United States Patent Application Publication US 2021/0199660 A1 - sequence listing, part 21

SEQ ID NO: 291046 - DNA, 120 bp, Artificial Sequence
  ENSG00000131115_4 (sequence is synthesized)
aagcagcaagcatcaaaataagatggaaacactccaaaaatttgcattaaaatacctttcaaatcaagagctgtcctgctggcaaatctggaaacaggttgcaagtgaattaaccaggtg

SEQ ID NO: 291047 - DNA, 120 bp, Artificial Sequence
  ENSG00000131115_5 (sequence is synthesized)
tcttcaggggaagagttcccagttattacaaggtgactctattcaggtttctgaaaatgagaacaatataatgaaccctaaaggagatagctctatttatattgaaaatcaagagtttcc

SEQ ID NO: 291048 - DNA, 120 bp, Artificial Sequence
  ENSG00000131115_6 (sequence is synthesized)
attttggagaacccagcattcttgcgggaatacatatctgagtgagtcacagattcagagtagaggtaagcaaattgatgtgaaaaataacctgcaaatacatgaagacttcatgaagaa

SEQ ID NO: 291049 - DNA, 120 bp, Artificial Sequence
  ENSG00000131115_7 (sequence is synthesized)
atcaccatttcatgagcatattaaaactgacacagaaccaaaaccctgcaaaggtaatgaatatggcaaaatcattagtgatggctccaatcagaaattacccttaggagagaaacccca

SEQ ID NO: 291050 - DNA, 120 bp, Artificial Sequence
  ENSG00000131115_8 (sequence is synthesized)
tccatgtggtgagtgtggaaggggcttcagttatagcccaaggcttccccttcatccgaatgttcatacaggagaaaaatgcttcagtcaaagctcacatctgcgaactcatcagagaat

SEQ ID NO: 291051 - DNA, 120 bp, Artificial Sequence
  ENSG00000131115_9 (sequence is synthesized)
tcacccaggagagaaactcaatagatgtcatgaatctggtgattgcttcaataagagctcttttcattcttatcaatctaatcatacaggagagaagtcttatagatgcgacagttgcgg

SEQ ID NO: 291052 - DNA, 120 bp, Artificial Sequence
  ENSG00000131115_10 (sequence is synthesized)
caagggattcagtagcagcacgggtcttatcattcattacagaactcatactggagagaaaccctataaatgcgaggaatgtggtaaatgctttagtcaaagttcaaattttcagtgcca

SEQ ID NO: 291053 - DNA, 120 bp, Artificial Sequence
  ENSG00000131115_11 (sequence is synthesized)
tcagagagtccacactgaagaaaaaccatacaaatgcgaagagtgtggtaagggcttcggttggagtgttaatctccgtgttcaccagagggtccacaggggtgagaagccctataaatg

SEQ ID NO: 291054 - DNA, 120 bp, Artificial Sequence
  ENSG00000131115_12 (sequence is synthesized)
cagagagtccacactggagagaaaccctacaagtgtgatgtgtgtggtaagggcttcagccacaattcaccattaatatgccatcggagagtccacacaggagagaagccatacaagtgt

SEQ ID NO: 291055 - DNA, 120 bp, Artificial Sequence
  ENSG00000131115_13 (sequence is synthesized)
gaggcgtgtgggaaaggctttacccgtaatacagatctgcatattcatttcagagttcacacgggagagaaaccctataaatgtaaggagtgtggtaagggcttcagtcaggcttcaaat

SEQ ID NO: 291056 - DNA, 120 bp, Artificial Sequence
  ENSG00000131115_14 (sequence is synthesized)
cttcaagtccatcagaatgtccacactggggagaaacgattcaagtgtgaaacgtgtgggaagggcttcagtcagtcctcaaagcttcaaacccatcagcgagtccacactggagagaaa

SEQ ID NO: 291057 - DNA, 120 bp, Artificial Sequence
  ENSG00000131115_15 (sequence is synthesized)
ccatatagatgtgatgtgtgtggtaaggacttcagttatagttcaaatcttaaactacaccaagtaattcacactggagaaaaaccatataaatgtgaggaatgtgggaagggcttcagt

SEQ ID NO: 291058 - DNA, 120 bp, Artificial Sequence
  ENSG00000131115_16 (sequence is synthesized)
tggagatcaaatcttcatgcacatcaaagagttcactcaggagaaaaaccctataaatgtgagcagtgtgataagagcttcagtcaggccatagattttcgggtacatcagagagtccat

SEQ ID NO: 291059 - DNA, 120 bp, Artificial Sequence
  ENSG00000131115_17 (sequence is synthesized)
actggagagaagccatacaaatgtggtgtctgtggtaagggcttcagtcagtcctctggtcttcaatcccatcagagagtccacacgggggaaaagccatacaaatgtgatgtgtgtgga

SEQ ID NO: 291060 - DNA, 120 bp, Artificial Sequence
  ENSG00000131115_18 (sequence is synthesized)
aagggctttagatacagttcgcagtttatataccatcagagaggccacactggagaaaaaccttacaaatgtgaagagtgtgggaaaggctttggtaggagcttgaatcttcgccatcat

SEQ ID NO: 291061 - DNA, 120 bp, Artificial Sequence
  ENSG00000131115_19 (sequence is synthesized)
cagagggtccacacgggagagaaaccccatatatgtgaggagtgtggtaaggccttcagtctcccctcaaatcttcgagtccacctgggtgttcacaccagggaaaaactctttaaatgt

SEQ ID NO: 291062 - DNA, 120 bp, Artificial Sequence
  ENSG00000131115_20 (sequence is synthesized)
gaagagtgtggtaaaggcttcagtcagagtgcacgtcttgaagcccatcagagagtccacactggagaaaaaccatacaaatgtgacatatgtgataaggacttccgtcaccgttcacgt

SEQ ID NO: 291063 - DNA, 120 bp, Artificial Sequence
  ENSG00000131115_21 (sequence is synthesized)
cttacatatcatcagaaagtccatactggtaaaaagctttagaaatgagaaatgtgttaccaacttttgtctgaatgcacatcttcaagtttttggctagtccatgctggtggtaaaccc

SEQ ID NO: 291064 - DNA, 120 bp, Artificial Sequence
  ENSG00000131115_22 (sequence is synthesized)
tgtaaaactactgagagtggaagggggtttgttcacacttggaatctttctaacaaatccatcaagatgataacacagaaccatgaacaggaatagaactcgtatttaggggagaaatag

SEQ ID NO: 291065 - DNA, 120 bp, Artificial Sequence
  ENSG00000131115_23 (sequence is synthesized)
ggctggtggctctcttggtaagatctagttaatataaatgatcacctttcattgtgaatatatgcctgaagataatgtgtggaaggatatttgccatatgctaactggttttttggccag

SEQ ID NO: 291066 - DNA, 120 bp, Artificial Sequence
  ENSG00000131115_24 (sequence is synthesized)
ggagagttttgggttattatcccttttctttaattttcattttatacttacagtgatcattattttcataaaagctgtaaagctatgaaaaatgaataaaattactaaaaattttctgta

SEQ ID NO: 291067 - DNA, 120 bp, Artificial Sequence
  ENSG00000131115_25 (sequence is synthesized)
cttttcagcctgtgcttgggaataggcgctccccagccatcagtcttgggatggagaggtcgcggccgcggcggaggccgagaggccgagggcgggaagtttgctctcctcccgcacttg

SEQ ID NO: 291068 - DNA, 120 bp, Artificial Sequence
  ENSG00000131115_26 (sequence is synthesized)
taccaataacatcttaccactttgattttaaggcattcgtctgtggaccatagctattgatgaagtaggtcttgttattttgttatgaggaaattaggcagagtttatgttattaaatac

SEQ ID NO: 291069 - DNA, 120 bp, Artificial Sequence
  ENSG00000131115_27 (sequence is synthesized)
tttcccgaagttattcaactgatagtaagaggtggatttgggattgaacccaagcattccttttcagactgtgtgatcttttttgtttgtttttgtttctttggtttttgttgttgttta

SEQ ID NO: 291070 - DNA, 120 bp, Artificial Sequence
  ENSG00000131115_28 (sequence is synthesized)
ttttctattcctttttctgagtctgtggtcttaatctcaatgatacagtcgtcttcagttatcttaaatagtaatccatatggctaccggtgagtcgttggaaatcagccttgggaatgt

SEQ ID NO: 291071 - DNA, 120 bp, Artificial Sequence
  ENSG00000131115_29 (sequence is synthesized)
taagggtttggaccttttaaaatggttctttgctcttgaagacaaaaggttttctaatccctgggaaaacaggataggtttttctggtctttctgctcaggcaaaattctgtccttttaa

SEQ ID NO: 291072 - DNA, 120 bp, Artificial Sequence
  ENSG00000131115_30 (sequence is synthesized)
attgctggttctcaaccatgggtgatttcgcccccagaagatatttggcaatgtctggaaatggttgtcacacctgacagaggggtgctattggcattttgtgggtagtatccaggaatt

SEQ ID NO: 291073 - DNA, 120 bp, Artificial Sequence
  ENSG00000131115_31 (sequence is synthesized)
ctgcaaaatctcctacagtgcacaggacagtgcccccaacagagaattggccagtccaaaatagtagtgctgcagttgcaaaaccctgttttaaatgaaccgtaaatggacacattagct

SEQ ID NO: 291074 - DNA, 120 bp, Artificial Sequence
  ENSG00000131115_32 (sequence is synthesized)
tctatgctttatctttcaaatacgttgtctttcaaatgaaacccatcaatgcattaacttagtgcactgtactggcttttttttcaatgaaataaaacagataaggatagaaaatatcag

SEQ ID NO: 291075 - DNA, 120 bp, Artificial Sequence
  ENSG00000131115_33 (sequence is synthesized)
agttgctgggaagttttttcgctctaggagggcgaaaacaagtgtttggatccgctgggaccctccaagttttctcagcctcgtcagggagcaagcggggccctggccctcgtctggagg

SEQ ID NO: 291076 - DNA, 120 bp, Artificial Sequence
  ENSG00000131115_34 (sequence is synthesized)
aaggctagagaagctgtggccagctgggaggctggagttgggagcagtttgtgttctttcctctcggctgagcctcacgtttggagcagttcttgcgtccccgggttgggagcgtcctgg

SEQ ID NO: 291077 - DNA, 120 bp, Artificial Sequence
  ENSG00000131115_35 (sequence is synthesized)
ttgtcgcttggttagagggtctcctggcgttccgcagccagcctctcccacctacttgccagctctgccacttactagtgttataacgttttgattgagtcatcgggctccaatgcgtgg

SEQ ID NO: 291078 - DNA, 120 bp, Artificial Sequence
  ENSG00000131115_36 (sequence is synthesized)
aaagatatgcgttgttcgagtttattgagcatgtatggtgtgctaggcacttctaagtgcttgacatatattcattcatctgatcctttcaaacactttatgatctatttattttaattc

SEQ ID NO: 291079 - DNA, 120 bp, Artificial Sequence
  ENSG00000131115_37 (sequence is synthesized)
tctcttggaatctataacaacttttttgtggtgctcttttccttcttgatgccacccttcttctagtgaaggttggttgtaagattgaggttacatgtgtttgatattgtaggaggctgt

SEQ ID NO: 291080 - DNA, 120 bp, Artificial Sequence
  ENSG00000131116_0 (sequence is synthesized)
acttgcgacgcaggcgcagaggctgggcgtgcagccgccgccgcagagccggagcgggggccgccggcgccgcatccctctctacctgccaacatcctgtattagagaacttgtggccgg

SEQ ID NO: 291081 - DNA, 120 bp, Artificial Sequence
  ENSG00000131116_1 (sequence is synthesized)
aggtgtggctgtggagagctggccggggagggacgctgctcagctgctgctctgctcctgtctcctgtcccctcccccggtcatgacagagacccgtgagccagctgagactgggggcta

SEQ ID NO: 291082 - DNA, 120 bp, Artificial Sequence
  ENSG00000131116_2 (sequence is synthesized)
cgccagcttggaagaagatgatgaagacctttccccaggccccgagcattcctctgattcagaatacactctctcagagccggactccgaagaggaagaagatgaggaggaggaggaaga

SEQ ID NO: 291083 - DNA, 120 bp, Artificial Sequence
  ENSG00000131116_3 (sequence is synthesized)
ggagaccactgacgatcctgaatatgatcctggctacaaggtgaagcagcgccttggcgggggccgtggtggcccatcccgccgggccccccgtgcagcccagcccccggcccagccttg

SEQ ID NO: 291084 - DNA, 120 bp, Artificial Sequence
  ENSG00000131116_4 (sequence is synthesized)
caggaagcaccagcccctgaaggcagggccctcggggaggaagaggaggaaccacctcgggctggggagggccgaccagctgggcgggaggaggaggaggaagaggaggaggagggaacc

SEQ ID NO: 291085 - DNA, 120 bp, Artificial Sequence
  ENSG00000131116_5 (sequence is synthesized)
taccactgtacggaatgtgaggattccttcgacaacctgggggagctgcacgggcacttcatgctgcatgcccggggtgaggtgtaggcagagcccccatacggggagcttggcagaagg

SEQ ID NO: 291086 - DNA, 120 bp, Artificial Sequence
  ENSG00000131116_6 (sequence is synthesized)
ggtggggtgggaggagggggctgaggaaattggggttgtgacagtggtcatgggggatggggtactgccggtctgtgttgtcttagaagtagatgtgtgatggccagaataaaagccaaa

SEQ ID NO: 291087 - DNA, 120 bp, Artificial Sequence
  ENSG00000131116_7 (sequence is synthesized)
agaagtagatgtgtgatggccagaataaaagccaaaatctgtatctgtgtgtgttggttcagagtgtgtgtgtgtgtgtgtgtattcccgcccgtgtgtgtgtttgtgtgtgtgtgtgtg

SEQ ID NO: 291088 - DNA, 120 bp, Artificial Sequence
  ENSG00000131116_8 (sequence is synthesized)
ttggggtcttttgggaaagataacatttactgcgtgcttgtattcgatgaggtttccatgtatttacttacagaccccataatgtaaaggctctaataatagaattttgtttctcactca

SEQ ID NO: 291089 - DNA, 120 bp, Artificial Sequence
  ENSG00000131116_9 (sequence is synthesized)
gggctacgccagcttggaagaagatgatgaagacctttccccaggctggaagggagtggcgcaatcatggctcaaatgcagcctggaactcctcggctcaagtgatcctcccgcctcagc

SEQ ID NO: 291090 - DNA, 120 bp, Artificial Sequence
  ENSG00000131116_10 (sequence is synthesized)
ggtttggcccccactgggaaatgttgatggggagtggctgcttgtcttgctaggggttctattctgactgagactgcttgtcctagtaggggatctcttccagtcgggacttctggggac

SEQ ID NO: 291091 - DNA, 120 bp, Artificial Sequence
  ENSG00000131116_11 (sequence is synthesized)
tgtagattgactggggtcgctctccttgctagaggttctagattggctatgatttccttctttgctgggggttctagatcggctatgagctttctccttgctggaggctctaggtcgact

SEQ ID NO: 291092 - DNA, 63 bp, Artificial Sequence
  ENSG00000131126_0 (sequence is synthesized)
aaccatccatcccatcagggaaatatgcaacatgcttcaaagaataagaagagaactttgggc

SEQ ID NO: 291093 - DNA, 120 bp, Artificial Sequence
  ENSG00000131126_1 (sequence is synthesized)
cctcccaaagtgctgggattacagggcactgaatgtcaaagtgaaggaattcaatgaagcccggatcaagggcaggagcaaccgtgaccctcttaaaagagccaatgccccatgtaatta

SEQ ID NO: 291094 - DNA, 120 bp, Artificial Sequence
  ENSG00000131126_2 (sequence is synthesized)
atgccccatgtaattagtgacgcgcgcgaatggatagacgctattcccaccgtccctacatagcatccagcgacaccacagccaagggacaggcttggcggaacctgcgggagagaagaa

SEQ ID NO: 291095 - DNA, 120 bp, Artificial Sequence
  ENSG00000131126_3 (sequence is synthesized)
ccctctgagcctgattgaaaggcggtgaagagacaggagagggggatcggtgggcggtcccgcctccatcttcagttcccgcatgggggcgaggcagatccagaccagctcctcccagac

SEQ ID NO: 291096 - DNA, 120 bp, Artificial Sequence
  ENSG00000131126_4 (sequence is synthesized)
ctctccagaagaagccatgggaacccctcgtatccagcatttgctgatcctcctggtcctaggagcctccctcctgacctcgggcctagagctgtattgtcaaaagggtctgtccatgac

SEQ ID NO: 291097 - DNA, 120 bp, Artificial Sequence
  ENSG00000131126_5 (sequence is synthesized)
tgtggaagcagatccagccaatatgtttaactggaccacagaggaagtggagacttgtgacaaaggggcactttgccaggaaaccatactaataattaaagcagggactgagacagccat

SEQ ID NO: 291098 - DNA, 120 bp, Artificial Sequence
  ENSG00000131126_6 (sequence is synthesized)
cacgaagggctgcatcccggaaggggaggaggccataacaattgtccagcactcttcacctcccggcctgatcgtgacctcctacagtaactactgtgaggattccttctgtaatgacaa

SEQ ID NO: 291099 - DNA, 120 bp, Artificial Sequence
  ENSG00000131126_7 (sequence is synthesized)
agacagcctgtctcagttttgggagttcagtgagaccacagcttccactgtgtcaacaaccctccattgtccaacctgtgtggctttggggacctgtttcagtgctccttctcttccctg

SEQ ID NO: 291100 - DNA, 120 bp, Artificial Sequence
  ENSG00000131126_8 (sequence is synthesized)
tcccaatggtacaactcgatgctatcaaggaaaacttgagatcactggaggtggcattgagtcgtctgtggaggtcaaaggctgtacagccatgattggctgcaggctgatgtctggaat

SEQ ID NO: 291101 - DNA, 120 bp, Artificial Sequence
  ENSG00000131126_9 (sequence is synthesized)
cttagcagtaggacccatgtttgtgagggaagcgtgcccacatcagctgctcactcaacctcgaaagactgaaaatggggccacctgtcttcccattcctgtttgggggttacagctact

SEQ ID NO: 291102 - DNA, 120 bp, Artificial Sequence
  ENSG00000131126_10 (sequence is synthesized)
gctgccattgctgctgccatcatttattcacttttcctaagaaggcacttctgggcctgggtctgaggacatcttttttgactgggagccttcttactgttgaggttcaacaagctgagg

SEQ ID NO: 291103 - DNA, 120 bp, Artificial Sequence
  ENSG00000131126_11 (sequence is synthesized)
agtagatgggaatttgagggagaatacagagatactatgaacgtatttgacatttttaatacaatttctgctataatttttgtatgcagtaggcgttactaataaacatttctgctgtga

SEQ ID NO: 291104 - DNA, 120 bp, Artificial Sequence
  ENSG00000131126_12 (sequence is synthesized)
gaaggcgttccgggcctcaactttggcgtcgtgagattcttgtgaggcgtctgcctggaagccggcagcaattttgcttctttaaagagaaaaagaaggctagggactcagattcctgga

SEQ ID NO: 291105 - DNA, 120 bp, Artificial Sequence
  ENSG00000131127_0 (sequence is synthesized)
gtctttgcgtctggctactaccagaccgcgggttaggggcttcatctctctgcgttctcagttgtgggaggccttggtgattcggccacagctcagcctccgtcgctctgtgacctgcgg

SEQ ID NO: 291106 - DNA, 120 bp, Artificial Sequence
  ENSG00000131127_1 (sequence is synthesized)
gtattggatgattggtagctaagactcccgaatacttcagaagtggggaaatggaactcttaacattcagggatgtggccatagaattctctccagaagagtggaaatgcctggaccctg

SEQ ID NO: 291107 - DNA, 120 bp, Artificial Sequence
  ENSG00000131127_2 (sequence is synthesized)
accagcagaatttgtatagagatgtgatgttggagaactacaggaacctggtctccctgggtgttgctatctctaacccagacctggtcacctgtctggagcaaagaaaagagccctaca

SEQ ID NO: 291108 - DNA, 120 bp, Artificial Sequence
  ENSG00000131127_3 (sequence is synthesized)
atgtgaagatacataagatcgtagccagacccccagctatgtgttctcatttcacccaagaccattggccagtgcagggcatagaagattcattccacaaacttatactgagaagatatg

SEQ ID NO: 291109 - DNA, 120 bp, Artificial Sequence
  ENSG00000131127_4 (sequence is synthesized)
agaaatgtggacatgataatttacaattaagaaaaggctgtaaaagtttgaatgagtgtaagttgcagaaaggaggttataatgaatttaatgaatgcttgtcaactacccagagcaaaa

SEQ ID NO: 291110 - DNA, 120 bp, Artificial Sequence
  ENSG00000131127_5 (sequence is synthesized)
tacttcagtgtaaagcaagtgtcaaagttgttagtaaattttcaaattcaaacaaacgtaagacaagacatactggagagaaacactttaaagaatgtggcaaatcatttcagaagtttt

SEQ ID NO: 291111 - DNA, 120 bp, Artificial Sequence
  ENSG00000131127_6 (sequence is synthesized)
cacacctaactcaacataaggtaattcatgctggagagaaaccctacacttgtgaagaatgtggcaaagcctttaaatggtctttaatatttaatgaacataagagaattcatactggag

SEQ ID NO: 291112 - DNA, 120 bp, Artificial Sequence
  ENSG00000131127_7 (sequence is synthesized)
agaaaccttttacttgtgaagaatgtggcagcatctttaccacatcctcacactttgctaagcataaaataattcatactggagaaaaaccctataaatgtgaagaatgtggcaaagcct

SEQ ID NO: 291113 - DNA, 120 bp, Artificial Sequence
  ENSG00000131127_8 (sequence is synthesized)
ttaataggttcacaacccttactaaacataagagaattcatgctggagagaaacccatcacatgtgaagaatgtaggaaaatctttacctcatcctcaaactttgccaaacataagcgaa

SEQ ID NO: 291114 - DNA, 63 bp, Artificial Sequence
  ENSG00000131127_9 (sequence is synthesized)
caaactttgccaaacataagaggtccacaacccttactaaacataagagaattcatactggag

SEQ ID NO: 291115 - DNA, 120 bp, Artificial Sequence
  ENSG00000131127_10 (sequence is synthesized)
gtggcaaagcttttagacagtcctcaaaactgaatgaacataagaaagttcatactggagagcggccctacaaatgtgatgaatgtggcaaagcctttggacggtccagggtcctgaatg

SEQ ID NO: 291116 - DNA, 120 bp, Artificial Sequence
  ENSG00000131127_11 (sequence is synthesized)
aatgtgaagaatgtggcaaagcctttagacggtccacagatcggagtcaacataagaaaattcatagtgcagataaaccctacaaatgtaaagaatgtgacaaagcctttaaacaatttt

SEQ ID NO: 291117 - DNA, 120 bp, Artificial Sequence
  ENSG00000131127_12 (sequence is synthesized)
aatgtaaagaatgtgacaaagcctttaaacaattttcgctcctgagtcaacataagaaaattcatactgtagataaaccctacaaatgtaaagattgtgacaaagcctttaaacggttct

SEQ ID NO: 291118 - DNA, 120 bp, Artificial Sequence
  ENSG00000131127_13 (sequence is synthesized)
cacacctgaataaacataagaaaattcatacttgagagaaatcctacaaatgtaaagaatgtggcaaacctttggatgatccacaaaccttaatgaacatgagaaaatttatactgtaga

SEQ ID NO: 291119 - DNA, 120 bp, Artificial Sequence
  ENSG00000131127_14 (sequence is synthesized)
gaaaccctggaaatgtgaagaacgtggcaaagttctttacctcattctcaaaccttgataaacataagagaattcataccggagagaaactgtacaaatgtgaagaatatggcaaagcct

SEQ ID NO: 291120 - DNA, 120 bp, Artificial Sequence
  ENSG00000131127_15 (sequence is synthesized)
gtgaatggtccacaaacctgaatgagcagaagaaaattattactggagataaaccctgcaaatgtaaagagtgtaacaaaacctttaaacagccctcaccggtgaataaacataagaaaa

SEQ ID NO: 291121 - DNA, 120 bp, Artificial Sequence
  ENSG00000131127_16 (sequence is synthesized)
atcatgctggagggaagccctacacatgtggcagaatgtggcaaagcatttaattggtcctcaatgcttaataaatataattcatgctggagagaaacttcacatgtgaaccgtgtggca

SEQ ID NO: 291122 - DNA, 120 bp, Artificial Sequence
  ENSG00000131127_17 (sequence is synthesized)
aagcctttaaatggtcctcaacccttaatgaacgtaagtgaattcatgctggagcaaaatgcttcacatgcgaagaatgtggcacagtctttaccacatcctcaaactttgttaaacata

SEQ ID NO: 291123 - DNA, 120 bp, Artificial Sequence
  ENSG00000131127_18 (sequence is synthesized)
agagaatttataccagagagaaaccctacacatgtaaagaatgtggcaaagccttcaataggttctcaacccttactgtgcacaagataattcattctggggaaaaaaatgctacaaatg

SEQ ID NO: 291124 - DNA, 120 bp, Artificial Sequence
  ENSG00000131127_19 (sequence is synthesized)
tgaaaaacgtggcagagccttcagaccatccacaaacctttatgaaaattcatatttgagagtagaagattcattccacaaacttacattgagaagatatgaaagatgaatataagaatt

SEQ ID NO: 291125 - DNA, 120 bp, Artificial Sequence
  ENSG00000131127_20 (sequence is synthesized)
catcctagatataaaaccatagaaatgtaaaagatgtgacaaaacctttaagccatactccaggcttcttaaacataatgagaactcatactggaggaaagtcttacaaatgtgaagaat

SEQ ID NO: 291126 - DNA, 120 bp, Artificial Sequence
  ENSG00000131127_21 (sequence is synthesized)
gtggcagtctttaaatcttcctcagtcttttctaatcataagataattcacactgaagagaaactgcaaacgtggaaagtgtgacaaagcttgcaaccacactcaatctattctaaatat

SEQ ID NO: 291127 - DNA, 120 bp, Artificial Sequence
  ENSG00000131127_22 (sequence is synthesized)
aagagaaatgatattggtgagaagccacaaaaatatgaaaaatgtggcaaagccttcaaatgcttgtcacatcttactgtatatatataattcctactgaagaaatcccctggaaatgca

SEQ ID NO: 291128 - DNA, 120 bp, Artificial Sequence
  ENSG00000131127_23 (sequence is synthesized)
aaaaatgtggcaggatttttaccaatgctcatctttttgcacatgatatcctttatattcgagaaaagttatagaaatataaaaaatatagaaaagtcatatctcctcacattttactaa

SEQ ID NO: 291129 - DNA, 120 bp, Artificial Sequence
  ENSG00000131127_24 (sequence is synthesized)
ctagcaatgttcatacttaataaaaacattataaatgtaatttctgttgaaagacttcagaaaatataggcctttaaagtgaagaagagtattcttaagacaaacaatacaaatataaag

SEQ ID NO: 291130 - DNA, 120 bp, Artificial Sequence
  ENSG00000131127_25 (sequence is synthesized)
agggttgtagtacctgtacttctctcatggattttgttgtacacattttataataggggaaaacactgaaggagactttcttcaacatcagaaaatttatattggagagaaatcctacaa

SEQ ID NO: 291131 - DNA, 120 bp, Artificial Sequence
  ENSG00000131127_26 (sequence is synthesized)
atgtaataaatgtggaaaaacatttgttcaaaaactgcagcttaaacagtttacactagaaaatattttgtagatgcagtaaatgtgaagaaatatttagtctaaaaagaagagtatgta

SEQ ID NO: 291132 - DNA, 120 bp, Artificial Sequence
  ENSG00000131127_27 (sequence is synthesized)
aacatcagaggatttacagtagaaagaactaaggaactaacactttagacactgcagtaaatcagagtattaagtattaaaaaaatccaaagttgaacctattagagaatttctttgtat

SEQ ID NO: 291133 - DNA, 120 bp, Artificial Sequence
  ENSG00000131127_28 (sequence is synthesized)
atttttgaagagatactacatttaaagtatattttttcacttgaaaaaagtatagattttttgaaaagcatataatagttaattcaactcaaattatttcatactgtttcaacattcctg

SEQ ID NO: 291134 - DNA, 120 bp, Artificial Sequence
  ENSG00000131127_29 (sequence is synthesized)
tgtttcaacattcctgtttatgtgaaagcatgtgatgaattgttgctgcatcagagataagagagattctttttcattaggtgggcattatttgtgaatttttacaagaaagagtgagga

SEQ ID NO: 291135 - DNA, 120 bp, Artificial Sequence
  ENSG00000131127_30 (sequence is synthesized)
cagaaatgaaagatccatgatgaaaatctagcagagaggcttttttgtagttgacaatattgagtgatgcatgaggtaggtgttcagagtaatattcttctgcattatagtgagagaaaa

SEQ ID NO: 291136 - DNA, 120 bp, Artificial Sequence
  ENSG00000131127_31 (sequence is synthesized)
tacatttatgtaataagatacagtaaattttaaaattattttaagattatgtgggaacataattttttaactaaacaaaatttttaacgtgttgaaataattgttgcttgaatgaagtgt

SEQ ID NO: 291137 - DNA, 120 bp, Artificial Sequence
  ENSG00000131127_32 (sequence is synthesized)
gtgttgaaataattgttgcttgaatgaagtgtcattatgccaccaacttaaacctatcccaccttactcaatggtgtaggtaaaagatggtaacaatggtaacatagttgaatgacattt

SEQ ID NO: 291138 - DNA, 120 bp, Artificial Sequence
  ENSG00000131127_33 (sequence is synthesized)
ttagtattctctttttccagtggctttaaatagcaaatacattgaagaatatcattcccatatgttgtattttcactcttgttattttccgaaatttttgtgggtacatagtatgcatat

SEQ ID NO: 291139 - DNA, 120 bp, Artificial Sequence
  ENSG00000131127_34 (sequence is synthesized)
ttatctatggcatatatgggttattttcttatacaggcatacaacatgtaatataccagagtaaatgagttattcatcacctcaagcattcatcctttgtattacacacaatccaattat

SEQ ID NO: 291140 - DNA, 120 bp, Artificial Sequence
  ENSG00000131127_35 (sequence is synthesized)
attatttctaaatgtacaattatgattgtagtattatatcagtataattataattcatacatttatgcatcctgaatacttctaaaaaatgttttacatttctctttgaacatgtggcat

SEQ ID NO: 291141 - DNA, 120 bp, Artificial Sequence
  ENSG00000131127_36 (sequence is synthesized)
tgtggcatcttttcctgcaaacttatacaaactttagttccatttacatgaagttaagtatgtaaatgtgttgctgtaaagataaaccttaggtgtaagaaaattatagagcaagcaatt

SEQ ID NO: 291142 - DNA, 120 bp, Artificial Sequence
  ENSG00000131127_37 (sequence is synthesized)
gtgtttatgtgagtttgtacctattttccaaagaaaatagcaatattagaacaaagaagattatgttaataccatggataatttactggaaatctagaagcctgaaacattctatatttt

SEQ ID NO: 291143 - DNA, 120 bp, Artificial Sequence
  ENSG00000131127_38 (sequence is synthesized)
cttctttttatttaatgactctagaatctaatggattgtcgttgagaatctccccatacaaactccttgtttttatttgtctggtgctcatgctagagctataatttctttgattctctt

SEQ ID NO: 291144 - DNA, 120 bp, Artificial Sequence
  ENSG00000131127_39 (sequence is synthesized)
tcttttttgttttcacttcatgaagtgtttattatgtgagctggtcagaaattataagaatgatttttataaaatgtagtgaatgtaaaatttttagatgtaatttcataatatatgtat

SEQ ID NO: 291145 - DNA, 120 bp, Artificial Sequence
  ENSG00000131127_40 (sequence is synthesized)
ttattttagttagaacatttcattttgttgttttaatttaagaaccctatataagctgttttctttagttattgttcctttcagtttttgtaattgacataaatgagtttattttgccaa

SEQ ID NO: 291146 - DNA, 120 bp, Artificial Sequence
  ENSG00000131127_41 (sequence is synthesized)
tttgttcaggtaagtacttggaaaactttgtcagtcatggggatgttttgatctattattgtagtgaacaaacaaagttctgggtgtgtaatagatgcttcataattagccataaatatt

SEQ ID NO: 291147 - DNA, 120 bp, Artificial Sequence
  ENSG00000131127_42 (sequence is synthesized)
cctggagttagtttgtagctccaagtaagagattgaaaataatctgtggcgaacaaatggcattaattgtgcatgtggagaggacgtctgttctcaggctgcagaaccaactcattatga

SEQ ID NO: 291148 - DNA, 120 bp, Artificial Sequence
  ENSG00000131127_43 (sequence is synthesized)
atgtaaagaggatttcttttcttattttctaattatcttcagttttgtgatatctttatgatttatccccagctatgtatgcctcagagcctttcttcatttttgcgttatggctagttt

SEQ ID NO: 291149 - DNA, 120 bp, Artificial Sequence
  ENSG00000131127_44 (sequence is synthesized)
gtcactgttctcttcattccacgtaatttcacgtggactttaggttaactggggtgtttgaggttatttataggttatcagtgcaacatttagatcacttgagataagagtaattcacta

SEQ ID NO: 291150 - DNA, 120 bp, Artificial Sequence
  ENSG00000131127_45 (sequence is synthesized)
tcaacaggtaagaggattaagtcagttggcattgtttttctgtgtttgtaaaagaaaaattgtatgagattctatcataaagtgtgtaaaatgtaacaaaagttagaataagtaaaacat

SEQ ID NO: 291151 - DNA, 120 bp, Artificial Sequence
  ENSG00000131127_46 (sequence is synthesized)
taatataagtgggttgtatattgtaccaccatatgaagaaacatcagaattttgaaatttcttaagaggaaatatatcttagaaataaaatttttaggccaggtggcggtggttcacacc

SEQ ID NO: 291152 - DNA, 68 bp, Artificial Sequence
  ENSG00000131127_47 (sequence is synthesized)
aatttttaggccaggtgtcatgaagtcaagagagcaagatcatcctggcaaacatggtgaaaccccat

SEQ ID NO: 291153 - DNA, 75 bp, Artificial Sequence
  ENSG00000131127_48 (sequence is synthesized)
tgatgttgtgccactgcagtgcagcctgccaacagagtaagacccgtctcaacaacaacaacaaaaaagaagaaa

SEQ ID NO: 291154 - DNA, 120 bp, Artificial Sequence
  ENSG00000131127_49 (sequence is synthesized)
agtaagacccgtctcaacaacaacaacaaaaaagaagaaaatttttaggagacaatggtaagtgaggaattttacatttaattttctgtgacatagcaaaacatttttccatacaaaatc

SEQ ID NO: 291155 - DNA, 120 bp, Artificial Sequence
  ENSG00000131127_50 (sequence is synthesized)
ggcatgagccaccgtgcctggccagaatattatatctttgagtgtgaatgttaaatggtggaaaaacaatagaatgatctctgtagattcaaaatctgcactgatcttttttgtccagat

SEQ ID NO: 291156 - DNA, 120 bp, Artificial Sequence
  ENSG00000131127_51 (sequence is synthesized)
agattcaaaatctgcactgatcttttttgtccagattcatattacaatcttgaggaatttctcataattctttgttttagtggatgcatttcatgggctacagttttcatttttactcac

SEQ ID NO: 291157 - DNA, 120 bp, Artificial Sequence
  ENSG00000131127_52 (sequence is synthesized)
atttttactcacctaactttatccaagtccttggtcaccttctctggaaaaaaatttgaagattatggcagctgttgaatccaaacagtttctcagtgattttttttttttttttttttt

SEQ ID NO: 291158 - DNA, 120 bp, Artificial Sequence
  ENSG00000131127_53 (sequence is synthesized)
ctgggattaccggtgtgagccactgtgcccagcctctcagtgatttttgatgcaaattcatttactgtgttcacgaagtggccaattttgggacctttagcatcacttgcccttttagtg

SEQ ID NO: 291159 - DNA, 120 bp, Artificial Sequence
  ENSG00000131127_54 (sequence is synthesized)
tcttacatatgtatgattaccatcagcactagaaattccaggtacttcaagcttaaaagtaagagctctagagtgtattgtcttgtattatatattgttctgggtctaagccatgctagt

SEQ ID NO: 291160 - DNA, 71 bp, Artificial Sequence
  ENSG00000131127_55 (sequence is synthesized)
tcttgtattatatattgttctgggtctaagccatgctagtaaatattagagttcctatgattattttcttc

SEQ ID NO: 291161 - DNA, 79 bp, Artificial Sequence
  ENSG00000131127_56 (sequence is synthesized)
caggcgattctcctgcctcagcctccttattagctggcgttagtagagatgcggtttgactatgttggccaggctggtc

SEQ ID NO: 291162 - DNA, 65 bp, Artificial Sequence
  ENSG00000131127_57 (sequence is synthesized)
ctgaccctgtgatcctgcctatggttattatattacaaaaacagcacaaaaactatatatttttt

SEQ ID NO: 291163 - DNA, 120 bp, Artificial Sequence
  ENSG00000131127_58 (sequence is synthesized)
tattttttataatactcaagttgtttgacaaagatactcatcatttgcaacattattctgtaatttttaaaatatatttgttaattgacagataaaatatcctgtagaatatggtgtttt

SEQ ID NO: 291164 - DNA, 120 bp, Artificial Sequence
  ENSG00000131127_59 (sequence is synthesized)
ttttgtagtatatatacattgtcaaaagcttaattctagctgcttaacaaatacttcaccacacataattacttttgggataagagctcataacattgactgtgttagcattttccaaaa

SEQ ID NO: 291165 - DNA, 120 bp, Artificial Sequence
  ENSG00000131127_60 (sequence is synthesized)
atacattattgttaactgtagtcaccatgctgtacaatagatttcttgaatttattcctcctaggcaactatgtgttgttttacagacatgtctccagatgcccctttcttgtaaatacc

SEQ ID NO: 291166 - DNA, 120 bp, Artificial Sequence
  ENSG00000131127_61 (sequence is synthesized)
caagcatctggtaaccagcattctactctctggcttatttcacttagcatagtgtcttccacatttatccacattgtttcaaatgaaaagatttcctcccttttaacgttgaattgtatt

SEQ ID NO: 291167 - DNA, 120 bp, Artificial Sequence
  ENSG00000131127_62 (sequence is synthesized)
tccttgtgtataccacgtttttggaaaaatacattcatttcttggttgaaaaactcacgtgatgagaagatatttctgtattaaagcatgtattggaattccgtatatacatgttttagt

SEQ ID NO: 291168 - DNA, 120 bp, Artificial Sequence
  ENSG00000131127_63 (sequence is synthesized)
tgtattggaattccgtatatacatgttttagtaatagttgatttctaccaaatgctaaccataatactgtatatgtgttaataaattttattttcggccaggcgtggtggctcacacctg

SEQ ID NO: 291169 - DNA, 120 bp, Artificial Sequence
  ENSG00000131127_64 (sequence is synthesized)
aaattaattttcacagaaaattaatagcataggtattattatcctcattttacagagaaagaaacagccatagagaaaaatgacttgctcacaacacaggcaactttgactctagagata

SEQ ID NO: 291170 - DNA, 120 bp, Artificial Sequence
  ENSG00000131127_65 (sequence is synthesized)
acacttattacagtaaaatccctcttcagacacaaaatacatgattatcttaaacacattcttaataaaaatttaacaaaaattgttaaatgttgtcatatatgtgtgtgcaaaacgtat

SEQ ID NO: 291171 - DNA, 120 bp, Artificial Sequence
  ENSG00000131127_66 (sequence is synthesized)
aaaatatacagaaaagagaaatacttcctgtatttaaaccatataaactctagaattgcccttcgatactgacgtacttgggaacagctttcctttcaactgtccttcaccaccccttta

SEQ ID NO: 291172 - DNA, 120 bp, Artificial Sequence
  ENSG00000131127_67 (sequence is synthesized)
gcaattcagaatatttatagcataatttttacctatacctgtagtcagtaaatgctgtaatgtaattaaatattatttactacaaactcacatagtacattatgactttattactgttat

SEQ ID NO: 291173 - DNA, 120 bp, Artificial Sequence
  ENSG00000131127_68 (sequence is synthesized)
aatacaaatttatttcttgagttaaatatttgactctattagtttagtttcctttgtgcctgtttctcagttttgcctaaatgctaccaattatcttacactggctccccaaataggttt

SEQ ID NO: 291174 - DNA, 120 bp, Artificial Sequence
  ENSG00000131127_69 (sequence is synthesized)
ttatttgtttataaaactttaaatttatctctaggaacctcagccgagcagtcagaactcacagctctgaccaaacccctagaactaagaaagaaccaaaaagttactatttaatacaga

SEQ ID NO: 291175 - DNA, 83 bp, Artificial Sequence
  ENSG00000131127_70 (sequence is synthesized)
caaatatgctttcttagtactccacatttatgcagccatctgggaagaaaggagactttttacaacagagaatacccctatta

SEQ ID NO: 291176 - DNA, 120 bp, Artificial Sequence
  ENSG00000131127_71 (sequence is synthesized)
gaagaaaggagactttttacaacagagaatacccctattaaatatgggtcacagatttttaccctagtccagcctatccacctaccacagaaagtagctgtagttcattgctggggccac

SEQ ID NO: 291177 - DNA, 120 bp, Artificial Sequence
  ENSG00000131127_72 (sequence is synthesized)
tcattgctggggccaccagaagggtcaagatgaaattgctcagagaaacaggagggctgaccaagcagctagggccaccaccatctctgggaactttttttttttttttttttgagacgg

SEQ ID NO: 291178 - DNA, 120 bp, Artificial Sequence
  ENSG00000131127_73 (sequence is synthesized)
agccaccgcgcccggccttagttgtgtgtgatttctatgtgtgctctaggcacttgccctatagctgctcctaaatgtggggtcttagaaaacatcttgtcccttcgaagcatactctgc

SEQ ID NO: 291179 - DNA, 120 bp, Artificial Sequence
  ENSG00000131127_74 (sequence is synthesized)
tggttggctaaattgcactgggaaaaaatagcagcagccctattgctatgtcacttgcctgcagagcaaaagttgattcaggaacagtaatttgactttgtctatattaaaaatcataaa

SEQ ID NO: 291180 - DNA, 120 bp, Artificial Sequence
  ENSG00000131127_75 (sequence is synthesized)
tagtcaacaaatgcaaaaaatgcaaagaatttgtaggtatgattagtgcattataggtgttttcaaatttctcctatgataaattaaaaatgtaatgttgggcattaatttcctaaaccc

SEQ ID NO: 291181 - DNA, 120 bp, Artificial Sequence
  ENSG00000131127_76 (sequence is synthesized)
agtgctcagcaattttctcaaattgtttacagtttttccaagagacttcagaaccattccctggagtgaattatttccaatggtgaagagtaatggatggatggcatgagattctcaaaa

SEQ ID NO: 291182 - DNA, 120 bp, Artificial Sequence
  ENSG00000131127_77 (sequence is synthesized)
aaatcttgctcctatttcagaagtgtcactccagccccttgaaggtccaggaaacctggctgagtagtgtggtctatggaggtgcatgggcttcagaatcaggccaacgttgatcctgag

SEQ ID NO: 291183 - DNA, 120 bp, Artificial Sequence
  ENSG00000131127_78 (sequence is synthesized)
tcccagccagctgcttagtagctgtgggatagttacacaagacacatctacaagaaaagtcatgataaaattgattgcaaaaacagcaatttgaaaaatttcttattgtattcatgtcct

SEQ ID NO: 291184 - DNA, 120 bp, Artificial Sequence
  ENSG00000131127_79 (sequence is synthesized)
tggaaatggcttttatagtcgttcctatcaagagacagattctgtttcccaaaccttgaacttctcttgacttatctgcactggcacagggtgccagtttggggcccaggtttaaaggtc

SEQ ID NO: 291185 - DNA, 120 bp, Artificial Sequence
  ENSG00000131127_80 (sequence is synthesized)
ctaaatgcttctgttatctttttcagaattcttccatctctatgacaacaagcccattttagctttctggagaatagcatctgagaaaagccaaagtgcctcagtttacagacagctcac

SEQ ID NO: 291186 - DNA, 120 bp, Artificial Sequence
  ENSG00000131127_81 (sequence is synthesized)
tcacagaagcagagccacctaattcaccagcatctaaccactcacacctgaaggagccaaactgagcccagaagaatggcccggctgagcccagcctaaatttctaaccagctcaatcct

SEQ ID NO: 291187 - DNA, 120 bp, Artificial Sequence
  ENSG00000131127_82 (sequence is synthesized)
gagctagtatgtttcgggattgttatgcagttataagttagtaatatatacacccattaaagacaggatctcaggacagattgatcacaaataacctgcaaatgcttgccaccctgtaag

SEQ ID NO: 291188 - DNA, 120 bp, Artificial Sequence
  ENSG00000131127_83 (sequence is synthesized)
tattgattttcttttttcctttatttaaagttagatttgttgtaagatgatattgagttacacagaagttaggcaggagaatagggtttggaggcagggaacttaaggccaattcgtgct

SEQ ID NO: 291189 - DNA, 120 bp, Artificial Sequence
  ENSG00000131127_84 (sequence is synthesized)
gacttcctacaagaaaaaacaccaaggtctgggagcagggaacctaaagccagttaacgtgaacttcctacatctaaaccaaaaggaaagacctcatctacacccgagtagcaaaggatc

SEQ ID NO: 291190 - DNA, 120 bp, Artificial Sequence
  ENSG00000131127_85 (sequence is synthesized)
gaaggcgactgtcgctacaaccctcccccttgtaccagttctctgatagaaaaggacagtgccttggagtggccgtgggccaagcacaggccatgccttcatctgcatagggtaccaatt

SEQ ID NO: 291191 - DNA, 120 bp, Artificial Sequence
  ENSG00000131127_86 (sequence is synthesized)
cgcctcaacctttgattagccaaggaccaaatccttcattcagataaggggtagctgataggaacctcaaaaggagtacttaaaacccagaaaacattgtaaccgggtccttgggcggct

SEQ ID NO: 291192 - DNA, 120 bp, Artificial Sequence
  ENSG00000131127_87 (sequence is synthesized)
tgctggggctcacacccaccctgtagagtgctttctcactttaataaaatcttgcttttgctattcccttcctgtttttcattcctttgtgtgctttgttcaatttttttgttcgaaatg

SEQ ID NO: 291193 - DNA, 120 bp, Artificial Sequence
  ENSG00000131127_88 (sequence is synthesized)
tcaaggacctggacagttcacactcacggccttccttctggtaacagaagtgcaggtatatgtggatgcatgtgattggtacttaaactcacacagtgccccataccacaggagaaaaac

SEQ ID NO: 291194 - DNA, 120 bp, Artificial Sequence
  ENSG00000131127_89 (sequence is synthesized)
acacagttccagcctggcaattaggtccaaagataaatagcaaaacaagaagtttgcctttaatctattccctccacatctaaactctggagggcaaggctgtgaggagatctgaagaca

SEQ ID NO: 291195 - DNA, 120 bp, Artificial Sequence
  ENSG00000131127_90 (sequence is synthesized)
tggtgctctctcttcctgtggacccatcattccttgtttaccatctgatatttgaaaagaagaggaacccctgagaaaggaggcagaggctggttaggaagatagggagggaaggtcttg

SEQ ID NO: 291196 - DNA, 120 bp, Artificial Sequence
  ENSG00000131127_91 (sequence is synthesized)
ggagatgaaaaacacccacgggaccacacctgcaccacccatgtagctagcaggaagaaatgtggttaagaacttcctcttatgccagggtgttgatcagaagagactgtcccacttagg

SEQ ID NO: 291197 - DNA, 120 bp, Artificial Sequence
  ENSG00000131127_92 (sequence is synthesized)
cccaggtgtaatgaatcaacctaaatgtcattaacttgacccagctccttataatgttactaacatgacataaatattttggttttagcttcactctttccacctgctgtcggttttgct

SEQ ID NO: 291198 - DNA, 120 bp, Artificial Sequence
  ENSG00000131127_93 (sequence is synthesized)
tgggcactcatgggtaataaccaagatggagtcactgtggtcaactccaggcatgcacagatacaacacccttagcggggaaatttacccctcccatttgggcagaacccacagaagact

SEQ ID NO: 291199 - DNA, 120 bp, Artificial Sequence
  ENSG00000131127_94 (sequence is synthesized)
tcctcgttcttgccacataaaagacccagaactcagccccatttctggcaacctgctttcatgtcccctttctgctgagagctttccttttgcttaataaatcctattctgctttattca

SEQ ID NO: 291200 - DNA, 82 bp, Artificial Sequence
  ENSG00000131127_95 (sequence is synthesized)
agcaaagaaaagagccctacaatgtgaagatacataagatcgtagccagacccccagatggagtttcgctctgactgcaacc

SEQ ID NO: 291201 - DNA, 69 bp, Artificial Sequence
  ENSG00000131127_96 (sequence is synthesized)
agctctccttcttttttataactcattttgttcatgcattgttgcaaaaaaaaattagtaatctgtgta

SEQ ID NO: 291202 - DNA, 120 bp, Artificial Sequence
  ENSG00000131142_0 (sequence is synthesized)
gtggccccgttattcgtccaggtgcccagggaggaggacccgcctgcagcatgaacctgtggctcctggcctgcctggtggccggcttcctgggagcctgggcccccgctgtccacaccc

SEQ ID NO: 291203 - DNA, 120 bp, Artificial Sequence
  ENSG00000131142_1 (sequence is synthesized)
aaggtgtctttgaggactgctgcctggcctaccactaccccattgggtgggctgtgctccggcgcgcctggacttaccggatccaggaggtgagcgggagctgcaatctgcctgctgcga

SEQ ID NO: 291204 - DNA, 120 bp, Artificial Sequence
  ENSG00000131142_2 (sequence is synthesized)
tattctacctccccaagagacacaggaaggtgtgtgggaaccccaaaagcagggaggtgcagagagccatgaagctcctggatgctcgaaataaggtttttgcaaagctccaccacaaca

SEQ ID NO: 291205 - DNA, 120 bp, Artificial Sequence
  ENSG00000131142_3 (sequence is synthesized)
ccatcagcagcagtaagaggaatgtctccctcctgatatcagctaattcaggactgtgagccggctcatttctgggctccatcggcacaggaggggccggatctttctccgataaaaccg

SEQ ID NO: 291206 - DNA, 120 bp, Artificial Sequence
  ENSG00000131142_4 (sequence is synthesized)
tcgccctacagacccagctgtccccacgcctctgtcttttgggtcaagtcttaatccctgcacctgagttggtcctccctctgcacccccaccacctcctgcccgtctggcaactggaaa

SEQ ID NO: 291207 - DNA, 120 bp, Artificial Sequence
  ENSG00000131142_5 (sequence is synthesized)
gagggagttggcctgattttaagccttttgccgctccggggaccagcagcaatcctgggcagccagtggctcttgtagagaagacttaggatacctctctcactttctgtttcttgccgt

SEQ ID NO: 291208 - DNA, 120 bp, Artificial Sequence
  ENSG00000131142_6 (sequence is synthesized)
ccaccccgggccatgccagtgtgtccctctgggtccctccaaaactctggtcagttcaaggatgcccctcccaggctatgcttttctataacttttaaataaaccttggggggtgatgga

SEQ ID NO: 291209 - DNA, 120 bp, Artificial Sequence
  ENSG00000131143_0 (sequence is synthesized)
ctcttccggtcgcgggacaccgggtgtagagggcggtcgcggcgggcagtggcggcagaatgttggctaccagggtatttagcctagttggcaagcgagcaatttccacctctgtgtgtg

SEQ ID NO: 291210 - DNA, 120 bp, Artificial Sequence
  ENSG00000131143_1 (sequence is synthesized)
tacgagctcatgaaagtgttgtgaagagcgaagacttttcgctcccagcttatatggatcggcgtgaccaccccttgccggaggtggcccatgtcaagcacctgtctgccagccagaagg

SEQ ID NO: 291211 - DNA, 120 bp, Artificial Sequence
  ENSG00000131143_2 (sequence is synthesized)
cattgaaggagaaggagaaggcctcctggagcagcctctccatggatgagaaagtcgagttgtatcgcattaagttcaaggagagctttgctgagatgaacaggggctcgaacgagtgga

SEQ ID NO: 291212 - DNA, 120 bp, Artificial Sequence
  ENSG00000131143_3 (sequence is synthesized)
atcggtttcaccgcgctcgttatcatgtggcagaagcactatgtgtacggccccctcccgcaaagctttgacaaagagtgggtggccaagcagaccaagaggatgctggacatgaaggtg

SEQ ID NO: 291213 - DNA, 120 bp, Artificial Sequence
  ENSG00000131143_4 (sequence is synthesized)
aaccccatccagggcttagcctccaagtgggactacgaaaagaacgagtggaagaagtgagagatgctggcctgcgcctgcacctgcgcctggctctgtcaccgccatgcaactccatgc

SEQ ID NO: 291214 - DNA, 120 bp, Artificial Sequence
  ENSG00000131143_5 (sequence is synthesized)
ctatttactggaaacctgttatgccaaacagttgtaccactgctaataaatgaccagtttacctgaaaccctttgtgatcagttctttaatgatacctaaatgaaagctaattaaaacaa

SEQ ID NO: 291215 - DNA, 120 bp, Artificial Sequence
  ENSG00000131143_6 (sequence is synthesized)
cttccggtcgcgggacaccgggtgtagagggcggtcgcggcgggcagtggcggcaggtgtacatttttatctttcagaatgttggctaccagggtatttagcctagttggcaagcgagca

SEQ ID NO: 291216 - DNA, 120 bp, Artificial Sequence
  ENSG00000131143_7 (sequence is synthesized)
ggacaccgggtgtagagggcggtcgcggcgggcagtggcggcaggtgagacaggaggtggccggtgcggcgccgccaggccgggccgggtcggggggccgggagccatcaagtctgcacg

SEQ ID NO: 291217 - DNA, 120 bp, Artificial Sequence
  ENSG00000131143_8 (sequence is synthesized)
ccatcaagtctgcacgtccgcagcctggccgctcggcttcagcaggaagcaccgaatgggcctcggagccagaatgttggctaccagggtatttagcctagttggcaagcgagcaatttc

SEQ ID NO: 291218 - DNA, 120 bp, Artificial Sequence
  ENSG00000131143_9 (sequence is synthesized)
tttacactttgccagataaggaatcggctctgcgaaggtgcgaagaaccaaatcctagcgattaatgtcccaacaacgtgaacacttcctgcaactcgaaatcctcaagggaaactctgt

SEQ ID NO: 291219 - DNA, 120 bp, Artificial Sequence
  ENSG00000131143_10 (sequence is synthesized)
cgaatccccaccaagtgaacgatgacttgtttctacaaaggctactgatttcaggaaactaacgtataactcgtcgccttaaagtgcctctaaaagcatccacgacggttaaagtcgctg

SEQ ID NO: 291220 - DNA, 120 bp, Artificial Sequence
  ENSG00000131143_11 (sequence is synthesized)
gggtcctaggagcctgctggagggcgaccgctgggccagcttcctctctgctgactgaggggaggccaggctgcctgcaaggggaaggggccctttccgcgcttaccaggaatgttggct

SEQ ID NO: 291221 - DNA, 120 bp, Artificial Sequence
  ENSG00000131143_12 (sequence is synthesized)
tactgtctagaggcagtcttgcacaggagggttgctctgctgggtttcggggtcactgtgccagggccccagtttatgtgctcaccagtcacttagctctgccagctgacaggatctttt

SEQ ID NO: 291222 - DNA, 120 bp, Artificial Sequence
  ENSG00000131143_13 (sequence is synthesized)
gctaggcccccttctctgtgctgagtggaggtagcctctcagcatatctgctgggtaagacatagttaactgtaaattattgaaagaaactcagcaaaatgcatagtgtttggtatgaaa

SEQ ID NO: 291223 - DNA, 120 bp, Artificial Sequence
  ENSG00000131143_14 (sequence is synthesized)
gcagcctctccatggatgagaaagtcgagtgtgggtattgaagggacccacaggcgcgcccagcagctctcggaagcgttgtatcgcattaagttcaaggagagctttgctgagatgaac

SEQ ID NO: 291224 - DNA, 120 bp, Artificial Sequence
  ENSG00000131143_15 (sequence is synthesized)
tttaatttgcacctgaagcgaactgtatgcattttcttctttccttgccctgtcacatgcctgcgtgggcacgtgtgtgcacgtacgtgcgtgaacatgatgtggcctgggttggtgtat

SEQ ID NO: 291225 - DNA, 120 bp, Artificial Sequence
  ENSG00000131143_16 (sequence is synthesized)
ccttcagctctgtgtttcctccttcacaagtgtggttttggggagaagtggttgaatgttgcagaggagggagctgctgacctttgtgcctgtaaatggctgtcctctctgcccccagtg

SEQ ID NO: 291226 - DNA, 120 bp, Artificial Sequence
  ENSG00000131143_17 (sequence is synthesized)
aagcactatggtcaccttgggctctgtttgtcagatcctgttatccatagcctttagagaggaccttctgcttttagcttattttgttgctaactttttacaaacaaagggctaatttta

SEQ ID NO: 291227 - DNA, 120 bp, Artificial Sequence
  ENSG00000131143_18 (sequence is synthesized)
aaatgtcagtgttgtcagtggtcagaaaccgtgtgtttgagcgggtgttgagtggcaggtggctctgctgacctggtggctggtgtgtcgggaggatttaacctgtgtgagggattggcc

SEQ ID NO: 291228 - DNA, 120 bp, Artificial Sequence
  ENSG00000131143_19 (sequence is synthesized)
gttctagaacattctcatcacccatatttacatttatttttaataactctcatgtgtaagctgagtgttttaaactttagagacttctggggggtgctgaacttgataaaaatattcagt

SEQ ID NO: 291229 - DNA, 120 bp, Artificial Sequence
  ENSG00000131143_20 (sequence is synthesized)
atacaagtgttctttatagttcactcatcattttcatagaattagggttttaaaattagaaagtaatttaggccatttccatctcctgtccctcaaatcccagctcagttttgggatgag

SEQ ID NO: 291230 - DNA, 120 bp, Artificial Sequence
  ENSG00000131143_21 (sequence is synthesized)
gtgtcaagtataagtttgtaagtatgccagtcatttgcacggctaagagaaacatctagagaagtctatatacgacttgcttaaagctgaatgttgatttactgttcacatgatttgggt

SEQ ID NO: 291231 - DNA, 120 bp, Artificial Sequence
  ENSG00000131143_22 (sequence is synthesized)
gattttagtcactgggactgagctaatggagttgaagcattgttgcgggcattgtacctccagaccagtgtgtaatacaaagagttcttgcagacataggacagaattggagaaacagct

SEQ ID NO: 291232 - DNA, 120 bp, Artificial Sequence
  ENSG00000131143_23 (sequence is synthesized)
tctaacagtgggaagactctcagtacaaccaagctattccttacctttctgatttctgaacttttttccatgtgatacctgctgctttgaaggcactaaaataacagaagcagatagagc

SEQ ID NO: 291233 - DNA, 120 bp, Artificial Sequence
  ENSG00000131143_24 (sequence is synthesized)
agaaatcctcactcagatcttcctccttcctacctgtataacagtttgtggcttgccttgtctgttttgtgcgtttcgttacgcgtatgtgagtatgtgcacgtgatttccagaaaggag

SEQ ID NO: 291234 - DNA, 120 bp, Artificial Sequence
  ENSG00000131143_25 (sequence is synthesized)
aagcgcacgatactgcccgtgctctgtgactcctgagtgcacgcttcctctgcatttgggctcctaggtcggcctcgtcctgtggacgttgccccttgtttcgtgccatccacacattcc

SEQ ID NO: 291235 - DNA, 120 bp, Artificial Sequence
  ENSG00000131143_26 (sequence is synthesized)
tgatgccccgctgctctactctttctccagagtactttttccaaacatgtgatttgcacatttgttatgtttattgtttgttttccacttctagaagtgtgccactaggcaggaatgttt

SEQ ID NO: 291236 - DNA, 120 bp, Artificial Sequence
  ENSG00000131143_27 (sequence is synthesized)
gatttgttcactgatgatcccagatctctagaaccctgccttgcctgtagagggtgcttggtaaatgtgctctgaatgaatggctccatgatcctcgtttctaagagctagcacgatttc

SEQ ID NO: 291237 - DNA, 120 bp, Artificial Sequence
  ENSG00000131143_28 (sequence is synthesized)
tcactcagtcctggttggacacaggttccctggaacagtgctgttgtggttatcttctcacgtgtctttgtttctgaacttgaaacgctttgagttttttattgtttttgttcttcctca

SEQ ID NO: 291238 - DNA, 120 bp, Artificial Sequence
  ENSG00000131143_29 (sequence is synthesized)
ttagtttgagtcccttgcagataggctttcattttgtccagtcacctgttcagggagccctgagggccttggcccacgtctgcaggtaactggtttttttatttttatttttttattttg

SEQ ID NO: 291239 - DNA, 120 bp, Artificial Sequence
  ENSG00000131143_30 (sequence is synthesized)
tacaggtgtgagccaccgcgcccagccctgcaggtaactgttaatgtaggaagtgctgcctctgggcaccttggccccagggttcattagcagttgcccctggtgggtttttgttggctg

SEQ ID NO: 291240 - DNA, 120 bp, Artificial Sequence
  ENSG00000131143_31 (sequence is synthesized)
ttttgttggctgtgatgagaagtgcttctgttccccctccaccacactcctgcaactgtttaaacagtggctgtgaccccctgagatgatccagggtttcaaggcgtgcacatgtctgtg

SEQ ID NO: 291241 - DNA, 120 bp, Artificial Sequence
  ENSG00000131143_32 (sequence is synthesized)
gggcggtgccatgttcttcatcggtttcaccgcgctcgttatcatgtggcagaagcactatggtgagtagagagggaggaaggcatgggcgcctggactggggctccagcctgcagtgcc

SEQ ID NO: 291242 - DNA, 120 bp, Artificial Sequence
  ENSG00000131143_33 (sequence is synthesized)
cattggtgggctgtcggggacctccataccttgaggctatgagatagggactgcattccagagttcatctcaggattgtttccaggccttggtgacctggagaactgaagtcgtgggagg

SEQ ID NO: 291243 - DNA, 120 bp, Artificial Sequence
  ENSG00000131143_34 (sequence is synthesized)
ttagtttataagccagcatctgattattcatagccatgcttgttgggtggtgaaataccttaactactttgtacagcacaccacgttttcagtagcaatttatgtgctcaccagtcactt

SEQ ID NO: 291244 - DNA, 120 bp, Artificial Sequence
  ENSG00000131143_35 (sequence is synthesized)
agcgaaagatgacttcgtgaaggttcgagcaaggataaggggactcattcattgaatgactgtctggactgttgtgaggactgcatctcaacagccagcatctgggggtcccgacctgat

SEQ ID NO: 291245 - DNA, 120 bp, Artificial Sequence
  ENSG00000131143_36 (sequence is synthesized)
agtttgtgtgtgggcattgccgggttgctcgctcgtggtaatgactcttccccgaggttctttctgtccaggcagaacaggcatttttgcattctgaataggtatattctcgtacttttg

SEQ ID NO: 291246 - DNA, 120 bp, Artificial Sequence
  ENSG00000131148_0 (sequence is synthesized)
gctttccggcggcgccgggcgagaagcgcgactggagtctggggctgcggcttcccagaggcgcgagtcgcttttccaggagccgaggcccaaacggggccgggcctgaagggtcccccg

SEQ ID NO: 291247 - DNA, 120 bp, Artificial Sequence
  ENSG00000131148_1 (sequence is synthesized)
cctcgtcccgcttctcggctgaggcgccgcgcggccaggcagcgggtccaggcctcagccgcgcgcccaggggcctccggggccctcccgggtcagcatgcccggggtgaaactgaccac

SEQ ID NO: 291248 - DNA, 120 bp, Artificial Sequence
  ENSG00000131148_2 (sequence is synthesized)
cgggtcagcatgcccggggtgaaactgaccacccaggcctactgcaagatggtgctgcacggcgccaagtacccgcactgcgccgtcaacgggctcctggtggccgagaagcagaagccg

SEQ ID NO: 291249 - DNA, 120 bp, Artificial Sequence
  ENSG00000131148_3 (sequence is synthesized)
cgtaaggagcacctccccctgggcggccccggcgcccaccacaccctcttcgtggactgcatccccctcttccacggcaccctggccctcgcccccatgctggaggtggctctcaccctg

SEQ ID NO: 291250 - DNA, 120 bp, Artificial Sequence
  ENSG00000131148_4 (sequence is synthesized)
attgattcatggtgcaaagatcatagctacgtgattgctggttattatcaagctaatgagcgagtaaaggatgccagtccaaaccaggttgcagagaaggtggcctccagaatcgccgag

SEQ ID NO: 291251 - DNA, 120 bp, Artificial Sequence
  ENSG00000131148_5 (sequence is synthesized)
ggcttcagcgacactgcgctcatcatggtagacaacaccaagtttacgatggactgcgtagcgcctacgatccacgtgtacgagcaccatgagaacagatggcggtgcagagacccacac

SEQ ID NO: 291252 - DNA, 120 bp, Artificial Sequence
  ENSG00000131148_6 (sequence is synthesized)
catgactactgtgaagactggccagaggcacagaggatctcagcctcgctcctggacagccggtcctacgagacgctcgtggatttcgataaccacctggatgacattcggaatgactgg

SEQ ID NO: 291253 - DNA, 120 bp, Artificial Sequence
  ENSG00000131148_7 (sequence is synthesized)
acaaacccagagatcaataaagctgtcctacacttgtgctaggcaggcaccgctgtgactgggctccgggcctttccactacgttgaagaagaaaacctatttttaaatgtaaataaaat

SEQ ID NO: 291254 - DNA, 120 bp, Artificial Sequence
  ENSG00000131148_8 (sequence is synthesized)
tgccttgaaagggggcagaatgttcagtcggtcgtgtttttaacacagagtctctagaagaggtgcagacatcccgtctgactgtccctgtggactctctcagttgtatgttgctataat

SEQ ID NO: 291255 - DNA, 120 bp, Artificial Sequence
  ENSG00000131148_9 (sequence is synthesized)
cctccaaatcaaagctctttctgcttgtgcaagattgttcctattaaacagttttaactaaccttttataatctggagagaatactttttaaggcttttgaactatctttttttaaaaaa

SEQ ID NO: 291256 - DNA, 120 bp, Artificial Sequence
  ENSG00000131148_10 (sequence is synthesized)
aaaaaaaaaagcccacatcttatactccaatgagtgtgtttgtgagtttttatcctgtttgaattttgatgtcgtccaggcgtcctgggatcagggtagacacgtggagtgctggtgctg

SEQ ID NO: 291257 - DNA, 120 bp, Artificial Sequence
  ENSG00000131148_11 (sequence is synthesized)
agctgtttgagaagctctgtgtgggtgtttctgtggtcaggtaggctgggctgtgaacagcactgctccacatggtgtcggctcacagagccaccgcaactctgcccagcgggagtgaca

SEQ ID NO: 291258 - DNA, 120 bp, Artificial Sequence
  ENSG00000131148_12 (sequence is synthesized)
ccactgatgccacagaagcctttatcgttaggggcaaaagcagacatctctggtagcaggagctcagtgtggtgctcttcagccacgcagaaagctcacgtgcctgcagggccaggaaag

SEQ ID NO: 291259 - DNA, 120 bp, Artificial Sequence
  ENSG00000131148_13 (sequence is synthesized)
ggaaatgatcgtttcttttgtattaggaaaaacaagacttagacttcccgagttgtgcagagtgacgtctgtactttttatacttagaacatttggtcaagttttgtaaccaaaccttag

SEQ ID NO: 291260 - DNA, 120 bp, Artificial Sequence
  ENSG00000131148_14 (sequence is synthesized)
ggaattgagagggaaactttatggtacgtttaccttttttcctttttatatgaattattttgtacaaagttcagagagcggtacctttcctactgtcttttctttgactccatggaggaa

SEQ ID NO: 291261 - DNA, 120 bp, Artificial Sequence
  ENSG00000131148_15 (sequence is synthesized)
tttgtaacgatcggtgtgacctgaaagggtttgtgatacagcggtcactattttctcttaacacataggaaaaaagttcagacatcgctacaataaatgtgctttatttgatccaccaaa

SEQ ID NO: 291262 - DNA, 120 bp, Artificial Sequence
  ENSG00000131148_16 (sequence is synthesized)
tgcgctcatcatggtaagtcgcttctgtgcagcatgtgggaggcccttgcgcctcctctcaccaacctggagcttgctctgcggcggtttcctttccgctaaccccttcactcatttatc

SEQ ID NO: 291263 - DNA, 120 bp, Artificial Sequence
  ENSG00000131148_17 (sequence is synthesized)
tgcttgagaccattgccgcctcttgcagttttctctcagctgcagaccagttgaatcccaggccatggcttctgtgcttccgcatcactacacaagtgggagtggggtcccctgccagcc

SEQ ID NO: 291264 - DNA, 120 bp, Artificial Sequence
  ENSG00000131148_18 (sequence is synthesized)
gcagcacctgggaacttgttagaaatgcgaattcccaggcacccaccccagaccccactgaatcagaaatgcgggggtttagcccagcagtccatgttaagacaccttctagatgattct

SEQ ID NO: 291265 - DNA, 120 bp, Artificial Sequence
  ENSG00000131148_19 (sequence is synthesized)
ggtctgaacatgccaagtgtgagaagcacaattagaacagccagcacagcctctaggggcacagggaaggaaggtccttgtatgtgagcagatgacatcaagggccttgctgaacagcct

SEQ ID NO: 291266 - DNA, 120 bp, Artificial Sequence
  ENSG00000131148_20 (sequence is synthesized)
tgattcagacagaatcctaggatgagggaagaagtcatgtttggaagcttcgcttttgtgaaaaaacaatgaaggacttgacgttttcctgcatgacacaacagttttcctcaggccaga

SEQ ID NO: 291267 - DNA, 120 bp, Artificial Sequence
  ENSG00000131148_21 (sequence is synthesized)
cactcgcgccactctgcatacaggctctgtcggaagagtctctgccccagccagcgtgggcacggctgcagggagagccccgaggaggcgcctgccgctgctgtttggctggcattctgt

SEQ ID NO: 291268 - DNA, 120 bp, Artificial Sequence
  ENSG00000131148_22 (sequence is synthesized)
tcactctcgtgtcctttgccttgtgctcaggtagacaacaccaagtttacgatggactgcgtagcgcctacgatccacgtgtacgagcaccatgagaacagatggcggtgcagagaccca

SEQ ID NO: 291269 - DNA, 120 bp, Artificial Sequence
  ENSG00000131148_23 (sequence is synthesized)
gcgcgggctgggctccttcagcgcccggccacgtgagagccactctcaccccgcctgtgttttcagttagcgttttctccagaagcatgataccaagcatattccccggctcctgtaggc

SEQ ID NO: 291270 - DNA, 120 bp, Artificial Sequence
  ENSG00000131148_24 (sequence is synthesized)
cccagtgttccagcgcttccaggcagtagagggaacctcagtggtacccacaggtcttcccaccccaggcgctagagcacagacactcttcccaggcctgtgctttgatgtatctgtggc

SEQ ID NO: 291271 - DNA, 120 bp, Artificial Sequence
  ENSG00000131148_25 (sequence is synthesized)
cactcagaaagcttcagtcatctgcctccaactttctcagaattccacgtgaaaggcgtcccttccatgtattaaccatgtcttctatgctctgtatacctcttcatgcgtttgaaatgc

SEQ ID NO: 291272 - DNA, 120 bp, Artificial Sequence
  ENSG00000131148_26 (sequence is synthesized)
acatgtttctcagtactctgcaccatctctgttcataccactgtgcatgtggctggccttctctcttgatgctgttacaagccgcccgttttcactgttagatgctgacttcttcatgtt

SEQ ID NO: 291273 - DNA, 120 bp, Artificial Sequence
  ENSG00000131148_27 (sequence is synthesized)
ttgctggttattatcaagctaatgagcgagtaaaggatgccaggtacgtggatgcagaaccctctgtgggcgaggaagtgagcacgtgttgggcagaccccgtctctcgtgtgcttttcg

SEQ ID NO: 291274 - DNA, 120 bp, Artificial Sequence
  ENSG00000131148_28 (sequence is synthesized)
caaataaataagtaggctgggcacagtggcccatgcctgtaagcactttgggaggccagggcagtaagattgcttgaggccaggagttgaagaccagtgtgggcaacatagcaatacctc

SEQ ID NO: 291275 - DNA, 90 bp, Artificial Sequence
  ENSG00000131148_29 (sequence is synthesized)
taaaaagtaactgggtgtggtggccagaggtgggattgcttgagcctaggaatttgaggttacagtgggctatgattgcgtcactacact

SEQ ID NO: 291276 - DNA, 120 bp, Artificial Sequence
  ENSG00000131148_30 (sequence is synthesized)
aatttgaggttacagtgggctatgattgcgtcactacactccagctagggcagcagagcaagaccctatctctaccaaaaaattaaataataagtaaaccagcgaagcgagcacgtgcag

SEQ ID NO: 291277 - DNA, 120 bp, Artificial Sequence
  ENSG00000131148_31 (sequence is synthesized)
tgccagtctttctgtcattgcttgttaagtctcagtggtgttgactgtgccttttgtaaacagtgttgaatggcattaactggaatgtggtagcctatttctttgacagtccaaaccagg

SEQ ID NO: 291278 - DNA, 75 bp, Artificial Sequence
  ENSG00000131148_32 (sequence is synthesized)
ctagcgttgcccctgccaactctcagacggagtctcgcactgtcacccgattggagcacaatgccgcagtctcgg

SEQ ID NO: 291279 - DNA, 120 bp, Artificial Sequence
  ENSG00000131149_0 (sequence is synthesized)
agtttagacaaacactgggcgacggtggctccagcatgtatcagccgaggtggagctgcggggccctggcatgaaaggcatgagccatgagcccaagtccccttcgctagggatgctttc

SEQ ID NO: 291280 - DNA, 120 bp, Artificial Sequence
  ENSG00000131149_1 (sequence is synthesized)
caccgcgaccaggaccaccgccaccgtcaaccccctcaccccctcgccgctcaatggcgccctggtgcccagcggcagccccgccaccagcagcgcgctgtcggcccaggccgcgccatc

SEQ ID NO: 291281 - DNA, 120 bp, Artificial Sequence
  ENSG00000131149_2 (sequence is synthesized)
ctccagctttgccgccgcgctgcgcaagctcgccaaacaggcggaggagcccagagggtcctcactgagcagcgagtcgtcccccgtgtcctctccggccaccaaccacagctcccccgc

SEQ ID NO: 291282 - DNA, 120 bp, Artificial Sequence
  ENSG00000131149_3 (sequence is synthesized)
cagcacacccaagcgcgtgcccatgggccctatcatcgtcccccctgggggccacagcgtgcccagcaccccccccgtggtgaccatcgctccaaccaaaaccgtgaatggtgtctggag

SEQ ID NO: 291283 - DNA, 120 bp, Artificial Sequence
  ENSG00000131149_4 (sequence is synthesized)
gagtgagagccggcaggatgccggctccaggagcagcagtggaggtcgggaacgcctcattgtggagcccccgctccctcaggagaaggcagggggaccagccatcccctcgcacctgct

SEQ ID NO: 291284 - DNA, 120 bp, Artificial Sequence
  ENSG00000131149_5 (sequence is synthesized)
cagcaccccctaccccttcggcctctcccccagctcagttgtgcaggattcccgcttcccgccactcaacctccagcggcccgtgcaccacgtggtgccccccagtaccgtgaccgagga

SEQ ID NO: 291285 - DNA, 120 bp, Artificial Sequence
  ENSG00000131149_6 (sequence is synthesized)
ctacctgagaagcttccggccctaccacaccaccgacgacctccgcatgtcctcactgcctcccctcggcctggacccggccactgctgcagcctactaccaccccagctacctggcccc

SEQ ID NO: 291286 - DNA, 120 bp, Artificial Sequence
  ENSG00000131149_7 (sequence is synthesized)
acaccccttcccccacccggccttcaggatggacgactcctactgcctgtctgccctgaggtccccgttctaccccatccccacccccggctccctgcccccactgcacccatcagcgat

SEQ ID NO: 291287 - DNA, 120 bp, Artificial Sequence
  ENSG00000131149_8 (sequence is synthesized)
gcacctgcacctctctggggtccgctaccctcccgagctctcccactcatccctggcagcgctgcactcggagcgcatgtctggcctcagcgcggagaggctgcagatggacgaggagct

SEQ ID NO: 291288 - DNA, 120 bp, Artificial Sequence
  ENSG00000131149_9 (sequence is synthesized)
aaggcgggagagggagcgcgagcgcgagcgcgagcgtgagcgtgaggctgaccgcgagcgggagaaggaacgtgagcgcgaacgcgagaaggagcgcgagcaagagaaggagcgtgagcg

SEQ ID NO: 291289 - DNA, 120 bp, Artificial Sequence
  ENSG00000131149_10 (sequence is synthesized)
tgagaaggagcgcgagcgcgagctggagcgccagcgggagcagcgggcccgggagaaggagctgctggccgccaaggccctggagcccagcttcctgcccgtggccgagctgcatgggct

SEQ ID NO: 291290 - DNA, 120 bp, Artificial Sequence
  ENSG00000131149_11 (sequence is synthesized)
gcgtggccatgccactgaggagcggggcaagccctcggagcagctgaccccaacccgagcagagaagctgaaggatgccggcctgcaggcgcccaagcccgtccaacaccccttgcatcc

SEQ ID NO: 291291 - DNA, 120 bp, Artificial Sequence
  ENSG00000131149_12 (sequence is synthesized)
ggtgcccaccccacaccacacggtgcccagcctcatctccaaccatggcatcttctctctgcctagcagcagtgctgccacagccctgctgatccagcgcaccaatgaggaggagaagtg

SEQ ID NO: 291292 - DNA, 120 bp, Artificial Sequence
  ENSG00000131149_13 (sequence is synthesized)
gctggcgcggcagcggcggctgcggcaggagaaggaggaccggcagtctcaggtgtccgagttccggcagcaggtgctggagcagcacctggatatgggccggcccccggtgccggcgga

SEQ ID NO: 291293 - DNA, 120 bp, Artificial Sequence
  ENSG00000131149_14 (sequence is synthesized)
ggcagagcacaggccggagagcaccaccaggccaggaccaaaccgtcacgagccaggtggccgtgaccctccgcagcactttggggggccaccacctctgatttcgcccaagccccagct

SEQ ID NO: 291294 - DNA, 120 bp, Artificial Sequence
  ENSG00000131149_15 (sequence is synthesized)
ccatgctgcacccacggccctctggaaccccgtgtccctgatggacaacaccttggagacgcggcgggccgaaagccactctctgcacagccacccggctgcatttgagcccagccgcca

SEQ ID NO: 291295 - DNA, 120 bp, Artificial Sequence
  ENSG00000131149_16 (sequence is synthesized)
ggcagccgtgccgctggtgaaggtggagcgggtcttctgcccggagaaagcagaggaggggccacggaagcgtgagcctgcccctctggacaagtaccagccacctccgccgccaccacg

SEQ ID NO: 291296 - DNA, 120 bp, Artificial Sequence
  ENSG00000131149_17 (sequence is synthesized)
agagggagggagcctggagcaccagcccttcctgcccgggcccgggcccttcctggctgagctcgagaagtccacccagaccatcctgggccagcagcgggcctccctcccacaggcggc

SEQ ID NO: 291297 - DNA, 120 bp, Artificial Sequence
  ENSG00000131149_18 (sequence is synthesized)
caccttcggggagctcagcggacccctgaagcctggctcgccctaccggcccccagtgccacgggcccccgaccctgcctacatctatgatgagttcctgcagcagcgccggaggctggt

SEQ ID NO: 291298 - DNA, 120 bp, Artificial Sequence
  ENSG00000131149_19 (sequence is synthesized)
cagcaagctggacctggaggagcgcaggcggcgggaggcccaggagaaagggtactactacgacctcgatgactcttacgacgagagcgatgaggaggaggtcagggcccacctccgttg

SEQ ID NO: 291299 - DNA, 120 bp, Artificial Sequence
  ENSG00000131149_20 (sequence is synthesized)
cgtggccgagcagccgcccctcaaactggacacgtcctctgagaagctagagtttttgcaactttttggcttgaccacccaacagcagaaggaggaattggtggcccagaagcggaggaa

SEQ ID NO: 291300 - DNA, 120 bp, Artificial Sequence
  ENSG00000131149_21 (sequence is synthesized)
gcggcggaggatgctgcgagagagaagcccgtcgcccccaacaattcagagcaagcggcagacgccttcaccgagactggcgctgtctacccgctacagccctgatgagatgaacaacag

SEQ ID NO: 291301 - DNA, 120 bp, Artificial Sequence
  ENSG00000131149_22 (sequence is synthesized)
tcccaacttcgaagaaaagaagaagttcctgaccatcttcaacctgacccacatcagcgctgagaagaggaaagacaaagagagacttgttgaaatgctccgtgccatgaagcagaaggc

SEQ ID NO: 291302 - DNA, 120 bp, Artificial Sequence
  ENSG00000131149_23 (sequence is synthesized)
actgtcagcagcagtggccgactccttgacaaactctccgagggacagtcctgccgtctccctgagtgaaccagccacgcagcaagcctctctggatgtggagaagccggttggtgttgc

SEQ ID NO: 291303 - DNA, 120 bp, Artificial Sequence
  ENSG00000131149_24 (sequence is synthesized)
tgcttccttgtctgacatcccaaaggccgcggagcctgggaagctggaacaggtccggccccaggagctgtcgagagtccaggagctagctcctgccagcggggagaaggccaggctgag

SEQ ID NO: 291304 - DNA, 120 bp, Artificial Sequence
  ENSG00000131149_25 (sequence is synthesized)
cgaggcccctggaggcaaaaagagtctgagcatgcttcactatatccggggcgctgcacccaaggacattcctgtgccgctgtcccacagcaccaatgggaagagcaagccgtgggagcc

SEQ ID NO: 291305 - DNA, 120 bp, Artificial Sequence
  ENSG00000131149_26 (sequence is synthesized)
ctttgtggcagaagagtttgcacatcagttccacgagtcagtgctgcagtccacccagaaggccctgcagaagcataaagggagcgtggctgtgctgtctgcagagcagaaccacaaggt

SEQ ID NO: 291306 - DNA, 120 bp, Artificial Sequence
  ENSG00000131149_27 (sequence is synthesized)
tgacacgtccgtccactacaacattcctgagctgcagtcctccagccgcgcccctccaccccagcacaatgggcagcaggagccccccactgcaaggaagggccccccaacccaggagtt

SEQ ID NO: 291307 - DNA, 120 bp, Artificial Sequence
  ENSG00000131149_28 (sequence is synthesized)
ggaccgggactcggaggaggaggaagaggaggatgatgaagatggagaagatgaggaggaagtccccaagcgcaagtggcaagggatcgaggccgtttttgaagcttaccaggaacacat

SEQ ID NO: 291308 - DNA, 120 bp, Artificial Sequence
  ENSG00000131149_29 (sequence is synthesized)
agaagagcaaaatctggagcggcaggtgttacagacacaatgtagacgactggaggcccggcactacagcctcagcctgacggcagagcagctctcccacagcgtggcggagttgaggag

SEQ ID NO: 291309 - DNA, 120 bp, Artificial Sequence
  ENSG00000131149_30 (sequence is synthesized)
gccttgccttgcctgcaatgcactggcctaggggctacctgaagggatatcccaggtgacggtttcccttgcactaggccgaacctatagtatagaaatattatctattttattaccttg

SEQ ID NO: 291310 - DNA, 120 bp, Artificial Sequence
  ENSG00000131149_31 (sequence is synthesized)
aatatttaatatttttcactgggaggtttgaagcttacaaaatgagaatgtgccatgcatgaagcaaaggattccaggctccagaaaaaatgaatgaactcaccttgacgtcaatgcaat

SEQ ID NO: 291311 - DNA, 120 bp, Artificial Sequence
  ENSG00000131149_32 (sequence is synthesized)
tgaatcaccgttgtcattcagcgagcaaccaatgtaggattgcccacagtttttctttttaaaggtggttttcgcccttcctctcccacattatttcttaatctgaacatgaaggctcca

SEQ ID NO: 291312 - DNA, 120 bp, Artificial Sequence
  ENSG00000131149_33 (sequence is synthesized)
ttagcaacactaaaacttgatcattaacagccccctgtgcatatgagtggatcaaaccggttctgttctttcttgtgttgccatgttactatgcctcaagcccagtttgcttttgccgca

SEQ ID NO: 291313 - DNA, 120 bp, Artificial Sequence
  ENSG00000131149_34 (sequence is synthesized)
gcgatggggccagtctcattcctccccaggagtgaaacttgcttcagctgaaaaggttgggtgcattgtcagtaaaaagggcttatttgtttcattttactttcctgcaaaattttcttc

SEQ ID NO: 291314 - DNA, 120 bp, Artificial Sequence
  ENSG00000131149_35 (sequence is synthesized)
aaagcaacaagtcctaggagcacacaaagcaacccaaaggcttttccctggaaaagctctttcttacctaaagataaaaccaattcacaaactgaaggtagctttttattactccgtggg

SEQ ID NO: 291315 - DNA, 120 bp, Artificial Sequence
  ENSG00000131149_36 (sequence is synthesized)
gagcatgtacagagctctgtgtatacacagcttcacacccaccagattgttactacagtgggttgggttttcatacagacgtaaattttgagagaaaagtcaaaggtgcttcagccttgt

SEQ ID NO: 291316 - DNA, 120 bp, Artificial Sequence
  ENSG00000131149_37 (sequence is synthesized)
actgtgtatatatattaaaaaaaaaacaaagttttgtatgtttttattactttaactattgttataaaaagcctgccatttttaatatgtggtttgggggatttttgtttgtttttcctg

SEQ ID NO: 291317 - DNA, 120 bp, Artificial Sequence
  ENSG00000131149_38 (sequence is synthesized)
tttgggggttttgtttgttgttttggttttttttgggcaaaaaaaaaaaaaaaaccttgcttttagtgtttgtactgctgctggtcaggacattaaaatattgaagtgtttttaaaaatt

SEQ ID NO: 291318 - DNA, 120 bp, Artificial Sequence
  ENSG00000131149_39 (sequence is synthesized)
aaagaagaagaaaagtaaaagagcttaccactggcgcctatgcgatcacttcatttttagtttgagttgcaccagaagctgccgtagaaagccatgcgctactgcttacctcctccactc

SEQ ID NO: 291319 - DNA, 120 bp, Artificial Sequence
  ENSG00000131149_40 (sequence is synthesized)
cccctgcctgcccccagcatctggacaagctaatagcaaatattacccattgctatcaagggaggagggggtagtctgtagaacccatgtgtgacagtcatgtgcacacatgggcggggg

SEQ ID NO: 291320 - DNA, 120 bp, Artificial Sequence
  ENSG00000131149_41 (sequence is synthesized)
cttttaaaaacctttcaggaagtcaatgatttctgtgattgatataattctaaggtgtctgagagcaggtacagaataggaacttcagaggctttgtttaaacgcaaagctttgtaaaag

SEQ ID NO: 291321 - DNA, 120 bp, Artificial Sequence
  ENSG00000131149_42 (sequence is synthesized)
ccacaaggtctgagctgaacccctcctttttgaacttactgtgacaagcacaggaacggtcagaaactgggctcatcacaccaaggcaaagcaacgggcgagtcttcctccttgtcctag

SEQ ID NO: 291322 - DNA, 120 bp, Artificial Sequence
  ENSG00000131149_43 (sequence is synthesized)
ttactgcctatggaggcagtgtttagatcaagaaggcctctcttgctcccaagggccctcaccagaggccagggctgccagtcactggtctggggggtggaggcctgagctgagggcagg

SEQ ID NO: 291323 - DNA, 120 bp, Artificial Sequence
  ENSG00000131149_44 (sequence is synthesized)
gtgcctgacctgtgtgccggctgctcactgctgtgaccagcagccgagcccttggccctagcccttgctgcgcagaacagcttgctggcagctggcatcgtgtcgctttatctgcccccg

SEQ ID NO: 291324 - DNA, 120 bp, Artificial Sequence
  ENSG00000131149_45 (sequence is synthesized)
cacagtttgctttgtacgtctgccaagaatcttccagttattagcaaactcagacgaatgtaccgccagtattatcagcagtcaacaagcaccttcctctccacagaagcagctggaaga

SEQ ID NO: 291325 - DNA, 120 bp, Artificial Sequence
  ENSG00000131149_46 (sequence is synthesized)
gaactcgaggggctgtgctgcaggcctcccctcgaaagacactgggaggtcagcatgttccacaggtgttcagagggagtctgctacaaactatcagggcaaaatctcactggatttctc

SEQ ID NO: 291326 - DNA, 120 bp, Artificial Sequence
  ENSG00000131149_47 (sequence is synthesized)
cactgaaaacctacttgaggtttctggtctgaaggcttaagagtcacatcttagcacttccgctctcaggcctcctcctccatcacagatgtctggatgcttttggaaatggccttggct

SEQ ID NO: 291327 - DNA, 120 bp, Artificial Sequence
  ENSG00000131149_48 (sequence is synthesized)
aaagtaaaagggaaaagtagatccgataacttaaaaacgtagctcatcccttaccatccaaggggcactcccttggttggattttctatgacagcacaggggacaggtggcacaccatga

SEQ ID NO: 291328 - DNA, 120 bp, Artificial Sequence
  ENSG00000131149_49 (sequence is synthesized)
gaggtctgcccagggtgggagcagtgtcactgtgctagcaatagttggcttctcccctgtcagtggaaaccccacttctgcccggcccttgagcttcttgcccactgtctccccatcctt

SEQ ID NO: 291329 - DNA, 120 bp, Artificial Sequence
  ENSG00000131149_50 (sequence is synthesized)
ccacctacttgtggcgatctgagtactctactcttgctcaagaagtaatacgacaatcagaatacaaaccagtaaggcaacacgaataaactaagaaaaaggtaagaactgtctcaaaaa

SEQ ID NO: 291330 - DNA, 120 bp, Artificial Sequence
  ENSG00000131149_51 (sequence is synthesized)
cgaaagcacaccacccaagacacagtacccagtcatggtttccccatccaactattagtttcatactttgaaaacttactttcagattattctcaaagaacacagtagcacctaaatctg

SEQ ID NO: 291331 - DNA, 120 bp, Artificial Sequence
  ENSG00000131149_52 (sequence is synthesized)
ttttcaattgggcttaaaaattgacatgcaatctcttaagttttttgttcagctacttcacactgagtacctcaaatctgctctggagtcgattatgccacctgtgtgtcaggatgcacc

SEQ ID NO: 291332 - DNA, 120 bp, Artificial Sequence
  ENSG00000131149_53 (sequence is synthesized)
tgaaagccctcggctcggtccttagaccatcttcctacattacctggaagggagctgccatctgtccctctgcagagggataccttccaatagtaaattatctggttcctcactgaaaca

SEQ ID NO: 291333 - DNA, 120 bp, Artificial Sequence
  ENSG00000131149_54 (sequence is synthesized)
agttatttttgcttcatatagtcagagtcagactgacatgataaaatatcatgttcctaatctgttgtctcagataagtgaccaagacgggactttccacattttagtctacattctaat

SEQ ID NO: 291334 - DNA, 120 bp, Artificial Sequence
  ENSG00000131149_55 (sequence is synthesized)
cttaaaggaataaagcactgaattgggactaacattctgataggttgcacccttaagagtattcagagagcatcaaaaggagcccacaccttcagcagtgaaggattctaacacagggaa

SEQ ID NO: 291335 - DNA, 120 bp, Artificial Sequence
  ENSG00000131149_56 (sequence is synthesized)
tctgcagtttgtagcagaatggtattttcctcaagtagctcataatactgccaaatctcaaaagttaagctgaatttcacaccagatcctacccctttccctgagccacatgtttcacac

SEQ ID NO: 291336 - DNA, 120 bp, Artificial Sequence
  ENSG00000131149_57 (sequence is synthesized)
aagtgtagaaaatgccagggatccaccacaagatggagatggtcagcacaaaccgattctgttcctctttaaagtgtatattagccacttagcaatctctatattctttcaagtaaccaa

SEQ ID NO: 291337 - DNA, 120 bp, Artificial Sequence
  ENSG00000131149_58 (sequence is synthesized)
gctgttgactttcttactacttgcagtagcctgtccccaacttttccatccagtgcttaacctaaaaaactccttaactctgccttgacctgaggaagaccatgctaactggtgttattt

SEQ ID NO: 291338 - DNA, 120 bp, Artificial Sequence
  ENSG00000131149_59 (sequence is synthesized)
tgtatgtaccctgtgcttaattctataacagtaaaccccatacgcaggtgggagggaggaacaccggtgcctcggtcactctgggggcagtttagatgctgtgaaattaaacctgttcta

SEQ ID NO: 291339 - DNA, 120 bp, Artificial Sequence
  ENSG00000131149_60 (sequence is synthesized)
agtgtacttgtttgaattaattgtattgtaatattatttgttgaatgtagtaattaggtatttatgaatatattgctgtaatttctgacaacatccaaaaaataaaatcttcctaaatta

SEQ ID NO: 291340 - DNA, 120 bp, Artificial Sequence
  ENSG00000131149_61 (sequence is synthesized)
accgtgtggtgcgtaaattatagcgtccggccaaggccgcaaggggggcgccgccggtgagctggcgggtcgtgcggggaagcagcacccccgcgccgtgccagggccggccagcgtccg

SEQ ID NO: 291341 - DNA, 120 bp, Artificial Sequence
  ENSG00000131149_62 (sequence is synthesized)
tgtggttgaggctgaccaaagttgctgagcgccacagctgctcagccgttcagccgtgggcacaagtttttataaactccaatcaccagaagaaaataatttcgttattatgccaaaacc

SEQ ID NO: 291342 - DNA, 120 bp, Artificial Sequence
  ENSG00000131149_63 (sequence is synthesized)
atgtttgtttgtttatctccaagctctaaaacctgaactcgtaggtgagaaacgtttgtaggcaccagcgctgacgctgtgctgtgagcagggacgcatcgatcggtaagaggtaaagga

SEQ ID NO: 291343 - DNA, 120 bp, Artificial Sequence
  ENSG00000131149_64 (sequence is synthesized)
ggttcagcagatgtccttggggggcagggatgggaagcaggtctcagatcactcccaaagtttttacatctgggggttccaagaactccgagtttgagccaagacagcagcagatgccga

SEQ ID NO: 291344 - DNA, 120 bp, Artificial Sequence
  ENSG00000131149_65 (sequence is synthesized)
ttcttaagactctggaagagccagggacagaacacaggctgagaagtggactttgtttctctttttgaggcgaagtctcactctgtcacccaagctggaatgcagtggcgcagtctcggc

SEQ ID NO: 291345 - DNA, 120 bp, Artificial Sequence
  ENSG00000131149_66 (sequence is synthesized)
gggccgggtgacatcagggatctgctgcgtggaacatcgtggggtcatctttccccttcaggaagtggcagtaatggtaggagtgggggagaaggcaccctgcctcagaggccaggcctg

SEQ ID NO: 291346 - DNA, 120 bp, Artificial Sequence
  ENSG00000131149_67 (sequence is synthesized)
ggtctttggggtgtttctttgtgttggggccaccttgtctgacttgaaataagaatacatcctcgcacgtcaccaccgaggtccgtgggcacagtgattcacagaggcgtcgtcaccgca

SEQ ID NO: 291347 - DNA, 120 bp, Artificial Sequence
  ENSG00000131149_68 (sequence is synthesized)
gcacgtctaggacattgtgtagtggatgccgagagcaatctgggctcgctttgagatggttgcttcctttcaactgggcctgccccatcacacctgcttttggtttttcgggctttagtg

SEQ ID NO: 291348 - DNA, 120 bp, Artificial Sequence
  ENSG00000131149_69 (sequence is synthesized)
ctttgcctgcccctcaaggctcggctagaatcccgctgtccttctctccaaaaaatgatgcaactggctcgttaatctcaggctgcttttctcatagacaaagagagacttgttgaaatg

SEQ ID NO: 291349 - DNA, 120 bp, Artificial Sequence
  ENSG00000131149_70 (sequence is synthesized)
ggcccagggcggccccgtgtccatctgctacatctgtggggctgagctgggccccgggaaggagttccagctcaacgtgaaccccgccagccgcttgggcgagaaggagcccttcttccc

SEQ ID NO: 291350 - DNA, 120 bp, Artificial Sequence
  ENSG00000131149_71 (sequence is synthesized)
cttcctcaccgtgtacccgcctgcccctcgtgccaggcctgtggactccaccggcctggtggctacctgtgtgctctgctaccatgacctgctggcccagtggctgcagcatgaggcccg

SEQ ID NO: 291351 - DNA, 120 bp, Artificial Sequence
  ENSG00000131149_72 (sequence is synthesized)
cagctcccaccacgctgtcagcgcctggtcccggcagtaccaggtggagacgttcgtgtgcttcttttgtcagcaggagaagaaacggtgtctggggctgaagtccgtgcgggtggcccg

SEQ ID NO: 291352 - DNA, 120 bp, Artificial Sequence
  ENSG00000131149_73 (sequence is synthesized)
acagcagctgatcatcggtgcttgcgtggagtgtgggaccctggtgtgtgcgggccaagggctcacccgccaaggacccatgagctggagctccccggtggcagcagcgacgaagatgaa

SEQ ID NO: 291353 - DNA, 120 bp, Artificial Sequence
  ENSG00000131149_74 (sequence is synthesized)
tcggcgctgtttccactatgatgcagctcctccatctctggcagcatctttgtcttggcacctcttttatctgaattattcacatctggacactgaggtctctgaggttcggagagggaa

SEQ ID NO: 291354 - DNA, 120 bp, Artificial Sequence
  ENSG00000131149_75 (sequence is synthesized)
agtgacttgcccaaggccacacaggtgtcagctccaggggcagagtgctcccttctcagcccagctgcacacaggttttctctactccaacagtcgctttggggccatgggtctgagaga

SEQ ID NO: 291355 - DNA, 120 bp, Artificial Sequence
  ENSG00000131149_76 (sequence is synthesized)
ttaattaaatctgtgctttaggtgtactctggcctttttccagcagcctaaactgaaagcctatttttttttttttgaaagctgcattttaaggccatcaaatttcttcctaatctgtat

SEQ ID NO: 291356 - DNA, 120 bp, Artificial Sequence
  ENSG00000131149_77 (sequence is synthesized)
caaattgcctttaggtcctggatcctttgtctttattcctgtgtattgggcttaatttagtgacgtttatgtatttatcggtacaattcaaagggctgggagcattgtggtccacaggag

SEQ ID NO: 291357 - DNA, 120 bp, Artificial Sequence
  ENSG00000131149_78 (sequence is synthesized)
gtcagggagccgggagcgagccagtggcccgggagtgggcggcgttgcgtttgggtgtgtcctcggcggcgacagcagcaggtgtttcttggccggggccccggaagctccacctcccca

SEQ ID NO: 291358 - DNA, 120 bp, Artificial Sequence
  ENSG00000131149_79 (sequence is synthesized)
tgcatctcaagtccaaaaggcagaaaatacacacgcggcgaagacacccgggcagccgtggaggctccggcccgtccttggtcgtcaattacctcattgtggatctgccagggccaaggt

SEQ ID NO: 291359 - DNA, 120 bp, Artificial Sequence
  ENSG00000131149_80 (sequence is synthesized)
ggccgaaattgcctgggcgctggtcggagagagagccttttgatcatcttgcggggcgggggggggaaagactgatttttttttttcgtcgctctcgggatcgctcttctgcctttattt

SEQ ID NO: 291360 - DNA, 120 bp, Artificial Sequence
  ENSG00000131149_81 (sequence is synthesized)
tattattttccttcttcatccctctctggccactatggaattctaatttgaaccatgtttggattgaagccgcctctgtattacttaccagggtcctcactgagcagcgagtcgtccccc

SEQ ID NO: 291361 - DNA, 120 bp, Artificial Sequence
  ENSG00000131149_82 (sequence is synthesized)
ccggccccggtctcccgcaagcagcggctcatggcagccgtgggcgagcgggctgcgggcggcgcgccgctctcctgcttcatctgcggcggcggcatcgggcgcggcaaggagctgaag

SEQ ID NO: 291362 - DNA, 120 bp, Artificial Sequence
  ENSG00000131149_83 (sequence is synthesized)
aaggagctgaagctgcaggtgaagcagccggcggcgggcgcggggaccccggcgcagcccttcttcccgttcctgcagcagcaggagccggcgcccggcgcgcgcgagctgtccccggcc

SEQ ID NO: 291363 - DNA, 120 bp, Artificial Sequence
  ENSG00000131149_84 (sequence is synthesized)
gacggctgcgtgttggtgtgcgccgtgtgccgctgcttcctgggcgagcagtgggccgccttcgagcgcgcccgcacgccggtggacaagcgcatgtactggctcaagcggccccaccag

SEQ ID NO: 291364 - DNA, 120 bp, Artificial Sequence
  ENSG00000131149_85 (sequence is synthesized)
gacaagcgcatgtactggctcaagcggccccaccagtgcgacgcgggcgcaggcggccgccgtggcggcgccggggccccccgcgagtggaacgtcgcctacgcgctgggcagcgccacc

SEQ ID NO: 291365 - DNA, 120 bp, Artificial Sequence
  ENSG00000131149_86 (sequence is synthesized)
ctgcgcggggccgcggaggagacgcgagactccgacctgtcggagctgtcggacaccgaccccctttccgagcccgacccgcccgcgcgggacgccgccagcccccaccaggacggggcc

SEQ ID NO: 291366 - DNA, 80 bp, Artificial Sequence
  ENSG00000131149_87 (sequence is synthesized)
tggaggccggctccgggacccgctccgggacagggcgcagaggcctcggcgcaggggcgcgcggaggaggaggggctccc

SEQ ID NO: 291367 - DNA, 120 bp, Artificial Sequence
  ENSG00000131149_88 (sequence is synthesized)
aaggcccacgcggatggggagcccaagtccggggttaggcgccggcggaagggggttgggaggcactgggttcccgaggcccgggccagcgtcctgaggagcattcaggatccctggcaa

SEQ ID NO: 291368 - DNA, 120 bp, Artificial Sequence
  ENSG00000131149_89 (sequence is synthesized)
ggccctcttgtccaagaggcccctgcagacggcatgaaagggcctccctctggcagagccactaagaccctggagagcaggccgctgggggagaccctacggggcttctgcacctccgag

SEQ ID NO: 291369 - DNA, 120 bp, Artificial Sequence
  ENSG00000131149_90 (sequence is synthesized)
gacagtgacatcaacatcaccagtggggaagaggaccacaaggaacagcctttcccaggcgtctgcaaccccaaagagaagaacagtggccgtgtcccccgggctctccaggacagccgg

SEQ ID NO: 291370 - DNA, 120 bp, Artificial Sequence
  ENSG00000131149_91 (sequence is synthesized)
gcggcaccagcagaaggcctttgctgctacatctgcggggccccgctgtccccggcctcgcaccaccaggtccacgtgcagaagcaggagaagctggctcaggccccgttcttccccttc

SEQ ID NO: 291371 - DNA, 120 bp, Artificial Sequence
  ENSG00000131149_92 (sequence is synthesized)
ctgtggctgcacagcccgcccccaggggcacagcccatcagcgagggcggcagtaccttggtgtgcgccagctgcttctcctccctcacgcagcagtggcagagcttcgagctggccaac

SEQ ID NO: 291372 - DNA, 120 bp, Artificial Sequence
  ENSG00000131149_93 (sequence is synthesized)
acgcccccggcatggcctctaagggcaggaggctcccgagggaagagggcctgccctccggggccctgcgagaggcctgctacctctgtggggaggactgtaccccggatgcccgggcgg

SEQ ID NO: 291373 - DNA, 120 bp, Artificial Sequence
  ENSG00000131149_94 (sequence is synthesized)
tcccctccaggatcctcaacggcaacgccaggagcgccatgcatttccccttcctcagcctcctgccctgcccgcccaacgcccagggccccaacaagcgctgtgaagtccgcagctgcc

SEQ ID NO: 291374 - DNA, 120 bp, Artificial Sequence
  ENSG00000131149_95 (sequence is synthesized)
ccaagtgcttcagcgtcctggaggatgtctgggccctgtaccgggcctgccagaacgaggagctcatcacctccgtgcagggcttcctgggcaggtaccaccaggccttctccgcctccg

SEQ ID NO: 291375 - DNA, 120 bp, Artificial Sequence
  ENSG00000131149_96 (sequence is synthesized)
ctcccacccgggagtccgagacccggccacgcgcccccacggagaccctgcccagaggccccaggatggcccaggagctgaggccagcacagtgtctgcagagcagccgggaggaggacg

SEQ ID NO: 291376 - DNA, 120 bp, Artificial Sequence
  ENSG00000131149_97 (sequence is synthesized)
cagagagccaggaagagcaaccgagcaggcgagagtgtgcagaggggagcaggggctccagcccagttttcttcctgatgctgaacactcaggtcctgtccagtgctgagctcagcctcc

SEQ ID NO: 291377 - DNA, 120 bp, Artificial Sequence
  ENSG00000131149_98 (sequence is synthesized)
tcttcaatagaagctggggcacaggcggtcttcctggttgttggtctaggctggatggagggcccagccaaatttctctcccctactcactttgtaaaggaggagggagataccccagcg

SEQ ID NO: 291378 - DNA, 120 bp, Artificial Sequence
  ENSG00000131149_99 (sequence is synthesized)
cccctgggcaggggctctgctattgttctctgtgtcttagagagctcaggcctgtgtgtgcctgtctcctcccaggagatggactcagatggccacagcatgggggagtgcatgtgcaca

SEQ ID NO: 291379 - DNA, 120 bp, Artificial Sequence
  ENSG00000131149_100 (sequence is synthesized)
agcagccctgtgttgccgtggacacagccccaggcctgtgtgatgaatggttccctgccagggggaggagggaggtcttgtcagcccaggggaccacccagctactgggagccatggatc

SEQ ID NO: 291380 - DNA, 120 bp, Artificial Sequence
  ENSG00000131149_101 (sequence is synthesized)
ccagggaagcctggtgtctgcggtcctgcaaagccccaggactgggttaatgttggtttccacctcggttgaaaggaactggccttcagggtgttcaggtgccagcaggcctggcctgat

SEQ ID NO: 291381 - DNA, 120 bp, Artificial Sequence
  ENSG00000131149_102 (sequence is synthesized)
aggtgctctgcacacatgaggccctgcgggcatgtccactggacagatgaaggctctttgtctggctgaatacaaccatttctccatcagggtactactacgacctcgatgactcttacg

SEQ ID NO: 291382 - DNA, 120 bp, Artificial Sequence
  ENSG00000131149_103 (sequence is synthesized)
gggctctcgttcctagcgtccacaccctgcagtccaccccactgttgctaggttcctccgaagtcctggcgggttcgccccatgaagctcttctcccaccaggcgcagccagctacggcc

SEQ ID NO: 291383 - DNA, 120 bp, Artificial Sequence
  ENSG00000131149_104 (sequence is synthesized)
cacacttcgaggaccccaggaggggaccccgggacagtgcaagcataccactgccagtggcttcaaactcatttgttttctttcccaatctagaagctagagtttttgcaactttttggc

SEQ ID NO: 291384 - DNA, 120 bp, Artificial Sequence
  ENSG00000131149_105 (sequence is synthesized)
ttactggtgcagctttgggcagagccctgccccaggaaaccagagtcctccggagcagaacaaggcccagatggacccctaggcggagtttggctgtggtttggggagcaggcccaccca

SEQ ID NO: 291385 - DNA, 70 bp, Artificial Sequence
  ENSG00000131149_106 (sequence is synthesized)
cccgcctcgacattttcaaatgagttgaggagccagaaacagaagatggtctcagaaagggagcggctcc

SEQ ID NO: 291386 - DNA, 120 bp, Artificial Sequence
  ENSG00000131153_0 (sequence is synthesized)
gggacgctgaggggcccgaggagaccgtgaggctctggcctgcagctcgcgccgccatggacgctgccgaggtcgaattcctcgccgagaaggagctggttaccattatccccaacttca

SEQ ID NO: 291387 - DNA, 120 bp, Artificial Sequence
  ENSG00000131153_1 (sequence is synthesized)
gtctggacaagatctacctcatcgggggggacctggggccttttaaccctggtttacccgtggaagtgcccctgtggctggcgattaacctgaaacaaagacagaaatgtcgcctgctcc

SEQ ID NO: 291388 - DNA, 120 bp, Artificial Sequence
  ENSG00000131153_2 (sequence is synthesized)
ctccagagtggatggatgtagaaaagttggagaagatgagggatcatgaacgaaaggaagaaacttttaccccaatgcccagcccttactacatggaacttacgaagctcctgttaaatc

SEQ ID NO: 291389 - DNA, 120 bp, Artificial Sequence
  ENSG00000131153_3 (sequence is synthesized)
atgcttcagacaacatcccgaaggcagacgaaatccggaccctggtcaaggatatgtgggacactcgtatagccaaactccgagtgtctgctgacagctttgtgagacagcaggaggcac

SEQ ID NO: 291390 - DNA, 120 bp, Artificial Sequence
  ENSG00000131153_4 (sequence is synthesized)
atgccaagctggataacttgaccttgatggagatcaacaccagcgggactttcctcacacaagcgctcaaccacatgtacaaactccgcacgaacctccagcctctggagagtactcagt

SEQ ID NO: 291391 - DNA, 120 bp, Artificial Sequence
  ENSG00000131153_5 (sequence is synthesized)
ctcaggacttctagagaaaggcctggtgcaggcggcttgctgggggatgtgagcgctcaggacgtgatgaggtactcgtggttctggagctctagaaacacttctgatgcatgaaaaatg

SEQ ID NO: 291392 - DNA, 120 bp, Artificial Sequence
  ENSG00000131153_6 (sequence is synthesized)
tgtgatggtgcaaggaatggattcaggatgttgttggagaaacaagtttgtgattagtccttaaaacttagctccctgggacattcttcaattccacatctgtttctagaaaccagccct

SEQ ID NO: 291393 - DNA, 120 bp, Artificial Sequence
  ENSG00000131153_7 (sequence is synthesized)
ttttccccccacttttgagaaataaaaaagccttaggtaaataagtcattctccctagcagagccacttgggtctcctgcatggaagccatcacacttgggcaggtgttcagtgactggt

SEQ ID NO: 291394 - DNA, 120 bp, Artificial Sequence
  ENSG00000131153_8 (sequence is synthesized)
aggtgtagatacagcaggagtggccatgtggtccacggctttttaccccttcttgatcctgatttcttgggctgaatttagactctctcacagaggtggctcacagagaaggatggcaga

SEQ ID NO: 291395 - DNA, 120 bp, Artificial Sequence
  ENSG00000131153_9 (sequence is synthesized)
tggtgcagccaacaatgctgaccggtgcttatcctctaagccctgatccacaataaaaatggacccaactcagctctgactctctaggtttttgtgctgcgtaactaccaagtaaaagga

SEQ ID NO: 291396 - DNA, 120 bp, Artificial Sequence
  ENSG00000131153_10 (sequence is synthesized)
ctcaggtttaatgggttgcttatcaagaggagagtcaggaaaaaaacgaatccaatgtattgagcatgagtgacaatgtattgagcatgagtgacaatgctagaagaaaagtcactttca

SEQ ID NO: 291397 - DNA, 120 bp, Artificial Sequence
  ENSG00000131153_11 (sequence is synthesized)
gtgctgctcttgatggatttggggaaggattctttgttgtaggtaacagtgggctcaggggaaattatttttttcctaagagaaaattactttattcgtagcattttggaaatgttagga

SEQ ID NO: 291398 - DNA, 120 bp, Artificial Sequence
  ENSG00000131153_12 (sequence is synthesized)
cctttacagaaattacattaccttgagaggtgaaatgatcgtccagcatcatgcaatggatagaaggttctgtaatcagctttaaaaaaaactttaatttttggccgggcacattggctt

SEQ ID NO: 291399 - DNA, 63 bp, Artificial Sequence
  ENSG00000131153_13 (sequence is synthesized)
tttaaaaaaaactttaatttttggccgggcacattggcccaggagattgagactatcctggct

SEQ ID NO: 291400 - DNA, 120 bp, Artificial Sequence
  ENSG00000131153_14 (sequence is synthesized)
actcctgcctgggcaacgagagcaagactctgtctcaaacaaaaaaaattttaactttttttttagacagggtctcgttctgtcatccaggctgcagtagagtggcgtgattatagctca

SEQ ID NO: 291401 - DNA, 120 bp, Artificial Sequence
  ENSG00000131153_15 (sequence is synthesized)
ctgcagcctcgaactcctgggttcacacagttctcccaccacagcctcccaaagcactgggattgcaagcatgagccgccatgcctggccagcctatttttggctggacaccagtgggcc

SEQ ID NO: 291402 - DNA, 120 bp, Artificial Sequence
  ENSG00000131153_16 (sequence is synthesized)
aaaagcagtggggtgctgtctggggagctctgagaatgcgcatgtgtgacaggctgagcctaaagacttatcacccagcatctgccctccagtgtctagcatgctgcacactatcactcc

SEQ ID NO: 291403 - DNA, 120 bp, Artificial Sequence
  ENSG00000131153_17 (sequence is synthesized)
atgttgctgcccacgtgtccccgccaggcaggttttggtggttatttggacactgaagggtcagacctggaagactgggaccaaaagatgaggtctccataatttaaggtgctgttcaga

SEQ ID NO: 291404 - DNA, 120 bp, Artificial Sequence
  ENSG00000131153_18 (sequence is synthesized)
cttggttcagctcataggacttgttctttcatctcagccttccttggaatcctcctgctttcatctggggatcttttagaatgaaaccacttgttattgtggagggcaaggggtcctaat

SEQ ID NO: 291405 - DNA, 120 bp, Artificial Sequence
  ENSG00000131153_19 (sequence is synthesized)
gccctcctcttagagcctgagccagtggaggcagctccgtctgcggagatgtatagttattgagcttttctttgtttggctttgttttatatcataaaaaagattttcctcttaacataa

SEQ ID NO: 291406 - DNA, 120 bp, Artificial Sequence
  ENSG00000131153_20 (sequence is synthesized)
ctcgcgggcctaattatcaaggtttcaaattcgactgcagtcctagaatagcgcttcacccccaggaagcttttccggccatgaccaccccatcaaaatcacctggccctggatgaaatt

SEQ ID NO: 291407 - DNA, 120 bp, Artificial Sequence
  ENSG00000131153_21 (sequence is synthesized)
cagctttctgtcctttccacgactccggaatcccaactcccaggagcgtgcacacagacaatgggcacccgctaggggattctgacacaggtgagctccagccaccgctctggcttcacc

SEQ ID NO: 291408 - DNA, 120 bp, Artificial Sequence
  ENSG00000131153_22 (sequence is synthesized)
cgagtagctggattgtgagcccccgcgcccgcccggctttgcgttttcagtatgagggaggcgcctcggcgctgggagtcctggagaaggagggcaggctctgtacctgcccagacccac

SEQ ID NO: 291409 - DNA, 120 bp, Artificial Sequence
  ENSG00000131153_23 (sequence is synthesized)
ctccccgcaccccaggaccccaacattgggtgtgtgaaacctgttccggagttggagggtgcaggcgggagagggagcgccccccacccactcaggggagacttgcatcctgtccgcgga

SEQ ID NO: 291410 - DNA, 120 bp, Artificial Sequence
  ENSG00000131165_0 (sequence is synthesized)
ggcgaccccggaagtccccgccgggtgcagcttggtcggttcgatcgccgccgggacctgacaccgcccggagttggcgtcccttctccctctccgagtgctgctcctgtcattgtggcc

SEQ ID NO: 291411 - DNA, 120 bp, Artificial Sequence
  ENSG00000131165_1 (sequence is synthesized)
atggacgataccctgttccagttgaagttcacggcgaagcagctggagaagctggccaagaaggcggagaaggactccaaggcggagcaggccaaagtgaagaaggcccttctgcagaaa

SEQ ID NO: 291412 - DNA, 120 bp, Artificial Sequence
  ENSG00000131165_2 (sequence is synthesized)
aatgtagagtgtgcccgtgtgtatgccgagaacgccatccgcaagaagaacgaaggtgtgaactggcttcggatggcgtcccgcgtagacgcagtggcctccaaggtgcagacagctgtg

SEQ ID NO: 291413 - DNA, 120 bp, Artificial Sequence
  ENSG00000131165_3 (sequence is synthesized)
actatgaagggggtgaccaagaatatggcccaggtgaccaaagccctggacaaggccctgagcaccatggacctgcagaaggtctcctcagtgatggacaggttcgagcagcaggtgcag

SEQ ID NO: 291414 - DNA, 120 bp, Artificial Sequence
  ENSG00000131165_4 (sequence is synthesized)
aacctggacgtccatacatcggtgatggaggactccatgagctcggccaccaccctgaccacgccgcaggagcaggtggacagcctcatcatgcagatcgccgaggagaatggcctggag

SEQ ID NO: 291415 - DNA, 120 bp, Artificial Sequence
  ENSG00000131165_5 (sequence is synthesized)
gtgctggaccagctcagccagctgcccgagggcgcctctgccgtgggcgagagctctgtgcgcagccaggaggaccagctgtcacggaggttggccgccttgaggaactagccgtgcccc

SEQ ID NO: 291416 - DNA, 120 bp, Artificial Sequence
  ENSG00000131165_6 (sequence is synthesized)
gccggtgtgcaccgcctctgccccgtgatgtgctggaaggctcctgtcctctccccaccgcgtcttgcctttgtgctgaccccgcggggctgcggccggcagccactctgcgtctctcac

SEQ ID NO: 291417 - DNA, 120 bp, Artificial Sequence
  ENSG00000131165_7 (sequence is synthesized)
ctgccaggcctgcgtggccttagggttgttcctgttcttttaggttgggcggtgggtctgtgtcctggtgttgagtttctgcaaatttctgggggtgatttctgtgactctgggcccaca

SEQ ID NO: 291418 - DNA, 120 bp, Artificial Sequence
  ENSG00000131165_8 (sequence is synthesized)
gcggggaggccaagaggggccctgtggactttcacccagcactgtgggggccttcagactctggggcagcagacatgctgcttcccatcagccagagggggtcagggctgccctgttgcc

SEQ ID NO: 291419 - DNA, 120 bp, Artificial Sequence
  ENSG00000131165_9 (sequence is synthesized)
gacatagcccaaggaggcaccacaggtctatgtgtgctgggggatgtcaggtgccacccaacgctgtcctggtggtatttacaatgacatcctcctcctccatcactccaggggtggtgt

SEQ ID NO: 291420 - DNA, 120 bp, Artificial Sequence
  ENSG00000131165_10 (sequence is synthesized)
ctcggccgcccctaccagctggctgagccccctggcctcctgcgctccctcacttccctcagttcccaaagctgcccagtccatggggacagaaccgtcactcagatccacattcaagtg

SEQ ID NO: 291421 - DNA, 120 bp, Artificial Sequence
  ENSG00000131165_11 (sequence is synthesized)
tgcccaccctgcagtcttcatcctcactcagctgctgcctctggaggtgcctttggccacatgtgctgtgctgtttgtctcctcgacagggagcctgtccaccagcaggctgcggtccca

SEQ ID NO: 291422 - DNA, 120 bp, Artificial Sequence
  ENSG00000131165_12 (sequence is synthesized)
gcgggtgcgtctgcagctcctccccttgggcagcctggttctcccggaggacctttccttggggccctgcttcatgacgatgctgcctgtgtcaccctctaccatctgtaaacaactggg

SEQ ID NO: 291423 - DNA, 120 bp, Artificial Sequence
  ENSG00000131165_13 (sequence is synthesized)
tgccttccccgaccacaccccaatgccttcccagcttggaagccaaggcagctgatgaagggagctcaggagagccgtcttcagctgggctggggttggggctgctgtgaggaaaacctg

SEQ ID NO: 291424 - DNA, 120 bp, Artificial Sequence
  ENSG00000131165_14 (sequence is synthesized)
ccattgtggccctggagagtcaccagcagctcttgggaaggacttgctgggaggctgagagaggctttgggcacagcctgctgtcttttccatttcctaaagtttacttcattgtcttga

SEQ ID NO: 291425 - DNA, 120 bp, Artificial Sequence
  ENSG00000131165_15 (sequence is synthesized)
ggcttccaggttttgtttttgtttttgccaaagtagaaaaggcaggtggtgggcggctggcagggagtgcgggtccccgcccctcttcagtcctgccctcccctcctcagtcctgcccac

SEQ ID NO: 291426 - DNA, 120 bp, Artificial Sequence
  ENSG00000131165_16 (sequence is synthesized)
cccgtgcagcccatgctgaggctgcagtggtgtcgtgggtgttacgtgcaggaacgtggagaccctgacgtgggctcactgcgtttggttttcttttcagaacttgggagcccccaggga

SEQ ID NO: 291427 - DNA, 120 bp, Artificial Sequence
  ENSG00000131165_17 (sequence is synthesized)
ggggctagtgttggtaggtcctagacgtggttccctccagcctccccaaaatcaaccctggtgttgagagaacgtccttctgtccatcgtgggtaacagccttggggagggtgcagagct

SEQ ID NO: 291428 - DNA, 120 bp, Artificial Sequence
  ENSG00000131165_18 (sequence is synthesized)
ctgcagagccatgggccaggtggggctgcctcagtcctgtccccttgggcactgaggagaggggcccattcacctttctcctagaatgctgttgtaaataaacaaatggatccctggaaa

SEQ ID NO: 291429 - DNA, 120 bp, Artificial Sequence
  ENSG00000131165_19 (sequence is synthesized)
ccctacccttggggctgtggcctggggacaaggagcgtgtgtgggcagctcatcgggaggggtggctcacaggctgacgtgctgtctctgcatacctgtggttgctccctgacgtcacca

SEQ ID NO: 291430 - DNA, 120 bp, Artificial Sequence
  ENSG00000131165_20 (sequence is synthesized)
aatgggctctgcggtctggatctggggcagctcagagttgacggaaggtggatcagcgcggggtggggaggttgagggaagctggatcagcgtggggtggggaggttgagggctggatca

SEQ ID NO: 291431 - DNA, 120 bp, Artificial Sequence
  ENSG00000131165_21 (sequence is synthesized)
aaaggctcctggtggaaggtgagacagagagagtcactgagagaacagggcaagaaggtggctggctgtgtgagggaacgaaaagtgcagtcgtacccttgtgaagctgagtggggcccc

SEQ ID NO: 291432 - DNA, 120 bp, Artificial Sequence
  ENSG00000131165_22 (sequence is synthesized)
gggtgggcagggcggcgggggcctcctgcaggcacctggctccttgtggggaggctcggatggcagacaagcatgcagaggtgtggaaagatgtccacccgcggcagcaggcatggcaca

SEQ ID NO: 291433 - DNA, 120 bp, Artificial Sequence
  ENSG00000131171_0 (sequence is synthesized)
gccaaccgctgtttcagcccctagctggattccagccattgctgcagctgctccacagcccttttcaggacccaaacaaccgcagccgctgttcccaggatggtgatccgtgtatatatt

SEQ ID NO: 291434 - DNA, 120 bp, Artificial Sequence
  ENSG00000131171_1 (sequence is synthesized)
gcatcttcctctggctctacagcgattaagaagaaacaacaagatgtgcttggtttcctagaagccaacaaaataggatttgaagaaaaagatattgcagccaatgaagagaatcggaag

SEQ ID NO: 291435 - DNA, 120 bp, Artificial Sequence
  ENSG00000131171_2 (sequence is synthesized)
tggatgagagaaaatgtacctgaaaatagtcgaccagccacaggttaccccctgccacctcagattttcaatgaaagccagtatcgcggggactatgatgccttctttgaagccagagaa

SEQ ID NO: 291436 - DNA, 120 bp, Artificial Sequence
  ENSG00000131171_3 (sequence is synthesized)
aataatgcagtgtatgccttcttaggcttgacagccccacctggttcaaaggaagcagaagtgcaagcaaagcagcaagcatgaaccttaagcactgtgctttaagcatcctgaaaaatg

SEQ ID NO: 291437 - DNA, 120 bp, Artificial Sequence
  ENSG00000131171_4 (sequence is synthesized)
agtctccattgcttttataaaatagcagaattagctttgcttcaaaagaaataggcttaatgttgaaataatagattagttgggttttcacatgcaaacattcaaaatgaatacaaaatt

SEQ ID NO: 291438 - DNA, 120 bp, Artificial Sequence
  ENSG00000131171_5 (sequence is synthesized)
aaaatttgaacattatggtgattatggtgaggagaatgggatattaacataaaattatattaataagtagatatcgtagaaatagtgttgttacctgccaagccatcctgtatacaccaa

SEQ ID NO: 291439 - DNA, 120 bp, Artificial Sequence
  ENSG00000131171_6 (sequence is synthesized)
tgattttacaaagaaaacacccttccctccttctgccattactatggcaacttaagtgtatctgcagctctacattaaaaaggagaaagagaaataacctgtctctcattcctaagttgc

SEQ ID NO: 291440 - DNA, 120 bp, Artificial Sequence
  ENSG00000131171_7 (sequence is synthesized)
atatgttaaacgttgtaatttcctatcgtaattataacattcccattcttttgtagatgaaacttctacatattgaaccacagattttctgagcttctaaatgtagcctttcattgcaca

SEQ ID NO: 291441 - DNA, 120 bp, Artificial Sequence
  ENSG00000131171_8 (sequence is synthesized)
tttcagtgatcagaatagatatccttttacacgcacaaaagcaatagattcattcagtggacaagttccttgtttaactacacagctatgatggaatgatatatccaagttccttgcctc

SEQ ID NO: 291442 - DNA, 120 bp, Artificial Sequence
  ENSG00000131171_9 (sequence is synthesized)
agtgaaatatgcatatgtatatcatgaaagtgggatgccaagtaagcttaaaatggcattctctagcaaagagattagacttttaaataactcttataaaacaggttggcgatcatttcc

SEQ ID NO: 291443 - DNA, 120 bp, Artificial Sequence
  ENSG00000131171_10 (sequence is synthesized)
caagattggtttcccttgagtttttgctaaaacaaatcttagtagttttgcccgtttaaaacaactcacaatcgtaaatgctactattcctaagatatcttacctttttatttcagttta

SEQ ID NO: 291444 - DNA, 120 bp, Artificial Sequence
  ENSG00000131171_11 (sequence is synthesized)
gccatgtattgtatgagtgtattagtctaagcagtgagaatcttttctatgcctctattccagcaaaaagtagaagtatcaaataaaaagggcaacttttaaaatattaagcctgaagac

SEQ ID NO: 291445 - DNA, 120 bp, Artificial Sequence
  ENSG00000131171_12 (sequence is synthesized)
ttctaaaaagacaagaaacatggcctaaataaccaacatagatttacatagtaagtttcacactaccttattaccaaaagcaaacacctcttactttaaactacattatcatgtatatct

SEQ ID NO: 291446 - DNA, 120 bp, Artificial Sequence
  ENSG00000131171_13 (sequence is synthesized)
attgtatgctggtctttactttttgccaaaatcaacatataatgaagagatgcctttgtttcatgagattcaaacttgatgctatgctttaaaataaactcagtacttttagaaacataa

SEQ ID NO: 291447 - DNA, 120 bp, Artificial Sequence
  ENSG00000131171_14 (sequence is synthesized)
ctgttaaacatttaatagaataataattattaaggatatataaaatgaatttatataagttgaattggggcattgtgtgccatttcagtgaatttgaacaatctgccaaaggattatgat

SEQ ID NO: 291448 - DNA, 120 bp, Artificial Sequence
  ENSG00000131171_15 (sequence is synthesized)
ggattccagccattgctgcagctgctccacagcccttttcaggacccaaacaaccgcagccgctgttcccaggatggtgatccgtgtatatattgcatcttcctctggctctacagcgag

SEQ ID NO: 291449 - DNA, 120 bp, Artificial Sequence
  ENSG00000131171_16 (sequence is synthesized)
ttcagctttgtttgcttcgtgacgttggggggcacatttctgctttgaaggaaaacgaaagctaccaagttttgggagatgggagatggtgctatacggtctttagggttacgtgaagtc

SEQ ID NO: 291450 - DNA, 120 bp, Artificial Sequence
  ENSG00000131174_0 (sequence is synthesized)
gtttttcagctcacttcaagggtacctgaagcgaattggcaccaaagcagcagctgtattgccgcagttctagcttcaccttcacgatgtttcccttggtcaaaagcgcactaaatcgtc

SEQ ID NO: 291451 - DNA, 120 bp, Artificial Sequence
  ENSG00000131174_1 (sequence is synthesized)
tccaagttcgaagcattcagcaaacaatggcaaggcagagccaccagaaacgtacacctgattttcatgacaaatacggtaatgctgtattagctagtggagccactttctgtattgtta

SEQ ID NO: 291452 - DNA, 120 bp, Artificial Sequence
  ENSG00000131174_2 (sequence is synthesized)
catggacatatgtagcaacacaagtcggaatagaatggaacctgtcccctgttggcagagttaccccaaaggaatggaggaatcagtaatcatcccagctggtgtaataatgaattgttt

SEQ ID NO: 291453 - DNA, 120 bp, Artificial Sequence
  ENSG00000131174_3 (sequence is synthesized)
aaaaaacagctcataattgatgccaaattaaagcactgtgtacccattaagatatggcattattgaagaaataaagtacatttgaaaccttcattgtaggttttgtttctttgtaaatga

SEQ ID NO: 291454 - DNA, 120 bp, Artificial Sequence
  ENSG00000131174_4 (sequence is synthesized)
attgtaggttttgtttctttgtaaatgaaactaagcttgatcactttagcctttatgttaatattaaagtcaaatgctgtgcagcttcttaaataggttttttttttttttttttttttt

SEQ ID NO: 291455 - DNA, 67 bp, Artificial Sequence
  ENSG00000131174_5 (sequence is synthesized)
gctcactgccagaactacaggcacatgccatgacgcccagctaattttttttttttttgagacggag

SEQ ID NO: 291456 - DNA, 120 bp, Artificial Sequence
  ENSG00000131174_6 (sequence is synthesized)
tggtaggattacaggcgtgagccacggcacccagcccttaaatggcttttatgaggtaatgtgaaaggaaaatttgcctttgacctggaagtcaactttatagtaagctgaaattataaa

SEQ ID NO: 291457 - DNA, 120 bp, Artificial Sequence
  ENSG00000131174_7 (sequence is synthesized)
catggaactattgcagatcacctttgagccaaaaatttggcctggattttggttatgcctactactatgtgcctctcatttgtatttatacctggaattggcattattaactccttttca

SEQ ID NO: 291458 - DNA, 120 bp, Artificial Sequence
  ENSG00000131174_8 (sequence is synthesized)
ctcctgcctagaaaacttaaagtgtcaccagacccaagggcggagtggtcctataaaacaaactcgtagcctgtctgaagactagctactagctccttggctgttttggcatattcatct

SEQ ID NO: 291459 - DNA, 120 bp, Artificial Sequence
  ENSG00000131174_9 (sequence is synthesized)
tgattatagctcttggtctttcatcatattagggatgtttatgatgttattaaagaaaatcttgtcaaatgcagtctgttcctagttatctactatcagtcacctgttgtataattataa

SEQ ID NO: 291460 - DNA, 120 bp, Artificial Sequence
  ENSG00000131174_10 (sequence is synthesized)
caatgtttggatttgtggattattattttagtatataacattggattttatgtatgttacctgaagaagagcaatatctgtaccacatatttctttgtttttcttttttgagatgaagtc

SEQ ID NO: 291461 - DNA, 60 bp, Artificial Sequence
  ENSG00000131174_11 (sequence is synthesized)
ggggtttcaccatgttggccaacttacaggcatgagacaccgcgcccggcttatatatca

SEQ ID NO: 291462 - DNA, 120 bp, Artificial Sequence
  ENSG00000131174_12 (sequence is synthesized)
ctcagcctcccaaagtgctaggcttacaggcatgagacaccgcgcccggcttatatatcattactttcttggctgagagctgtagtctgtggtagttgttttgttttgttttttgttttt

SEQ ID NO: 291463 - DNA, 120 bp, Artificial Sequence
  ENSG00000131174_13 (sequence is synthesized)
gtgatcaattaagcagaaagtagaatttcagtcaggtaacctgtctatattagctaaattatcttttgcttattacatagagtgctagaagtatgctgtcatggcatatgtcctagtttc

SEQ ID NO: 291464 - DNA, 120 bp, Artificial Sequence
  ENSG00000131174_14 (sequence is synthesized)
tcatcaaatggaccaaagtcagtgattttatttgaagaggaaaaattgaacgtcattgtaaattaagttgcaagtttagtaaccatattgtaccactgtttgataaatttgaacgcttta

SEQ ID NO: 291465 - DNA, 120 bp, Artificial Sequence
  ENSG00000131174_15 (sequence is synthesized)
tggtatttcatatttagaatgttcaaaatagtactgaagtattcaaatacatacaaccctgagcgatattgaagtaaaataaacatgtatttaaggaagtgtcaaccttcaattatatac

SEQ ID NO: 291466 - DNA, 120 bp, Artificial Sequence
  ENSG00000131174_16 (sequence is synthesized)
ttaacatagtagtgtacatatctagttaggagggacttgagagattgtgtaatctaattacccacacagtgcaggggattttttccccccagcattcatccatcttctgttcttaacatt

SEQ ID NO: 291467 - DNA, 120 bp, Artificial Sequence
  ENSG00000131174_17 (sequence is synthesized)
ttttccccccagcattcatccatcttctgttcttaacattcccagtaataaattgcttactggatcacaaggcagccctttccatcttgtgtagctgttttttttgtttttgtttttttt

SEQ ID NO: 291468 - DNA, 120 bp, Artificial Sequence
  ENSG00000131183_0 (sequence is synthesized)
gtcctggaggcttcattgagctgctgagcagaagctgaaacacagaattctaagcgttgctgagacccactgacctgcagacctcatagtgggtgcccaggatgttgtcctacggagaga

SEQ ID NO: 291469 - DNA, 120 bp, Artificial Sequence
  ENSG00000131183_1 (sequence is synthesized)
ggctggggtcccctgctgtctccccactcccagtccgtggggggcatgtgatgcgagggacggcctttgcctacgtgcccagccctcaggtcctacacaggatcccggggacctctgcct

SEQ ID NO: 291470 - DNA, 120 bp, Artificial Sequence
  ENSG00000131183_2 (sequence is synthesized)
atgccttccccagcctgggccctgtggcccttgctgagcacacctgcccctgtggggaggtcctggagcgccatgaaccactgcctgccaagctggccctggaggaggagcagaagccag

SEQ ID NO: 291471 - DNA, 120 bp, Artificial Sequence
  ENSG00000131183_3 (sequence is synthesized)
agtccaggctggtccccaagctgcgccaggctggcgccatgctgctcaaggtgccactgatgctcaccttcctctacctcttcgtctgctccctggacatgctcagctcggccttccagc

SEQ ID NO: 291472 - DNA, 120 bp, Artificial Sequence
  ENSG00000131183_4 (sequence is synthesized)
tggctggagggaaggtggctggtgacatcttcaaggataacgccatcctgtccaacccggtggccgggctggtggtggggatcctggtgaccgtgctggtgcagagctccagcacctcca

SEQ ID NO: 291473 - DNA, 120 bp, Artificial Sequence
  ENSG00000131183_5 (sequence is synthesized)
catccatcatcgtcagcatggtctcctctggcttgctggaggtgagctctgccatccccatcatcatgggctccaacatcggcacctctgtcaccaacaccatcgtggccctgatgcagg

SEQ ID NO: 291474 - DNA, 120 bp, Artificial Sequence
  ENSG00000131183_6 (sequence is synthesized)
cgggggacaggactgacttccggcgggccttcgcgggggccacggtgcatgactgctttaactggctgtcagtgctggtcctgctgcccctggaggctgccactggctacctgcaccaca

SEQ ID NO: 291475 - DNA, 120 bp, Artificial Sequence
  ENSG00000131183_7 (sequence is synthesized)
tcactcgacttgtggtggcctccttcaacatccatggtggccgtgatgctcctgacctgctcaagatcatcacagagcccttcacgaagctcatcatccagctggacgagtctgtgataa

SEQ ID NO: 291476 - DNA, 120 bp, Artificial Sequence
  ENSG00000131183_8 (sequence is synthesized)
ccagcattgccactggtgatgagtccctgaggaaccacagtctcatccagatctggtgccacccagactccttacaggctcccacctccatgtccagagcagaggccaactccagccaga

SEQ ID NO: 291477 - DNA, 120 bp, Artificial Sequence
  ENSG00000131183_9 (sequence is synthesized)
cccttggaaatgccaccatggagaaatgcaaccacatctttgtggacactggcctaccggacctggctgtggggctcatcctgctggcaggatccctggtgctgctgtgcacctgcctca

SEQ ID NO: 291478 - DNA, 120 bp, Artificial Sequence
  ENSG00000131183_10 (sequence is synthesized)
tcatcaatacggacttccctgcccccttcacctgggtcacaggctactttgccatggtggtgggcgccagcatgaccttcgtggtccagagcagttctgtgttcacctcggccatcaccc

SEQ ID NO: 291479 - DNA, 120 bp, Artificial Sequence
  ENSG00000131183_11 (sequence is synthesized)
cactcatcggtcttggtgtgatcagcattgagagggcctacccgctcacactgggttccaacatcggcaccaccaccacggccatcctggctgccctggccagccccagggagaagctgt

SEQ ID NO: 291480 - DNA, 120 bp, Artificial Sequence
  ENSG00000131183_12 (sequence is synthesized)
ccagcgctttccagattgccctctgtcacttcttcttcaacatctcgggtatccttctgtggtacccggtgccctgcacacgcctgcccatccgcatggccaaggcgctggggaaacgca

SEQ ID NO: 291481 - DNA, 120 bp, Artificial Sequence
  ENSG00000131183_13 (sequence is synthesized)
cggccaagtaccgctggtttgccgtcctctatctccttgtctgcttcctgctgctgccctcactggtgtttggcatctccatggcaggctggcaggtcatggtaggtgtgggcacgccct

SEQ ID NO: 291482 - DNA, 120 bp, Artificial Sequence
  ENSG00000131183_14 (sequence is synthesized)
tcggggccctgctggccttcgtggtgctcatcaatgtcctgcagagtcggagtcccgggcacctgcccaagtggttacagacatgggacttcctgcctcgctggatgcactccctgaagc

SEQ ID NO: 291483 - DNA, 120 bp, Artificial Sequence
  ENSG00000131183_15 (sequence is synthesized)
ccctggaccacctcatcacccgcgccaccctatgctgtgccaggcctgagccccgctcacccccgctgccccccagggtcttcctggaggagctaccccctgccacaccctccccccgtc

SEQ ID NO: 291484 - DNA, 120 bp, Artificial Sequence
  ENSG00000131183_16 (sequence is synthesized)
ttgcactgcctgctcaccacaatgccacccgcctctaggctgtgggcccagactacagcctggaatggggaaggcctggggtggaaaggcaggggagggagggtgtgtgtaggtatgtgc

SEQ ID NO: 291485 - DNA, 120 bp, Artificial Sequence
  ENSG00000131183_17 (sequence is synthesized)
atgtgcctgtgccaccctgggtgccagtctctccttctgtagctccgcaaagctctgggcttgtgtgagagtgtcggtgtgtgtgcatgtgtgggggtgagtctgcatgtgcacctgtca

SEQ ID NO: 291486 - DNA, 120 bp, Artificial Sequence
  ENSG00000131183_18 (sequence is synthesized)
tgtgtagaagcttgtatttgtgtacaggtgtgccagcccatgcaggtgtacacagacacacctgtgggaggctgtgtgcaggctgcaggatatctgggtatgatttcaggtcctctgcac

SEQ ID NO: 291487 - DNA, 120 bp, Artificial Sequence
  ENSG00000131183_19 (sequence is synthesized)
gtgtacacatgactaggataggcaggagtaagggtgggtctgggtatatgactgtgcagctgtttgtgcatagatgttggtgcctgcgttactgaatttgcacacctccttgccaccttc

SEQ ID NO: 291488 - DNA, 120 bp, Artificial Sequence
  ENSG00000131183_20 (sequence is synthesized)
cttcctccaagataccatctcctcatcctaacccaggtcttcggcaccaccacaattaattcccttcccaacacttgcctgatggaaaaaaaacaaaggaattaaaactctcctcaggca

SEQ ID NO: 291489 - DNA, 120 bp, Artificial Sequence
  ENSG00000131183_21 (sequence is synthesized)
tcttcgcaaaaagcaagccatggaagacagctctgttcctcactgcccctgagctccctgccggccacctactgcagcttccggcagatctcaaccagcagcctccacgtcctcacttga

SEQ ID NO: 291490 - DNA, 120 bp, Artificial Sequence
  ENSG00000131183_22 (sequence is synthesized)
agtcatcctcacccaggttcactctggggaggccgcccttgggcctttctctacggctgcagctgacacttgtccagctggtttctcttcctcactctaccaggaaatgctttccttaaa

SEQ ID NO: 291491 - DNA, 120 bp, Artificial Sequence
  ENSG00000131183_23 (sequence is synthesized)
cgctttctgcagggcagggtctcatttcctcggcttggagagtagctggtgggtgggacccaagctctcactttcatcccctttctgggacagcgccccgaaggagtgtgactcacacag

SEQ ID NO: 291492 - DNA, 120 bp, Artificial Sequence
  ENSG00000131183_24 (sequence is synthesized)
cagtggatgtgcttggtcttgcaaagtgtgaagtgcgtcctggctcttcctgcccaaagacgggccacagagtctccccgtgctcccttccaacctgttcccattgacgccaactttcac

SEQ ID NO: 291493 - DNA, 120 bp, Artificial Sequence
  ENSG00000131183_25 (sequence is synthesized)
catgctggacctgaaccagcccgaaacagtctccagggaagctatgcaccagggagaggaggcaagtccaaggcctaccagatggggaaagcagcagcagcggcagttgagtgatcagac

SEQ ID NO: 291494 - DNA, 120 bp, Artificial Sequence
  ENSG00000131183_26 (sequence is synthesized)
acttgagtctcccgggaccctgacaccgtcctgggaatcaccttcttatgtggccacactgtggactgtcaactatacctgcctggattaaacaagcatcttttgaggacttgcaacctg

SEQ ID NO: 291495 - DNA, 120 bp, Artificial Sequence
  ENSG00000131183_27 (sequence is synthesized)
ggaggcagggattatcacgtccccattttacagacgaggagcactgagccccagagaagtgcagtggcttgcccaagtccatgtaattgaggtaggatacaaatcctggtagaatcctga

SEQ ID NO: 291496 - DNA, 120 bp, Artificial Sequence
  ENSG00000131183_28 (sequence is synthesized)
atctggaaaatagaacttggaagagacgatgtttcagggccttgcctgctctgtgctggggccaggcagctctgttgaagtccaggctctccaagagaggacaaagtcaaggaggccagg

SEQ ID NO: 291497 - DNA, 120 bp, Artificial Sequence
  ENSG00000131183_29 (sequence is synthesized)
gtgtggggcctcacaaaggtgtgacaacatggaacaaatattttgactgcctactaagggccacctaatatgctcaatgaaaccattatgggcaaagtagacccaataccaccctcgaga

SEQ ID NO: 291498 - DNA, 120 bp, Artificial Sequence
  ENSG00000131183_30 (sequence is synthesized)
ccttagcatctaatagggagacactgctcataattacaccaataaatagcagtgagtcggatttgcaccataaggaagaggaagaggaagaggcactacaaaagagggcctggagcagtt

SEQ ID NO: 291499 - DNA, 120 bp, Artificial Sequence
  ENSG00000131183_31 (sequence is synthesized)
caaaggggaattattctaggagcaaaggagtaactgacaagccaaggcactgactgaatgagggtccagaaactgacatcaatcctttagctgctggattttggcagtatctgctggggg

SEQ ID NO: 291500 - DNA, 120 bp, Artificial Sequence
  ENSG00000131183_32 (sequence is synthesized)
attcctgtgcgaggggtcagtggggaaaatgtggggagctcagggcagtagttatttaccaactggtctagaagtatttcaatatttgcatagccagcatagccacctcggggtgatctc

SEQ ID NO: 291501 - DNA, 120 bp, Artificial Sequence
  ENSG00000131183_33 (sequence is synthesized)
ggggcagggggcacatcacccctaagtggaaactttcctgctgcccagaccagatcggggttcctatcatctacccctgctggcctgacacaggacctgggagccagtgcccatctcagc

SEQ ID NO: 291502 - DNA, 120 bp, Artificial Sequence
  ENSG00000131183_34 (sequence is synthesized)
ttccggcggtgaggggggctgggggttgggggctcgtgcctgggggaggacagccccagatgccaggaaccccaggcgtgactgtgcactggctcgagcctgccttgcaatgtggcctcc

SEQ ID NO: 291503 - DNA, 120 bp, Artificial Sequence
  ENSG00000131187_0 (sequence is synthesized)
ctattgatctggactcctggataggcagctggaccaacggacggatgccatgagggctctgctgctcctggggttcctgctggtgagcttggagtcaacactttcgattccaccttggga

SEQ ID NO: 291504 - DNA, 120 bp, Artificial Sequence
  ENSG00000131187_1 (sequence is synthesized)
agcccccaaggagcataagtacaaagctgaagagcacacagtcgttctcactgtcaccggggagccctgccacttccccttccagtaccaccggcagctgtaccacaaatgtacccacaa

SEQ ID NO: 291505 - DNA, 120 bp, Artificial Sequence
  ENSG00000131187_2 (sequence is synthesized)
gggccggccaggccctcagccctggtgtgctaccacccccaactttgatcaggaccagcgatggggatactgtttggagcccaagaaagtgaaagaccactgcagcaaacacagcccctg

SEQ ID NO: 291506 - DNA, 120 bp, Artificial Sequence
  ENSG00000131187_3 (sequence is synthesized)
ccagaaaggagggacctgtgtgaacatgccaagcggcccccactgtctctgtccacaacacctcactggaaaccactgccagaaagagaagtgctttgagcctcagcttctccggttttt

SEQ ID NO: 291507 - DNA, 120 bp, Artificial Sequence
  ENSG00000131187_4 (sequence is synthesized)
ccacaagaatgagatatggtatagaactgagcaagcagctgtggccagatgccagtgcaagggtcctgatgcccactgccagcggctggccagccaggcctgccgcaccaacccgtgcct

SEQ ID NO: 291508 - DNA, 120 bp, Artificial Sequence
  ENSG00000131187_5 (sequence is synthesized)
ccatgggggtcgctgcctagaggtggagggccaccgcctgtgccactgcccggtgggctacaccggagccttctgcgacgtggacaccaaggcaagctgctatgatggccgcgggctcag

SEQ ID NO: 291509 - DNA, 120 bp, Artificial Sequence
  ENSG00000131187_6 (sequence is synthesized)
ctaccgcggcctggccaggaccacgctctcgggtgcgccctgtcagccgtgggcctcggaggccacctaccggaacgtgactgccgagcaagcgcggaactggggactgggcggccacgc

SEQ ID NO: 291510 - DNA, 120 bp, Artificial Sequence
  ENSG00000131187_7 (sequence is synthesized)
cttctgccggaacccggacaacgacatccgcccgtggtgcttcgtgctgaaccgcgaccggctgagctgggagtactgcgacctggcacagtgccagaccccaacccaggcggcgcctcc

SEQ ID NO: 291511 - DNA, 120 bp, Artificial Sequence
  ENSG00000131187_8 (sequence is synthesized)
gtcccctaggcttcatgtcccactcatgcccgcgcagccggcaccgccgaagcctcagcccacgacccggaccccgcctcagtcccagaccccgggagccttgccggcgaagcgggagca

SEQ ID NO: 291512 - DNA, 120 bp, Artificial Sequence
  ENSG00000131187_9 (sequence is synthesized)
gccgccttccctgaccaggaacggcccactgagctgcgggcagcggctccgcaagagtctgtcttcgatgacccgcgtcgttggcgggctggtggcgctacgcggggcgcacccctacat

SEQ ID NO: 291513 - DNA, 120 bp, Artificial Sequence
  ENSG00000131187_10 (sequence is synthesized)
cgccgcgctgtactggggccacagtttctgcgccggcagcctcatcgccccctgctgggtgctgacggccgctcactgcctgcaggaccggcccgcacccgaggatctgacggtggtgct

SEQ ID NO: 291514 - DNA, 120 bp, Artificial Sequence
  ENSG00000131187_11 (sequence is synthesized)
cggccaggaacgccgtaaccacagctgtgagccgtgccagacgttggccgtgcgctcctaccgcttgcacgaggccttctcgcccgtcagctaccagcacgacctggctctgttgcgcct

SEQ ID NO: 291515 - DNA, 120 bp, Artificial Sequence
  ENSG00000131187_12 (sequence is synthesized)
tcaggaggatgcggacggcagctgcgcgctcctgtcgccttacgttcagccggtgtgcctgccaagcggcgccgcgcgaccctccgagaccacgctctgccaggtggccggctggggcca

SEQ ID NO: 291516 - DNA, 120 bp, Artificial Sequence
  ENSG00000131187_13 (sequence is synthesized)
ccagttcgagggggcggaggaatatgccagcttcctgcaggaggcgcaggtaccgttcctctccctggagcgctgctcagccccggacgtgcacggatcctccatcctccccggcatgct

SEQ ID NO: 291517 - DNA, 120 bp, Artificial Sequence
  ENSG00000131187_14 (sequence is synthesized)
ctgcgcagggttcctcgagggcggcaccgatgcgtgccagggtgattccggaggcccgctggtgtgtgaggaccaagctgcagagcgccggctcaccctgcaaggcatcatcagctgggg

SEQ ID NO: 291518 - DNA, 120 bp, Artificial Sequence
  ENSG00000131187_15 (sequence is synthesized)
atcgggctgtggtgaccgcaacaagccaggcgtctacaccgatgtggcctactacctggcctggatccgggagcacaccgtttcctgattgctcagggactcatctttccctccttggtg

SEQ ID NO: 291519 - DNA, 120 bp, Artificial Sequence
  ENSG00000131187_16 (sequence is synthesized)
attccgcagtgagagagtggctggggcatggaaggcaagattgtgtcccattcccccagtgcggccagctccgcgccaggatggcgcaggaactcaataaagtgctttgaaaatgctgag

SEQ ID NO: 291520 - DNA, 120 bp, Artificial Sequence
  ENSG00000131187_17 (sequence is synthesized)
ccttctcccgccccacccttctttccacgcccctccggagctcccggggaggaagctggaacacgggattggggttcgggagcagggggcttccccagaacgcttgtggccaggtctgag

SEQ ID NO: 291521 - DNA, 120 bp, Artificial Sequence
  ENSG00000131187_18 (sequence is synthesized)
ccaggaaggagagctctctgggggggtctttaggcccaggggtggctcactgcgttccctccccaagcctgccgcaccaacccgtgcctccatgggggtcgctgcctagaggtggagggc

SEQ ID NO: 291522 - DNA, 120 bp, Artificial Sequence
  ENSG00000131187_19 (sequence is synthesized)
gcctccttgcctatgaaattgaattaatggcacctcctccccttcgggcttgctgcgagagaggaagggcatgagtgggtttacaagcgcctggagcagctttgtccatcgtccgggcgg

SEQ ID NO: 291523 - DNA, 120 bp, Artificial Sequence
  ENSG00000131187_20 (sequence is synthesized)
caagcgttgtcagatggggtgtgaagaaggcgctctgtgttcgcaggggcggaggaatatgccagcttcctgcaggaggcgcaggtaccgttcctctccctggagcgctgctcagccccg

SEQ ID NO: 291524 - DNA, 120 bp, Artificial Sequence
  ENSG00000131188_0 (sequence is synthesized)
ccgctttcgctgccactgtctgctcccccgggccgccgccgcctccccccgcaggcccggggctctgtccgctgggcccgcgctgctcgccccgagccaggagaacgagctcgaggagga

SEQ ID NO: 291525 - DNA, 120 bp, Artificial Sequence
  ENSG00000131188_1 (sequence is synthesized)
acgagctcgaggaggatgcctgggcccggtgcaaggttccccctctcacccgcagctgtggagaggaggaagcggaactagagatgcccatctggagtgagtgcaggaccaggtcccgcg

SEQ ID NO: 291526 - DNA, 120 bp, Artificial Sequence
  ENSG00000131188_2 (sequence is synthesized)
gccatgggaaggagcgggcgccgctgctgtcccccgccggcgcgcgcacgacttgagacctgccacgggcagcccccggccgcgggtccccgagtgacgctggcggcacctgagagtgtg

SEQ ID NO: 291527 - DNA, 120 bp, Artificial Sequence
  ENSG00000131188_3 (sequence is synthesized)
ggtccccgagtgacgctggcggcacctgagagtgtggcgcgggcccggggccacgcagcggagcccagtgtccagtgaagcgtctgaggacccgccgcccgtgccgccgccatggtgatg

SEQ ID NO: 291528 - DNA, 120 bp, Artificial Sequence
  ENSG00000131188_4 (sequence is synthesized)
tcccagggcacctacacgttcctcacgtgcttcgccggcttctggctcatctggggtctcatcgtcctgctctgctgcttctgcagcttcctgcgccgccgcctcaaacggcgccaggag

SEQ ID NO: 291529 - DNA, 120 bp, Artificial Sequence
  ENSG00000131188_5 (sequence is synthesized)
gagcgactgcgcgagcagaacctgcgcgccctagagctggagcccctcgaactcgagggcagtctggccgggagccccccgggcctggcgccgccgcagccaccaccacaccgtagccgc

SEQ ID NO: 291530 - DNA, 120 bp, Artificial Sequence
  ENSG00000131188_6 (sequence is synthesized)
cactcgcatccgcacgtgcacgtgcacccgctgctgcaccacgggcccgcgcagccgcacgcgcacgcgcacccacacccgcaccaccacgcgctcccgcacccgccgcctacgcacctg

SEQ ID NO: 291531 - DNA, 120 bp, Artificial Sequence
  ENSG00000131188_7 (sequence is synthesized)
tcggtgccgccacggccctggagctacccgcgccaagcggaatcggacatgtccaaaccaccgtgttacgaagaggcggtgctgatggcagagccgccgccgccctatagcgaggtgctc

SEQ ID NO: 291532 - DNA, 120 bp, Artificial Sequence
  ENSG00000131188_8 (sequence is synthesized)
acggacacgcgcggcctctaccgcaagatcgtcacgcccttcctgagtcgccgcgacagcgcggagaagcaggagcagccgcctcccagctacaagccgctcttcctggaccggggctac

SEQ ID NO: 291533 - DNA, 120 bp, Artificial Sequence
  ENSG00000131188_9 (sequence is synthesized)
acctcggcgctgcacctgcccagcgcccctcggcccgcgccgccctgcccagccctctgcctgcaggccgaccgtggccgccgggtcttccccagctggaccgactcagagctcagcagc

SEQ ID NO: 291534 - DNA, 120 bp, Artificial Sequence
  ENSG00000131188_10 (sequence is synthesized)
cgcgagcccctggagcacggagcttggcgtctgccggtctccatccccttgttcgggaggactacagccgtatagaggggcgcccggcgccccgggccccaccggcggactcctggcctg

SEQ ID NO: 291535 - DNA, 120 bp, Artificial Sequence
  ENSG00000131188_11 (sequence is synthesized)
actgcggggctttttaaatgcttccctggactgcggggaggggcggggggagggagggatttcttatcccgtttgttacattttgaggataataaaggtgtgtgatctggtttggtacaa

SEQ ID NO: 291536 - DNA, 120 bp, Artificial Sequence
  ENSG00000131188_12 (sequence is synthesized)
acggggacctggacatgtgtgtgctctccgagctgagctgtgtgcgcgtccgggttctcgacctcagctgcctggctgtgcatccagcgtgcacgaccggtgtggcctgggctccagcct

SEQ ID NO: 291537 - DNA, 120 bp, Artificial Sequence
  ENSG00000131196_0 (sequence is synthesized)
gagccgccgggccggcggggaggcgggggaggtgttttccagctttaaaaaggcaggaggcagagcgcggccctgcgtcagagcgagactcagaggctccgaactcgccggcggagtcgc

SEQ ID NO: 291538 - DNA, 120 bp, Artificial Sequence
  ENSG00000131196_1 (sequence is synthesized)
gagactcagaggctccgaactcgccggcggagtcgccgcgccagatcccagcagcagggcgcgggcaccggggcgcgggcagggctcggagccaccgcgcaggtcctagggccgcggccg

SEQ ID NO: 291539 - DNA, 120 bp, Artificial Sequence
  ENSG00000131196_2 (sequence is synthesized)
gatgactttcctccggggcgcgcggcgctgagcccggggcgagggctgtcttcccggagacccgaccccggcagcgcggggcggccgcttctcctgtgcctccgcccgccgctccactcc

SEQ ID NO: 291540 - DNA, 120 bp, Artificial Sequence
  ENSG00000131196_3 (sequence is synthesized)
gccgcgcggatgccaagcaccagctttccagtcccttccaagtttccacttggccctgcggctgcggtcttcgggagaggagaaactttggggcccgcgccgcgcgccggcggcaccatg

SEQ ID NO: 291541 - DNA, 120 bp, Artificial Sequence
  ENSG00000131196_4 (sequence is synthesized)
aagtcagcggaggaagaacactatggctatgcatcctccaacgtcagccccgccctgccgctccccacggcgcactccaccctgccggccccgtgccacaaccttcagacctccacaccg

SEQ ID NO: 291542 - DNA, 120 bp, Artificial Sequence
  ENSG00000131196_5 (sequence is synthesized)
ggcatcatcccgccggcggatcacccctcggggtacggagcagctttggacggtgggcccgcgggctacttcctctcctccggccacaccaggcctgatggggcccctgccctggagagt

SEQ ID NO: 291543 - DNA, 120 bp, Artificial Sequence
  ENSG00000131196_6 (sequence is synthesized)
cctcgcatcgagataacctcgtgcttgggcctgtaccacaacaataaccagtttttccacgatgtggaggtggaagacgtcctccctagctccaaacggtccccctccacggccacgctg

SEQ ID NO: 291544 - DNA, 120 bp, Artificial Sequence
  ENSG00000131196_7 (sequence is synthesized)
agtctgcccagcctggaggcctacagagacccctcgtgcctgagcccggccagcagcctgtcctcccggagctgcaactcagaggcctcctcctacgagtccaactactcgtacccgtac

SEQ ID NO: 291545 - DNA, 120 bp, Artificial Sequence
  ENSG00000131196_8 (sequence is synthesized)
gcgtccccccagacgtcgccatggcagtctccctgcgtgtctcccaagaccacggaccccgaggagggctttccccgcgggctgggggcctgcacactgctgggttccccgcggcactcc

SEQ ID NO: 291546 - DNA, 120 bp, Artificial Sequence
  ENSG00000131196_9 (sequence is synthesized)
ccctccacctcgccccgcgccagcgtcactgaggagagctggctgggtgcccgctcctccagacccgcgtccccttgcaacaagaggaagtacagcctcaacggccggcagccgccctac

SEQ ID NO: 291547 - DNA, 120 bp, Artificial Sequence
  ENSG00000131196_10 (sequence is synthesized)
tcaccccaccactcgcccacgccgtccccgcacggctccccgcgggtcagcgtgaccgacgactcgtggttgggcaacaccacccagtacaccagctcggccatcgtggccgccatcaac

SEQ ID NO: 291548 - DNA, 120 bp, Artificial Sequence
  ENSG00000131196_11 (sequence is synthesized)
gcgctgaccaccgacagcagcctggacctgggagatggcgtccctgtcaagtcccgcaagaccaccctggagcagccgccctcagtggcgctcaaggtggagcccgtcggggaggacctg

SEQ ID NO: 291549 - DNA, 120 bp, Artificial Sequence
  ENSG00000131196_12 (sequence is synthesized)
ggcagccccccgcccccggccgacttcgcgcccgaagactactcctctttccagcacatcaggaagggcggcttctgcgaccagtacctggcggtgccgcagcacccctaccagtgggcg

SEQ ID NO: 291550 - DNA, 120 bp, Artificial Sequence
  ENSG00000131196_13 (sequence is synthesized)
aagcccaagcccctgtcccctacgtcctacatgagcccgaccctgcccgccctggactggcagctgccgtcccactcaggcccgtatgagcttcggattgaggtgcagcccaagtcccac

SEQ ID NO: 291551 - DNA, 120 bp, Artificial Sequence
  ENSG00000131196_14 (sequence is synthesized)
caccgagcccactacgagacggagggcagccggggggccgtgaaggcgtcggccggaggacaccccatcgtgcagctgcatggctacttggagaatgagccgctgatgctgcagcttttc

SEQ ID NO: 291552 - DNA, 120 bp, Artificial Sequence
  ENSG00000131196_15 (sequence is synthesized)
attgggacggcggacgaccgcctgctgcgcccgcacgccttctaccaggtgcaccgcatcacagggaagaccgtgtccaccaccagccacgaggccatcctctccaacaccaaagtcctg

SEQ ID NO: 291553 - DNA, 120 bp, Artificial Sequence
  ENSG00000131196_16 (sequence is synthesized)
gagatcccactcctgccggagaacagcatgcgagccgtcattgactgtgccggaatcctgaaactcagaaactccgacattgaacttcggaaaggagagacggacatcgggaggaagaac

SEQ ID NO: 291554 - DNA, 120 bp, Artificial Sequence
  ENSG00000131196_17 (sequence is synthesized)
acacgggtacggctggtgttccgcgttcacgtcccgcaacccagcggccgcacgctgtccctgcaggtggcctccaaccccatcgaatgctcccagcgctcagctcaggagctgcctctg

SEQ ID NO: 291555 - DNA, 120 bp, Artificial Sequence
  ENSG00000131196_18 (sequence is synthesized)
gtggagaagcagagcacggacagctatccggtcgtgggcgggaagaagatggtcctgtctggccacaacttcctgcaggactccaaggtcattttcgtggagaaagccccagatggccac

SEQ ID NO: 291556 - DNA, 120 bp, Artificial Sequence
  ENSG00000131196_19 (sequence is synthesized)
atcagaggataaccagccccgttcacgtcagtttctacgtctgcaacgggaagagaaagcgaagccagtaccagcgtttcacctaccttcccgccaacgttccaattataaaaacagaac

SEQ ID NO: 291557 - DNA, 120 bp, Artificial Sequence
  ENSG00000131196_20 (sequence is synthesized)
ccactgatgattatgagcctgctccaacctgtggaccggtgagccaggggttaagtcctctcccaagaccatactacagccagcagctcgcgatgccacccgaccccagctcctgcctcg

SEQ ID NO: 291558 - DNA, 120 bp, Artificial Sequence
  ENSG00000131196_21 (sequence is synthesized)
tggccggcttcccgccctgtccgcagagaagcaccctgatgccagcggcccctggcgtgagccccaagctccacgacctttctcccgctgcctacaccaagggcgttgccagcccgggcc

SEQ ID NO: 291559 - DNA, 120 bp, Artificial Sequence
  ENSG00000131196_22 (sequence is synthesized)
ctcggactcccgcagccggccggagaggcccccgccgtccaggacgtgcccaggccagtggccacgcaccccggctcgcccgggcagccacccccggccctgctgccacagcagtaaatg

SEQ ID NO: 291560 - DNA, 120 bp, Artificial Sequence
  ENSG00000131196_23 (sequence is synthesized)
agtaaatgaaataatacgaaatgacctctccagcacgagcacccactcctagttgccacattggagcactcagttcagcaggggtatgctgacttcagcagacaaagacttttgaataaa

SEQ ID NO: 291561 - DNA, 120 bp, Artificial Sequence
  ENSG00000131196_24 (sequence is synthesized)
taaactgaactcacacctggtaccactcagaacctccaactgactgaatgccaggagctgaacattaatatgtgcaaagattggctctccaacaagaaggaaagcagggaggaagggaga

SEQ ID NO: 291562 - DNA, 120 bp, Artificial Sequence
  ENSG00000131196_25 (sequence is synthesized)
ccactgtgtcacctggaggagaagtcatctcatgacaacagaagggaggtggccgggctgagcacgggagacccaccgtgcaggggcctttcatgggaacggcccacacgcagtttgacc

SEQ ID NO: 291563 - DNA, 120 bp, Artificial Sequence
  ENSG00000131196_26 (sequence is synthesized)
ccacgcccagcccttctggcacccctggggttcaatactggaagtgccttatttaaccagaccatcagggcatcatagaattgagcattgaatttgctactgtaggagtatttttaggag

SEQ ID NO: 291564 - DNA, 120 bp, Artificial Sequence
  ENSG00000131196_27 (sequence is synthesized)
cagaaactgcaaacacatttcattgtgaggttttaccctctgtatgaatgaagagaacgctggaaggctgcgagaggactctagtatgagtctccaacatttggaacgtttcctgggctg

SEQ ID NO: 291565 - DNA, 120 bp, Artificial Sequence
  ENSG00000131196_28 (sequence is synthesized)
tcacgtacactcctgctgccttacacagtgcattttagaatcttccagtctgtcatctcagctcttttgtaacatgcttcccttgtctgcgcggttgaaaccgtaggcttgttcatagtc

SEQ ID NO: 291566 - DNA, 120 bp, Artificial Sequence
  ENSG00000131196_29 (sequence is synthesized)
gcatgctcgcatctttgtttttaatctggcttcgaacatagcacaagtaacttgaatagcacatcaataggttactggacaaaagcagaaaaacctgttacaggatagcctgcatttgca

SEQ ID NO: 291567 - DNA, 120 bp, Artificial Sequence
  ENSG00000131196_30 (sequence is synthesized)
tgtgtgtacatatctaggcatctatttatgtataaataataacagagccgacgtgtcctcgcccaggagggcttccctgtcagcaataaccggcatccgttttggaacctgcgtctgggg

SEQ ID NO: 291568 - DNA, 120 bp, Artificial Sequence
  ENSG00000131196_31 (sequence is synthesized)
ctccagtcgctgctcttgctggcgtccatcgccgcctcggacggccgtgcattttctcgtctcacgcagttcgaggaggaccctagaaagccaggagctgtgattgacagtagctgtagg

SEQ ID NO: 291569 - DNA, 120 bp, Artificial Sequence
  ENSG00000131196_32 (sequence is synthesized)
ttaccagacggcaacattagaaagtgattgtaaataacatgcaacctaagtgtaatatatttgttcagttataagatgattgtttcacagaagccttaccactctctgcttcatctaaga

SEQ ID NO: 291570 - DNA, 120 bp, Artificial Sequence
  ENSG00000131196_33 (sequence is synthesized)
aaaccaataccaaaaacgccactttaatgctcagccctgcgttgtgtgttttcagatgagttactgttaacaggtaggtttgtgtaggccttgctgggcactctgtacaattagttgctt

SEQ ID NO: 291571 - DNA, 120 bp, Artificial Sequence
  ENSG00000131196_34 (sequence is synthesized)
attacgtatgattactcacagcgatctattgttccatataaccaaaaagcatggtttattcattgaaacacggttgacctgaactcgtgccttaggaattaatgcccccttatggaacct

SEQ ID NO: 291572 - DNA, 120 bp, Artificial Sequence
  ENSG00000131196_35 (sequence is synthesized)
gcctgaattgcacctgcgggtggaggctccggctgtgaagtcactgaacagaacgtcgctgatggagaaagggctcccgcagaaggaacggcctgtaccgtgcgctccggcacaatcgcg

SEQ ID NO: 291573 - DNA, 120 bp, Artificial Sequence
  ENSG00000131196_36 (sequence is synthesized)
tctcttgtgtctcactcacggaaagaaacaacctgaaggccatcccgtcggtctgcacgtaaccgtgaagacgtgtggccgcgtcccacctgcggctgggtaccctgcacccggcactgt

SEQ ID NO: 291574 - DNA, 120 bp, Artificial Sequence
  ENSG00000131196_37 (sequence is synthesized)
aggagtcacgtgcagcctttctcaggggactgtcattgaaaaggaaacgtttgatgtctgtgtcagctgtctttgtagttaggaaatagatccaataaagccgtatttttttgctggaca

SEQ ID NO: 291575 - DNA, 120 bp, Artificial Sequence
  ENSG00000131196_38 (sequence is synthesized)
cagcgccgggagaaccgaacccctggcggccgcgaccccggctcccgccccggccccggcccgacccgccatgacggggctggaggaccaggagttcgacttcgagttcctcttcgagtt

SEQ ID NO: 291576 - DNA, 120 bp, Artificial Sequence
  ENSG00000131196_39 (sequence is synthesized)
ccctctcctccactcccgcctgccacccaagagccgacctgcctgcagccctgcagcccagcgtgcccgcccgccacgggccgcccgcagcacctgccgtccacggtccgcagggacgag

SEQ ID NO: 291577 - DNA, 120 bp, Artificial Sequence
  ENSG00000131196_40 (sequence is synthesized)
tctccgactgccgggccacggctgctgccagaggtgcatgaggacggtagtcctaatttggcccctattcctgtaacggtcaagcgagagcctgaagagttggaccagttgtacctggat

SEQ ID NO: 291578 - DNA, 120 bp, Artificial Sequence
  ENSG00000131196_41 (sequence is synthesized)
catgagcgcgtggggtgctttttctaaagacgcagaaacgacgtcgccgtaaagcagcgtggcgtgttgcacatttaactgtgtgatgtcccgttagtgagaccgagccatcgatgccct

SEQ ID NO: 291579 - DNA, 120 bp, Artificial Sequence
  ENSG00000131196_42 (sequence is synthesized)
gaaaaggaaaggaaaagggaagcttcggatgcattttccttgatccctgttgggggtggggggcgggggttgcatactcagatagtcacggttattttgcttcttgcgaatgtataacag

SEQ ID NO: 291580 - DNA, 120 bp, Artificial Sequence
  ENSG00000131196_43 (sequence is synthesized)
ccaaggggaaaacatggctcttctgctccaaaaaactgagggggtcctggtgtgcatttgcaccctaaagctgcttacggtgaaaaggcaaataggtatagctattttgcaggcaccttt

SEQ ID NO: 291581 - DNA, 120 bp, Artificial Sequence
  ENSG00000131196_44 (sequence is synthesized)
aggaataaactttgcttttaagcctgtagtcctgatgtggtctttaaggatggtgaatgagctttgtgctgggcggacgtccccgagacacttctccaggggtaacttcatctcctggga

SEQ ID NO: 291582 - DNA, 120 bp, Artificial Sequence
  ENSG00000131196_45 (sequence is synthesized)
ccacgggcatccaggctggggcaccttctcctcaacctgcctgcccctcacccgccgtgggaatggctccttttcactcatacaaaaaaaaaaaaaaatcatcttacctttttaaccttt

SEQ ID NO: 291583 - DNA, 120 bp, Artificial Sequence
  ENSG00000131196_46 (sequence is synthesized)
agggtgttttcttaaagaaaataccatccagtttgtttcttcagtccctgaaccagtagaagagaaaggcgtcccccacgccatccccggcttcctttgtgggtacaggccactcccccc

SEQ ID NO: 291584 - DNA, 120 bp, Artificial Sequence
  ENSG00000131196_47 (sequence is synthesized)
agctcggagaggacagaattagcagtcatcctgaattttactgtattttgtgggtacaggccactccccacagctcggaggggacagttagcggtcatcctgaattttactgtattttgg

SEQ ID NO: 291585 - DNA, 120 bp, Artificial Sequence
  ENSG00000131196_48 (sequence is synthesized)
gtaagcttagctaacatcaataatctttttatattgctttttttctaaaaactgcagagattcctgtcatctgagagggaaattacacactgggcgctaattgcaaaagcagctgcgttc

SEQ ID NO: 291586 - DNA, 120 bp, Artificial Sequence
  ENSG00000131196_49 (sequence is synthesized)
tcttagtaaaatcagggtgttttggaaggtttccattttctctgaatgtaaacagcatttgtaatagaccagatcctaaggaagcccttgaatccccacgttcacaccaaactgttggga

SEQ ID NO: 291587 - DNA, 120 bp, Artificial Sequence
  ENSG00000131196_50 (sequence is synthesized)
ctccttgtttttatcaggcaagctctggaaaggcctctcaagatgtggaaaatggggttttgctgtaaagtcgctgtaccctaagagtgtctgtgagacagagctgcaggggtgatgtgc

SEQ ID NO: 291588 - DNA, 120 bp, Artificial Sequence
  ENSG00000131196_51 (sequence is synthesized)
agcccccagcccagccctcgcggggaagagcctcacgctctgtgacccccaggattgtggggagggcctcatgctctgggacccccgggattgtggggaagagcctcatgctctgggacc

SEQ ID NO: 291589 - DNA, 120 bp, Artificial Sequence
  ENSG00000131196_52 (sequence is synthesized)
cccgggattgtggggaagggcctcacgctctgggacccccaggattgtggggaagagcctcacgctctgggacccccgggattgtggggaagagcctcacgctctgggacccccgggatt

SEQ ID NO: 291590 - DNA, 120 bp, Artificial Sequence
  ENSG00000131196_53 (sequence is synthesized)
gtggggaagggcctcacgctctggacccccctggggtttacgtggtctgtgccgcccacacttagtgagtccagcccattcttggaacaaagtacaatatatcttacagaagaaaatatt

SEQ ID NO: 291591 - DNA, 120 bp, Artificial Sequence
  ENSG00000131196_54 (sequence is synthesized)
ttatctttttctgaaaatataatgattgagtcctaattaaacttcaagcatggttgaccagaaattgaatgttttaaagaaaacctaggccttatagagaaggattgctttccagagcag

SEQ ID NO: 291592 - DNA, 120 bp, Artificial Sequence
  ENSG00000131196_55 (sequence is synthesized)
tgcattaatttttttcttatttgctcagcatgcggcagtccccaccgtgggtttgagcagcactgactttagcacagatcacgtatctcagaggcagaaggggcgtgcggggagcgtgcc

SEQ ID NO: 291593 - DNA, 120 bp, Artificial Sequence
  ENSG00000131196_56 (sequence is synthesized)
tgcccttcacaggtgggaggtggcggcccccaggaccgtggccacagcatgaagccggtggggctgagccgctcctgctacctccagtccacaccccacctggcagccggccgtcctgtc

SEQ ID NO: 291594 - DNA, 120 bp, Artificial Sequence
  ENSG00000131196_57 (sequence is synthesized)
ctaccagccacactcctgcctcgattggccccggctcccctctcagcattgtgcccagcgtggacatctctcctgcaccccctgcccagtgtctcggctgcaccctccaccccccatctg

SEQ ID NO: 291595 - DNA, 120 bp, Artificial Sequence
  ENSG00000131196_58 (sequence is synthesized)
ctccagcatggctcaacgcaggccaggttccccaggctcaccctgggcaccagccttcgcccgttctccctctctttgcctccgtcgtctcttctctcctggacgtagcaccatagtccc

SEQ ID NO: 291596 - DNA, 120 bp, Artificial Sequence
  ENSG00000131196_59 (sequence is synthesized)
tgggtgaccatcccaggtccccacaagcacactgaccagccccaccagcccccaggggctccccggctccctgtcaccccacctggtcctgggggctgcgaccgcaacctgcaccagact

SEQ ID NO: 291597 - DNA, 120 bp, Artificial Sequence
  ENSG00000131196_60 (sequence is synthesized)
gtgagcccctcaggcagagcccccaggctgccgcagggcgagatccccagtgttgacgctgggcctacctcgaggccactgtcagtgtggttgttaaataaataatgaatagaaaccagc

SEQ ID NO: 291598 - DNA, 120 bp, Artificial Sequence
  ENSG00000131196_61 (sequence is synthesized)
cagggagccatcaggaagggtgctggggcctggggcccgtcgtgctgtgtgtgtgcaaacgcagtgtggcgtcccctgatcaggagtgggagctgcgcgctgcccggttccaggttaatg

SEQ ID NO: 291599 - DNA, 120 bp, Artificial Sequence
  ENSG00000131196_62 (sequence is synthesized)
cctaaaactcagtgcccaggtccattgggataacaaggcattttctaatctgatttacaaagacaccagtatgacatggcagagaaataaaaagggggcagggcagggggacacaggcct

SEQ ID NO: 291600 - DNA, 120 bp, Artificial Sequence
  ENSG00000131196_63 (sequence is synthesized)
cgaacccgccgcaggttttctctgcgttccggtgactcccggcggtctgtgctctgggtgctgagcaggtgttttctgttctctcgccagctgcatggctacttggagaatgagccgctg

SEQ ID NO: 291601 - DNA, 120 bp, Artificial Sequence
  ENSG00000131196_64 (sequence is synthesized)
aaataaaaatcaggaagagcctgagagggaggctcaggcgacactggtgctgacaccacagaagtgctggtgtggacctgtgggtcgcttggttcgtggagagacagccacagcatcttc

SEQ ID NO: 291602 - DNA, 120 bp, Artificial Sequence
  ENSG00000131196_65 (sequence is synthesized)
ccagcatcgcggccggcacctggcacctgcactttggccgtcagagacgtgctggtaccgtgctacggacgagggcggtcactctggcgaccccagctctctgccgaggcagccaggcac

SEQ ID NO: 291603 - DNA, 120 bp, Artificial Sequence
  ENSG00000131196_66 (sequence is synthesized)
ggacccacctgtgcacggtcaccgggacggggcttatggggtgtggcacggagcagaggctctgcgtggcccgtgtctgcatccggctgtgggtttttgtgtgagccgacagctgtgctg

SEQ ID NO: 291604 - DNA, 120 bp, Artificial Sequence
  ENSG00000131196_67 (sequence is synthesized)
ctgaagggaagaggtggatgtttatttctggggccgccggggccactgcactcacatcgctgctgatactcagggagcccacgggctggggacgcagaggagggcaagacgcatttgctg

SEQ ID NO: 291605 - DNA, 120 bp, Artificial Sequence
  ENSG00000131196_68 (sequence is synthesized)
aggacagcggccgtccctcggcgcggggctggtctgccacgggcgcctccccgtgtcccctgggccgccgcacggcctctgccacggtcggccctttcagtccctcagaagcacttgggt

SEQ ID NO: 291606 - DNA, 120 bp, Artificial Sequence
  ENSG00000131196_69 (sequence is synthesized)
ttaaagtctccatgtcattaaaacaacgagcaggtagacgaggcggccggagcgtgtccgccgcagtctgggctgtgaacgggcccctcgcccgcccctcctgagccggagctgctccgg

SEQ ID NO: 291607 - DNA, 120 bp, Artificial Sequence
  ENSG00000131203_0 (sequence is synthesized)
actgaggggcaccagaggagcagactacaagaatggcacacgctatggaaaactcctggacaatcagtaaagagtaccatattgatgaagaagtgggctttgctctgccaaatccacagg

SEQ ID NO: 291608 - DNA, 120 bp, Artificial Sequence
  ENSG00000131203_1 (sequence is synthesized)
aaaatctacctgatttttataatgactggatgttcattgctaaacatctgcctgatctcatagagtctggccagcttcgagaaagagttgagaagttaaacatgctcagcattgatcatc

SEQ ID NO: 291609 - DNA, 120 bp, Artificial Sequence
  ENSG00000131203_2 (sequence is synthesized)
tcacagaccacaagtcacagcgccttgcacgtctagttctgggatgcatcaccatggcatatgtgtggggcaaaggtcatggagatgtccgtaaggtcttgccaagaaatattgctgttc

SEQ ID NO: 291610 - DNA, 120 bp, Artificial Sequence
  ENSG00000131203_3 (sequence is synthesized)
cttactgccaactctccaagaaactggaactgcctcctattttggtttatgcagactgtgtcttggcaaactggaagaaaaaggatcctaataagcccctgacttatgagaacatggacg

SEQ ID NO: 291611 - DNA, 120 bp, Artificial Sequence
  ENSG00000131203_4 (sequence is synthesized)
ttttgttctcatttcgtgatggagactgcagtaaaggattcttcctggtctctctattggtggaaatagcagctgcttctgcaatcaaagtaattcctactgtattcaaggcaatgcaaa

SEQ ID NO: 291612 - DNA, 120 bp, Artificial Sequence
  ENSG00000131203_5 (sequence is synthesized)
tgcaagaacgggacactttgctaaaggcgctgttggaaatagcttcttgcttggagaaagcccttcaagtgtttcaccaaatccacgatcatgtgaacccaaaagcatttttcagtgttc

SEQ ID NO: 291613 - DNA, 120 bp, Artificial Sequence
  ENSG00000131203_6 (sequence is synthesized)
ttcgcatatatttgtctggctggaaaggcaacccccagctatcagacggtctggtgtatgaagggttctgggaagacccaaaggagtttgcagggggcagtgcaggccaaagcagcgtct

SEQ ID NO: 291614 - DNA, 120 bp, Artificial Sequence
  ENSG00000131203_7 (sequence is synthesized)
acatgctgctcagttcctccaggacatgagaagatatatgccaccagctcacaggaacttcctgtgctcattagagtcaaatccctcagtccgtgagtttgtcctttcaaaaggtgatgc

SEQ ID NO: 291615 - DNA, 120 bp, Artificial Sequence
  ENSG00000131203_8 (sequence is synthesized)
tggcctgcgggaagcttatgacgcctgtgtgaaagctctggtctccctgaggagctaccatctgcaaatcgtgactaagtacatcctgattcctgcaagccagcagccaaaggagaataa

SEQ ID NO: 291616 - DNA, 120 bp, Artificial Sequence
  ENSG00000131203_9 (sequence is synthesized)
gacctctgaagacccttcaaaactggaagccaaaggaactggaggcactgatttaatgaatttcctgaagactgtaagaagtacaactgagaaatcccttttgaaggaaggttaatgtaa

SEQ ID NO: 291617 - DNA, 120 bp, Artificial Sequence
  ENSG00000131203_10 (sequence is synthesized)
cccaacaagagcacattttatcatagcagagacatctgtatgcattcctgtcattacccattgtaacagagccacaaactaatactatgcaatgttttaccaataatgcaatacaaaaga

SEQ ID NO: 291618 - DNA, 120 bp, Artificial Sequence
  ENSG00000131203_11 (sequence is synthesized)
cctcaaaatacctgtgcatttcttgtaggaaaacaacaaaaggtaattatgtgtaattatactagaagttttgtaatctgtatcttatcattggaataaaatgacattcaataaataaaa

SEQ ID NO: 291619 - DNA, 120 bp, Artificial Sequence
  ENSG00000131203_12 (sequence is synthesized)
aggacaaccaaaactgctctgctcttccgaaaattgcagtcagggaacctgggacccggcaagccagcagaaggaggaacgggcaacttggtttcttctttagcttccttgttctcatta

SEQ ID NO: 291620 - DNA, 120 bp, Artificial Sequence
  ENSG00000131203_13 (sequence is synthesized)
ttttctcctattaatctgctttgtcatttgattttcaatgaaccttcagagggcaaaaggaaagttttccctcagctccaacagttttggcccagtgaacaggacaaccaaaactgctct

SEQ ID NO: 291621 - DNA, 120 bp, Artificial Sequence
  ENSG00000131203_14 (sequence is synthesized)
gctcttccgaaaattgcagtcagggaacctgggacccggcaagccagcagaaggaacacagttggagactctggttattttaccaaggctttgactgaaatgccatattttcagatgtga

SEQ ID NO: 291622 - DNA, 120 bp, Artificial Sequence
  ENSG00000131203_15 (sequence is synthesized)
aaatttatatgtcaatttacgtaagcagagcaatcacttcggagcctaaactatactaagcatgagttaactttatccttaacaagtacaacatgggatcatttaattgggggtaaagga

SEQ ID NO: 291623 - DNA, 120 bp, Artificial Sequence
  ENSG00000131203_16 (sequence is synthesized)
tcaattatttatttttgtgtattacctaaaatataaaatctcagagccatatacttaaaatccaacttgaaacctctgtaggagataaaaattttcaataaaatctggctttggaactat

SEQ ID NO: 291624 - DNA, 120 bp, Artificial Sequence
  ENSG00000131203_17 (sequence is synthesized)
aaccaaaactgctctgctcttccgaaaattgcagtcagggaacctgggacccggcaagccagcagaaggagttaaggaaaatgtttgttctgttaagctttacagaaatggaacacagtt

SEQ ID NO: 291625 - DNA, 120 bp, Artificial Sequence
  ENSG00000131203_18 (sequence is synthesized)
ttcactttaggtattttatcttactaaaccattccactttctatgtggtaggtttcattatctccattttataagtaaagtcatctaaattcagaaagacagggtaaatgacttcagatt

SEQ ID NO: 291626 - DNA, 120 bp, Artificial Sequence
  ENSG00000131203_19 (sequence is synthesized)
ccacaggcggtgaagccagagttccaagctgggtctatttaacactaaggaacttccttgcctcccgctaaaaaccttagagaaactttccacatgggagggtggttttaagtcccgaaa

SEQ ID NO: 291627 - DNA, 120 bp, Artificial Sequence
  ENSG00000131203_20 (sequence is synthesized)
gaacaggacaaccaaaactgctctgctcttccgaaaattgcagtcagggaacctgggacccggcaagccagcagaaggagccattgactaatagttgagtataacacaggttgtgtttcc

SEQ ID NO: 291628 - DNA, 120 bp, Artificial Sequence
  ENSG00000131203_21 (sequence is synthesized)
gggctgctgaaacatgacactaatattttcaaagaactgtggaagcctaaaaggaagccaatgagaaataactaaatgagagtttaggactgcagccttcattttcattcaaagatttaa

SEQ ID NO: 291629 - DNA, 120 bp, Artificial Sequence
  ENSG00000131203_22 (sequence is synthesized)
aagtttccataaagtaaaatgttcttctccggccacctgttttcatagttctgtgttttccttcaggcctttctggcttcctatatggcagtaagaaaatgatgtgcttaatgattacaa

SEQ ID NO: 291630 - DNA, 120 bp, Artificial Sequence
  ENSG00000131203_23 (sequence is synthesized)
atttcatatggaatacgaactttcagtttgtacatatgatgcacagagatgcttttgtggttttattggttttcatattacaaacaaagaaactagaaaatgaaaccattccaaaagtgg

SEQ ID NO: 291631 - DNA, 120 bp, Artificial Sequence
  ENSG00000131233_0 (sequence is synthesized)
atggattttagttgatggatgactcactcactacattcaactgaactgaatctgctctataccagcaaagggacaaattcagaaaataaattgaagatggccatgctgtaacttctaaac

SEQ ID NO: 291632 - DNA, 120 bp, Artificial Sequence
  ENSG00000131233_1 (sequence is synthesized)
atggtttgcttctcagatttacctaaactaagaaaggtttgctttaagaaatagtgctcccttcagaatggaagaatttatctgcctcttatttgatgtggatcagagctaagatggctg

SEQ ID NO: 291633 - DNA, 120 bp, Artificial Sequence
  ENSG00000131233_2 (sequence is synthesized)
actaaataaacatgggggactggaatctccttggagatactctggaggaagttcacatccactccaccatgattggaaagatctggctcaccatcctgttcatatttcgaatgcttgttc

SEQ ID NO: 291634 - DNA, 120 bp, Artificial Sequence
  ENSG00000131233_3 (sequence is synthesized)
tgggtgtagcagctgaagatgtctggaatgatgagcagtctggcttcatctgcaatacagaacaaccaggctgcagaaatgtatgctacgaccaggcctttcctatctccctcattagat

SEQ ID NO: 291635 - DNA, 120 bp, Artificial Sequence
  ENSG00000131233_4 (sequence is synthesized)
actgggttctgcaggtgatatttgtgtcttcaccatccctggtctacatgggccatgcattgtaccgactgagagttcttgaggaagagaggcaaaggatgaaagctcagttaagagtag

SEQ ID NO: 291636 - DNA, 120 bp, Artificial Sequence
  ENSG00000131233_5 (sequence is synthesized)
aactggaggaggtagagtttgaaatgcctagggatcggaggagattggagcaagagctttgtcagctggagaaaaggaaactaaataaagctccactcagaggaaccttgctttgcactt

SEQ ID NO: 291637 - DNA, 120 bp, Artificial Sequence
  ENSG00000131233_6 (sequence is synthesized)
atgtgatacacattttcactcgctctgtggttgaagttggattcatgattggacagtaccttttatatggatttcacttagagccgctatttaagtgccatggccacccgtgtccaaata

SEQ ID NO: 291638 - DNA, 120 bp, Artificial Sequence
  ENSG00000131233_7 (sequence is synthesized)
taatcgactgttttgtctcaagaccaacagaaaagacaatattcctattatttatgcaatctatagccactatttcacttttcttaaacattcttgaaattttccacctaggttttaaaa

SEQ ID NO: 291639 - DNA, 120 bp, Artificial Sequence
  ENSG00000131233_8 (sequence is synthesized)
agattaaaagagggctttggggaaaatacaagttgaagaaggaacataatgaattccatgcaaacaaggcaaaacaaaatgtagccaaataccagagcacatctgcaaattcactgaagc

SEQ ID NO: 291640 - DNA, 120 bp, Artificial Sequence
  ENSG00000131233_9 (sequence is synthesized)
actcccttctgcccctgattataatctgttagtggaaaagcaaacacacactgcagtgtaccctagtttaaattcatcttctgtattccagccaaatcctgacaatcatagtgtaaatga

SEQ ID NO: 291641 - DNA, 120 bp, Artificial Sequence
  ENSG00000131233_10 (sequence is synthesized)
tgagaaatgcattttggatgaacaggaaactgtactttctaatgagatttccacacttagtactagttgtagtcattttcaacacatcagttcaaacaataacaaagacactcataaaat

SEQ ID NO: 291642 - DNA, 120 bp, Artificial Sequence
  ENSG00000131233_11 (sequence is synthesized)
atttggaaaagaacttaatggtaaccagttaatggaaaaaagagaaactgaaggcaaagacagcaaaaggaactactactctagaggtcaccgttctattccaggtgttgctatagatgg

SEQ ID NO: 291643 - DNA, 120 bp, Artificial Sequence
  ENSG00000131233_12 (sequence is synthesized)
agagaacaacatgaggcagtcaccccaaacagttttctccttgccagctaactgcgattggaaaccgcggtggcttagagctacatggggttcctctacagaacatgaaaaccgggggtc

SEQ ID NO: 291644 - DNA, 120 bp, Artificial Sequence
  ENSG00000131233_13 (sequence is synthesized)
acctcctaaaggtaacctcaagggccagttcagaaagggcacagtcagaacccttcctccttcacaaggagattctcaatcacttgacattccaaacactgctgattctttgggagggct

SEQ ID NO: 291645 - DNA, 120 bp, Artificial Sequence
  ENSG00000131233_14 (sequence is synthesized)
gtcctttgagccagggttggtcagaacctgtaataatcctgtttgtcctccaaatcacgtagtgtccctaacgaacaatctcattggtaggcgggttcccacagatcttcagatctaaac

SEQ ID NO: 291646 - DNA, 120 bp, Artificial Sequence
  ENSG00000131233_15 (sequence is synthesized)
agcggttggcttttagacattatatatattatcagagaagtagcctagtggtcgtggggcacagaaaaaatagataggggcagctctaaagaccagctgttaagacagacaactgcaaac

SEQ ID NO: 291647 - DNA, 120 bp, Artificial Sequence
  ENSG00000131233_16 (sequence is synthesized)
tcatttaagcaagagaaaaacagctctaattcgagattgtgaagcaacacttctaaattcaaagacatagagttgtcaaatcaggatttttttttttttaaatgatatcctttcgaatgt

SEQ ID NO: 291648 - DNA, 120 bp, Artificial Sequence
  ENSG00000131233_17 (sequence is synthesized)
aactgattttgggaaaatcacatgttcagaattgaggctaaatggtttgatcaggttttctctttgaagagaccacagccttaggaaatggttcttgatctatacaattccaccttggac

SEQ ID NO: 291649 - DNA, 120 bp, Artificial Sequence
  ENSG00000131233_18 (sequence is synthesized)
actgggttaattctgtttgcccctggaacacaatcacgtaagtttccttctagactggcatcctgatgtgtcttgagtataatcacatgttgctacctagtaaataaaatcttaagaaga

SEQ ID NO: 291650 - DNA, 120 bp, Artificial Sequence
  ENSG00000131233_19 (sequence is synthesized)
ggcaacagagggagactctgtctcaacaaacaaacaaacaaagaaaaaaccccacagctatctagggaaaaagtaaagcaaccagcatatagaagtgacatattgttatattttcaccat

SEQ ID NO: 291651 - DNA, 120 bp, Artificial Sequence
  ENSG00000131236_0 (sequence is synthesized)
gagattgctgggcggttcttgccggaagcggagagcggctgatcgcagtccggaggtgaggcggaactctgagcaggtggtccattatggctgacatgcaaaatctggtagaaagattgg

SEQ ID NO: 291652 - DNA, 120 bp, Artificial Sequence
  ENSG00000131236_1 (sequence is synthesized)
agagggcagtgggccgcctggaggcagtatctcatacctctgacatgcaccgtgggtatgcagacagtccttcaaaagcaggagcagctccatatgtgcaggcatttgactcgctgcttg

SEQ ID NO: 291653 - DNA, 120 bp, Artificial Sequence
  ENSG00000131236_2 (sequence is synthesized)
ctggtcctgtggcagagtacttgaagatcagtaaagagattgggggagacgtgcagaaacatgcggagatggtccacacaggtttgaagttggagcgagctctgttggttacagcttctc

SEQ ID NO: 291654 - DNA, 120 bp, Artificial Sequence
  ENSG00000131236_3 (sequence is synthesized)
agtgtcaacagccagcagaaaataagctttccgatttgttggcacccatctcagagcagatcaaagaagtgataacctttcgggagaagaaccgaggcagcaagttgtttaatcacctgt

SEQ ID NO: 291655 - DNA, 120 bp, Artificial Sequence
  ENSG00000131236_4 (sequence is synthesized)
cagctgtcagcgaaagtatccaggccctgggctgggtggctatggctcccaagcctggcccttatgtgaaagaaatgaatgatgccgccatgttttatacaaaccgagtcctcaaagagt

SEQ ID NO: 291656 - DNA, 120 bp, Artificial Sequence
  ENSG00000131236_5 (sequence is synthesized)
acaaagatgtggataagaagcatgtagactgggtcaaagcttatttaagtatatggacagagctgcaggcttacattaaggagttccataccaccggactggcctggagcaaaacggggc

SEQ ID NO: 291657 - DNA, 120 bp, Artificial Sequence
  ENSG00000131236_6 (sequence is synthesized)
ctgtggcaaaagaactgagcggactgccatctggaccctctgccggatcatgtcctcctccccctccaccatgcccccctcctcccccagtctctaccatttcatgctcatatgagtctg

SEQ ID NO: 291658 - DNA, 120 bp, Artificial Sequence
  ENSG00000131236_7 (sequence is synthesized)
cttcccgctcatcactgttcgcgcagattaatcagggggagagcattacacatgccctgaaacatgtatctgatgacatgaagactcacaagaaccctgccctgaaggctcagagtggtc

SEQ ID NO: 291659 - DNA, 120 bp, Artificial Sequence
  ENSG00000131236_8 (sequence is synthesized)
cagtacgcagtggccccaaaccattctctgcacctaaaccccaaaccagcccatcccccaaacgagccacaaagaaggagccagctgtacttgaactggagggcaagaagtggagagtgg

SEQ ID NO: 291660 - DNA, 120 bp, Artificial Sequence
  ENSG00000131236_9 (sequence is synthesized)
aaaatcaggaaaatgtttccaacctggtgattgaggacacagagctgaaacaggtggcttacatatacaagtgtgtcaacacgacattgcaaatcaagggcaaaattaactccattacag

SEQ ID NO: 291661 - DNA, 120 bp, Artificial Sequence
  ENSG00000131236_10 (sequence is synthesized)
atccatcaacaaaacagatggctgccatgcttacctgagcaagaattccctggattgtgaaatagtcagtgccaaatcttccgagatgaatgtcctcattcctacagaaggcggtgactt

SEQ ID NO: 291662 - DNA, 120 bp, Artificial Sequence
  ENSG00000131236_11 (sequence is synthesized)
taatgaattcccagttcctgagcagttcaagaccctatggaacgggcagaagttggtcaccacagtgacagaaattgctggataagcgaagtgccactgggttctttgccctcccttcac

SEQ ID NO: 291663 - DNA, 120 bp, Artificial Sequence
  ENSG00000131236_12 (sequence is synthesized)
accatgggataaatctgtatcaagacggttcttttctagatttcctctacctttttgctcttaaaactgcttctctgctctgagaagcacagctacctgccttcactgaaatatacctca

SEQ ID NO: 291664 - DNA, 120 bp, Artificial Sequence
  ENSG00000131236_13 (sequence is synthesized)
ggctgaaatttggggtgggatagcaggtcagttgatcttctgcaggaaggtgcagcttttccatatcagctcaaccacgccgccagtccattcttaaggaactgccgactaggactgatg

SEQ ID NO: 291665 - DNA, 120 bp, Artificial Sequence
  ENSG00000131236_14 (sequence is synthesized)
atgcattttagctttgagcttttgggggttattctaccaacaaacagtccattggaaagaaaacagtccctggaattaacagatcagaatgttcacactggttaatctttttttaacaat

SEQ ID NO: 291666 - DNA, 120 bp, Artificial Sequence
  ENSG00000131236_15 (sequence is synthesized)
gagcatgaaggtagcagaagctggtgtgtttccagatggttcttctaaccaaactaatttttcactgttgacaagcgaggcaagggttgcactggaccaaaggctgaggcttggccatct

SEQ ID NO: 291667 - DNA, 120 bp, Artificial Sequence
  ENSG00000131236_16 (sequence is synthesized)
agcattccatacaaaattgtttcctataagcattccttttattctctattctatcctgggtctgcctcaaccgtgagataggagagtctctggtactagctgctgtagcagtgcccttca

SEQ ID NO: 291668 - DNA, 120 bp, Artificial Sequence
  ENSG00000131236_17 (sequence is synthesized)
tccagggcagttaatggagtcttggaccctttctttctctgggatccctgcccagcaccttcctatagagatgactttaaaaggaaaaaaaaaaaaaaaaaaacccacatgatttcaagg

SEQ ID NO: 291669 - DNA, 120 bp, Artificial Sequence
  ENSG00000131236_18 (sequence is synthesized)
agtctggcattcctgaatccttcttccctgccaggtgcctgtcacctgtcttcactgcctccttttccctgtcatgctcatcagcttatggcttctgtctaagcacctgaacagaggact

SEQ ID NO: 291670 - DNA, 120 bp, Artificial Sequence
  ENSG00000131236_19 (sequence is synthesized)
gaaacctccactgcaggctggttttaggtcttgaattatgtaagaatcttgcacagcactgctaatgtaaatttcagttgtttttccctctaggacaaacacttaccaaaatatgcaact

SEQ ID NO: 291671 - DNA, 120 bp, Artificial Sequence
  ENSG00000131236_20 (sequence is synthesized)
tttttttggtgggaagagagattgtcctgtgatttctacccatttcctgaggcctgtggaaataaacctttatgtacttaaagttatacagaaaatagaataaagttaataccaaacttg

SEQ ID NO: 291672 - DNA, 120 bp, Artificial Sequence
  ENSG00000131236_21 (sequence is synthesized)
gcggagcgtggcctcgatcaccaccgagagctgacggccgcccggattcccgccctcagagaatcctggcccccagtcgttccaagaccctttacggactgcagcttaaaggaaccggcc

SEQ ID NO: 291673 - DNA, 120 bp, Artificial Sequence
  ENSG00000131236_22 (sequence is synthesized)
tctgccattgagaccaaactgacagaggaactggtcactcttctgttctttccagagaggagcttagccagggacttctgcccttcctgggcccgggcctcgggggcgattccgggtagg

SEQ ID NO: 291674 - DNA, 120 bp, Artificial Sequence
  ENSG00000131236_23 (sequence is synthesized)
taaagcggaacgagggcgtggcctctcttgtgagcccgccctccccgtgtcgctcccgccttgagggcggggctctttcccaagtgccctctgtgagagccgggccgctctctccggggc

SEQ ID NO: 291675 - DNA, 120 bp, Artificial Sequence
  ENSG00000131236_24 (sequence is synthesized)
gtggcgaagaggggcggagtcacgagcggggcggtgagacttcctgcccagtcgcgggccagcctagcgcttcagccggcggctcatttccggtgggggcgccgcgcccagtgagggccc

SEQ ID NO: 291676 - DNA, 120 bp, Artificial Sequence
  ENSG00000131236_25 (sequence is synthesized)
gggcattgtggagataatcaacagtaaggatgtcaaagttcaggtaactcgatattttggctccttctttttgtccctgaggaattaattcaaagagacatggtagacccacagatgttg

SEQ ID NO: 291677 - DNA, 120 bp, Artificial Sequence
  ENSG00000131236_26 (sequence is synthesized)
ctttggtgggaatctgattctacaaagtctgtaagctgagctgctttggacgtggcagaagaagggttggctcttcaagcaagttcttttcaggacccatcccaacccacccgagtatcc

SEQ ID NO: 291678 - DNA, 120 bp, Artificial Sequence
  ENSG00000131236_27 (sequence is synthesized)
agtgtcttgcgcatctgtgagcttttcatgtagttgctgagtcacgtgaaacaggaaaccttttcctgcgacttactgttgtccttcccaaccactgggactcagttctctttgtttact

SEQ ID NO: 291679 - DNA, 120 bp, Artificial Sequence
  ENSG00000131236_28 (sequence is synthesized)
ggtcgcgcggagattgctgggcggttcttgccggaagcggagagcggctgatcgcagtccggaggtgaggcggaactctgaggtggtccattatggctgacatgcaaaatctggtagaaa

SEQ ID NO: 291680 - DNA, 120 bp, Artificial Sequence
  ENSG00000131236_29 (sequence is synthesized)
ggaggtgaggcggaactctgaggcagatatcctccctttcctcctcggctgctgctcttactttgacaagccaggctaacattgaaggtggtccattatggctgacatgcaaaatctggt

SEQ ID NO: 291681 - DNA, 120 bp, Artificial Sequence
  ENSG00000131236_30 (sequence is synthesized)
ttgctgggcggttcttgccggaagcggagagcggctgatcgcagtccggaggcagatatcctccctttcctcctcggctgctgctcttactttgacaagccaggctaacattgaagcagg

SEQ ID NO: 291682 - DNA, 120 bp, Artificial Sequence
  ENSG00000131236_31 (sequence is synthesized)
ctacgcgcgtgtcatgaaccctgccgagagggccggggctgaggccctcaggccgacccggactcttgggcgcggtctcttgagcaggtggtccattatggctgacatgcaaaatctggt

SEQ ID NO: 291683 - DNA, 120 bp, Artificial Sequence
  ENSG00000131236_32 (sequence is synthesized)
caagagaacatctcaaaggctctggttttggctttgaattttctgttaaggatgtttaacatgacgatagcagctcaaaggtctggtatgaaggacaggaacaaggtagctgttgttctt

SEQ ID NO: 291684 - DNA, 120 bp, Artificial Sequence
  ENSG00000131238_0 (sequence is synthesized)
ccttctttcttccttcctctgtgcatgtttcttgcaaaggcagtacagggcagtggtgaagagcaacgactttggaaccaccaatttgctatctctgtgaccttgggcaccttactcagt

SEQ ID NO: 291685 - DNA, 120 bp, Artificial Sequence
  ENSG00000131238_1 (sequence is synthesized)
gccaattcgcagtgcctcagtgtcctcacctgtcagggggagaagtgcatacagcattgttatgaagagtgaattagttaaaggttgtaagaatagtgcctgatagcatctgatcagcac

SEQ ID NO: 291686 - DNA, 120 bp, Artificial Sequence
  ENSG00000131238_2 (sequence is synthesized)
tgaatatatgttagcaattattttgattcaccgcagagggcggtctacgagagcgcagagccccactcggccagcggggtctggcgggggacctgtcgcgctgaaagctccagggtaggg

SEQ ID NO: 291687 - DNA, 120 bp, Artificial Sequence
  ENSG00000131238_3 (sequence is synthesized)
ccgacgcccatcaggctgggcatccgttcgggatgcgcaggttgcgatctgcaaccggcggcgccacgcccaggcgggcggagcgcggttcccggagtctcgcgcccgcggtcatgtgac

SEQ ID NO: 291688 - DNA, 120 bp, Artificial Sequence
  ENSG00000131238_4 (sequence is synthesized)
acagcgaagatggcgtcgcccggctgcctgtggctcttggctgtggctctcctgccatggacctgcgcttctcgggcgctgcagcatctggacccgccggcgccgctgccgttggtgatc

SEQ ID NO: 291689 - DNA, 120 bp, Artificial Sequence
  ENSG00000131238_5 (sequence is synthesized)
tggcatgggatgggagacagctgttgcaatcccttaagcatgggtgctattaaaaaaatggtggagaagaaaatacctggaatttacgtcttatctttagagattgggaagaccctgatg

SEQ ID NO: 291690 - DNA, 120 bp, Artificial Sequence
  ENSG00000131238_6 (sequence is synthesized)
gaggacgtggagaacagcttcttcttgaatgtcaattcccaagtaacaacagtgtgtcaggcacttgctaaggatcctaaattgcagcaaggctacaatgctatgggattctcccaggga

SEQ ID NO: 291691 - DNA, 120 bp, Artificial Sequence
  ENSG00000131238_7 (sequence is synthesized)
ggccaatttctgagggcagtggctcagagatgcccttcacctcccatgatcaatctgatctcggttgggggacaacatcaaggtgtttttggactccctcgatgcccaggagagagctct

SEQ ID NO: 291692 - DNA, 120 bp, Artificial Sequence
  ENSG00000131238_8 (sequence is synthesized)
cacatctgtgacttcatccgaaaaacactgaatgctggggcgtactccaaagttgttcaggaacgcctcgtgcaagccgaatactggcatgaccccataaaggaggatgtgtatcgcaac

SEQ ID NO: 291693 - DNA, 120 bp, Artificial Sequence
  ENSG00000131238_9 (sequence is synthesized)
cacagcatcttcttggcagatataaatcaggagcggggtatcaatgagtcctacaagaaaaacctgatggccctgaagaagtttgtgatggtgaaattcctcaatgattccattgtggac

SEQ ID NO: 291694 - DNA, 120 bp, Artificial Sequence
  ENSG00000131238_10 (sequence is synthesized)
cctgtagattcggagtggtttggattttacagaagtggccaagccaaggaaaccattcccttacaggagacctccctgtacacacaggaccgcctggggctaaaggaaatggacaatgca

SEQ ID NO: 291695 - DNA, 120 bp, Artificial Sequence
  ENSG00000131238_11 (sequence is synthesized)
ggacagctagtgtttctggctacagaaggggaccatcttcagttgtctgaagaatggttttatgcccacatcataccattccttggatgaaacccgtatagttcacaatagagctcaggg

SEQ ID NO: 291696 - DNA, 120 bp, Artificial Sequence
  ENSG00000131238_12 (sequence is synthesized)
agcccctaactcttccaaaccacatgggagacagtttccttcatgcccaagcctgagctcagatccagcttgcaactaatccttctatcatctaacatgccctacttggaaagatctaag

SEQ ID NO: 291697 - DNA, 120 bp, Artificial Sequence
  ENSG00000131238_13 (sequence is synthesized)
atctgaatcttatcctttgccatcttctgttaccatatggtgttgaatgcaagtttaattaccatggagattgttttacaaacttttgatgtggtcaagttcagttttagaaaagggagt

SEQ ID NO: 291698 - DNA, 120 bp, Artificial Sequence
  ENSG00000131238_14 (sequence is synthesized)
ctgttccagatcagtgccagaactgtgcccaggcccaaaggagacaactaactaaagtagtgagatagattctaagggcaaacatttttccaagtcttgccatatttcaagcaaagaggt

SEQ ID NO: 291699 - DNA, 120 bp, Artificial Sequence
  ENSG00000131238_15 (sequence is synthesized)
gcccaggcctgaggtactcacataaatgctttgttttgctggtgatttaaccagtgcttggaaaaatcttgcttggctatttctgcatcatttcttaaggctgccttcctctctcagtac

SEQ ID NO: 291700 - DNA, 120 bp, Artificial Sequence
  ENSG00000131238_16 (sequence is synthesized)
ggcctacagtcttgcttctgcagcacccactttgtctcctcaggtagtgatgaattagttgctgtcacaaaaggagggaagtagcacccaaattaagttgcttaagagaggaaatgtaca

SEQ ID NO: 291701 - DNA, 120 bp, Artificial Sequence
  ENSG00000131238_17 (sequence is synthesized)
tcttgtataacttagggagcgaagaaaatgtaggcgcgaaagtgaaaagtgaggcagctagttcttcctattccattctcgaccaacctgccctttcttaatatgactagtggtcttgat

SEQ ID NO: 291702 - DNA, 120 bp, Artificial Sequence
  ENSG00000131238_18 (sequence is synthesized)
gctagagtcaacttactctgttgctggctttagcagagaataggaggaaccatatgaaaaagatcaggctttctgacttccatccccaaaacacatttaccagcatactccaaactgttt

SEQ ID NO: 291703 - DNA, 120 bp, Artificial Sequence
  ENSG00000131238_19 (sequence is synthesized)
ctgatgtgttccatgagaaaaggattgtttgctcaaaaagcttggaaaatactacacactccctttctccttctggagatcaacccacattagagtgtctaaggactcctgagaattcct

SEQ ID NO: 291704 - DNA, 120 bp, Artificial Sequence
  ENSG00000131238_20 (sequence is synthesized)
gttacagtaaacaaaactaacgtaatctaccatttcctacactatttgagcatggaaatcatagtccccactctgtgaaaacttaacgctttttggaagacatttctgtagcatgtcagt

SEQ ID NO: 291705 - DNA, 120 bp, Artificial Sequence
  ENSG00000131238_21 (sequence is synthesized)
ttggagaaatgatgagctacgccttgatgaaagaaccgtgttggtgctgctaagtttagccattatggtttttcctttctctctcttaagccttattcttcaactaaaagatgaggatta

SEQ ID NO: 291706 - DNA, 120 bp, Artificial Sequence
  ENSG00000131238_22 (sequence is synthesized)
agagcaagaagttgggggggatgtgaaaataattttatgaggttgtctaaaataaagagtagtttcttatccttggtgttttcagtattttttgcatttctgtacagccaatatcacagg

SEQ ID NO: 291707 - DNA, 120 bp, Artificial Sequence
  ENSG00000131238_23 (sequence is synthesized)
taaacaactaagcaagtttggtattaactttattctattttctgtataactttaagtacataaaggtttatttccacaggcctcaggaaatgggtagaaatcacaggacaatctctcttc

SEQ ID NO: 291708 - DNA, 120 bp, Artificial Sequence
  ENSG00000131238_24 (sequence is synthesized)
ccaccaaaaaaaagttgcatattttggtaagtgtttgtcctagagggaaaaacaactgaaatttacattagcagtgctgtgcaagattcttacataattcaagacctaaaaccagcctgc

SEQ ID NO: 291709 - DNA, 120 bp, Artificial Sequence
  ENSG00000131238_25 (sequence is synthesized)
agtggaggtttcagtcctctgttcaggtgcttagacagaagccataagctgatgagcatgacagggaaaaggaggcagtgaagacaggtgacaggcacctggcagggaagaaggattcag

SEQ ID NO: 291710 - DNA, 120 bp, Artificial Sequence
  ENSG00000131238_26 (sequence is synthesized)
gaatgccagactccttgaaatcatgtgggtttttttttttttttttttccttttaaagtcatctctataggaaggtgctgggcagggatcccagagaaagaaagggtccaagactccatt

SEQ ID NO: 291711 - DNA, 120 bp, Artificial Sequence
  ENSG00000131238_27 (sequence is synthesized)
aactgccctggatgaagggcactgctacagcagctagtaccagagactctcctatctcacggttgaggcagacccaggatagaatagagaataaaaggaatgcttataggaaacaatttt

SEQ ID NO: 291712 - DNA, 120 bp, Artificial Sequence
  ENSG00000131238_28 (sequence is synthesized)
gtatggaatgctagatggccaagcctcagcctttggtccagtgcaacccttgcctcgcttgtcaacagtgaaaaattagtttggttagaagaaccatctggaaacacaccagcttctgct

SEQ ID NO: 291713 - DNA, 120 bp, Artificial Sequence
  ENSG00000131238_29 (sequence is synthesized)
accttcatgctcattgttaaaaaaagattaaccagtgtgaacattctgatctgttaattccagggactgttttctttccaatggactgtttgttggtagaataacccccaaaagctcaaa

SEQ ID NO: 291714 - DNA, 120 bp, Artificial Sequence
  ENSG00000131238_30 (sequence is synthesized)
gctaaaatgcatcatcagtcctagtcggcagttccttaagaatggactggcggcgtggttgagctgatatggaaaagctgcaccttcctgcagaagatcaactgacctgctatcccaccc

SEQ ID NO: 291715 - DNA, 120 bp, Artificial Sequence
  ENSG00000131238_31 (sequence is synthesized)
caaatttcagcctgaggtatatttcagtgaaggcaggtagctgtgcttctcagagcagagaagcagttttaagagcaaaaaggtagaggaaatctagaaaagaaccgtcttgatacagat

SEQ ID NO: 291716 - DNA, 120 bp, Artificial Sequence
  ENSG00000131238_32 (sequence is synthesized)
ttatcccatggtgtgaagggagggcaaagaacccagtggcacttcgcttatccagcaatttctgtcactgtggtgaccaacttctgcccgttccatagggtcttgaactgctcaggaact

SEQ ID NO: 291717 - DNA, 120 bp, Artificial Sequence
  ENSG00000131238_33 (sequence is synthesized)
agtctcatctgctcctgggagggagagctccatctctgacgtagctggctctgttgggctttagcgccagcctgctccaccgagtggcgttttcaggaccactgcctctgggcagctctt

SEQ ID NO: 291718 - DNA, 120 bp, Artificial Sequence
  ENSG00000131238_34 (sequence is synthesized)
cttggctgtggctctcctgccatggacctgcgcttctcgggcgctgcagcatctggacccgccggcgccgctgccgttggtgatctggcatgggatgggtgagtgagtgagaaatttaaa

SEQ ID NO: 291719 - DNA, 120 bp, Artificial Sequence
  ENSG00000131238_35 (sequence is synthesized)
agggtttggcgattctctctcttcctagcctgggttcgcatctgcaaaatgcgggtgtagagggcgaggacgtggtcccacagcacgcggctgcctcgacattttaggatttgaaggatc

SEQ ID NO: 291720 - DNA, 120 bp, Artificial Sequence
  ENSG00000131238_36 (sequence is synthesized)
tgcattggaaagagagaaggggaaggagccgtccccttcactggaaagagagaaggggaaggaaagagagagccgcgcacggcgttgaagttttacatgctgtccttgattaatccttac

SEQ ID NO: 291721 - DNA, 77 bp, Artificial Sequence
  ENSG00000131238_37 (sequence is synthesized)
ggttcaagcccgcctggggctaaaggaaatggacaatgcaggacagctagtgtttctggctacagaaggggaccatc

SEQ ID NO: 291722 - DNA, 80 bp, Artificial Sequence
  ENSG00000131242_0 (sequence is synthesized)
ggatggcgggcggcgcgggctggtcgggcgcccccgcggctctgctgcgctccgtgcgccgcctgcgcgaggtgttcgag

SEQ ID NO: 291723 - DNA, 120 bp, Artificial Sequence
  ENSG00000131242_1 (sequence is synthesized)
gcgcgaggtgttcgaggtgtgcggccgcgaccccgacggcttcctgcgcgtggagcgcgtcgcggcgctcggactgcgcttcggccagggcgaggaggtggaaaaacttgtgaaatattt

SEQ ID NO: 291724 - DNA, 120 bp, Artificial Sequence
  ENSG00000131242_2 (sequence is synthesized)
ggatcccaacgacctggggagaatcaacttcaaggacttttgccggggggtgttcgccatgaaagggtgcgaggagctgctgaaggatgtgctgtcggtggagagcgcggggacgctgcc

SEQ ID NO: 291725 - DNA, 120 bp, Artificial Sequence
  ENSG00000131242_3 (sequence is synthesized)
gtgcgcgccagagatcccagactgcgtggagcagggcagcgaggtcacaggccccacctttgctgatggcgagctcatccccagggaacccggcttttttcccgaggacgaggaggaggc

SEQ ID NO: 291726 - DNA, 120 bp, Artificial Sequence
  ENSG00000131242_4 (sequence is synthesized)
tatgacgctggcgccacctgagggcccccaggagttgtacacagacagccccatggagagcactcagagcctggaggggtctgtcgggagtcctgccgagaaggacgggggacttggggg

SEQ ID NO: 291727 - DNA, 120 bp, Artificial Sequence
  ENSG00000131242_5 (sequence is synthesized)
cctgtttctgccagaagacaagtccctggtccacactccatccatgacgacctcagacctttctacacactccaccacctcgctcatcagcaatgaggagcagtttgaagactatgggga

SEQ ID NO: 291728 - DNA, 120 bp, Artificial Sequence
  ENSG00000131242_6 (sequence is synthesized)
gggtgacgatgtggactgtgcccccagcagcccttgccccgatgatgagaccaggaccaacgtctactcggacctggggtcttcggtgtcttccagtgcggggcagacgcctaggaaaat

SEQ ID NO: 291729 - DNA, 120 bp, Artificial Sequence
  ENSG00000131242_7 (sequence is synthesized)
gcggcacgtgtacaacagcgaattgctagatgtttactgctctcaatgctgcaagaaaatcaacctgctcaatgacttggaagcccgactgaaaaacctgaaggccaacagccccaaccg

SEQ ID NO: 291730 - DNA, 120 bp, Artificial Sequence
  ENSG00000131242_8 (sequence is synthesized)
aaagatctccagcacggcctttggacggcagctcatgcacagcagcaacttcagcagcagcaatggcagcaccgaagacctgttccgggacagcattgactcttgcgacaatgacatcac

SEQ ID NO: 291731 - DNA, 120 bp, Artificial Sequence
  ENSG00000131242_9 (sequence is synthesized)
agagaaggtaagcttcctggaaaagaaggtgacagagctggagaatgacagcctgaccaatggggacctgaagagcaagctgaagcaagagaacacacagctggtgcacagggtgcatga

SEQ ID NO: 291732 - DNA, 120 bp, Artificial Sequence
  ENSG00000131242_10 (sequence is synthesized)
gctggaggagatggtgaaggatcaggagaccacggccgagcaggctctggaggaggaggcgcggcgccaccgcgaggcctacggcaagctggagagggagaaggctaccgaggtggagct

SEQ ID NO: 291733 - DNA, 120 bp, Artificial Sequence
  ENSG00000131242_11 (sequence is synthesized)
gctcaatgccagggtgcagcagttggaggaagaaaatacagagcttagaacaacagtgactcggctcaagtctcaaacagagaaactggatgaggagcggcagcgcatgtctgaccgtct

SEQ ID NO: 291734 - DNA, 120 bp, Artificial Sequence
  ENSG00000131242_12 (sequence is synthesized)
ggaggacaccagcctgcggctcaaagatgagatggacctgtacaagcgcatgatggacaagctgcgacagaaccgccttgagttccagaaggagcgggaggcgacgcaggagctcatcga

SEQ ID NO: 291735 - DNA, 120 bp, Artificial Sequence
  ENSG00000131242_13 (sequence is synthesized)
ggacttgcggaaggagctggagcacctgcagatgtacaagctggactgcgagcggccaggcaggggccgcagtgcctcctctggcctaggcgagttcaatgccagggcccgcgaggtgga

SEQ ID NO: 291736 - DNA, 120 bp, Artificial Sequence
  ENSG00000131242_14 (sequence is synthesized)
gctcgagcacgaggtcaagcggctcaagcaggagaattataagctgcgggatcagaacgacgacttgaatgggcagattttgagcctcagcctctacgaagcaaaaaacctctttgctgc

SEQ ID NO: 291737 - DNA, 120 bp, Artificial Sequence
  ENSG00000131242_15 (sequence is synthesized)
ccagactaaagcccagtctctggctgcggagatagacaccgcctcgcgcgatgagctaatggaagccctgaaggagcaggaggagatcaacttccggctgaggcagtacatggacaagat

SEQ ID NO: 291738 - DNA, 120 bp, Artificial Sequence
  ENSG00000131242_16 (sequence is synthesized)
tatcctcgccatcctggaccacaatccctccatcctcgagatcaaacactaaggcacggggctggctgcagagcagccttaggaccctgggaccaagggcagaccctgcccaaggatgca

SEQ ID NO: 291739 - DNA, 120 bp, Artificial Sequence
  ENSG00000131242_17 (sequence is synthesized)
ggcctaagccgggcctcacactcacactgtaaatgtctctctggccaccatgcgttacgtgtacccgtgtatatgtggggaggctgtgcacacgagcgaggggtgagtggccgtggctgt

SEQ ID NO: 291740 - DNA, 120 bp, Artificial Sequence
  ENSG00000131242_18 (sequence is synthesized)
gggcagcatccacacggttagccgtgcatgcactttgtggcccctttgcaaggggcagagggtactggaagtgggaggaggcaaggtctgctatcaggagttactgtaaaaacaagaact

SEQ ID NO: 291741 - DNA, 120 bp, Artificial Sequence
  ENSG00000131242_19 (sequence is synthesized)
ggaagctcgtgtttccggtactgggtaaaatgattctacctctggggataaggattcacattcgctctagtacgatgggctctttcaccccactcctagtccccttgggagtgggagcaa

SEQ ID NO: 291742 - DNA, 120 bp, Artificial Sequence
  ENSG00000131242_20 (sequence is synthesized)
aattgtgatctttcctaggagtttgaatgccccatatttgtgtcctcgccagctctttggccacctttcaagccccagtgttcaagctcagagaggatgaaggggcatctggagggtcca

SEQ ID NO: 291743 - DNA, 120 bp, Artificial Sequence
  ENSG00000131242_21 (sequence is synthesized)
tgagatggggccctcaccaaatgccttggccaccggccagcagccctctgtgatgtgtgtgcagagtgaacagaggactcaggtttcatagcagctagtgcggggcatcctcatcctgta

SEQ ID NO: 291744 - DNA, 120 bp, Artificial Sequence
  ENSG00000131242_22 (sequence is synthesized)
cctatagagttcgtgcactcccccatccatgctacctacctccccgtttctgtttcagttttaagacaatgaagcagcattcactgcgtcattgtaacatgaagggataaaaatgaagga

SEQ ID NO: 291745 - DNA, 120 bp, Artificial Sequence
  ENSG00000131242_23 (sequence is synthesized)
gaaggagggtttgggatgggtgtctaaggcaggagttgacatcgggcaaccaaagaaatgagttttggggaggaacacaactcccatcccagtcagtttccttcccatggctgcatctta

SEQ ID NO: 291746 - DNA, 120 bp, Artificial Sequence
  ENSG00000131242_24 (sequence is synthesized)
agatggatgcacggagaaaccgtctgcctggctccctgtcttcattctccacgcagcctggtgatggcaggcctgggtttggatttcagaatcctagctccgggctccactcgtgtggca

SEQ ID NO: 291747 - DNA, 120 bp, Artificial Sequence
  ENSG00000131242_25 (sequence is synthesized)
gcaagactgcttcgttccagcgtttagaaacacacctgtatttgattctcagccaggggagcactcgctgcactggtgggaggcggttgggaaagttgcaggaaaaccttagtcttccat

SEQ ID NO: 291748 - DNA, 120 bp, Artificial Sequence
  ENSG00000131242_26 (sequence is synthesized)
ccttctgacccatggtggaaattcacaccatggatttttaatggatctttgttctaggcagctgggaatagacatggtacttaccttagagttttccaatttatctcaattttatatggc

SEQ ID NO: 291749 - DNA, 120 bp, Artificial Sequence
  ENSG00000131242_27 (sequence is synthesized)
ttgtgattcattttcttaatccaaatatatataaacgtgtgtggtcttattcttccccctgcagtttcttgctttcttcagcacatcttatagtatgagaaggaaggtttgggcatgttg

SEQ ID NO: 291750 - DNA, 120 bp, Artificial Sequence
  ENSG00000131242_28 (sequence is synthesized)
ggaagggcggtggagggggagttgcagaaagagagggcagtgagggtgaggagaggggatctggggacttgggtgtgacacctgcttgacagaggcagggctgtggccaggaccaacctt

SEQ ID NO: 291751 - DNA, 120 bp, Artificial Sequence
  ENSG00000131242_29 (sequence is synthesized)
caattccattccaatcagcctttgcatttgttggatctcgtggcttctttttaatcttttgttggggattagtttcatgctgcacataatggggttgcactggtctgacccaggactttg

SEQ ID NO: 291752 - DNA, 120 bp, Artificial Sequence
  ENSG00000131242_30 (sequence is synthesized)
gagccacccacactgggaagactaggctaggcagtcggtcttctaggagtttctcagccccttaggacgcgggtctccttgggctcccccaagggttctgcgaagaggcagtggaagaag

SEQ ID NO: 291753 - DNA, 120 bp, Artificial Sequence
  ENSG00000131242_31 (sequence is synthesized)
gcatgaggagagggtctcttgagaatttgccaataggaaggagtggccacggctgaaaggaacaagacagatcctgacatagctttggcctgggtgttaggtcagaaggagtactggtgc

SEQ ID NO: 291754 - DNA, 120 bp, Artificial Sequence
  ENSG00000131242_32 (sequence is synthesized)
gtgggggccttaccccagggttgagtattttatctgtaaaatgttatctgccctttggctgcattggaatttcagagaaggctgcagaggcctgggttacacagcctgagtcacaacgtg

SEQ ID NO: 291755 - DNA, 120 bp, Artificial Sequence
  ENSG00000131242_33 (sequence is synthesized)
ggaaggaatctctgccacgggaaaggtgggcggaagcagctggcagcctggggcgtgcttcaggctcctccctctaaggggcgccatgggaacaggctccggagggagccggcgtctgaa

SEQ ID NO: 291756 - DNA, 120 bp, Artificial Sequence
  ENSG00000131242_34 (sequence is synthesized)
cttttaaatggggggctgaattccagctcacacacacctcaagtccaaccttactttcttcagccagaatacatttcttgtaaaacctggcttgttgcttggcttttaaagatggtgtat

SEQ ID NO: 291757 - DNA, 120 bp, Artificial Sequence
  ENSG00000131242_35 (sequence is synthesized)
gtttgtaaaaatattcttctgggctcaaaagctagcttgagggggcagatgccccaggtgtcccagctccacagcccctggcagatcccagaccccttggtggcaggtcccagagcctag

SEQ ID NO: 291758 - DNA, 120 bp, Artificial Sequence
  ENSG00000131242_36 (sequence is synthesized)
gtggtaggagcttgatctttgtttctgcccttacccctcagtagtggggctgcgaggtagtagacaggatgcccagttaagtttgaatttcagatagaaaataattttagaataaatatg

SEQ ID NO: 291759 - DNA, 82 bp, Artificial Sequence
  ENSG00000131242_37 (sequence is synthesized)
tgatcatagctcaccacaaccttgaactcccaggctcaagcgatcctcccgccttaactgcctgagtagctgggactacagg

SEQ ID NO: 291760 - DNA, 69 bp, Artificial Sequence
  ENSG00000131242_38 (sequence is synthesized)
atcatagctcaccacaaccttgaactcccaggctcaagcgatcctcccgccttaactcttattttttgt

SEQ ID NO: 291761 - DNA, 86 bp, Artificial Sequence
  ENSG00000131242_39 (sequence is synthesized)
acatatttgaaatggggagattttaaaaattctgatgattagactgaatcctcagacgttctggtttgattgttgtgggtgtagcc

SEQ ID NO: 291762 - DNA, 120 bp, Artificial Sequence
  ENSG00000131242_40 (sequence is synthesized)
aatcctcagacgttctggtttgattgttgtgggtgtagcccaggcatgggattttttaaagagctgctcaggtaattccaatttaattgcgtgtcctacttgggttttttgtttgttttt

SEQ ID NO: 291763 - DNA, 120 bp, Artificial Sequence
  ENSG00000131242_41 (sequence is synthesized)
attgtttttgctaaacctggcaaccctaccgagtagggattagcagtaacttatctgaaatttagaggtgttttgggggtggggcgagggtttctgtagtagactcagattttacatggc

SEQ ID NO: 291764 - DNA, 120 bp, Artificial Sequence
  ENSG00000131242_42 (sequence is synthesized)
cctgagctgcccttgcgttcagttggaagccacgcaaaatgaactgaaccaggagtgagcttcgtgtacattatctattagaaaatgaagtaccttctggttcagctagtccctgtgcgt

SEQ ID NO: 291765 - DNA, 120 bp, Artificial Sequence
  ENSG00000131242_43 (sequence is synthesized)
tgagaggctttaagaaacttctagtaaaaatgtttttttcttttagctttgaattggccagagtttatcctagattattttattttaaattggtagaattctttgcgaactgtcacagag

SEQ ID NO: 291766 - DNA, 84 bp, Artificial Sequence
  ENSG00000131242_44 (sequence is synthesized)
tattttaaattggtagaattctttgcgaactgtcacagagaaattccttttcatgactttatttctgacctattaaaacatgaa

SEQ ID NO: 291767 - DNA, 120 bp, Artificial Sequence
  ENSG00000131242_45 (sequence is synthesized)
agtcctaaaccagcctgggcaacatagtgataccttgtctctaccaaaagttaaaaaaaaaaaaaaaaaagctcaagaacctgcacgagggcctaaaacagtgggctcagctttggctgt

SEQ ID NO: 291768 - DNA, 120 bp, Artificial Sequence
  ENSG00000131242_46 (sequence is synthesized)
gcattggaatcacctggggagatttgtaagcttctgctgtctgggctgaacccccagaggttcggattgaattggtgtggggtgtggtccaggcatcgagatgtgtaaagacctccccag

SEQ ID NO: 291769 - DNA, 120 bp, Artificial Sequence
  ENSG00000131242_47 (sequence is synthesized)
gtgatgatatgcagtccgaggttgagactgccctgtcctgcaaggtcgttggccagaggtagaggaaactggtcaaagtggctgttgggcttgtcaagcccgtggctgaatgacagtgag

SEQ ID NO: 291770 - DNA, 120 bp, Artificial Sequence
  ENSG00000131242_48 (sequence is synthesized)
ctctcttgctgggagggttccttttcctgttgttgaatggtcctggcctgcaggatgggaggccagatgccttcaggagctggtggatccagctgttctcaccagcctggaggttagcag

SEQ ID NO: 291771 - DNA, 120 bp, Artificial Sequence
  ENSG00000131242_49 (sequence is synthesized)
accagagtgggtgggcaggaccttggcctggtgcccctggaatcagtgggtggcatgtgttgggatatactggctacaggctcatctcaaagagcaggtagaacagagtcagcagggaac

SEQ ID NO: 291772 - DNA, 120 bp, Artificial Sequence
  ENSG00000131242_50 (sequence is synthesized)
tgacaggtggggctgtccccctgaaagcagccgcagaaacagctgccacctatttgcatagctgagcaggaggacatactgtctttgtgggttttgcttctggtctgtttcctgactggg

SEQ ID NO: 291773 - DNA, 120 bp, Artificial Sequence
  ENSG00000131242_51 (sequence is synthesized)
ttgataaagggagtcccagctcgttccctgttagccaaaccagcatcctactcacacaccggacactccaggtgctagtccactggtgctggtgttcaggggagttggggggggggggcg

SEQ ID NO: 291774 - DNA, 120 bp, Artificial Sequence
  ENSG00000131242_52 (sequence is synthesized)
cggggacagaagcgcgggttcttggttccaatgagggacttagcagaagcctccaggggccagcagggccaggtgaaactgggagaaatgaagccctctgtgtcctgtgtgtgtggtggg

SEQ ID NO: 291775 - DNA, 77 bp, Artificial Sequence
  ENSG00000131242_53 (sequence is synthesized)
gggagaaatgaagccctctgtgtcctgtgtgtgtggtggggtttaatgcattagcaaatttaaacttaaaaactaac

SEQ ID NO: 291776 - DNA, 120 bp, Artificial Sequence
  ENSG00000131242_54 (sequence is synthesized)
accagcctggacaacatggtgaaactcttgtctttatttttttaaaaaaacaaaaagtaactttcgatgtgatcataccaggaaagttttgcgtggtcaccatgccaagaaaatgacttt

SEQ ID NO: 291777 - DNA, 120 bp, Artificial Sequence
  ENSG00000131242_55 (sequence is synthesized)
ctttggttgcccagcagatccacagcgactctttctcaagggctactgtggattctagattgaggaaaggggccacttaggactcagtgctggtatcctccacagtcctttctcccagac

SEQ ID NO: 291778 - DNA, 120 bp, Artificial Sequence
  ENSG00000131242_56 (sequence is synthesized)
tctggccctccctttgggacccaggaaatcccctctagggtgacgctgctggctaggaagactgaggtctgctgcgccaaggggcctcaagttagaagggccatgccgtcagtggatgac

SEQ ID NO: 291779 - DNA, 120 bp, Artificial Sequence
  ENSG00000131242_57 (sequence is synthesized)
tttgagcgctgatcctagggacctgccaggtcctcacttcctgccctgggtgcacacatgaatggggcagccagcaggaagcgggagaggctggaaccaggagcctgccctacctgcatg

SEQ ID NO: 291780 - DNA, 120 bp, Artificial Sequence
  ENSG00000131242_58 (sequence is synthesized)
gcaggacaactctgaggcccttctgccatattctctgctacccaccagagaaaataggctgccttctagaaagatttgtttctaaaagcgtagaccctggggaagtataatgtcaccatg

SEQ ID NO: 291781 - DNA, 120 bp, Artificial Sequence
  ENSG00000131242_59 (sequence is synthesized)
ctcaccaggcgaggtttcccatatgacctccctgccccgacctcgtaggttgctcctttccccatctgtaaggtagagatgtctgccccggagctaccagctggggatggcatccaggcc

SEQ ID NO: 291782 - DNA, 120 bp, Artificial Sequence
  ENSG00000131242_60 (sequence is synthesized)
atgtctcctgcaggatccaagtgctgttgtccccagggtgaccctgcctcctgctggggcccatccgctttgctgtgctgcacaggctgttttcatctgcatggtttggggtctttgtcc

SEQ ID NO: 291783 - DNA, 120 bp, Artificial Sequence
  ENSG00000131242_61 (sequence is synthesized)
ttgtgccttttcttccccatcgccactgtacaggattttccacattgcccactgcctccttttctacatcgtctcatctccctggcctttcccgagccctgtaaatgtgtactttttcaa

SEQ ID NO: 291784 - DNA, 120 bp, Artificial Sequence
  ENSG00000131242_62 (sequence is synthesized)
cgtgcctcccccaggtgaggccagctctcccgggcacattcgtccacaaggatcaggccccacttacccttggctcgctcagcctgtagacttggtaactttgtacagaatctttcatta

SEQ ID NO: 291785 - DNA, 120 bp, Artificial Sequence
  ENSG00000131242_63 (sequence is synthesized)
ttgtcttaagcatggggggctaggacccacttagtccctcctccagcctgcagctaatttaggagccttgcattccagaaaagggcaactttgtgtaaagcagcttctcccacagagctt

SEQ ID NO: 291786 - DNA, 120 bp, Artificial Sequence
  ENSG00000131242_64 (sequence is synthesized)
tccctgcattgttagtgatgtcgggcaaagcatcactctttaacctggggcattggccccagcagggatatcatgggaccgcagccgctccgtgcactgtctctgcccccagaggaagcc

SEQ ID NO: 291787 - DNA, 120 bp, Artificial Sequence
  ENSG00000131242_65 (sequence is synthesized)
ctgtccatggttcctggtgcacggccacaggcctgccttgaggccaccacatctggtgtctagaacagctgcgggccccacttgggcagaaggaagaggtgctagctgctgcccctgcct

SEQ ID NO: 291788 - DNA, 120 bp, Artificial Sequence
  ENSG00000131242_66 (sequence is synthesized)
gctgtgaacacctgcccagcccttccttgtctgctgaggtgctcagaccagagtgccattaaataccaactgatgtcacggagcggacggtgcattgccaaggactcacagctgtgggct

SEQ ID NO: 291789 - DNA, 120 bp, Artificial Sequence
  ENSG00000131242_67 (sequence is synthesized)
cccttccagctcctcccactttcttggctgggtcttctgaggcctacgtggaatgaactacacatgtggcctcatgcccaagggtttgttagatggcctctgactctgtgggattcaact

SEQ ID NO: 291790 - DNA, 120 bp, Artificial Sequence
  ENSG00000131242_68 (sequence is synthesized)
tgacttttttgccccaggaggctctgtctggaaacaggcttagctttagtgctggggtgggacctgccctgtgggccccagggaggggacagtgggggtgaggccctgaggctgtccagg

SEQ ID NO: 291791 - DNA, 120 bp, Artificial Sequence
  ENSG00000131242_69 (sequence is synthesized)
gtctgagctctttgcctccaacctgcttctgccccaaaaggaacaggctgttggtggcaggctcctcccggggagctgtactgtacagaccaaggtgtaaataaacagtttgctcttctc

SEQ ID NO: 291792 - DNA, 120 bp, Artificial Sequence
  ENSG00000131242_70 (sequence is synthesized)
ccctgaagccgtgtgctcagggagggtgtgctcagggaggagccggtgttggctctgcttttctttgcccgagttgtctgtcaccatggggagaataaagtggccccatggctgatactg

SEQ ID NO: 291793 - DNA, 80 bp, Artificial Sequence
  ENSG00000131242_71 (sequence is synthesized)
actggtgcccagaagtgcgagcggcagcggcgcggccgcgattgttcctgcgcttcggggctgcccgccgcgtccccgcg

SEQ ID NO: 291794 - DNA, 120 bp, Artificial Sequence
  ENSG00000131242_72 (sequence is synthesized)
tgtagctagacaattaggttgtaagcagtgttttgctactgtggagtagcatgggtagaattggtttgaactgtagaaatggtttctgtggtgagatgtttccctttagatagggtccct

SEQ ID NO: 291795 - DNA, 120 bp, Artificial Sequence
  ENSG00000131242_73 (sequence is synthesized)
gaaatgtacttaccaggtcaagagctacaaacttaatcggtagtgccaattaaagggaaatgcctgtcagtttccccaccacgggctgtggctggggacccatgagtcctcctctgactt

SEQ ID NO: 291796 - DNA, 120 bp, Artificial Sequence
  ENSG00000131242_74 (sequence is synthesized)
aagatctccagcacggcctttggacggtaaggcccgcctcgagggagggcaaattgagtgctgtccccatgctgcccactggccggggctccctgccagcagcccggactcagctggtgc

SEQ ID NO: 291797 - DNA, 120 bp, Artificial Sequence
  ENSG00000131242_75 (sequence is synthesized)
ccgcatgtggctgagtgagcagaggggaacgaggccatcccagggcagtgcagccagggcagcgtcacttctgaaaaagaggggccagctcctccctgctctctccccaccccttgtccc

SEQ ID NO: 291798 - DNA, 120 bp, Artificial Sequence
  ENSG00000131242_76 (sequence is synthesized)
ttcttcaaatcctaggtcaccttgacttcaggcaggcatgccagggatgccctgagagagacagagcaccccacagcgttcagtgcccttcctgcctcttggagctggcagccatactca

SEQ ID NO: 291799 - DNA, 120 bp, Artificial Sequence
  ENSG00000131242_77 (sequence is synthesized)
ataaagagaccccgggtttcctgcaggcggggatctgggcatgagtgtgcgccattggggctggtcactttgctccgattaagtcctgcggcagttcagtgtggccccaggtccacactc

SEQ ID NO: 291800 - DNA, 120 bp, Artificial Sequence
  ENSG00000131242_78 (sequence is synthesized)
agggctctgggagctggcagcaagggcccaggagctaggtgggttggcctcttggcagagaccctggctgctgcctatcagggagctggaaggggatgtcactgggggtggcagctggat

SEQ ID NO: 291801 - DNA, 120 bp, Artificial Sequence
  ENSG00000131242_79 (sequence is synthesized)
tttgcctcaggcacgggttagctcagcaggcccagtcccaccccagctcactgctctgcaaggcctggagaattctctgcctttgccatcccccagagttcccagagacgtagcaggagc

SEQ ID NO: 291802 - DNA, 120 bp, Artificial Sequence
  ENSG00000131242_80 (sequence is synthesized)
cagcttggtggagaggctcaagcctcaggaggcccagaccctcttccagggccatggagctgggctacctccttgggggcttccccactggaagaggagggggctcacgtgccagctgag

SEQ ID NO: 291803 - DNA, 120 bp, Artificial Sequence
  ENSG00000131242_81 (sequence is synthesized)
gtcactgggtagctgcaggccagcatgctggcgtgaagagggttctgaggccgcaggagaagctgtgcgtcattggctgtgtctgccaggggaccccgggggtctgtacagcccatttgc

SEQ ID NO: 291804 - DNA, 120 bp, Artificial Sequence
  ENSG00000131242_82 (sequence is synthesized)
catcctctgggcggggtgatccgctgagtttggcaacattcttcctctcaggctgagtgagggcagcctccttaaaggggcagaccccctggggtactggatgctcgcctagccagtagt

SEQ ID NO: 291805 - DNA, 120 bp, Artificial Sequence
  ENSG00000131242_83 (sequence is synthesized)
gtgagtaggcccctgtctctggaaggcccctgcagccagacaccctcctcccacccctgcaggcagctcatgcacagcagcaacttcagcagcagcaatggcagcaccgaagacctgttc

SEQ ID NO: 291806 - DNA, 120 bp, Artificial Sequence
  ENSG00000131242_84 (sequence is synthesized)
cgggacagcattgactcttgcgacaatgacatcacagagaaggtgggccttgggtggctggagaagggactgaatgcatgcctgctcccaggggagatggggtgcactcaggctactgtc

SEQ ID NO: 291807 - DNA, 120 bp, Artificial Sequence
  ENSG00000131242_85 (sequence is synthesized)
tggggacttgggagaccctgtacctgcctaggaattgggggcaggtggccctggtcacgtgttccccactcccccaccccacacatgaccgttctcagatacacagtggtttggaggtcc

SEQ ID NO: 291808 - DNA, 120 bp, Artificial Sequence
  ENSG00000131242_86 (sequence is synthesized)
tgctcatgaacctcatggcgtcgaggttctcggttctgtggcctcagaggtcttctccaccccaccccggccccctgctgcaggtaagcttcctggaaaagaaggtgacagagctggaga

SEQ ID NO: 291809 - DNA, 120 bp, Artificial Sequence
  ENSG00000131242_87 (sequence is synthesized)
atgacagcctgaccaatggggacctgaagagcaagctgaagcaagagaacacacagctggtgcacaggtcaagcaggcagcggcgctgggggctcggccgtgacgctggggaacaaaggg

SEQ ID NO: 291810 - DNA, 120 bp, Artificial Sequence
  ENSG00000131242_88 (sequence is synthesized)
gggtccatcttgctaagacctccaggaggaggcagcctcatgcctttgcagctctgagggtctgtgacgcatcagcctcttgtcacatggccctgcccacatgtggtgcccaggacagga

SEQ ID NO: 291811 - DNA, 120 bp, Artificial Sequence
  ENSG00000131242_89 (sequence is synthesized)
ccttagggacagggagacaggttggagcttgaccttggctctaggcccaatggattctaccccctgaggtctgaagccacagggctggtccaagatgggagtggggatccactgtgtctc

SEQ ID NO: 291812 - DNA, 120 bp, Artificial Sequence
  ENSG00000131242_90 (sequence is synthesized)
actcatacagtgacaggagcctgacgtcccttcctagggacaagctctgcaggggacaggccagtgtgagctgggcggtgggaagggtccagcactgctgctgatggaggtcccctgagc

SEQ ID NO: 291813 - DNA, 120 bp, Artificial Sequence
  ENSG00000131242_91 (sequence is synthesized)
ctgccgttcctgatgctgtctgcagtggtggattcagggtttagttgtcctcaccagatggcatgacccttgggggacataccctggccaggggtccggtcctccaacttgtcacagggc

SEQ ID NO: 291814 - DNA, 120 bp, Artificial Sequence
  ENSG00000131242_92 (sequence is synthesized)
ccaaagatgggcccttttgtacaccccagaaggtcagcctggtggaggggctgttgccagtgagacgtatcccagaccgaaataccaaccaggctgtcactggggtgctcacatctacgt

SEQ ID NO: 291815 - DNA, 120 bp, Artificial Sequence
  ENSG00000131242_93 (sequence is synthesized)
ggagtcaaggtgcccaataagctgaattattaatcagaggggtggccgggaaggaacagcacaaaaagaagaggtgaggcctgaggtggttccggccaggtgtggctgcagggactggtg

SEQ ID NO: 291816 - DNA, 120 bp, Artificial Sequence
  ENSG00000131242_94 (sequence is synthesized)
ggggcggtccctccctgtgctgccctgagcgccccaccttctgactgccaggcctgcccctccatggcatgtgtgaccgacaccccctctatatgtgcggtgtccccgttcatctctctg

SEQ ID NO: 291817 - DNA, 120 bp, Artificial Sequence
  ENSG00000131242_95 (sequence is synthesized)
aaagctactggcccacacgccctcagtggacatgccagtgactcagggtctcggggcccagggtcccccgtgccacagcctgggttggggtgaaatggtgcaggccccaagagcttgccc

SEQ ID NO: 291818 - DNA, 120 bp, Artificial Sequence
  ENSG00000131242_96 (sequence is synthesized)
atagatgggaatgtgaggctgaggggcagcctcttgagactttccagtagtaacagttccactttaataccacgagaaacacagaggcatgctcttcaggaagttcgctaaggaatgttc

SEQ ID NO: 291819 - DNA, 120 bp, Artificial Sequence
  ENSG00000131242_97 (sequence is synthesized)
ccaggagcgtggctcacatttggtaatgcaaaccacacaaatgtctgtcagagaaaagggcctgggctgggtctcacatccaggcctggagcgccccctgctgtcaggttctcccctgac

SEQ ID NO: 291820 - DNA, 120 bp, Artificial Sequence
  ENSG00000131242_98 (sequence is synthesized)
ccctggtggactgagccagagccccagggccaaggtaaatggaaaacccggctcctgtgccttgcgtgtacctgtggcttcgtcattggaacgtgacgcaggcgggacaaggagcagccc

SEQ ID NO: 291821 - DNA, 120 bp, Artificial Sequence
  ENSG00000131242_99 (sequence is synthesized)
cgggccagggatctgagttggtctcccattagctccatggccttggacgtactgggtcacctccctgtgtgccccacagagcggctgtgtgggtgggtgagccgatgtaagtccagaccc

SEQ ID NO: 291822 - DNA, 120 bp, Artificial Sequence
  ENSG00000131242_100 (sequence is synthesized)
tgcccacgggtgagggctatgatgatgcctctgtgatgaagcccctttgcggcccttgaccgaggccgaggaggccgcctgggcttctggcagagaggacagctgccctggcactcctca

SEQ ID NO: 291823 - DNA, 120 bp, Artificial Sequence
  ENSG00000131242_101 (sequence is synthesized)
ggccccctgaggccccagtctccatgctgaggcttcccagagttgccgagccccacctggcggctggtgggctgctgagcaaatgactgggagttgggctctcaggcaggtacctccctg

SEQ ID NO: 291824 - DNA, 120 bp, Artificial Sequence
  ENSG00000131242_102 (sequence is synthesized)
cccccgtgtccctgcccctgtgcagtttggtgaggagacttcccaactccccggtgtctgagacctgctttgctaagttacccaccaggggttcattttacattttgactctattctaga

SEQ ID NO: 291825 - DNA, 120 bp, Artificial Sequence
  ENSG00000131242_103 (sequence is synthesized)
agctgctgttttgcatctgtttctggaggctggtgcctagttaagggtgactgctctcgctcagcccgcctcggcagctggcccaagagaggtggctgggacacgggaggtggtaaaaga

SEQ ID NO: 291826 - DNA, 120 bp, Artificial Sequence
  ENSG00000131242_104 (sequence is synthesized)
cagtgtgaacctgggccacaggacaaagtgcagaaagccagccctcgggaactgtctcctaacgtgtgcccgtcacacagctccgggggcgccattcgtgtaaaatatccgagtggtgtt

SEQ ID NO: 291827 - DNA, 120 bp, Artificial Sequence
  ENSG00000131242_105 (sequence is synthesized)
cccagagtcctgccgtatgcttggttccctaccacttccacccgcttggggccacctgctggtggtggggctgaattcctctctggagcccagagggcagtggaggcccagaagccatcc

SEQ ID NO: 291828 - DNA, 120 bp, Artificial Sequence
  ENSG00000131242_106 (sequence is synthesized)
ttccaggaaagaggacatgatggggaggtggtgggttgagaacgggatgctctgcaggagtcactgccagaagtgaccctgttcagttctgctgccaccgacggcccaactcacctgcac

SEQ ID NO: 291829 - DNA, 68 bp, Artificial Sequence
  ENSG00000131242_107 (sequence is synthesized)
gttcagttctgctgccaccgacggcccaactcacctgcacctattctcagaccatttaaaactgacct

SEQ ID NO: 291830 - DNA, 120 bp, Artificial Sequence
  ENSG00000131242_108 (sequence is synthesized)
gcagaggttgcagtgagctgaggtcacgccactgagactccgtctcaaaacagacaaacaaacaaaaaactgacctgaacacccaggctctgtcttcttgtggaatccctttaggattcc

SEQ ID NO: 291831 - DNA, 120 bp, Artificial Sequence
  ENSG00000131242_109 (sequence is synthesized)
ctttgtggaattcctgtgtgaacgctaacacagaggattattactgtcagagcccatgcctgtggtcatcagagggaggtgcagtgagcgctcagagaagagccctggatgagatgctgt

SEQ ID NO: 291832 - DNA, 120 bp, Artificial Sequence
  ENSG00000131242_110 (sequence is synthesized)
tggcggagaatgaaaagccaatatgatcattgccttcaagttacagagtctaacaggagggcccagtcacagaagccacaagaagactgtttctccatctagcagaaagacatccccgtg

SEQ ID NO: 291833 - DNA, 120 bp, Artificial Sequence
  ENSG00000131242_111 (sequence is synthesized)
ttgtctgaggatctgaaggatgcatacaagaagaatctgcgttcctactctctaatgaatgtttccacttattggaaaaataaaggccacgtgtggtggctcactcttgtaatcccaaca

SEQ ID NO: 291834 - DNA, 80 bp, Artificial Sequence
  ENSG00000131242_112 (sequence is synthesized)
tggtgcatgcctcgaaggagttagaggttgcagagctgagattgtgccacctcactccagcctgggcaacagagcaggac

SEQ ID NO: 291835 - DNA, 120 bp, Artificial Sequence
  ENSG00000131242_113 (sequence is synthesized)
aaagcctacccttcctgccacaccagagtatgcttatgaaagatcaggcctccaaaatgccccggctgcattgtaacatgaattacaagacactctgtcactgagcctcaccctctgcct

SEQ ID NO: 291836 - DNA, 120 bp, Artificial Sequence
  ENSG00000131242_114 (sequence is synthesized)
cgcggatgcgcaccccgccagctctcgggagccagcaccaacctgaggttccacagccagtgtgtgccagatccagaactgaaccaaatctgcccaagagcctcagtctccacatcttca

SEQ ID NO: 291837 - DNA, 120 bp, Artificial Sequence
  ENSG00000131242_115 (sequence is synthesized)
cagcacaggaaacgtggtgaaaccctgtctctacaaaaaatctgtaaaatagggtgatttattacctccctctgggggtgatgcaagaagcctgcttgcttctcatgtgaaatgaatgag

SEQ ID NO: 291838 - DNA, 120 bp, Artificial Sequence
  ENSG00000131242_116 (sequence is synthesized)
cacctggggaaccccagttgtcccggttgcccccgctcctggggtctgcaggcccaccttaggatggaagtggagcgcagcaaccaggtgtctacacaagatccactcctagaagctgca

SEQ ID NO: 291839 - DNA, 120 bp, Artificial Sequence
  ENSG00000131242_117 (sequence is synthesized)
gggcgggagcagtgggccctgctgaggggtggtcttgagctcctggccacaccctttctgggggcagcgaggtcacaggccccacctttgctgatggcgagctcatccccagggaacccg

SEQ ID NO: 291840 - DNA, 80 bp, Artificial Sequence
  ENSG00000131242_118 (sequence is synthesized)
gcggcccgcggatgcgcaccccgccagctctcgggagccaggtaagcggcggccccggggctggcgctcgcagggctccg

SEQ ID NO: 291841 - DNA, 120 bp, Artificial Sequence
  ENSG00000131242_119 (sequence is synthesized)
gcggcgcgcacctggctcggcccggcccgcggccccgggaagttggcggagagcggacttggcctgggaggtcgtgttacctgagccatctcgttcggccgcgagtagaagccgctgcca

SEQ ID NO: 291842 - DNA, 120 bp, Artificial Sequence
  ENSG00000131242_120 (sequence is synthesized)
gcggccgcgaccccgacggcttcctgcgcgtggagcgcgtcgcggcgctcggactgcgcttcggccagggcgaggaggtccttctgagcggtctgcacatccacccttgtctgggggaga

SEQ ID NO: 291843 - DNA, 120 bp, Artificial Sequence
  ENSG00000131242_121 (sequence is synthesized)
agggggtgaaagggaccggtaggggtgctctgcagccttggctcctcggctgcacacaccctgcccagacacggaaggaggtgtctgctggggccaccgtgtactcccgggccagtgtcg

SEQ ID NO: 291844 - DNA, 120 bp, Artificial Sequence
  ENSG00000131242_122 (sequence is synthesized)
ggtgacctctcattcaggctctgctgggcagccaggctggcagctggctgtgttggttgcagcaggccaggcaaagccaggctcggggagtggtggctgagcagagggctttcatgtggc

SEQ ID NO: 291845 - DNA, 120 bp, Artificial Sequence
  ENSG00000131263_0 (sequence is synthesized)
gcagtcgtttcctgtcgctgcttggtaacaatggggaagataatggctgcctgagcaacgtctccgagcaggcgctgggctagaggcgggtctcaaccagctactcattggaggcgggct

SEQ ID NO: 291846 - DNA, 120 bp, Artificial Sequence
  ENSG00000131263_1 (sequence is synthesized)
tgagagcggcggccagggaggtgcggagcagcctcggcggcggcggccgaaccaaccgagtcggatcctgaccctaaaacctagtattttccacttgttcatcaatatggaaaactcaga

SEQ ID NO: 291847 - DNA, 120 bp, Artificial Sequence
  ENSG00000131263_2 (sequence is synthesized)
ttccaatgacaaaggaagtggtgatcagtctgcagcacagcgcagaagtcagatggaccgattggatcgagaagaagctttctatcaatttgtaaataacctgagtgaagaagattatag

SEQ ID NO: 291848 - DNA, 120 bp, Artificial Sequence
  ENSG00000131263_3 (sequence is synthesized)
gcttatgagagataacaatttgctaggcaccccaggtgaaagtactgaggaagagttgctgagacgactacagcaaattaaagaaggcccaccaccgcaaaactcagatgaaaatagagg

SEQ ID NO: 291849 - DNA, 120 bp, Artificial Sequence
  ENSG00000131263_4 (sequence is synthesized)
aggagactcttcagatgatgtgtctaatggtgactctataatagactggcttaactctgtcagacaaactggaaatacaacaagaagtgggcaaagaggaaaccaatcttggagagcagt

SEQ ID NO: 291850 - DNA, 120 bp, Artificial Sequence
  ENSG00000131263_5 (sequence is synthesized)
gagtcggactaatccaaacagtggtgatttcagattcagtttagagataaatgttaaccgtaataatgggagccaaaattcagagaatgaaaatgagccatctgcaagacgttctagtgg

SEQ ID NO: 291851 - DNA, 120 bp, Artificial Sequence
  ENSG00000131263_6 (sequence is synthesized)
agaaaatgtggaaaacaacagccaaaggcaagtggaaaacccacgatctgaatcaacatctgcaaggccatctagatcagaacgaaattcaactgaagcgttaacagaggtcccacctac

SEQ ID NO: 291852 - DNA, 120 bp, Artificial Sequence
  ENSG00000131263_7 (sequence is synthesized)
cagaggtcagaggagggcaagaagcaggagcccagaccatcggagaaccagagcaagagctgaaagaagtaggtcacctctgcatccaatgagtgaaattccacgaagatctcatcatag

SEQ ID NO: 291853 - DNA, 120 bp, Artificial Sequence
  ENSG00000131263_8 (sequence is synthesized)
tatctcatctcagacttttgaacatcctttggtaaatgagacggagggaagttctagaacccggcaccatgtgacattgaggcagcaaatatctgggcctgagttgctaagtagaggtct

SEQ ID NO: 291854 - DNA, 120 bp, Artificial Sequence
  ENSG00000131263_9 (sequence is synthesized)
ttttgcagcttctggaacaagaaatgcttctcaaggagcaggttcttcagacacagctgccagtggtgaatctacaggatcaggacagagacctccaaccatagtccttgatcttcaagt

SEQ ID NO: 291855 - DNA, 120 bp, Artificial Sequence
  ENSG00000131263_10 (sequence is synthesized)
aagaagagttcgtcctggagaatatcggcagagagatagcatagccagcagaactcggtctaggtctcagacaccaaacaacactgtcacctatgaaagtgaacgaggaggttttaggcg

SEQ ID NO: 291856 - DNA, 120 bp, Artificial Sequence
  ENSG00000131263_11 (sequence is synthesized)
tacattttcacgttctgagcgggcaggtgtgagaacctatgtcagtaccatcagaattcccattcgtagaatcttaaatactggtttaagtgagactacatctgttgcaattcagaccat

SEQ ID NO: 291857 - DNA, 120 bp, Artificial Sequence
  ENSG00000131263_12 (sequence is synthesized)
gttaaggcagataatgacaggttttggtgagttaagctattttatgtacagtgatagcgactcagagcctactggctcagtctcaaatcgaaatatggaaagggcagagtcacggagtgg

SEQ ID NO: 291858 - DNA, 120 bp, Artificial Sequence
  ENSG00000131263_13 (sequence is synthesized)
aagaggaggttctggtggtggtagtagttctggttccagttcgagttccagttccagttcgagttccagttccagttcaagttccagttccagtcctagttccagttccggtggtgaaag

SEQ ID NO: 291859 - DNA, 120 bp, Artificial Sequence
  ENSG00000131263_14 (sequence is synthesized)
ttcagaaactagctcagatttatttgaaggcagtaatgaaggaagctcatcatcaggctcatcaggtgccaggcgagagggtcgacatagggccccagtcacatttgatgaaagtggctc

SEQ ID NO: 291860 - DNA, 120 bp, Artificial Sequence
  ENSG00000131263_15 (sequence is synthesized)
tttgcccttccttagcctggctcagtttttcctcttaaatgaggatgatgatgaccaacctagaggactcaccaaagaacagattgacaacttggcaatgagaagttttggtgaaaatga

SEQ ID NO: 291861 - DNA, 120 bp, Artificial Sequence
  ENSG00000131263_16 (sequence is synthesized)
tgcattaaaaacctgtagtgtttgcattacagaatatacagaaggcaacaaacttcgtaaactaccttgttcccatgagtaccatgtccactgcatcgatcgctggttatctgagaattc

SEQ ID NO: 291862 - DNA, 120 bp, Artificial Sequence
  ENSG00000131263_17 (sequence is synthesized)
tacctgtcctatttgtcgcagagcagtcttagcttctggtaacagagaaagtgttgtgtaattaagatctgaactctcagctatgtagctgatatagtgatgggcaaacaggaatcactt

SEQ ID NO: 291863 - DNA, 120 bp, Artificial Sequence
  ENSG00000131263_18 (sequence is synthesized)
gcttttatgtccactttttgagtggtacttaaatgtaaagtaacaacctgaattgagtcattgctttctgaaggaatcattgtcctttctccagtttttgttccagaataaaaggaaata

SEQ ID NO: 291864 - DNA, 120 bp, Artificial Sequence
  ENSG00000131263_19 (sequence is synthesized)
ttttaaaagccacgttataggacctaaaaatctgatttccgtaccagttaaattggtagcatcactgttactgataatttatcatatacacttgtcaatttttcctttgttatcttaaaa

SEQ ID NO: 291865 - DNA, 120 bp, Artificial Sequence
  ENSG00000131263_20 (sequence is synthesized)
gatctgccttagcaatggctcctttttcatgttgatctttaaattttcccacaccataagagaggagcaaaggaaattaccagtttagactaagttacagtatgtgtttcataagtgatt

SEQ ID NO: 291866 - DNA, 120 bp, Artificial Sequence
  ENSG00000131263_21 (sequence is synthesized)
aaagctatatcattcccagttattagttaacacaaattcagccacattctgagtattgtttgttcacctttcagacttggtgatactggacatgtcagtgtaaataacactaaggttagg

SEQ ID NO: 291867 - DNA, 120 bp, Artificial Sequence
  ENSG00000131263_22 (sequence is synthesized)
atcttctaagtgtataactgtctcctaagcccatcactgtggcacactgtagagtgagcttatagtttaattgagatatttatcttgtggaaatattaaaaagcctatgcttgtgtaagt

SEQ ID NO: 291868 - DNA, 120 bp, Artificial Sequence
  ENSG00000131263_23 (sequence is synthesized)
gaaaaaaaatcacattcatttgtttaaaaatgtaaagctattttgtagaggctcagtacttttccaatgcactgttgtatgaatgcattaaaaattgtaaagtaccatgcttagaactga

SEQ ID NO: 291869 - DNA, 120 bp, Artificial Sequence
  ENSG00000131263_24 (sequence is synthesized)
gaaaactgctttttgtgagccaacatagtaacaaacacaccaaacaaagtacaaagctgcttttgtaagtgtgtagatgtcaagagcagaacatatctataatatttaatgtgtgaacag

SEQ ID NO: 291870 - DNA, 120 bp, Artificial Sequence
  ENSG00000131263_25 (sequence is synthesized)
ctactgtgacatgcaaaggaaaggacagtgcagaattaaaccgtgttgaagaccagtggaaattgtataatttaacttggatttaggcaggaagtgaaatatgggaggagtaaagaaaac

SEQ ID NO: 291871 - DNA, 120 bp, Artificial Sequence
  ENSG00000131263_26 (sequence is synthesized)
tgaagaatttaaagttttcctgaagacagtaataatgcagacacaaactggtttcatatggtgagagcagccacagcagcagcttgacctggtattctacctgagtagatgaagcagaag

SEQ ID NO: 291872 - DNA, 120 bp, Artificial Sequence
  ENSG00000131263_27 (sequence is synthesized)
atcagcaagtttggcagagttttggtttaagaaaaacaaaccactactacctagcacaagttaaatttacaagtctgctcctcaaaaatgaaaaaatggaggaaagagactataaaacca

SEQ ID NO: 291873 - DNA, 120 bp, Artificial Sequence
  ENSG00000131263_28 (sequence is synthesized)
cttttagcatatgaattgcagttggtacacatgtgtgtgttaataggaaagtctcgaatttgtgttgtttttgagatttgtcatttaaggtaccagtgcacacttgatcatatttcatta

SEQ ID NO: 291874 - DNA, 120 bp, Artificial Sequence
  ENSG00000131263_29 (sequence is synthesized)
ctatctctaacacagtcctaacatctcaaatttaaagaccagttgaagattaagggatttttatcctttgttgaaagtcatgttgggttatttgaaattcaaattttaattgtgctgccc

SEQ ID NO: 291875 - DNA, 120 bp, Artificial Sequence
  ENSG00000131263_30 (sequence is synthesized)
atatatgaaaatgagactgctgactcgctatctatggacatgcactttatgttggtttcttagtagtaagagtaacttcatgataaccccagtcttcttgcctaatttcttttttgagac

SEQ ID NO: 291876 - DNA, 120 bp, Artificial Sequence
  ENSG00000131263_31 (sequence is synthesized)
tagctggggttaggattagaatgactatggagcagatatttgttcttctgggaaaagctttaacaggccaaaatagggattgaacttgtccttggcctttatcaaagcaagctagctacc

SEQ ID NO: 291877 - DNA, 120 bp, Artificial Sequence
  ENSG00000131263_32 (sequence is synthesized)
cagacgtagtcaaatactctacaaaataaacaagtctgctttaggaattgtctgggtaccttcactgttaccaacttagctgtaaagattatttcaaagctcactcttccatgatttctt

SEQ ID NO: 291878 - DNA, 120 bp, Artificial Sequence
  ENSG00000131263_33 (sequence is synthesized)
ctggctttcaatcctatctaagtatcaaggaaattaacttgtaaatatggtagttgtttactaaggatatgtactgctcttgcaaggaaataatgtccaaacaaagcttcacttattttt

SEQ ID NO: 291879 - DNA, 120 bp, Artificial Sequence
  ENSG00000131263_34 (sequence is synthesized)
tttaatataagcagatttcactgtttatggcgcttatgtaatacattttatctttttaaaaatttgtccgtgtaaaagtcaggattcctttatatttgtgagcctccttttctcctttcc

SEQ ID NO: 291880 - DNA, 120 bp, Artificial Sequence
  ENSG00000131263_35 (sequence is synthesized)
taaggatgtaatctacagttttcagatctgcagggtagtcttgattggctaaaaacaaatcaattttcttcttggcataaagtgtttcattattataggggtgttcattttaaatagttt

SEQ ID NO: 291881 - DNA, 120 bp, Artificial Sequence
  ENSG00000131263_36 (sequence is synthesized)
aaaaacaattgcagcacattctaagcataagagaaagttattgacaacaggtaccttcctaatctcccaagacgtacttactcatttgtgaagtattaaagtaagaggtaactcaagcag

SEQ ID NO: 291882 - DNA, 120 bp, Artificial Sequence
  ENSG00000131263_37 (sequence is synthesized)
aatgctggctatgaatgtagatattgaagctattcataaacactggaaatagaattttaagcttttagccttcagtggaatgcacatattggacatgtgcatgtgaacacctttttcagt

SEQ ID NO: 291883 - DNA, 120 bp, Artificial Sequence
  ENSG00000131263_38 (sequence is synthesized)
agcactcacggatttccattcgattgtatagaatgaatacaagtgttttagtggaatttgctacttaatttttaatcttgcgatgtccgtgattattacatgcttactagtgttgtggac

SEQ ID NO: 291884 - DNA, 120 bp, Artificial Sequence
  ENSG00000131263_39 (sequence is synthesized)
attgaagacaaggtcattcgtaggtgtcagattacaatggagaacaaaaatcgttttccccccacccacatccaaacaccattctcgagggagcatttcttgcaaaacaccttacatttc

SEQ ID NO: 291885 - DNA, 120 bp, Artificial Sequence
  ENSG00000131263_40 (sequence is synthesized)
attttctatctttgcactttttcttaagtacagaaaagttgtctttaagacctagtttgaacttcatgcagtaagaggaacaaggataaacaatgttgggagttcacattgttcagagca

SEQ ID NO: 291886 - DNA, 120 bp, Artificial Sequence
  ENSG00000131263_41 (sequence is synthesized)
taaggaaaagtaccaaaacccaaattttcttgaatatttcagatgtttttaaaaactcacttctagtctgaaacatttgaattgttttaactctgagcagctgacaaagttgaggttttt

SEQ ID NO: 291887 - DNA, 70 bp, Artificial Sequence
  ENSG00000131263_42 (sequence is synthesized)
aactctgagcagctgacaaagttgaacttggttgcccaggatgaagtgcaatggagcgatctcggctcac

SEQ ID NO: 291888 - DNA, 120 bp, Artificial Sequence
  ENSG00000131263_43 (sequence is synthesized)
ttacaggcgtgagccaccatgtccagccaaagttgaggtttattagtactattagaaacaaaattgagcaagttaagttaaaagtttgctgactttgtatcaacactatagaagatgagc

SEQ ID NO: 291889 - DNA, 120 bp, Artificial Sequence
  ENSG00000131263_44 (sequence is synthesized)
aaagtttgctgactttgtatcaacactatagaagatgagccaccttgttaatttggaatatttgctctgaaaagaacatgttagttacaccttaatggtgttaatggaggtggggattga

SEQ ID NO: 291890 - DNA, 120 bp, Artificial Sequence
  ENSG00000131263_45 (sequence is synthesized)
gaaaagtgttcacattagtgttggaatgtaggtaattgtacagtttataagacctttagcaccaggaaataaaatatgtgtgtgtacacacacagtttttaaaaacgattggaattcatc

SEQ ID NO: 291891 - DNA, 120 bp, Artificial Sequence
  ENSG00000131263_46 (sequence is synthesized)
caaaccttaagattaggaaactgattggctgtaagtgttgcctcaagtaatgtgtcccccgccccataacatgtcttttctgtgccaagtatcctctcctagtgtcagtgtctcaaatta

SEQ ID NO: 291892 - DNA, 120 bp, Artificial Sequence
  ENSG00000131263_47 (sequence is synthesized)
tatttatgaagggttatcacataatatgctttgtatttaactacctgcttcccaggcgtccatgacatgaaatgggtgaagcatcagccatgactttcggtcagttcccaaaatacccaa

SEQ ID NO: 291893 - DNA, 120 bp, Artificial Sequence
  ENSG00000131263_48 (sequence is synthesized)
atgatagggaggtaaagattgcaaaattcctcttaaaaggccatttttacagcttgctaaaatacagtggcaccttatggttgttaatattttttcttttaaagatggagaatgttttta

SEQ ID NO: 291894 - DNA, 120 bp, Artificial Sequence
  ENSG00000131263_49 (sequence is synthesized)
ttcttccccttttctcctttgttcttttgcgaacaaaaaaaattataatctgccttatttgattttttttttaagttttaccttacaggcttccctgtcacatgttttaccatattaagt

SEQ ID NO: 291895 - DNA, 120 bp, Artificial Sequence
  ENSG00000131263_50 (sequence is synthesized)
acatagaagccatgtttgcagggcacttttattctcctagtcttataagactatgctaattgttactttctgaagtattctgtaccttagtatgcaagattgttaaggcacatgttaaag

SEQ ID NO: 291896 - DNA, 120 bp, Artificial Sequence
  ENSG00000131263_51 (sequence is synthesized)
tgtcaggtgtgtttttttccctttaattcttcagtatgtttatattcaataacagtattgtaattcattgagttaactagtaaattgtgtgcttttgaaaaaacatgaaaaatgtaaatt

SEQ ID NO: 291897 - DNA, 120 bp, Artificial Sequence
  ENSG00000131263_52 (sequence is synthesized)
tgtaaattgacagcatacttcatttggaaaaaagtaaaagatccgaggaactagtatgtcacttatttatttttattttattttattttttactttttgagacagggtcttgctctgtca

SEQ ID NO: 291898 - DNA, 120 bp, Artificial Sequence
  ENSG00000131263_53 (sequence is synthesized)
acattgcctggctaattttttgtggagatggggtttcgccatgttgtccaggctgttcttgaactcctgggctcaggcaatttgcctgcctcattctcccaaagtgctgggattataggc

SEQ ID NO: 291899 - DNA, 120 bp, Artificial Sequence
  ENSG00000131263_54 (sequence is synthesized)
agccttacttatttttaaatcagattttttaatcaactaaaacagctatgagttaagtacctgccctgcaaaaatttttagaaaaagttttaggattatgaaattaagaattattttcct

SEQ ID NO: 291900 - DNA, 120 bp, Artificial Sequence
  ENSG00000131263_55 (sequence is synthesized)
taactggaacagttctaaaatttatctgatacttctctaacaagtgagtgatctcatgtaaccccagtttgtatcttaaaggctgcagcatagaattgagctgtataacagtgttagaac

SEQ ID NO: 291901 - DNA, 120 bp, Artificial Sequence
  ENSG00000131263_56 (sequence is synthesized)
tgtcaagtgataatcacagaacagtttgtatcggttttataattctcatgtcttgatcagatctgaaggaaataggcataccctccaacattctaaaaattatttatttttattaggatt

SEQ ID NO: 291902 - DNA, 120 bp, Artificial Sequence
  ENSG00000131263_57 (sequence is synthesized)
tgtttattaaagttccacgagctgctttatggtcagttgggctgagtagtagatatcttaaagacatgcagtgaaagtgaaccctgtcatatcatggtgcctctttcaaggttcctctgt

SEQ ID NO: 291903 - DNA, 120 bp, Artificial Sequence
  ENSG00000131263_58 (sequence is synthesized)
aagttcctcatcttgcagaattatttcaataccaaggtatggttgaaccagctgtccagccttaactctatttagtgccccattactaatgttcttttaactggtttgtatgtgttttaa

SEQ ID NO: 291904 - DNA, 120 bp, Artificial Sequence
  ENSG00000131263_59 (sequence is synthesized)
ctgtccagtgtttggattttacctcttgatagctccatttgtccctggtgctgcttttaaggatgtagggccatgtgatcaggtatcaagttgagtaggtacgcagttggcctggtgatg

SEQ ID NO: 291905 - DNA, 120 bp, Artificial Sequence
  ENSG00000131263_60 (sequence is synthesized)
tatctgtgcctgttttatcttctcccaggaagagctgctttggtatagttgtttacttggattcatacaaagaacagggcagcaatcttggaaagctttctgaagcttataagaacctga

SEQ ID NO: 291906 - DNA, 120 bp, Artificial Sequence
  ENSG00000131263_61 (sequence is synthesized)
aggggtttggagggggaacagtaacaaaggctgcctttatgtctttggtcacaaagcacatagatgtatgttctgtaaagactaaagtgattgttataccagggcttcctgaccttcggg

SEQ ID NO: 291907 - DNA, 120 bp, Artificial Sequence
  ENSG00000131263_62 (sequence is synthesized)
agagactcaaaaaagcagagaggagcacaaagtgaagttaatttggttggcttgctttatctggtttctcattttctttcaatttaaacctgaacataacacccttctccgatacctatc

SEQ ID NO: 291908 - DNA, 120 bp, Artificial Sequence
  ENSG00000131263_63 (sequence is synthesized)
cagcagactcctggttgggaagccctgtattaaattttgagaatgtacacagttttcttttgtacagtgctttacaactgctaaaagttaacttgtttaaagcaaaacaagaccttgaaa

SEQ ID NO: 291909 - DNA, 120 bp, Artificial Sequence
  ENSG00000131263_64 (sequence is synthesized)
ggtcaatcatattaaagctggtttgattattaatagttatcttttaggaagaagcttttttccctatgtaagatgtcatactgcagatttaaaatatagactatcaataaaatgcatgaa

SEQ ID NO: 291910 - DNA, 120 bp, Artificial Sequence
  ENSG00000131263_65 (sequence is synthesized)
gtgatcatttgtgcttgatcatctctccttgggtttttctttaaaaaggggaatctgctataaaggttctgttgcttcaaaccaatgtcaaatagacttgatttttagagtcatggaatt

SEQ ID NO: 291911 - DNA, 120 bp, Artificial Sequence
  ENSG00000131263_66 (sequence is synthesized)
acagtgcaaccttgatttttattcccctcactgctatgagtgtgggcaggtactggtttatatgttataacttccgttttatctgtgttgtgtagttgaatggcttaatcgttgagtggt

SEQ ID NO: 291912 - DNA, 120 bp, Artificial Sequence
  ENSG00000131263_67 (sequence is synthesized)
aaaataaaagattatattccaatacaagaatcctggaaagatttatgtgaatgacattttaagtaggcgcatctttgctgtttcttgtattctcgccattgctctgaccactcccttgct

SEQ ID NO: 291913 - DNA, 120 bp, Artificial Sequence
  ENSG00000131263_68 (sequence is synthesized)
tgccctgtatatatacaaaaacttgtaggtgtgcacgtgtgcttgtacttctgtcttccatttctatcttaatctcttaaacatattgcttaagccactaagatgtccttgtttcaagta

SEQ ID NO: 291914 - DNA, 120 bp, Artificial Sequence
  ENSG00000131263_69 (sequence is synthesized)
aatcgtcacattgtgacacctggtgtattgtattatagtttcatttcctctggtgcctgcagagctatctgtcattggcatcataactcggtttctcaggatagttttgatgtagtcagc

SEQ ID NO: 291915 - DNA, 120 bp, Artificial Sequence
  ENSG00000131263_70 (sequence is synthesized)
tcttcaactcatgaccttcccaaggttttaagtttagtgtcattcatgattttattatttgaaactcaataccaccatcaaaaagttagtgctctagacaatgaagccaaagcacaggca

SEQ ID NO: 291916 - DNA, 120 bp, Artificial Sequence
  ENSG00000131263_71 (sequence is synthesized)
aaaagttagtgctctagacaatgaagccaaagcacaggcatcttaggtcagtgaaaaggatccagacataaattagccaggtgtggtggtacacagctgtggtcccagctacttgggagg

SEQ ID NO: 291917 - DNA, 120 bp, Artificial Sequence
  ENSG00000131263_72 (sequence is synthesized)
gcagtgagccatgatcatgctgatgcactccagcctgggttacagagcaaaaccttgtctcaaaaaaacccccagatacctagaagaaaggattcgataaatctgggtggattataaact

SEQ ID NO: 291918 - DNA, 120 bp, Artificial Sequence
  ENSG00000131263_73 (sequence is synthesized)
gaactcttaatggtcattttaaaaaataagaaagcaagggtccagtttctttgaggtctttgaatttagacaagatttaactataaggccttgcatggattactaactataattaaatta

SEQ ID NO: 291919 - DNA, 120 bp, Artificial Sequence
  ENSG00000131263_74 (sequence is synthesized)
gctaaacttttctggttgctgtcaggcattgtattaagtattctatataaattatttaatcatcacagtgactgtgaggtgaaagtataccacccattttataggtaatgcagctgagat

SEQ ID NO: 291920 - DNA, 120 bp, Artificial Sequence
  ENSG00000131263_75 (sequence is synthesized)
acagatgtttggtaatttgcccaggtcacatagtaagtagcagattatttgcaatcatctttgatgcagtcatcttccttgtgctcttaatcccactactatatgacttctaatttgttt

SEQ ID NO: 291921 - DNA, 120 bp, Artificial Sequence
  ENSG00000131263_76 (sequence is synthesized)
cttagtatttatcccaagccctagactagattgcttatgaggtgtgatttcttaggaaaaacatcagttttggctggtttgccaagaaaaaaaaaggccaaattggtttttgtttatttt

SEQ ID NO: 291922 - DNA, 60 bp, Artificial Sequence
  ENSG00000131263_77 (sequence is synthesized)
gccaagaaaaaaaaaggccaaattggtttttgtttatttttttgtttgtttgagatggat

SEQ ID NO: 291923 - DNA, 120 bp, Artificial Sequence
  ENSG00000131263_78 (sequence is synthesized)
acaggcgtgagccaccacgcccggccgcaaattgttttttgtttttttgttttttggaggattaatggtaatatactgtaaattcagtaaagcactgggcattaccagatacaccttagc

SEQ ID NO: 291924 - DNA, 120 bp, Artificial Sequence
  ENSG00000131263_79 (sequence is synthesized)
gggcattaccagatacaccttagcactatgaataacatgaactatcattttagcagtttaagtgtaccttgtaatcagccctagggcaaacggtatcaaggtgttttatttccagaagtc

SEQ ID NO: 291925 - DNA, 120 bp, Artificial Sequence
  ENSG00000131263_80 (sequence is synthesized)
tcaaaatagactggaataaaaatttggtgaattcatcaacacagacaatgggtccacgtcttgcagctacagctgctgcagctactcctgctgtccgcaccgttccacagtataaatatg

SEQ ID NO: 291926 - DNA, 120 bp, Artificial Sequence
  ENSG00000131263_81 (sequence is synthesized)
ctgcgggagtttgcaatcctcagcaacatcttaatgcacagccacaagttacagtgcaacagcctgctattcatgtacaaggtcaggaacctttgactgtttccatgttggcatctgccc

SEQ ID NO: 291927 - DNA, 120 bp, Artificial Sequence
  ENSG00000131263_82 (sequence is synthesized)
ctcaagagcaaaagcaaatgttgggtgaatggctgtttcctcttattcaagccatgcaccctactcttgccggtaaaatcactggcgtgttgttggagattgataattcagaacttcttc

SEQ ID NO: 291928 - DNA, 120 bp, Artificial Sequence
  ENSG00000131263_83 (sequence is synthesized)
atatgctcaagtctccagagtcactccattctaaggttgatgaagctgtagctgtactacaagcccaccaagctaaagagactgcccagaaagcagttaacagtgccaccggtgttccaa

SEQ ID NO: 291929 - DNA, 120 bp, Artificial Sequence
  ENSG00000131263_84 (sequence is synthesized)
ctgtttaaaattgatcagggaccacgaaaagaaacttgtgcttcaccaaagaaaaatatctaaacatcgaaaaacttaaatatggaaaaaaatatcaaaatataaaagaaggaaactgaa

SEQ ID NO: 291930 - DNA, 120 bp, Artificial Sequence
  ENSG00000131264_0 (sequence is synthesized)
atgtacggaagctgtcttttggagaaagaagcaggcatgtacccgggcactctcatgagccctgggggcgacggcacagctgggacaggcggcacagggggcggtgggagtccgatgcca

SEQ ID NO: 291931 - DNA, 120 bp, Artificial Sequence
  ENSG00000131264_1 (sequence is synthesized)
gcctccaatttcgctgcggcaccggctttctcgcactatatggggtatcctcatatgcccagcatggatcctcactggccgtctctgggagtctggggctcaccctacagtcccccgcga

SEQ ID NO: 291932 - DNA, 120 bp, Artificial Sequence
  ENSG00000131264_2 (sequence is synthesized)
gaagactggagcgtgtatcctgggccgtctagtacaatgggcacagtgccggtgaacgacgtgacctctagccccgccgctttctgctcgaccgactacagcaacttgggccctgtgggc

SEQ ID NO: 291933 - DNA, 120 bp, Artificial Sequence
  ENSG00000131264_3 (sequence is synthesized)
ggtggaactagcggcagcagcctaccaggccaggctggcgggtcgcttgtcccgacggacgcaggcgccgccaaggccagttcccccagcaggagccgccacagcccctatgcatggatg

SEQ ID NO: 291934 - DNA, 120 bp, Artificial Sequence
  ENSG00000131264_4 (sequence is synthesized)
cgcaagacggtgcaggtgacggggaaaaccaggacaaaagaaaagtatcgtgtagtttacactgatcatcaaagattggagctggaaaaggaattccattgcaatagatatatcaccatc

SEQ ID NO: 291935 - DNA, 120 bp, Artificial Sequence
  ENSG00000131264_5 (sequence is synthesized)
cagagaaaatcagagctggcagttaacctgggcctttccgagagacaggtgaaaatctggtttcagaatcgcagagccaaggagagaaagatgatcaaaaagaaaatctcccagtttgag

SEQ ID NO: 291936 - DNA, 120 bp, Artificial Sequence
  ENSG00000131264_6 (sequence is synthesized)
ccatctgctgttcgtggatttcaacctattgagatacagcaggttatagtctccgaatgaaagaaagcaaagagaaatttaaagtgccctttttttagtgatgtcttttgggtctctaag

SEQ ID NO: 291937 - DNA, 120 bp, Artificial Sequence
  ENSG00000131264_7 (sequence is synthesized)
ctatctacaggggagttggagcagggtgtaattccctgtaaggcagtatttggaacagatggatgcacaatgggttgaagataatttaggggactcttacttttagaaactatccccaga

SEQ ID NO: 291938 - DNA, 120 bp, Artificial Sequence
  ENSG00000131264_8 (sequence is synthesized)
aaactcctgtcacgtgctgtgctatatgtcagtcactcaggaatcttagtggtaaggtatataattaaaagctagaatcacaggcccttccaactctgttcacaatttcagaaacttgct

SEQ ID NO: 291939 - DNA, 120 bp, Artificial Sequence
  ENSG00000131264_9 (sequence is synthesized)
tatgaatagactgtaaaatacaattttgccagaaagcacatttgtgtatgtgtacttctgtttgttatttgatgctaggtgttttcttttatgctatctttaaggagtgagaagaaggta

SEQ ID NO: 291940 - DNA, 120 bp, Artificial Sequence
  ENSG00000131264_10 (sequence is synthesized)
aaccgaagtttatctatctttagctacctttccaagtgtttaattcaaaagctaacagaatttttataataagataaatgttttaaaaatcatcagaaggtgattctgattccattgtca

SEQ ID NO: 291941 - DNA, 120 bp, Artificial Sequence
  ENSG00000131264_11 (sequence is synthesized)
ctgcttaacaagaataaccaataaaaaagacaattttggccctcaatcatacttgtctggcatcaattatctcagaactttcaacttgcagtgtcattttaaaatcttgtcaaaacaatg

SEQ ID NO: 291942 - DNA, 120 bp, Artificial Sequence
  ENSG00000131269_0 (sequence is synthesized)
cctcgctcaagatggcgctgctcgcgatgcattcttggcgctgggcggccgcggcggctgctttcgaaaagcgccggcactccgcgattctgatccggcctttagtctctgttagcggct

SEQ ID NO: 291943 - DNA, 120 bp, Artificial Sequence
  ENSG00000131269_1 (sequence is synthesized)
caggtccgcagtggaggccacatcaactcggcgccttgggaaccgctcgagcctaccagcagattccagagtcattaaaaagtatcacatggcagagattgggaaaaggcaattcaggac

SEQ ID NO: 291944 - DNA, 120 bp, Artificial Sequence
  ENSG00000131269_2 (sequence is synthesized)
agttcttagatgctgcaaaggctctccaggtatggccactgatagaaaagaggacatgttggcatggtcatgcaggaggaggactccacacagacccaaaagaagggttaaaagatgttg

SEQ ID NO: 291945 - DNA, 120 bp, Artificial Sequence
  ENSG00000131269_3 (sequence is synthesized)
atactcggaaaatcataaaagcaatgctttcttatgtgtggcccaaagacaggccagatctacgagctagagttgccatttcgctgggatttttgggtggtgcaaaggccatgaatattg

SEQ ID NO: 291946 - DNA, 120 bp, Artificial Sequence
  ENSG00000131269_4 (sequence is synthesized)
tggttcccttcatgtttaaatatgctgtagacagcctcaaccagatgtcgggaaacatgctgaacctgagtgatgcaccaaatacagttgcaaccatggcaacagcagttctgattggct

SEQ ID NO: 291947 - DNA, 120 bp, Artificial Sequence
  ENSG00000131269_5 (sequence is synthesized)
atggtgtatcaagagctggagctgctttttttaacgaagttcgaaatgcagtatttggcaaggtagcccagaattcaatccgaagaatagccaaaaatgtctttctccatcttcacaacc

SEQ ID NO: 291948 - DNA, 120 bp, Artificial Sequence
  ENSG00000131269_6 (sequence is synthesized)
tggatctgggttttcacctgagcagacagacgggagctttatctaaggctattgacagaggaacaaggggtatcagttttgtcctgagtgctttggtatttaatcttcttcccatcatgt

SEQ ID NO: 291949 - DNA, 120 bp, Artificial Sequence
  ENSG00000131269_7 (sequence is synthesized)
ttgaagtgatgcttgtcagtggtgttttgtattacaaatgcggtgcccagtttgctttggtaacccttggaacacttggtacatacacagcattcacagttgcagtcacacggtggagaa

SEQ ID NO: 291950 - DNA, 120 bp, Artificial Sequence
  ENSG00000131269_8 (sequence is synthesized)
ctagatttagaatagaaatgaacaaagcagataatgatgcaggtaatgctgctatagactcactgctgaattatgaaactgtgaagtattttaataatgaaagatatgaagcacagagat

SEQ ID NO: 291951 - DNA, 120 bp, Artificial Sequence
  ENSG00000131269_9 (sequence is synthesized)
atgatggatttttgaagacgtatgagactgcttcattgaaaagtacctctactctggctatgctgaactttggtcaaagtgctattttcagtgtcggtttaacagctataatggtgctcg

SEQ ID NO: 291952 - DNA, 120 bp, Artificial Sequence
  ENSG00000131269_10 (sequence is synthesized)
ccagtcagggaattgtggcaggtacccttactgttggagatctagtaatggtgaatggactgctttttcagctttcattacccctgaactttctgggaactgtatatagagagactagac

SEQ ID NO: 291953 - DNA, 120 bp, Artificial Sequence
  ENSG00000131269_11 (sequence is synthesized)
aagcactcatagatatgaacaccttgtttactctactcaaggtagacacccaaattaaagacaaagtgatggcatctccccttcagatcacaccacagacagctaccgtggcctttgata

SEQ ID NO: 291954 - DNA, 120 bp, Artificial Sequence
  ENSG00000131269_12 (sequence is synthesized)
atgtgcattttgaatacattgagggccagaaagtccttagtggaatatcctttgaagtccctgcaggaaagaaagtggccattgtaggaggtagtgggtcagggaaaagcacaatagtga

SEQ ID NO: 291955 - DNA, 120 bp, Artificial Sequence
  ENSG00000131269_13 (sequence is synthesized)
ggctattatttcgcttctatgagcctcaaaagggtagcatttatcttgctggtcaaaatatacaagatgtgagcctggaaagccttcggagggcagtgggagtggtacctcaggatgctg

SEQ ID NO: 291956 - DNA, 120 bp, Artificial Sequence
  ENSG00000131269_14 (sequence is synthesized)
tcctcttccataatactatttattacaacctcttatatggaaacatcagtgcttcacctgaggaagtgtatgcagtggcaaaattagctggacttcatgatgcaattcttcgaatgccac

SEQ ID NO: 291957 - DNA, 120 bp, Artificial Sequence
  ENSG00000131269_15 (sequence is synthesized)
atggatatgacacccaagtaggggaacgaggactcaagctttcaggaggagaaaagcaaagagtagcaattgcaagagccattttgaaggaccccccagtcatactctatgatgaagcta

SEQ ID NO: 291958 - DNA, 120 bp, Artificial Sequence
  ENSG00000131269_16 (sequence is synthesized)
cttcatcgttagattcgattactgaagagactattcttggtgccatgaaggatgtggtcaaacacagaacttctattttcattgcacacagattgtcaacagtggttgatgcagatgaaa

SEQ ID NO: 291959 - DNA, 120 bp, Artificial Sequence
  ENSG00000131269_17 (sequence is synthesized)
tcattgtcttggatcagggtaaggtagccgaacgtggtacccaccatggtttgcttgctaaccctcatagtatctattcagaaatgtggcatacacagagcagccgtgtgcagaaccatg

SEQ ID NO: 291960 - DNA, 120 bp, Artificial Sequence
  ENSG00000131269_18 (sequence is synthesized)
ataaccccaaatgggaagcaaagaaagaaaatatatccaaagaggaggaaagaaagaaactacaagaagaaattgtcaatagtgtgaaaggctgtggaaactgttcgtgctaagtcacat

SEQ ID NO: 291961 - DNA, 120 bp, Artificial Sequence
  ENSG00000131269_19 (sequence is synthesized)
atttgcactgaagcagaattgttttattaaaaaaatcatacattcccattttctataatccttcttttagataagatttatttaaaaggggatttgagttttacatctttcatagtctat

SEQ ID NO: 291962 - DNA, 120 bp, Artificial Sequence
  ENSG00000131269_20 (sequence is synthesized)
ttaatgtggcatctgtatttatccccaaattattttcttgtcactgtcctggttgtgctcaatgcatactttttgctacctgtttgatattaccacattaccctcttgaggcctgacatt

SEQ ID NO: 291963 - DNA, 120 bp, Artificial Sequence
  ENSG00000131269_21 (sequence is synthesized)
catttgatctatagccagatgaatcagattggtttcccaatttttatagtttttaaaacctttatgctgacaatttagagggaaagtgtctgtttcttaacatgaaagaaaaagaggata

SEQ ID NO: 291964 - DNA, 120 bp, Artificial Sequence
  ENSG00000131269_22 (sequence is synthesized)
gtgtaggttcattgtttcttctccctccttcgtccaattgaaattgatgtgaaaatgaatttataaacttttaaaattagaatgtatcagaaatagacatgcatttatagtttgatgtct

SEQ ID NO: 291965 - DNA, 67 bp, Artificial Sequence
  ENSG00000131269_23 (sequence is synthesized)
aatgtatcagaaatagacatgcatttatagtttgatgtcttacttgataggttacttacgacagatt

SEQ ID NO: 291966 - DNA, 120 bp, Artificial Sequence
  ENSG00000131269_24 (sequence is synthesized)
ggctctctgcaacctctgtcttctgagttcaagcaattatcatgccttggcctcccaagtagctggaattacaggcgcatgacaccacacctggctaatttttctgtttttagtagagac

SEQ ID NO: 291967 - DNA, 120 bp, Artificial Sequence
  ENSG00000131269_25 (sequence is synthesized)
tacaggcttgagccaccgcacccggccgctagaatttttgaagtatttgcaactatgtactttttgaaggaaaaaaaccttcattctcatgtcgctatgtagaatattcttcatcattaa

SEQ ID NO: 291968 - DNA, 120 bp, Artificial Sequence
  ENSG00000131269_26 (sequence is synthesized)
tctcatgtcgctatgtagaatattcttcatcattaagcagcaccataactatcatctagtgattagaattttatttttccataaaaatatgaggcactgtttttgttttggacaaaacta

SEQ ID NO: 291969 - DNA, 120 bp, Artificial Sequence
  ENSG00000131269_27 (sequence is synthesized)
cacatttttctttaaagatttacaaactcctatgtaatttgaaagttgctatactgggagtaatctgaaaagcttagaaagttcatttccttttatatttccatcttaaatgtgctgctt

SEQ ID NO: 291970 - DNA, 120 bp, Artificial Sequence
  ENSG00000131269_28 (sequence is synthesized)
tttctattcgaagtttacaaagaaacaagtaaatgggatgtcgtgcatgtatgcacatgctcacacgtgtataaatcagtgtccatttaaaaaatattaacatttaggtaaatagagtat

SEQ ID NO: 291971 - DNA, 120 bp, Artificial Sequence
  ENSG00000131269_29 (sequence is synthesized)
tacatattatactctttagatgatcaagactctaatctgtgttgacacttcagaatttattaaaagatcttcccttacttttcagtaatttaattagtttctttaagcctgacataacga

SEQ ID NO: 291972 - DNA, 120 bp, Artificial Sequence
  ENSG00000131269_30 (sequence is synthesized)
ggaggagcccaaacaacataatcaagttttaccttgggaggaaaaaaagttttacctgctagaaagaattaataaaatattgctatacattcacttagaaagttcttctcttttccagta

SEQ ID NO: 291973 - DNA, 120 bp, Artificial Sequence
  ENSG00000131269_31 (sequence is synthesized)
tgaacttgctttcatttgtttggtagtaatcattcaatttgaaaacatatgcacctcatgaatggccacataactatgtaataaggttttatttctcagaaaaggtcctaatattttatt

SEQ ID NO: 291974 - DNA, 120 bp, Artificial Sequence
  ENSG00000131269_32 (sequence is synthesized)
ggtttatagttttaagaaatttttcatgataatttgatatgggagagattaattttagtattgttgacattggtgggtggatagctgaacttatctaacttaggtgtccactcttgctat

SEQ ID NO: 291975 - DNA, 120 bp, Artificial Sequence
  ENSG00000131269_33 (sequence is synthesized)
ataaaggtaatttgataagtaacatgaaaccagtatttcgtagtctttgctgccagagtaagtgatgcaagatcttgcttttaaagctagagttaatactgagatgcataatcaactgaa

SEQ ID NO: 291976 - DNA, 120 bp, Artificial Sequence
  ENSG00000131269_34 (sequence is synthesized)
aagtggattagtttttttttttttttccttttcaacatttcttactctgaaaccatagttgttactgctcttctgggggtggggtgagtacttttaataaaccagttgcattactggaaa

SEQ ID NO: 291977 - DNA, 120 bp, Artificial Sequence
  ENSG00000131269_35 (sequence is synthesized)
tcagggtgggtaatttagttatttgtaaaattctgtattataggctgatgattcccaatgtaatatttctttctttatcaaaatgattactgtggtttaaaactggggtttcctaacatt

SEQ ID NO: 291978 - DNA, 120 bp, Artificial Sequence
  ENSG00000131269_36 (sequence is synthesized)
aataggagctaaataacctttcttcatctccaatttcaggaaaagcacaatagtgaggctattatttcgcttctatgagcctcaaaagggtagcatttatcttgctggtcaaaatataca

SEQ ID NO: 291979 - DNA, 120 bp, Artificial Sequence
  ENSG00000131269_37 (sequence is synthesized)
ggggacctgtagggaaaaggttgccctcctgacctcggggcagagagagcaccaagaagaaagtcatggctaactgggagcagcacagattccagagtcattaaaaagtatcacatggca

SEQ ID NO: 291980 - DNA, 120 bp, Artificial Sequence
  ENSG00000131269_38 (sequence is synthesized)
tgataagaagagcattggactgaaatgggtctagtccagattcttgctcggtgaccttgagcaaatcacttaacttttctgggcctatatcctttctattttaaaaatttgatatgctag

SEQ ID NO: 291981 - DNA, 120 bp, Artificial Sequence
  ENSG00000131269_39 (sequence is synthesized)
ttcatgtttcagggaatataatttgtcaaaagatattgtatatgaacttcaactctacaactcagtaaaatgaactgtgatcaggagaataaggaaatgttcagtgtattacttggtggt

SEQ ID NO: 291982 - DNA, 120 bp, Artificial Sequence
  ENSG00000131323_0 (sequence is synthesized)
cttccccgccccccgccatggggcagcccggggagcagaacgctgcggaccgcggcggaggacgcgcccggcgcccctgagccggccgagcggcgacggaccgcgagatgaggaaaatga

SEQ ID NO: 291983 - DNA, 120 bp, Artificial Sequence
  ENSG00000131323_1 (sequence is synthesized)
tgaggaaaatgaggcccaaagaagtgatgccacttggttaaggtcccagagcaggtcagaatcagacctaggatcagaaacctggctcctggctcctggctccctactcttctaaggatc

SEQ ID NO: 291984 - DNA, 120 bp, Artificial Sequence
  ENSG00000131323_2 (sequence is synthesized)
gctgtcctgacagaagagaactcctctttcctaaaatggagtcgagtaaaaagatggactctcctggcgcgctgcagactaacccgccgctaaagctgcacactgaccgcagtgctggga

SEQ ID NO: 291985 - DNA, 120 bp, Artificial Sequence
  ENSG00000131323_3 (sequence is synthesized)
cgccagtttttgtccctgaacaaggaggttacaaggaaaagtttgtgaagaccgtggaggacaagtacaagtgtgagaagtgccacctggtgctgtgcagcccgaagcagaccgagtgtg

SEQ ID NO: 291986 - DNA, 120 bp, Artificial Sequence
  ENSG00000131323_4 (sequence is synthesized)
ggcaccgcttctgcgagagctgcatggcggccctgctgagctcttcaagtccaaaatgtacagcgtgtcaagagagcatcgttaaagataaggtgtttaaggataattgctgcaagagag

SEQ ID NO: 291987 - DNA, 120 bp, Artificial Sequence
  ENSG00000131323_5 (sequence is synthesized)
aaattctggctcttcagatctattgtcggaatgaaagcagaggttgtgcagagcagttaatgctgggacatctgctggtgcatttaaaaaatgattgccattttgaagaacttccatgtg

SEQ ID NO: 291988 - DNA, 120 bp, Artificial Sequence
  ENSG00000131323_6 (sequence is synthesized)
tgcgtcctgactgcaaagaaaaggtcttgaggaaagacctgcgagaccacgtggagaaggcgtgtaaataccgggaagccacatgcagccactgcaagagtcaggttccgatgatcgcgc

SEQ ID NO: 291989 - DNA, 120 bp, Artificial Sequence
  ENSG00000131323_7 (sequence is synthesized)
tgcagaaacacgaagacaccgactgtccctgcgtggtggtgtcctgccctcacaagtgcagcgtccagactctcctgaggagcgagttgagtgcacacttgtcagagtgtgtcaatgccc

SEQ ID NO: 291990 - DNA, 120 bp, Artificial Sequence
  ENSG00000131323_8 (sequence is synthesized)
ccagcacctgtagttttaagcgctatggctgcgtttttcaggggacaaaccagcagatcaaggcccacgaggccagctccgccgtgcagcacgtcaacctgctgaaggagtggagcaact

SEQ ID NO: 291991 - DNA, 120 bp, Artificial Sequence
  ENSG00000131323_9 (sequence is synthesized)
cgctcgaaaagaaggtttccttgttgcagaatgaaagtgtagaaaaaaacaagagcatacaaagtttgcacaatcagatatgtagctttgaaattgaaattgagagacaaaaggaaatgc

SEQ ID NO: 291992 - DNA, 120 bp, Artificial Sequence
  ENSG00000131323_10 (sequence is synthesized)
aaactgaaggagcttgacaaggagatccggcccttccggcagaactgggaggaagcagacagcatgaagagcagcgtggagtccctccagaaccgcgtgaccgagctggagagcgtggac

SEQ ID NO: 291993 - DNA, 120 bp, Artificial Sequence
  ENSG00000131323_11 (sequence is synthesized)
aagagcgcggggcaagtggctcggaacacaggcctgctggagtcccagctgagccggcatgaccagatgctgagtgtgcacgacatccgcctagccgacatggacctgcgcttccaggtc

SEQ ID NO: 291994 - DNA, 120 bp, Artificial Sequence
  ENSG00000131323_12 (sequence is synthesized)
ctggagaccgccagctacaatggagtgctcatctggaagattcgcgactacaagcggcggaagcaggaggccgtcatggggaagaccctgtccctttacagccagcctttctacactggt

SEQ ID NO: 291995 - DNA, 120 bp, Artificial Sequence
  ENSG00000131323_13 (sequence is synthesized)
tactttggctataagatgtgtgccagggtctacctgaacggggacgggatggggaaggggacgcacttgtcgctgttttttgtcatcatgcgtggagaatatgatgccctgcttccttgg

SEQ ID NO: 291996 - DNA, 120 bp, Artificial Sequence
  ENSG00000131323_14 (sequence is synthesized)
ccgtttaagcagaaagtgacactcatgctgatggatcaggggtcctctcgacgtcatttgggagatgcattcaagcccgaccccaacagcagcagcttcaagaagcccactggagagatg

SEQ ID NO: 291997 - DNA, 120 bp, Artificial Sequence
  ENSG00000131323_15 (sequence is synthesized)
aatatcgcctctggctgcccagtctttgtggcccaaactgttctagaaaatgggacatatattaaagatgatacaatttttattaaagtcatagtggatacttcggatctgcccgatccc

SEQ ID NO: 291998 - DNA, 120 bp, Artificial Sequence
  ENSG00000131323_16 (sequence is synthesized)
tgataagtagctggggaggtggatttagcagaaggcaactcctctgggggatttgaaccggtctgtcttcactgaggtcctcgcgctcagaaaaggaccttgtgagacggaggaagcggc

SEQ ID NO: 291999 - DNA, 120 bp, Artificial Sequence
  ENSG00000131323_17 (sequence is synthesized)
agaaggcggacgcgtgccggcgggaggagccacgcgtgagcacacctgacacgttttataatagactagccacacttcactctgaagaattatttatccttcaacaagataaatattgct

SEQ ID NO: 292000 - DNA, 120 bp, Artificial Sequence
  ENSG00000131323_18 (sequence is synthesized)
gtcagagaaggttttcattttcatttttaaagatctagttaattaaggtggaaaacatatatgctaaacaaaagaaacatgatttttcttccttaaacttgaacaccaaaaaaacacaca

SEQ ID NO: 292001 - DNA, 120 bp, Artificial Sequence
  ENSG00000131323_19 (sequence is synthesized)
cacacacacacgtggggatagctggacatgtcagcatgttaagtaaaaggagaatttatgaaatagtaatgcaattctgatatcttctttctaaaattcaagagtgcaattttgtttcaa

SEQ ID NO: 292002 - DNA, 120 bp, Artificial Sequence
  ENSG00000131323_20 (sequence is synthesized)
attttttaatttaaagttctacaaataattgttactgcaaacattttattttaaaacgttgatagactgatatttcttggaagaaaatataaaatatcaaacactggttatcacttgtga

SEQ ID NO: 292003 - DNA, 120 bp, Artificial Sequence
  ENSG00000131323_21 (sequence is synthesized)
taggaaagagaatattcaacctgttgttatttctcgttagaaatgtaaaccttcaaatatctgtcgtagttaatgacacgacttcacaattctgaacggagcctcgctcatggatgctgt

SEQ ID NO: 292004 - DNA, 120 bp, Artificial Sequence
  ENSG00000131323_22 (sequence is synthesized)
gcatcattttcagatttataattgttttcaccctaaaatagggcatccgttgaactttggagttctaaacaaaatcctgtaggtgtttggattctgccccatgtgttcggacgagctctc

SEQ ID NO: 292005 - DNA, 120 bp, Artificial Sequence
  ENSG00000131323_23 (sequence is synthesized)
tgttgctgacagcaccggccttcggtctccatgtcaggggtgggcgggtgactgctgagggaggcccgcaggtgtgtttctccatcccgtcatcttgctgcatgccgtcaacggtctccg

SEQ ID NO: 292006 - DNA, 120 bp, Artificial Sequence
  ENSG00000131323_24 (sequence is synthesized)
aaagcaacgttgtgcgtagagctggtggcatacggcccacgtgccttagatgggacatgctgcttctccaccctgggtttgcattgagcatcattctagaaagtgctagtttaaccagac

SEQ ID NO: 292007 - DNA, 120 bp, Artificial Sequence
  ENSG00000131323_25 (sequence is synthesized)
ttttctctccaccactagatctttgtctctacaagggccctcagacacctctgcacctgctgaggggaagccaggctccaccgtcggcttctggagcctccgctgcttaattaccacaga

SEQ ID NO: 292008 - DNA, 120 bp, Artificial Sequence
  ENSG00000131323_26 (sequence is synthesized)
ttccaaatctctaggccccacgagtgagccgcctggtccaagtacggcctggtcccaccctgagggaggcaggtgtggaacagaagccgagcctctccgtgtccccaccggggccgtggg

SEQ ID NO: 292009 - DNA, 120 bp, Artificial Sequence
  ENSG00000131323_27 (sequence is synthesized)
cacccccacagcccgaagcagaaccctctgagcattccagagaccgctgctcgggggcctgcccaggctgaccaacgggcgctcctgaccaccaccctggcgggaagggtggccacgggg

SEQ ID NO: 292010 - DNA, 120 bp, Artificial Sequence
  ENSG00000131323_28 (sequence is synthesized)
cccgtcgtcccagcctgtgcctgcccagatggcattttctcaactcactgtttactgtctctcagtgtccaactgtgattagaagcctggagcctgccccctgcaccccttttgctatgc

SEQ ID NO: 292011 - DNA, 120 bp, Artificial Sequence
  ENSG00000131323_29 (sequence is synthesized)
accacgcttcatggtgctcttaccactgatgggtgctacacgcgacgggtgcttcttaggcaaaaccaatgtgtgcgaactgtcacacctgtgccactcgcccacaagccgcgcccacaa

SEQ ID NO: 292012 - DNA, 120 bp, Artificial Sequence
  ENSG00000131323_30 (sequence is synthesized)
ggtggcccacctgtctctggtgctgccatctgtcctgggtgtgccttcgccccagtgcctgctggaagtgccctccgtcgcacccctgtgccctgagctcccgtgaggggcccgccgcgc

SEQ ID NO: 292013 - DNA, 120 bp, Artificial Sequence
  ENSG00000131323_31 (sequence is synthesized)
cctttcgcggtcgaagcgttccgttgttcttatctgcctttcctttccccgctctcctgggattactttgggggaatgagtatccttggttctgccctgtgagggagtcgtgtgtccctg

SEQ ID NO: 292014 - DNA, 120 bp, Artificial Sequence
  ENSG00000131323_32 (sequence is synthesized)
ctcataaaggaaggacttcctgcagaagctgcggaaaactactgttccctcgaaggtgtcccccacctgaggcctgtcccctacctgccctcaggtagttttcctgaggccaggggttaa

SEQ ID NO: 292015 - DNA, 120 bp, Artificial Sequence
  ENSG00000131323_33 (sequence is synthesized)
caacagggacatccctgcaacttccccttcacaaaatgtataatattagatgaaggatatgcaacatcttggtctagtaagaaccgtttcctcccctctgggttgaagtcctggtgtggc

SEQ ID NO: 292016 - DNA, 120 bp, Artificial Sequence
  ENSG00000131323_34 (sequence is synthesized)
ccccagaagcagcagtgcgtgtcactgggacgtctccagtagcccttcccaggcagacgctcctggcgggacgccatggggcccacctgagggtcccacagacgtaacctgagtgacagg

SEQ ID NO: 292017 - DNA, 120 bp, Artificial Sequence
  ENSG00000131323_35 (sequence is synthesized)
agtccttgaggatgggatggcctatgtcacacactttgtccttgaacctgagtgatgggggtccttgaggatgggatggcctgtgtcacgcgctttgtctttgtgtttggttgtatcggg

SEQ ID NO: 292018 - DNA, 120 bp, Artificial Sequence
  ENSG00000131323_36 (sequence is synthesized)
gtctctgttctgagtgtgtcttcctctcatgtactcaacacagtgggcagcagcctgggacggcgtcccctctcccggcggcgggcaagccttgcgctgctccaccctcggcctgggcac

SEQ ID NO: 292019 - DNA, 120 bp, Artificial Sequence
  ENSG00000131323_37 (sequence is synthesized)
cctcacttggcgctggccacctgggccagcctggggccatggtctctctgcagctgaggcccagtggccccttgggcagtgatcggccctccccgcatcacagggccctggcagcaagcg

SEQ ID NO: 292020 - DNA, 120 bp, Artificial Sequence
  ENSG00000131323_38 (sequence is synthesized)
ggaaatgggggcgcacactgtgtgcttgggggtgctgcttgtttaccacacatgaccagactcccagcaggacagagctgctcagtactttacagaaaccaactgagtcgtttgtgcatg

SEQ ID NO: 292021 - DNA, 120 bp, Artificial Sequence
  ENSG00000131323_39 (sequence is synthesized)
aattaagccggtctgcttccccgtcaccttcgtaacaaaacaacgtcccctctcccctcgcctcgagcagtttcttcaggacaccgtggctcgggctgctccctgctgccaggcacgctg

SEQ ID NO: 292022 - DNA, 120 bp, Artificial Sequence
  ENSG00000131323_40 (sequence is synthesized)
gttggctggcctgggcccggctcacgtgaagggcactggctcttgtgaccacactgagccacgtgcaagccgcagccgggcctggaagcctgaccctctggttctagggcttgtcccgcg

SEQ ID NO: 292023 - DNA, 120 bp, Artificial Sequence
  ENSG00000131323_41 (sequence is synthesized)
gagcctgcagagctagacgttggggtgtgtccgtgatgatatgggggccaggctgggagtagggcctttctagcagggttgggtggctcagtgagggtgtggaagtgggggacccacggg

SEQ ID NO: 292024 - DNA, 120 bp, Artificial Sequence
  ENSG00000131323_42 (sequence is synthesized)
gcctggctttgggactagacatgccagccccagctgggctggagggagcctgagtgagccccgacatacgctgggcctttcagctcgccgtgctctggtgacacacaggcggccaggttg

SEQ ID NO: 292025 - DNA, 120 bp, Artificial Sequence
  ENSG00000131323_43 (sequence is synthesized)
ggatttgtgtcaattctaggagccatcaagcatgaatgtggttctgtctcctgagcgcaagcctcgccggacccctgggcgaaggcctggacttgcagatgtgtgttccctgtgcgggtg

SEQ ID NO: 292026 - DNA, 120 bp, Artificial Sequence
  ENSG00000131323_44 (sequence is synthesized)
gacagagggggcccttatgacccacattgcagccccattccaccaccccttcctccccagagcagtctctgccgagggacagcacctgtgtcccttcgatgccacaacagccagttgaac

SEQ ID NO: 292027 - DNA, 120 bp, Artificial Sequence
  ENSG00000131323_45 (sequence is synthesized)
aggggagccctttgctcaggcagcttctcctgcctctccctcctttctccttccctgccccatccccgtgcccttcttggcctgtggcgctggggagccatggtgtggcatactggggct

SEQ ID NO: 292028 - DNA, 120 bp, Artificial Sequence
  ENSG00000131323_46 (sequence is synthesized)
cctgctccttgggccacttcctcagcccgggccccacaggcccaccacctgccagggctcccactgcactggctgtggcaggaggcttccccatgaccccgtgtggcccagctcggtgag

SEQ ID NO: 292029 - DNA, 120 bp, Artificial Sequence
  ENSG00000131323_47 (sequence is synthesized)
gatgcagttctaggcacagcccctgggacagccagctgcctcccagaccacgtcagcctgctccagggtcctcagtcaccctgggccaggggccacgtgtcccatggatgtcgaccatgc

SEQ ID NO: 292030 - DNA, 120 bp, Artificial Sequence
  ENSG00000131323_48 (sequence is synthesized)
caacgtcacattccagcaccccttttgcttgatggcgtctggtggtagtcagcatggtggacccacatcctacagccagaggtgatgttggacaaaggaaggggagtctggatgggtcct

SEQ ID NO: 292031 - DNA, 120 bp, Artificial Sequence
  ENSG00000131323_49 (sequence is synthesized)
taaacgaccattctgtccgcagcggggtcattccttgtcagcccaagggagggccggggagtacactgatcccaacagctgggctgacacctcctttctcccctgcacggggaggattgg

SEQ ID NO: 292032 - DNA, 120 bp, Artificial Sequence
  ENSG00000131323_50 (sequence is synthesized)
cctgaggaccgtcaccctgtgcacagccccagtagggtggcagtgccactgtctccttgggccgttgcaggattgggcgggtgcagactccccttgcgggccccttgctcaatccccggc

SEQ ID NO: 292033 - DNA, 120 bp, Artificial Sequence
  ENSG00000131323_51 (sequence is synthesized)
cctcccagactcctccctctactgggggtaatttgtgtgtcagaagggctctggcagagctgtaaaatactgttttttaaaaattttagtccagatctttacttattagactgcagaagg

SEQ ID NO: 292034 - DNA, 120 bp, Artificial Sequence
  ENSG00000131323_52 (sequence is synthesized)
agagctagggagagtgggggaagcccccttgcttttgtatctgtgaggtgaatgagggtctgtcacccaaatctacttctcagcccatgaccatagttctgttttccgtttgcaaatctc

SEQ ID NO: 292035 - DNA, 120 bp, Artificial Sequence
  ENSG00000131323_53 (sequence is synthesized)
agtagctctgttttctccaaagtagaatgtgcgcaccggggtcctagccaggcgaggtcagtgtcggcaggctacctggtcattattgctgcctcgtccaggctgatgctgatggtcaca

SEQ ID NO: 292036 - DNA, 120 bp, Artificial Sequence
  ENSG00000131323_54 (sequence is synthesized)
ggcacggtggcatcagggagccgggccagcaggcggcgtgaggcggggccagcagctcactgcaagggcattttccacctgatcctggtgtgccccacatgcggtggcagggcagacgtg

SEQ ID NO: 292037 - DNA, 120 bp, Artificial Sequence
  ENSG00000131323_55 (sequence is synthesized)
tgaagcctcggccgtctcggggctggcaggtgtgcgggtgaggaggccccggtggccaagcagagcctgcgtttcatttctcctgctgcactgtgtctagtctgtcttgtgaactctcac

SEQ ID NO: 292038 - DNA, 120 bp, Artificial Sequence
  ENSG00000131323_56 (sequence is synthesized)
cgtgaaaagaggctagaagtccaggatcgctgtaccgctcctgtaattaggtgatgactggatttgacaacttagtcccctcagacaagtaagataccctccaacagcaaattcaatgac

SEQ ID NO: 292039 - DNA, 120 bp, Artificial Sequence
  ENSG00000131323_57 (sequence is synthesized)
ttaattggaaaacacacaagctggcatgatgtccggtgatttctgtaagaaatgcctgtaggagaaggtctgtgaagtgtggagggcagtgtcgacgctgcacagcatctgcagattcgc

SEQ ID NO: 292040 - DNA, 120 bp, Artificial Sequence
  ENSG00000131323_58 (sequence is synthesized)
agcctcttctctgccggtgcctctgttcggttctgttacccaaaaacaaagaccaaagaaggccaatctctcatttgaccctgtctttttaatctgcctgttttaaaagttgcgtctgta

SEQ ID NO: 292041 - DNA, 120 bp, Artificial Sequence
  ENSG00000131323_59 (sequence is synthesized)
gtagccgcttgctgtgaagacacatcttgacagtccaagtgattttgtgaccagtgatttgggtcctgttttccgctcttctaagaaaaaacaaaaagaccgtgagttattgcccagcaa

SEQ ID NO: 292042 - DNA, 120 bp, Artificial Sequence
  ENSG00000131323_60 (sequence is synthesized)
taatcatgttgttactgtgagttagcaacatgcctgacttcctgatagcattactgttttctagttttgtttattgtatattatgtgtggttttatttggtatttatttgtgttttgagg

SEQ ID NO: 292043 - DNA, 120 bp, Artificial Sequence
  ENSG00000131323_61 (sequence is synthesized)
tcttgcaatgtttttgtgtttctgatgctaataactaaagtttgtaagactgtagaatgcaaaactcggagatgctaaactgtcttattagaggaaaataaatctgattatggagtctca

SEQ ID NO: 292044 - DNA, 70 bp, Artificial Sequence
  ENSG00000131323_62 (sequence is synthesized)
ccgcggcggaggacgcgcccggcgcccctgagccggccgagcggcgacggaccgcctgcttactgcagct

SEQ ID NO: 292045 - DNA, 120 bp, Artificial Sequence
  ENSG00000131323_63 (sequence is synthesized)
cctcccaagtagctgggactacagcagctgacatctgtgaagcctcagtgatcctataaattgaggaacctgagagaatcaagagaaagacaacaattcttgctgatatgaggaaaatga

SEQ ID NO: 292046 - DNA, 120 bp, Artificial Sequence
  ENSG00000131323_64 (sequence is synthesized)
gaatgaattgttactttcagagggacacaactaccacgcgatgctgcatatggcccgctccacattcgtgcaggtttccttgttgcagaatgaaagtgtagaaaaaaacaagagcataca

SEQ ID NO: 292047 - DNA, 120 bp, Artificial Sequence
  ENSG00000131323_65 (sequence is synthesized)
tcaattcctatatgatacattccacaggccttccgctcaattcgtagataatccgttccacaggccttccctcaactcatagataatccgttccacaggccttccactcagttcatagat

SEQ ID NO: 292048 - DNA, 120 bp, Artificial Sequence
  ENSG00000131351_0 (sequence is synthesized)
gggtcgggccttgaggtggaaggcgggaaaatggcggattcctcggggcgaggcgctgggaagcctgcaaccggccccacaaattctagcagtgccaagaagaaggataaaagagttcaa

SEQ ID NO: 292049 - DNA, 120 bp, Artificial Sequence
  ENSG00000131351_1 (sequence is synthesized)
ggtggaagagtgattgagtcccggtatctgcagtatgaaaagaagacaacccaaaaggctcctgcaggagatgggtcacagacccgagggaagatgtctgaaggtggaaggaaatccagc

SEQ ID NO: 292050 - DNA, 120 bp, Artificial Sequence
  ENSG00000131351_2 (sequence is synthesized)
ctgctccagaaaagcaaagcagatagcagtggggtcggaaagggtgacctgcagtccacgttgctggaagggcatggcacagctccacctgacctggatctctctgctattaatgacaaa

SEQ ID NO: 292051 - DNA, 120 bp, Artificial Sequence
  ENSG00000131351_3 (sequence is synthesized)
agcatcgtcaaaaagacgccacagttagcaaaaacaatatcaaagaaacctgagtcaacatcattttctgcccctcggaaaaagagcccggatttatctgaagcaatggaaatgatggag

SEQ ID NO: 292052 - DNA, 120 bp, Artificial Sequence
  ENSG00000131351_4 (sequence is synthesized)
tctcagacactactgctgacgctactatccgtaaagatggagaacaatcttgctgagtttgaaagaagggcagaaaagaatttattaataatgtgtaaggagaaggagaagctacagaaa

SEQ ID NO: 292053 - DNA, 120 bp, Artificial Sequence
  ENSG00000131351_5 (sequence is synthesized)
agccccttcgaggcagtggccacacgcttcaaggagcaatacaggacattcgccacggccctggacactaccaggcacgagctgcccgtgaggtccatccacctggagggagatgggcag

SEQ ID NO: 292054 - DNA, 120 bp, Artificial Sequence
  ENSG00000131351_6 (sequence is synthesized)
cagctcttagacgccctgcagcatgaactggtgaccactcagcgcctcctgggagaacttgatgttggtgattcggaagaaaatgtgcaggtgctggacttactgagcgaactcaaggac

SEQ ID NO: 292055 - DNA, 120 bp, Artificial Sequence
  ENSG00000131351_7 (sequence is synthesized)
gtgacggcgaaaaaggaccttgagctccgaaggagctttgcccaggtgctggaactctccgcagaggcaagcaaagaggcagccttggcaaaccaggaagtctgggaagagacccagggc

SEQ ID NO: 292056 - DNA, 120 bp, Artificial Sequence
  ENSG00000131351_8 (sequence is synthesized)
atggcgccccccagccggtggtatttcaatcaagacagtgcctgcagagaatctgggggagcacccaagaacacgcccctgtctgaggacgacaacccgggtgcctcgtcagcccccgct

SEQ ID NO: 292057 - DNA, 120 bp, Artificial Sequence
  ENSG00000131351_9 (sequence is synthesized)
caggccacgttcatcagcccaagcgaagatttttcttcaagcagccaggcagaagtcccgccctctctctctcgttcagggagggacttgtcatgactcatggttacattcaggatactt

SEQ ID NO: 292058 - DNA, 120 bp, Artificial Sequence
  ENSG00000131351_10 (sequence is synthesized)
gagcactttatatactaccgtagcactgtagctattttttatgtgataatcttgtttgataaaaaagtaaacctgttttgcaattgaagcctccattttctatgaaggggccagttggaa

SEQ ID NO: 292059 - DNA, 120 bp, Artificial Sequence
  ENSG00000131351_11 (sequence is synthesized)
cgccgatggtgggcgagaccaagtgcgaggggaggacaggcgaagcgcgcgtctggggccgcgctctccacacttagccggcgctgcctcacgcctcgcagccacccctcctgcgtctcc

SEQ ID NO: 292060 - DNA, 120 bp, Artificial Sequence
  ENSG00000131351_12 (sequence is synthesized)
gagttccgcgtcctcggctgggacgctgggcgacctccggcaagcggcctgaccgcccagtgcctcgctttcctccgctacgaaatggggccgatgacgcagctcaacctcgtaggcgtc

SEQ ID NO: 292061 - DNA, 120 bp, Artificial Sequence
  ENSG00000131351_13 (sequence is synthesized)
gcgtgaggctgaaacgcgcttagatcggcgcctgggtctttactgtgatgtcgctcttggaattatcgttatgcagtgaacaagtgttgggcgaccaaagtgtcccctttaatcctccca

SEQ ID NO: 292062 - DNA, 120 bp, Artificial Sequence
  ENSG00000131351_14 (sequence is synthesized)
cgcgctttattctgtgctcccagtttactgaggagatgatggagacccagggaggggaagtgacttgcctagggtaacacaccatgaacaagaaagaagttgaatactgaccgagagcta

SEQ ID NO: 292063 - DNA, 120 bp, Artificial Sequence
  ENSG00000131351_15 (sequence is synthesized)
ggcatgaatgatcatgaggctatatttgtctagttttgttaattctgccagtgttgattgtgccaggtgcaaactgaagtgaaattggccagcaagaggaatcactccaccgccccttgc

SEQ ID NO: 292064 - DNA, 120 bp, Artificial Sequence
  ENSG00000131351_16 (sequence is synthesized)
cgtaaccgatagattgacagtagcacctcccaggtacaggtgcagtagctgaggctcgcacaggttgtagggacccccctcaggtcgcagcaggttcacccaggagcccattcggtttga

SEQ ID NO: 292065 - DNA, 120 bp, Artificial Sequence
  ENSG00000131351_17 (sequence is synthesized)
ggccacagccctagcacagtccccagagggagtctgtgctcttgtctctttctggctgtgagactgccccgggggtgacctatgtaaaacctgtgcgtctttgttttgcagcgacgaaaa

SEQ ID NO: 292066 - DNA, 120 bp, Artificial Sequence
  ENSG00000131351_18 (sequence is synthesized)
agcaggtgtgaacagttaggaagctgtcgggttaggaggagcctacgggcgagcgcagctgctggcacctggcgaacatttgctaagttgcctctccccacggtggcctggaagtgtccc

SEQ ID NO: 292067 - DNA, 120 bp, Artificial Sequence
  ENSG00000131351_19 (sequence is synthesized)
caacattgtctgggtctcactttggggtcctgggagcctgcttcagaggaggtggccgcagggaccagtggagccgcctttggtgatgggagcaggagttacagtgccctggccttggcc

SEQ ID NO: 292068 - DNA, 120 bp, Artificial Sequence
  ENSG00000131351_20 (sequence is synthesized)
ctgcccctccacttgcccatccacttgcccctcctgtgttgctggtgtctgttcttggatcccttcttttctcaccagctcaggctgaaaccctgaaacccctagtcatcccagattctc

SEQ ID NO: 292069 - DNA, 120 bp, Artificial Sequence
  ENSG00000131351_21 (sequence is synthesized)
agattctccctctcctgcacccccacagctgatgagtcagcgattcctatctcagggtcccttctttcctattacatcaggcttcattctatttttatttttatttttatttttatttat

SEQ ID NO: 292070 - DNA, 80 bp, Artificial Sequence
  ENSG00000131351_22 (sequence is synthesized)
gcgtagttctcctgtgtcagtctcctgagtaggagggactacaggcgcatgccaccaccccagctcatttttgtattttt

SEQ ID NO: 292071 - DNA, 120 bp, Artificial Sequence
  ENSG00000131351_23 (sequence is synthesized)
agtgaggtacctgctgggaccactcctcgtacctgcctgtcaagatgttgttcttccctttctgggaaggagctctgtgttttgttaccactgtgtctctactggaatatagtaggtgca

SEQ ID NO: 292072 - DNA, 120 bp, Artificial Sequence
  ENSG00000131351_24 (sequence is synthesized)
tccacagagctctcattaccctcctctcttctcagtttgggtgttcacctatgccttcttgcccaggtgaccagggctggctgctccttgtgtcccttttcctgttgaggtggcccaccc

SEQ ID NO: 292073 - DNA, 120 bp, Artificial Sequence
  ENSG00000131351_25 (sequence is synthesized)
tcactgaaattgtcctctggcagcccttggactgggctgtctgagcttcaactagcagaggcacctcgccggcttccctgtgcttcttgggtagtgaggtgaacaagacctctctctctt

SEQ ID NO: 292074 - DNA, 90 bp, Artificial Sequence
  ENSG00000131351_26 (sequence is synthesized)
cccgcatccgatgaggacacaagtcactggattaggccccacccatcttaactcccccccatccacaaaaccctgtttctggttaaggtc

SEQ ID NO: 292075 - DNA, 120 bp, Artificial Sequence
  ENSG00000131351_27 (sequence is synthesized)
actcccccccatccacaaaaccctgtttctggttaaggtcatgttcactaggagtggaggattggagtgaaacgtacgtattggggagggcataattcggtccacagccggagggagaag

SEQ ID NO: 292076 - DNA, 120 bp, Artificial Sequence
  ENSG00000131351_28 (sequence is synthesized)
aggctggctgatacggcacttaaaaggctcccaaaatgtgactctcatgtacgactggccttgatgtgatgtatgtcagggtagagaggcgtgttgtcctagtgcaggtgacacaggtcc

SEQ ID NO: 292077 - DNA, 120 bp, Artificial Sequence
  ENSG00000131351_29 (sequence is synthesized)
cgcagttgcaggcatccttctgctcagtggtgcaggcaacaaggactgtttttcagttgctcatggtctggcttggaggcctcaggcattctccctggcacagcacagcccttttcacat

SEQ ID NO: 292078 - DNA, 120 bp, Artificial Sequence
  ENSG00000131351_30 (sequence is synthesized)
ttgcattggtttctgttgaggacaccagagtgacatttcagttctggtccaatgccctcctggatagatggatgtgcctgtcccacaatctcagagcacgggatggataagggacgaatg

SEQ ID NO: 292079 - DNA, 120 bp, Artificial Sequence
  ENSG00000131351_31 (sequence is synthesized)
tcttccttggcttctgcttcttccctgtgcgctctccacggttccagcgcgatagccgagcatcatgacagaagtctgtcggccgctccacttgtgtgtgccttgcgtggggcaccttgc

SEQ ID NO: 292080 - DNA, 120 bp, Artificial Sequence
  ENSG00000131351_32 (sequence is synthesized)
catgatacaagaatggccagcaggtgtcattgtcatctgtattgtggataacaaaatctccatccaaaagcacccgccttgccttccctttcttttttttttgagacaggttctcactct

SEQ ID NO: 292081 - DNA, 90 bp, Artificial Sequence
  ENSG00000131351_33 (sequence is synthesized)
gtggcagatctcagctcactgcaacctcaaattgctgggctcaagtgatcccacctcagcctcttcagtagctgggactgcccttttcta

SEQ ID NO: 292082 - DNA, 120 bp, Artificial Sequence
  ENSG00000131351_34 (sequence is synthesized)
tttttgagctaatggggactctaggtgaagtgaggatcaaatatgctataagacgtgtcctagattcacagagtataagactcaagcagagcagggggaagagagaacaaaagagctcag

SEQ ID NO: 292083 - DNA, 120 bp, Artificial Sequence
  ENSG00000131351_35 (sequence is synthesized)
gggattacaagcgtgagccaccatgccgggcctctctatttaaaaaacacaaaaattagccaggcacactggtgcatgcctgtggtctcagctactcaggaagcagaggtgggagaatca

SEQ ID NO: 292084 - DNA, 120 bp, Artificial Sequence
  ENSG00000131351_36 (sequence is synthesized)
cagctactcaggaagcagaggtgggagaatcatctgagcctggggaggtcaaggctgtaatgagctgtggtcgtgccactgcattacaacctgagcagtagagtgagaccctgtctcagg

SEQ ID NO: 292085 - DNA, 120 bp, Artificial Sequence
  ENSG00000131351_37 (sequence is synthesized)
tttttttttttttttttagcctttccaccttggacgaaattgggcttttagaagcaagtggtattgttcaaaaacacggcctgcgtttcctggcttgaatggagagtgtctcttgactgt

SEQ ID NO: 292086 - DNA, 120 bp, Artificial Sequence
  ENSG00000131355_0 (sequence is synthesized)
aggaaaggtggttggcttacggcacagtagagagcttccagggctggctggcgtgggatacccgtaccacagaaatgcagggaccattgcttcttccaggcctctgctttctgctgagcc

SEQ ID NO: 292087 - DNA, 120 bp, Artificial Sequence
  ENSG00000131355_1 (sequence is synthesized)
tctttggagctgtgactcagaaaaccaaaacttcctgtgctaagtgccccccaaatgcttcctgtgtcaataacactcactgcacctgcaaccatggatatacttctggatctgggcaga

SEQ ID NO: 292088 - DNA, 120 bp, Artificial Sequence
  ENSG00000131355_2 (sequence is synthesized)
aactattcacattccccttggagacatgtaacgacattaatgaatgtacaccaccctatagtgtatattgtggatttaacgctgtgtgttacaatgtcgaaggaagtttctactgtcaat

SEQ ID NO: 292089 - DNA, 120 bp, Artificial Sequence
  ENSG00000131355_3 (sequence is synthesized)
gtgtcccaggatatagactgcattctgggaatgaacaattcagtaattccaatgagaacacctgtcaggacaccacctcctcaaagacaaccgagggcaggaaagagctgcaaaagattg

SEQ ID NO: 292090 - DNA, 120 bp, Artificial Sequence
  ENSG00000131355_4 (sequence is synthesized)
tggacaaatttgagtcacttctcaccaatcagactttatggagaacagaagggagacaagaaatctcatccacagctaccactattctccgggatgtggaatcgaaagttctagaaactg

SEQ ID NO: 292091 - DNA, 120 bp, Artificial Sequence
  ENSG00000131355_5 (sequence is synthesized)
ccttgaaagatccagaacaaaaagtcctgaaaatccaaaacgatagtgtagctattgaaactcaagcgattacagacaattgctctgaagaaagaaagacattcaacttgaacgtccaaa

SEQ ID NO: 292092 - DNA, 120 bp, Artificial Sequence
  ENSG00000131355_6 (sequence is synthesized)
tgaactcaatggacatccgttgcagtgacatcatccagggagacacacaaggtcccagtgccattgcctttatctcatattcttctcttggaaacatcataaatgcaactttttttgaag

SEQ ID NO: 292093 - DNA, 120 bp, Artificial Sequence
  ENSG00000131355_7 (sequence is synthesized)
agatggataagaaagatcaagtgtatctgaactctcaggttgtgagtgctgctattggacccaaaaggaacgtgtctctctccaagtctgtgacgctgactttccagcacgtgaagatga

SEQ ID NO: 292094 - DNA, 120 bp, Artificial Sequence
  ENSG00000131355_8 (sequence is synthesized)
cccccagtaccaaaaaggtcttctgtgtctactggaagagcacagggcagggcagccagtggtccagggatggctgcttcctgatacacgtgaacaagagtcacaccatgtgtaattgca

SEQ ID NO: 292095 - DNA, 120 bp, Artificial Sequence
  ENSG00000131355_9 (sequence is synthesized)
tcacctacgtggggctgagcgtctctctgctgtgcctcctcctggcggccctcacttttctcctgtgtaaagccatccggaacaccagcacctcactgcatctgcagctctcgctctgcc

SEQ ID NO: 292096 - DNA, 120 bp, Artificial Sequence
  ENSG00000131355_10 (sequence is synthesized)
tcttcctggcccacctcctcttcctcgtggggattgatcgaactgaacccaaggtgctgtgctccatcatcgccggtgctttgcactatctctacctggccgccttcacctggatgctgc

SEQ ID NO: 292097 - DNA, 120 bp, Artificial Sequence
  ENSG00000131355_11 (sequence is synthesized)
tggagggtgtgcacctcttcctcactgcacggaacctgacagtggtcaactactcaagcatcaatagactcatgaagtggatcatgttcccagtcggctatggcgttcccgctgtgactg

SEQ ID NO: 292098 - DNA, 120 bp, Artificial Sequence
  ENSG00000131355_12 (sequence is synthesized)
tggccatttctgcagcctcctggcctcacctttatggaactgctgatcgatgctggctccacctggaccagggattcatgtggagtttccttggcccagtctgtgccattttctctgcga

SEQ ID NO: 292099 - DNA, 120 bp, Artificial Sequence
  ENSG00000131355_13 (sequence is synthesized)
atttagtattgtttatcttggtcttttggattttgaaaagaaaactttcctccctcaatagtgaagtgtcaaccatccagaacacaaggatgctggctttcaaagcaacagctcagctct

SEQ ID NO: 292100 - DNA, 120 bp, Artificial Sequence
  ENSG00000131355_14 (sequence is synthesized)
tcatcctgggctgcacatggtgtctgggcttgctacaggtgggtccagctgcccaggtcatggcctacctcttcaccatcatcaacagcctccaaggcttcttcatcttcttggtctact

SEQ ID NO: 292101 - DNA, 120 bp, Artificial Sequence
  ENSG00000131355_15 (sequence is synthesized)
gcctcctcagccagcaggtccagaaacaatatcaaaagtggtttagagagatcgtaaaatcaaaatctgagtctgagacatacacactttccagcaagatgggtcctgactcaaaaccca

SEQ ID NO: 292102 - DNA, 120 bp, Artificial Sequence
  ENSG00000131355_16 (sequence is synthesized)
gtgagggggatgtttttccaggacaagtgaagagaaaatattaaaactagaatattcaactccatatggaaaatcatatccatggatctctttggcattatgaagaatgaagctaaggaa

SEQ ID NO: 292103 - DNA, 120 bp, Artificial Sequence
  ENSG00000131355_17 (sequence is synthesized)
aagggaattcattaaacatatcatccttggagaggaagtaatcaacctttacttcccaagctgtttgttctccacaataggctctcaacaaatgtgtggtaaattgcatttctcttcact

SEQ ID NO: 292104 - DNA, 120 bp, Artificial Sequence
  ENSG00000131355_18 (sequence is synthesized)
atggtgtattcagtcaatgcttgtccctggaaacccaaagcatgaccactgcaaatatttccttgactttttgtaaatgaagaggtccttttcctcaagttcttagtcccactcatccta

SEQ ID NO: 292105 - DNA, 120 bp, Artificial Sequence
  ENSG00000131355_19 (sequence is synthesized)
aacggaagtggctgtggctcaggctgttgtggccagggtagccttaggcggcggcagagaaactaacgtcttctttagcctccaaggagaaattctagtattcttacccgggggatgagg

SEQ ID NO: 292106 - DNA, 120 bp, Artificial Sequence
  ENSG00000131355_20 (sequence is synthesized)
caatagctaggcagaaaaggtacagcaaataaacgaaaagcagaaccatgagtctgatggcgaaagaggggaagcagtttgcttttctgatagcaatttcatgagtcagctgacctaaga

SEQ ID NO: 292107 - DNA, 120 bp, Artificial Sequence
  ENSG00000131355_21 (sequence is synthesized)
ggtctccagtgggctggagaaaagtgcctgttctgagagcaatatttgggaaggcttgctcctgtgtttcattatttgtttgcttaatttatcattatatcaaatatggatagcctttta

SEQ ID NO: 292108 - DNA, 120 bp, Artificial Sequence
  ENSG00000131368_0 (sequence is synthesized)
gcgggaagtggaacctggctctggggagaagccgcgtgagatccgcgcgggtgctagctagtcctttctcgtcgctgctcggctcgcggcccgtggggtcggccccgccaccgttgccgc

SEQ ID NO: 292109 - DNA, 120 bp, Artificial Sequence
  ENSG00000131368_1 (sequence is synthesized)
catgcccatgaagggccgcttccccatccgccgcaccctgcaatatctgagccaggggaacgtggtgttcaaggactccgtgaaggtcatgacagtgaattacaacacgcatggggagct

SEQ ID NO: 292110 - DNA, 120 bp, Artificial Sequence
  ENSG00000131368_2 (sequence is synthesized)
gggcgagggcgccaggaagtttgtgtttttcaacatacctcagattcaatacaaaaacccttgggtgcagatcatgatgtttaagaacatgacgccgtcacccttcctgcgattctactt

SEQ ID NO: 292111 - DNA, 120 bp, Artificial Sequence
  ENSG00000131368_3 (sequence is synthesized)
agattctggggagcaggtcctggtggatgtggagaccaagagcaataaggagatcatggagcacatcagaaaaatcttggggaagaatgaggaaaccctcagggaagaggaggaggagaa

SEQ ID NO: 292112 - DNA, 120 bp, Artificial Sequence
  ENSG00000131368_4 (sequence is synthesized)
aaagcagctttctcacccagccaacttcggccctcgaaagtactgcctgcgggagtgcatctgtgaagtggaagggcaggtgccctgccccagcctggtgccattacccaaggagatgag

SEQ ID NO: 292113 - DNA, 120 bp, Artificial Sequence
  ENSG00000131368_5 (sequence is synthesized)
ggggaagtacaaagccgctctgaaagccgatgcccaggactaaggcccacggtcactgtgggctggggtgatggtgtctgaccagtggggagattggaatgggattactttggcccaggg

SEQ ID NO: 292114 - DNA, 120 bp, Artificial Sequence
  ENSG00000131368_6 (sequence is synthesized)
aagcccctggttctgtccctggagactctggaaatccttttgcattaaaaggactttacacacctgtgtaaaaggatgtgggagaggagggtctgaagctgagctgctaaatgaatatcc

SEQ ID NO: 292115 - DNA, 120 bp, Artificial Sequence
  ENSG00000131368_7 (sequence is synthesized)
ctgctctgctggtcaataaaacgcttcctaatagcagcttggcgtgtatctggtcctagtgaagaggaaggcctgtgtagcagaaaggctttgggcctgagaggttaaggccacagcctg

SEQ ID NO: 292116 - DNA, 120 bp, Artificial Sequence
  ENSG00000131368_8 (sequence is synthesized)
ttgacacctgttttggtcctgcgaccctttactggtctccgctggctttgaatcttcctctgggctctactctggagaacataagggctgctgtggttgagtctggctagcactgtctgt

SEQ ID NO: 292117 - DNA, 120 bp, Artificial Sequence
  ENSG00000131368_9 (sequence is synthesized)
ggttggcagtgtgtacacccctccgttcagttccttgggggtatttttcagaaatccaaaggcaacccttcgtgcagtgctcacttttttaagtacagttgattacccttgcctgctggg

SEQ ID NO: 292118 - DNA, 120 bp, Artificial Sequence
  ENSG00000131368_10 (sequence is synthesized)
gggcctagccatgggccagagatggaggagccccagtggctgacaggccagcctcactcaggcacgtacctgctgaccagtcagccactgccaacccatggcccagccactgtgtgcatt

SEQ ID NO: 292119 - DNA, 120 bp, Artificial Sequence
  ENSG00000131368_11 (sequence is synthesized)
agcagggaggtttgtaggccatggaggaaatgaggagacaccacctagtggagacattggggccctgctggggggatggtgtctatagctggctctgctggctccctcaggccctgctta

SEQ ID NO: 292120 - DNA, 120 bp, Artificial Sequence
  ENSG00000131368_12 (sequence is synthesized)
ccaagctctggaggagggagtgctgcattactgagcaccttccttgttctttcctcataggacactgatgttactgtcactttagttatgctaaagtggaggtttcagcctccagaagac

SEQ ID NO: 292121 - DNA, 77 bp, Artificial Sequence
  ENSG00000131368_13 (sequence is synthesized)
tttagttatgctaaagtggaggtttcagcctccagaagacagcagagccttctagggtcaccttaagaataggttta

SEQ ID NO: 292122 - DNA, 120 bp, Artificial Sequence
  ENSG00000131368_14 (sequence is synthesized)
acatggcaagaccttgtctctacaaaaagtacaaaaattagatgggtgtggtgtttcgcgtctgtagtcccagctatttgggaagctgaggtgggaggatctcgagcctgcgagatcaag

SEQ ID NO: 292123 - DNA, 86 bp, Artificial Sequence
  ENSG00000131368_15 (sequence is synthesized)
cgtctcaagaaaaaaaattttttaaataagtttaattataaagtgaaggaccagttggaccacggacccctagaaactcagccaag

SEQ ID NO: 292124 - DNA, 120 bp, Artificial Sequence
  ENSG00000131368_16 (sequence is synthesized)
aggaccagttggaccacggacccctagaaactcagccaaggagacctgactttatctgagacaggaaggcagtggttaaaagaattaaaaaaggacagtggtgcttgacagagcaggact

SEQ ID NO: 292125 - DNA, 120 bp, Artificial Sequence
  ENSG00000131368_17 (sequence is synthesized)
gaagttttcattcctctacctgctggggccttggtcaagtcctaaaagctttccaggtctgtaactggttttgtctgtaaaatggggaaaaggttaccttttctgccacatgaagtagct

SEQ ID NO: 292126 - DNA, 120 bp, Artificial Sequence
  ENSG00000131368_18 (sequence is synthesized)
ggctggtgaaatgatgtcatactacgatgtgtttcattaactgttggagattatcacattaaattgagcagatttggatcttttacatttgatgctcaagtttgattctgtaccagatct

SEQ ID NO: 292127 - DNA, 120 bp, Artificial Sequence
  ENSG00000131368_19 (sequence is synthesized)
atggcttgtcgggggtgggaggggaaggtgggcagagactgatgtataatggacaggtgttccttgagtgacagacttacaaagggagtgtttaattgaaatctagcatcttgtctctct

SEQ ID NO: 292128 - DNA, 120 bp, Artificial Sequence
  ENSG00000131368_20 (sequence is synthesized)
gctatcagcattttggctgggtggaaaaagctctcctccacagagagccctcccatgtctgctggtttcagttccccacccaactgactgaagtcttgaccttgataccacctgcctggg

SEQ ID NO: 292129 - DNA, 120 bp, Artificial Sequence
  ENSG00000131368_21 (sequence is synthesized)
cgttctacttggctgcaagggctcttcagaaagcacctagttccttttggctttcatctgcagtgtaggtctccatagctagtgacacacaaagccttatgagagtattccttccctcta

SEQ ID NO: 292130 - DNA, 120 bp, Artificial Sequence
  ENSG00000131368_22 (sequence is synthesized)
gggcccaaagaggctgctaaccagcaggaatgtcctgaaccaaaaggagtggtgaccattctctagacagaataaatgtctggtccctaatgggacagataactagggtttgagttcagg

SEQ ID NO: 292131 - DNA, 120 bp, Artificial Sequence
  ENSG00000131368_23 (sequence is synthesized)
cttgacacaggagcaatgggcagtgaggtggacagcccagaccctgaaaggacgtgtggagacagcagcagtcctgtggtgcagttactgcctgtgtggccagcttcacaggcagcagat

SEQ ID NO: 292132 - DNA, 120 bp, Artificial Sequence
  ENSG00000131368_24 (sequence is synthesized)
aatttgtggaaataaacattattttctttttttgttccctgtaggctacttgatcctggatagtttctctttaaacctttgtctttccctattttgtttagtagtgatgaaagatgggtt

SEQ ID NO: 292133 - DNA, 120 bp, Artificial Sequence
  ENSG00000131368_25 (sequence is synthesized)
taaaatatacagaaatgggagaaaattaattagagaaaatgtgaggattttataattgataacatgttcttaattttacttgcacaagcagtgttcacagccttattctgaagtgaccac

SEQ ID NO: 292134 - DNA, 120 bp, Artificial Sequence
  ENSG00000131368_26 (sequence is synthesized)
tgcacaagcagtgttcacagccttattctgaagtgaccacttttcttctctttgaggcactacctggcagcaccatctaaacctgtatcatctgctgtggtcccagttactcaggaggct

SEQ ID NO: 292135 - DNA, 120 bp, Artificial Sequence
  ENSG00000131368_27 (sequence is synthesized)
agtgagccatgactgtaccactgcattccagcctgggtgacggagtgaggccctatctgcctgccagtgagttctgtcatgcatcagactttggacctcagaattttcacctggaacatg

SEQ ID NO: 292136 - DNA, 120 bp, Artificial Sequence
  ENSG00000131368_28 (sequence is synthesized)
agaggtcagatgacataatgaatatgttctaacttctgaaacttttggagcttgtttttgcccttgatagcacgtatccttagagaataagcttgccaatttaaggcctgtctgtaatgg

SEQ ID NO: 292137 - DNA, 120 bp, Artificial Sequence
  ENSG00000131368_29 (sequence is synthesized)
catctgaatgttccagcagcctaactgtgctctgctccagaaacatgtgtgtggcttccctacctccacaccaaggagctgccttgctgggtggatgtaaagactgtcctgccagggttt

SEQ ID NO: 292138 - DNA, 120 bp, Artificial Sequence
  ENSG00000131368_30 (sequence is synthesized)
cccactaaaggtattaataagtccagtggaccacagagggcccaatccctcttggccgctaaggctaaggtaggagccagagagctgtagagacaggaccaccaggatgcttcatgtcca

SEQ ID NO: 292139 - DNA, 120 bp, Artificial Sequence
  ENSG00000131368_31 (sequence is synthesized)
taacacaagagagcgctgcattgtttgggggccaggcattactactatcatgaagaaaaatgaagagcaggatgcatgttagtctttaattcacttttaatagtataaacctcatttagg

SEQ ID NO: 292140 - DNA, 120 bp, Artificial Sequence
  ENSG00000131368_32 (sequence is synthesized)
tagtagtattaagccacaacaataatgccacattgaaacagcatttaataaaatgcataaagctaattcatgcactgcaatactctatatacaaacacaacaatgcaaattcttcttcaa

SEQ ID NO: 292141 - DNA, 120 bp, Artificial Sequence
  ENSG00000131368_33 (sequence is synthesized)
gactgaagacattgattagatataaaattcagtttaaaaagaacatgctattttttaaatgccatcacataaacaaagtgatttcacagggagaagaaagctgtataaagctgcagcttt

SEQ ID NO: 292142 - DNA, 120 bp, Artificial Sequence
  ENSG00000131368_34 (sequence is synthesized)
caacaggttttaaacctggcattaaaatgtaatggcaaaaccaatattttctatattgtgaagggcaaaggttacagaaacggtcccaagaaaatctaacacccaaattttcctttgata

SEQ ID NO: 292143 - DNA, 120 bp, Artificial Sequence
  ENSG00000131368_35 (sequence is synthesized)
gatagatgcctttaaaagggctggtaatgcagttacattctaacagagaagtccaaactacaggtaaaaactacggcttgtactgtgaaaaatgtgcagcttttcagttataaaactagt

SEQ ID NO: 292144 - DNA, 120 bp, Artificial Sequence
  ENSG00000131368_36 (sequence is synthesized)
tgaacactggtttacaagataatccgtagaacagagagactgtagaaaaatattccagcacttgagttgtgtgtggcagcagcatttgagtccatgaatgctatggtcattaaaataatt

SEQ ID NO: 292145 - DNA, 120 bp, Artificial Sequence
  ENSG00000131368_37 (sequence is synthesized)
gattatactttcctaaagaaaagccattttttaatgcaaagtctactacttccaaatgttattccaaacattaaattttaacagtctatcaatcaataaatgttgaacattttttttcta

SEQ ID NO: 292146 - DNA, 120 bp, Artificial Sequence
  ENSG00000131368_38 (sequence is synthesized)
gtcattagaaaaggagactgtttgatgcccttcaaccacagctcagcaaaggctcctggggtcccgtctgtattgcacagaatcaaaccaaacggatccaccatccacccacctctcttt

SEQ ID NO: 292147 - DNA, 120 bp, Artificial Sequence
  ENSG00000131368_39 (sequence is synthesized)
tctgatttcaacagttcctcttatagaaatttatcatgagaaaaaaccaaatgagtacaaaatgtatgtacagatgtgttcccttcactcttgtttattccaactctcctcacccccacc

SEQ ID NO: 292148 - DNA, 120 bp, Artificial Sequence
  ENSG00000131368_40 (sequence is synthesized)
accaagagaaaacctggaaattcatcaacagaggacagactaaagtaggagtcttcatatgatgaactgctagagactcatttaaaaaacgataatacaaacctgtatttactgaccagg

SEQ ID NO: 292149 - DNA, 120 bp, Artificial Sequence
  ENSG00000131368_41 (sequence is synthesized)
aggaacaaacttctcagcccagagaatttgaggaagaaaggggtgtgtgggaagggtgttgagaggcactacctggcagcaccatctaaacctgtatcatctgctgtggtcccagttact

SEQ ID NO: 292150 - DNA, 120 bp, Artificial Sequence
  ENSG00000131368_42 (sequence is synthesized)
cactctcaaggatcaaaacgacggaaggcaggcaacaatctgtgttagaggcaccactgagctgcaggatgcctgctactaaaagccttcacaagcagaaatgaaacaaacctgccctaa

SEQ ID NO: 292151 - DNA, 120 bp, Artificial Sequence
  ENSG00000131370_0 (sequence is synthesized)
ctctgctccgccgcggccggaggtatccgcatcggcgagctgcgtctcccgggtgtcggccccggcggctccccgaccgtgcccggctgtggcgaggcggctccagcccagcctgtggca

SEQ ID NO: 292152 - DNA, 120 bp, Artificial Sequence
  ENSG00000131370_1 (sequence is synthesized)
ggcagccgcgacccccggggcgctccggagcccactgcgcggcgcgcgtgccggctgcctgcatggacgcggcactgaagcggagccgctcggaggagccagccgaaatcctgccgcctg

SEQ ID NO: 292153 - DNA, 120 bp, Artificial Sequence
  ENSG00000131370_2 (sequence is synthesized)
ggacgaggaggaggaggaggaagaggggatggagcaggggctggaggaggaagaagaggtggatccccggatccagggagaactggagaagttaaatcagtccacggatgatatcaacag

SEQ ID NO: 292154 - DNA, 120 bp, Artificial Sequence
  ENSG00000131370_3 (sequence is synthesized)
acgggagactgaacttgaggatgctcgtcagaagttccgctctgttctggttgaagcaacggtgaaactggatgaactggtgaagaaaattggcaaagctgtggaagactccaagcccta

SEQ ID NO: 292155 - DNA, 120 bp, Artificial Sequence
  ENSG00000131370_4 (sequence is synthesized)
ctgggaggcacggagggtggcgaggcaggctcagctggaagctcagaaagccacgcaggacttccagagggccacagaggtgctccgtgccgccaaggagaccatctccctggccgagca

SEQ ID NO: 292156 - DNA, 120 bp, Artificial Sequence
  ENSG00000131370_5 (sequence is synthesized)
gcggctgctggaggatgacaagcggcagttcgactccgcctggcaggagatgctgaatcacgccactcagagggtcatggaggcggagcagaccaagaccaggagcgagctggtgcataa

SEQ ID NO: 292157 - DNA, 120 bp, Artificial Sequence
  ENSG00000131370_6 (sequence is synthesized)
ggagacggcagccaggtacaatgccgccatgggccgcatgcgacagctggagaagaaactcaagagagccatcaacaagtccaagccttattttgaactcaaggcaaagtactatgtgca

SEQ ID NO: 292158 - DNA, 120 bp, Artificial Sequence
  ENSG00000131370_7 (sequence is synthesized)
gctcgagcaactgaaaaagactgtggatgacctgcaggccaaactgaccctggcaaaaggcgagtacaagatggccctgaagaacctggagatgatctcagatgagatccacgagcggcg

SEQ ID NO: 292159 - DNA, 120 bp, Artificial Sequence
  ENSG00000131370_8 (sequence is synthesized)
gcgctccagtgccatggggcctcggggatgcggtgttggtgctgagggcagcagcacatctgtggaggatctgccagggagcaaacctgagcctgatgccatttctgtggcctcggaggc

SEQ ID NO: 292160 - DNA, 120 bp, Artificial Sequence
  ENSG00000131370_9 (sequence is synthesized)
ctttgaagatgacagctgtagcaactttgtgtctgaagatgactcggaaacccagtccgtgtccagctttagttcaggaccaacaagcccgtctgagatgcctgaccagttccctgcggt

SEQ ID NO: 292161 - DNA, 120 bp, Artificial Sequence
  ENSG00000131370_10 (sequence is synthesized)
tgtgaggcctggcagcctggatctgcccagccctgtgtccctgtcagagtttgggatgatgttcccagtgttgggccctcgaagtgaatgcagcggggcctcctcccctgaatgtgaagt

SEQ ID NO: 292162 - DNA, 120 bp, Artificial Sequence
  ENSG00000131370_11 (sequence is synthesized)
agaacgaggagacagggcagaaggggcagagaataaaacaagtgacaaagccaacaacaaccggggcctcagcagtagcagtggcagtggtggcagcagtaagagccaaagcagcacctc

SEQ ID NO: 292163 - DNA, 120 bp, Artificial Sequence
  ENSG00000131370_12 (sequence is synthesized)
ccctgagggccaggccttggagaaccggatgaagcagctctccctacagtgctcaaagggaagagatggaattattgctgacataaaaatggtgcagattggctgattcatcctgggccc

SEQ ID NO: 292164 - DNA, 120 bp, Artificial Sequence
  ENSG00000131370_13 (sequence is synthesized)
gaacattgtgccaataatcatttaatatatgccaaatcttacacgtctactctaaactgctctaatgaagtttcagtgaccttgagggctaaagattgttcttctgggtaagagctcttg

SEQ ID NO: 292165 - DNA, 120 bp, Artificial Sequence
  ENSG00000131370_14 (sequence is synthesized)
ggctggtttttcagagcagagttcttgttgtgggtagactgtgactaggttcacagcctttgtggaacattccgtataacggcattgtggaagcaataactagttcctatgaaagaacca

SEQ ID NO: 292166 - DNA, 120 bp, Artificial Sequence
  ENSG00000131370_15 (sequence is synthesized)
gagctgggaagatggctgggaagccaggccaaagtgggggcaacagcttgcttctctttctcttctcaccctcagtttgtatgggaaaatggagatgtcctctccactttatcccacgat

SEQ ID NO: 292167 - DNA, 120 bp, Artificial Sequence
  ENSG00000131370_16 (sequence is synthesized)
atctaaatgaaaaagaaagaaaacccacacacaaagcaaaaactcaagtattaagagcacatatttttgacccagtggaggcttaaaaaaaaaaaaatccaagaacacaattcattttca

SEQ ID NO: 292168 - DNA, 120 bp, Artificial Sequence
  ENSG00000131370_17 (sequence is synthesized)
ccacctctggtgttcagagggggcttttaaaaaagcgtgtatgctgggatacccattaaaaccattttctagaaggctaccatgagctgcactttttggggtgggaaaggtgaatgccag

SEQ ID NO: 292169 - DNA, 120 bp, Artificial Sequence
  ENSG00000131370_18 (sequence is synthesized)
tggggatgcggggggatgagggtaggagggacttatagaaggggatttgtggctgtgggggagaaggttctacagcataagccttatcctgccagccaaggggatttattctaagagaag

SEQ ID NO: 292170 - DNA, 120 bp, Artificial Sequence
  ENSG00000131370_19 (sequence is synthesized)
tgcatgtgaagaatggttgccactgttattagattgacaagatgttaatttctctgtaggttgtaactttaaaaataaatgaaattatttaagggttatgctgcactagtattccttaga

SEQ ID NO: 292171 - DNA, 120 bp, Artificial Sequence
  ENSG00000131370_20 (sequence is synthesized)
ggaaacagttctttaaagttaggaaagggagtaggcaggcatgtgttggcaaaggctgttaatagtagttaagtgttaagactgcttttctttaacgttttcatggtaatgcatatttag

SEQ ID NO: 292172 - DNA, 120 bp, Artificial Sequence
  ENSG00000131370_21 (sequence is synthesized)
agcactgtatttttgtcttgttaagaaaatttagcatttctaaaagaaaaaagcaaccctctttcaaactgttaattctgtcacagcctgtatattttagtcatttgtaaatctcttcat

SEQ ID NO: 292173 - DNA, 120 bp, Artificial Sequence
  ENSG00000131370_22 (sequence is synthesized)
acaatagtgacttcttttttgactgatacagtatcttaattacaaggttattttgtacttgtcttaatacactaagtgtaataaaaacggcttgagaaaagtttctcctttctgtgactt

SEQ ID NO: 292174 - DNA, 120 bp, Artificial Sequence
  ENSG00000131370_23 (sequence is synthesized)
caaataagaactcccagtattgcctaaatcttctaggcaaccctttttccataaggaagagcatggagtgctgtggtcaccagtaatcattttcaattaattaaggtcatgaacagtaat

SEQ ID NO: 292175 - DNA, 120 bp, Artificial Sequence
  ENSG00000131370_24 (sequence is synthesized)
aatttaagccttgtttaccaaggtttgaattctacttttgctgttgctaaagctgtgggcaatgaggagacacagtggcagataaagacgaggtggtgacgctggaggagtgggcctcgg

SEQ ID NO: 292176 - DNA, 120 bp, Artificial Sequence
  ENSG00000131370_25 (sequence is synthesized)
ctgcacactgcagtctcgaagcttaagtgttgctgtcagtcagttctcatccccagagaattatttaattaattaactggggggggtacactggggcattagacttttaaaagctccccg

SEQ ID NO: 292177 - DNA, 120 bp, Artificial Sequence
  ENSG00000131370_26 (sequence is synthesized)
agggaattcaaatgtgcattcagagttgagaatcagatggattctttcttttgtggaaatgttttataatattggactcttaatccgcatttcattattaaagcatgctgtggagaaaaa

SEQ ID NO: 292178 - DNA, 120 bp, Artificial Sequence
  ENSG00000131370_27 (sequence is synthesized)
gagaaagccttgctatggatgtgacatttgggctgagatgtggatgatgagaaggagtcaggcagccgtgccctggaggagatagcgatgcagacagcagaagccctgaggacagagcca

SEQ ID NO: 292179 - DNA, 120 bp, Artificial Sequence
  ENSG00000131370_28 (sequence is synthesized)
tattgcggggagtcccccgccgacccgtagcaggatcggggtcggtgcagcgtgcctggtggttcgggtggatgtgcaacaaagggaaaaagggggcgggggcgccatggtatcctcggg

SEQ ID NO: 292180 - DNA, 120 bp, Artificial Sequence
  ENSG00000131370_29 (sequence is synthesized)
tcagaaggccgtcaaaagagcatcttttcttgcttgaagaaataagggattcataactgaagcagagagaactgggagaagagagtttacccttaaatgttgctgaattgaaatactaaa

SEQ ID NO: 292181 - DNA, 120 bp, Artificial Sequence
  ENSG00000131370_30 (sequence is synthesized)
caagtgatccacccgccttggccttccatagtgctgggattacaggtgtgttactgcgcccagcccataagctgccttttaaaattttctccatggagctcttcccatgaaagctgttag

SEQ ID NO: 292182 - DNA, 120 bp, Artificial Sequence
  ENSG00000131370_31 (sequence is synthesized)
aattcataaattcttggccagagtgtgcccatcaacaggggttacacttgccacctccttaaatcccagctcaatgcattctccatgctcctggctattcagggagaactggagaagtta

SEQ ID NO: 292183 - DNA, 120 bp, Artificial Sequence
  ENSG00000131373_0 (sequence is synthesized)
agaggtgcagtaccagaggtggcgtgctgccgatttcgcgtttgccttgctggatgattccgcttgtttgccggctgcgtgagtgcttagagcttttcggtggaagatgccggacagtaa

SEQ ID NO: 292184 - DNA, 120 bp, Artificial Sequence
  ENSG00000131373_1 (sequence is synthesized)
cttcgcagagcgcagcgaggagcaggtgtctggtgctaaagtcatcgctcaggccctgaaaacgcaagatgtggagtacatatttggcatcgtaggcatcccagtgaccgaaatcgccat

SEQ ID NO: 292185 - DNA, 120 bp, Artificial Sequence
  ENSG00000131373_2 (sequence is synthesized)
tgctgcccagcagctaggcatcaagtacatcgggatgaggaatgagcaagcggcttgttatgctgcctccgcgattggatatctgacaagcaggccaggagtctgccttgttgtttctgg

SEQ ID NO: 292186 - DNA, 120 bp, Artificial Sequence
  ENSG00000131373_3 (sequence is synthesized)
cccaggtctcatccatgccttgggcggtatggcaaatgcaaacatgaactgctggcccttgcttgtgattggtggttcctctgaaagaaaccaagaaacaatgggagctttccaggagtt

SEQ ID NO: 292187 - DNA, 120 bp, Artificial Sequence
  ENSG00000131373_4 (sequence is synthesized)
tcctcaggttgaagcttgtagattatataccaagttctctgcccgcccaagcagcatagaagctattccttttgttattgaaaaggcagtgagaagcagtatctatggtcgtccaggtgc

SEQ ID NO: 292188 - DNA, 120 bp, Artificial Sequence
  ENSG00000131373_5 (sequence is synthesized)
ttgctatgttgacataccagcagattttgtgaaccttcaggtgaatgtgaattctataaagtacatggaacgctgcatgtcacctcctattagcatggcagaaacctctgctgtgtgcac

SEQ ID NO: 292189 - DNA, 120 bp, Artificial Sequence
  ENSG00000131373_6 (sequence is synthesized)
ggcggcttctgttattaggaatgccaaacaaccccttcttatcatcgggaaaggtgctgcttacgctcatgcagaagagagtatcaagaaattggtggagcaatataaactgccattttt

SEQ ID NO: 292190 - DNA, 120 bp, Artificial Sequence
  ENSG00000131373_7 (sequence is synthesized)
gcccacccctatggggaagggtgttgtccctgacaaccatccatactgtgtaggtgcagccagatccagggctttgcaatttgctgatgtaattgtgttatttggtgccagactaaattg

SEQ ID NO: 292191 - DNA, 120 bp, Artificial Sequence
  ENSG00000131373_8 (sequence is synthesized)
taaagcccgctgttactttgctaggaaacatacatgctgtcactaagcagcttttagaggaacttgataaaacaccatggcagtatcctccagagagcaagtggtggaaaactctgagag

SEQ ID NO: 292192 - DNA, 120 bp, Artificial Sequence
  ENSG00000131373_9 (sequence is synthesized)
aaaaaatgaagagcaatgaagctgcatccaaggaactagcttctaaaaaatccctgcctatgaattattacacagtattctaccatgttcaagaacaactacctagagactgtttcgtgg

SEQ ID NO: 292193 - DNA, 120 bp, Artificial Sequence
  ENSG00000131373_10 (sequence is synthesized)
taagtgaaggagcaaatactatggacattggacggactgtgcttcagaactaccttcctcgtcacaggcttgatgctggtactttcggaacaatgggagttggtttgggatttgctattg

SEQ ID NO: 292194 - DNA, 120 bp, Artificial Sequence
  ENSG00000131373_11 (sequence is synthesized)
cagctgccgtggtggctaaagatagaagccctgggcaatggatcatctgtgtggaaggagacagtgcatttgggttttctggcatggaggtagaaaccatctgcaggtacaacttgccaa

SEQ ID NO: 292195 - DNA, 120 bp, Artificial Sequence
  ENSG00000131373_12 (sequence is synthesized)
tcatactgttggtagtgaataacaatggaatttaccaaggttttgatacagatacttggaaagaaatgttaaaatttcaagatgctactgcagtggtccctccaatgtgtttgctgccaa

SEQ ID NO: 292196 - DNA, 120 bp, Artificial Sequence
  ENSG00000131373_13 (sequence is synthesized)
attcacattatgagcaagtcatgactgcatttggaggcaaagggtattttgtacaaacaccagaagaactccaaaaatccctgaggcagagcctagcagacacaactaaaccttctctta

SEQ ID NO: 292197 - DNA, 120 bp, Artificial Sequence
  ENSG00000131373_14 (sequence is synthesized)
tcaacatcatgattgagccacaagccacacggaaggcccaggattttcattggctgacccgctctaatatgtaaataaagacgccagttggtggtcttgagttttctctttcttgcaaga

SEQ ID NO: 292198 - DNA, 120 bp, Artificial Sequence
  ENSG00000131373_15 (sequence is synthesized)
tgaaattttattttccacagcaaaattactctactgttaaaattgtgcaaaataaaataaacatttaaaatgacattttacagtaaaggaattgattaaaaacagaaaaagttagaaaaa

SEQ ID NO: 292199 - DNA, 120 bp, Artificial Sequence
  ENSG00000131373_16 (sequence is synthesized)
attctccctttacagccccgaaaacgctccagctggccgactcggagacaatggcgagaggcctcagagttcggcttcttacctgctttgcataggcagcaatctcctgctagtcccgcc

SEQ ID NO: 292200 - DNA, 120 bp, Artificial Sequence
  ENSG00000131373_17 (sequence is synthesized)
tccctctggcattctggcgcgcgaatggaggagccgagaagagagcgcagttctgattggagaacgcgcgtgtttacattctcacctctcccgggaagtggacgaatttagaccgcctct

SEQ ID NO: 292201 - DNA, 120 bp, Artificial Sequence
  ENSG00000131373_18 (sequence is synthesized)
ggatatctgacaagcaggtaaactaaaatttgtttcacttcaattactttaatattttggggtagaactattacgtctttcagctgaaggatgagttcatttggaaagattatagaaaaa

SEQ ID NO: 292202 - DNA, 120 bp, Artificial Sequence
  ENSG00000131373_19 (sequence is synthesized)
aaataacaaaggataaaaaacatttaaaactctctgaggaccacatcaaaagaataatgataccagaagtgtttcagagtggaacacattgccattttgtagagtgaatcactggtgatc

SEQ ID NO: 292203 - DNA, 120 bp, Artificial Sequence
  ENSG00000131373_20 (sequence is synthesized)
agatagtgagttgatgtatgataccttgtcttggatctcacaactaccccagcacacttaatacaaaaatgcttggttcaaaatgtgactgttgagagctgttccacacgttctgatttt

SEQ ID NO: 292204 - DNA, 120 bp, Artificial Sequence
  ENSG00000131373_21 (sequence is synthesized)
ttagtgtgtatccatgttacctaactaccaccccctttttattattaaaaattaatacatttttaaaatgtccattttggaaaacttggaaaatatagaaagcacaaagaagaaaatgaa

SEQ ID NO: 292205 - DNA, 120 bp, Artificial Sequence
  ENSG00000131373_22 (sequence is synthesized)
tagcggtaggtatgcattgcaaacacccagatagcgcttaccactcttctgctactttacatatatcatatcaatcactgttgaatattaactgttgttacaccaagttgacagatgaga

SEQ ID NO: 292206 - DNA, 120 bp, Artificial Sequence
  ENSG00000131373_23 (sequence is synthesized)
aaagacacaggttaagtaaaacttgcctttggtgacacagctggtagtagcagagccagggtttgaacccacgtattctgggtctgagtccattctcttactactatactgtatgtcatg

SEQ ID NO: 292207 - DNA, 120 bp, Artificial Sequence
  ENSG00000131374_0 (sequence is synthesized)
tgactgcatcacctggtctgtgaattttccattagaagcttggtgtgctgttaggtgaaagacttgctcagctatgcgtcattgggttttatcaacatataggcgaaaaaaatcctggtc

SEQ ID NO: 292208 - DNA, 120 bp, Artificial Sequence
  ENSG00000131374_1 (sequence is synthesized)
tctgagtgtacagctgagatgaaaatttcttttattggaggaagtattgagtgtgtgctctcaaatgcggcctcagttgagtagtgcattcctgagttttggaagcaaatttgcaaacaa

SEQ ID NO: 292209 - DNA, 120 bp, Artificial Sequence
  ENSG00000131374_2 (sequence is synthesized)
ttgagagtcgtacagtgggtgttctaactggattcaggttttttctaatgtaattttttcacacgtaaattaaaaagtttagaaatgtcacacataacttcataacactttatggagaaa

SEQ ID NO: 292210 - DNA, 120 bp, Artificial Sequence
  ENSG00000131374_3 (sequence is synthesized)
tggttgtacttttaatttttttctttttatttatactccaactgactgagcagaggttgtacttctaaataactttgtggaagtttttagtaccataatttttataattttcattccagt

SEQ ID NO: 292211 - DNA, 120 bp, Artificial Sequence
  ENSG00000131374_4 (sequence is synthesized)
taattttcattccagtcctttgatatttatgacagtacttctgaagcgcttactgagtgccggacactgttgtaagtgctttacggaacttgacttttttttttttttgagacggactct

SEQ ID NO: 292212 - DNA, 120 bp, Artificial Sequence
  ENSG00000131374_5 (sequence is synthesized)
ctggagtgcagtggtgcagtggctcgatctcggctcactgccacctctccctcatggtttcaaacacttctcctgcctcagcctcccaggtagccaggattatagccgcccgccaccact

SEQ ID NO: 292213 - DNA, 90 bp, Artificial Sequence
  ENSG00000131374_6 (sequence is synthesized)
gcctcccaggtagccaggattatagccgcccgccaccactcccgactaattttattttgtatgttcttttttagtagagacggaggacct

SEQ ID NO: 292214 - DNA, 89 bp, Artificial Sequence
  ENSG00000131374_7 (sequence is synthesized)
acctttttttttttgttttttgtttttttgaaaaggagtttcgctcttgtccaggctggagtataatggtgcgatctcagctcaccgca

SEQ ID NO: 292215 - DNA, 72 bp, Artificial Sequence
  ENSG00000131374_8 (sequence is synthesized)
aatggtgcgatctcagctcaccgcagagctgggattacaggcgcccaccgccatgcccggctaatttttgta

SEQ ID NO: 292216 - DNA, 71 bp, Artificial Sequence
  ENSG00000131374_9 (sequence is synthesized)
tccaccaggatcacaccaggccgcgcctggcctgctttcattttaaaagtcaaatttgtcatccgcctcag

SEQ ID NO: 292217 - DNA, 120 bp, Artificial Sequence
  ENSG00000131374_10 (sequence is synthesized)
ctgctttcattttaaaagtcaaatttgtcatccgcctcagtgcttgtaatcttttctgagtgagatactgaaatttgcagtttcgttttgcttgcacttgttcactggaccagtagtcac

SEQ ID NO: 292218 - DNA, 120 bp, Artificial Sequence
  ENSG00000131374_11 (sequence is synthesized)
tgttaaatgtaaaagtatctacttcctctgaaagttttttattcctttatttcctgcctgggcttgtcctccaccctacatgtatgcgtagtagatttagtgtttgttatcctaaccttt

SEQ ID NO: 292219 - DNA, 120 bp, Artificial Sequence
  ENSG00000131374_12 (sequence is synthesized)
aggtttagggattgactgggtttctgactttttatttggccaatgaggacgatacagaaaatgaagcattggtcattatcacattttaacgctgaaaaagtaagaaggacaaccccggaa

SEQ ID NO: 292220 - DNA, 120 bp, Artificial Sequence
  ENSG00000131374_13 (sequence is synthesized)
taaaatgatatcagtatcaagataaaagtttggaatgggagaaaaattctcaaagcctgaaagaaaatctgtagttacttttggtgacgctgtccagttcccacaatgtatcattcctta

SEQ ID NO: 292221 - DNA, 120 bp, Artificial Sequence
  ENSG00000131374_14 (sequence is synthesized)
tctgaaactagacatcctctgcagccagaagaacaagaagtaggcattgaccccttgtccagttactctaacaagtctggaggagattcaaataaaaatggaagaagaacaagttctact

SEQ ID NO: 292222 - DNA, 120 bp, Artificial Sequence
  ENSG00000131374_15 (sequence is synthesized)
ttagactctgaagggacttttaattcctataggaaagaatgggaagaactatttgtaaacaacaattacttggcaacaataaggcagaaggggattaatgggcagctgagaagcagcagg

SEQ ID NO: 292223 - DNA, 120 bp, Artificial Sequence
  ENSG00000131374_16 (sequence is synthesized)
ttccgcagcatttgctggaagctatttctttgtgttcttcctcaagacaaaagtcaatggataagtagaattgaagaattaagagcatggtatagcaacattaaagaaatacatattacc

SEQ ID NO: 292224 - DNA, 120 bp, Artificial Sequence
  ENSG00000131374_17 (sequence is synthesized)
aacccgaggaaggttgttggccaacaagatttgatgatcaataatcctctttcacaggatgaagggagtctttggaacaaattcttccaagataaagaacttcgatcaatgattgaacaa

SEQ ID NO: 292225 - DNA, 120 bp, Artificial Sequence
  ENSG00000131374_18 (sequence is synthesized)
gatgtcaaaagaacgtttcctgaaatgcagtttttccagcaagaaaatgtgagaaaaattcttacagatgttcttttctgttatgccagagaaaacgagcagttgctttataaacagggc

SEQ ID NO: 292226 - DNA, 120 bp, Artificial Sequence
  ENSG00000131374_19 (sequence is synthesized)
atgcacgaactgttagcacctatagtctttgtccttcactgtgaccaccaagcttttctacatgccagtgagtctgcacagcccagtgaggaaatgaaaactgtcttgaaccctgagtat

SEQ ID NO: 292227 - DNA, 120 bp, Artificial Sequence
  ENSG00000131374_20 (sequence is synthesized)
ctggaacatgatgcctatgcagtgttctcacaacttatggaaactgctgaaccttggttttcaacttttgagcatgatggtcagaaggggaaagaaacactgatgactcccattcccttt

SEQ ID NO: 292228 - DNA, 120 bp, Artificial Sequence
  ENSG00000131374_21 (sequence is synthesized)
gctagaccacaagatttagggccaacaattgctattgttactaaagtcaaccagatccaggatcatctactgaagaagcatgatattgagctttacatgcacttgaacagactagaaatt

SEQ ID NO: 292229 - DNA, 120 bp, Artificial Sequence
  ENSG00000131374_22 (sequence is synthesized)
gcaccacagatatatgggttaaggtgggtgcggctgctatttggacgagagttccccctgcaggaccttctggtggtctgggatgccttgtttgcagacggcctcagcctgggtttagta

SEQ ID NO: 292230 - DNA, 120 bp, Artificial Sequence
  ENSG00000131374_23 (sequence is synthesized)
gattatatcttcgtagccatgttactttacatccgagatgctttgatctctagtaactaccagacctgtctcggccttctgatgcattacccattcatcggggatgtacactcactgatt

SEQ ID NO: 292231 - DNA, 120 bp, Artificial Sequence
  ENSG00000131374_24 (sequence is synthesized)
cttaaggctctgttccttagagatccaaagagaaatccaagaccagtgacttatcaattccatccaaatttagattattacaaagcacgaggagcagacctcatgaataaaagccggacc

SEQ ID NO: 292232 - DNA, 120 bp, Artificial Sequence
  ENSG00000131374_25 (sequence is synthesized)
aatgccaaaggtgctcccctgaatataaataaggtctctaatagcctgattaattttggaagaaagttgatttccccagcaatggctccaggcagtgcaggtggccctgtacctggaggc

SEQ ID NO: 292233 - DNA, 120 bp, Artificial Sequence
  ENSG00000131374_26 (sequence is synthesized)
aacagcagtagctcctcctctgttgtaattcctaccaggacctcagcagaggccccaagccatcacttgcaacagcaacagcagcagcagaggctgatgaaatcagaaagcatgcctgtg

SEQ ID NO: 292234 - DNA, 120 bp, Artificial Sequence
  ENSG00000131374_27 (sequence is synthesized)
caattgaacaaagggctaagttctaaaaacatcagttcatctccaagcgttgagagtttgcctggaggaagagaattcactggctctccaccttcatctgctactaaaaaagattccttt

SEQ ID NO: 292235 - DNA, 120 bp, Artificial Sequence
  ENSG00000131374_28 (sequence is synthesized)
tttagcaacatctcacgttctcgctcacacagcaaaactatgggcagaaaagaatctgaagaagaattagaagcccaaatttccttccttcaagggcagttgaatgacctggatgccatg

SEQ ID NO: 292236 - DNA, 120 bp, Artificial Sequence
  ENSG00000131374_29 (sequence is synthesized)
tgcaaatactgtgcaaaggtgatggacactcatcttgtaaatattcaagatgtgatattacaagaaaatttggaaaaagaagatcaaattctggtttccctggcaggattaaaacagatc

SEQ ID NO: 292237 - DNA, 120 bp, Artificial Sequence
  ENSG00000131374_30 (sequence is synthesized)
aaagacattctaaaaggttccctgcgttttaaccagagccagctagaggccgaagagaacgaacagatcaccattgcggacaaccactactgctccagcggccagggccagggccgaggc

SEQ ID NO: 292238 - DNA, 120 bp, Artificial Sequence
  ENSG00000131374_31 (sequence is synthesized)
caaggccagagcgttcaaatgtcaggggccattaaacaggcctcttcagaaacgccagggtgcactgatagagggaattccgatgacttcatcctgatttccaaagatgatgatgggagc

SEQ ID NO: 292239 - DNA, 120 bp, Artificial Sequence
  ENSG00000131374_32 (sequence is synthesized)
acctctgggaaaagccaggccccagtctgctccccactggtgttctcagatccactgatgggcccagcctcagcttcctccagcaaccccagctccagtcctgatgacgacagcagcaag

SEQ ID NO: 292240 - DNA, 120 bp, Artificial Sequence
  ENSG00000131374_33 (sequence is synthesized)
gactctggcttcaccattgtgagtcccctggacatctgaccacagtgcccagtcctgccccacagggatctagccacccttcagtggccccaaggccagactgaggctcatccagtggag

SEQ ID NO: 292241 - DNA, 120 bp, Artificial Sequence
  ENSG00000131374_34 (sequence is synthesized)
aaccttcttaaaccactgcttccttcccggcatgcattttgcattggtccagccctttgaaaccccttagagagaagcatatatggccacaaagcacagaggcttaggtttgccacatgc

SEQ ID NO: 292242 - DNA, 120 bp, Artificial Sequence
  ENSG00000131374_35 (sequence is synthesized)
agacagggctttctgggcccttacctaatccccacccgactcttgctctgagttagagctgagttacgtacccagtatcacactcacagttagaaaagaccgaatcacaatttagaatca

SEQ ID NO: 292243 - DNA, 120 bp, Artificial Sequence
  ENSG00000131374_36 (sequence is synthesized)
cttttcctctgtccccttctccccagctaagaatgtgtggcacctccatcagttatacttagaaggagcagaaatagttattttcgtatcttctatccctcaaagcatcagacatgggaa

SEQ ID NO: 292244 - DNA, 120 bp, Artificial Sequence
  ENSG00000131374_37 (sequence is synthesized)
aattggtttataccaagaaagcttcctctgtggaaatctgtctcagcctactttattcctgcattgggaagccatatcgcagagctaaatgcaatagaatgaaccagaactagtggattc

SEQ ID NO: 292245 - DNA, 120 bp, Artificial Sequence
  ENSG00000131374_38 (sequence is synthesized)
cagggctgggggaaaaaaaaaaagaaaaaacctcattactgacctctcaaagttataaggatctctgcaaacaggatctaagcttaggaataatatttaggtgtgatatagtgttagatt

SEQ ID NO: 292246 - DNA, 120 bp, Artificial Sequence
  ENSG00000131374_39 (sequence is synthesized)
tttttgatgtattaaagaatgcatctccaatccttaggccatatcaactttggccatcaatatctctccttaaacaattatatttcaccttttagaatctttcatagccagaaaacaaga

SEQ ID NO: 292247 - DNA, 120 bp, Artificial Sequence
  ENSG00000131374_40 (sequence is synthesized)
ttactgtaagccagttttagctgcactgatttcaaaagatataagaatattactatccttcaaatggaaaatgcgaccttgactttatgggataaacatctttcagacagtcagttttct

SEQ ID NO: 292248 - DNA, 120 bp, Artificial Sequence
  ENSG00000131374_41 (sequence is synthesized)
agtcaggtttctctggtttcagagctgtatatacctgtcaactgaggaataaagggaaaaacccaagttcattcccacccaaagtcagaatccctcattggccttaaggtagcagtcata

SEQ ID NO: 292249 - DNA, 120 bp, Artificial Sequence
  ENSG00000131374_42 (sequence is synthesized)
agacagagaattggacctagagtcccttctgtggggaataaggatacctagagaacattccacatgccaagaggatgcaggatttctacacaaccccttcccttcttggaagtcaagtgt

SEQ ID NO: 292250 - DNA, 120 bp, Artificial Sequence
  ENSG00000131374_43 (sequence is synthesized)
aggtactgcagggcctgtgctcagctgtgaaccccgtatcctgggccccactgccgggaccgggtctgacatgccagtgccttcctgggctgagcacagattagagactctcccccttgt

SEQ ID NO: 292251 - DNA, 120 bp, Artificial Sequence
  ENSG00000131374_44 (sequence is synthesized)
cagtcagcaccttaggaaaccatgatgggcacagagcatcacatgagctgtttctctccttaaagaagatccctggaaaggatgcttttcctctcctttgcctgcgcaggaattctaaca

SEQ ID NO: 292252 - DNA, 120 bp, Artificial Sequence
  ENSG00000131374_45 (sequence is synthesized)
ggagtgggtgaggatggcagagggacacagtgcctgtctcgcctccatcagggagagcagccatgccagggatgactagctctttgagcctgtcctcagaggatggcgaggcagccgggc

SEQ ID NO: 292253 - DNA, 120 bp, Artificial Sequence
  ENSG00000131374_46 (sequence is synthesized)
agtggaggccttcatggtaacaaatgaaagctcagtatagaggaacagacactgtttacgtccctcccactgctaaccttatatatctctatagacaaatgtgataatgacatgatttcc

SEQ ID NO: 292254 - DNA, 120 bp, Artificial Sequence
  ENSG00000131374_47 (sequence is synthesized)
cacctgccctccaagaaaatggtgactcactctcaagtcagctactgtagagagggttctaattggttctgcaatttgctcttaaactctagcagggaactctcctcttaccacatcagc

SEQ ID NO: 292255 - DNA, 120 bp, Artificial Sequence
  ENSG00000131374_48 (sequence is synthesized)
atgtaaggtgaataataactggttttgccagacagcaggttgtctgaccttcaaccactgggcaattgcctggcagatgcacacagtagctccctggcttctggctctgagtgttcctct

SEQ ID NO: 292256 - DNA, 120 bp, Artificial Sequence
  ENSG00000131374_49 (sequence is synthesized)
cagcacctctgagtaagctgctgccaagcacatatccctatgacaacactttgtaaaagccgcggggcccccatacagcgagtgaccttgcaactgtgcagggttgccattggtcacttt

SEQ ID NO: 292257 - DNA, 120 bp, Artificial Sequence
  ENSG00000131374_50 (sequence is synthesized)
ctcaccttgggaaggtgtcagtgttttcagttctaaggtaagaggtgtagagctgttcccaccagggctctgggacagactggaaaggaccacagacctggccatccctgggcagcaggg

SEQ ID NO: 292258 - DNA, 120 bp, Artificial Sequence
  ENSG00000131374_51 (sequence is synthesized)
ccagtgtcacctgctgacctctagtatttcctttgccctagagctagagtcatgatagctgagggtcactcgccctgcaagagtcactaggcacccaccatgccaataaggctctccgct

SEQ ID NO: 292259 - DNA, 120 bp, Artificial Sequence
  ENSG00000131374_52 (sequence is synthesized)
ggctccctgcagttggctgggtgtttaatagtcactgaaaactcccagccctgctgcacactagaggcaggtcctctcggtcctctccatcctgtgcttctgtggcccccagcaagctca

SEQ ID NO: 292260 - DNA, 120 bp, Artificial Sequence
  ENSG00000131374_53 (sequence is synthesized)
ccacctccttggaggagagagacatacaaggacagtgggtcatgggtagtaccagcctcaaattcccacaggctcatactcagacaattgtattactgccttatgttttttaagtgtttt

SEQ ID NO: 292261 - DNA, 120 bp, Artificial Sequence
  ENSG00000131374_54 (sequence is synthesized)
aattcttcatagttgagtattatttgcaattttattagttacagtgctattaaagaatatgtgctcctttttattatattatcagatacttatgtttaattgtacattttttaaatcctg

SEQ ID NO: 292262 - DNA, 120 bp, Artificial Sequence
  ENSG00000131374_55 (sequence is synthesized)
cctgaatatattgtgttttgttaacaaatgtaatcagtggaacccttcttacgttttgattattagcagttaaatacattttgtatacatgaagcttagattaattcccatcatcatcat

SEQ ID NO: 292263 - DNA, 120 bp, Artificial Sequence
  ENSG00000131374_56 (sequence is synthesized)
ctcctgtttttatatgtgtccctatgtgtttcatgcattcctctttgatcagattggaatttgagttaaaatttagctttgtacattacgtgtgagagttacagactagcaagtctaatt

SEQ ID NO: 292264 - DNA, 120 bp, Artificial Sequence
  ENSG00000131374_57 (sequence is synthesized)
actttgccttaccttgagtgtatgccacagggtcagataacacattaaacatttagttacactggattactcttccaaagctgacctcctgctaatgttcagaggtaactgcaatccgga

SEQ ID NO: 292265 - DNA, 120 bp, Artificial Sequence
  ENSG00000131374_58 (sequence is synthesized)
aagaaataatatcactgcagaaagaatgtgactctaaaaataaaccaggacctccctgtgatttgccttgcctgcagatgaccagttgactcttgtgctgtcagccctggggttgctaag

SEQ ID NO: 292266 - DNA, 120 bp, Artificial Sequence
  ENSG00000131374_59 (sequence is synthesized)
gaagctgcttcagggagttgggggttagttgcccgctctcaacaggaatgcctcctctactttgtcagagatgctgaacaaatatcaaactctgtggcagtcatgctggcctcctaagaa

SEQ ID NO: 292267 - DNA, 120 bp, Artificial Sequence
  ENSG00000131374_60 (sequence is synthesized)
taacctgtgagtcagagttgatgcacattatttttgtttttattttatttttttaaggaactgctccaagggttcattatagaacaggagtgtgtacggaggacttaggtccccacatag

SEQ ID NO: 292268 - DNA, 120 bp, Artificial Sequence
  ENSG00000131374_61 (sequence is synthesized)
agtggccgttctgtggcggctccaaccaattccatccctcctttcctgcggacacacacctggcccctggcccctgccctgtgtgtctggaggaggggcactggggaggctgtggagcag

SEQ ID NO: 292269 - DNA, 120 bp, Artificial Sequence
  ENSG00000131374_62 (sequence is synthesized)
agagaagaggccggatacattgaggatggcacctggcaagccaggcttccttctcaaaggccagactgctttctcagtgttacttactaaagctctctttttatactgttaaaaagatat

SEQ ID NO: 292270 - DNA, 120 bp, Artificial Sequence
  ENSG00000131374_63 (sequence is synthesized)
ataaagttcgtataaacaggcttgagaccactttgatgtaaaagctgtcatagtagtttttctcacagtggcacaattcatttgattgatggaatattcagtgacgccatgtatgcccta

SEQ ID NO: 292271 - DNA, 120 bp, Artificial Sequence
  ENSG00000131374_64 (sequence is synthesized)
tcgcttttttctcatccatctttatgctataactcatactgatttaagaaatgatttctccttttggcaaagcgaccccattcaatatggttataataaaagactaatgtcaaactgaga

SEQ ID NO: 292272 - DNA, 120 bp, Artificial Sequence
  ENSG00000131374_65 (sequence is synthesized)
agcccttctgcgccacagagatggggtctcactctgtcatccaggctggaatatagtggcacaatcatagcccattgtagcctccatctcaaggactcaggggatcctcccttctaggcc

SEQ ID NO: 292273 - DNA, 120 bp, Artificial Sequence
  ENSG00000131374_66 (sequence is synthesized)
acatattcattaaatctacggaagaactgtgtccaaaaagacagccatgcgttcagaaacagtacacaactaaatatatatgttttaaaagttgcattttttagacttacttaaaattaa

SEQ ID NO: 292274 - DNA, 120 bp, Artificial Sequence
  ENSG00000131374_67 (sequence is synthesized)
cactagcaatactttgttctaggccttgtgctaagctgtttacatgaattaccttatttaatccttacaacagctatataatagaagtactcttactctcactctctacattatatagat

SEQ ID NO: 292275 - DNA, 120 bp, Artificial Sequence
  ENSG00000131374_68 (sequence is synthesized)
gaagaaaccaaggcatagagggattaagaaaatgccccaagattatatcattagtaaatcgagtggaaattcaaaatcaagcaatccgattataagctggatgccgtggctcacagctgt

SEQ ID NO: 292276 - DNA, 120 bp, Artificial Sequence
  ENSG00000131374_69 (sequence is synthesized)
aatcccagcactgtggaaagccaaggtgggaagatttgaggccaggaatttgagaccagcctgagcaacatactgagaccctgtctctaccaacacaaaacaacaaattttttttttttt

SEQ ID NO: 292277 - DNA, 78 bp, Artificial Sequence
  ENSG00000131374_70 (sequence is synthesized)
ccaagaggctgagatggaaatattgcttaaacccaggggtttgaggttgcagcaagttgtgattgtgccactatattc

SEQ ID NO: 292278 - DNA, 120 bp, Artificial Sequence
  ENSG00000131374_71 (sequence is synthesized)
gtattgagtcaccataagtggacaaggaaggagcttctaacagacctcattgtacatacaaaattacaatcatgaatgtaaaggaaagcacactggaactgcttgcagctgactgcgacc

SEQ ID NO: 292279 - DNA, 120 bp, Artificial Sequence
  ENSG00000131374_72 (sequence is synthesized)
gtcgggccgggcccggccgcttccgcgagcgccctgcagactgagggagagagagagaaagaggaggggaggaggaggaggattcagggaataggagctggggagcccttctgcgccaca

SEQ ID NO: 292280 - DNA, 120 bp, Artificial Sequence
  ENSG00000131374_73 (sequence is synthesized)
gagcttcccaggcgcgcgggccgcgaggttattagaggtggagcgcggggagggcgcgcggcgggaggcggccgccgttacggcgcgagcgtggtcacgtggccgctggtcaccgccgcc

SEQ ID NO: 292281 - DNA, 120 bp, Artificial Sequence
  ENSG00000131374_74 (sequence is synthesized)
aaaatctgagatgcttggagtgtaaagatcccatggtcacataaatccggaaagcactgaatactttgtttcccataagagaatcccattatatgttgatgtattaaaagacctgagaac

SEQ ID NO: 292282 - DNA, 120 bp, Artificial Sequence
  ENSG00000131374_75 (sequence is synthesized)
ctggtacttgtgtttggagaactctattgtactgagcctaagtcatttttgatctataacaagaacatgcattttcacatgtcaaccggatttgtggaccagtaaagttctcccacaagg

SEQ ID NO: 292283 - DNA, 120 bp, Artificial Sequence
  ENSG00000131374_76 (sequence is synthesized)
aagcctgcagacaacactgtcatgcttttcttttcaacagatgtcctctgactcctcccaacctcctagtacaaaaaaacataaaaatctttgtatgttttgcatctgtttgaaaaagat

SEQ ID NO: 292284 - DNA, 120 bp, Artificial Sequence
  ENSG00000131374_77 (sequence is synthesized)
cttgaatgattttgatcagctgtcatgtatgcccaacacagcagttggtttaatcaattttatgttttgggatggttttattaaaatgagctgctgctttcagtaaatcattgagaaaga

SEQ ID NO: 292285 - DNA, 120 bp, Artificial Sequence
  ENSG00000131374_78 (sequence is synthesized)
ttggagtccagaacatgtaaagttttttcacccattataaacaatttggacaaaatactgcatgttctacttaaaattgggagctaagcagtggtagagatggggcttcaccatgttgac

SEQ ID NO: 292286 - DNA, 120 bp, Artificial Sequence
  ENSG00000131374_79 (sequence is synthesized)
atcttctatgatattgtctcagggaccacctgcagcaggagcccacaaattgaataaatgcaacataaggagaggattttttttttctgttgttgcttgtttcaaaaatgctactatcca

SEQ ID NO: 292287 - DNA, 120 bp, Artificial Sequence
  ENSG00000131374_80 (sequence is synthesized)
gattctctattaaggagggagcctgcgagcaaacgaggtggaaactggagtgcacaagtgctggaatgggctgtctgccttccacccctcacgggagggagcgcgcaggtagttactttt

SEQ ID NO: 292288 - DNA, 120 bp, Artificial Sequence
  ENSG00000131374_81 (sequence is synthesized)
tgatattgagctttacatgcacttgaacagactagaaattgcaccacagatatatgggttctgcccttggaagaatttggaaactccaagggacaacactttagtgaaatgagaatttat

SEQ ID NO: 292289 - DNA, 120 bp, Artificial Sequence
  ENSG00000131374_82 (sequence is synthesized)
tgattacaagcttcagaatatcttgcctcaaactagctgaagtctggaggtactgtgacacaagaggctcaattaaggatccaagattttcgccatatttccgctgtgttaacttcatca

SEQ ID NO: 292290 - DNA, 120 bp, Artificial Sequence
  ENSG00000131374_83 (sequence is synthesized)
tcagtttcttaagacatactctcttgtaatcacaaagtgattgacaatgattttggagctataggctttcttgttctagccaaactggtgagacagaataaaaccgttcaccaagtacaa

SEQ ID NO: 292291 - DNA, 120 bp, Artificial Sequence
  ENSG00000131374_84 (sequence is synthesized)
taagtggacaaggaaggagcttctaacagacttgtgtttggagaactctattgtactgagcctaagtcatttttgatctataacaagaacatgcattttcacatgtcaaccggatttgtg

SEQ ID NO: 292292 - DNA, 120 bp, Artificial Sequence
  ENSG00000131374_85 (sequence is synthesized)
tgatatcagtatcaagataaaagtttggaatgggagaaaaattctcaaagcctgaaagaaaatctggagatgctgtttttccagcagctcagttaagggagaacttagtttgtctctgtt

SEQ ID NO: 292293 - DNA, 120 bp, Artificial Sequence
  ENSG00000131374_86 (sequence is synthesized)
agtcaccataagtggacaaggaaggagcttctaacagttttggagtccagaacatgtaaagttttttcacccattataaacaatttggacaaaatactgcatgttctacttaaaattggg

SEQ ID NO: 292294 - DNA, 120 bp, Artificial Sequence
  ENSG00000131374_87 (sequence is synthesized)
ttctctattaaggcaatattcactctgtcgccaagactggagtgcatggtgtgattaaggctcactgcagcatcaacctccaggtctcaaaccatcctcccacctcagcccccactacag

SEQ ID NO: 292295 - DNA, 120 bp, Artificial Sequence
  ENSG00000131374_88 (sequence is synthesized)
cagtgatatcagtatcaagataaaagtttggaatgggagaaaaattctcaaagcctgaaagaaaatctccccctgctgctgttgattacacctagatctgctactgattggaactgttaa

SEQ ID NO: 292296 - DNA, 120 bp, Artificial Sequence
  ENSG00000131374_89 (sequence is synthesized)
tattagttatgattctgttttaggaggtgtaatgccataatttcatagttttactaagtaagtttgaatttacatttgatttcttctggaagtcttagcagggtcttttaaatgaactgc

SEQ ID NO: 292297 - DNA, 120 bp, Artificial Sequence
  ENSG00000131374_90 (sequence is synthesized)
aaacgcccacttcgtatggggaaagaggacaacttgaagtcaagttgcaattaacttccgcggcagccgcagctccggcggcggcggcggcggcaggagaggcagaagccgccgcctcgg

SEQ ID NO: 292298 - DNA, 120 bp, Artificial Sequence
  ENSG00000131375_0 (sequence is synthesized)
gagggccgctggggccgcgaagtggggcggccgggtgggctacaagccgggtctgggctgaggggcgcggcttcgcggtggaccccagcccggcaacgggaaggcgagctctcctccacc

SEQ ID NO: 292299 - DNA, 120 bp, Artificial Sequence
  ENSG00000131375_1 (sequence is synthesized)
gtccaaagtaaactttgccgctccttccgcggcgctcccgagtcctcgccgccgccgggccgccgcagtccgcgaagagccgtcctgcgtcagggcctccttccctgccccggcgcgggg

SEQ ID NO: 292300 - DNA, 120 bp, Artificial Sequence
  ENSG00000131375_2 (sequence is synthesized)
ccactgcgccatggacgccacagcactggagcgggacgctgtgcagttcgcccgtctggcggttcagcgcgaccacgaaggccgctactccgaggcggtgttttattacaaggaagctgc

SEQ ID NO: 292301 - DNA, 120 bp, Artificial Sequence
  ENSG00000131375_3 (sequence is synthesized)
acaagccttaatttatgctgagatggcaggatcaagcctagaaaatattcaagaaaaaataactgagtatctggaaagagttcaagctctacattcagcagttcagtcaaagagtgctga

SEQ ID NO: 292302 - DNA, 120 bp, Artificial Sequence
  ENSG00000131375_4 (sequence is synthesized)
tcctttgaagtcaaaacatcagttggacttagagcgtgctcatttccttgttacacaagcttttgatgaagatgaaaaagagaatgttgaagatgctatagaattgtacacagaagctgt

SEQ ID NO: 292303 - DNA, 120 bp, Artificial Sequence
  ENSG00000131375_5 (sequence is synthesized)
ggatctctgtctgaaaacatcttatgaaactgctgataaagtcctgcaaaataaactgaaacagttggctcgacaggcactagacagagcagaagcgctgagtgagcctttgaccaagcc

SEQ ID NO: 292304 - DNA, 120 bp, Artificial Sequence
  ENSG00000131375_6 (sequence is synthesized)
agttggcaaaatcagttcaacaagtgttaagccaaagccacctccagtgagagcacattttccactgggcgctaatcccttccttgaaagacctcagtcatttataagtcctcagtcatg

SEQ ID NO: 292305 - DNA, 120 bp, Artificial Sequence
  ENSG00000131375_7 (sequence is synthesized)
tgatgcacaaggacagagatacacagcagaagaaatagaagtactcaggacaacatcaaaaataaatggtatagaatatgttcctttcatgaatgttgacctgagagaacgttttgccta

SEQ ID NO: 292306 - DNA, 120 bp, Artificial Sequence
  ENSG00000131375_8 (sequence is synthesized)
tccaatgcctttctgtgatagatggggcaagctaccattatcacctaaacaaaaaactacattttccaagtgggtacgaccagaagacctcaccaacaatcctacaatgatatatactgt

SEQ ID NO: 292307 - DNA, 120 bp, Artificial Sequence
  ENSG00000131375_9 (sequence is synthesized)
gtccagttttagcataaagcagacaatagtatcggattgctcctttgtggcatcactggccatcagtgcagcttatgaaagacgttttaataagaagttaattaccggcataatttaccc

SEQ ID NO: 292308 - DNA, 120 bp, Artificial Sequence
  ENSG00000131375_10 (sequence is synthesized)
tcaaaacaaggatggtgaaccagaatacaatccatgtgggaagtatatggtaaaacttcacctcaatggtgtcccaagaaaggtgataattgatgaccagttacctgttgatcacaaggg

SEQ ID NO: 292309 - DNA, 120 bp, Artificial Sequence
  ENSG00000131375_11 (sequence is synthesized)
agaattgctctgttcttattccaacaacaaaagtgaattatgggtttctctcatagaaaaagcatacatgaaagtcatgggaggatatgattttccaggatccaactccaatattgatct

SEQ ID NO: 292310 - DNA, 120 bp, Artificial Sequence
  ENSG00000131375_12 (sequence is synthesized)
tcatgcactgactggctggataccagaaagaattgctatgcattcagatagccaaactttcagtaaggataattctttcagaatgctttatcaaagatttcacaaaggagatgtcctcat

SEQ ID NO: 292311 - DNA, 120 bp, Artificial Sequence
  ENSG00000131375_13 (sequence is synthesized)
cactgcgtcaactggaatgatgacagaagctgaaggagagaagtggggtctggttcccacacacgcatatgctgttttggatattagagagttcaaggggctgcgatttatccagttgaa

SEQ ID NO: 292312 - DNA, 120 bp, Artificial Sequence
  ENSG00000131375_14 (sequence is synthesized)
aaatccttggagtcatttacgttggaaaggaagatacagtgaaaatgatgtaaaaaactggactccagagttgcaaaagtatttaaactttgatccccgaacagctcagaaaatagacaa

SEQ ID NO: 292313 - DNA, 120 bp, Artificial Sequence
  ENSG00000131375_15 (sequence is synthesized)
cggaatattttggatttcctgggatgatctctgccagtattatgatgtgatttatttgagttggaatccaggtctttttaaagaatcaacatgtattcacagtacttgggatgctaagca

SEQ ID NO: 292314 - DNA, 120 bp, Artificial Sequence
  ENSG00000131375_16 (sequence is synthesized)
aggacctgtgaaagatgcctatagcctggccaacaacccccagtacaaactggaggtgcagtgtccacaggggggtgctgcagtttgggttttgcttagtagacacataacagacaagga

SEQ ID NO: 292315 - DNA, 120 bp, Artificial Sequence
  ENSG00000131375_17 (sequence is synthesized)
tgattttgcgaataatcgagaatttatcacaatggttgtatacaagactgatgggaaaaaagtttattacccagctgacccacctccatacattgatggaattcgaattaacagccctca

SEQ ID NO: 292316 - DNA, 120 bp, Artificial Sequence
  ENSG00000131375_18 (sequence is synthesized)
cctggcacccatacctttacattagtggtttctcaatatgaaaaacagaacacaatccattacacggttcgggtatattcagcatgcagctttactttttcaaagattccttcaccatac

SEQ ID NO: 292317 - DNA, 120 bp, Artificial Sequence
  ENSG00000131375_19 (sequence is synthesized)
accttatcaaaacggattaatggaaagtggagtggtcagagtgctggaggatgtggaaatttccaagagactcacaaaaataaccccatctaccaattccatatagaaaagactgggccg

SEQ ID NO: 292318 - DNA, 120 bp, Artificial Sequence
  ENSG00000131375_20 (sequence is synthesized)
ttactgattgagctacgaggaccaaggcaatatagcgttggatttgaggttgtaacagtttctactctaggagatcctggtccccatggctttctgaggaaatctagtggtgactatagg

SEQ ID NO: 292319 - DNA, 120 bp, Artificial Sequence
  ENSG00000131375_21 (sequence is synthesized)
tgtgggttttgctacctggaattagaaaatataccttctgggatcttcaatatcattcctagtacctttttgcctaaacaagaaggaccttttttcttggactttaatagtattatcccc

SEQ ID NO: 292320 - DNA, 120 bp, Artificial Sequence
  ENSG00000131375_22 (sequence is synthesized)
atcaagatcacacaacttcagtgatggagaaatctcaagttactggcttttatacttaccaaacatcagttcttcaaataaggacgcaaatcttcaggacagtaagcagaacaatcagaa

SEQ ID NO: 292321 - DNA, 120 bp, Artificial Sequence
  ENSG00000131375_23 (sequence is synthesized)
tggaattaaatctctaaaaacgtgttacagtggaatctggtgcttgtcagggtgtttggtaagaactgtatatagtcagaattacctaaatcacctagaggtaccgtttacatggttttg

SEQ ID NO: 292322 - DNA, 120 bp, Artificial Sequence
  ENSG00000131375_24 (sequence is synthesized)
tgtatatagagttggcttgcattttaggggccattttgtataaaaagtgcatatgattaaaattagactcagtcatcactgtgagatgcctttgctaagaggataaaggaactgagacca

SEQ ID NO: 292323 - DNA, 120 bp, Artificial Sequence
  ENSG00000131375_25 (sequence is synthesized)
gatgagaaaaagaaaggatatagattccttgagtggaatagtgggctagattaatataccgaaatatttccattgtttcccttttttgcagagcatgtggaagttaaacctgcttgattc

SEQ ID NO: 292324 - DNA, 120 bp, Artificial Sequence
  ENSG00000131375_26 (sequence is synthesized)
tactatacatcttgggcaactagttaccaaatgaattgtgccaccataactgattttaattttgcattatttatgattttaaaatatttgttgcccaggtgttatgaaagaataaagctt

SEQ ID NO: 292325 - DNA, 120 bp, Artificial Sequence
  ENSG00000131375_27 (sequence is synthesized)
ttaagtatagactaccttagcatgaagatgctcatgcctaagaatgaaaattgttgaggttatctcccattcaatcatgtagcaagaacttaaagaaattcactactgcagtttttattt

SEQ ID NO: 292326 - DNA, 120 bp, Artificial Sequence
  ENSG00000131375_28 (sequence is synthesized)
ttaaaaaacagtaattgagatattgaagacattacaatttagtttgtgtggtctttttttaaattgctgtatcgttcagtctcttgtggcaatagcactttgaagaaaatagagaattta

SEQ ID NO: 292327 - DNA, 120 bp, Artificial Sequence
  ENSG00000131375_29 (sequence is synthesized)
atatatggtgattgggatatgtagcattcaaaaaaagtgaattgccaagatactggtgtcatgtaaattcccactttacataaaaacccatcaggacagaatgatgctcaatattttaaa

SEQ ID NO: 292328 - DNA, 120 bp, Artificial Sequence
  ENSG00000131375_30 (sequence is synthesized)
attctaaaaatagggtgggatttttcattgtctctactttataattatcaaaacttattttgtattgctactaccttaaattgaaataaaatgtttatacttacggatattgcatagttt

SEQ ID NO: 292329 - DNA, 120 bp, Artificial Sequence
  ENSG00000131375_31 (sequence is synthesized)
aagttagatttattgaaagatttcatctgtcgtgtttcatgtaaatgagaacagattatttgcatgaaaatatatacttcaacaaaaatctgttctttaacagagtagtggtagattatt

SEQ ID NO: 292330 - DNA, 120 bp, Artificial Sequence
  ENSG00000131375_32 (sequence is synthesized)
acactaatgagatttcactttggtaaatacttcatgctttcagttttagcctattaattttaggtggacaaatttaacaagttttctgttactttttaaaaagaaaaaatccagaacata

SEQ ID NO: 292331 - DNA, 120 bp, Artificial Sequence
  ENSG00000131375_33 (sequence is synthesized)
agaactatattatgaacacatgatttgaacctgttgtggtaaagatcttgtacaggatgcaaactaaaaacctaatccctgccatcaaatttattagaagagacctatatatgaacaact

SEQ ID NO: 292332 - DNA, 120 bp, Artificial Sequence
  ENSG00000131375_34 (sequence is synthesized)
taaaggcactgatttctataatagagctctaaaaacatgccaccagtgtatgaataagggaaagattaattttggctggaccaatataaaaaattgtatttgaagaattgatactttaac

SEQ ID NO: 292333 - DNA, 120 bp, Artificial Sequence
  ENSG00000131375_35 (sequence is synthesized)
ttggaccttgaaggtaaagcttcaaaagacaggttactgaccattgagtgtttactatgtacccaatgtgtatatttttctttttaatcttcccaatagctgaataaagtatagatacta

SEQ ID NO: 292334 - DNA, 69 bp, Artificial Sequence
  ENSG00000131375_36 (sequence is synthesized)
catagtaatagtttagccccgtggtaatatagtatgttggactaataatacatttgtgcattagtgcaa

SEQ ID NO: 292335 - DNA, 83 bp, Artificial Sequence
  ENSG00000131375_37 (sequence is synthesized)
ttgctctgtcacccaggctggagtgagtgcattagtgcaatctcggctcactgcagcctccacttcccgggctcaagtaattt

SEQ ID NO: 292336 - DNA, 67 bp, Artificial Sequence
  ENSG00000131375_38 (sequence is synthesized)
cagccactgcacccagccaatatatttcattttaaagcaagcaataaaaacttatttcgctgtttaa

SEQ ID NO: 292337 - DNA, 120 bp, Artificial Sequence
  ENSG00000131375_39 (sequence is synthesized)
cattttaaagcaagcaataaaaacttatttcgctgtttaatatttttattgactttaaaaagactttgaacttagtgaaagagaatcagtcacctagaaatgtactgctctcatctagct

SEQ ID NO: 292338 - DNA, 120 bp, Artificial Sequence
  ENSG00000131375_40 (sequence is synthesized)
gggaaggtcattgtaattttcttctatatagatttgtttgctctagataagcggctcaatttgaatagatttttagtgatgaaagggacattgggagctgctgccacccattcctttttc

SEQ ID NO: 292339 - DNA, 120 bp, Artificial Sequence
  ENSG00000131375_41 (sequence is synthesized)
agatgcagaagccacagcctggaaaaattgtgatttgtcctgaggcatacagttactagcagagaaagccaagaccagacccctagcttctcagttcccagctcattaaacctgacctga

SEQ ID NO: 292340 - DNA, 120 bp, Artificial Sequence
  ENSG00000131375_42 (sequence is synthesized)
tactaggctgcctataatgacttgtgtatgccaactgatttttttagtcttccaatatattcatgtatcactttgatgttcttgtaagtgtaaaatttatcaatacagtctttttttaaa

SEQ ID NO: 292341 - DNA, 120 bp, Artificial Sequence
  ENSG00000131378_0 (sequence is synthesized)
ggcgctgggcgcagcgagcgagagcgcggcggccgcgggctccggcgagggacagacgcaccgatcgccggagggacagacacacgaccacgcggcgccaccgcccacgcctccacccac

SEQ ID NO: 292342 - DNA, 120 bp, Artificial Sequence
  ENSG00000131378_1 (sequence is synthesized)
ccgcccacgcctccacccaccggcgcccaagtcctccccgcgccgcctcctctgtatggcacaaactttcctcccgggacggaacacgctgcctcagggagcccgcgaccgcgccttctc

SEQ ID NO: 292343 - DNA, 120 bp, Artificial Sequence
  ENSG00000131378_2 (sequence is synthesized)
ctccgccggtcccatacgctgctgaaatgggttgcggattgaacaagttagagaaacgtgatgaaaaacggcctgggaatatttattcaactttgaagaggcctcaggtggaaaccaaga

SEQ ID NO: 292344 - DNA, 120 bp, Artificial Sequence
  ENSG00000131378_3 (sequence is synthesized)
tagatgtgtcctatgaataccgcttcctggagttcacgactctgagtgctgcggagctccctgggtcctcagcagtgaggctggcctccctgcgtgacctgcccgcccagctcctggagc

SEQ ID NO: 292345 - DNA, 120 bp, Artificial Sequence
  ENSG00000131378_4 (sequence is synthesized)
tgtaccagcagggcttctcgctggcggccctgcaccccttcgtgcagcccacccatgagcgggagaagacgcccctggagcacatctttagagccatcctgatcaagaaaaccgacagat

SEQ ID NO: 292346 - DNA, 120 bp, Artificial Sequence
  ENSG00000131378_5 (sequence is synthesized)
ctcagaaaactgatcttcacaatgaaggctacatcttggaattagattgctgttcctccttagaccacccgacagaccagaaactcatcccagagttcattaagaagatccaggaggctg

SEQ ID NO: 292347 - DNA, 120 bp, Artificial Sequence
  ENSG00000131378_6 (sequence is synthesized)
caagccagggcctgaaattcgttggtgttatacctcagtaccattcctctgtgaactcggcaggcagcagtgctccggtgtctactgccaacagcaccgaggatgccagagatgcaaaaa

SEQ ID NO: 292348 - DNA, 120 bp, Artificial Sequence
  ENSG00000131378_7 (sequence is synthesized)
acgcacgtggggatcacgcgtcactggagaatgagaaaccggggactggggatgtgtgcagtgctccggctgggagaaaccaaagcccagagcccagctcaggccccagaggggaggtgc

SEQ ID NO: 292349 - DNA, 120 bp, Artificial Sequence
  ENSG00000131378_8 (sequence is synthesized)
ccctcgccaagcagcccagctcaccctccggagagggagatggtggagaactttcaccacagggggtgagcaagacactggatggaccggagagcaaccccttggaggtgcatgaagagc

SEQ ID NO: 292350 - DNA, 120 bp, Artificial Sequence
  ENSG00000131378_9 (sequence is synthesized)
cactctcagggaaaatggagatcttcacccttttcaacaaaccgaagagccatcagaagtgccggcaatactaccctgtcaccattcctctccatgtctccaagaatggccagacagtga

SEQ ID NO: 292351 - DNA, 120 bp, Artificial Sequence
  ENSG00000131378_10 (sequence is synthesized)
gcggtttggacgccaactggttagagcacatgagcgaccacttccggaaaggaggcatgctggtgaacgcagtcttctaccttggaatagtgaatgattccttacatggcttgacagatg

SEQ ID NO: 292352 - DNA, 120 bp, Artificial Sequence
  ENSG00000131378_11 (sequence is synthesized)
gagtattcatctttgaagctgtttccacagaagatagcaaaaccatacagggctatgatgctattgtggttgaacaatggacagtcctggaaggtgtcgaagtgcagacagactacgtgc

SEQ ID NO: 292353 - DNA, 120 bp, Artificial Sequence
  ENSG00000131378_12 (sequence is synthesized)
ctttcttcagagaccttgtctacctcagaaaatcaagaagaaggaatcgaagtttcagtggcgattctccagagaagaaatgcacaacaggcagatgaggaaatcaaaaggtaaactcag

SEQ ID NO: 292354 - DNA, 120 bp, Artificial Sequence
  ENSG00000131378_13 (sequence is synthesized)
tgccagagacaaacaacaagcagaagaaaatgagaagaacttagaagaccagtcttccaaagctggagacatgggaaactgtgtttcaggacagcagcaggagggtggagtctccgagga

SEQ ID NO: 292355 - DNA, 120 bp, Artificial Sequence
  ENSG00000131378_14 (sequence is synthesized)
gatgaagggccctgtccaagaggacaagggagaacagctgtcccctggtggcctgctgtgtggggtgggtgtggagggtgaggctgtgcagaatggtcctgccagccacagcagggccct

SEQ ID NO: 292356 - DNA, 120 bp, Artificial Sequence
  ENSG00000131378_15 (sequence is synthesized)
ggtggggatttgcactgggcactccaatcctggagaggatgccagggacggggatgctgaggaagtcagagagcttggtacggttgaagaaaactgagtcttgggcaatttgtgctaaaa

SEQ ID NO: 292357 - DNA, 120 bp, Artificial Sequence
  ENSG00000131378_16 (sequence is synthesized)
ctaggtgagttgccaaacccaaggcatcttaccaacagctggtttgggggctggtttccctggtgttgtgtgttacctaccctttggcttggcttgacctctccttgtgagctcacctga

SEQ ID NO: 292358 - DNA, 120 bp, Artificial Sequence
  ENSG00000131378_17 (sequence is synthesized)
gccctcccagggccaggttcctgacagtgttggtttttgcacatccactggaaaggtgtcattaatgacccagtgttagaatgcaagaggtcaggttattctagccctcatggctgaagg

SEQ ID NO: 292359 - DNA, 120 bp, Artificial Sequence
  ENSG00000131378_18 (sequence is synthesized)
cccagtcctggctccaccactcctccagccagagggtctggaccatccagtgcctgtcctcgccacagggcctccagggagcattcgggtcaaatccatggacaccctgggctacaaacc

SEQ ID NO: 292360 - DNA, 120 bp, Artificial Sequence
  ENSG00000131378_19 (sequence is synthesized)
aaggctgctgttcatcccacatcgtgtggggcagtgtccatcccctgcagctacttggtgacttaacaactccaggagccctgtcagctgccctcctccacctaaaccccttcgactctt

SEQ ID NO: 292361 - DNA, 120 bp, Artificial Sequence
  ENSG00000131378_20 (sequence is synthesized)
ctgctttgacaaagaaaatgacattggggaggggaggtgctccgcctcccagcttttctcaaaatagtcctatagatactggtaatctggaaatgaagaagtaattctgtctctgcacct

SEQ ID NO: 292362 - DNA, 120 bp, Artificial Sequence
  ENSG00000131378_21 (sequence is synthesized)
acttttgcagaatgttcaaggaagtattctgtgttagtattaatgccaaaaagttgtttttaaaggttttgtactcagcacatcatacaaaccacattacttctgtcacttcagggcatc

SEQ ID NO: 292363 - DNA, 120 bp, Artificial Sequence
  ENSG00000131378_22 (sequence is synthesized)
gggactggctggcgcccttgttatgtgctattttaatcagtgtaacattggtcaagttgttacccatgtatgctgtgtttatcatgtgtatatcgtccagaaagtattaaggctttaggt

SEQ ID NO: 292364 - DNA, 120 bp, Artificial Sequence
  ENSG00000131378_23 (sequence is synthesized)
agatgcaactggcgaaccttggagagggaatgctgattgtcttgaccaaacccacagcctgtctcttctcttgtttagttacttacggcaataaatcatctatgagttagtgcaccgtga

SEQ ID NO: 292365 - DNA, 120 bp, Artificial Sequence
  ENSG00000131378_24 (sequence is synthesized)
ctcgtacagtccttcatcttcatggcagaaaggctgttctgcccctgcgccctccctggcctctctggggatccctgcagctgatgtattgtgatggagcagtggacttggatgctgctg

SEQ ID NO: 292366 - DNA, 120 bp, Artificial Sequence
  ENSG00000131378_25 (sequence is synthesized)
aaatcttgaaggatccttgtctcccaggcgctcttcctgacagcacacaaccttgattaggaggggctgggagggaggatcgatgagcccctgacccctgggttctgaggctgccagggt

SEQ ID NO: 292367 - DNA, 120 bp, Artificial Sequence
  ENSG00000131378_26 (sequence is synthesized)
tataaaagaaacttgctaggccaccaagcacttggagctttgcaggatatcttgtagttttactgaacagcaaagccttcactttggctttcttggttcctgaatcttctgtgtgctgtg

SEQ ID NO: 292368 - DNA, 120 bp, Artificial Sequence
  ENSG00000131378_27 (sequence is synthesized)
gagttctcatcaatgcctcctggtccagtcctcccaccatacacctgtcagaagttcctgcacccctttgggctcctccagcttaacttctttaatgctgtgtcagctgttagggaaatg

SEQ ID NO: 292369 - DNA, 120 bp, Artificial Sequence
  ENSG00000131378_28 (sequence is synthesized)
ggaaggaagagaaaagaaaaatggtgaatgcaaagaaccatattcaggaggtgcttggtctctgcttacaaaggctgcagcgagacccccccatatgaagatgctatcgaggattatgtc

SEQ ID NO: 292370 - DNA, 120 bp, Artificial Sequence
  ENSG00000131378_29 (sequence is synthesized)
gggtttgctctggggacagaggtgctggacgtgtaggagcagacatgccgcgcgctccgaggaagcgccggaaccaccagaagcacagggacgcgggtgccgagagtccccagcactgaa

SEQ ID NO: 292371 - DNA, 120 bp, Artificial Sequence
  ENSG00000131378_30 (sequence is synthesized)
atggaccgggtctctggcgggtagtgggaaccgcgcgtggcgcctccctgcaggttgctctttgccggggctccggagctgccagagcagcaccccctggcccgcgtcggatggggacct

SEQ ID NO: 292372 - DNA, 120 bp, Artificial Sequence
  ENSG00000131378_31 (sequence is synthesized)
gggctgatccttgggacgcctggatcttgggccaacttttttttgcggggaacgggtgtaggggagtcattcctggagcgatgtagggagaggcacttcggagcagcctgttgggggtcg

SEQ ID NO: 292373 - DNA, 120 bp, Artificial Sequence
  ENSG00000131378_32 (sequence is synthesized)
cactcctttcagaaaattcctttggaatggtgaaatacagcctctcaaatctccagtgctctgtatctcagaaaactgatcttcacaatgaaggctacatcttggaattagattgctgtt

SEQ ID NO: 292374 - DNA, 120 bp, Artificial Sequence
  ENSG00000131378_33 (sequence is synthesized)
ctatgagttagtgcaccgtgaggattgagtgtttatcgtgtcactaggaacagtcctggcctcatgtccaaaggattccagcccacaccccccattcactataagtttctaactcctggc

SEQ ID NO: 292375 - DNA, 120 bp, Artificial Sequence
  ENSG00000131378_34 (sequence is synthesized)
agcatgatgacgtggtggaggaagacaaagttcccatggaaagctgcagagccagctaggcttgctgtgctttctcgtcatttgtagaaagagatggcaagtggaactcagatgccacca

SEQ ID NO: 292376 - DNA, 120 bp, Artificial Sequence
  ENSG00000131378_35 (sequence is synthesized)
gtttcttcacagctctgagcatcaatcgcctcaagtgtgaaatggggtgaaatggcacccacctctttggatttttgtgaggattaataagatgtgaataaagtgcttggtccatggtaa

SEQ ID NO: 292377 - DNA, 120 bp, Artificial Sequence
  ENSG00000131379_0 (sequence is synthesized)
acagttaacacaacctggagtagcccatgccatactgtgtccttttaagtcagtaaattgaactaagtcggttattcggcaagcagttcctataaaaaactacatggctaagatgtacac

SEQ ID NO: 292378 - DNA, 120 bp, Artificial Sequence
  ENSG00000131379_1 (sequence is synthesized)
gttggataattccatgcccatcttggcattgcgaccaggagcttctgcatcccttgcttccaaagcgaaccagtgaaacatctttttattcttgcaggttcttaatgattgaccacaagc

SEQ ID NO: 292379 - DNA, 120 bp, Artificial Sequence
  ENSG00000131379_2 (sequence is synthesized)
agatctttcaccctcggatctctagctacaaaaggaaccactggctcaatgacctgtaagggccgtttcagcacatccattctgtccatctccaagccttcaccgtagggaagaactttt

SEQ ID NO: 292380 - DNA, 120 bp, Artificial Sequence
  ENSG00000131379_3 (sequence is synthesized)
gctctcagtcacctctcagagagctctctttatagctgaaggtccctctcatgagttacatcaagagtaacctagaattatatcagcaatacacagccatggcccccaagctactggccc

SEQ ID NO: 292381 - DNA, 120 bp, Artificial Sequence
  ENSG00000131379_4 (sequence is synthesized)
gcatctccaaactcctcatgatctgccagaatgcaggcatttctgtaccaaaaggcatcagaaacatctttgagttcacttgggaagagctcatcagtgacccttcagtgcctaccccgt

SEQ ID NO: 292382 - DNA, 120 bp, Artificial Sequence
  ENSG00000131379_5 (sequence is synthesized)
ccgacatcttgggcctggaggtcagctttggagcccccctggtggtgctcatggaacccacctttgtgcaggtccccacactgaagaagccactacctccaccaccaccagcaccaccac

SEQ ID NO: 292383 - DNA, 120 bp, Artificial Sequence
  ENSG00000131379_6 (sequence is synthesized)
gtccagtgctgctggcaaccactggggcagccaagcgctccaccctctctcccaccatggcccgtcaggtgcgcacccaccaggagaccctgaacaggtttcagcagcagtccatccacc

SEQ ID NO: 292384 - DNA, 120 bp, Artificial Sequence
  ENSG00000131379_7 (sequence is synthesized)
tgctgacggagctcctcagactgaagatgaaggccatggtggagtctatgtcggtgggtgccaaccccttggacatcaccaggcgctttgtggaggccagccagctcctccacctcaatg

SEQ ID NO: 292385 - DNA, 120 bp, Artificial Sequence
  ENSG00000131379_8 (sequence is synthesized)
ccaaggagatggccttcaactgcctgatcagcacagccgggagaagtggctacagcagcggacagttgtggaaagagtccctcgcaaacatgtccgccattggggtgaactcgccttacc

SEQ ID NO: 292386 - DNA, 120 bp, Artificial Sequence
  ENSG00000131379_9 (sequence is synthesized)
agctgatctaccactcttccacagcctgtctgagcttttctctctctgctggaaaagaagccaagaagaaaataggcaaatctagaactacagaagatgtcagcatgccgcccctgcatc

SEQ ID NO: 292387 - DNA, 120 bp, Artificial Sequence
  ENSG00000131379_10 (sequence is synthesized)
gaggagtgggaacccctgccaacagcctggagttcagcgacccctgccctgaggcccgggagaagctgcaggagttgtgtcgccacatagaagctgaaagggccacatggaaagggagga

SEQ ID NO: 292388 - DNA, 120 bp, Artificial Sequence
  ENSG00000131379_11 (sequence is synthesized)
atatctcctaccccatgatcttacgaaactacaaggcaaagatgccctctcatctaatgttggcccgcaaaggagactctcagaccccgggtttacattaccctcccactgcaggtgctc

SEQ ID NO: 292389 - DNA, 120 bp, Artificial Sequence
  ENSG00000131379_12 (sequence is synthesized)
agactctcagccccacctctcacccatcttctgccaaccatcatttcagtcagcattgtcaagaggggaaggcacccaagaaggccttcaagtttcattacaccttctatgatggctcct

SEQ ID NO: 292390 - DNA, 120 bp, Artificial Sequence
  ENSG00000131379_13 (sequence is synthesized)
cacatgctgcagagggagaaccatcacctgcctctttaatgacatacctggattctccttgctggccctattcaatactgaaggccagggctgtgttcactacaacctaaaaaccagttg

SEQ ID NO: 292391 - DNA, 120 bp, Artificial Sequence
  ENSG00000131379_14 (sequence is synthesized)
cccatatgtcttaatcttggatgaggaaggtgggaccaccaatgaccagcagggctatgtagtccacaagtggagctggacttccaggacagagaccctgctttccctggaatacaaggt

SEQ ID NO: 292392 - DNA, 120 bp, Artificial Sequence
  ENSG00000131379_15 (sequence is synthesized)
gaatgaggaaatgaaactaaaggtactgggacaggactccatcacagtcaccttcacctccctgaatgagacagtaacactcactgtgtcggccaacaattgtccccatggaatggcata

SEQ ID NO: 292393 - DNA, 120 bp, Artificial Sequence
  ENSG00000131379_16 (sequence is synthesized)
tgacaaacggctgaaccgcagaatcagcaacatggacgacaaggtgtataagatgagccgagccctggctgagatcaagaagcggtttcagaagacagtgactcagttcattaattctat

SEQ ID NO: 292394 - DNA, 120 bp, Artificial Sequence
  ENSG00000131379_17 (sequence is synthesized)
cttgctggccgcaggtctgtttaccattgaatatcccaccaaaaaggaggaggaagaatttgttcggttcaagatgagatccagaactcatcccgagcggctccccaagctaagtttata

SEQ ID NO: 292395 - DNA, 120 bp, Artificial Sequence
  ENSG00000131379_18 (sequence is synthesized)
ctcaggagaaagtcttttacgatctcagtcaggccacctggaatcctcaattgcagagactttgaaggatgagcctgagtctgctcctgtgagcccagttcggaagaccaccaaaatcca

SEQ ID NO: 292396 - DNA, 120 bp, Artificial Sequence
  ENSG00000131379_19 (sequence is synthesized)
caccaaagccaaggtcacatccagagggaaggcccgcgaggggcgcagccccaccaggtgggcggccttgccctcagactgcccgctggtgctgcggaagctcatgctcaaggaagacac

SEQ ID NO: 292397 - DNA, 120 bp, Artificial Sequence
  ENSG00000131379_20 (sequence is synthesized)
ccgtgctggctgcaagtgcctggtgaaggcgcccctggtctctgacgtggagctggagcgcttcctgttggcgccccgagaccccagccaagtgctggtgtttgggatcatctcaagcca

SEQ ID NO: 292398 - DNA, 120 bp, Artificial Sequence
  ENSG00000131379_21 (sequence is synthesized)
gaactacaccagcactgggcagctccagtggctgctgaacactctctacaaccaccagcagcggggccgtggctccccctgcatccagtgccggtatgactcctaccgcctgctgcagta

SEQ ID NO: 292399 - DNA, 120 bp, Artificial Sequence
  ENSG00000131379_22 (sequence is synthesized)
tgacctggacagccccctgcaggaggaccctcccctgatggtgaagaagaactctgtggtgcaggggatgattctgatgtttgccggggggaagctcatttttgggggccgtgttttgaa

SEQ ID NO: 292400 - DNA, 120 bp, Artificial Sequence
  ENSG00000131379_23 (sequence is synthesized)
tggatatggcctcagcaagcagaatctgctgaaacagatcttccggtctcaacaggattacaagatgggctacttcctgccggatgactacaaattcagtgttcccaactctgtcctgag

SEQ ID NO: 292401 - DNA, 120 bp, Artificial Sequence
  ENSG00000131379_24 (sequence is synthesized)
cctggaggattctgaatcagtcaagaaagccgagtcagaagatatccaaggaagcagctcctcattggccctggaagactatgtggagaaggagttatctctggaggctgagaagacaag

SEQ ID NO: 292402 - DNA, 120 bp, Artificial Sequence
  ENSG00000131379_25 (sequence is synthesized)
agagcctgaagtggagctacatcctctcagcagggacagcaagataactagttggaagaagcaggcctccaagaagtagcgccatcctggcagcagccaagtgagccaggccccggcccg

SEQ ID NO: 292403 - DNA, 120 bp, Artificial Sequence
  ENSG00000131379_26 (sequence is synthesized)
gggtgctggggcttcttgccagcccagccctgcctccccggtctcccaccctgtcctccaagcttctataataaaccagcgggcctccagcattggggtgaggctctggggaaggacaga

SEQ ID NO: 292404 - DNA, 120 bp, Artificial Sequence
  ENSG00000131379_27 (sequence is synthesized)
gtccttttaagtcagtaaattgaactaagtcggttattcggcaagcagttcctataaaaaactacatggctaaggttcttaatgattgaccacaagcagatctttcaccctcggatctct

SEQ ID NO: 292405 - DNA, 120 bp, Artificial Sequence
  ENSG00000131379_28 (sequence is synthesized)
ttcgcatctcttggctctgctttcctctttgttggcttcattctcaaggagtttctctcctgttgatgacaagatgaccatgaacatctctgggctattattataccagctttagtgccc

SEQ ID NO: 292406 - DNA, 120 bp, Artificial Sequence
  ENSG00000131381_0 (sequence is synthesized)
gagttccgagcgaccgatggagatggcggctgcggctgagtgacggacggtggaggcccagagcccgggcctgaagggggggacaaacctgggtgcccgcaggagcccggcagggtactg

SEQ ID NO: 292407 - DNA, 120 bp, Artificial Sequence
  ENSG00000131381_1 (sequence is synthesized)
tgctaaaccctggggagacggcgaagtggaaaacatatagagtctgtgccctcccagattttacagtcttacttggtcacttcacgtatgtacctgcggttataaattgagatgagtgct

SEQ ID NO: 292408 - DNA, 120 bp, Artificial Sequence
  ENSG00000131381_2 (sequence is synthesized)
gtgaaggagaagtccattctgatgctctgagtgtcttacaagtatcaagaacttactatatgtggttgaataaacaatcaaggtaaagagcatcaagtaaaaacttctgcttgttgataa

SEQ ID NO: 292409 - DNA, 120 bp, Artificial Sequence
  ENSG00000131381_3 (sequence is synthesized)
gtacttcagacattcccccagtggctgaagtggcatatgaattatgaagttggatcatttggaatgaatgtaagagaattgccaagggctcctcctactccagagaggaaacctcatcca

SEQ ID NO: 292410 - DNA, 120 bp, Artificial Sequence
  ENSG00000131381_4 (sequence is synthesized)
gggccatgaagccacttcctcaccatctgtgtgctgcttaagctaatgctgcgggaaccatggttccttgggaggaatcaagctgactcttggcatgagattcctgccttcctagggttg

SEQ ID NO: 292411 - DNA, 120 bp, Artificial Sequence
  ENSG00000131381_5 (sequence is synthesized)
agagcggcactgccatggcttctctggacgacccaggggaagtgagggagggcttcctctgccctctgtgcctgaaggatctgcagtctttctatcagcttcactcacattacgaggaag

SEQ ID NO: 292412 - DNA, 120 bp, Artificial Sequence
  ENSG00000131381_6 (sequence is synthesized)
aacactcaggggaagaccgtgatgtcaaagggcaaattaaaagtcttgtccagaaggctaaaaaagcaaaggacaggttgttgaaacgagaaggggatgatcgagcagagtcagggaccc

SEQ ID NO: 292413 - DNA, 120 bp, Artificial Sequence
  ENSG00000131381_7 (sequence is synthesized)
aaggatatgagtctttcagctatggaggggttgatccttacatgtgggaaccccaggagcttggtgctgtgagaagccatctttccgacttcaaaaaacaccgagctgctagaattgacc

SEQ ID NO: 292414 - DNA, 120 bp, Artificial Sequence
  ENSG00000131381_8 (sequence is synthesized)
actatgttgtggaagtcaataaactaataatcaggttagagaagctcactgcatttgacagaacaaatactgagtctgcaaagattcgagcaatagaaaagtctgtggtgccttgggtca

SEQ ID NO: 292415 - DNA, 120 bp, Artificial Sequence
  ENSG00000131381_9 (sequence is synthesized)
acgaccaggatgtccctttctgtccagactgtgggaataagttcagcatccggaaccgccgccaccactgccgcctctgcgggtctattatgtgcaagaagtgtatggagctcatcagcc

SEQ ID NO: 292416 - DNA, 120 bp, Artificial Sequence
  ENSG00000131381_10 (sequence is synthesized)
ttcccttggcaaacaagctcaccagtgccagcaaggagtccctgagcacccacaccagccccagccagtcacccaacagtgtccatggctcccgccgaggcagcatcagcagcatgagca

SEQ ID NO: 292417 - DNA, 120 bp, Artificial Sequence
  ENSG00000131381_11 (sequence is synthesized)
gtgtcagctcggtcctggatgagaaggacgatgaccggatccgctgctgtacacactgcaaggacacgctgctcaagagagagcagcagattgatgagaaggagcacacacctgacatcg

SEQ ID NO: 292418 - DNA, 120 bp, Artificial Sequence
  ENSG00000131381_12 (sequence is synthesized)
tgaagctctacgagaaattacgactttgcatggagaaagttgaccagaaagctccagaatacatcaggatggcagcatcattaaatgctggggagacaacctacagtctggaacatgcca

SEQ ID NO: 292419 - DNA, 120 bp, Artificial Sequence
  ENSG00000131381_13 (sequence is synthesized)
gtgaccttcgagtggaagtgcagaaagtgtatgagctgatagacgctttaagtaagaagatcttaaccttgggcttgaaccaggaccctccaccacatccaagcaatttgcggctgcaga

SEQ ID NO: 292420 - DNA, 120 bp, Artificial Sequence
  ENSG00000131381_14 (sequence is synthesized)
gaatgatcagatactcagctacactttttgtgcaggaaaagttgcttggtttgatgtcactgccaaccaaagaacagtttgaggaactgaaaaagaaaaggaaggaggaaatggagagga

SEQ ID NO: 292421 - DNA, 120 bp, Artificial Sequence
  ENSG00000131381_15 (sequence is synthesized)
agagggccgtggagagacaagctgccctggagtcccagcgaaggcttgaggaaaggcagagtggcctggcttctcgagcggccaacggggaggtggcatctctccgcaggggccctgccc

SEQ ID NO: 292422 - DNA, 120 bp, Artificial Sequence
  ENSG00000131381_16 (sequence is synthesized)
ccttgagaaaggctgagggctggctcccactgtcaggaggtcaggggcagagtgaggactcagacccgctcctccagcagatccacaacatcacatcattcatcaggcaggccaaggccg

SEQ ID NO: 292423 - DNA, 120 bp, Artificial Sequence
  ENSG00000131381_17 (sequence is synthesized)
cgggccgcatggatgaagtgcgcactctgcaggagaacctgcggcagctgcaggacgagtatgaccagcagcagacagagaaggccatcgagctgtcccggaggcaggctgaggaggagg

SEQ ID NO: 292424 - DNA, 120 bp, Artificial Sequence
  ENSG00000131381_18 (sequence is synthesized)
acctgcagcgggaacagctgcagatgttgcgtgaacgggagttggaacgagaaagggagcagtttcgggtggcatccctgcacacacggactcggtccctggacttcagagaaatcggcc

SEQ ID NO: 292425 - DNA, 120 bp, Artificial Sequence
  ENSG00000131381_19 (sequence is synthesized)
cttttcagctggagcccagcagagagcctcgcacccaccttgcttatgctttggatctaggctcttccccagttccaagcagcacagctcccaagaccccttcacttagctcaactcaac

SEQ ID NO: 292426 - DNA, 120 bp, Artificial Sequence
  ENSG00000131381_20 (sequence is synthesized)
ccaccagagtgtggtctgggcccccagccgttggccaggagcgcttaccccagagcagcatgccacagcaacatgaggggccctccttaaacccctttgatgaggaagacctctccagcc

SEQ ID NO: 292427 - DNA, 120 bp, Artificial Sequence
  ENSG00000131381_21 (sequence is synthesized)
ccatggaagaggccactactggtcctcctgctgcaggggtttccttagacccttcagcccgcatcctgaaagagtacaatcctttcgaggaagaggacgaggaggaggaagcagtggcag

SEQ ID NO: 292428 - DNA, 120 bp, Artificial Sequence
  ENSG00000131381_22 (sequence is synthesized)
ggaatccattcattcagccagacagcccagctcctaaccccttcagtgaggaagacgaacatccccagcagaggctctcaagccctctggttcctggtaacccctttgaggaacccacct

SEQ ID NO: 292429 - DNA, 120 bp, Artificial Sequence
  ENSG00000131381_23 (sequence is synthesized)
gtatcaacccctttgagatggacagtgacagtgggccagaggctgaggagcccatagaggaagagctcctcctgcagcagatcgataacatcaaggcatacatctttgatgccaagcagt

SEQ ID NO: 292430 - DNA, 120 bp, Artificial Sequence
  ENSG00000131381_24 (sequence is synthesized)
gcggccgcctggatgaggtagaggtgctgacagagaatctgcgggagctgaagcacaccctggccaagcagaaggggggcactgactgaccagcagtggagagggcacctttgggcccag

SEQ ID NO: 292431 - DNA, 120 bp, Artificial Sequence
  ENSG00000131381_25 (sequence is synthesized)
gggtctggcaggagccagtggagcaggacagagggcaggcaggatggatggggaaggtggcagggtgagaactcagatgcacacaggtgaggggcaggaatctgctgttttgtgttgcgc

SEQ ID NO: 292432 - DNA, 120 bp, Artificial Sequence
  ENSG00000131381_26 (sequence is synthesized)
actttgaggtatttccactacagttgaataataaaatagaaactagaacagggagaatcagcattcagttgctgcttttcctgtttattattactatcttttgtaatcggaggtttaccc

SEQ ID NO: 292433 - DNA, 120 bp, Artificial Sequence
  ENSG00000131381_27 (sequence is synthesized)
ctgtgtacctcttgggtccatttgctactgcctagtcttggttccttatgcagtattatagggcagcctttttagagcccttcctttagccaagacagagaagatagattccactgagct

SEQ ID NO: 292434 - DNA, 120 bp, Artificial Sequence
  ENSG00000131381_28 (sequence is synthesized)
ctattctgctctgacagaagtccatccctagtaggctgtgagttccatttcacctggggccgcctctcccctgctctgcacttcctgtctgtacaatagaagggggaggtgctgctatga

SEQ ID NO: 292435 - DNA, 120 bp, Artificial Sequence
  ENSG00000131381_29 (sequence is synthesized)
aggggagagtttagacccaggagagcccagcacctctttttaaggtggggtgatgggaatatttcaccagggtctattttctcagtttaagttcttttttgtctctttcaggaagttaag

SEQ ID NO: 292436 - DNA, 120 bp, Artificial Sequence
  ENSG00000131381_30 (sequence is synthesized)
aagttcttttttgtctctttcaggaagttaagctcccagtgcagggtatcaatgtgaatctggtcctgagctttttagaaaataagagtggtggccgggcgcgctggctcacgcctgtaa

SEQ ID NO: 292437 - DNA, 78 bp, Artificial Sequence
  ENSG00000131381_31 (sequence is synthesized)
tgagagtgagactccgtctcaaaaaaaaataagagtggttaactttttggttgatattagtattatttgtgagaagag

SEQ ID NO: 292438 - DNA, 120 bp, Artificial Sequence
  ENSG00000131381_32 (sequence is synthesized)
ttaactttttggttgatattagtattatttgtgagaagagtttccccacccttcttctgatagaacaattgtctgtcactggagaaatctccctccagagctttggcaaagttactctga

SEQ ID NO: 292439 - DNA, 120 bp, Artificial Sequence
  ENSG00000131381_33 (sequence is synthesized)
tctgggtctgtttaaaaggccgggtctctaatttaggaatcggtgatttggaagcttttgcagaacatcaccagaagaagggaagcttcccagagtcagaagctaaattaaaataatttc

SEQ ID NO: 292440 - DNA, 120 bp, Artificial Sequence
  ENSG00000131381_34 (sequence is synthesized)
cagaagctaaattaaaataatttccaaggctatttgatcagccttcttcctttttggttcattgtgtcctgacttggggcactgatgagattttttattttttttgagacagagtttcac

SEQ ID NO: 292441 - DNA, 120 bp, Artificial Sequence
  ENSG00000131381_35 (sequence is synthesized)
gcaacctccacctccctggttcaagtgatatttgtgcctcagccccctgaatagctaggattacaggcgtgggccaccacgcctggttaatctctgtatttttagtagaggtagagtttc

SEQ ID NO: 292442 - DNA, 76 bp, Artificial Sequence
  ENSG00000131381_36 (sequence is synthesized)
ttacaggcgtgggccaccacgcctggttaatctctgtatttttagtagaggtagagtttcaccataccttggcctc

SEQ ID NO: 292443 - DNA, 120 bp, Artificial Sequence
  ENSG00000131381_37 (sequence is synthesized)
cctgatgagatattttattaccaatgttagtattgagaaactgaaatgtttgaagaagcacaacccaggatcgtgctggtagcaccacagtacttaaactgttggtcaattaaggccaga

SEQ ID NO: 292444 - DNA, 120 bp, Artificial Sequence
  ENSG00000131381_38 (sequence is synthesized)
aagggaaattgttaatttagctctggtgctttggtttacaggaacataactcttaactgacatctgacatcatgatagccatatgtgctcagctctgggtagagtttctgcagttactca

SEQ ID NO: 292445 - DNA, 120 bp, Artificial Sequence
  ENSG00000131381_39 (sequence is synthesized)
tctgaactaatgaacaataactgaccactagtcactttatgccgtgtaactagctctaggccatactttcactggttactggtgtgaaagctgaaattcattttgttacattctggtgaa

SEQ ID NO: 292446 - DNA, 120 bp, Artificial Sequence
  ENSG00000131381_40 (sequence is synthesized)
gacccctcttgataatgggaatgttttaactctcttgatgaaaaaataatctgtatttgtgttgatgttcacatttctgtagcacatttcttatccttttggttgaatgaaaagatcttg

SEQ ID NO: 292447 - DNA, 120 bp, Artificial Sequence
  ENSG00000131381_41 (sequence is synthesized)
tataggggtgtggagatggggagtgggtagaagtgtgtgaaggacgctttgcatttgggatctgttcacaaacagccatatgagtgtgttaatgaatgtcagccagttaccaaccctgct

SEQ ID NO: 292448 - DNA, 120 bp, Artificial Sequence
  ENSG00000131381_42 (sequence is synthesized)
ggttgttatgggttgttttgagaagttggcaaccaggcatctaagatgttgcctggtacaggcctcttttcttccctgaggcccatgacatttctctgttactctagagggtttctcaga

SEQ ID NO: 292449 - DNA, 120 bp, Artificial Sequence
  ENSG00000131381_43 (sequence is synthesized)
tggccagtaggctcctccctgcttagggtctcatttctctgaaaagaggatgaactgaaaagcaggtagttccagaagctaattgctgctttccatcataattatttttcttgtgagaac

SEQ ID NO: 292450 - DNA, 120 bp, Artificial Sequence
  ENSG00000131381_44 (sequence is synthesized)
atttctcttttaattagctagtgattttgattaagactaattcactaaacatacccttccctcaaatcacctcaggtagcaatctgtaagtaactaaaagcattgaaaaacacacaagaa

SEQ ID NO: 292451 - DNA, 90 bp, Artificial Sequence
  ENSG00000131381_45 (sequence is synthesized)
ccaacaaaaaacaaacaaaactgactgattgaatatactaaaccaaactaaaatcatattcttttgattaagtttatccatggctgtatt

SEQ ID NO: 292452 - DNA, 120 bp, Artificial Sequence
  ENSG00000131381_46 (sequence is synthesized)
aaatcatattcttttgattaagtttatccatggctgtattcttctatgaattcttccatttaattcttccacgattatcttctcctgtaaatacatcacaggagttagaattctctaccc

SEQ ID NO: 292453 - DNA, 120 bp, Artificial Sequence
  ENSG00000131381_47 (sequence is synthesized)
atcagctgtaccatgtcgcagaattcatgcaggcacaaagttggagttacagagatgggttgacagcaggcaaacttggcctatgtattataaccacaacttcaagttcttacctcatgt

SEQ ID NO: 292454 - DNA, 120 bp, Artificial Sequence
  ENSG00000131381_48 (sequence is synthesized)
gaatattcaccctttctttagtcttccaaggcaaacagccccgtctcatcaccagatgagcaaggtcttgatatggcatagcagatctccctagacacagatcatgagaaaagatggaag

SEQ ID NO: 292455 - DNA, 120 bp, Artificial Sequence
  ENSG00000131381_49 (sequence is synthesized)
agacttagggattcaggcatcagatgaagttggcttttcccttttatgccttgtttgtatttaccctgtctaatacactaaggatacttactcattgtacttgcagctcaatatgtcttt

SEQ ID NO: 292456 - DNA, 120 bp, Artificial Sequence
  ENSG00000131381_50 (sequence is synthesized)
gctgttcagatactaaaatgtacctctgagtcattgtgagctgtgtggtaggttggacattggcatagttggtgatgggactcaaaatgaaaaggtggtctctttaccaggtcacagact

SEQ ID NO: 292457 - DNA, 120 bp, Artificial Sequence
  ENSG00000131381_51 (sequence is synthesized)
gtagcagattgtgcttgttatctgacaatgactgtcactttgagggtcgttgatttgcatgcactactctggggccttgtattggagccttttttaaaaaaaataaaatctgagatagag

SEQ ID NO: 292458 - DNA, 120 bp, Artificial Sequence
  ENSG00000131381_52 (sequence is synthesized)
gcaggcgcacctgccgagttccgagcgaccgatggagatggcggctgcggctgagtgacggacggtggaggcccagagcccgggcctgaagggggggacaaacctgggtgcccgcaggag

SEQ ID NO: 292459 - DNA, 120 bp, Artificial Sequence
  ENSG00000131381_53 (sequence is synthesized)
accgatggagatggcggctgcggctgagtgacggacggtggaggcccagagcccgggcctgaagggggggacaaacctgggtgcccgcaggagcccggcagggtacatacagagggtgtc

SEQ ID NO: 292460 - DNA, 120 bp, Artificial Sequence
  ENSG00000131381_54 (sequence is synthesized)
tctcatcagctttggtgttgccacaggaatatgataatagtagtagcaaacagatgactagtgtttgtcatgtgccaggcgttttcagagtttccctgtttattaatttcatttaatcct

SEQ ID NO: 292461 - DNA, 120 bp, Artificial Sequence
  ENSG00000131381_55 (sequence is synthesized)
cacaataactgtgtggctgtaagccacatttcgaaccagacacagagagattagataacttgtctgaagccactcagagaaacaatctgactttgagtctagtaaatgtaattgctgtga

SEQ ID NO: 292462 - DNA, 120 bp, Artificial Sequence
  ENSG00000131381_56 (sequence is synthesized)
atatctgtttcttgaagctttttgcaagtattctcacatgcattcaataagtgcgtgggcagtagtggggaagcaagaactctgtgtccagttaagcctatggggaacaccagtccacgg

SEQ ID NO: 292463 - DNA, 120 bp, Artificial Sequence
  ENSG00000131381_57 (sequence is synthesized)
tttttttttttttttttttttggagagagacggggtctcgctatgttgaccaacctgcttttgaaattcactgggataagaggcaaggtagagactaggctccctcagagaaactataag

SEQ ID NO: 292464 - DNA, 120 bp, Artificial Sequence
  ENSG00000131381_58 (sequence is synthesized)
agaaatggtgtcaattaagccccatgttgggttgcagatgtagcattctccatcctttgtgtggagttcacgacctggtatctcatttctgtgaatacccacggtgcttgtgccacctcc

SEQ ID NO: 292465 - DNA, 120 bp, Artificial Sequence
  ENSG00000131381_59 (sequence is synthesized)
tgtgccacctcctcttttgaaacaccttggcttgtgccctggaagccttgctcctctcaaaaacatctcgccgggcactttgggaggccggggcaggcagatcatttgaggccaggagtt

SEQ ID NO: 292466 - DNA, 63 bp, Artificial Sequence
  ENSG00000131381_60 (sequence is synthesized)
gccattgtactccaccttggaaattacgactttgcatggagaaagttgaccagaaagctccag

SEQ ID NO: 292467 - DNA, 120 bp, Artificial Sequence
  ENSG00000131381_61 (sequence is synthesized)
ggccgtggagagacaaggcctatttttctttcagagcttctgctgattctctcatggctagaataccacagagattgacagttctccctatggcaggagttgcagaggaccaagacatta

SEQ ID NO: 292468 - DNA, 120 bp, Artificial Sequence
  ENSG00000131381_62 (sequence is synthesized)
ggaagttccttgtagaacatatcgggtctcccttccgcccacatatacacaaaaacatgacttgattttagcagttggatatctttgtcctgaggctgccctggagtcccagcgaaggct

SEQ ID NO: 292469 - DNA, 120 bp, Artificial Sequence
  ENSG00000131386_0 (sequence is synthesized)
acatctgttgatctgacctgactggaagcgtccaaagagggacggctgtcagccctgcttgactgagaacccaccagctcatcccagacacctcatagcaacctatttatacaaaggggg

SEQ ID NO: 292470 - DNA, 120 bp, Artificial Sequence
  ENSG00000131386_1 (sequence is synthesized)
aaagaaacacctgagcagaatggaatcattatttttttcccaaggagaaaaccggggtaaagggagggaagcaattcaatttgaagtccctgtgaatgggctttcagaaggcaattaaag

SEQ ID NO: 292471 - DNA, 120 bp, Artificial Sequence
  ENSG00000131386_2 (sequence is synthesized)
aaatccactcagagaggacttggggtgaaacttgggtcctgtggttttctgattgtaagtggaagcaggtcttgcacacgctgttggcaaatgtcaggaccaggttaagtgactggcaga

SEQ ID NO: 292472 - DNA, 120 bp, Artificial Sequence
  ENSG00000131386_3 (sequence is synthesized)
aaaacttccaggtggaacaagcaacccaggttctgctgcaagcttgaaggagcctggagcgggagaaagctaacttgaacatgacctgttgcatttggcaagttctagcaacatgctcct

SEQ ID NO: 292473 - DNA, 120 bp, Artificial Sequence
  ENSG00000131386_4 (sequence is synthesized)
aaggaagcgatacaggcacagaccatgcagactccagttcctcctgctgctcctgatgctgggatgcgtcctgatgatggtggcgatgttgcaccctccccaccacaccctgcaccagac

SEQ ID NO: 292474 - DNA, 120 bp, Artificial Sequence
  ENSG00000131386_5 (sequence is synthesized)
tgtcacagcccaagccagcaagcacagccctgaagccaggtaccgcctggactttggggaatcccaggattgggtactggaagctgaggatgagggtgaagagtacagccctctggaggg

SEQ ID NO: 292475 - DNA, 120 bp, Artificial Sequence
  ENSG00000131386_6 (sequence is synthesized)
cctgccaccctttatctcactgcgggaggatcagctgctggtggccgtggccttaccccaggccagaaggaaccagagccagggcaggagaggtgggagctaccgcctcatcaagcagcc

SEQ ID NO: 292476 - DNA, 120 bp, Artificial Sequence
  ENSG00000131386_7 (sequence is synthesized)
aaggaggcaggataaggaagccccaaagagggactggggggctgatgaggacggggaggtgtctgaagaagaggagttgaccccgttcagcctggacccacgtggcctccaggaggcact

SEQ ID NO: 292477 - DNA, 120 bp, Artificial Sequence
  ENSG00000131386_8 (sequence is synthesized)
cagtgcccgcatccccctccagagggctctgcccgaggtgcggcacccactgtgtctgcagcagcaccctcaggacagcctgcccacagccagcgtcatcctctgtttccatgatgaggc

SEQ ID NO: 292478 - DNA, 120 bp, Artificial Sequence
  ENSG00000131386_9 (sequence is synthesized)
ctggtccactctcctgcggactgtacacagcatcctcgacacagtgcccagggccttcctgaaggagatcatcctcgtggacgacctcagccagcaaggacaactcaagtctgctctcag

SEQ ID NO: 292479 - DNA, 120 bp, Artificial Sequence
  ENSG00000131386_10 (sequence is synthesized)
cgaatatgtggccaggctggagggggtgaagttactcaggagcaacaagaggctgggtgccatcagggcccggatgctgggggccaccagagccaccggggatgtgctcgtcttcatgga

SEQ ID NO: 292480 - DNA, 120 bp, Artificial Sequence
  ENSG00000131386_11 (sequence is synthesized)
tgcccactgcgagtgccacccaggctggctggagcccctcctcagcagaatagctggtgacaggagccgagtggtatctccggtgatagatgtgattgactggaagactttccagtatta

SEQ ID NO: 292481 - DNA, 120 bp, Artificial Sequence
  ENSG00000131386_12 (sequence is synthesized)
cccctcaaaggacctgcagcgtggggtgttggactggaagctggatttccactgggaacctttgccagagcatgtgaggaaggccctccagtcccccataagccccatcaggagccctgt

SEQ ID NO: 292482 - DNA, 120 bp, Artificial Sequence
  ENSG00000131386_13 (sequence is synthesized)
ggtgcccggagaggtggtggccatggacagacattacttccaaaacactggagcgtatgactctcttatgtcgctgcgaggtggtgaaaacctcgaactgtctttcaaggcctggctctg

SEQ ID NO: 292483 - DNA, 120 bp, Artificial Sequence
  ENSG00000131386_14 (sequence is synthesized)
tggtggctctgttgaaatccttccctgctctcgggtaggacacatctaccaaaatcaggattcccattcccccctcgaccaggaggccaccctgaggaacagggttcgcattgctgagac

SEQ ID NO: 292484 - DNA, 120 bp, Artificial Sequence
  ENSG00000131386_15 (sequence is synthesized)
ctggctggggtcattcaaagaaaccttctacaagcatagcccagaggccttctccttgagcaaggctgagaagccagactgcatggaacgcttgcagctgcaaaggagactgggttgtcg

SEQ ID NO: 292485 - DNA, 120 bp, Artificial Sequence
  ENSG00000131386_16 (sequence is synthesized)
gacattccactggtttctggctaatgtctaccctgagctgtacccatctgaacccaggcccagtttctctggaaagctccacaacactggacttgggctctgtgcagactgccaggcaga

SEQ ID NO: 292486 - DNA, 120 bp, Artificial Sequence
  ENSG00000131386_17 (sequence is synthesized)
aggggacatcctgggctgtcccatggtgttggctccttgcagtgacagccggcagcaacagtacctgcagcacaccagcaggaaggagattcactttggcagcccacagcacctgtgctt

SEQ ID NO: 292487 - DNA, 120 bp, Artificial Sequence
  ENSG00000131386_18 (sequence is synthesized)
tgctgtcaggcaggagcaggtgattcttcagaactgcacggaggaaggcctggccatccaccagcagcactgggacttccaggagaatgggatgattgtccacattctttctgggaaatg

SEQ ID NO: 292488 - DNA, 120 bp, Artificial Sequence
  ENSG00000131386_19 (sequence is synthesized)
catggaagctgtggtgcaagaaaacaataaagatttgtacctgcgtccgtgtgatggaaaagcccgccagcagtggcgttttgaccagatcaatgctgtggatgaacgatgaatgtcaat

SEQ ID NO: 292489 - DNA, 120 bp, Artificial Sequence
  ENSG00000131386_20 (sequence is synthesized)
gtcagaaggaaaagagaattttggccatcaaaatccagctccaagtgaacttaaagagcttatatatttcatgaagctgatccttttgtgtgtgtgctcctggtgttaggagagaaaaaa

SEQ ID NO: 292490 - DNA, 120 bp, Artificial Sequence
  ENSG00000131386_21 (sequence is synthesized)
aggaagtttctccttttcacaccttatttcattgactgctggctgctttaaaaaaaaaaaaaaaggatccattgtaccgttgtcttcatcactgggaaatgattattacatagtacagaa

SEQ ID NO: 292491 - DNA, 120 bp, Artificial Sequence
  ENSG00000131386_22 (sequence is synthesized)
gattctttgtttttctccactgagcacttaacaattgctttctctctggcctggacattctctggcagcacctccaggatacataaattcaatggatcaatttatttgtcttcaaatggc

SEQ ID NO: 292492 - DNA, 120 bp, Artificial Sequence
  ENSG00000131386_23 (sequence is synthesized)
cttaacttggattgtctgtttggccaaccatgaaaattaaagagtgaagcagatgtaatggcctgacattccaaaaactctgaattgggtttattagcacaaatgttgtgttcatttgtt

SEQ ID NO: 292493 - DNA, 120 bp, Artificial Sequence
  ENSG00000131386_24 (sequence is synthesized)
gagccatatctcagaagaaggaaagggagctacagaaaggaggtttaggattgcagagaagatgcaagagcactttggcccaattctccagctcaacccagcagctgaaaagcttcaaga

SEQ ID NO: 292494 - DNA, 120 bp, Artificial Sequence
  ENSG00000131386_25 (sequence is synthesized)
gatctaggaaaagacattttcatgttaatgagaatttccaccattgtagagaatttccttcctactgagaatctacctctattccccctgccctagctcttctctaacttggttaaccat

SEQ ID NO: 292495 - DNA, 120 bp, Artificial Sequence
  ENSG00000131386_26 (sequence is synthesized)
aaccataaccagattcccttgcaatcgatttctctttagtcgttggtgttagaagtaccagcacaatttgagcattcccattaacaaaggtgttcacagttgagaaactctcctgccggg

SEQ ID NO: 292496 - DNA, 77 bp, Artificial Sequence
  ENSG00000131386_27 (sequence is synthesized)
tgtaattccagcactttgggaggcagagttgggaggatcacctgatgtcaggggtttgagaccagcctggtcaacat

SEQ ID NO: 292497 - DNA, 120 bp, Artificial Sequence
  ENSG00000131386_28 (sequence is synthesized)
ccatctcaaaaaaaaaaaaaaagagagaaactctcctgatgccctgttacagggtttgcactgactggagcagaaacagcaacctttctaaaaaagcaaacctttttcctgggaggaaaa

SEQ ID NO: 292498 - DNA, 120 bp, Artificial Sequence
  ENSG00000131386_29 (sequence is synthesized)
aaagcaaacctttttcctgggaggaaaatgccagagcctgagccaaaattcttatgacaggtaacatttgggtgttaatgtccatgagagctgacagggccatctctgagcccatataac

SEQ ID NO: 292499 - DNA, 120 bp, Artificial Sequence
  ENSG00000131386_30 (sequence is synthesized)
tgtctggaacccccaaatgtgtccacaggttgaatgtccatgagtgtgggaagaacacggctcatctggagcacagctgaggctagtaagagctaaatgactttccttgctatgacttgg

SEQ ID NO: 292500 - DNA, 120 bp, Artificial Sequence
  ENSG00000131386_31 (sequence is synthesized)
cttacctgaattagctgtaagagttgccgaatgggatgggttctgctatttaataaacagcattcatattcatttttccccagatggagttacctacctttccacatggtcagcttagaa

SEQ ID NO: 292501 - DNA, 120 bp, Artificial Sequence
  ENSG00000131386_32 (sequence is synthesized)
atcttcccctaaagatgctaatctcctttgggctgtctcagaacacagtatccttcaaataagaaaaactgagtgggaagtgcagtgtttccaaacaatacctatcataactacgtattc

SEQ ID NO: 292502 - DNA, 120 bp, Artificial Sequence
  ENSG00000131386_33 (sequence is synthesized)
attgtctacctgctaagtcaagggttcactgcatttctccttcctcagaatacactctggacctgtgctgtctaatatggtagccactaacaaaatgtggccattttgatggaaatccat

SEQ ID NO: 292503 - DNA, 120 bp, Artificial Sequence
  ENSG00000131386_34 (sequence is synthesized)
taaaatcaaagaaaatttaaaactcaattcctcaattgggctggccacatttcaaatgctcactacccacctgtggctagggtctacttctactgtattggcgagcatggatatagaaca

SEQ ID NO: 292504 - DNA, 120 bp, Artificial Sequence
  ENSG00000131386_35 (sequence is synthesized)
tttcatcacagttctgttggaccaatctagatagattcattatcccatctagagaagagactttagtcactgtcttcttgcttcagacccatctatatttaaaacaaatttccctaaatc

SEQ ID NO: 292505 - DNA, 120 bp, Artificial Sequence
  ENSG00000131386_36 (sequence is synthesized)
ctgagactgagacggagctacaaattctcagatggcgaccgtgtaaatggtattagcggctgaagaaaaaaaatttttcaagacctctgttttttaactgaactttatcattggcattgt

SEQ ID NO: 292506 - DNA, 120 bp, Artificial Sequence
  ENSG00000131386_37 (sequence is synthesized)
gggtctttgaagttgctgggataaattaatataattaaataaaagactgaatttaattgcataaattgtattaggtggcaattaacaaaaggacccagatggcttattgcctaattgggt

SEQ ID NO: 292507 - DNA, 120 bp, Artificial Sequence
  ENSG00000131386_38 (sequence is synthesized)
gaacaaagcaagaatatggtgtttcttgcttccttaaccagctccatgatttattactttattgcagaagtggctgtcaactcagtccctggctggtatttacagacccttaatttaagt

SEQ ID NO: 292508 - DNA, 120 bp, Artificial Sequence
  ENSG00000131386_39 (sequence is synthesized)
aaaacagatgcctccatttagttctagaaggaccttctcctttagtgtaaccaagtgttcaaattcccttcttctctatgaactcagcattcattttatccataatgatcaatttaaaag

SEQ ID NO: 292509 - DNA, 120 bp, Artificial Sequence
  ENSG00000131386_40 (sequence is synthesized)
tagagaaacttgtcagttgagagatctgattcccaagagattggtttcacttgtctacctgaattttgtgattggattttgttgttcgttttttaagattgaattttgttaccaccccca

SEQ ID NO: 292510 - DNA, 120 bp, Artificial Sequence
  ENSG00000131386_41 (sequence is synthesized)
tccagagggctctgcccgaggtgcggcacccactgaaccaacagcatcagcattacctgggagctcaccagaaatgcagaatctcaggccccaccccagacctacttgacctaagtctac

SEQ ID NO: 292511 - DNA, 120 bp, Artificial Sequence
  ENSG00000131386_42 (sequence is synthesized)
ctgctctatgacctgctatcaactgctcactttttgcatgtctaaagctcacacttcttgagatggaggatctggcaggtttctctggccgctagcctggggaggctgtccctgttaggt

SEQ ID NO: 292512 - DNA, 120 bp, Artificial Sequence
  ENSG00000131386_43 (sequence is synthesized)
ggaactatggctccaagatgcttcataggcctccggtcagtgttcagaccagtgactcccagtgtgtgcctgtctctggttcagaggtagatgccaggatcagagcaagccaaggatccc

SEQ ID NO: 292513 - DNA, 120 bp, Artificial Sequence
  ENSG00000131386_44 (sequence is synthesized)
ctgaacccctccagaagtgagctgtgagagtttggagaacctgcacaaagagaaggggatggcatgtaccttgtgacgtctgtccactgatggagaatgacaggctggcagaatcagcct

SEQ ID NO: 292514 - DNA, 120 bp, Artificial Sequence
  ENSG00000131386_45 (sequence is synthesized)
aacaggtgggtagtcagacttctcaggatggatgatagcccaagaagacttgaaagtgggcgatatttttctgggatgccccatacttccctttgaggtatcttctttctgtggtcccat

SEQ ID NO: 292515 - DNA, 120 bp, Artificial Sequence
  ENSG00000131386_46 (sequence is synthesized)
gtcccttgactgccatggtcccccactgtaatgactcatcacagctctcctcacctcacctccatctgtaagcacagacatgtgccattgtcagaaaataaaagcatcttagttaaaggg

SEQ ID NO: 292516 - DNA, 120 bp, Artificial Sequence
  ENSG00000131386_47 (sequence is synthesized)
tgctttgctgtcaggcaggagcaggtgattcttcagaactgcacggaggaaggcctggccatccaccagcagcactgggacttccaggagttctgcaggctgcacaggaagcatggctga

SEQ ID NO: 292517 - DNA, 120 bp, Artificial Sequence
  ENSG00000131386_48 (sequence is synthesized)
ggcggagcaagggagagagagagcgaaggaggaggtgctacacacttccaaacaaccaatcttgtgagaactctatcaagaaaacagcaagggggaagtctgccccatgattcaatcacc

SEQ ID NO: 292518 - DNA, 120 bp, Artificial Sequence
  ENSG00000131386_49 (sequence is synthesized)
tcccaccaggcccctcttccaacactgggaattacaattcaacatgagatttcagtggggacacagaaccaaaccatatcaatctcaaacattaataaatgaatgatgaataaataggca

SEQ ID NO: 292519 - DNA, 120 bp, Artificial Sequence
  ENSG00000131386_50 (sequence is synthesized)
ggacatcatttgcttcattcagagatcctcaagaaggcactgccgatcactctcctctaggcacagatcaagggtggcattgtttaatgtcttatttaaataaaatccagaaaaactgga

SEQ ID NO: 292520 - DNA, 120 bp, Artificial Sequence
  ENSG00000131389_0 (sequence is synthesized)
atttttccacccagcaggatgggtgatgctgagagctgcctgctcagacaacagacacgcgaggtcaggaagaagccgcttataaattaccgcttccttcgcgccgccgccaacgccgag

SEQ ID NO: 292521 - DNA, 120 bp, Artificial Sequence
  ENSG00000131389_1 (sequence is synthesized)
ccccgaggaccgcaagcccagaggacaagctgcgccaagagggagtgcggagcgttcacccagcgggtcagagagcgagcgggcaggcagcccccggccggcggaacccggcacagccga

SEQ ID NO: 292522 - DNA, 120 bp, Artificial Sequence
  ENSG00000131389_2 (sequence is synthesized)
gcagagcgcgggcggcgccgcagccaccccagatccagaaccagaaccacagcccttctgaggagctcccaaacaaagcaaggagatggccaccaaggagaagctgcagtgtctgaaaga

SEQ ID NO: 292523 - DNA, 120 bp, Artificial Sequence
  ENSG00000131389_3 (sequence is synthesized)
tttccacaaggacatcctgaagccctcaccagggaagagcccaggcacgcggcctgaggacgaggctgagggaaaacctccgcagagggagaagtggtctagcaagatcgactttgtgct

SEQ ID NO: 292524 - DNA, 120 bp, Artificial Sequence
  ENSG00000131389_4 (sequence is synthesized)
ctctgtggctggcggcttcgtgggcttgggcaacgtctggcgcttcccgtacctctgctacaagaatggtggaggtgcgtttctcataccgtattttattttcctgtttgggagcggcct

SEQ ID NO: 292525 - DNA, 120 bp, Artificial Sequence
  ENSG00000131389_5 (sequence is synthesized)
gcctgtgtttttcttggagatcatcataggccagtacacctctgaagggggcatcacctgctgggaaaagatctgccccttgttctctggtatcggctatgcctccgttgtaattgtgtc

SEQ ID NO: 292526 - DNA, 120 bp, Artificial Sequence
  ENSG00000131389_6 (sequence is synthesized)
cctcctgaatgtctactacatcgtcatcctggcctgggccacatactacctgttccagtccttccagaaggagctgccctgggcacactgcaaccacagctggaacacacctcactgcat

SEQ ID NO: 292527 - DNA, 120 bp, Artificial Sequence
  ENSG00000131389_7 (sequence is synthesized)
ggaggacaccatgcgcaagaacaagagtgtctggatcaccatcagctccaccaacttcacctcccctgtcatcgagttctgggagcgcaacgtgctgagcttgtcccctggaatcgacca

SEQ ID NO: 292528 - DNA, 120 bp, Artificial Sequence
  ENSG00000131389_8 (sequence is synthesized)
cccaggctctctgaaatgggacctcgctctctgccttcttttagtctggctagtgtgtttcttctgcatctggaagggcgtcaggtccactgggaaggtcgtctacttcacagccacttt

SEQ ID NO: 292529 - DNA, 120 bp, Artificial Sequence
  ENSG00000131389_9 (sequence is synthesized)
tccattcgccatgctcctggtgctgctggtccgagggctgacgctgccgggcgcgggcgcaggcatcaagttctatctgtatcctgacatcacccgccttgaggacccacaggtgtggat

SEQ ID NO: 292530 - DNA, 120 bp, Artificial Sequence
  ENSG00000131389_10 (sequence is synthesized)
tgacgctgggactcagatattcttctcttatgccatctgcctgggggctatgacctcgctggggagctacaacaagtacaagtataactcgtacagggactgtatgctgctgggatgcct

SEQ ID NO: 292531 - DNA, 120 bp, Artificial Sequence
  ENSG00000131389_11 (sequence is synthesized)
gaacagtggtaccagttttgtgtctggcttcgcaattttttccatcctgggcttcatggcacaagagcaaggggtggacattgctgatgtggctgagtcaggtcctggcctggccttcat

SEQ ID NO: 292532 - DNA, 120 bp, Artificial Sequence
  ENSG00000131389_12 (sequence is synthesized)
tgcctacccaaaagctgtgacaatgatgccgctgcccacattttggtccattcttttttttattatgcttctcttgcttggactggatagccagtttgttgaagttgaaggacagatcac

SEQ ID NO: 292533 - DNA, 120 bp, Artificial Sequence
  ENSG00000131389_13 (sequence is synthesized)
atccttggttgatctttacccatccttcctaaggaagggttatcgtcgggaaatcttcatcgccttcgtgtgtagcatcagctacctgctggggctgacgatggtgacggagggtggcat

SEQ ID NO: 292534 - DNA, 120 bp, Artificial Sequence
  ENSG00000131389_14 (sequence is synthesized)
gtatgtgtttcagctctttgactactatgcagctagcggtgtatgccttttgtgggttgcattctttgaatgttttgttattgcctggatatatggaggtgataacctttatgatggtat

SEQ ID NO: 292535 - DNA, 120 bp, Artificial Sequence
  ENSG00000131389_15 (sequence is synthesized)
tgaggacatgattggctatcggcccgggccctggatgaagtacagctgggctgtgatcactccagttctctgtgttggatgtttcatcttctcgctcgtcaagtacgtacccctgaccta

SEQ ID NO: 292536 - DNA, 120 bp, Artificial Sequence
  ENSG00000131389_16 (sequence is synthesized)
caacaaaacatacgtgtaccccaactgggccattgggctgggctggagcctggccctttcctccatgctctgcgttcccttggtcatcgtcatccgcctctgccagactgaggggccgtt

SEQ ID NO: 292537 - DNA, 120 bp, Artificial Sequence
  ENSG00000131389_17 (sequence is synthesized)
ccttgtgagagtcaagtacctgctgaccccaagggaacccaaccgctgggctgtggagcgcgagggagccacaccttacaactctcgcaccgtcatgaacggcgctctcgtgaaaccgac

SEQ ID NO: 292538 - DNA, 120 bp, Artificial Sequence
  ENSG00000131389_18 (sequence is synthesized)
ccacatcattgtggagaccatgatgtgagctctctcgggtcgacggggccggcggctttcctgctgtttactaacattagattctcataggaccaggtttacagagctttatatttgcac

SEQ ID NO: 292539 - DNA, 120 bp, Artificial Sequence
  ENSG00000131389_19 (sequence is synthesized)
taggatttttttttttttgtaattgtcacagaaaatgtaattgtgggtatgtgtgcgtgcgtgtgtgtgtgtgtgtgtatcgtgtgtgtgtgttttgttttgatttgggggatattttgt

SEQ ID NO: 292540 - DNA, 120 bp, Artificial Sequence
  ENSG00000131389_20 (sequence is synthesized)
acaaaaagaaaacccacgggaagatgtccgtggagaggcagagctttcatactgaattagatgtattttatgggaatttggtaaatttttctttgtatttttttttttacatataagtat

SEQ ID NO: 292541 - DNA, 120 bp, Artificial Sequence
  ENSG00000131389_21 (sequence is synthesized)
atatacacttagagattgtcatatacttttaccacttgaattgatcttcttgccagcaatagatctcattttcaaaagcaattcttcggtgctgtgtagctggcagaaagttctgtccag

SEQ ID NO: 292542 - DNA, 120 bp, Artificial Sequence
  ENSG00000131389_22 (sequence is synthesized)
taaacgcaggatggaattttcctgggactctacacccatcttaaggtggtataccttccaaatcctggttcagatggaagaaatagcaggagagaggacccattagctggcagacccagg

SEQ ID NO: 292543 - DNA, 120 bp, Artificial Sequence
  ENSG00000131389_23 (sequence is synthesized)
gggaagaaaggagggctgtgaggagatacctcattaaacttggcttagtgaagaagagagatgccaaaggaatgaaccaacccttcacataaaggagactggctgaagctgaatgaggag

SEQ ID NO: 292544 - DNA, 120 bp, Artificial Sequence
  ENSG00000131389_24 (sequence is synthesized)
gccctatagcagaagtctgattctaagagcagtagaaacttgtaccagaagcaaaatcccacttttaattttgagatggtgagtggatagtcagtagaccgtcagaaccactggccagag

SEQ ID NO: 292545 - DNA, 120 bp, Artificial Sequence
  ENSG00000131389_25 (sequence is synthesized)
agggagctgctagagatccaagaaggctggcaggagtgaggctcacaactcagcctcgcaagaggtggcagaggcacaggaggccacagtccttcctggggcattccaggcagagaagga

SEQ ID NO: 292546 - DNA, 120 bp, Artificial Sequence
  ENSG00000131389_26 (sequence is synthesized)
gcagaggctctcccggcaggagctggggtctcagggctcagatgagtctgttgcatttgaatggggtcatagcaggttctggtcattccccaagcaacatctcagcatctcttaaagttg

SEQ ID NO: 292547 - DNA, 120 bp, Artificial Sequence
  ENSG00000131389_27 (sequence is synthesized)
tggggaggtgagtggaccaaaggatataggccccaggcatgcagatgggcccggtgtcggggaggggtgctttctttcctcatctccccactccccactctcagcctgggagactcctgc

SEQ ID NO: 292548 - DNA, 120 bp, Artificial Sequence
  ENSG00000131389_28 (sequence is synthesized)
caagccctcattaaagatgccaccctgggctgccctggcacctagcaaggcacaccaagaacagcttttgagtctgtatcctccactgggggaagtgctcccagttcagaacaagggcag

SEQ ID NO: 292549 - DNA, 120 bp, Artificial Sequence
  ENSG00000131389_29 (sequence is synthesized)
cccgtggtgctgacctaggatataacaaagctcttcacttcaaaacccctgcaatagctgggtttacagacatttaccacctgcggacccaaaagagaaggcctaggagagttttctaga

SEQ ID NO: 292550 - DNA, 120 bp, Artificial Sequence
  ENSG00000131389_30 (sequence is synthesized)
aggttgggattgtcagggtcctggcccctcagaactggcttgatcaagggccttatgtggagcagaggttgtctctgaaccaggagagaaggtactatacctttcaaatccccagggcag

SEQ ID NO: 292551 - DNA, 120 bp, Artificial Sequence
  ENSG00000131389_31 (sequence is synthesized)
acacacccccacccagcccctatttggacctaaactgtgccatttgaacagtcacttccaagctcagtctaaatgaaaccgaaacgtgaccacgcacaaaggcagtcactgcctcgaggg

SEQ ID NO: 292552 - DNA, 120 bp, Artificial Sequence
  ENSG00000131389_32 (sequence is synthesized)
gtgcagaccgcagaattttcacagcaggggctcttggaaccctggaaacccccttcttaaatttgggaggaggagtatgcctttggtgtccccctcccaaggggcaattctgaaccccat

SEQ ID NO: 292553 - DNA, 120 bp, Artificial Sequence
  ENSG00000131389_33 (sequence is synthesized)
ctttggcaggcatacatatttcactgtttccaaagctatctactctgccaaacaacacccagtcctattccaaactctcaacgattctatcttgttcctgtttttctatgtatttatggt

SEQ ID NO: 292554 - DNA, 120 bp, Artificial Sequence
  ENSG00000131389_34 (sequence is synthesized)
tgccgtttgtgtctgatttgattttactgttttttccctgattttatggagtagcattgtgacctgttttcctttgtcttatataactttagtaaactaaccactgtcaatgattgaggg

SEQ ID NO: 292555 - DNA, 120 bp, Artificial Sequence
  ENSG00000131389_35 (sequence is synthesized)
caggtggcacgtggggaagaggggacttggcacgcagtggctacctgggcatttgtggtcatttcagtttccatctccccagcgggggctccctgggtgaaaggccacagtattttgggt

SEQ ID NO: 292556 - DNA, 120 bp, Artificial Sequence
  ENSG00000131389_36 (sequence is synthesized)
tggtaggcaaattgcaacattctggacatggcctgaggaaggcctcttcttataagattctcagaccaaattctagaccaaagacacaggcagaccaagtccccaggccccgcctggaag

SEQ ID NO: 292557 - DNA, 120 bp, Artificial Sequence
  ENSG00000131389_37 (sequence is synthesized)
gaagtcgttcctcaactctccccaaggcacctgtctccaatcagagccctctcgcccagccagccctggctctgtgtgcagagcatagctctgcgagtacctgtgtaataatgctcaacc

SEQ ID NO: 292558 - DNA, 120 bp, Artificial Sequence
  ENSG00000131389_38 (sequence is synthesized)
ttcatgtctccgtataaacgaaactttccatgagagctcatgactctggtccacctgtctatagagaatgggcaaagtccttcacctgctttctgcttgggatgggtcagaaatgctgat

SEQ ID NO: 292559 - DNA, 120 bp, Artificial Sequence
  ENSG00000131389_39 (sequence is synthesized)
gcccgcacatagcccagccagccagatctggaaaggaagcgagggggttgtttaaatcaattttttaagatgaagaagtgggagacactgcgttgagatgggccatgctagggccacaga

SEQ ID NO: 292560 - DNA, 120 bp, Artificial Sequence
  ENSG00000131389_40 (sequence is synthesized)
gatttcctgacggtcagggagagaagggcctccagggtcccctaacccaacgcccttgttgtaaatgaggtaactgaggctcagggaggcactgtgagccaggaatggattttcttgaaa

SEQ ID NO: 292561 - DNA, 120 bp, Artificial Sequence
  ENSG00000131389_41 (sequence is synthesized)
cagctctagctgcaggttctccgaggtaggtgcagggaatggtgagtgtctaaccagggctacatccagcaacatcctcaaggtcttcctgacaaccaaagacaagcctttatggaaaag

SEQ ID NO: 292562 - DNA, 120 bp, Artificial Sequence
  ENSG00000131389_42 (sequence is synthesized)
gaaatgcgctcccctccatgttcagggatgaggggagcagcagcagccacactcccaccatcctcacagaattcctggacccatgcggtggctccgtgagctgggtgactccagcctcac

SEQ ID NO: 292563 - DNA, 120 bp, Artificial Sequence
  ENSG00000131389_43 (sequence is synthesized)
ctgcacaccccagccctgcacggggccctccttcctcccagcagcccttggtgagctaggaattgagatccctgtttgtgaaagagggaactgaggtgcagagaagccagaggtgtgcca

SEQ ID NO: 292564 - DNA, 120 bp, Artificial Sequence
  ENSG00000131389_44 (sequence is synthesized)
gatccttaggcaggatttagatgaagtcgccctggctccagactgaccccgaggctctgcggggagtttccaggcagcaggaagtggccttggatgctctccttccaggacagcataacc

SEQ ID NO: 292565 - DNA, 120 bp, Artificial Sequence
  ENSG00000131389_45 (sequence is synthesized)
cctgggccatgtgcagctccttcactgccccctggatccccagcatacccccaaagacagtggggaaacacaaggggagagcacagcatggcccctccagcccacttcagggcactcttg

SEQ ID NO: 292566 - DNA, 120 bp, Artificial Sequence
  ENSG00000131389_46 (sequence is synthesized)
tatcacccgggtaccgccacactggtcccccacccagccagcatctcccagcacagcccctctccctggggaaatgctctgggtagccagtctaaaggcagaggcacctaactgctcccc

SEQ ID NO: 292567 - DNA, 120 bp, Artificial Sequence
  ENSG00000131389_47 (sequence is synthesized)
gcagcccaccccacccaagattcagacacaagccaggaaaggacccaagagaaaatccttcaaggtggcctgaggtcccatccctccctcagacccatgtggtcccaggccaggctgcct

SEQ ID NO: 292568 - DNA, 120 bp, Artificial Sequence
  ENSG00000131389_48 (sequence is synthesized)
gggacacggtaaataccactgtgtgcaaaaatcgaagtacaaaaccacaagactaaacaaaacaaacccagagagccaaacttgtagaggtgggcagtccagaaagcagggggcagccct

SEQ ID NO: 292569 - DNA, 120 bp, Artificial Sequence
  ENSG00000131389_49 (sequence is synthesized)
ccccctttccttctctccctgatcctcagaatatatattgttgtaataggaagcatttttgcattgttctcttgtgggtgtcactacagacatgttctggcgtgttctccgagggatgga

SEQ ID NO: 292570 - DNA, 120 bp, Artificial Sequence
  ENSG00000131389_50 (sequence is synthesized)
gcatcctgttatatatttgacttcaaattgagatgttggcttcattttttttttttacccaattaatctcccaatccctagcaactgtgactctgtatttagcacaagagaaagctgaga

SEQ ID NO: 292571 - DNA, 120 bp, Artificial Sequence
  ENSG00000131389_51 (sequence is synthesized)
atgtgggtcttgcctccttccagaaatatgtctggctcatcaggacatttttttaaaacttcaaaatatttttaagatattttaaacttttataaaaaaaaaatcaaccaacaagagact

SEQ ID NO: 292572 - DNA, 120 bp, Artificial Sequence
  ENSG00000131389_52 (sequence is synthesized)
tttctgaggaggaacatttgtatttgaacaagatccttggtgtgtagttcagtcttgcagtatacaagcttttgtgtataaatgttttatgatatgattccctgtattttgcaggggttt

SEQ ID NO: 292573 - DNA, 120 bp, Artificial Sequence
  ENSG00000131389_53 (sequence is synthesized)
ttttctcttttgctttttagataaatatgtatatcaatattttaaattcatctttgctttttttagaggagtttgtaatcaccttataacatgaaaataaacatttcctttttaacatcc

SEQ ID NO: 292574 - DNA, 120 bp, Artificial Sequence
  ENSG00000131389_54 (sequence is synthesized)
ctggatacctctctgtaccatctggggaccagctctctgcatgtcactctcttgctcaaaagccttcagtggtggctccctagtgctttgtgaaatcaagtccaacctccttagcctggc

SEQ ID NO: 292575 - DNA, 120 bp, Artificial Sequence
  ENSG00000131389_55 (sequence is synthesized)
attggaggcccttcacgatctggctcttggccagcgttcacgctcacctaccacaacttctttccttgtttgtagtctggctggtttctgctcctagctagaccaagcgtccagctctct

SEQ ID NO: 292576 - DNA, 120 bp, Artificial Sequence
  ENSG00000131389_56 (sequence is synthesized)
ctttgggactgtgatgagtgtcctagacgctccccagaacaaagcacatacactagacccaagttgcccacagtttcaaagggtttatggacccgctgaagccattagtggacaccaggt

SEQ ID NO: 292577 - DNA, 120 bp, Artificial Sequence
  ENSG00000131389_57 (sequence is synthesized)
aagtccaacagtgcgcgactccccaggtcaggagaagccccgatgtgtgcagaatctgcagatggggctgctctcggccctgcctctggctgtggaaacaggcctccaagtacccaagaa

SEQ ID NO: 292578 - DNA, 120 bp, Artificial Sequence
  ENSG00000131389_58 (sequence is synthesized)
aatttgagttgaacagtaggccctccctacctagactacacaaataatctcactgtagccacactgaagatcctcctggtgctaaaggtgtgaggtgtgactggatgttttcacagtttc

SEQ ID NO: 292579 - DNA, 120 bp, Artificial Sequence
  ENSG00000131389_59 (sequence is synthesized)
agaacttggttgtgcaggacctggaatactccttttttatctccttgaggccttgggtttgagtttgggctgtgcctaagattgcacacctagggtttggagtgtgcctcagattgccag

SEQ ID NO: 292580 - DNA, 120 bp, Artificial Sequence
  ENSG00000131389_60 (sequence is synthesized)
cattgaagcaaggaggaggacatgggtggggcagagaggatggcccacttccttatctcctcccctgggatacaggagccactgtcttcgggggagtgggaggagggtgcagatctggag

SEQ ID NO: 292581 - DNA, 120 bp, Artificial Sequence
  ENSG00000131389_61 (sequence is synthesized)
ataaatttatgcctttggccatagacaggactggaatcccagttctgccacttactggctgtttgaccttaggcaagccactcctcctttctgagcctcagtttctttacctgtaagata

SEQ ID NO: 292582 - DNA, 120 bp, Artificial Sequence
  ENSG00000131389_62 (sequence is synthesized)
aaaagaatgaatcattactaccctgtgaggcaggtatgcatacttatgttgtctaaaaatgatacagttttcttaatgtattttaggaaaaaatatattctgttattgcacagagaaaaa

SEQ ID NO: 292583 - DNA, 120 bp, Artificial Sequence
  ENSG00000131389_63 (sequence is synthesized)
ggtgagcttgggccgggccacaggggagcccatccagtacaaagccgccttagagctggaggctgggaccagagcgtgggtggcctctctttccctgctttccctggcccccccccttga

SEQ ID NO: 292584 - DNA, 120 bp, Artificial Sequence
  ENSG00000131389_64 (sequence is synthesized)
cctccatgaggtcagcctgccatgctcctgccaaccccacccttagagacaggggataagcccgactgagaatcagagtactgttctgcagggcctttctgtgttaccttgagcaggtcc

SEQ ID NO: 292585 - DNA, 120 bp, Artificial Sequence
  ENSG00000131389_65 (sequence is synthesized)
ctcagcctctctggtcctccagtttgccacctccaaagaggcaggacaaggccaggcttgtgtctcccaagccccagacattcacacacctccttatctgtccgccatatctacttgcct

SEQ ID NO: 292586 - DNA, 120 bp, Artificial Sequence
  ENSG00000131389_66 (sequence is synthesized)
ctgactctttatctttcctttaatattcatgtttgcttttctaactttaccaaatgtactccagaaagcaaattctgttacccgctgtagatggaaaactggtatcatttgtcatgctcc

SEQ ID NO: 292587 - DNA, 120 bp, Artificial Sequence
  ENSG00000131389_67 (sequence is synthesized)
gacaatgatgccgctgcccacattttggtccattcttttttttattatgcttctcttgcttggactggatagccagggatgtttcatcttctcgctcgtcaagtacgtacccctgaccta

SEQ ID NO: 292588 - DNA, 120 bp, Artificial Sequence
  ENSG00000131398_0 (sequence is synthesized)
accggtcccgcctcccttgacgccccgccccgcccctcctccctgctctcttagaaagagccaatcgctccgtctcattggcggccccgactcgtccagctgggtcgcgttagagtgccc

SEQ ID NO: 292589 - DNA, 120 bp, Artificial Sequence
  ENSG00000131398_1 (sequence is synthesized)
gccccactcctcccagccacagccccgccccacctcccccaggccaatcagtttggttcctctcccctaagccacgcccccgctacctcgctcctcctcccacccaatcccgtcggtctc

SEQ ID NO: 292590 - DNA, 120 bp, Artificial Sequence
  ENSG00000131398_2 (sequence is synthesized)
tctctccccccgtgtccccgcccctgcgtccccgcccctcccgccccgccccccgtccaatgctgagctcagtctgcgtctcgtccttccgcgggcgccagggggccagcaagcagcagc

SEQ ID NO: 292591 - DNA, 120 bp, Artificial Sequence
  ENSG00000131398_3 (sequence is synthesized)
ggaccggcgcgccgagccatgccccgggctgccggcggcggccatggggcggcacggcggcggcggtggcgacagcggcaagatcgtgatcaacgtgggcggcgtgcgccatgagacgta

SEQ ID NO: 292592 - DNA, 120 bp, Artificial Sequence
  ENSG00000131398_4 (sequence is synthesized)
ccgctcgacgctgcgcaccctgccggggacgcggctggccggcctgacggagcccgaggcggcggcacgcttcgactacgacccgggcgccgacgagttcttctttgaccggcacccggg

SEQ ID NO: 292593 - DNA, 120 bp, Artificial Sequence
  ENSG00000131398_5 (sequence is synthesized)
agtcttcgcgtacgtgctcaactactaccgcaccggcaagctgcactgcccagccgacgtgtgcgggcccctgtttgaggaggagctcggcttctggggcatcgacgagaccgacgtgga

SEQ ID NO: 292594 - DNA, 120 bp, Artificial Sequence
  ENSG00000131398_6 (sequence is synthesized)
ggcctgctgctggatgacctaccggcagcatcgcgacgctgaggaggcgctcgactccttcgaggcgcccgaccccgcgggcgccgccaacgccgccaacgccgcaggcgcccacgacgg

SEQ ID NO: 292595 - DNA, 80 bp, Artificial Sequence
  ENSG00000131398_7 (sequence is synthesized)
aggcctggacgacgaggcgggcgcgggcggcggcggcctggacggagcgggcggcgagctcaagcgcctctgcttccagg

SEQ ID NO: 292596 - DNA, 120 bp, Artificial Sequence
  ENSG00000131398_8 (sequence is synthesized)
cggcgcgggcggcacatggtggcgccgctggcagccccgcgtgtgggcgctcttcgaggacccctactcgtcgcgggctgccaggtatgtggccttcgcctccctcttcttcatcctcat

SEQ ID NO: 292597 - DNA, 120 bp, Artificial Sequence
  ENSG00000131398_9 (sequence is synthesized)
ctccatcaccaccttctgcctggaaacccatgagggcttcatccatattagcaacaagacggtgacccaggcctccccgatccccggggcacctccggagaacatcaccaacgtggaggt

SEQ ID NO: 292598 - DNA, 120 bp, Artificial Sequence
  ENSG00000131398_10 (sequence is synthesized)
ggagacggagcccttcctgacctacgtggagggggtgtgcgtggtctggttcaccttcgagttcctcatgcgcatcaccttctgcccagacaaggtggagtttcttaaaagcagcctcaa

SEQ ID NO: 292599 - DNA, 120 bp, Artificial Sequence
  ENSG00000131398_11 (sequence is synthesized)
catcatcgactgtgtggccatcctgcccttctatctcgaggtgggcctctcgggcctcagctccaaggccgccaaagacgtgctgggcttcctgcgggtggtccgcttcgtccgcatcct

SEQ ID NO: 292600 - DNA, 120 bp, Artificial Sequence
  ENSG00000131398_12 (sequence is synthesized)
tccgcgccagcaccaacgagttcctgctgctcatcatcttcctggccctgggggtgctcatcttcgccaccatgatttactacgctgagcgcattggcgccgaccccgatgacatcctgg

SEQ ID NO: 292601 - DNA, 120 bp, Artificial Sequence
  ENSG00000131398_13 (sequence is synthesized)
gctccaaccacacctacttcaagaacatccccattggcttctggtgggctgtggtcaccatgacgaccctgggctatggagacatgtaccccaagacgtggtcggggatgctggtcgggg

SEQ ID NO: 292602 - DNA, 120 bp, Artificial Sequence
  ENSG00000131398_14 (sequence is synthesized)
cgctgtgtgccctggcgggggtgctgaccatcgccatgcctgtgcccgtcattgtcaacaactttggcatgtactattcgctggccatggccaagcagaagctgcccaagaagaagaaca

SEQ ID NO: 292603 - DNA, 120 bp, Artificial Sequence
  ENSG00000131398_15 (sequence is synthesized)
aacaaacacatcccccggcccccgcaaccgggctcgcccaactactgcaagcctgacccacccccgccacccccgccccacccgcaccacggcagcgggggcatcagcccgccgccaccc

SEQ ID NO: 292604 - DNA, 120 bp, Artificial Sequence
  ENSG00000131398_16 (sequence is synthesized)
ccccaccctccatgggggtgactgtggccggggcctacccagcggggccccacacgcaccccgggctgctcagggggggagcgggtgggctggggatcatggggctgcctcctctgccag

SEQ ID NO: 292605 - DNA, 120 bp, Artificial Sequence
  ENSG00000131398_17 (sequence is synthesized)
cccccggcgagccttgcccgttggctcaggaggaggtgattgagatcaaccgggcagatcctcgccccaatggggatccggcagcagctgcgcttgcccacgaggactgcccagccattg

SEQ ID NO: 292606 - DNA, 120 bp, Artificial Sequence
  ENSG00000131398_18 (sequence is synthesized)
accagcctgccatgtccccggaagacaagagccccatcacgcctggaagccgtggccgctatagccgggaccgagcctgcttcctcctcaccgactatgccccttcccctgatggctcca

SEQ ID NO: 292607 - DNA, 120 bp, Artificial Sequence
  ENSG00000131398_19 (sequence is synthesized)
tccgaaaagccactggtgctcccccactgcccccccaagactggcgtaagccaggccccccaagcttcttgcccgacctcaacgccaacgccgcggcctggatatccccctagtggacga

SEQ ID NO: 292608 - DNA, 120 bp, Artificial Sequence
  ENSG00000131398_20 (sequence is synthesized)
accccctccccccgggctcttgtcaccgcctgagacctcgcgagactttcggtcccccccgccccttccccccaggttagcaattgggaatggctgggagggggtgtccccaagacactg

SEQ ID NO: 292609 - DNA, 120 bp, Artificial Sequence
  ENSG00000131398_21 (sequence is synthesized)
ggcttcaaatctccccccaagccctccctcctacgatcaagacaccttttgtccagacagctcccttagcgttgcctggaaaagccacagagctccctgcgggggtgcagaaccctgcag

SEQ ID NO: 292610 - DNA, 120 bp, Artificial Sequence
  ENSG00000131398_22 (sequence is synthesized)
gcagccccaggctttgcagaaaccacacacactgttgctggatcttgagtcccattagctgtgagatgcctgtgagagccttcccgcacccgtcagaagctcagagccttcttggaccct

SEQ ID NO: 292611 - DNA, 120 bp, Artificial Sequence
  ENSG00000131398_23 (sequence is synthesized)
ttaaagatgtccctctccccagccctccgcctcaccgccccccacccccgaccccgtccttagaatcttctggaggagcctccctccccccccacccccccccactgctcctggagttct

SEQ ID NO: 292612 - DNA, 120 bp, Artificial Sequence
  ENSG00000131398_24 (sequence is synthesized)
catcggattccccaagggcactgccagcttcgctccactcagcccccttgcagaccccaccccctgcctgctctctttccctacaactaggtcagcccccagccccgctacggcggccgc

SEQ ID NO: 292613 - DNA, 120 bp, Artificial Sequence
  ENSG00000131398_25 (sequence is synthesized)
ggttacgagaaatcccgcagcctcagcagcatcgcgggcctgagcggggtgtccctgcgcctcgcgccccttgccaccccccctggctctccccgggccgcccgccgcgctcccccgacc

SEQ ID NO: 292614 - DNA, 120 bp, Artificial Sequence
  ENSG00000131398_26 (sequence is synthesized)
catcctttagcgctcccctcccccctgtggggggactcgggggtgaccgggaagaaggtcaaaggagctgggggtggggggtggggaaaagggtttttttaaaaaaaatcaaaaagtcat

SEQ ID NO: 292615 - DNA, 120 bp, Artificial Sequence
  ENSG00000131398_27 (sequence is synthesized)
cctcacccccaacctgggcccccaggatggagagaggggccacagcccgtccccccaactcttccctccccaaaaaaagccttctcaggtctccacgagccataggacatccccctgcca

SEQ ID NO: 292616 - DNA, 120 bp, Artificial Sequence
  ENSG00000131398_28 (sequence is synthesized)
tcaacttgtgtaaataagtccaaattatgccagttacatcttggggcacctccccccacacactgcatgccttccctaacctggagcccccactccaagtccacctcagcaataagccgc

SEQ ID NO: 292617 - DNA, 120 bp, Artificial Sequence
  ENSG00000131398_29 (sequence is synthesized)
caggggccgcatgcgcgggtttgaggggcaggcactctgggaagggggtggcacctcccgggggtcgggctggcctttaaggtctccagccttcccatccttcaccccaggaggacaacc

SEQ ID NO: 292618 - DNA, 120 bp, Artificial Sequence
  ENSG00000131398_30 (sequence is synthesized)
aaccctgtgcgttgattaggagaaaacaaaccagaaactagaaacagtgtaggggaaggaggaacagttacccaagccccagatcggagttgagctcaggtggcgggagggcggggccga

SEQ ID NO: 292619 - DNA, 120 bp, Artificial Sequence
  ENSG00000131398_31 (sequence is synthesized)
gttgagctcaggtggtgggagggcggggcgggctttggacctgctccctcagcctttaggagaattcctctggtgaatttcaccctctcatccgccccttcccccagggacctgctcgcc

SEQ ID NO: 292620 - DNA, 120 bp, Artificial Sequence
  ENSG00000131398_32 (sequence is synthesized)
tctattcttgctgcatggactcagacctcctatcccagaattcctgggatgatctggccctagcacacgaaattccccgactatctccctccattcccaggacatgagacctgcacccag

SEQ ID NO: 292621 - DNA, 120 bp, Artificial Sequence
  ENSG00000131398_33 (sequence is synthesized)
aattctgagactgaccctggcacgccacatctcccaatccccacacactcctgcgacttaacctctgcacacagaggctccctgaaccaccctccctccccactcctgccaccccaaaca

SEQ ID NO: 292622 - DNA, 120 bp, Artificial Sequence
  ENSG00000131398_34 (sequence is synthesized)
cccccaccaaattccctgaactgcgtcccagcacttctcaaacctccaagacttgacccagctcttttcagctcaaattcagcctttgggatgctccaaatccttcccacaactgacatt

SEQ ID NO: 292623 - DNA, 120 bp, Artificial Sequence
  ENSG00000131398_35 (sequence is synthesized)
tcttggacacccccaaagcctcaggcctgttccgcacccatatccccaaagccctaacagacttgtccagcccaggttcccttgatgctagaacttccaagataggcgcaacctgtctgc

SEQ ID NO: 292624 - DNA, 120 bp, Artificial Sequence
  ENSG00000131398_36 (sequence is synthesized)
aattccagggaaccagaccctccccaagcaccctctttgtcttacgcctaaccctgagtctcttccctgagatggtgccccaaaggtaccctcttcacagacaccagtgtttcccagagg

SEQ ID NO: 292625 - DNA, 120 bp, Artificial Sequence
  ENSG00000131398_37 (sequence is synthesized)
gttgtatttgtacctttggtggtgtgctaaggtttgaggcagtatgaggacaaacacttgttttaaaagttttgtctctaatacgcattttgtacagaagccgataagtgcaggcatcgc

SEQ ID NO: 292626 - DNA, 120 bp, Artificial Sequence
  ENSG00000131398_38 (sequence is synthesized)
tgcttggctaggacacggtttatttaggttaagagtgtttccatttaaagtagtccacagatgatcacagaggctgttcccgaagggaggaacactggagtatcagaagattgggaaccg

SEQ ID NO: 292627 - DNA, 120 bp, Artificial Sequence
  ENSG00000131398_39 (sequence is synthesized)
acaacacccagctcggctgggatcccagccccccttccccagcggtcctcaccgcgtcacgctcgcgggtggaaaatcatttcccacctcctatcctggctcaaggatgcgctacctccc

SEQ ID NO: 292628 - DNA, 120 bp, Artificial Sequence
  ENSG00000131398_40 (sequence is synthesized)
ccaagcccagagaccacaccggtcccagactctttagcggaccccccttttggagccggggtcccacggaattagccacctccctccctctgctcccacggcctcaggaaccccccaccc

SEQ ID NO: 292629 - DNA, 120 bp, Artificial Sequence
  ENSG00000131398_41 (sequence is synthesized)
gagggtggatggggggcgtcactgagcacgattctcgatgcaacgattcctatgcaaggggcattttgagtcccccccatccttccctcggaccctaaaccctggtgaagcaggggtgag

SEQ ID NO: 292630 - DNA, 120 bp, Artificial Sequence
  ENSG00000131398_42 (sequence is synthesized)
gggtggggcgggttttggtgggggcggggcaaagggctaggggctccagacaccagggtacggggtggggactgattatattgccaaagggttcaacttctttaacaagcccccccgttt

SEQ ID NO: 292631 - DNA, 120 bp, Artificial Sequence
  ENSG00000131398_43 (sequence is synthesized)
cccctgaccttcacgaaagccgaaggaggcggggaaagggggtgagggtcttttccaaagggtactgacctcttcccaacgtctccccctgctcgccagtccgccacacgtacccagctt

SEQ ID NO: 292632 - DNA, 120 bp, Artificial Sequence
  ENSG00000131398_44 (sequence is synthesized)
ttgagttcagcttttcaaaataaccacaatcatgataaacttctacaaaacgtgattctcctcccctcccaccccatcccccaagtcaatagtgtgggattcggggagggagagagcgag

SEQ ID NO: 292633 - DNA, 120 bp, Artificial Sequence
  ENSG00000131398_45 (sequence is synthesized)
ctaaagggactctttccaagtccggctcccccttttccccccggccgccagggtgcctgcacctacacgcatgcgctgcatgacgcgccccccacacgcatgtcgcacccctcctgcgct

SEQ ID NO: 292634 - DNA, 120 bp, Artificial Sequence
  ENSG00000131398_46 (sequence is synthesized)
ccgggaacgcacggacacgggccagggggcggggcgattggggaggaatgaatggcggggggtcttcctgagctccgcggctcaccctccccaacacacacacacacacacacagagcaa

SEQ ID NO: 292635 - DNA, 120 bp, Artificial Sequence
  ENSG00000131398_47 (sequence is synthesized)
taagtttctctcactcaaatgtgggcggggcgggcctagcctgtcgctggtggggggagtggtgagggggcgctctcagggatgggggcggggttcggagacagtgtggggaggggaggt

SEQ ID NO: 292636 - DNA, 120 bp, Artificial Sequence
  ENSG00000131398_48 (sequence is synthesized)
ctgcaaatcgtccaactctggtgctaatggcgggtcttctcagcccacccgcagggcagggagggaggggtcggcgtggccccttccccaagcctcccccacgcccaccctgggtgcatg

SEQ ID NO: 292637 - DNA, 120 bp, Artificial Sequence
  ENSG00000131398_49 (sequence is synthesized)
aaccgcccaatgcagaagctgccgcatgtcacccccctctccccaaagaaaaagtgtcatgcccccttcccacccaccctcactccccaccaaaataaacgtttccttttcatttaaaaa

SEQ ID NO: 292638 - DNA, 120 bp, Artificial Sequence
  ENSG00000131400_0 (sequence is synthesized)
acacccaggtccccagcgatgtctccaccaccgctgctgcaacccctgctgctgctgctgcctctgctgaatgtggagccttccggggccacactgatccgcatccctcttcatcgagtc

SEQ ID NO: 292639 - DNA, 120 bp, Artificial Sequence
  ENSG00000131400_1 (sequence is synthesized)
caacctggacgcaggatcctgaacctactgaggggatggagagaaccagcagagctccccaagttgggggccccatcccctggggacaagcccatcttcgtacctctctcgaactacagg

SEQ ID NO: 292640 - DNA, 120 bp, Artificial Sequence
  ENSG00000131400_2 (sequence is synthesized)
gatgtgcagtattttggggaaattgggctgggaacgcctccacaaaacttcactgttgcctttgacactggctcctccaatctctgggtcccgtccaggagatgccacttcttcagtgtg

SEQ ID NO: 292641 - DNA, 120 bp, Artificial Sequence
  ENSG00000131400_3 (sequence is synthesized)
ccctgctggttacaccaccgatttgatcccaaagcctctagctccttccaggccaatgggaccaagtttgccattcaatatggaactgggcgggtagatggaatcctgagcgaggacaag

SEQ ID NO: 292642 - DNA, 120 bp, Artificial Sequence
  ENSG00000131400_4 (sequence is synthesized)
ctgactattggtggaatcaagggtgcatcagtgattttcggggaggctctctgggagcccagcctggtcttcgcttttgcccattttgatgggatattgggcctcggttttcccattctg

SEQ ID NO: 292643 - DNA, 120 bp, Artificial Sequence
  ENSG00000131400_5 (sequence is synthesized)
tggagcaggggctattggataagcctgtcttctccttttacctcaacagggaccctgaagagcctgatggaggagagctggtcctggggggctcggacccggcacactacatcccacccc

SEQ ID NO: 292644 - DNA, 120 bp, Artificial Sequence
  ENSG00000131400_6 (sequence is synthesized)
tcaccttcgtgccagtcacggtccctgcctactggcagatccacatggagcgtgtgaaggtgggcccagggctgactctctgtgccaagggctgtgctgccatcctggatacgggcacgt

SEQ ID NO: 292645 - DNA, 120 bp, Artificial Sequence
  ENSG00000131400_7 (sequence is synthesized)
ccctcatcacaggacccactgaggagatccgggccctgcatgcagccattgggggaatccccttgctggctggggagtacatcatcctgtgctcggaaatcccaaagctccccgcagtct

SEQ ID NO: 292646 - DNA, 120 bp, Artificial Sequence
  ENSG00000131400_8 (sequence is synthesized)
ccttccttcttgggggggtctggtttaacctcacggcccatgattacgtcatccagactactcgaaatggcgtccgcctctgcttgtccggtttccaggccctggatgtccctccgcctg

SEQ ID NO: 292647 - DNA, 120 bp, Artificial Sequence
  ENSG00000131400_9 (sequence is synthesized)
cagggcccttctggatcctcggtgacgtcttcttggggacgtatgtggccgtcttcgaccgcggggacatgaagagcagcgcccgggtgggcctggcgcgcgctcgcactcgcggagcgg

SEQ ID NO: 292648 - DNA, 120 bp, Artificial Sequence
  ENSG00000131400_10 (sequence is synthesized)
acctcggatggggagagactgcgcaggcgcagttccccgggtgacgcccaagtgaagcgcatgcgcagcgggtggtcgcggaggtcctgctacccagtaaaaatccactatttccattga

SEQ ID NO: 292649 - DNA, 120 bp, Artificial Sequence
  ENSG00000131400_11 (sequence is synthesized)
tttaggaggctgaggccaggagtttgagatcagcacgggcaacacagcaagacaattaagatttgacgcttacatttttctcctcaagggtggggaaaatagtccctaacctcacgaact

SEQ ID NO: 292650 - DNA, 120 bp, Artificial Sequence
  ENSG00000131400_12 (sequence is synthesized)
ctgcacaaatcttcaaaaaacatccttgtcccactgcgtcacctgcggacagatttcatgtcctggtctccttctaaacctggaggtggggcatgaacagggtggagtcacaggggaaag

SEQ ID NO: 292651 - DNA, 120 bp, Artificial Sequence
  ENSG00000131400_13 (sequence is synthesized)
aaggctgaatgggggtgaagggaggaggcggggctggacctcagcttctcagaggcttttgaggaactgttcttttatcatgccctcacaggtcagaaagtcaaaggggcagtaggcact

SEQ ID NO: 292652 - DNA, 120 bp, Artificial Sequence
  ENSG00000131400_14 (sequence is synthesized)
cttgggaaatctttaagaatgtcaattccttgggaatagcttattttaagggatttggacatggaaaggtctgtttgggatggtttgctcttgtaaagtctttggggatatttgtcatca

SEQ ID NO: 292653 - DNA, 120 bp, Artificial Sequence
  ENSG00000131400_15 (sequence is synthesized)
tggcatctttgatgggcttttctggaggttgttattgcagggtttctggtactgactactattgtagtgccttggagatgttgaatttgtcatcatatcctatttgggtaagtctattta

SEQ ID NO: 292654 - DNA, 120 bp, Artificial Sequence
  ENSG00000131400_16 (sequence is synthesized)
cagaagtcttgagcctgggagaaccccattgtctaagatcatctggcttaggaagaggctcgaggaggagcttcccaagccaatggatggggcttttcaagtggggaggagggcctgcct

SEQ ID NO: 292655 - DNA, 120 bp, Artificial Sequence
  ENSG00000131400_17 (sequence is synthesized)
ttcagagtgaagggatggtgcgtcacaaggagggggaggggcttcctgggtgaagaggtggggcttctcaagcaggggggaggagcttccaaggttaagaggtggggcttctcaagcagg

SEQ ID NO: 292656 - DNA, 120 bp, Artificial Sequence
  ENSG00000131400_18 (sequence is synthesized)
gaggaggagcttcctgggtgaagaggtggggcttctcaagcaggggaggagcttcctgggtgaagaggtggggcttctcaaggagaagaaaggggttcctgggtgaaggggtggggcttc

SEQ ID NO: 292657 - DNA, 120 bp, Artificial Sequence
  ENSG00000131400_19 (sequence is synthesized)
gggcctgagggtgggaggcaagtatttaaggggctttccagggcagcaggcactggacttcgtgacagatagtctggagggtggtggaggaattgaggacactttccacgtgtctacact

SEQ ID NO: 292658 - DNA, 120 bp, Artificial Sequence
  ENSG00000131400_20 (sequence is synthesized)
gcgactctgcggatggtggccgggtggagggagacgatcatgcaggtttgcttgggactgcgtaagtctaggcggcagggcctctgcacacaggacgctgagtacccaggtgctcaatag

SEQ ID NO: 292659 - DNA, 120 bp, Artificial Sequence
  ENSG00000131400_21 (sequence is synthesized)
ggaaattaccctatggcactggggagccacggaagggactgaacagagcaggaatctctcatcttcactagttcctcttctcccccagtacatcatcctgtgctcggaaatcccaaagct

SEQ ID NO: 292660 - DNA, 120 bp, Artificial Sequence
  ENSG00000131400_22 (sequence is synthesized)
gtagagctgagagacgtcactaggaagggaaggggccacagaaacatttcttttccctgtgatggcagtttgttggcgaacatcaaagaacccgagggtgggggggatggacgggctccc

SEQ ID NO: 292661 - DNA, 120 bp, Artificial Sequence
  ENSG00000131408_0 (sequence is synthesized)
gtgacgcaagggcggggttgccggaagaagtggcgaagttacttttgagggtatttgagtagcggcggtgtgtcaggggctaaagaggaggacgaagaaaagcagagcaagggaacccag

SEQ ID NO: 292662 - DNA, 120 bp, Artificial Sequence
  ENSG00000131408_1 (sequence is synthesized)
ggcaacaggagtagttcactccgcgagaggccgtccacgagacccccgcgcgcagccatgagccccgccccccgctgttgcttggagaggggcgggacctggagagaggctgctccgtga

SEQ ID NO: 292663 - DNA, 120 bp, Artificial Sequence
  ENSG00000131408_2 (sequence is synthesized)
ccccaccatgtcctctcctaccacgagttccctggatacccccctgcctggaaatggcccccctcagcctggcgccccttcttcttcacccactgtaaaggaggagggtccggagccgtg

SEQ ID NO: 292664 - DNA, 120 bp, Artificial Sequence
  ENSG00000131408_3 (sequence is synthesized)
gcccgggggtccggaccctgatgtcccaggcactgatgaggccagctcagcctgcagcacagactgggtcatcccagatcccgaagaggaaccagagcgcaagcgaaagaagggcccagc

SEQ ID NO: 292665 - DNA, 120 bp, Artificial Sequence
  ENSG00000131408_4 (sequence is synthesized)
cccgaagatgctgggccacgagctttgccgtgtctgtggggacaaggcctccggcttccactacaacgtgctcagctgcgaaggctgcaagggcttcttccggcgcagtgtggtccgtgg

SEQ ID NO: 292666 - DNA, 120 bp, Artificial Sequence
  ENSG00000131408_5 (sequence is synthesized)
tggggccaggcgctatgcctgccggggtggcggaacctgccagatggacgctttcatgcggcgcaagtgccagcagtgccggctgcgcaagtgcaaggaggcagggatgagggagcagtg

SEQ ID NO: 292667 - DNA, 120 bp, Artificial Sequence
  ENSG00000131408_6 (sequence is synthesized)
cgtcctttctgaagaacagatccggaagaagaagattcggaaacagcagcaggagtcacagtcacagtcgcagtcacctgtggggccgcagggcagcagcagctcagcctctgggcctgg

SEQ ID NO: 292668 - DNA, 120 bp, Artificial Sequence
  ENSG00000131408_7 (sequence is synthesized)
ggcttcccctggtggatctgaggcaggcagccagggctccggggaaggcgagggtgtccagctaacagcggctcaagaactaatgatccagcagttggtggcggcccaactgcagtgcaa

SEQ ID NO: 292669 - DNA, 120 bp, Artificial Sequence
  ENSG00000131408_8 (sequence is synthesized)
caaacgctccttctccgaccagcccaaagtcacgccctggcccctgggcgcagacccccagtcccgagatgcccgccagcaacgctttgcccacttcacggagctggccatcatctcagt

SEQ ID NO: 292670 - DNA, 120 bp, Artificial Sequence
  ENSG00000131408_9 (sequence is synthesized)
ccaggagatcgtggacttcgctaagcaagtgcctggtttcctgcagctgggccgggaggaccagatcgccctcctgaaggcatccactatcgagatcatgctgctagagacagccaggcg

SEQ ID NO: 292671 - DNA, 120 bp, Artificial Sequence
  ENSG00000131408_10 (sequence is synthesized)
gagtgtatcaccttcttgaaggacttcacctacagcaaggacgacttccaccgtgcaggcctgcaggtggagttcatcaaccccatcttcgagttctcgcgggccatgcggcggctgggc

SEQ ID NO: 292672 - DNA, 120 bp, Artificial Sequence
  ENSG00000131408_11 (sequence is synthesized)
ctggacgacgctgagtacgccctgctcatcgccatcaacatcttctcggccgaccggcccaacgtgcaggagccgggccgcgtggaggcgttgcagcagccctacgtggaggcgctgctg

SEQ ID NO: 292673 - DNA, 120 bp, Artificial Sequence
  ENSG00000131408_12 (sequence is synthesized)
tcctacacgcgcatcaagaggccgcaggaccagctgcgcttcccgcgcatgctcatgaagctggtgagcctgcgcacgctgagctctgtgcactcggagcaggtcttcgccttgcggctc

SEQ ID NO: 292674 - DNA, 120 bp, Artificial Sequence
  ENSG00000131408_13 (sequence is synthesized)
caggacaagaagctgccgcctctgctgtcggagatctgggacgtccacgagtgaggggctggccacccagccccacagccttgcctgaccaccctccagcagatagacgccggcacccct

SEQ ID NO: 292675 - DNA, 120 bp, Artificial Sequence
  ENSG00000131408_14 (sequence is synthesized)
tcctcttcctagggtggaaggggccctgggccgagcctgtagacctatcggctctcatcccttgggataagccccagtccaggtccaggaggctccctccctgcccagcgagtcttccag

SEQ ID NO: 292676 - DNA, 120 bp, Artificial Sequence
  ENSG00000131408_15 (sequence is synthesized)
aaggggtgaaagggttgcaggtcccgaccactgacccttcccggctgccctccctccccagcttacacctcaagcccagcacgcagtgcaccttgaacagagggaggggaggacccatgg

SEQ ID NO: 292677 - DNA, 120 bp, Artificial Sequence
  ENSG00000131408_16 (sequence is synthesized)
ctctcccccctagcccgggagaccagggccttcctcttcctctgcttttatttaataaaaactaaaaacagaaacaggaaaataaaatatgaatacaatccagcccggagctggagtgca

SEQ ID NO: 292678 - DNA, 120 bp, Artificial Sequence
  ENSG00000131408_17 (sequence is synthesized)
agatggagagggcgcgggcttctagggacctcagtgacactgggtgcccgaacctgattgagcaggtgggactgggtgtccccaggctgttgggaaaagggtggcacatagggtcccagt

SEQ ID NO: 292679 - DNA, 120 bp, Artificial Sequence
  ENSG00000131408_18 (sequence is synthesized)
gttgggtggtgtgtcgcctgctgtgaaagttcaggacagaggcctcagcctcagggtcacctccctggacaaggtgaatcagaactcacccttgaaggataaacaggatttaagtgaatg

SEQ ID NO: 292680 - DNA, 120 bp, Artificial Sequence
  ENSG00000131408_19 (sequence is synthesized)
aggggacctggacttctgtccgaacaacaagtgtttgctgaggcctcctgtgggccaggcactgggttggccattctagagatggagacattcacccaataaatgtttccagagcattaa

SEQ ID NO: 292681 - DNA, 120 bp, Artificial Sequence
  ENSG00000131408_20 (sequence is synthesized)
gagtgcgagcgcgcgccaggcccacccgggcgctgctcttcatgtccccgcggtcgaagacggccacatacgtccccaagaagacgtcaccgaggatccagaagggccctgcaggcggag

SEQ ID NO: 292682 - DNA, 120 bp, Artificial Sequence
  ENSG00000131408_21 (sequence is synthesized)
ggacatccagggcctggaaaccggacaagcagaggcggacgccatttcgagtagtctgcaaggcaacaagacgacaactgggtgtcgcggccacaaggacggccatttgcctgggagccc

SEQ ID NO: 292683 - DNA, 120 bp, Artificial Sequence
  ENSG00000131408_22 (sequence is synthesized)
gtccatcccccccaccctcgggttctttgatgttcgccaacaaactgccatcacagggaaaagaaatgtttctgtggccccttcccttcctagtgacgtctctcagctctaccctctcaa

SEQ ID NO: 292684 - DNA, 120 bp, Artificial Sequence
  ENSG00000131408_23 (sequence is synthesized)
accgtcatatgacgtcactatggcgtcatggtgatggccacctacctggatgacgtaatcatgggccgtgaggttaaaccagacccccccaagaaggaaggagactgcggggagctttgg

SEQ ID NO: 292685 - DNA, 120 bp, Artificial Sequence
  ENSG00000131408_24 (sequence is synthesized)
gatttccgagcacaggatgatgtactgggggagaagaggaactagtgaagatgagagattcctgctctgttcagtcccttccgtggctccccagtgccatagggtaatttccctattgag

SEQ ID NO: 292686 - DNA, 120 bp, Artificial Sequence
  ENSG00000131408_25 (sequence is synthesized)
cacctgggtactcagcgtcctgtgtgcagaggccctgccgcctagacttacgcagtcccaagcaaacctgcatgatcgtctccctccacccggccaccatccgcagagtcgcagtgtaga

SEQ ID NO: 292687 - DNA, 120 bp, Artificial Sequence
  ENSG00000131408_26 (sequence is synthesized)
cacgtggaaagtgtcctcaattcctccaccaccctccagactatctgtcacgaagtccagtgcctgctgccctggaaagccccttaaatacttgcctcccaccctcaggccctttgatgt

SEQ ID NO: 292688 - DNA, 120 bp, Artificial Sequence
  ENSG00000131408_27 (sequence is synthesized)
tcactgtcaaactgccatcagccttcccagcccgtacccaccagactgggacctcacctccccagccagcaaggggattcccccaatggctgcatgcagggcccggatctcctcagtggg

SEQ ID NO: 292689 - DNA, 120 bp, Artificial Sequence
  ENSG00000131408_28 (sequence is synthesized)
tcctgtgatgagggacgtgcccgtatccaggatggcagcacagcccttggcacagagagtcagccctgggcccaccttcacactgagggggaaggaggcagtcatcagaggcagggtcct

SEQ ID NO: 292690 - DNA, 120 bp, Artificial Sequence
  ENSG00000131408_29 (sequence is synthesized)
aggagtccaggcccccagcctccagctccagagccaggagaccaagtccctcaccgctccatgtggatctgccagtaggcagggaccgtgactggcacgaagtcttgctctgtccccagg

SEQ ID NO: 292691 - DNA, 120 bp, Artificial Sequence
  ENSG00000131408_30 (sequence is synthesized)
tggcggcccaactgcagtgcaacaaacgctccttctccgaccagcccaaagtcacggtactgccccctccacaaccttgagtgtgacggtcccaatggggtagagccagctgggccatca

SEQ ID NO: 292692 - DNA, 120 bp, Artificial Sequence
  ENSG00000131408_31 (sequence is synthesized)
cccagggtgtgggagaatgaggctccagagggcaggggctttgggaagaggatcccccagggtgcaggcttggcctcaaggtggccacccagacttaggctcacaaagacctgggagtga

SEQ ID NO: 292693 - DNA, 120 bp, Artificial Sequence
  ENSG00000131408_32 (sequence is synthesized)
ggccccgcagagcctctgcgcagagccaactacgtcccgcggcccacgtggtccgttcaggctgggttctgccagccacactgccctcccctccgcagagtctttcctcaggccccaccc

SEQ ID NO: 292694 - DNA, 120 bp, Artificial Sequence
  ENSG00000131408_33 (sequence is synthesized)
agatgagactgcatggggcgggaactagagatggaggactttcccgcgcaagggggacaggctggactgaaagaggacacgggaagaacaaagacttagactcgaagccctcggatggtg

SEQ ID NO: 292695 - DNA, 120 bp, Artificial Sequence
  ENSG00000131408_34 (sequence is synthesized)
gcccttgcatgcttcagttcatgatgttggagactatttccccacccttgcggaaaaaccttctctctgtgccatgcagctactgccagggatggaggatggcgggaattggcaactaaa

SEQ ID NO: 292696 - DNA, 120 bp, Artificial Sequence
  ENSG00000131408_35 (sequence is synthesized)
tactgccagggatggaggatggcgggaattggcaactaaagactgtcctcctaccctcttcagtgtgtccttcagcaatatgaagttaaaaccagtcttgctctgtccccaggctggagt

SEQ ID NO: 292697 - DNA, 120 bp, Artificial Sequence
  ENSG00000131408_36 (sequence is synthesized)
agtctcctgagtagctgggactacaggctcagagaagcgcatgaatgagctaaagccacaaagcgcggggctggaggtttggctcccaagaagcgaggaaatgggttcggaactcttctg

SEQ ID NO: 292698 - DNA, 120 bp, Artificial Sequence
  ENSG00000131408_37 (sequence is synthesized)
ggaaatgggttcggaactcttctgccaagtcccagtagatctacccggtaaacttccggtgagtttccaacttccgtgcggggcagcagcttcggctggtcctaagcggaccggaagttc

SEQ ID NO: 292699 - DNA, 120 bp, Artificial Sequence
  ENSG00000131408_38 (sequence is synthesized)
gagggtttgtaggctggcaggaaccagggttgtggctgagagtagggtctttggagagatggaaaaaaaagggaaagccctgtcaggacctgtaactgacctaacctaacccttcttagc

SEQ ID NO: 292700 - DNA, 120 bp, Artificial Sequence
  ENSG00000131408_39 (sequence is synthesized)
gcttggaagagacagggccgcagaaagtagaaacggtccagatgagactgcatggggcgggaactagagatggaggactttcccgcgcaagggggacaggctggactgaaagaggacacg

SEQ ID NO: 292701 - DNA, 62 bp, Artificial Sequence
  ENSG00000131408_40 (sequence is synthesized)
tcccgcgcaagggggacaggctggactgaaagaggacacgggaagaacaaagacttagactc

SEQ ID NO: 292702 - DNA, 120 bp, Artificial Sequence
  ENSG00000131408_41 (sequence is synthesized)
gttgccggaagaagtggcgaagttacttttgagggtatttgagtagcggcggtgtgtcaggggctaaagaggaggacgaagaaaagcagagcaagggaacccaggtaggtgcacccgaga

SEQ ID NO: 292703 - DNA, 120 bp, Artificial Sequence
  ENSG00000131408_42 (sequence is synthesized)
gtggggagacgcaggaggagccccgaacccggggcttctcggcgctccccgcgtactccgctctgcccccttctctccttccatttcctcccctcggtaattcgcgcctcccgcggctgt

SEQ ID NO: 292704 - DNA, 120 bp, Artificial Sequence
  ENSG00000131408_43 (sequence is synthesized)
gttggagactatttccccacccttgcggaaaaacctaccttcagacaacaaaactgccagtgaccgagtgcttctgtatgccaggcactgcgcttccgggatcctcatacccttcataag

SEQ ID NO: 292705 - DNA, 120 bp, Artificial Sequence
  ENSG00000131408_44 (sequence is synthesized)
taggaagggagaaagaaatagaaatgggaatgggaggccctgatctttgctttttgttcttgctttctccttaacatatacatctttctaaattgcaatttccctgaatgtgagcagcaa

SEQ ID NO: 292706 - DNA, 120 bp, Artificial Sequence
  ENSG00000131408_45 (sequence is synthesized)
ctcctctctccctccatcctctggctctttgcctggggatctcctgtgggcccatctctctggttcctgtttctccttgtggctttctcatggcctctacctacccaccccagtcatccc

SEQ ID NO: 292707 - DNA, 120 bp, Artificial Sequence
  ENSG00000131409_0 (sequence is synthesized)
cccgcagcgggccttgcaccccaaattcctgagcctcattgggggggtcctccccccacgggccgggcatgctgccccccggaaggaacccctctcctcgctccccccagcgtccacgcg

SEQ ID NO: 292708 - DNA, 120 bp, Artificial Sequence
  ENSG00000131409_1 (sequence is synthesized)
gagcatgaacattgaggatggcgcgtgcccgcggctccccgtgccccccgctgccgcccggtaggatgtcctggccccacggggcattgctcttcctctggctcttctccccacccctgg

SEQ ID NO: 292709 - DNA, 120 bp, Artificial Sequence
  ENSG00000131409_2 (sequence is synthesized)
gggccggtggaggtggagtggccgtgacgtctgccgccggagggggctccccgccggccacctcctgccccgtggcctgctcctgcagcaaccaggccagccgggtgatctgcacacgga

SEQ ID NO: 292710 - DNA, 120 bp, Artificial Sequence
  ENSG00000131409_3 (sequence is synthesized)
gagacctggccgaggtcccagccagcatcccggtcaacacgcggtacctgaacctgcaagagaacggcatccaggtgatccggacggacacgttcaagcacctgcggcacctggagattc

SEQ ID NO: 292711 - DNA, 120 bp, Artificial Sequence
  ENSG00000131409_4 (sequence is synthesized)
tgcagctgagcaagaacctggtgcgcaagatcgaggtgggcgccttcaacgggctgcccagcctcaacacgctggagctttttgacaaccggctgaccacggtgcccacgcaggccttcg

SEQ ID NO: 292712 - DNA, 120 bp, Artificial Sequence
  ENSG00000131409_5 (sequence is synthesized)
agtacctgtccaagctgcgggagctctggctgcggaacaaccccatcgagagcatcccctcctacgccttcaaccgcgtgccctcgctgcggcgcctggacctgggcgagctcaagcggc

SEQ ID NO: 292713 - DNA, 120 bp, Artificial Sequence
  ENSG00000131409_6 (sequence is synthesized)
tggaatacatctcggaggcggccttcgaggggctggtcaacctgcgctacctcaacctgggcatgtgcaacctcaaggacatccccaacctgacggccctggtgcgcctggaggagctgg

SEQ ID NO: 292714 - DNA, 120 bp, Artificial Sequence
  ENSG00000131409_7 (sequence is synthesized)
agctgtcgggcaaccggctggacctgatccgcccgggctccttccagggtctcaccagcctgcgcaagctgtggctcatgcacgcccaggtagccaccatcgagcgcaacgccttcgacg

SEQ ID NO: 292715 - DNA, 120 bp, Artificial Sequence
  ENSG00000131409_8 (sequence is synthesized)
acctcaagtcgctggaggagctcaacctgtcccacaacaacctgatgtcgctgccccacgacctcttcacgcccctgcaccgcctcgagcgcgtgcacctcaaccacaacccctggcatt

SEQ ID NO: 292716 - DNA, 120 bp, Artificial Sequence
  ENSG00000131409_9 (sequence is synthesized)
gcaactgcgacgtgctctggctgagctggtggctcaaggagacggtgcccagcaacacgacgtgctgcgcccgctgtcatgcgcccgccggcctcaaggggcgctacattggggagctgg

SEQ ID NO: 292717 - DNA, 120 bp, Artificial Sequence
  ENSG00000131409_10 (sequence is synthesized)
accagtcgcatttcacctgctatgcgcccgtcatcgtggagccgcccacggacctcaacgtcaccgagggcatggctgccgagctcaaatgccgcacgggcacctccatgacctccgtca

SEQ ID NO: 292718 - DNA, 120 bp, Artificial Sequence
  ENSG00000131409_11 (sequence is synthesized)
actggctgacgcccaacggcaccctcatgacccacggctcctaccgcgtgcgcatctccgtcctgcatgacggcacgcttaacttcaccaacgtcaccgtgcaggacacgggccagtaca

SEQ ID NO: 292719 - DNA, 120 bp, Artificial Sequence
  ENSG00000131409_12 (sequence is synthesized)
ccgggggcaccggcagcggcgggggcggccctgggggcagtggtggtgttggagggggcagtggcggctacacctacttcaccacggtgaccgtggagaccctggagacgcagcccggag

SEQ ID NO: 292720 - DNA, 120 bp, Artificial Sequence
  ENSG00000131409_13 (sequence is synthesized)
aggaggccctgcagccgcgggggacggagaaggaaccgccagggcccacgacagacggtgtctggggtgggggccggcctggggacgcggccggccctgcctcgtcttctaccacggcac

SEQ ID NO: 292721 - DNA, 120 bp, Artificial Sequence
  ENSG00000131409_14 (sequence is synthesized)
ccgccccgcgctcctcgcggcccacggagaaggcgttcacggtgcccatcacggatgtgacggagaacgccctcaaggacctggacgacgtcatgaagaccaccaaaatcatcatcggct

SEQ ID NO: 292722 - DNA, 120 bp, Artificial Sequence
  ENSG00000131409_15 (sequence is synthesized)
gcttcgtggccatcacgttcatggccgcggtgatgctcgtggccttctacaagctgcgcaagcagcaccagctccacaagcaccacgggcccacgcgcaccgtggagatcatcaacgtgg

SEQ ID NO: 292723 - DNA, 120 bp, Artificial Sequence
  ENSG00000131409_16 (sequence is synthesized)
gagatcatcaacgtggaggacgagctgcccgccgcctcggccgtgtccgtggccgccgcggccgccgtggccagtgggggtggtgtgggcggggacagccacctggccctgcccgccctg

SEQ ID NO: 292724 - DNA, 120 bp, Artificial Sequence
  ENSG00000131409_17 (sequence is synthesized)
accaccaccactacgtggctgccgccttcaaggcgcactacagcagcaaccccagcggcgggggctgcgggggcaaaggcccgcctggcctcaactccatccacgaacctctgctcttca

SEQ ID NO: 292725 - DNA, 120 bp, Artificial Sequence
  ENSG00000131409_18 (sequence is synthesized)
agagcggctccaaggagaacgtgcaagagacgcagatctgaggcggcggggccgggcgggcgaggggcgtggagccccccacccaggtcccagcccgggcgcagcctgaccgggacccct

SEQ ID NO: 292726 - DNA, 120 bp, Artificial Sequence
  ENSG00000131409_19 (sequence is synthesized)
ccctcccacagcccagcccaccttctgggaccacgcagggaattggggagaggtggcttccagccccatctggggctcggacccccagtaaggacagggtggggctccaggagcggagtc

SEQ ID NO: 292727 - DNA, 120 bp, Artificial Sequence
  ENSG00000131409_20 (sequence is synthesized)
tctgggatcctcgcctcacccccgccaatccccggtgacgggaggggacgtgggacccaggagaagtggcctgagttctccgcgtttcctcctcgctctcccaccaagcgttccgggccc

SEQ ID NO: 292728 - DNA, 120 bp, Artificial Sequence
  ENSG00000131409_21 (sequence is synthesized)
gccgccttccaggggagagaggagctttctccaggggtgtcctttcccctcggccccaaacaccttccttttacggttcagtttttgcagtttgacgcccgtccctccctcccactcctc

SEQ ID NO: 292729 - DNA, 120 bp, Artificial Sequence
  ENSG00000131409_22 (sequence is synthesized)
cgccctcaaaactgaagagatggacacgtcgccagagctcccgtcccagcgcccggctctgctcccggccggcggtccctgtcgtcggcgcgggggggagcctccacccgccccagcccc

SEQ ID NO: 292730 - DNA, 120 bp, Artificial Sequence
  ENSG00000131409_23 (sequence is synthesized)
acctgccccacagacacttttgatactgaagggaggtttgcgtcaacgactacctgctctgtaattactttaaaaaaaaaacatggaaaaagtaaaaaaatattttttttggtcatgaaa

SEQ ID NO: 292731 - DNA, 120 bp, Artificial Sequence
  ENSG00000131409_24 (sequence is synthesized)
atgcggaggtagacatggcagcggcaggcctggaggccggggtgggtgccgtgggctcccacaggccctgcggggtcccccggcctcaaatccaggccctgcgctttgggccagcccttt

SEQ ID NO: 292732 - DNA, 80 bp, Artificial Sequence
  ENSG00000131409_25 (sequence is synthesized)
agtattccgctcccgtctccgccgctctcggctgctctcggtcgctgccgcaccgtccgaggcgggggccggggccgggg

SEQ ID NO: 292733 - DNA, 120 bp, Artificial Sequence
  ENSG00000131409_26 (sequence is synthesized)
cggcgggcccgaggagggaggaaggaaggaaggaaggctggaaggaaggaagccaggaaagaaagaaggaaagaaaggaaggcaagaaggaaggcgggcggcgggcgagggcgcggggcc

SEQ ID NO: 292734 - DNA, 80 bp, Artificial Sequence
  ENSG00000131409_27 (sequence is synthesized)
ccccagccccaccgccgccgctgcggaagccccctccccacccaggagccggggaggggggagagcgcgagaggctccag

SEQ ID NO: 292735 - DNA, 120 bp, Artificial Sequence
  ENSG00000131435_0 (sequence is synthesized)
agagtccggctcaggctccggctgcggctccagcccgcgatgccccattccgtgaccctgcgcgggccttcgccctggggcttccgcctggtgggcggccgggacttcagcgcgcccctc

SEQ ID NO: 292736 - DNA, 120 bp, Artificial Sequence
  ENSG00000131435_1 (sequence is synthesized)
accatctcacgggtccatgctggcagcaaggctgcattggctgccctgtgcccaggagacctgatccaggccatcaatggtgagagcacagagctcatgacacacctggaggcacagaac

SEQ ID NO: 292737 - DNA, 120 bp, Artificial Sequence
  ENSG00000131435_2 (sequence is synthesized)
cgcatcaagggctgccacgatcacctcacactgtctgtgagcaggcctgagggtaggagctggcccagtgcccctgatgacagcaaggctcaggcacacaggatccacatcgatcctgag

SEQ ID NO: 292738 - DNA, 120 bp, Artificial Sequence
  ENSG00000131435_3 (sequence is synthesized)
atccaggacggcagcccaacaaccagcaggcggccctcaggcaccgggactgggccagaagatggcagaccaagcctgggatctccatatggacaaccccctcgctttccagtccctcac

SEQ ID NO: 292739 - DNA, 120 bp, Artificial Sequence
  ENSG00000131435_4 (sequence is synthesized)
aatggcagcagcgaggccaccctgccagcccagatgagcaccctgcatgtgtctccaccccccagcgctgacccagccagaggcctcccgcggagccgggactgcagagtcgacctgggc

SEQ ID NO: 292740 - DNA, 120 bp, Artificial Sequence
  ENSG00000131435_5 (sequence is synthesized)
tccgaggtgtacaggatgctgcgggagccagccgagcccgtggccgcggagcccaagcagtcaggctccttccgctacttgcagggcatgctagaggccggcgagggcggggattggccc

SEQ ID NO: 292741 - DNA, 120 bp, Artificial Sequence
  ENSG00000131435_6 (sequence is synthesized)
gggcctggcggcccccggaacctcaagcccacggccagcaagctgggcgctccgctgagcggcctgcaggggctgcccgagtgcacgcgctgcggccacggcatcgtgggcaccatcgtc

SEQ ID NO: 292742 - DNA, 120 bp, Artificial Sequence
  ENSG00000131435_7 (sequence is synthesized)
aaggcacgggacaagctctaccatcccgagtgcttcatgtgcagtgactgcggcctgaacctcaagcagcgtggttacttctttctggacgagcggctctactgtgagagccacgccaag

SEQ ID NO: 292743 - DNA, 120 bp, Artificial Sequence
  ENSG00000131435_8 (sequence is synthesized)
gcgcgcgtgaagccgcccgagggctacgacgtggtggcggtgtaccccaatgccaaggtggaactcgtctgagctgggaccctgctcccacgcctgcttcttaaggtccctgctcggccg

SEQ ID NO: 292744 - DNA, 120 bp, Artificial Sequence
  ENSG00000131435_9 (sequence is synthesized)
gctcccgagtacagtagtatctgcttaggtgccaggcatgtcctaggctctgggtgcagtagtgagcaggacgggtaccatgctgccctgaagggggccacagcctgggtggaaggcaga

SEQ ID NO: 292745 - DNA, 120 bp, Artificial Sequence
  ENSG00000131435_10 (sequence is synthesized)
cctgaatcacaacgggccagctctagtaatacgaaggtgaggtctgggatgctgcgtgcggcgcgacgacaggaggtatgacctgggtggggtcagggaaagtcttagctgagaactaag

SEQ ID NO: 292746 - DNA, 120 bp, Artificial Sequence
  ENSG00000131435_11 (sequence is synthesized)
agatgagggaggcacaaactctgcacgggggaactgtgtgtgcaaaggtgagctgggggcgagaaaggcctctgtggccgtcatcggcactagcgggttgggggtggtggtggggtgctg

SEQ ID NO: 292747 - DNA, 120 bp, Artificial Sequence
  ENSG00000131435_12 (sequence is synthesized)
gcagcctcaggagcgatcgctcccctggagagggtgattgagtgtggagatcaccggggccgccgcgggccgtctgcacttctgttccaggtttttctggcattttctgttccaggtttc

SEQ ID NO: 292748 - DNA, 120 bp, Artificial Sequence
  ENSG00000131435_13 (sequence is synthesized)
ttccacccacgagcactttattctcctccgagacccccttttcttccccttcctctctcccccaccagggggcgcgcttaaatttccagacagagaccagaaggaaggtttagaaagaaa

SEQ ID NO: 292749 - DNA, 120 bp, Artificial Sequence
  ENSG00000131435_14 (sequence is synthesized)
agaacacttgcccagggcagctttgccctccaagaggctccctcctgtctctaagtcaattccacccctcctcgaagtcccggcttccacccctctcctcagagtcccggcgtttacctc

SEQ ID NO: 292750 - DNA, 120 bp, Artificial Sequence
  ENSG00000131435_15 (sequence is synthesized)
gtggtgtgtttgccttgggcctttcatgccccggctgcacacatcgtctgtgaattgtggctgttcactcccgaggatgtgtcctagactccgggtcgcgtggatctaccctctagttta

SEQ ID NO: 292751 - DNA, 120 bp, Artificial Sequence
  ENSG00000131435_16 (sequence is synthesized)
cttgctcgggagaagaaactgactcgttttatttagtgcctatttagcgagcccagagtaacgtacatttgtgctgttttcaattttgtgctatcgcaaatcacaaaaaaactgttatca

SEQ ID NO: 292752 - DNA, 120 bp, Artificial Sequence
  ENSG00000131435_17 (sequence is synthesized)
attcacattcatcatcagcacgagacccatttccttgtgctcctgccagctcaggatattatgtttcttttttcatttttgccagtctgttaagtaaaatgtcatatgcgtttgttttaa

SEQ ID NO: 292753 - DNA, 120 bp, Artificial Sequence
  ENSG00000131435_18 (sequence is synthesized)
ggctctcagatacccaagacagagactgaagcagaagttttctctggaccacatccataccccatcccatgttcctcagatgatgagcacctggtgtgggctctgtctctactccgggca

SEQ ID NO: 292754 - DNA, 120 bp, Artificial Sequence
  ENSG00000131435_19 (sequence is synthesized)
tcaaatctcacccagtcccactctgacccctgacacttgatccttgggtcttagctggttgcattctgactcataagccttaccagaccccaagtccacagggtgaaggctggaactgca

SEQ ID NO: 292755 - DNA, 120 bp, Artificial Sequence
  ENSG00000131435_20 (sequence is synthesized)
tgcccaggttgccccctagcgaccccacgtcccgcctcgcagtcacctgccctcttcggtctctgcggcccggtcccacgcccttgctacaaccttgctacgccctggcttcccgattcc

SEQ ID NO: 292756 - DNA, 120 bp, Artificial Sequence
  ENSG00000131435_21 (sequence is synthesized)
ctctccaccccctgtcgctgcccctcaccccacgcccgccaaacccgttccccagtctcgggtgccgatggcccgtctggcgcccaaccaaacaccccgcagaaatggagttctgacctc

SEQ ID NO: 292757 - DNA, 120 bp, Artificial Sequence
  ENSG00000131437_0 (sequence is synthesized)
gcgcaggcgtaattcaagggccgagagagcctgagactgggcttggggcggggcgagctcggaatgcggctgcgcactgggcgctctcgcccgagaagccgcagtctcgagagcgtcaac

SEQ ID NO: 292758 - DNA, 120 bp, Artificial Sequence
  ENSG00000131437_1 (sequence is synthesized)
gaggtgtttcggtagtctctggccatcctttctgcgcacccggtgtcgctgggctgcaccccgggcggggacgtccgccgggcacgggagggggccaagatgccgatcaataaatcagag

SEQ ID NO: 292759 - DNA, 120 bp, Artificial Sequence
  ENSG00000131437_2 (sequence is synthesized)
aagccagaaagctgcgataatgtgaaggttgttgttaggtgccggcccctcaatgagagagagaaatcaatgtgctacaaacaggctgtcagtgtggatgagatgaggggaactatcact

SEQ ID NO: 292760 - DNA, 120 bp, Artificial Sequence
  ENSG00000131437_3 (sequence is synthesized)
gtacataagactgattcttccaatgaacctccaaagacatttacttttgatactgtttttggaccagagagtaaacaacttgatgtttataacttaactgcaagacctattattgattct

SEQ ID NO: 292761 - DNA, 120 bp, Artificial Sequence
  ENSG00000131437_4 (sequence is synthesized)
gtacttgaaggctacaatgggactatttttgcatatggacaaaccggaacaggcaaaacttttaccatggaaggtgttcgagctattcctgaacttagaggaataattcccaattcattt

SEQ ID NO: 292762 - DNA, 120 bp, Artificial Sequence
  ENSG00000131437_5 (sequence is synthesized)
gctcacatatttggtcatattgcaaaagcggagggtgatacaagatttttggttcgagtgtcttatttggaaatatataatgaagaagttcgtgaccttttgggcaaggatcagacacaa

SEQ ID NO: 292763 - DNA, 120 bp, Artificial Sequence
  ENSG00000131437_6 (sequence is synthesized)
aggttagaggttaaagaaagacctgatgtgggagtttatatcaaagatttatcagcttatgtggtaaataatgctgatgatatggatagaattatgacgctaggccacaaaaatcgttct

SEQ ID NO: 292764 - DNA, 120 bp, Artificial Sequence
  ENSG00000131437_7 (sequence is synthesized)
gttggtgcaactaatatgaacgaacatagttcccgttcccatgccatctttacaattactatagaatgcagtgaaaaaggcattgatggtaacatgcatgtcaggatggggaagctccat

SEQ ID NO: 292765 - DNA, 120 bp, Artificial Sequence
  ENSG00000131437_8 (sequence is synthesized)
cttgtagatcttgctggttcagaaagacaggcaaaaactggagctactggacagcgcctaaaggaagctacaaaaatcaatctttcactttccacccttggtaatgtaatttctgccttg

SEQ ID NO: 292766 - DNA, 120 bp, Artificial Sequence
  ENSG00000131437_9 (sequence is synthesized)
gttgatggaaaaagcactcatgtgccttatcgtaactctaaactgactcgtcttcttcaggattccttaggaggaaattcaaaaaccatgatgtgtgcaaatattgggccagcagattac

SEQ ID NO: 292767 - DNA, 120 bp, Artificial Sequence
  ENSG00000131437_10 (sequence is synthesized)
aattatgatgaaactatcagtacattacggtatgccaatcgtgctaagaatattaaaaataaagctagaattaatgaagatccaaaggatgctttgctgcgtcagttccagaaagaaata

SEQ ID NO: 292768 - DNA, 120 bp, Artificial Sequence
  ENSG00000131437_11 (sequence is synthesized)
gaagaactgaaaaagaagcttgaagaaggagaagaaatatcaggctctgatatcagtgggtcagaggaagatgatgatgaagagggtgaggttggagaagatggagagaaaaggaaaaaa

SEQ ID NO: 292769 - DNA, 120 bp, Artificial Sequence
  ENSG00000131437_12 (sequence is synthesized)
agaaggggaaaaaagaaagtctccccagacaagatgattgaaatgcaagcaaaaattgatgaggagagaaaagcacttgaaacaaagctcgacatggaagaagaagaaagaaacaaggct

SEQ ID NO: 292770 - DNA, 120 bp, Artificial Sequence
  ENSG00000131437_13 (sequence is synthesized)
agagctgaattagagaaacgggaaaaagatcttcttaaagcccaacaagagcatcagtctttgctggaaaaattatctgccctggaaaagaaggtaattgttggtggggttgacttgttg

SEQ ID NO: 292771 - DNA, 120 bp, Artificial Sequence
  ENSG00000131437_14 (sequence is synthesized)
gccaaagctgaggaacaagagaaacttcttgaagaatctaacatggaactggaagaaaggaggaaaagagcagagcaacttcgcagagaacttgaggaaaaagagcaagaacgcttggat

SEQ ID NO: 292772 - DNA, 120 bp, Artificial Sequence
  ENSG00000131437_15 (sequence is synthesized)
attgaagaaaaatataccagtttgcaagaggaagcacagggaaagaccaagaagttaaagaaagtttggactatgctgatggctgcaaagtcagagatggctgatctccaacaagaacat

SEQ ID NO: 292773 - DNA, 120 bp, Artificial Sequence
  ENSG00000131437_16 (sequence is synthesized)
cagagggaaattgaaggcctactggagaacattcggcaacttagccgggagcttcgacttcagatgcttattattgataactttatacctcgggattatcaggaaatgattgaaaactat

SEQ ID NO: 292774 - DNA, 120 bp, Artificial Sequence
  ENSG00000131437_17 (sequence is synthesized)
gtccattggaatgaagacataggagaatggcagctaaaatgtgttgcttatacaggaaataacatgaggaagcaaaccccagtacctgataaaaaggagaaagatccctttgaggtggac

SEQ ID NO: 292775 - DNA, 120 bp, Artificial Sequence
  ENSG00000131437_18 (sequence is synthesized)
ctttctcacgtgtatcttgcctatactgaggagagtctgcgtcagtctttgatgaaactagaaagaccacgaacttcaaaggggaaagcaaggccaaagacagggagaagaaagcgttct

SEQ ID NO: 292776 - DNA, 120 bp, Artificial Sequence
  ENSG00000131437_19 (sequence is synthesized)
gcaaagcctgaaactgtaattgactctttactgcagtaaatgttacagacttaaagtcacaataaaaattagtgatattctcatgcctggacaaaatctttaattaaaacagtgaagact

SEQ ID NO: 292777 - DNA, 120 bp, Artificial Sequence
  ENSG00000131437_20 (sequence is synthesized)
tctctataatttcaattaatggaagttgtagatcaatgaataagactggaaataataatttgcttaagaacttttagtctacatatattaatataacattaaaattgtacaactggtgat

SEQ ID NO: 292778 - DNA, 120 bp, Artificial Sequence
  ENSG00000131437_21 (sequence is synthesized)
tgttcaaattgttgtactactactcttcaattgtactgtgcagggaagttgggggaacagttcatactatagagagttacagtttagatgtatgtgtaaatcgattagctatttatccaa

SEQ ID NO: 292779 - DNA, 120 bp, Artificial Sequence
  ENSG00000131437_22 (sequence is synthesized)
ctactgtatatttaggtaactagaatttcaaaatagaaaaaaaaaaactgtgtcctgttttgcacatagaaagaagcagatcagattgtcctatgttgcgctgttatatatgaatgtttg

SEQ ID NO: 292780 - DNA, 120 bp, Artificial Sequence
  ENSG00000131437_23 (sequence is synthesized)
gactgtacatctaaagaatgattccgtcctaacacccacccagcctgtttgaacacattctaattgtctaacatttgttgcattttaagtatgagatgactgatcttatgaatgttttgt

SEQ ID NO: 292781 - DNA, 120 bp, Artificial Sequence
  ENSG00000131437_24 (sequence is synthesized)
agaaaatgttataatttaacagtctttgcgagtatacatgttttttaacaagttgaaaatgtttcatctgaacctttcctaacttttttttgccagtttgagttcaaatcaaatacacct

SEQ ID NO: 292782 - DNA, 120 bp, Artificial Sequence
  ENSG00000131437_25 (sequence is synthesized)
taagttctggtttcatgttctcttgaaacattgaattgtacgtaaatataaaggatctactgttgcggaaaattaagaagctaaatactgctcagttatctttgcctgcgtgtatatttt

SEQ ID NO: 292783 - DNA, 120 bp, Artificial Sequence
  ENSG00000131437_26 (sequence is synthesized)
gagtctccattttccagaaaatacagctaagcaagaaaaatatcttttaaatactttgcctttaaaacacttttttattttgtttttctattttaaaaataaaatattattttctgaatt

SEQ ID NO: 292784 - DNA, 120 bp, Artificial Sequence
  ENSG00000131437_27 (sequence is synthesized)
tcttctattgggtaatccagttagaccatattcctctacaaataaaaactatgttgatttcatagtaaagtaagttgtaatagagataattatttttttctgttgttagctgcttatgaa

SEQ ID NO: 292785 - DNA, 120 bp, Artificial Sequence
  ENSG00000131437_28 (sequence is synthesized)
tgcactccagcctgggtgacagggtgacactccacctcaaaaaataaaaataaaataaaaataaagttatgctactcctaaaccacttaatatatgttttgtggttttcaaaattatgta

SEQ ID NO: 292786 - DNA, 120 bp, Artificial Sequence
  ENSG00000131437_29 (sequence is synthesized)
aaccacttaatatatgttttgtggttttcaaaattatgtaatcagccctgaaacacattggttgaaaatattttgagactttataagttagtatttattaaattaatattattttaataa

SEQ ID NO: 292787 - DNA, 120 bp, Artificial Sequence
  ENSG00000131437_30 (sequence is synthesized)
gttttgttaaatcctagtttaaatgacaaagctgtgtatagagtaggggtgagtgaaggtggagtactcttgaggtggcgataaaaatgtacccataaatttaaagtccattctgtaatt

SEQ ID NO: 292788 - DNA, 120 bp, Artificial Sequence
  ENSG00000131437_31 (sequence is synthesized)
ggaatactgaatgtcctgtgtgtggtgaacattttctaggtgattagaattgcatttcactggctgcatttgtttgtggtatgtaagatagctagaaatttattacttaactctgtgggg

SEQ ID NO: 292789 - DNA, 120 bp, Artificial Sequence
  ENSG00000131437_32 (sequence is synthesized)
cattgtttagatactgtgaagagttgaggtaaatatgtgtcttgtaaaagctttgtgtgatcagaatattttggtaattataaaatgtttttgatgatacacatttaactctgttagtaa

SEQ ID NO: 292790 - DNA, 120 bp, Artificial Sequence
  ENSG00000131437_33 (sequence is synthesized)
ttactctaaagaaatcttaattttaccagtttaaaaaaaacgcttctttttaaaagttcatgtttctaacctttaacaattcagttaataggaaaggagtaacttttaaatcaagcttta

SEQ ID NO: 292791 - DNA, 120 bp, Artificial Sequence
  ENSG00000131437_34 (sequence is synthesized)
aaacatggaaatttaagccagtatgttagatattttttctatcccaccctaccatgataataaaaataaatctataaaaagtcaaaataaaaagccgatctataaaaagtcaattgagaa

SEQ ID NO: 292792 - DNA, 120 bp, Artificial Sequence
  ENSG00000131437_35 (sequence is synthesized)
gttctaaaagcaggctactatagcaggggtgtttgttttttgtttggagacggagtctggctctattacctaggctggagtgcagtgggacaatctcggctcactgtaacctctgtctct

SEQ ID NO: 292793 - DNA, 85 bp, Artificial Sequence
  ENSG00000131437_36 (sequence is synthesized)
tgcagtgggacaatctcggctcactgtaacctctgtctcttcagcctcctgagttgctggaactacagctgtatgccatcatgct

SEQ ID NO: 292794 - DNA, 120 bp, Artificial Sequence
  ENSG00000131437_37 (sequence is synthesized)
taagtgatccacccgcctcaggctcccgaagtgctgggattacaggcatgattataggcctgagccaccacaccccgcctactatagcagttttttaaaaaaagcattatgttaaaactg

SEQ ID NO: 292795 - DNA, 120 bp, Artificial Sequence
  ENSG00000131437_38 (sequence is synthesized)
aaagcattatgttaaaactgattataccagatggacattaaatatccatctcagaaataccaaaatttgatacataagcctggcctgaatatcttttttttttttttgagacggagtctt

SEQ ID NO: 292796 - DNA, 120 bp, Artificial Sequence
  ENSG00000131437_39 (sequence is synthesized)
gcctggcctcaagcctggtctgaatatctatatgcaaatatgggacactgacttcagagctattcatttagctccagtcatagcaattctgtagtttcctcacatttactgtgtctttgt

SEQ ID NO: 292797 - DNA, 120 bp, Artificial Sequence
  ENSG00000131437_40 (sequence is synthesized)
ccacaaatgaaatatgttgtaaggtcagtgttaatttcgtgagacgatatagatgaacacacttgctcattttttgaaataaatatgcagatttaaaatgagtggcacatatatataaat

SEQ ID NO: 292798 - DNA, 120 bp, Artificial Sequence
  ENSG00000131437_41 (sequence is synthesized)
aggttattgaatgggtattctcttttccctttaatttaaaaagtgatatttatttattaaaaggagcattggtagaattattggtttatagtatcttctttaataatccttacaattaca

SEQ ID NO: 292799 - DNA, 120 bp, Artificial Sequence
  ENSG00000131437_42 (sequence is synthesized)
tatactaataggatgttaaaattatcatcgtgtttcctatttgtgtttagattcttataaagcatgagatgagtaatcaagggaagggtcgcatctccatgtttgccccatgaatagaat

SEQ ID NO: 292800 - DNA, 120 bp, Artificial Sequence
  ENSG00000131437_43 (sequence is synthesized)
ccatttgacaagccatttcatttcctttctggagaaagggagttgttttttttttctttttacagcaaaaatttaaggttttattgggggagggggtggtgctacttcctctgtaacatg

SEQ ID NO: 292801 - DNA, 120 bp, Artificial Sequence
  ENSG00000131437_44 (sequence is synthesized)
tttttaaaactatgattatggtttttggttgttttttgttttgtttgtttccttttagtctgtttttaatatccttccccttaactcttaaggaaagtcttctttcctacagggctgtga

SEQ ID NO: 292802 - DNA, 120 bp, Artificial Sequence
  ENSG00000131437_45 (sequence is synthesized)
attaaggaatgggtagcgtttacatttaagtacaccaatgtctgcccaatttcctaatgtatacatttgttttattttaaattattttttgttcttaaaaatactagaagaaaacataga

SEQ ID NO: 292803 - DNA, 120 bp, Artificial Sequence
  ENSG00000131437_46 (sequence is synthesized)
tgtttctagtgcctttgaacttatactgtagtctgactaatttaatgaataacttcagtagcattactataatactgtatgctggccaaaattacaaattacagtttgttgcatcagttt

SEQ ID NO: 292804 - DNA, 120 bp, Artificial Sequence
  ENSG00000131437_47 (sequence is synthesized)
caaaagccatgctttcattgtattttatgtataaattgtatttgttcaagttgtatatattggtattgtatgtatacatgcagcatggttaaataagaataaaaatcttttacctaatgc

SEQ ID NO: 292805 - DNA, 120 bp, Artificial Sequence
  ENSG00000131437_48 (sequence is synthesized)
gatgatgatgaagagggtgaggttggagaagatggagagaaaaggaaaaaaagaaggggtaatagcagcagcagtagttcagactccacatgttctgtcatagagaaacctctggataag

SEQ ID NO: 292806 - DNA, 120 bp, Artificial Sequence
  ENSG00000131437_49 (sequence is synthesized)
tggcagctagtgagtattaccttcattctttcacgtaataattaaagagtacttcctatggtctagaaattgtgctggctacagtggggaggaacatggtccagtagatgaatcagatga

SEQ ID NO: 292807 - DNA, 120 bp, Artificial Sequence
  ENSG00000131437_50 (sequence is synthesized)
tactcaccaacctttattaagtacattttagatactgggattagaagatgatgtcattagacatttctttggttttagcttctgtgggtttgatcaaggagtttattcagtattttaaat

SEQ ID NO: 292808 - DNA, 120 bp, Artificial Sequence
  ENSG00000131437_51 (sequence is synthesized)
ttagcttatgatgcagaatgaaacccgtaggtgtctttgtgtgtgtggcggtgttatgtttatcttccaggatttcacagattgttatcgtgaacttaataatggggccttctaagaccc

SEQ ID NO: 292809 - DNA, 80 bp, Artificial Sequence
  ENSG00000131446_0 (sequence is synthesized)
ggccacgttgcccgcccggccgtccggccccggcgcgccgcagaaagggctggcgagtcgaaaggcgaggcggccgcggc

SEQ ID NO: 292810 - DNA, 120 bp, Artificial Sequence
  ENSG00000131446_1 (sequence is synthesized)
agcgcttgggacgcgcctgggcaccgggctcgctccctgcgccccggagcaggccaagttcggggccaggacgtcgggaggacctggtgcatggctgcctcctaatcccatagtccagag

SEQ ID NO: 292811 - DNA, 120 bp, Artificial Sequence
  ENSG00000131446_2 (sequence is synthesized)
gaggcatccctaggactgcgggcaagggagccgggcaagcccagggcagccttgaaccgtcccctggcctgccctccccggtgggggccaggatgctgaagaagcagtctgcagggcttg

SEQ ID NO: 292812 - DNA, 120 bp, Artificial Sequence
  ENSG00000131446_3 (sequence is synthesized)
tgctgtggggcgctatcctctttgtggcctggaatgccctgctgctcctcttcttctggacgcgcccagcacctggcaggccaccctcagtcagcgctctcgatggcgaccccgccagcc

SEQ ID NO: 292813 - DNA, 120 bp, Artificial Sequence
  ENSG00000131446_4 (sequence is synthesized)
tcacccgggaagtgattcgcctggcccaagacgccgaggtggagctggagcggcagcgtgggctgctgcagcagatcggggatgccctgtcgagccagcgggggagggtgcccaccgcgg

SEQ ID NO: 292814 - DNA, 120 bp, Artificial Sequence
  ENSG00000131446_5 (sequence is synthesized)
cccctcccgcccagccgcgtgtgcctgtgacccccgcgccggcggtgattcccatcctggtcatcgcctgtgaccgcagcactgttcggcgctgcctggacaagctgctgcattatcggc

SEQ ID NO: 292815 - DNA, 120 bp, Artificial Sequence
  ENSG00000131446_6 (sequence is synthesized)
cctcggctgagctcttccccatcatcgttagccaggactgcgggcacgaggagacggcccaggccatcgcctcctacggcagcgcggtcacgcacatccggcagcccgacctgagcagca

SEQ ID NO: 292816 - DNA, 120 bp, Artificial Sequence
  ENSG00000131446_7 (sequence is synthesized)
ttgcggtgccgccggaccaccgcaagttccagggctactacaagatcgcgcgccactaccgctgggcgctgggccaggtcttccggcagtttcgcttccccgcggccgtggtggtggagg

SEQ ID NO: 292817 - DNA, 120 bp, Artificial Sequence
  ENSG00000131446_8 (sequence is synthesized)
atgacctggaggtggccccggacttcttcgagtactttcgggccacctatccgctgctgaaggccgacccctccctgtggtgcgtctcggcctggaatgacaacggcaaggagcagatgg

SEQ ID NO: 292818 - DNA, 120 bp, Artificial Sequence
  ENSG00000131446_9 (sequence is synthesized)
tggacgccagcaggcctgagctgctctaccgcaccgactttttccctggcctgggctggctgctgttggccgagctctgggctgagctggagcccaagtggccaaaggccttctgggacg

SEQ ID NO: 292819 - DNA, 120 bp, Artificial Sequence
  ENSG00000131446_10 (sequence is synthesized)
actggatgcggcggccggagcagcggcaggggcgggcctgcatacgccctgagatctcaagaacgatgacctttggccgcaagggtgtgagccacgggcagttctttgaccagcacctca

SEQ ID NO: 292820 - DNA, 120 bp, Artificial Sequence
  ENSG00000131446_11 (sequence is synthesized)
gtttatcaagctgaaccagcagtttgtgcacttcacccagctggacctgtcttacctgcagcgggaggcctatgaccgagatttcctcgcccgcgtctacggtgctccccagctgcaggt

SEQ ID NO: 292821 - DNA, 120 bp, Artificial Sequence
  ENSG00000131446_12 (sequence is synthesized)
ggagaaagtgaggaccaatgaccggaaggagctgggggaggtgcgggtgcagtatacgggcagggacagcttcaaggctttcgccaaggctctgggtgtcatggatgaccttaagtcggg

SEQ ID NO: 292822 - DNA, 120 bp, Artificial Sequence
  ENSG00000131446_13 (sequence is synthesized)
ggttccgagagctggctaccggggtattgtcaccttccagttccggggccgccgtgtccacctggcgcccccactgacgtgggagggctatgatcctagctggaattagcacctgcctgt

SEQ ID NO: 292823 - DNA, 120 bp, Artificial Sequence
  ENSG00000131446_14 (sequence is synthesized)
ccttcctgggcccctccttgccacatcatgagctgaggtgggaccacagtccccaggctgcatcggcctgcctgtgtttccctcttaggtgcatttatctttttgatttttccgagtggc

SEQ ID NO: 292824 - DNA, 120 bp, Artificial Sequence
  ENSG00000131446_15 (sequence is synthesized)
atttaagtgcacaaatgataacaagaggattattctcccgttctcaagggagtcagatcaggggaactattctagggtatgttgcggggtattaagcaggaaaccactgtgtggtggggg

SEQ ID NO: 292825 - DNA, 120 bp, Artificial Sequence
  ENSG00000131446_16 (sequence is synthesized)
gcactgggcttgttggggccagaaatgtccacgtcctgagctttctcctggagcatgtgcagagagtttggcaacgttcgctctcttgaccagaccccttctccctgacctggctcttcc

SEQ ID NO: 292826 - DNA, 120 bp, Artificial Sequence
  ENSG00000131446_17 (sequence is synthesized)
agccagggcacgagccctccttctatacctgctccccttcccccagtggggactgagttatgggagaaggggacatatttgtggccaaaatgatactaaccaaaggggcttccttgtcag

SEQ ID NO: 292827 - DNA, 120 bp, Artificial Sequence
  ENSG00000131446_18 (sequence is synthesized)
ggcctggtggagttggtgggtcatcggggctcactgcctcctgcccttctctcctgtctgacccccacttagcccttctctccttgcagcctagcagtttatagttctgagatggaaagt

SEQ ID NO: 292828 - DNA, 120 bp, Artificial Sequence
  ENSG00000131446_19 (sequence is synthesized)
tgaagggggcaagcaagacctctcctcagcccatgcccagctgtcaggagagaggtgcagggaggaaggccttgtgctgggacaacctctctcttgccttacctcagagagggactatgc

SEQ ID NO: 292829 - DNA, 120 bp, Artificial Sequence
  ENSG00000131446_20 (sequence is synthesized)
cctgacccctcctttctgaaaatcagtgccctccctgttgctctaggaggctcctgctggcttggtagaagacagaattcgatctgcctgtccctttttcccctggggtttgacacacag

SEQ ID NO: 292830 - DNA, 120 bp, Artificial Sequence
  ENSG00000131446_21 (sequence is synthesized)
gctcctctcagcatgaggtggagcagtgaccaggtggagcagtgaccaggacgcctctggcccagtgctgcccagcctccccgcccgctcccaggcgccccatgtcctcacaggccagga

SEQ ID NO: 292831 - DNA, 120 bp, Artificial Sequence
  ENSG00000131446_22 (sequence is synthesized)
cgccatggcaggatggagaggacttggtggatttttgtttcttgcctgacctcagtttcatgaaagaaagtggaagctacagaattattttctaaaataaaggctgaattgtctgaaaaa

SEQ ID NO: 292832 - DNA, 120 bp, Artificial Sequence
  ENSG00000131446_23 (sequence is synthesized)
ggcttttgactgactggatgtgggaatgttgtggaagacttctggcctgccatttcctgagaacgggactgctgagagaggagctgggaggagcactgcaaatttcactttggacacgtg

SEQ ID NO: 292833 - DNA, 120 bp, Artificial Sequence
  ENSG00000131446_24 (sequence is synthesized)
agtcagagaaatctgcctcctgggccatgccgcttctaaggcctgtttcttctcatgagccccagcacaagacagatgggccagttctcacagtggataacttcccctgcctgagcaaga

SEQ ID NO: 292834 - DNA, 120 bp, Artificial Sequence
  ENSG00000131446_25 (sequence is synthesized)
gatgggatagtatctgggatctgtccatcaccagactctgagcttaataaggcagctgaatgaagggaggtaacggacccctgagaggggcactgaagtctgcagtggggggggaggggc

SEQ ID NO: 292835 - DNA, 120 bp, Artificial Sequence
  ENSG00000131446_26 (sequence is synthesized)
ctggacacaccccttcccccccagactcctccccgtcagggtcagctcagccatggactttggacctggataagaagagagaagctgcactttggtggatctgatttgggattctcagtt

SEQ ID NO: 292836 - DNA, 120 bp, Artificial Sequence
  ENSG00000131446_27 (sequence is synthesized)
ctggaaaaggaggtggcaggcagggaaagaaaggaaaagggagaatgaagagttaaggagagggctagacgggtgggaggaagcaaagttgaggaaagaaagcagatgagtgggagggaa

SEQ ID NO: 292837 - DNA, 120 bp, Artificial Sequence
  ENSG00000131446_28 (sequence is synthesized)
gagccagggacagcccaggggatgggggccaggtgggaaaggaagtccaggccacaaggtggagaggagccccggactgtgctcctgctgatcgtcctgtagagccaggaggccgcagca

SEQ ID NO: 292838 - DNA, 120 bp, Artificial Sequence
  ENSG00000131446_29 (sequence is synthesized)
ggaaagctggtgagtgtctcctgcttctgcctcctgctggctgggcaggcctggtctggggaagaaccaggtcctctgatcagggtggtccctgagtggtgctttgtgcccggtgccctc

SEQ ID NO: 292839 - DNA, 120 bp, Artificial Sequence
  ENSG00000131446_30 (sequence is synthesized)
tgctggcccaggcagtgcttattgagtgccctttatgacgtgccggggagcctcagggtacacagctgataccagggttggcctcacagtggcgcttggactcccaaacgcaaccccagt

SEQ ID NO: 292840 - DNA, 120 bp, Artificial Sequence
  ENSG00000131446_31 (sequence is synthesized)
gagagtgcctgttttgctaatacccagaacacagacagactgttacctctgcatatcacgtgcaacattctgagagtttctgttctccactaattcatttaaaagaacaaaacgcggccg

SEQ ID NO: 292841 - DNA, 120 bp, Artificial Sequence
  ENSG00000131446_32 (sequence is synthesized)
tttgggaggctgaggcggacggatcacgaagtcaggagttcgggaccatcctggccaacatggtgaaacctaaaaatactctactaaaaatacaaaaacttgctgggcatggtggcacac

SEQ ID NO: 292842 - DNA, 120 bp, Artificial Sequence
  ENSG00000131446_33 (sequence is synthesized)
ctgggcgacagagcaagactctgtctcggaaaaacaaaacgctttttgtgactcacgaacttgatttcatgagtgggtttgaaaaccctgggctagtccaggcgcggtggctcacgcctg

SEQ ID NO: 292843 - DNA, 120 bp, Artificial Sequence
  ENSG00000131446_34 (sequence is synthesized)
gcagagttgtctggggagctgtgtcgagggccgtggccttgggagcagctccaacctcccatctgggctcagaaaccagtgtcagacattggttttattttaacctttgagatttgtgtg

SEQ ID NO: 292844 - DNA, 120 bp, Artificial Sequence
  ENSG00000131446_35 (sequence is synthesized)
gagcgggttttgccttcccctgttgcttagatggattatttagccatattttttgttaaataaggggaggtggtcattatccgtgatttcagacgtggaatcggcccggcgatagctgca

SEQ ID NO: 292845 - DNA, 120 bp, Artificial Sequence
  ENSG00000131446_36 (sequence is synthesized)
ttgtgccctttccggtggagccaggaggagtttggccgccacgctccatgcgcatagcatgtcatgcagctagccaagtgcattgttctgagtgctccaggataagtaccaacttactta

SEQ ID NO: 292846 - DNA, 120 bp, Artificial Sequence
  ENSG00000131446_37 (sequence is synthesized)
gtgctccaggataagtaccaacttagtgctccaggataagtaccaacttacttagtgctccaggataagtaccaacttacttagtgctccaggataagtaccaacttacttagtgctcca

SEQ ID NO: 292847 - DNA, 120 bp, Artificial Sequence
  ENSG00000131446_38 (sequence is synthesized)
ggataagtaccaacttacttagtgctccaggataagtaccaacttacttagtgctccaggataagtaccaacttacttagtgctccaggataagtaccaacttacttgatcctcagagca

SEQ ID NO: 292848 - DNA, 120 bp, Artificial Sequence
  ENSG00000131446_39 (sequence is synthesized)
agcctaggcggtgggtactgttttgctcctgttttaccagtgaggaagcaggcacacagaggtgaagttgcccaaggtcacacagatggttgagggagagccggattggaatgaactctg

SEQ ID NO: 292849 - DNA, 120 bp, Artificial Sequence
  ENSG00000131446_40 (sequence is synthesized)
tgctgttagccactgtgtgaggctggactgttccattccagcctttacggcctcttccaggccattccccagctgcacttggattctcaggccaggcaccggcggtctcctgtgagggtg

SEQ ID NO: 292850 - DNA, 120 bp, Artificial Sequence
  ENSG00000131446_41 (sequence is synthesized)
gagaggaagagggggctgcgtggctcggggaggtccaggagagatggcgggaggagtagagtttggggcctgcggtgccagaggacccccttacaagacgaaagactgggttctcaggct

SEQ ID NO: 292851 - DNA, 120 bp, Artificial Sequence
  ENSG00000131446_42 (sequence is synthesized)
cctgaagcaaggagcaccttcaggggtctcctggtattcacccatcaaggcttgctcaggtggcatgcgtgtgtgcgtggcggctgcccccgggcccggaagcgcctgtggataccaaag

SEQ ID NO: 292852 - DNA, 120 bp, Artificial Sequence
  ENSG00000131446_43 (sequence is synthesized)
caagtggaaatgccagatggaaaagccccgtgttagtcaatgctgtagagttcagccagcctcgagtttgcaggtttacagagctgccttgcgcctggctgctgctgctgctgcattcct

SEQ ID NO: 292853 - DNA, 120 bp, Artificial Sequence
  ENSG00000131446_44 (sequence is synthesized)
gcttctgcctccagctgtgaccacctcctgccactcctgctctcactgtgggttcctgctcactctgtctccaggacagactgccttccgggcagccttccctcctcaagcctcttggcc

SEQ ID NO: 292854 - DNA, 120 bp, Artificial Sequence
  ENSG00000131446_45 (sequence is synthesized)
tttgcaatcctcttacctgggtcactggtgggatctcatttgtggatcaagtcgcccccagtggagacaaatgtctgatggagtctggccaaggccctcctgagccttcactgggccctg

SEQ ID NO: 292855 - DNA, 120 bp, Artificial Sequence
  ENSG00000131446_46 (sequence is synthesized)
catgagaagcctgccaaggctgaggggccagggaaacggagacgaagccctcagagcaggccaagagggtgggaggtggggggcatttagagggttagatacagagcacccctttacaaa

SEQ ID NO: 292856 - DNA, 120 bp, Artificial Sequence
  ENSG00000131446_47 (sequence is synthesized)
taccagctactggcttttcgtattacatgttcattttagatacaacatactgcacacgctcccttaacgtgtgtttacgcgtgggtggtgtatccttccagacgtcttcctcacatctat

SEQ ID NO: 292857 - DNA, 120 bp, Artificial Sequence
  ENSG00000131446_48 (sequence is synthesized)
acataatatgcatagataaaacatttaccaccaaaacccatagtgttatgtacatatttgtctggctgtgtaactttaaataacatacaaatgtatagaacagaagcttgccctctttct

SEQ ID NO: 292858 - DNA, 120 bp, Artificial Sequence
  ENSG00000131446_49 (sequence is synthesized)
gaaatatctaacgtgggatttcaggctttctgatgagacctctgtagaggtcagtgttttgccaccagaggtccttcagcctccatctgttctcccacctacccacattctggcccctgg

SEQ ID NO: 292859 - DNA, 120 bp, Artificial Sequence
  ENSG00000131446_50 (sequence is synthesized)
caattcacagggagtttaggaagtagacaccagggccctatttcctggagaccagcctggtggccgatgtcatagagtgcggtgggcctgggccggccctgctctgggcccgtgacctgc

SEQ ID NO: 292860 - DNA, 120 bp, Artificial Sequence
  ENSG00000131446_51 (sequence is synthesized)
gtgtctgactcgggtccagctgttcttcctgccagagcctcttcctgtgaggcgggggtaacacaaccttctgtggtggctgtgggattaatccgtatggctgcattgtgagtaaagcct

SEQ ID NO: 292861 - DNA, 120 bp, Artificial Sequence
  ENSG00000131446_52 (sequence is synthesized)
ggtggaaatctctgtctccactgctttccttttcctgctgttcaccttggctccctcgacacttaatccccctccacatgtgtctggagcgggcagagcgggggcagttgatagaaaggg

SEQ ID NO: 292862 - DNA, 120 bp, Artificial Sequence
  ENSG00000131446_53 (sequence is synthesized)
ggccgggtagtgccaaggctgttactttcccccactgcctcccttggctaacttgaagtctgaccctttataccagaactgtaagacagtgtgtcagaatggattcagttgcagagcagg

SEQ ID NO: 292863 - DNA, 120 bp, Artificial Sequence
  ENSG00000131446_54 (sequence is synthesized)
aagcctggatcccagcgccggacggaaatgagaggtcgatggtgcaggctggtgtgggggttcctccaccgtcagggcccaggctccttctcaggtctcagtctcactcttcttagcacg

SEQ ID NO: 292864 - DNA, 120 bp, Artificial Sequence
  ENSG00000131446_55 (sequence is synthesized)
aggtcaggtctcattccttggctgcgggagctccagccagcacacgttttaggaagaaggaggaaggaagaaggtaaagggtggatggcagctgcctcctcctctcttggaagctcacag

SEQ ID NO: 292865 - DNA, 120 bp, Artificial Sequence
  ENSG00000131446_56 (sequence is synthesized)
agcgctgggtcacaattccctgggtagaactggatcacacaggcacccctgtcagcaaaagaggctggaaaaagtatttctgaagctgaatcaaattaagattcctgttactaagaaggg

SEQ ID NO: 292866 - DNA, 120 bp, Artificial Sequence
  ENSG00000131446_57 (sequence is synthesized)
agtgattgtatgggcgactacagggaccacggccatacacggtgcctggaagaccaagcttgtgacagtgacgaggatttggagagggcagggtgatggggagctttggggggagtgcat

SEQ ID NO: 292867 - DNA, 120 bp, Artificial Sequence
  ENSG00000131446_58 (sequence is synthesized)
taggaaccctgacctggagaggggcagaatgaaacctgcgggcccctaaccctagtgggttgtttgagaaacctgtcctactgtggcagggggctgagtcttctcagggtcatgcatgaa

SEQ ID NO: 292868 - DNA, 120 bp, Artificial Sequence
  ENSG00000131446_59 (sequence is synthesized)
aactgaaattcctgaaggccacacacagccccggaagtgctgactgacaagggcacatgccagtgatgcagttttcttttttgtcttcacttttgttgttccgccgtcttcaacacatgg

SEQ ID NO: 292869 - DNA, 120 bp, Artificial Sequence
  ENSG00000131446_60 (sequence is synthesized)
ctcccagctcacagcaaatgctgccctggttcagctaccaggaagcaggagaggggaagggagggcaagcctcattctttatggaacaaaagcagtgggcagacagccttccctcacgtt

SEQ ID NO: 292870 - DNA, 120 bp, Artificial Sequence
  ENSG00000131446_61 (sequence is synthesized)
ccactcactggaatgtggtctggctgccttccctgcaggaggtgggatgcaccctcagtgcagcagccctgccccagccaaaaacgtctcagcacagctgtaagaagaggaagatggcta

SEQ ID NO: 292871 - DNA, 120 bp, Artificial Sequence
  ENSG00000131446_62 (sequence is synthesized)
gagacaggcagccttccctgcaagggcaatgaggcaagcctgccaaaagcctcctttggaaatactgtttgattacttttcagagtttctatttaggaaaagggcaaaacctttcaggat

SEQ ID NO: 292872 - DNA, 120 bp, Artificial Sequence
  ENSG00000131446_63 (sequence is synthesized)
caggagtaggtgagcggcgatcaggcctcactcttcaccgagggccttccctgaggaggggcctgcaggacgctggcagcggaatggggctgtgtggctgctagattaggtcatggcagg

SEQ ID NO: 292873 - DNA, 120 bp, Artificial Sequence
  ENSG00000131446_64 (sequence is synthesized)
gagacagcctcttcctggttcttgctagaacaggcacacttggggccttgagctccagggagttcatggaagacatctgactaccctgagccccttgctggagggttctggggagtggcc

SEQ ID NO: 292874 - DNA, 120 bp, Artificial Sequence
  ENSG00000131446_65 (sequence is synthesized)
cacggccaccgtcacccatggccaccgtcacccacaggggccgtgaggacatccctggccagcatctaacacaaccacatgggatgccctaagcaactactgcccagccgagggctgcct

SEQ ID NO: 292875 - DNA, 120 bp, Artificial Sequence
  ENSG00000131446_66 (sequence is synthesized)
gaatttctgactcacaaatggtgggcaatgtgaaacgggtattttaagctgctgagttctgcgggagtttgctgagcaacagtagaaaccagaactctcggatactgtgttctgtccttg

SEQ ID NO: 292876 - DNA, 120 bp, Artificial Sequence
  ENSG00000131446_67 (sequence is synthesized)
aaacggtggaagattttatgtgaccagaatggaatgtttgaacaaatattttgagaatagaattttaaaacatttactcatcagcatccaagggtggggagcagtgtcatctaggagact

SEQ ID NO: 292877 - DNA, 120 bp, Artificial Sequence
  ENSG00000131446_68 (sequence is synthesized)
ggttctattatttacgtagatgttcttgaattaaaggatgggaatattttttccttccaaaactttttttcaattttatattctgtttttcaagtttttattatgaaaatattcaaactc

SEQ ID NO: 292878 - DNA, 120 bp, Artificial Sequence
  ENSG00000131446_69 (sequence is synthesized)
acagggaagttgaaagactaatacaaagaagaaccatactctttccactgacatgatccaacgaggaatattttgccacacggcaaatatataccgtataattttctgtaccacttgata

SEQ ID NO: 292879 - DNA, 120 bp, Artificial Sequence
  ENSG00000131446_70 (sequence is synthesized)
acttgatagaaaggtaaagaatgaatattgttttttaaataacttttttcgtatataagtaatatgtgcttatcgtgtaactacctaaaaacattgaaaaataaaaggaaaataaaattc

SEQ ID NO: 292880 - DNA, 120 bp, Artificial Sequence
  ENSG00000131446_71 (sequence is synthesized)
ctgatcacatggcagcagcccttcttggggaagtcagctacccagcagcctgtagtcctcggctacccaccctcaccgcctggggtcccatggtgagacagctgggtgggcatcaggctt

SEQ ID NO: 292881 - DNA, 120 bp, Artificial Sequence
  ENSG00000131446_72 (sequence is synthesized)
ctgcagagggccaggccggagggagctgggcgagggagtggggctggctcctggcttgcaccggcctcgtggaatccaggcctcagacctgatcgctggcgaaactggctctgtgcgctg

SEQ ID NO: 292882 - DNA, 120 bp, Artificial Sequence
  ENSG00000131446_73 (sequence is synthesized)
gtgtggatggatgtgtgttgagagagagaatggatgtgtgtgtgtttacgaataaacttggaggggagggggcaacaggggtgggttttcgggctgagaaatgggaacactgtggggctg

SEQ ID NO: 292883 - DNA, 120 bp, Artificial Sequence
  ENSG00000131446_74 (sequence is synthesized)
gcctcgggcaggccgttcacgcgccggcgacggcgggcccggccgcaggtaccaacagcacctgtcagagggcagcgcgggcgcaccctgcaagggccctgcctcgtcaagagaggcagc

SEQ ID NO: 292884 - DNA, 120 bp, Artificial Sequence
  ENSG00000131446_75 (sequence is synthesized)
acgaaacaaaaccttcctccaccacggctacacagagctcgcgtccgaggaagcgggaacacacaggccccggtgctttccgaaaggcttctcgccaggacccgcgaccagcgtggggcg

SEQ ID NO: 292885 - DNA, 120 bp, Artificial Sequence
  ENSG00000131446_76 (sequence is synthesized)
gagagaagctgcactttggtggatctgatttgggattctcagttttgaaaatggagtgctgaatggggatttgatgatctcctggagagcaactgagacaagagaagaaaggtaaggctc

SEQ ID NO: 292886 - DNA, 120 bp, Artificial Sequence
  ENSG00000131446_77 (sequence is synthesized)
ctgtctcatttcccacttaatgtcttgctgtgcctgtgcagaaggtgttgagctggcgagttcgcggaggctactattcaggaaatcttatccagatgagtacactggaagctacacctc

SEQ ID NO: 292887 - DNA, 120 bp, Artificial Sequence
  ENSG00000131446_78 (sequence is synthesized)
cctgagcctggcagagagcaggtgtgtgatacacgtcgtcaggtgactgaccgaggaattcagggcaaacagatcatctcaatttgccttgctgatgtgccagctgggattacgctgatg

SEQ ID NO: 292888 - DNA, 120 bp, Artificial Sequence
  ENSG00000131446_79 (sequence is synthesized)
gcttcttcccgcgcggctccacctgccgcgcgcttccgctgctggccagtctcttctgcccctccccctcctgtacggccgctactctgcgcccggcttccttctcacaacctggttctg

SEQ ID NO: 292889 - DNA, 120 bp, Artificial Sequence
  ENSG00000131446_80 (sequence is synthesized)
cccacacctgttcttcagccctgtgaacagtggctgtagaacagtctcaggccctgcagacccacctccctcgctcccgtggtggcggtggtgacgggctggggacgttgggtagaaaaa

SEQ ID NO: 292890 - DNA, 120 bp, Artificial Sequence
  ENSG00000131446_81 (sequence is synthesized)
aggttgggaattacatctctggcacagttttgcaagcagagggggagcttagttaaaggagcaaagaatgcaagtggaagatgccagcatctcggtctggaaaggatttattaactagtt

SEQ ID NO: 292891 - DNA, 120 bp, Artificial Sequence
  ENSG00000131446_82 (sequence is synthesized)
tcagcaccctaagaagcttgggagattcgattattatgttgcgctttagacaggagggcaggagaaagggcgttcttttctcgatttcttagaagagtctccggttacttttctgtggtg

SEQ ID NO: 292892 - DNA, 120 bp, Artificial Sequence
  ENSG00000131446_83 (sequence is synthesized)
attcgtacacactctctttactcagattcacctgttaatattttgctccatttgctctctatgtgtgcagagtatgtttttgttctgaaccatttgagaagttgcatctatcctggtcct

SEQ ID NO: 292893 - DNA, 120 bp, Artificial Sequence
  ENSG00000131446_84 (sequence is synthesized)
ctacttctcaatacttcagtgtgtattacctaagaattggaattaatcagttatcactgatactttaacctactgtccatattccacctttgtcattttacccaataacgtctttttaaa

SEQ ID NO: 292894 - DNA, 120 bp, Artificial Sequence
  ENSG00000131446_85 (sequence is synthesized)
cggaagtggctgcggtggatggtgggaggggggaaggagtgcgaggggagggccgggccgctgggggtcgagggggtggggcctgggccagcgctggggatcgggcctggggcctggatt

SEQ ID NO: 292895 - DNA, 120 bp, Artificial Sequence
  ENSG00000131446_86 (sequence is synthesized)
gatgtcaggggcgtgggtcctgatcacatggcagcagcccttcttggggaagtcagctacccagcagcctgtagtcctcggctacccaccctcaccgcctggggtcccatggtgcatggc

SEQ ID NO: 292896 - DNA, 120 bp, Artificial Sequence
  ENSG00000131446_87 (sequence is synthesized)
ctctcttcgctttctttactcagaactgaagctctcattccccacccaccaaggaaaaacaaaagggaagaagccacagctggccccggcttgctttggcacaggtgcatggctgcctcc

SEQ ID NO: 292897 - DNA, 120 bp, Artificial Sequence
  ENSG00000131459_0 (sequence is synthesized)
agctggagcccgcggagcccacggagcccacggagcccacggaggagcccacggaggagccccagcgtccgaacgggcagaccccctcgagccgcgaaggagcccgagaagcagccacga

SEQ ID NO: 292898 - DNA, 120 bp, Artificial Sequence
  ENSG00000131459_1 (sequence is synthesized)
tgtgcggaatctttgcctacatgaactacagagtcccccggacgaggaaggagatcttcgaaaccctcatcaagggcctgcagcggctggagtacagaggctacgactcggcaggtgtgg

SEQ ID NO: 292899 - DNA, 120 bp, Artificial Sequence
  ENSG00000131459_2 (sequence is synthesized)
cgatcgatgggaataatcacgaagtcaaagaaagacacattcagctggtcaagaaaagggggaaagtcaaggctctcgatgaagaactttacaaacaagacagcatggacttaaaagtgg

SEQ ID NO: 292900 - DNA, 120 bp, Artificial Sequence
  ENSG00000131459_3 (sequence is synthesized)
agtttgagacacacttcggcattgcccacacgcgctgggccacccacggggtccccagtgctgtcaacagccaccctcagcgctcagacaaaggcaacgaatttgttgtcatccacaatg

SEQ ID NO: 292901 - DNA, 120 bp, Artificial Sequence
  ENSG00000131459_4 (sequence is synthesized)
ggatcatcacaaattacaaagatctgaggaaatttctggaaagcaaaggctacgagtttgagtcagaaacagatacagagaccatcgccaagctgattaaatatgtgttcgacaacagag

SEQ ID NO: 292902 - DNA, 120 bp, Artificial Sequence
  ENSG00000131459_5 (sequence is synthesized)
aaactgaggacattacgttttcaacgttggtcgagagagtcattcagcagttggaaggtgcattcgcgctggttttcaagagtgtccactacccaggagaagccgttgccacacggagag

SEQ ID NO: 292903 - DNA, 120 bp, Artificial Sequence
  ENSG00000131459_6 (sequence is synthesized)
gcagccccctgctcatcggagtccggagcaaatacaagctctccacagaacagatccctatcttatacaggacgtgcactctggagaatgtgaagaatatctgtaagacacggatgaaga

SEQ ID NO: 292904 - DNA, 120 bp, Artificial Sequence
  ENSG00000131459_7 (sequence is synthesized)
ggctggacagctccgcctgcctgcatgctgtgggcgacaaggccgtggaattcttctttgcttctgatgcaagcgctatcatagagcacaccaaccgggtcatcttcctggaggacgatg

SEQ ID NO: 292905 - DNA, 120 bp, Artificial Sequence
  ENSG00000131459_8 (sequence is synthesized)
acatcgccgcagtggctgatgggaaactctccattcaccgggtcaagcgctcggccagtgatgacccatctcgagccatccagaccttgcagatggaactgcagcaaatcatgaaaggta

SEQ ID NO: 292906 - DNA, 120 bp, Artificial Sequence
  ENSG00000131459_9 (sequence is synthesized)
acttcagtgcgtttatgcagaaggagatcttcgaacagccagaatcagttttcaatactatgagaggtcgggtgaattttgaaaccaacacagtgctcctgggtggcttgaaggaccact

SEQ ID NO: 292907 - DNA, 120 bp, Artificial Sequence
  ENSG00000131459_10 (sequence is synthesized)
tgaaggagattcgacgatgccgacggctcatcgtgattggctgtggaaccagctaccacgctgccgtggctacgcggcaagttttggaggaactgactgagcttcctgtgatggttgaac

SEQ ID NO: 292908 - DNA, 120 bp, Artificial Sequence
  ENSG00000131459_11 (sequence is synthesized)
ttgctagtgattttctggacaggaacacacctgtgttcagggatgacgtttgctttttcatcagccagtcaggcgagaccgcggacaccctcctggcgctgcgctactgtaaggaccgcg

SEQ ID NO: 292909 - DNA, 120 bp, Artificial Sequence
  ENSG00000131459_12 (sequence is synthesized)
cagctccatctctcgcgagaccgactgcggcgtccacatcaacgcagggccggagatcggcgtggccagcaccaaggcttataccagtcagttcatctctctggtgatgtttggtttgat

SEQ ID NO: 292910 - DNA, 120 bp, Artificial Sequence
  ENSG00000131459_13 (sequence is synthesized)
gatgtctgaagaccgaatttcactacaaaacaggaggcaagagatcatccgtggcttgagatctttacctgagctgatcaaggaagtgctgtctctggaggagaagatccacgacttggc

SEQ ID NO: 292911 - DNA, 120 bp, Artificial Sequence
  ENSG00000131459_14 (sequence is synthesized)
cctggagctctacacgcagagatcgctgctggtgatggggcggggctacaactatgccacctgcctggaaggagccctgaaaattaaagagataacctacatgcactcagaaggcatcct

SEQ ID NO: 292912 - DNA, 120 bp, Artificial Sequence
  ENSG00000131459_15 (sequence is synthesized)
ggctggggagctgaagcacgggcccctggcactgattgacaagcagatgcccgtcatcatggtcattatgaaggatccttgcttcgccaaatgccagaacgccctgcagcaagtcacggc

SEQ ID NO: 292913 - DNA, 120 bp, Artificial Sequence
  ENSG00000131459_16 (sequence is synthesized)
ccgccagggtcgccccattatactgtgctccaaggacgatactgaaagttccaagtttgcgtataagacaattgagctgccccacactgtggactgcctccagggcatcctgagcgtgat

SEQ ID NO: 292914 - DNA, 120 bp, Artificial Sequence
  ENSG00000131459_17 (sequence is synthesized)
tccgctgcagctgctgtccttccacctggctgttctccgaggatatgacgttgacttccccagaaatctggccaagtctgtaactgtggaatgaggctgagaccgtgacaagaccatcac

SEQ ID NO: 292915 - DNA, 120 bp, Artificial Sequence
  ENSG00000131459_18 (sequence is synthesized)
cacctttcatctgattccagacctgtcccaacagcagggatgctacatgggaagagaagtggacatcccacatgttctgcgtgctcctgtagagcttgacagcttccacgtgccttctac

SEQ ID NO: 292916 - DNA, 120 bp, Artificial Sequence
  ENSG00000131459_19 (sequence is synthesized)
ccaagtgcttttgcttacagcagatactgtttctctgtgtcctgaagtcgccagaggagaagggaatcattgtttacacatggggatcagagcagacttctccactactgtgcaatagag

SEQ ID NO: 292917 - DNA, 120 bp, Artificial Sequence
  ENSG00000131459_20 (sequence is synthesized)
atacagctctcttcagagtaactgtgaaccttttataaccaacactagagttagttttaaaagacaagatatttataatgacgactgtatagcttttaagttatttttctagtatgtggc

SEQ ID NO: 292918 - DNA, 120 bp, Artificial Sequence
  ENSG00000131459_21 (sequence is synthesized)
tttctgtagccgtggtaacggccaaactgttcatcctagctacccatgctctgtgtccaggcttgctcctggcaggtggcattcatctcagatgtgagcacaaggcattggccctctgga

SEQ ID NO: 292919 - DNA, 120 bp, Artificial Sequence
  ENSG00000131459_22 (sequence is synthesized)
ctcctttctccttttctttcctctctaggctgctcctgaatcctgttctctgacatccgtggagcccctcctgcatccacctatgcctcctataagtccagttgaaatctcagcctcctt

SEQ ID NO: 292920 - DNA, 120 bp, Artificial Sequence
  ENSG00000131459_23 (sequence is synthesized)
caacattttcttctcgtgtgtggcccacatccctccacttctccaacttctgtttaatctgatcacggctctttttaagccctggcagcattttggtccctgctccttgcccatagtaaa

SEQ ID NO: 292921 - DNA, 120 bp, Artificial Sequence
  ENSG00000131459_24 (sequence is synthesized)
acagcttgaaatatcccatgcaagagagtagtttcaagtgggcaactctgctctctatttaaaagcgtgcacaatcaaaagtactatgcaattttaggacaataaagaacatacagtttt

SEQ ID NO: 292922 - DNA, 120 bp, Artificial Sequence
  ENSG00000131459_25 (sequence is synthesized)
aaatgcttttgcagtggtactgtgctattgggggatcttttacacgatttggctgacacagccaaagctaaaaattgcaaatttctcccacacatattcagaggggaaattggttccttg

SEQ ID NO: 292923 - DNA, 120 bp, Artificial Sequence
  ENSG00000131459_26 (sequence is synthesized)
aagtcactccaagggcagatcaccagggaggagagggagttggccaggcaggcattgtgcaatgaccaatctctcacactgtgccgactgcatattccaggaaagcaaaggctacgagtt

SEQ ID NO: 292924 - DNA, 120 bp, Artificial Sequence
  ENSG00000131459_27 (sequence is synthesized)
ccgtgctgtaaaaccgggcttcgcagggtatgggatggtttattttaggtggtggcggcgcatggataatttttttaagtgtgaagggttacatacagtagttattttaattattccagc

SEQ ID NO: 292925 - DNA, 120 bp, Artificial Sequence
  ENSG00000131459_28 (sequence is synthesized)
aaatgatactgcttctctgtttatggtagggatatatcattttctttttaaagcaagtttatttctgtgaagaagtgagctaagctacagacaagtagtaaataaccttcagcacgggtg

SEQ ID NO: 292926 - DNA, 120 bp, Artificial Sequence
  ENSG00000131459_29 (sequence is synthesized)
gtttgtgggcctgcgcggactcccagggtgggagctggtggggaggtgccatcggtgtgggtgacgtgacttgggtaacgacaccaggttgcactcacagtcctgggtcgaggcttgttg

SEQ ID NO: 292927 - DNA, 120 bp, Artificial Sequence
  ENSG00000131459_30 (sequence is synthesized)
ttcaagtgcggcaaactgattttcctttcatttagaacaagacagcatggacttaaaagtggagtttgagacacacttcggcattgcccacacgcgctgggccacccacggggtccccag

SEQ ID NO: 292928 - DNA, 120 bp, Artificial Sequence
  ENSG00000131459_31 (sequence is synthesized)
ggagctcctgacactctgcctggtcctagtagaggccacagccctcctgccctctgtggccaccagggcggggctgcaggtagcctgtggcttgcacaggtgaggggatgtggggaggct

SEQ ID NO: 292929 - DNA, 120 bp, Artificial Sequence
  ENSG00000131459_32 (sequence is synthesized)
taacagaggggtccccaccccatgccgaccgaggtcgctctcctccacgtctcccagtcgcccacaaaggcggccacgcgcaggccggcgcatcccgagtgcggggcgcccatcccgact

SEQ ID NO: 292930 - DNA, 120 bp, Artificial Sequence
  ENSG00000131459_33 (sequence is synthesized)
cccaccgaggagaggagaggcgaccccgccccgccgtccccgcagcccgcccggtcgcccccgctgcgtcagtgcctcaggcagggcctgcgcgtcctcctcgcgaccccaaaggaacgt

SEQ ID NO: 292931 - DNA, 120 bp, Artificial Sequence
  ENSG00000131459_34 (sequence is synthesized)
gcagtcactgcccgaacctcggcccgaagccacgagagggagtccggggcggggagcggggccgggcgtccgattcccgcggcgctcccgcgctgtcccgcgtggctgcgggaccgtggg

SEQ ID NO: 292932 - DNA, 120 bp, Artificial Sequence
  ENSG00000131459_35 (sequence is synthesized)
ggcccggagcgcacatctgcaattctttactctcctggctgggccgcctccgctggccgggagagagccgggaacttctgctgggacaaaaggaatctttgcctacatgaactacagagt

SEQ ID NO: 292933 - DNA, 120 bp, Artificial Sequence
  ENSG00000131459_36 (sequence is synthesized)
gatcatcacaaattacaaagatctgaggaaatttctggtaagatgcttcccctaggtgatgtctcagtccggtgggattggtctccccagaaactttccagccagctcatttccttgcgg

SEQ ID NO: 292934 - DNA, 120 bp, Artificial Sequence
  ENSG00000131462_0 (sequence is synthesized)
ggcgtgcggcgccgttgcgggcgggagcggctgcaacgccggtgcctgaggagcgatgccgagggaaatcatcaccctacagttgggccagtgcggcaatcagattgggttcgagttctg

SEQ ID NO: 292935 - DNA, 120 bp, Artificial Sequence
  ENSG00000131462_1 (sequence is synthesized)
gaaacagctgtgcgccgagcatggtatcagccccgagggcatcgtggaggagttcgccaccgagggcactgaccgcaaggacgtctttttctaccaggcagacgatgagcactacatccc

SEQ ID NO: 292936 - DNA, 120 bp, Artificial Sequence
  ENSG00000131462_2 (sequence is synthesized)
ccgggccgtgctgctggacttggaaccccgggtgatccactccatcctcaactccccctatgccaagctctacaacccagagaacatctacctgtcggaacatggaggaggagctggcaa

SEQ ID NO: 292937 - DNA, 120 bp, Artificial Sequence
  ENSG00000131462_3 (sequence is synthesized)
caactgggccagcggattctcccagggagaaaagatccatgaggacatttttgacatcatagaccgggaggcagatggtagtgacagtctagagggctttgtgctgtgtcactccattgc

SEQ ID NO: 292938 - DNA, 120 bp, Artificial Sequence
  ENSG00000131462_4 (sequence is synthesized)
tggggggacaggctctggactgggttcctacctcttagaacggctgaatgacaggtatcctaagaagctggtgcagacatactcagtgtttcccaaccaggacgagatgagcgatgtggt

SEQ ID NO: 292939 - DNA, 120 bp, Artificial Sequence
  ENSG00000131462_5 (sequence is synthesized)
ggtccagccttacaattcactcctcacactcaagaggctgacgcagaatgcagactgtgtggtggtgctggacaacacagccctgaaccggattgccacagaccgcctgcacatccagaa

SEQ ID NO: 292940 - DNA, 120 bp, Artificial Sequence
  ENSG00000131462_6 (sequence is synthesized)
cagcaccaccaccctgcgctaccctggctacatgaacaatgacctcatcggcctcatcgcctcgctcattcccaccccacggctccacttcctcatgaccggctacacccctctcactac

SEQ ID NO: 292941 - DNA, 120 bp, Artificial Sequence
  ENSG00000131462_7 (sequence is synthesized)
ggaccagtcagtggccagcgtgaggaagaccacggtcctggatgtcatgaggcggctgctgcagcccaagaacgtgatggtgtccacaggccgagaccgccagaccaaccactgctacat

SEQ ID NO: 292942 - DNA, 120 bp, Artificial Sequence
  ENSG00000131462_8 (sequence is synthesized)
cgccatcctcaacatcatccagggagaggtggaccccacccaggtccacaagagcttgcagaggatccgggaacgcaagttggccaacttcatcccgtggggccccgccagcatccaggt

SEQ ID NO: 292943 - DNA, 120 bp, Artificial Sequence
  ENSG00000131462_9 (sequence is synthesized)
ggccctgtcgaggaagtctccctacctgccctcggcccaccgggtcagcgggctcatgatggccaaccacaccagcatctcctcgctcttcgagagaacctgtcgccagtatgacaagct

SEQ ID NO: 292944 - DNA, 120 bp, Artificial Sequence
  ENSG00000131462_10 (sequence is synthesized)
gcgtaagcgggaggccttcctggagcagttccgcaaggaggacatgttcaaggacaactttgatgagatggacacatccagggagattgtgcagcagctcatcgatgagtaccatgcggc

SEQ ID NO: 292945 - DNA, 120 bp, Artificial Sequence
  ENSG00000131462_11 (sequence is synthesized)
cacacggccagactacatctcctggggcacccaggagcagtgagtcccccaggacagggaccctcatctgccttactggttggcccaagccctgcctgactgaccaccccctcagagcac

SEQ ID NO: 292946 - DNA, 120 bp, Artificial Sequence
  ENSG00000131462_12 (sequence is synthesized)
agatcagggacctcacgcatctctttctcatatacatggactctctgttggcctgcaaacacatttacttctcctcttatgagactatttatctttaataaagcactggatataaatcaa

SEQ ID NO: 292947 - DNA, 120 bp, Artificial Sequence
  ENSG00000131462_13 (sequence is synthesized)
agtgtcccaggaatgctggtaggagccgacatgggcaaggcttggcagcaccctctagaagcgacctgttaggaacaagacccactcatgtaccctttgcactggacagaagctatcagg

SEQ ID NO: 292948 - DNA, 120 bp, Artificial Sequence
  ENSG00000131462_14 (sequence is synthesized)
tcgtttcctattccctggcagggcccacaactcgctgggtagggacaggctctatgacgtcccgaagagagggaaaaccggatcagggatgtatgaatgctggagggagagacctggctg

SEQ ID NO: 292949 - DNA, 120 bp, Artificial Sequence
  ENSG00000131462_15 (sequence is synthesized)
catatattaatttttctaaatctcccaacaaccctagaagtaagtactacaggtccacagtcccttatctgcctttccaggatccagaaagccatgaaaccaaaggacatttcataacta

SEQ ID NO: 292950 - DNA, 90 bp, Artificial Sequence
  ENSG00000131462_16 (sequence is synthesized)
gatccagaaagccatgaaaccaaaggacatttcataactagtttatcagcaaaaacaaatttcaatgaagacaggctgttttatagtttc

SEQ ID NO: 292951 - DNA, 120 bp, Artificial Sequence
  ENSG00000131467_0 (sequence is synthesized)
gcagtttccggcgtgagcggcgaaagccgggagggcgagcgagagagcaagcaggcagcaggctgccggcgggcgggcggacggcacagagggagggagcgagcgagcagtgagtaagcc

SEQ ID NO: 292952 - DNA, 120 bp, Artificial Sequence
  ENSG00000131467_1 (sequence is synthesized)
agcaagggcggtcgggtcccgaggtcagccgagatttctcaggtccctccggccccctccctggagtccacagcgcctccggtgtccagaggatcggacacggcccggcccggccatggc

SEQ ID NO: 292953 - DNA, 120 bp, Artificial Sequence
  ENSG00000131467_2 (sequence is synthesized)
ctcgttgctgaaggtggatcaggaagtgaagctcaaggttgattctttcagggagcggatcacaagtgaggcagaagacttggtggcaaattttttcccaaagaagttattagaacttga

SEQ ID NO: 292954 - DNA, 120 bp, Artificial Sequence
  ENSG00000131467_3 (sequence is synthesized)
tagttttctgaaggaaccaatcttaaacatccatgacctaactcagatccactctgacatgaatctcccagtccctgaccccattcttctcaccaatagccatgatggactggatggtcc

SEQ ID NO: 292955 - DNA, 120 bp, Artificial Sequence
  ENSG00000131467_4 (sequence is synthesized)
cacttataagaagcgaaggttggatgagtgtgaagaagccttccaaggaaccaaggtgtttgtgatgcccaatgggatgctgaaaagcaaccagcagctggtggacattattgagaaagt

SEQ ID NO: 292956 - DNA, 120 bp, Artificial Sequence
  ENSG00000131467_5 (sequence is synthesized)
gaaacctgagatccggctgttgattgagaaatgtaacacggtcaaaatgtgggtacagctcctgattcccaggatagaagatggaaacaactttggggtgtccattcaggaggaaacagt

SEQ ID NO: 292957 - DNA, 120 bp, Artificial Sequence
  ENSG00000131467_6 (sequence is synthesized)
tgcagagctaagaactgttgagagtgaagctgcatcttatctggaccagatttctagatattatattacaagagccaaattggtttctaaaatagctaaatatccccatgtggaggacta

SEQ ID NO: 292958 - DNA, 120 bp, Artificial Sequence
  ENSG00000131467_7 (sequence is synthesized)
tcgccgcaccgtgacagagattgatgagaaagaatatatcagccttcggctcatcatatcagagctgaggaatcaatatgtcactctacatgacatgatcctgaaaaatatcgagaagat

SEQ ID NO: 292959 - DNA, 120 bp, Artificial Sequence
  ENSG00000131467_8 (sequence is synthesized)
caaacggccccggagcagcaatgcagagactctgtactgaggccagggccagggccaggggactctgtgagtctggctcaagaccgacattgccttggtttgttacatgactatcgtgat

SEQ ID NO: 292960 - DNA, 120 bp, Artificial Sequence
  ENSG00000131467_9 (sequence is synthesized)
ggggaaactggctggaaatagtaatcacacctctctgtttttagttagagtctaatgaaactctcatctagttctgtgatgtgtttacctcttttttcaggcctcaggaactcttctatt

SEQ ID NO: 292961 - DNA, 120 bp, Artificial Sequence
  ENSG00000131467_10 (sequence is synthesized)
tccttccctaataccccacacccaacctgtcgtaatttctggagaactccaggtttgtgtgtgcaggatgttggcacaaaaatacctgtgttttcattctccccctctctccctcctgtg

SEQ ID NO: 292962 - DNA, 120 bp, Artificial Sequence
  ENSG00000131467_11 (sequence is synthesized)
tcttgcgctttatgttttcttccgtttgataattagttggttaaaagctgagggaaccggaaggaaagtgctaggtgttttttaggaactagggtggcggggggacgaacttctcttcct

SEQ ID NO: 292963 - DNA, 120 bp, Artificial Sequence
  ENSG00000131467_12 (sequence is synthesized)
cacatgaggttactgtttctttcctctgtggggcattggatcctcccacagttgccctggtgatgacttagggcttcccatctgtgtacatcccactttgaatcttgatcgtgacaagaa

SEQ ID NO: 292964 - DNA, 120 bp, Artificial Sequence
  ENSG00000131467_13 (sequence is synthesized)
catgcacatatgtgtatgcatgtatacgcccatacagacatgcacacacagactcctactccattagctaacataccctccctctccacaacccctgtcacatacctttcaggaggtgac

SEQ ID NO: 292965 - DNA, 120 bp, Artificial Sequence
  ENSG00000131467_14 (sequence is synthesized)
agttgtcttagttgtcatctacccagacaaacgtcctgggcccgtcctccctcctgatactgtagcctcttggtacccagggtgagttggtggagaacagagagatgagaagcagagggc

SEQ ID NO: 292966 - DNA, 120 bp, Artificial Sequence
  ENSG00000131467_15 (sequence is synthesized)
ttggggaaagcctgttcctctctgactcagccctttttggcattattgcaagagcttgactcctggttgccttttcccagccagttttcagttggggtgaaggtttctgcaagtgtgagg

SEQ ID NO: 292967 - DNA, 120 bp, Artificial Sequence
  ENSG00000131467_16 (sequence is synthesized)
tccagatgctgctgctcatgttgggctttccttttgggaactatttctctttatttatagtgtcgggcttccggggaaagcaatcattggtgtgtatgtgtatgtgcatgcacacacgtg

SEQ ID NO: 292968 - DNA, 120 bp, Artificial Sequence
  ENSG00000131467_17 (sequence is synthesized)
catatacacatttgtgtatgtggaaatgtgctgggcaagtcaaaactatagaagagttgcctcctgtctctcgaatcttccagagatatcacttaattgttaacagcttttgtgttaatc

SEQ ID NO: 292969 - DNA, 120 bp, Artificial Sequence
  ENSG00000131467_18 (sequence is synthesized)
cccttcagcccctagctcttttattctaccacggctggagagttgatacctgcagtcagcctgccagtgactcttagtgtctgtttctgacttatttttcctgtctctgtcttccaaccc

SEQ ID NO: 292970 - DNA, 120 bp, Artificial Sequence
  ENSG00000131467_19 (sequence is synthesized)
ccaataatatttccaccggggatgcatcatttttactcccaatattctgtagagagggagtcaggatgctgtcttcccacgaatagtactcagtaacaaaccaattgcattttagttggg

SEQ ID NO: 292971 - DNA, 120 bp, Artificial Sequence
  ENSG00000131467_20 (sequence is synthesized)
cagtgctcccacccaccctccagatcccttccagctaaaacccttcccccttccctccatgtgtttctcagtttcccgtttcgtttgttggactgttccactgcccctcctcctcaccct

SEQ ID NO: 292972 - DNA, 120 bp, Artificial Sequence
  ENSG00000131467_21 (sequence is synthesized)
atcacccatggatcgtaatgtaaaattcttttaccatgtcaagaaattattaaaaatacaggtactttgacctctttctaaagccgcagaccctggtgcaatgctctggtggctagggat

SEQ ID NO: 292973 - DNA, 120 bp, Artificial Sequence
  ENSG00000131467_22 (sequence is synthesized)
gtactcatgctcatatgtgtgcacgcttggacacccacctccatggacacctagccaccctgttgtgtgtccttatgccagttgagctgaatcttttccccagtatagtggaaagactga

SEQ ID NO: 292974 - DNA, 120 bp, Artificial Sequence
  ENSG00000131467_23 (sequence is synthesized)
ggcttctgcctactgagcaaggttgggtgcttcatttgtgttcagtctgaattatgggaaagttagctcttcccagacctaagctgccttctctccctactttcagaagatcctagttcc

SEQ ID NO: 292975 - DNA, 120 bp, Artificial Sequence
  ENSG00000131467_24 (sequence is synthesized)
ttccttcccgagtgatacccatgaactgccagtagaggctgctatcgttccatgtgtaaggaatgaactggttcaaggcgcgtcctacccagtcattttctttaccttatactaattctt

SEQ ID NO: 292976 - DNA, 120 bp, Artificial Sequence
  ENSG00000131467_25 (sequence is synthesized)
cctgaataatgtcttcagtttcttgaggagactcctagttttggttttcaaattacttggagggctgcctaggaatctatctccctctgaaataaagtttcctcatcttccaccttgcaa

SEQ ID NO: 292977 - DNA, 120 bp, Artificial Sequence
  ENSG00000131467_26 (sequence is synthesized)
ggaagtgaagctcaagctctgagcttccgctcggctcagcccagcccccaactcccggggtcggcttcgcgggagaggaaaatataggatggctttctgtaccgcgtctgatgatggaga

SEQ ID NO: 292978 - DNA, 120 bp, Artificial Sequence
  ENSG00000131467_27 (sequence is synthesized)
gtcccggggacacctccgcggacacgtgttggactcagggctttaggcccgtgacagctgacagcttcagacacaggaggaagggagggaagggggaggacagaggagacaggcaggtgc

SEQ ID NO: 292979 - DNA, 120 bp, Artificial Sequence
  ENSG00000131467_28 (sequence is synthesized)
tgtcctcaaagccctgcgttcttctgagatggaaaaatggatcctcaaaaaaataaagtatttgcagtctgggggcctctcagcttcttattacagttacaaggttgattctttcaggga

SEQ ID NO: 292980 - DNA, 120 bp, Artificial Sequence
  ENSG00000131467_29 (sequence is synthesized)
ggagtgcagcggctgagaaggtcccttcggtgaaggcgagttccgggacaacagagagggccgcaccgtttccgagtctctcggaggctcagttctcagcgcaccattccccacagctct

SEQ ID NO: 292981 - DNA, 120 bp, Artificial Sequence
  ENSG00000131467_30 (sequence is synthesized)
cctttttactttacccctacccgacacttgaccccggcagtgtgaaccccgctgggagcgtccaaagccatgcctcatcgcggctgcgcagcgcacgtgcacagcctcgcaggagtctcg

SEQ ID NO: 292982 - DNA, 83 bp, Artificial Sequence
  ENSG00000131467_31 (sequence is synthesized)
aagtgtaggagccaaggccgcagagaatggggaggctccgctattctctaaattcagggggcgggggaggccgaggagggcgg

SEQ ID NO: 292983 - DNA, 73 bp, Artificial Sequence
  ENSG00000131467_32 (sequence is synthesized)
tggagtgaagcggaacaaacaaacatggctcactgcagatttgacttcctggctcaagcaatcctcttgcttc

SEQ ID NO: 292984 - DNA, 120 bp, Artificial Sequence
  ENSG00000131467_33 (sequence is synthesized)
tgcagatttgacttcctggctcaagcaatcctcttgcttcaacctccagtgtagcagggaccacagcatgaaagcccctttaggggaggtgactggaatcatccccaaagaattctcacc

SEQ ID NO: 292985 - DNA, 120 bp, Artificial Sequence
  ENSG00000131467_34 (sequence is synthesized)
tagtcctggtgtggctgcttcatagtcctgcgtttcttcctgcttggctgtccctaacatctcagaaacgcatagagaagtaacgggcttctagagaggttgattctttcagggagcgga

SEQ ID NO: 292986 - DNA, 120 bp, Artificial Sequence
  ENSG00000131467_35 (sequence is synthesized)
aaaagcagcgggcttcagcggatgaacaaggctggagtgaagcggaacaaacaaacatggctcactgcagatttgacttcctggctcaagcaatcctcttgcttcaacctccagtgtagc

SEQ ID NO: 292987 - DNA, 120 bp, Artificial Sequence
  ENSG00000131467_36 (sequence is synthesized)
gcttatttttcttgatgacttatactgcttagaaagttattcccacctccagaagtgtctttcttttcttttaaatcatgaaagcccctttaggggaggtgactggaatcatccccaaag

SEQ ID NO: 292988 - DNA, 120 bp, Artificial Sequence
  ENSG00000131467_37 (sequence is synthesized)
agtttccggcgtgagcggcgaaagccgggagggcgagcgagagagcaagcaggcagcaggctgccggcgggcgggcggacggcacagagggagggagcgagcgagcagttgattctttca

SEQ ID NO: 292989 - DNA, 120 bp, Artificial Sequence
  ENSG00000131467_38 (sequence is synthesized)
gaagtgaagctcaaggtagcggcaccggtccggcctttttgcccctcgctttgatcccccagcagtctgaccggcttcctactccccatggcgtctttgtctccctggggataccagctc

SEQ ID NO: 292990 - DNA, 120 bp, Artificial Sequence
  ENSG00000131467_39 (sequence is synthesized)
atttctaggtagggctgcttgggcttggccgaggcgttgggggctgatgaggtggtgggcaccatcaagggtctcctgcatcttcctcctcttctctctctttccagatattatattaca

SEQ ID NO: 292991 - DNA, 120 bp, Artificial Sequence
  ENSG00000131467_40 (sequence is synthesized)
acctccgcggacacgtgttggactcagggctttaggcccgtgacagctggtaatcccccagcccaacaacgtccctggacactgcccctgcccttggcggctggcctgcctagtatcata

SEQ ID NO: 292992 - DNA, 120 bp, Artificial Sequence
  ENSG00000131469_0 (sequence is synthesized)
agcggaagtgtccttctttcctttttgctggtagggccgggtggttgctgccgaaatgggcaagttcatgaaacctgggaaggtggtgcttgtcctggctggacgctactccggacgcaa

SEQ ID NO: 292993 - DNA, 120 bp, Artificial Sequence
  ENSG00000131469_1 (sequence is synthesized)
agctgtcatcgtgaagaacattgatgatggcacctcagatcgcccctacagccatgctctggtggctggaattgaccgctacccccgcaaagtgacagctgccatgggcaagaagaagat

SEQ ID NO: 292994 - DNA, 120 bp, Artificial Sequence
  ENSG00000131469_2 (sequence is synthesized)
tttgtgaaagtgtataactacaatcacctaatgcccacaaggtactctgtggatatccccttggacaaaactgtcgtcaataaggatgtcttcagagatcctgctcttaaacgcaaggcc

SEQ ID NO: 292995 - DNA, 120 bp, Artificial Sequence
  ENSG00000131469_3 (sequence is synthesized)
cgacgggaggccaaggtcaagtttgaagagagatacaagacaggcaagaacaagtggttcttccagaaactgcggttttagatgctttgttttgatcattaaaaattataaagaaaaaaa

SEQ ID NO: 292996 - DNA, 120 bp, Artificial Sequence
  ENSG00000131469_4 (sequence is synthesized)
attcgaatacttgagctgccgcgccctgcgtttccctcatgagcttcttccgcccgcaacacgagactcagcaccacacaatcagcgtggcaaagcctgaagggcgggacaggaagtgag

SEQ ID NO: 292997 - DNA, 120 bp, Artificial Sequence
  ENSG00000131469_5 (sequence is synthesized)
ggtaagtagaagcttgggttgaatctttcaatccgctgccatccgcggcttgggggtcgaaggtccgggcggcgccgggtgcattccttccctaggtctctggcggctacgtatccgatc

SEQ ID NO: 292998 - DNA, 120 bp, Artificial Sequence
  ENSG00000131469_6 (sequence is synthesized)
ctgtcctgcgagcagggccctcgggcggccttgaccaaggcgacagtgaacacagtctgaagttccggcccaagacctgggcttgctggcaggagtcagctctgggcatctttggcttta

SEQ ID NO: 292999 - DNA, 120 bp, Artificial Sequence
  ENSG00000131469_7 (sequence is synthesized)
gaaggtggtgcttgtcctggctggacgctactccggacgcaaagctgtcatcgtgaagacgggatctctgtccaggctaagtgcagtggcgtgatcactgcagcctcgacctcccgggct

SEQ ID NO: 293000 - DNA, 120 bp, Artificial Sequence
  ENSG00000131469_8 (sequence is synthesized)
gcttggaattcaaggcctgtttctggggcagtagccagtgagcacggtcagggtgaacgtgggagagtttttgagagaggaagaagcacagtaaaagcaaatgtgagctgaattgggctc

SEQ ID NO: 293001 - DNA, 120 bp, Artificial Sequence
  ENSG00000131469_9 (sequence is synthesized)
ccaacgcataaagccttctccaccagaggctttaaatatatagtaatagtggctgacattgcacgcttgctatgtgctcccactgcctttcaggtattgtcatgtgcagtccttgaagta

SEQ ID NO: 293002 - DNA, 89 bp, Artificial Sequence
  ENSG00000131469_10 (sequence is synthesized)
cttttcttttttttttttttgagacgggatctctgtccaggctaagtgcagtggcgtgagagtctcccatctcagcctctcgagtggct

SEQ ID NO: 293003 - DNA, 120 bp, Artificial Sequence
  ENSG00000131469_11 (sequence is synthesized)
tgttgctaaggtttggaggtgttctgttatttacctgaagtgctgcagctgggaatctgtaagaagaggaggaaattgcttttagaaaggtcacatagcccctcactgttttcctcttat

SEQ ID NO: 293004 - DNA, 120 bp, Artificial Sequence
  ENSG00000131469_12 (sequence is synthesized)
ccatgattttgtagcttcttgagagagttccctaggctctggccacatacaccactgcgttttgttgttgtggggacactggagtacccctggattcccctctcccatctcctgagactg

SEQ ID NO: 293005 - DNA, 120 bp, Artificial Sequence
  ENSG00000131469_13 (sequence is synthesized)
atctctggagttaggctgtggtgtcttaaccttggctgtacacttcactagcagtggagcaagtgaatagataccaagtcctgtgagcagtgcttggcatatagcaagtacttcttaaat

SEQ ID NO: 293006 - DNA, 120 bp, Artificial Sequence
  ENSG00000131469_14 (sequence is synthesized)
gttaactgttgctacttttaaatctcttacctctagtaagccgttccagatgcttcctgatggagataaacactgttctgtttctctttggtcatttctcatagctttctgtgatttttc

SEQ ID NO: 293007 - DNA, 120 bp, Artificial Sequence
  ENSG00000131469_15 (sequence is synthesized)
tctttataatggtggatcttggagacctgagggtggaaatattttttggacactgcactacctctaacacagggcctaaataggccctcagtgaataacaaatgtaattcttactcattt

SEQ ID NO: 293008 - DNA, 120 bp, Artificial Sequence
  ENSG00000131470_0 (sequence is synthesized)
cttccccttcagccaatcaccgttcgaggcccgcccccgtcgccggaaggagccgtcgccccgagcaactacaacgtccggctttctgagttgggtggcgggaaaggcgatgagtaaagg

SEQ ID NO: 293009 - DNA, 120 bp, Artificial Sequence
  ENSG00000131470_1 (sequence is synthesized)
ccgggcagaagctgcggcgggagccgccgggatcctcctgaggtacctgcaggagcagaaccggccctacagctcccaggatgtgttcgggaacctacagcgggaacacggactgggcaa

SEQ ID NO: 293010 - DNA, 120 bp, Artificial Sequence
  ENSG00000131470_2 (sequence is synthesized)
ggcggtggtggtgaagacgctggagcagctggcgcaacaaggcaagatcaaagagaagatgtacggcaagcagaagatctattttgcggatcaggaccagtttgacatggtgagtgatgc

SEQ ID NO: 293011 - DNA, 120 bp, Artificial Sequence
  ENSG00000131470_3 (sequence is synthesized)
tgaccttcaagtcctagatggcaaaatcgtggccctcactgctaaggtgcagagcttgcagcagagctgccgctacatggaggctgagctcaaggaattatctagtgccctgaccacacc

SEQ ID NO: 293012 - DNA, 120 bp, Artificial Sequence
  ENSG00000131470_4 (sequence is synthesized)
agagatgcagaaagaaatccaggagttaaagaaggaatgcgctggctacagagagagattgaagaacattaaagcagctaccaatcatgtgactccagaagagaaagagcaggtgtacag

SEQ ID NO: 293013 - DNA, 120 bp, Artificial Sequence
  ENSG00000131470_5 (sequence is synthesized)
gcagttctttgaggaagttgggatagagacggatgaagattacaacgtcacactcccagacccctgaggggcccacggtcaggactggtggggactgcaggatgtcagaagagtgagatg

SEQ ID NO: 293014 - DNA, 120 bp, Artificial Sequence
  ENSG00000131470_6 (sequence is synthesized)
tcttgcactggctaccttgtttttggttggcttttgttgttgttcctgctactttcacctttaagcagagcagtcaggagacaagcataaaccagagcactgggtagagaggatgagggc

SEQ ID NO: 293015 - DNA, 120 bp, Artificial Sequence
  ENSG00000131470_7 (sequence is synthesized)
tggtggctgggggtagacccagcccatttcattgtctaaattgcagtagcttgaggttaacatttagacttggaacaatgctaaaggaaagcatttggcaatatttattataatttaatt

SEQ ID NO: 293016 - DNA, 120 bp, Artificial Sequence
  ENSG00000131470_8 (sequence is synthesized)
ttatataaaaatatttaatttcctctggatagtcaaacctgccagatatcaaacctgaggaaggcagaagtgaatttggagaactagggtagagagaggttgctataaaacgagcatttg

SEQ ID NO: 293017 - DNA, 120 bp, Artificial Sequence
  ENSG00000131470_9 (sequence is synthesized)
gagggcccacggcttcactcaggacctgctgggcttgtgtaccccaggagcccttttaagtatcttttgtacgcttttcaccccacccccaagtcctgggagaaatgcaggcaacactga

SEQ ID NO: 293018 - DNA, 120 bp, Artificial Sequence
  ENSG00000131470_10 (sequence is synthesized)
gacatgggagaggccaagatatgcttgacagaaagggtgattttgaggctcagttaatatttcaaaattgtaaccgtagcaaaactgcattggtatttagaaaaataaaaaatttccaat

SEQ ID NO: 293019 - DNA, 120 bp, Artificial Sequence
  ENSG00000131470_11 (sequence is synthesized)
cgggaaaggcgatgagtaaaggccgggcagaagctgcggcgggaggtaacggcgccgtgggcgcggggaagacccgggagggcagtgggtgaggaggtcggttgagtggccccctcccct

SEQ ID NO: 293020 - DNA, 120 bp, Artificial Sequence
  ENSG00000131470_12 (sequence is synthesized)
tcccttaggcataaaaagaaatgtaggataactaacggcttttgtgtaccaacaaatggacaagatacgcatttgttctccctgccacgattatcagtacactgtccccacgtttccctt

SEQ ID NO: 293021 - DNA, 120 bp, Artificial Sequence
  ENSG00000131470_13 (sequence is synthesized)
agatttacaatatgatggatgacagaagattctgtattgttgctaccaagatccatttccgctccaaagctcttattccttatcatctacattagcaacaccctctgccaaatgatgttc

SEQ ID NO: 293022 - DNA, 120 bp, Artificial Sequence
  ENSG00000131470_14 (sequence is synthesized)
ctcctgcctccatccgattctctaaacacacatatcaaatttatattctccagcccagacctccagctggaatctgtcaggcattaatatcagagtcaaaattgccacagtagaatgcct

SEQ ID NO: 293023 - DNA, 120 bp, Artificial Sequence
  ENSG00000131470_15 (sequence is synthesized)
catcttccccccaccccggactggtttctttctaacattctcctcccctaatggaattactcttcacccaaaccagaaattgggagcaattcttgacttcctttactagtcaaccatcaa

SEQ ID NO: 293024 - DNA, 120 bp, Artificial Sequence
  ENSG00000131470_16 (sequence is synthesized)
gaaagaaaattagaagaataaataatcctgtatggcttagtttccatgtgagatgatagatccagagcaaggtggaacacctcagggagcacccactgggaaagacagaactccttcctc

SEQ ID NO: 293025 - DNA, 120 bp, Artificial Sequence
  ENSG00000131471_0 (sequence is synthesized)
agtcccaggcatctgactaccgggaacctcagccagagtccgggagccccccaccccgtccaggagccaacagagcccccgtcttgctggcgtgagaatacattgctctcctttggttga

SEQ ID NO: 293026 - DNA, 120 bp, Artificial Sequence
  ENSG00000131471_1 (sequence is synthesized)
atcagctgtccctcttcgtgggaaaatgaaccagaagacaatcctcgtgctcctcattctggccgtcatcaccatctttgccttggtttgtgtcctgctggtgggcaggggtggagatgg

SEQ ID NO: 293027 - DNA, 120 bp, Artificial Sequence
  ENSG00000131471_2 (sequence is synthesized)
gggtgaacccagccagcttccccattgcccctctgtatctcccagtgcccagccttggacacaccctggccagagccagctgtttgcagacctgagccgagaggagctgacggctgtgat

SEQ ID NO: 293028 - DNA, 120 bp, Artificial Sequence
  ENSG00000131471_3 (sequence is synthesized)
gcgctttctgacccagcggctggggccagggctggtggatgcagcccaggcccggccctcggacaactgtgtcttctcagtggagttgcagctgcctcccaaggctgcagccctggctca

SEQ ID NO: 293029 - DNA, 120 bp, Artificial Sequence
  ENSG00000131471_4 (sequence is synthesized)
cttggacagggggagccccccacctgcccgggaggcactggccatcgtcttctttggcaggcaaccccagcccaacgtgagtgagctggtggtggggccactgcctcacccctcctacat

SEQ ID NO: 293030 - DNA, 120 bp, Artificial Sequence
  ENSG00000131471_5 (sequence is synthesized)
gcgggacgtgactgtggagcgtcatggaggccccctgccctatcaccgacgccccgtgctgttccaagagtacctggacatagaccagatgatcttcaacagagagctgccccaggcttc

SEQ ID NO: 293031 - DNA, 120 bp, Artificial Sequence
  ENSG00000131471_6 (sequence is synthesized)
tgggcttctccaccactgttgcttctacaagcaccggggacggaacctggtgacaatgaccacggctccccgtggtctgcaatcaggggaccgggccacctggtttggcctctactacaa

SEQ ID NO: 293032 - DNA, 120 bp, Artificial Sequence
  ENSG00000131471_7 (sequence is synthesized)
catctcgggcgctgggttcttcctgcaccacgtgggcttggagctgctagtgaaccacaaggcccttgaccctgcccgctggactatccagaaggtgttctatcaaggccgctactacga

SEQ ID NO: 293033 - DNA, 120 bp, Artificial Sequence
  ENSG00000131471_8 (sequence is synthesized)
cagcctggcccagctggaggcccagtttgaggccggcctggtgaatgtggtgctgatcccagacaatggcacaggtgggtcctggtccctgaagtcccctgtgcccccgggtccagctcc

SEQ ID NO: 293034 - DNA, 120 bp, Artificial Sequence
  ENSG00000131471_9 (sequence is synthesized)
ccctctacagttctatccccaaggcccccgcttcagtgtccagggaagtcgagtggcctcctcactgtggactttctcctttggcctcggagcattcagtggcccaaggatctttgacgt

SEQ ID NO: 293035 - DNA, 120 bp, Artificial Sequence
  ENSG00000131471_10 (sequence is synthesized)
tcgcttccaaggagaaagactagtttatgagataagcctccaagaggccttggccatctatggtggaaattccccagcagcaatgacgacccgctatgtggatggaggctttggcatggg

SEQ ID NO: 293036 - DNA, 120 bp, Artificial Sequence
  ENSG00000131471_11 (sequence is synthesized)
caagtacaccacgcccctgacccgtggggtggactgcccctacttggccacctacgtggactggcacttccttttggagtcccaggcccccaagacaatacgtgatgccttttgtgtgtt

SEQ ID NO: 293037 - DNA, 120 bp, Artificial Sequence
  ENSG00000131471_12 (sequence is synthesized)
tgaacagaaccagggcctccccctgcggcgacaccactcagatctctactcgcactactttgggggtcttgcggaaacggtgctggtcgtcagatctatgtccaccttgctcaactatga

SEQ ID NO: 293038 - DNA, 120 bp, Artificial Sequence
  ENSG00000131471_13 (sequence is synthesized)
ctatgtgtgggatacggtcttccaccccagtggggccatagaaatacgattctatgccacgggctacatcagctcggcattcctctttggtgctactgggaagtacgggaaccaagtgtc

SEQ ID NO: 293039 - DNA, 120 bp, Artificial Sequence
  ENSG00000131471_14 (sequence is synthesized)
agagcacaccctgggcacggtccacacccacagcgcccacttcaaggtggatctggatgtagcaggactggagaactgggtctgggccgaggatatggtctttgtccccatggctgtgcc

SEQ ID NO: 293040 - DNA, 120 bp, Artificial Sequence
  ENSG00000131471_15 (sequence is synthesized)
ctggagccctgagcaccagctgcagaggctgcaggtgacccggaagctgctggagatggaggagcaggccgccttcctcgtgggaagcgccacccctcgctacctgtacctggccagcaa

SEQ ID NO: 293041 - DNA, 120 bp, Artificial Sequence
  ENSG00000131471_16 (sequence is synthesized)
ctttgctggagagccgctgccccaaaacagctccatggcgagaggcttcagctgggagaggtaccagctggctgtgacccagcggaaggaggaggagcccagtagcagcagcgttttcaa

SEQ ID NO: 293042 - DNA, 120 bp, Artificial Sequence
  ENSG00000131471_17 (sequence is synthesized)
tcagaatgacccttgggcccccactgtggatttcagtgacttcatcaacaatgagaccattgctggaaaggatttggtggcctgggtgacagctggttttctgcatatcccacatgcaga

SEQ ID NO: 293043 - DNA, 120 bp, Artificial Sequence
  ENSG00000131471_18 (sequence is synthesized)
ggacattcctaacacagtgactgtggggaacggcgtgggcttcttcctccgaccctataacttctttgacgaagacccctccttctactctgccgactccatctacttccgaggggacca

SEQ ID NO: 293044 - DNA, 120 bp, Artificial Sequence
  ENSG00000131471_19 (sequence is synthesized)
ggatgctggggcctgcgaggtcaaccccctagcttgcctgccccaggctgctgcctgtgcccccgacctccctgccttctcccacgggggcttctctcacaactaggcggtcctgggatg

SEQ ID NO: 293045 - DNA, 120 bp, Artificial Sequence
  ENSG00000131471_20 (sequence is synthesized)
gggcatgtggccaagggctccagggccagggtgtgagggatggggagcagctgggcactgggccggcagcctggttccctctttcctgtgccaggactctctttcttccactaccctccc

SEQ ID NO: 293046 - DNA, 120 bp, Artificial Sequence
  ENSG00000131471_21 (sequence is synthesized)
tcgcatccgcctctgagccaggagcctcctgaccctgtgatgcctgacacaggggacactgaaccttgttgatgccagctgtactgagttctcatccacagaggccaggcatggcccagc

SEQ ID NO: 293047 - DNA, 120 bp, Artificial Sequence
  ENSG00000131471_22 (sequence is synthesized)
ctggagccgtggccgagggcttccctagatggttccctttgttgctgtctggctttcccgaatctttttaggccacctccaaggactctaaaagggggctattccctggagaccccagag

SEQ ID NO: 293048 - DNA, 120 bp, Artificial Sequence
  ENSG00000131471_23 (sequence is synthesized)
tagggttgccagtcctgcaagtccatagctgagctggaaaggatgcttctgctcacattccctctcatccaggtcctttccttctcgtcttcctctctctcacctacttcctcctcctcc

SEQ ID NO: 293049 - DNA, 120 bp, Artificial Sequence
  ENSG00000131471_24 (sequence is synthesized)
tcctgttcctgccttctcttctatcctgcaatttctcccgaatcctgaggggatatccctatgtcccagcccctggtactcccccagccctcagttttcagtcaagttccgtctcctctc

SEQ ID NO: 293050 - DNA, 120 bp, Artificial Sequence
  ENSG00000131471_25 (sequence is synthesized)
cagccctatggaagtctcaaggtcacgggacccctaatcagagtggccaatccctgtgtgtcgttcccttgtgtctgttgcttattgggagtaggagttgctcctacccctgtcctgggg

SEQ ID NO: 293051 - DNA, 120 bp, Artificial Sequence
  ENSG00000131471_26 (sequence is synthesized)
ctgggtgtgtttcaggacagctgcttctgtgcatttgtgtctgcctgcctcatgctctctatagaggaggatggtcatcgtgacagcagcagctcaagttagcatttcaagtgatttggg

SEQ ID NO: 293052 - DNA, 120 bp, Artificial Sequence
  ENSG00000131471_27 (sequence is synthesized)
ggtgcaatgataatgaagaatggccattttgtaccagggctctgtattctgcaacagcctgtttgggaggctggagtggaaacaaagggtgggcatcaaagatgagaagccaaagcccct

SEQ ID NO: 293053 - DNA, 120 bp, Artificial Sequence
  ENSG00000131471_28 (sequence is synthesized)
acaactccagccacccagccaggaggggctgtccaatcacattcaggcatgcgaatgagctgggccctgggtgaggtgggggtctggcctagtggggaggggcctggcctgggtggggca

SEQ ID NO: 293054 - DNA, 120 bp, Artificial Sequence
  ENSG00000131471_29 (sequence is synthesized)
gggcctggcctggtccaggcttgggctccattcccatcactgctgtccctcctgaggtctggattggggatggggacaaagaaatagcaagagatgagaaacaacagaaacttttttctc

SEQ ID NO: 293055 - DNA, 120 bp, Artificial Sequence
  ENSG00000131471_30 (sequence is synthesized)
taaaggactggttaaatcaattctgatacagccttacaatacaatagtatgcagctaaaaaataattgtatgtctttatatactaatatgtaataatcttcaggtgaaaaaggcaagcca

SEQ ID NO: 293056 - DNA, 120 bp, Artificial Sequence
  ENSG00000131471_31 (sequence is synthesized)
cagaaatgtgtatagcgcacttcccatttgtgtttcagaaaggagtagaatataaacacataattgcttatgtatgcctattcagaataaatgggtaacactgattacttttgggagggg

SEQ ID NO: 293057 - DNA, 120 bp, Artificial Sequence
  ENSG00000131471_32 (sequence is synthesized)
aaccagtaggttgaggacaggagagggaagggtcttaacacttacacccttttgtacattttgaattttgaaccatgtgactgtattacctattcaaaataaacaataaatgggcccaaa

SEQ ID NO: 293058 - DNA, 120 bp, Artificial Sequence
  ENSG00000131471_33 (sequence is synthesized)
gtttgtctgtctgcgtggaaagcaagagggtaaggatgatcattcatctctatccccagggacgagtacagtcctctctgctaatgaatgttgaaagaatgaatgagtgaaatggaatga

SEQ ID NO: 293059 - DNA, 120 bp, Artificial Sequence
  ENSG00000131471_34 (sequence is synthesized)
tgtttgtcagctcagttctgtgtctggcctgtggtggtggtgttttggaggatctctttgcattctaccacgtccctggcatgtgcaggactggagaactgggtctgggccgaggatatg

SEQ ID NO: 293060 - DNA, 120 bp, Artificial Sequence
  ENSG00000131471_35 (sequence is synthesized)
ccggaagttgcctaggccatgctcctctcacaggacaggccagtcagtggtttgtctgtctgcgtggaaagcaagagggtcaacagctttggctaaaggattggaggtatcctggggaga

SEQ ID NO: 293061 - DNA, 120 bp, Artificial Sequence
  ENSG00000131471_36 (sequence is synthesized)
gggaagagaaggaggggcacactcagttctgggctgctctttggcccccactctgaagccagatgggggcagagtccagaggggccagggcagttgcctgacaggccctcccctatccca

SEQ ID NO: 293062 - DNA, 120 bp, Artificial Sequence
  ENSG00000131473_0 (sequence is synthesized)
gctggggtgctccggattttgcggggttcgtcgggcctgtggaagaagcgccgcgcacggacttcggcagaggtagagcaggtctctctgcagccatgtcggccaaggcaatttcagagc

SEQ ID NO: 293063 - DNA, 120 bp, Artificial Sequence
  ENSG00000131473_1 (sequence is synthesized)
agacgggcaaagaactcctttacaagttcatctgtaccacctcagccatccagaatcggttcaagtatgctcgggtcactcctgacacagactgggcccgcttgctgcaggaccacccct

SEQ ID NO: 293064 - DNA, 120 bp, Artificial Sequence
  ENSG00000131473_2 (sequence is synthesized)
ggctgctcagccagaacttggtagtcaagccagaccagctgatcaaacgtcgtggaaaacttggtctcgttggggtcaacctcactctggatggggtcaagtcctggctgaagccacggc

SEQ ID NO: 293065 - DNA, 120 bp, Artificial Sequence
  ENSG00000131473_3 (sequence is synthesized)
tgggacaggaagccacagttggcaaggccacaggcttcctcaagaactttctgatcgagcccttcgtcccccacagtcaggctgaggagttctatgtctgcatctatgccacccgagaag

SEQ ID NO: 293066 - DNA, 120 bp, Artificial Sequence
  ENSG00000131473_4 (sequence is synthesized)
gggactacgtcctgttccaccacgaggggggtgtggacgtgggtgatgtggacgccaaggcccagaagctgcttgttggcgtggatgagaaactgaatcctgaggacatcaaaaaacacc

SEQ ID NO: 293067 - DNA, 120 bp, Artificial Sequence
  ENSG00000131473_5 (sequence is synthesized)
tgttggtccacgcccctgaagacaagaaagaaattctggccagttttatctccggcctcttcaatttctacgaggacttgtacttcacctacctcgagatcaatccccttgtagtgacca

SEQ ID NO: 293068 - DNA, 120 bp, Artificial Sequence
  ENSG00000131473_6 (sequence is synthesized)
aagatggagtctatgtccttgacttggcggccaaggtggacgccactgccgactacatctgcaaagtgaagtggggtgacatcgagttccctccccccttcgggcgggaggcatatccag

SEQ ID NO: 293069 - DNA, 120 bp, Artificial Sequence
  ENSG00000131473_7 (sequence is synthesized)
aggaagcctacattgcagacctcgatgccaaaagtggggcaagcctgaagctgaccttgctgaaccccaaagggaggatctggaccatggtggccgggggtggcgcctctgtcgtgtaca

SEQ ID NO: 293070 - DNA, 120 bp, Artificial Sequence
  ENSG00000131473_8 (sequence is synthesized)
gcgataccatctgtgatctagggggtgtcaacgagctggcaaactatggggagtactcaggcgcccccagcgagcagcagacctatgactatgccaagactatcctctccctcatgaccc

SEQ ID NO: 293071 - DNA, 120 bp, Artificial Sequence
  ENSG00000131473_9 (sequence is synthesized)
gagagaagcacccagatggcaagatcctcatcattggaggcagcatcgcaaacttcaccaacgtggctgccacgttcaagggcatcgtgagagcaattcgagattaccagggccccctga

SEQ ID NO: 293072 - DNA, 120 bp, Artificial Sequence
  ENSG00000131473_10 (sequence is synthesized)
aggagcacgaagtcacaatctttgtccgaagaggtggccccaactatcaggagggcttacgggtgatgggagaagtcgggaagaccactgggatccccatccatgtctttggcacagaga

SEQ ID NO: 293073 - DNA, 120 bp, Artificial Sequence
  ENSG00000131473_11 (sequence is synthesized)
ctcacatgacggccattgtgggcatggccctgggccaccggcccatccccaaccagccacccacagcggcccacactgcaaacttcctcctcaacgccagcgggagcacatcgacgccag

SEQ ID NO: 293074 - DNA, 120 bp, Artificial Sequence
  ENSG00000131473_12 (sequence is synthesized)
cccccagcaggacagcatctttttctgagtccagggccgatgaggtggcgcctgcaaagaaggccaagcctgccatgccacaagattcagtcccaagtccaagatccctgcaaggaaaga

SEQ ID NO: 293075 - DNA, 120 bp, Artificial Sequence
  ENSG00000131473_13 (sequence is synthesized)
gcaccaccctcttcagccgccacaccaaggccattgtgtggggcatgcagacccgggccgtgcaaggcatgctggactttgactatgtctgctcccgagacgagccctcagtggctgcca

SEQ ID NO: 293076 - DNA, 120 bp, Artificial Sequence
  ENSG00000131473_14 (sequence is synthesized)
tggtctaccctttcactggggaccacaagcagaagttttactgggggcacaaagagatcctgatccctgtcttcaagaacatggctgatgccatgaggaagcatccggaggtagatgtgc

SEQ ID NO: 293077 - DNA, 120 bp, Artificial Sequence
  ENSG00000131473_15 (sequence is synthesized)
tcatcaactttgcctctctccgctctgcctatgacagcaccatggagaccatgaactatgcccagatccggaccatcgccatcatagctgaaggcatccctgaggccctcacgagaaagc

SEQ ID NO: 293078 - DNA, 120 bp, Artificial Sequence
  ENSG00000131473_16 (sequence is synthesized)
tgatcaagaaggcggaccagaagggagtgaccatcatcggacctgccactgttggaggcatcaagcctgggtgctttaagattggcaacacaggtgggatgctggacaacatcctggcct

SEQ ID NO: 293079 - DNA, 120 bp, Artificial Sequence
  ENSG00000131473_17 (sequence is synthesized)
gcgtctatgagggcgtggccattggtggggacaggtacccgggctccacattcatggatcatgtgttacgctatcaggacactccaggagtcaaaatgattgtggttcttggagagattg

SEQ ID NO: 293080 - DNA, 120 bp, Artificial Sequence
  ENSG00000131473_18 (sequence is synthesized)
ggggcactgaggaatataagatttgccggggcatcaaggagggccgcctcactaagcccatcgtctgctggtgcatcgggacgtgtgccaccatgttctcctctgaggtccagtttggcc

SEQ ID NO: 293081 - DNA, 120 bp, Artificial Sequence
  ENSG00000131473_19 (sequence is synthesized)
atgctggagcttgtgccaaccaggcttctgaaactgcagtagccaagaaccaggctttgaaggaagcaggagtgtttgtgccccggagctttgatgagcttggagagatcatccagtctg

SEQ ID NO: 293082 - DNA, 120 bp, Artificial Sequence
  ENSG00000131473_20 (sequence is synthesized)
tatacgaagatctcgtggccaatggagtcattgtacctgcccaggaggtgccgcccccaaccgtgcccatggactactcctgggccagggagcttggtttgatccgcaaacctgcctcgt

SEQ ID NO: 293083 - DNA, 120 bp, Artificial Sequence
  ENSG00000131473_21 (sequence is synthesized)
tcatgaccagcatctgcgatgagcgaggacaggagctcatctacgcgggcatgcccatcactgaggtcttcaaggaagagatgggcattggcggggtcctcggcctcctctggttccaga

SEQ ID NO: 293084 - DNA, 120 bp, Artificial Sequence
  ENSG00000131473_22 (sequence is synthesized)
aaaggttgcctaagtactcttgccagttcattgagatgtgtctgatggtgacagctgatcacgggccagccgtctctggagcccacaacaccatcatttgtgcgcgagctgggaaagacc

SEQ ID NO: 293085 - DNA, 120 bp, Artificial Sequence
  ENSG00000131473_23 (sequence is synthesized)
tggtctccagcctcacctcggggctgctcaccatcggggatcggtttgggggtgccttggatgcagcagccaagatgttcagtaaagcctttgacagtggcattatccccatggagtttg

SEQ ID NO: 293086 - DNA, 120 bp, Artificial Sequence
  ENSG00000131473_24 (sequence is synthesized)
tgaacaagatgaagaaggaagggaagctgatcatgggcattggtcaccgagtgaagtcgataaacaacccagacatgcgagtgcagatcctcaaagattacgtcaggcagcacttccctg

SEQ ID NO: 293087 - DNA, 120 bp, Artificial Sequence
  ENSG00000131473_25 (sequence is synthesized)
ccactcctctgctcgattatgcactggaagtagagaagattaccacctcgaagaagccaaatcttatcctgaatgtagatggtctcatcggagtcgcatttgtagacatgcttagaaact

SEQ ID NO: 293088 - DNA, 120 bp, Artificial Sequence
  ENSG00000131473_26 (sequence is synthesized)
gtgggtcctttactcgggaggaagctgatgaatatattgacattggagccctcaatggcatctttgtgctgggaaggagtatggggttcattggacactatcttgatcagaagaggctga

SEQ ID NO: 293089 - DNA, 120 bp, Artificial Sequence
  ENSG00000131473_27 (sequence is synthesized)
agcaggggctgtatcgtcatccgtgggatgatatttcatatgttcttccggaacacatgagcatgtaacagagccaggaaccctactgcagtaaactgaagacaagatctcttcccccaa

SEQ ID NO: 293090 - DNA, 120 bp, Artificial Sequence
  ENSG00000131473_28 (sequence is synthesized)
gaaaaagtgtacagacagctggcagtggagcctgctttatttagcaggggcctggaatgtaaacagccactggggtacaggcaccgaagaccaacatccacaggctaacaccccttcagt

SEQ ID NO: 293091 - DNA, 120 bp, Artificial Sequence
  ENSG00000131473_29 (sequence is synthesized)
ccacacaaagaagcttcatattttttttataagcatagaaataaaaaccaagccaatatttgtgactttgctctgctacctgctgtatttattatatggaagcatctaagtactgtcagg

SEQ ID NO: 293092 - DNA, 120 bp, Artificial Sequence
  ENSG00000131473_30 (sequence is synthesized)
atggggtcttcctcattgtagggcgttaggatgttgctttctttttccattagttaaacatttttttctcctttggaggaagggaatgaaacatttatggcctcaagatactatacattt

SEQ ID NO: 293093 - DNA, 120 bp, Artificial Sequence
  ENSG00000131473_31 (sequence is synthesized)
aaagcaccccaatgtctctctttttttttttttacttccctttcttcttccttatataacatgaagaacattgtattaatctgatttttaaagatctttttgtatgttacgtgttaaggg

SEQ ID NO: 293094 - DNA, 120 bp, Artificial Sequence
  ENSG00000131473_32 (sequence is synthesized)
cttgtttggtatcccactgaaatgttctgtgttgcagaccagagtctgtttatgtcagggggatggggccattgcatccttagccattgtcacaaaatatgtggagtagtaacttaatat

SEQ ID NO: 293095 - DNA, 120 bp, Artificial Sequence
  ENSG00000131473_33 (sequence is synthesized)
gtaaagttgtaacatacatacatttaaaatggaaatgcagaaagctgtgaaatgtcttgtgtcttatgttctctgtatttatgcagctgatttgtctgtctgtaactgaagtgtgggtcc

SEQ ID NO: 293096 - DNA, 120 bp, Artificial Sequence
  ENSG00000131473_34 (sequence is synthesized)
aaggactcctaactactttgcatctgtaatccacaaagattctgggcagctgccacctcagtctcttctctgtattatcatagtctggtttaaataaactatatagtaacaatgaaggca

SEQ ID NO: 293097 - DNA, 120 bp, Artificial Sequence
  ENSG00000131473_35 (sequence is synthesized)
tctgccgcgcactgggccagggagtgatgattgcgtggctgacggctgggctggttagtgtttgctgttgcacgctctggcggttctctctggagttgctgcctgaaaaggctcccttgt

SEQ ID NO: 293098 - DNA, 120 bp, Artificial Sequence
  ENSG00000131473_36 (sequence is synthesized)
agcagggaaggggccttgaaagcagagtttgagccagagccaagttaccatgagttcccaggtcaggtagggagctcttgccccagggtctcttaaaggggtggagaagacactgggaca

SEQ ID NO: 293099 - DNA, 120 bp, Artificial Sequence
  ENSG00000131473_37 (sequence is synthesized)
ggagctgcccatctgcgctgtgtgtctctgggcaagcagctgctacgctgaactataactctcccacctgaagcatgggaggcgaatttctgctttcttccttctcaggaccaatgcttt

SEQ ID NO: 293100 - DNA, 120 bp, Artificial Sequence
  ENSG00000131473_38 (sequence is synthesized)
agtgggaaaggacagtaaatatttgaaacagtttatatagtctcacacagggccggtcatttctatgtccttatattgtgctttggttagaaaccaaagagcaagagatgaggtcactgg

SEQ ID NO: 293101 - DNA, 120 bp, Artificial Sequence
  ENSG00000131473_39 (sequence is synthesized)
cagctgctcagggccttatggggacagctccttagcagatccctttaccctgggctccttggctctgtagctccagcaacctcatttatttggtcactccactggcctaggtggggagta

SEQ ID NO: 293102 - DNA, 120 bp, Artificial Sequence
  ENSG00000131473_40 (sequence is synthesized)
ttaacatgaaggtcatgcatgtgattcaggacaccaccttctaggcagccaaacacttggccatctcaggtgatacccagaggttgcttgatgagcaaggaccagctcagaaccaagcag

SEQ ID NO: 293103 - DNA, 120 bp, Artificial Sequence
  ENSG00000131475_0 (sequence is synthesized)
agcttccgggtttcctgggctactacgatggcgatgagtttcgagtggccgtggcagtatcgcttcccacccttctttacgttacaaccgaatgtggacactcggcagaagcagctggcc

SEQ ID NO: 293104 - DNA, 120 bp, Artificial Sequence
  ENSG00000131475_1 (sequence is synthesized)
gcctggtgctcgctggtcctgtccttctgccgcctgcacaaacagtccagcatgacggtgatggaagctcaggagagcccgctcttcaacaacgtcaagctacagcgaaagcttcctgtg

SEQ ID NO: 293105 - DNA, 120 bp, Artificial Sequence
  ENSG00000131475_2 (sequence is synthesized)
gagtcgatccagattgtattagaggaactgaggaagaaagggaacctcgagtggttggataagagcaagtccagcttcctgatcatgtggcggaggccagaagaatgggggaaactcatc

SEQ ID NO: 293106 - DNA, 120 bp, Artificial Sequence
  ENSG00000131475_3 (sequence is synthesized)
tatcagtgggtttccaggagtggccagaacaactccgtctttaccctgtatgaactgactaatggggaagacacagaggatgaggagttccacgggctggatgaagccactctactgcgg

SEQ ID NO: 293107 - DNA, 120 bp, Artificial Sequence
  ENSG00000131475_4 (sequence is synthesized)
ggccctacagcaggagcacaaggccgagatcatcactgtcagcgatggccgaggcgtcaagttcttctagcagggacctgtctccctttacttcttacctcccacctttccagggctttc

SEQ ID NO: 293108 - DNA, 120 bp, Artificial Sequence
  ENSG00000131475_5 (sequence is synthesized)
aaaaggagacagacccagtgtcccccaaagactggatctgtgactccaccagactcaaaaggactccagtcctgaaggctgggacctggggatgggtttctcacaccccatatgtctgtc

SEQ ID NO: 293109 - DNA, 120 bp, Artificial Sequence
  ENSG00000131475_6 (sequence is synthesized)
ccttggatagggtgaggctgaagcaccagggagaaaatatgtgcttcttctcgccctacctcctttcccatcctagactgtccttgagccagggtctgtaaacctgacactttatatgtg

SEQ ID NO: 293110 - DNA, 120 bp, Artificial Sequence
  ENSG00000131475_7 (sequence is synthesized)
ttcacacatgtaagtacatacacacatgcgcctgcagcacatgcttctgtctcctcctcctcccacccctttagctgctgttgcctcccttctcaggctggtgctggatccttcctaggg

SEQ ID NO: 293111 - DNA, 120 bp, Artificial Sequence
  ENSG00000131475_8 (sequence is synthesized)
gatgggggaagccctggctgcaggcagccttccaggcaatatgaagataggaggcccacgggcctggcagtgagaggtgtggccccacaccgatttatgatattaaaatctcaactccca

SEQ ID NO: 293112 - DNA, 120 bp, Artificial Sequence
  ENSG00000131475_9 (sequence is synthesized)
gtattagaggaactgaggaagaaaggtgggttcagttccccagattccttatttttcttcctagttgggttttcctgagggcaaattaggataagtctttttccctttaataactttttc

SEQ ID NO: 293113 - DNA, 120 bp, Artificial Sequence
  ENSG00000131475_10 (sequence is synthesized)
caaaattgaaatctctgtctgtgccctaaacctgaagagaagtggaagaaggatgagtgccttgtagataataatagtaaaataaatattgaatctttctttctgaaagctgagtctctt

SEQ ID NO: 293114 - DNA, 120 bp, Artificial Sequence
  ENSG00000131475_11 (sequence is synthesized)
gaaagctgagtctcttccactctgtcccaccttggtatttttttgcctctttgtttctttttagttcatgatactttttttttgggtggggagataaggtctcactctgtcatccaggct

SEQ ID NO: 293115 - DNA, 120 bp, Artificial Sequence
  ENSG00000131475_12 (sequence is synthesized)
tcctcccatctcagcctcctgagtagttgagacctcaggcatgtgtcaccacacacctggctaattttttgtattttctatagagagaatttttttgtattttctgtagggtctcatcat

SEQ ID NO: 293116 - DNA, 120 bp, Artificial Sequence
  ENSG00000131475_13 (sequence is synthesized)
ccacacacctggctaattttttgtattttctatagagagaatttttttgtattttctgtagggtctcatcatgttgcccaggctagtttcgaactcctgggctcaagcagtcctcccgcc

SEQ ID NO: 293117 - DNA, 120 bp, Artificial Sequence
  ENSG00000131475_14 (sequence is synthesized)
gcacttctgcgctttcacacatgcccagacgcccccccgcgccagcccccttttacccatgtaagggtcatttgtttttgctgcctgattcatccctaaaatatctgtggagaaaggctg

SEQ ID NO: 293118 - DNA, 120 bp, Artificial Sequence
  ENSG00000131475_15 (sequence is synthesized)
cgatgagtttcgagtggccgtggcagtatcgcttcccacccttctttacgtgaggctcagaccccaagaagcaccgctgtgcctccctcccctcccccggaccctgggctcagccctgat

SEQ ID NO: 293119 - DNA, 120 bp, Artificial Sequence
  ENSG00000131475_16 (sequence is synthesized)
gcttcatatggggagggggagaaaagacccgtcggccaacaccctcagtcccttactttcttcctgaaatgcgtcccgggcaagtgctgcctcccgccctctaattctgcgccccactcc

SEQ ID NO: 293120 - DNA, 120 bp, Artificial Sequence
  ENSG00000131475_17 (sequence is synthesized)
tacccatggtaggcagattcccacccaaactggacttaaagagtgaaaatgtgtagctgacattttcccctggcaaatgcagtaccataccctcttgttcttggcagtgatgactgctcg

SEQ ID NO: 293121 - DNA, 120 bp, Artificial Sequence
  ENSG00000131475_18 (sequence is synthesized)
gatgtcattaaggtcttagaatttctgccctgaagccaagttccaagttttttaacctaaacccttttgactatttgtatcttccatccttttctgtgtgaggcccagacttgggtaact

SEQ ID NO: 293122 - DNA, 120 bp, Artificial Sequence
  ENSG00000131475_19 (sequence is synthesized)
acctttaattattttctctgcccccctcctgccaggaagtaagggtcatttgtttttgctgcctgattcatccctaaaatatctgtggagaaaggctgaaggaaggcaacagacagaggg

SEQ ID NO: 293123 - DNA, 120 bp, Artificial Sequence
  ENSG00000131477_0 (sequence is synthesized)
ccgccgccgctcctcgcctccttgctgcacgatggcctcgctccgggtggagcgcgccggcggcccgcgtctccctaggacccgagtcgggcggccggcagcgctccgcctcctcctcct

SEQ ID NO: 293124 - DNA, 120 bp, Artificial Sequence
  ENSG00000131477_1 (sequence is synthesized)
tcctgctgggcgctgtcctgaatccccacgaggccctggctcagcctcttcccaccacaggcacaccagggtcagaaggggggacggtgaagaactatgagacagctgtccaattttgct

SEQ ID NO: 293125 - DNA, 120 bp, Artificial Sequence
  ENSG00000131477_2 (sequence is synthesized)
ggaatcattataaggatcaaatggatcctatcgaaaaggattggtgcgactgggccatgattagcaggccttatagcaccctgcgagattgcctggagcactttgcagagttgtttgacc

SEQ ID NO: 293126 - DNA, 120 bp, Artificial Sequence
  ENSG00000131477_3 (sequence is synthesized)
atctttgagactcaccagatccactttgccaactgctccctggtgcagcccaccttctctgaccccccagaggatgtactcctggccatgatcatagcccccatctgcctcatccccttc

SEQ ID NO: 293127 - DNA, 120 bp, Artificial Sequence
  ENSG00000131477_4 (sequence is synthesized)
ctcatcactcttgtagtatggaggagtaaagacagtgaggcccaggcctagggggccacgagcttctcaacaaccatgttactccacttccccacccccaccaggcctccctcctcccct

SEQ ID NO: 293128 - DNA, 120 bp, Artificial Sequence
  ENSG00000131477_5 (sequence is synthesized)
cctactcccttttctcactctcatccccaccacagatccctggattgctgggaatggaagccaggtggggtcatggcacaagttctgtaatcttcaaaataaaactttttttttgtacaa

SEQ ID NO: 293129 - DNA, 120 bp, Artificial Sequence
  ENSG00000131477_6 (sequence is synthesized)
cgagaggccgctggagctcccagccccctccctcttctccacgtctgggagagcagcttgccgacccctccagacccgaaagagagagggggcgactcgaattcggggagcgatcctggg

SEQ ID NO: 293130 - DNA, 120 bp, Artificial Sequence
  ENSG00000131477_7 (sequence is synthesized)
agaccctggagagtcctgggcgccacgcagccgagcccccgaaatagatcccggttccggggttccgggagctgtccagcctcgcggggtgagctacgagagggtgggccaacgccggcg

SEQ ID NO: 293131 - DNA, 120 bp, Artificial Sequence
  ENSG00000131480_0 (sequence is synthesized)
ggaaggagcagctgttagaattctgatttcagctctcagcatccaccatgcatctcaagatagtcctggcgttcctggcactgtccctcattaccatctttgccctggcctatgttttgc

SEQ ID NO: 293132 - DNA, 120 bp, Artificial Sequence
  ENSG00000131480_1 (sequence is synthesized)
tgaccagcccaggtggttccagccagcctccccactgcccctctgtatcccatagggcccagccctggccacaccctggccagagccagctgtttgcagacctgagccgagaggagttga

SEQ ID NO: 293133 - DNA, 120 bp, Artificial Sequence
  ENSG00000131480_2 (sequence is synthesized)
cagctgtgatgcgctttctgacccagcggctggggccagggctggtggacgcagcccaggctcagccctcggacaactgcatcttctcagtggagctgcagctgccccccaaggctgcag

SEQ ID NO: 293134 - DNA, 120 bp, Artificial Sequence
  ENSG00000131480_3 (sequence is synthesized)
ccctggcccacctggacagggggagccccccacctgcccgggaggcactggccatcgtcctctttggtggacaaccccaacccaatgtgagtgagctggtggtggggccgctgcctcacc

SEQ ID NO: 293135 - DNA, 120 bp, Artificial Sequence
  ENSG00000131480_4 (sequence is synthesized)
cctcgtacatgcgggatgtgactgtggagcgtcacggcgggcccctgccctatcaccgtcgcccggtgctgagagctgagtttacacagatgtggaggcatctgaaagaggtggagctac

SEQ ID NO: 293136 - DNA, 120 bp, Artificial Sequence
  ENSG00000131480_5 (sequence is synthesized)
ccaaggcacccatcttcctgtcgtccaccttcaactacaatggctctaccctggcagctgtgcatgccacccctcggggcttgcgctcaggggaccgagctacctggatggccctctacc

SEQ ID NO: 293137 - DNA, 120 bp, Artificial Sequence
  ENSG00000131480_6 (sequence is synthesized)
ataacatctcaggggttggtcttttccttcaccccgtggggctggagctactactggaccacagggccctggaccctgcccactggactgtccagcaggtcttctaccttgggcactact

SEQ ID NO: 293138 - DNA, 120 bp, Artificial Sequence
  ENSG00000131480_7 (sequence is synthesized)
atgcagacttgggccagttggaacgggagtttaagtctggccggttggaagtggttagagtccctctacctccaccaaatggagcttcatccctgaggtctcggaactctccaggtcctc

SEQ ID NO: 293139 - DNA, 120 bp, Artificial Sequence
  ENSG00000131480_8 (sequence is synthesized)
ttccccctcttcagttctcgccccagggttcccagtacagtgtgcaaggaaacctggtggtatcctccctctggtcatttacctttggccatggggtgttcagcggcctgaggatttttg

SEQ ID NO: 293140 - DNA, 120 bp, Artificial Sequence
  ENSG00000131480_9 (sequence is synthesized)
atgttcggttccagggtgagcgaatagcctatgaagtcagtgtccaggagtgtgtatctatctatggtgccgattcacccaagacgatgctgactcgctatttggatagcagctttggac

SEQ ID NO: 293141 - DNA, 120 bp, Artificial Sequence
  ENSG00000131480_10 (sequence is synthesized)
tcggccgtaacagccgaggcttggtgcggggagtggactgcccctatcaagccacgatggtggacatccatatattagtgggcaaaggggcagtccagctgcttccaggggctgtgtgtg

SEQ ID NO: 293142 - DNA, 120 bp, Artificial Sequence
  ENSG00000131480_11 (sequence is synthesized)
ccacaattaccttcaaaatcatttctatggtggtttggccagctcagcccttgtggtcaggtctgtgtcatctgtgggcaactatgactacatttgggactttgtgttgtacccaaatgg

SEQ ID NO: 293143 - DNA, 120 bp, Artificial Sequence
  ENSG00000131480_12 (sequence is synthesized)
ggcacttgaagggcgggtccatgccacgggttatatcaacacagctttcctgaaagggggagaggagggcctcctctttgggaaccgtgtgggggaaagagtgctgggaacggtgcacac

SEQ ID NO: 293144 - DNA, 120 bp, Artificial Sequence
  ENSG00000131480_13 (sequence is synthesized)
acatgccttccacttcaagctggacctggatgtggcagggctgaaaaactgggtggtagctgaagacgtggtgtttaaacctgtggctgccccctggaacccggagcactggctacagcg

SEQ ID NO: 293145 - DNA, 120 bp, Artificial Sequence
  ENSG00000131480_14 (sequence is synthesized)
cccacagctgactcggcaggtcctgggaaaggaggacctgacagctttttccttgggaagccccctaccccgctacctctacctggctagcaaccagactaatgcgtggggtcaccagcg

SEQ ID NO: 293146 - DNA, 120 bp, Artificial Sequence
  ENSG00000131480_15 (sequence is synthesized)
cgggtaccgaatccagatccacagcccccttggcatacacatacccctggagagtgacatggagagggccctcagctgggggagataccagcttgtggtgacccagagaaaggaggagga

SEQ ID NO: 293147 - DNA, 120 bp, Artificial Sequence
  ENSG00000131480_16 (sequence is synthesized)
gtcacagagcagtagcatctatcaccagaatgacatctggacacccacagttacctttgctgacttcatcaacaatgaaaccctcttaggagaggatctggtggcttgggtcacagccag

SEQ ID NO: 293148 - DNA, 120 bp, Artificial Sequence
  ENSG00000131480_17 (sequence is synthesized)
cttcctgcacattccccatgccgaggacatcccaaacacagtgactctggggaacagagttggcttcttgctccgaccctataacttctttgatgaggacccctccatcttctcccctgg

SEQ ID NO: 293149 - DNA, 120 bp, Artificial Sequence
  ENSG00000131480_18 (sequence is synthesized)
cagtgtctactttgagaagggccaggatgctgggctctgcagcatcaatcctgtggcctgcctccccgacctggcagcctgtgtcccggacttaccccctttctcttaccacggcttcta

SEQ ID NO: 293150 - DNA, 120 bp, Artificial Sequence
  ENSG00000131480_19 (sequence is synthesized)
gtcctgagggtgtggcgggcggcgtggttaggcacatgtacttttccctgtttctactttctattctccgtgtttttatcacacctgctccccagattcccaccccctcaatgttcctct

SEQ ID NO: 293151 - DNA, 120 bp, Artificial Sequence
  ENSG00000131480_20 (sequence is synthesized)
cacacgaaacccccatcagtccctttggttaattcttacttcctgttcatctctaaagtgttaaattataaaaatgatttttaaatattcaaagaaaaatatcacaaatcctactactca

SEQ ID NO: 293152 - DNA, 120 bp, Artificial Sequence
  ENSG00000131480_21 (sequence is synthesized)
gaaataggtggtcacattacatcagacatctctttatgcatgtgcattcaaaaggaagagtagatagaattttgtaaaacagatgttgtatgtaatttataataaaaagtattagaggaa

SEQ ID NO: 293153 - DNA, 120 bp, Artificial Sequence
  ENSG00000131482_0 (sequence is synthesized)
agcagagcaatcaccaccaagcctggaataactgcaagggctctgctgacatcttcctgaggtgccaaggaaatgaggatggaggaaggaatgaatgttctccatgactttgggatccag

SEQ ID NO: 293154 - DNA, 120 bp, Artificial Sequence
  ENSG00000131482_1 (sequence is synthesized)
tcaacacattacctccaggtgaattaccaagactcccaggactggttcatcttggtgtccgtgatcgcagacctcaggaatgccttctacgtcctcttccccatctggttccatcttcag

SEQ ID NO: 293155 - DNA, 120 bp, Artificial Sequence
  ENSG00000131482_2 (sequence is synthesized)
gaagctgtgggcattaaactcctttgggtagctgtgattggagactggctcaacctcgtctttaagtggattctctttggacagcgtccatactggtgggttttggatactgactactac

SEQ ID NO: 293156 - DNA, 120 bp, Artificial Sequence
  ENSG00000131482_3 (sequence is synthesized)
agcaacacttccgtgcccctgataaagcagttccctgtaacctgtgagactggaccagggagcccctctggccatgccatgggcacagcaggtgtatactacgtgatggtcacatctact

SEQ ID NO: 293157 - DNA, 120 bp, Artificial Sequence
  ENSG00000131482_4 (sequence is synthesized)
ctttccatctttcagggaaagataaagccgacctacagatttcggtgcttgaatgtcattttgtggttgggattctgggctgtgcagctgaatgtctgtctgtcacgaatctaccttgct

SEQ ID NO: 293158 - DNA, 120 bp, Artificial Sequence
  ENSG00000131482_5 (sequence is synthesized)
gctcattttcctcatcaagttgttgctggagtcctgtcaggcattgctgttgcagaaactttcagccacatccacagcatctataatgccagcctcaagaaatattttctcattaccttc

SEQ ID NO: 293159 - DNA, 120 bp, Artificial Sequence
  ENSG00000131482_6 (sequence is synthesized)
ttcctgttcagcttcgccatcggattttatctgctgctcaagggactgggtgtagacctcctgtggactctggagaaagcccagaggtggtgcgagcagccagaatgggtccacattgac

SEQ ID NO: 293160 - DNA, 120 bp, Artificial Sequence
  ENSG00000131482_7 (sequence is synthesized)
accacaccctttgccagcctcctcaagaacctgggcacgctctttggcctggggctggctctcaactccagcatgtacagggagagctgcaaggggaaactcagcaagtggctcccattc

SEQ ID NO: 293161 - DNA, 120 bp, Artificial Sequence
  ENSG00000131482_8 (sequence is synthesized)
cgcctcagctctattgtagcctccctcgtcctcctgcacgtctttgactccttgaaacccccatcccaagtcgagctggtcttctacgtcttgtccttctgcaagagtgcggtagtgccc

SEQ ID NO: 293162 - DNA, 120 bp, Artificial Sequence
  ENSG00000131482_9 (sequence is synthesized)
ctggcatccgtcagtgtcatcccctactgcctcgcccaggtcctgggccagccgcacaagaagtcgttgtaagagatgtggagtcttcggtgtttaaagtcaacaaccatgccagggatt

SEQ ID NO: 293163 - DNA, 120 bp, Artificial Sequence
  ENSG00000131482_10 (sequence is synthesized)
gaggaggactactatttgaagcaatgggcactggtatttggagcaagtgacatgccatccattctgccgtcgtggaattaaatcacggatggcagattggagggtcgcctggcttattcc

SEQ ID NO: 293164 - DNA, 120 bp, Artificial Sequence
  ENSG00000131482_11 (sequence is synthesized)
catgtgtgactccagcctgccctcagcacagactctttcagatggaggtgccatatcacgtacaccatatgcaagtttcccgccaggaggtcctcctctctctacttgaatactctcaca

SEQ ID NO: 293165 - DNA, 120 bp, Artificial Sequence
  ENSG00000131482_12 (sequence is synthesized)
agtagggagctcactcccactggaacagcccattttatctttgaatggtcttctgccagcccattttgaggccagaggtgctgtcagctcaggtggtcctcttttacaatcctaatcata

SEQ ID NO: 293166 - DNA, 120 bp, Artificial Sequence
  ENSG00000131482_13 (sequence is synthesized)
ttgggtaatgtttttgaaaagctaatgaagctattgagaaagacctgttgctagaagttgggttgttctggattttcccctgaagacttacttattcttccgtcacatatacaaaagcaa

SEQ ID NO: 293167 - DNA, 120 bp, Artificial Sequence
  ENSG00000131482_14 (sequence is synthesized)
gacttccaggtagggccagctcacaagcccaggctggagatcctaactgagaattttctacctgtgttcattcttaccgagaaaaggagaaaggagctctgaatctgataggaaaagaag

SEQ ID NO: 293168 - DNA, 120 bp, Artificial Sequence
  ENSG00000131482_15 (sequence is synthesized)
gctgcctaaggaggagtttttagtatgtggcgtatcatgcaagtgctatgccaagccatgtctaaatggctttaattatatagtaatgcactctcagtaatgggggaccagcttaagtat

SEQ ID NO: 293169 - DNA, 120 bp, Artificial Sequence
  ENSG00000131482_16 (sequence is synthesized)
aattaatagatggttagtggggtaattctgcttctagtattttttttactgtgcatacatgttcatcgtatttccttggatttctgaatggctgcagtgacccagatattgcactaggtc

SEQ ID NO: 293170 - DNA, 120 bp, Artificial Sequence
  ENSG00000131482_17 (sequence is synthesized)
ccactggctccacatccaccccactggatcttcagaaggctagagggcgactctggtggtgcttttgtatgtttcaattaggctctgaaatcttgggcaaaatgacaaggggagggccag

SEQ ID NO: 293171 - DNA, 120 bp, Artificial Sequence
  ENSG00000131482_18 (sequence is synthesized)
gattcctctctcaggtcactccagtgttacttttaattcctagagggtaaatatgactcctttctctatcccaagccaaccaagagcacattcttaaaggaaaagtcaacatcttctctc

SEQ ID NO: 293172 - DNA, 120 bp, Artificial Sequence
  ENSG00000131482_19 (sequence is synthesized)
agggtctcactatgttgcccaggctgctcttgaattcctgggctcaagcagtcctcccaccctaccacagcgtcccgcgtagctgggactacaggtgcaagccactatgtccagctagcc

SEQ ID NO: 293173 - DNA, 120 bp, Artificial Sequence
  ENSG00000131482_20 (sequence is synthesized)
gccactatgtccagctagccaactcctccttgcctgcttttctttttttttctttttttgagacggcgcacctatcacccaggctggagtggagtggcacgatcttggctcactgcaacc

SEQ ID NO: 293174 - DNA, 120 bp, Artificial Sequence
  ENSG00000131482_21 (sequence is synthesized)
ttcaagcgattctcatgtctcagcctcctcagtagctaggactaccggcgtgcaccaccatgccaggctaatttttatatttttagaattttagaagagatgggatttcatcatgttggc

SEQ ID NO: 293175 - DNA, 120 bp, Artificial Sequence
  ENSG00000131482_22 (sequence is synthesized)
caatctcatctgatatgcagagtatttctgccccacccacctaccccccaaaaaaagctgaagcctatttatttgaaagtccttgtttttgctactaattatatagtataccatacatta

SEQ ID NO: 293176 - DNA, 120 bp, Artificial Sequence
  ENSG00000131482_23 (sequence is synthesized)
tcattcaaaacaaccatcctgctcataacatctttgaaaagaaaaatatatatgtgcagtattttattaaagcaacattttatttaagaataaagtcttgttaattactatattttagat

SEQ ID NO: 293177 - DNA, 120 bp, Artificial Sequence
  ENSG00000131482_24 (sequence is synthesized)
gcaatgtgatctgaagtttctaattctggcccaactaaatttctagctctgtttccctaaacaaataatttggtttctctgtgcctgcattttccctttggagaagaaaagtgctctctc

SEQ ID NO: 293178 - DNA, 120 bp, Artificial Sequence
  ENSG00000131482_25 (sequence is synthesized)
ttgagttgaccgagagtcccattagggatagggagacttaaatgcatccacaggggcacaggcagagttgagcacataaacggaggcccaaaatcagcatagaaccagaaagattcagag

SEQ ID NO: 293179 - DNA, 120 bp, Artificial Sequence
  ENSG00000131482_26 (sequence is synthesized)
ttggccaagaatgaacattggctaccagaccacaagtcagcatgagttgctctatggcatcaaattgcaacttgagagtagatgggcagggtcactatcaaattaagcaatcagggcaca

SEQ ID NO: 293180 - DNA, 120 bp, Artificial Sequence
  ENSG00000131482_27 (sequence is synthesized)
caagttgcagtaacacaacaagactaggccagctctggaatccagtaactcagtgtcagcaaggttttgggttatagttcaagaaagtctaaacagagccagtcacagcaccaaggaatg

SEQ ID NO: 293181 - DNA, 120 bp, Artificial Sequence
  ENSG00000131482_28 (sequence is synthesized)
ctcaagggagctattgcaggtttctctgctaagagatttatttcatcctgggtgcagggttcgacctccaaaggcctcaaatcatcaccgtatcaatggatttcctgagggtaagctccg

SEQ ID NO: 293182 - DNA, 120 bp, Artificial Sequence
  ENSG00000131482_29 (sequence is synthesized)
ctatttcacacctgaactccggagtctgtatattcagggaagattgcattctcctactggatttgggctctcagagggcgttgtgggaaccaggcccctcacagaatcaaatggtcccaa

SEQ ID NO: 293183 - DNA, 85 bp, Artificial Sequence
  ENSG00000131482_30 (sequence is synthesized)
ttgtgggaaccaggcccctcacagaatcaaatggtcccaaccagggagaaagaaaatagtcttttttttttttttaatagagatg

SEQ ID NO: 293184 - DNA, 120 bp, Artificial Sequence
  ENSG00000131482_31 (sequence is synthesized)
tgctgggattacagtgtgagccactgcgcttggccagaaatggttttgatctgtctgaactgaaccctactgcttaggcatagccccatccttgataatctatttgctcccaaggaccaa

SEQ ID NO: 293185 - DNA, 120 bp, Artificial Sequence
  ENSG00000131482_32 (sequence is synthesized)
gtccaagatccttacaagaaaggtctgccagaaagtaaatactgcccccactccctgaagtttatgaggttgataagaaaacataacagataaagtttattgagtgctaactttatgcca

SEQ ID NO: 293186 - DNA, 120 bp, Artificial Sequence
  ENSG00000131482_33 (sequence is synthesized)
cctgataaagcagttccctgtaacctgtgagactggaccaggtaagcgtcccagcccctgcagacagaagctgagtggacctcgtttacctgttatggatgaaactgaccttgaggggac

SEQ ID NO: 293187 - DNA, 120 bp, Artificial Sequence
  ENSG00000131482_34 (sequence is synthesized)
atgaggagagccattcctttgtacttttgtcatgctcttcaattggcacaaattaattcacttctgcaatactttcctgaatagcacagtagtattggaaatctgcctattacagaacct

SEQ ID NO: 293188 - DNA, 120 bp, Artificial Sequence
  ENSG00000131495_0 (sequence is synthesized)
gcttcctgtttttccctccgaccaaccccgagcgcaaagaaattgacctcgcagcggtcctacaatacttttatatcattggccaagctttaccccgcccctgcctcatgcagcctatgg

SEQ ID NO: 293189 - DNA, 120 bp, Artificial Sequence
  ENSG00000131495_1 (sequence is synthesized)
gctaggctttagggtccgcggttggtcagaccggagcacttggcctgaagacctggaattggcgacttcgatattaacaaggatggcggcggccgcagcaagtcgaggagtcggggcaaa

SEQ ID NO: 293190 - DNA, 120 bp, Artificial Sequence
  ENSG00000131495_2 (sequence is synthesized)
gctgggcctgcgtgagattcgcatccacttatgtcagcgctcgcccggcagccagggcgtcagggacttcattgagaaacgctacgtggagctgaagaaggcgaatcccgacctacccat

SEQ ID NO: 293191 - DNA, 120 bp, Artificial Sequence
  ENSG00000131495_3 (sequence is synthesized)
cttcagtgctgatcaggtaaccagagccctggagaacgttctaagtggtaaagcctgaagcctccactgaggattaagagcaacagccccagagcctgggctctgctggacttagtataa

SEQ ID NO: 293192 - DNA, 120 bp, Artificial Sequence
  ENSG00000131495_4 (sequence is synthesized)
tgtgaaaaaaatgtgttctcctattcctcataaagcttgtgctgtaaaatactttctcagggtgttcttgtcctcatctaccctctaccccttactgtgcaaccactgaggcaaagtagc

SEQ ID NO: 293193 - DNA, 120 bp, Artificial Sequence
  ENSG00000131495_5 (sequence is synthesized)
ttaatataaaaataaaactttattctgtctcatcaaaagctaccagctgctgaagcaaacatgaagggtggcgggggggcagggattctagggccccagagtaagtagaccacactgagt

SEQ ID NO: 293194 - DNA, 120 bp, Artificial Sequence
  ENSG00000131495_6 (sequence is synthesized)
cctacccatcctaatccgcgaatgctccgatgtgcagcccaagctctgggcccgctacggaaaaaaagtctctcatccctgacctcgagtgacccaagccagcagtgtcacaatctactc

SEQ ID NO: 293195 - DNA, 120 bp, Artificial Sequence
  ENSG00000131495_7 (sequence is synthesized)
agcaaacacaacttccccacccacaatacgctctagatgaaagttcaaaacaatcccgaactgcgggaagcgccatgatgccgtttcactattaatgcggatcccactgatgagagctgc

SEQ ID NO: 293196 - DNA, 120 bp, Artificial Sequence
  ENSG00000131495_8 (sequence is synthesized)
ggtcctgagaacatgtgcccaaggtggtccggtacagcttggttttacatattttagggagatatgagacttcagttcattcaagaaatacactggttgggccgggcctggtggctcatg

SEQ ID NO: 293197 - DNA, 65 bp, Artificial Sequence
  ENSG00000131495_9 (sequence is synthesized)
gggagatatgagacttcagttcattcaagaaatacactggtgggtggatcagctgaggtcaggaa

SEQ ID NO: 293198 - DNA, 120 bp, Artificial Sequence
  ENSG00000131495_10 (sequence is synthesized)
agattcgcatccacttatgtcagcgctcgcccggcagccagggcgtcaggtgaggcgcggcgtggtgaggcgggcgggcttcgggacgccagggtcacgacctcgacctccctgaagttg

SEQ ID NO: 293199 - DNA, 120 bp, Artificial Sequence
  ENSG00000131503_0 (sequence is synthesized)
agtgagaagttagtggcgctgctgggacgggggaaaggagacgcttcttcctcttgctgctcttctcgttcccgagatcagcggcggcggtgaccgcgagtgggtcggcaccgtctccgg

SEQ ID NO: 293200 - DNA, 120 bp, Artificial Sequence
  ENSG00000131503_1 (sequence is synthesized)
ctccgggtgcgaacaatgctgactgatagcggaggcggcggcacctcctttgaggaggacctggactctgtggctccgcgatccgccccagctggggcctcggagccgcctccgccggga

SEQ ID NO: 293201 - DNA, 120 bp, Artificial Sequence
  ENSG00000131503_2 (sequence is synthesized)
ggggtcggtctggggatccgcaccgtgaggctctttggggaggccgggccagcgtcgggagtcggcagcagcggcggcggcggcagcggcagcggtacgggcggaggggacgcggcgctg

SEQ ID NO: 293202 - DNA, 120 bp, Artificial Sequence
  ENSG00000131503_3 (sequence is synthesized)
gatttcaagttggcggctgccgtgctgaggaccgggggtggaggtggtgcctctggcagtgacgaggacgaagtgtccgaggttgaatcatttattttggaccaagaagatctggataac

SEQ ID NO: 293203 - DNA, 120 bp, Artificial Sequence
  ENSG00000131503_4 (sequence is synthesized)
ccagtgcttaaaacaacatcagagatattcttatcaagtactgcagaaggagcagacttacgcactgtggatccagagacacaggcacgactagaagcattgctagaagcagcaggaatt

SEQ ID NO: 293204 - DNA, 120 bp, Artificial Sequence
  ENSG00000131503_5 (sequence is synthesized)
ggcaaattgtcaactgctgatggtaaagcttttgcagatcctgaggtactccggagactgacatcctcagttagttgtgcactggatgaagctgctgctgcactgacacggatgaaagca

SEQ ID NO: 293205 - DNA, 120 bp, Artificial Sequence
  ENSG00000131503_6 (sequence is synthesized)
gaaaacagccacaatgcaggacaagtggacactcgcagtctagcagaagcttgttcagatggggatgttaatgctgttcgtaaattgctagatgaaggcagaagtgtaaatgaacataca

SEQ ID NO: 293206 - DNA, 120 bp, Artificial Sequence
  ENSG00000131503_7 (sequence is synthesized)
gaagaaggagaaagcctgctgtgtttggcttgttcagcagggtattatgaattagcacaagtattgcttgctatgcatgctaatgttgaagatcgagggaataaaggagacataactccc

SEQ ID NO: 293207 - DNA, 120 bp, Artificial Sequence
  ENSG00000131503_8 (sequence is synthesized)
ctgatggcagcttccagtggaggttacttagatattgtgaaattattacttcttcatgatgctgatgtcaactcccagtctgcaacaggaaacactgcgctaacttatgcatgtgctgga

SEQ ID NO: 293208 - DNA, 120 bp, Artificial Sequence
  ENSG00000131503_9 (sequence is synthesized)
ggatttgttgacattgttaaagtgctccttaatgaaggtgcaaatatagaagatcataatgaaaatggacatactcccttaatggaagcagccagtgcaggtcatgtggaagttgcaaga

SEQ ID NO: 293209 - DNA, 120 bp, Artificial Sequence
  ENSG00000131503_10 (sequence is synthesized)
gttcttttagatcatggtgcaggcatcaacactcattctaatgaattcaaagaaagtgctctaacacttgcttgctacaaaggccatttggatatggttcgctttctacttgaagctggt

SEQ ID NO: 293210 - DNA, 120 bp, Artificial Sequence
  ENSG00000131503_11 (sequence is synthesized)
gcagatcaagagcacaaaacagatgagatgcacactgccttaatggaggcctgcatggatggacatgtagaggtggcacgtttgcttttggatagtggtgctcaagtgaacatgcctgca

SEQ ID NO: 293211 - DNA, 120 bp, Artificial Sequence
  ENSG00000131503_12 (sequence is synthesized)
gattcatttgaatctccattgacgctagctgcctgtggaggacatgttgaattggcagctctacttattgaaaggggagcaaatcttgaagaagttaatgatgaaggatacactcccttg

SEQ ID NO: 293212 - DNA, 120 bp, Artificial Sequence
  ENSG00000131503_13 (sequence is synthesized)
atggaagctgcccgggaaggacatgaagaaatggtggcactactcttagcacaaggagcaaatataaatgcccagacagaagaaactcaagaaactgctcttactttggcttgctgtgga

SEQ ID NO: 293213 - DNA, 120 bp, Artificial Sequence
  ENSG00000131503_14 (sequence is synthesized)
ggattttctgaagttgcagactttcttattaaggcaggggctgatatagaacttggctgctccacacctctgatggaggcatctcaggagggacacctggaattggttaaatatttgctg

SEQ ID NO: 293214 - DNA, 120 bp, Artificial Sequence
  ENSG00000131503_15 (sequence is synthesized)
gcttctggcgctaatgtgcatgctacaacagcaacaggagacacagccttaacctatgcttgtgaaaatggacatacggatgttgcagatgttttacttcaagcaggggctgatttagaa

SEQ ID NO: 293215 - DNA, 120 bp, Artificial Sequence
  ENSG00000131503_16 (sequence is synthesized)
catgaatctgaaggtggaagaacacctttgatgaaagctgcaagagctggtcatttgtgcactgtgcagtttcttattagcaaaggtgccaatgttaacagggctacagccaataatgat

SEQ ID NO: 293216 - DNA, 120 bp, Artificial Sequence
  ENSG00000131503_17 (sequence is synthesized)
catacagtagtgtcgctggcatgtgcaggaggccacctggcagttgttgagcttctcttggctcatggggctgaccctactcatcgactcaaggatggttcaacaatgctcattgaagct

SEQ ID NO: 293217 - DNA, 120 bp, Artificial Sequence
  ENSG00000131503_18 (sequence is synthesized)
gcaaagggtggccatactaatgtagtttcttatctgttggattatccaaataatgttctgtcagttcccaccacagatgtgtctcagctccctccaccttctcaagatcagtctcaggtg

SEQ ID NO: 293218 - DNA, 120 bp, Artificial Sequence
  ENSG00000131503_19 (sequence is synthesized)
ccacgtgtgccaacgcatacacttgccatggttgtacctccccaggaacctgacagaacttcacaggagaactctcctgcccttttaggagtgcaaaaaggtacatccaagcagaagtcc

SEQ ID NO: 293219 - DNA, 120 bp, Artificial Sequence
  ENSG00000131503_20 (sequence is synthesized)
agttccctccaggtagcagatcaggacctactgccatcttttcacccataccagcctttggagtgcatagtagaggagactgaaggcaagctgaatgaactgggacaaagaattagtgct

SEQ ID NO: 293220 - DNA, 120 bp, Artificial Sequence
  ENSG00000131503_21 (sequence is synthesized)
attgaaaaagcacagcttaagtcactggagttaattcaaggtgaacctctgaacaaagataagatagaagaacttaaaaagaacagagaagagcaagtccagaagaagaagaaaatattg

SEQ ID NO: 293221 - DNA, 120 bp, Artificial Sequence
  ENSG00000131503_22 (sequence is synthesized)
aaagaactgcagaaagtggaaaggcagttgcagatgaaaacacagcagcaatttaccaaagaatacttggaaaccaaaggtcagaaagacacagtgtctctacaccaacagtgctctcat

SEQ ID NO: 293222 - DNA, 120 bp, Artificial Sequence
  ENSG00000131503_23 (sequence is synthesized)
agaggagtcttcccagaaggggaaggagatggtagtctcccagaggatcacttttcagagttacctcaggttgacacaatcttatttaaagataatgatgttgatgatgagcaacagtct

SEQ ID NO: 293223 - DNA, 120 bp, Artificial Sequence
  ENSG00000131503_24 (sequence is synthesized)
ccaccatcggcagaacagattgattttgtcccagtccagcctttatcatctccacagtgtaacttttccagtgacttaggttctaatgggacaaattctcttgaacttcagaaagtatca

SEQ ID NO: 293224 - DNA, 120 bp, Artificial Sequence
  ENSG00000131503_25 (sequence is synthesized)
ggtaatcagcagattgtaggacagcctcagattgctattactggacatgatcaggggctgttagttcaagaaccagatggactaatggttgcaactccagctcagacgcttaccgacact

SEQ ID NO: 293225 - DNA, 120 bp, Artificial Sequence
  ENSG00000131503_26 (sequence is synthesized)
cttgatgacctgatagcagctgtgagtaccagagtgcccactggttccaacagttcttctcagaccacagagtgtcttacacctgaatcctgttcgcagactacaagcaatgtggcttcc

SEQ ID NO: 293226 - DNA, 120 bp, Artificial Sequence
  ENSG00000131503_27 (sequence is synthesized)
caatcgatgcctcctgtgtatccttcagttgacattgatgcacatactgagagcaatcatgacacagcattaacactagcttgtgcaggtggtcatgaagaacttgtatctgtgctcatt

SEQ ID NO: 293227 - DNA, 120 bp, Artificial Sequence
  ENSG00000131503_28 (sequence is synthesized)
gcacgggatgccaaaattgaacacagagacaaaaaaggtttcacaccactaatcctggcagcaacagcagggcatgttggagttgttgaaatccttttggataaaggtggagatatagaa

SEQ ID NO: 293228 - DNA, 120 bp, Artificial Sequence
  ENSG00000131503_29 (sequence is synthesized)
gcacagtctgaacgaactaaggatactccgctttcattggcatgttctggtggacgtcaggaggtggtagacttgctgctggctcgaggtgcaaataaagaacataggaacgtatctgat

SEQ ID NO: 293229 - DNA, 120 bp, Artificial Sequence
  ENSG00000131503_30 (sequence is synthesized)
tatacaccactgagtctagctgcgtctggaggatatgttaatatcattaagattctgcttaatgctggggcagaaattaattcaaggactgggagtaaactaggtatttctcccctgatg

SEQ ID NO: 293230 - DNA, 120 bp, Artificial Sequence
  ENSG00000131503_31 (sequence is synthesized)
ttggctgcaatgaatggacatgttcctgcagtaaaattgctgctcgatatgggttcagacattaatgcccaaatagagaccaatcggaacacggctctcaccctggcctgtttccagggc

SEQ ID NO: 293231 - DNA, 120 bp, Artificial Sequence
  ENSG00000131503_32 (sequence is synthesized)
cgagcagaagtagtgagtttgcttctggaccgaaaagccaatgttgaacatagggcaaagacgggtcttacccccttgatggaagcagcttctggagggtatgcagaggttggaagagtt

SEQ ID NO: 293232 - DNA, 120 bp, Artificial Sequence
  ENSG00000131503_33 (sequence is synthesized)
cttcttgataaaggagcagatgttaatgctccccctgtgccttcctcaagagatactgctttaacaatagcagcagacaaaggtcactacaaattttgtgaactcctgattcatagggga

SEQ ID NO: 293233 - DNA, 120 bp, Artificial Sequence
  ENSG00000131503_34 (sequence is synthesized)
gccactttggctggcatccaatggaggtcattttgatgttgtgcagttgctagtgcaagcaggtgctgatgtggatgcagcagataaccggaaaatcacacctcttatgtcagcatttcg

SEQ ID NO: 293234 - DNA, 120 bp, Artificial Sequence
  ENSG00000131503_35 (sequence is synthesized)
caagggtcatgtaaaagttgttcaatatttggtaaaggaagtaaatcagttcccttctgatatagaatgcatgagatacatagcaacaattacagataaggaactgttgaaaaaatgtca

SEQ ID NO: 293235 - DNA, 120 bp, Artificial Sequence
  ENSG00000131503_36 (sequence is synthesized)
tcaatgtgtcgaaaccattgtgaaggctaaagaccagcaagctgcagaagcaaataagaatgcgagtattcttttaaaggaacttgatctggaaaagtcaagagaagagagcagaaagca

SEQ ID NO: 293236 - DNA, 120 bp, Artificial Sequence
  ENSG00000131503_37 (sequence is synthesized)
aagaaaagaaaagagaaaaaagaaaaaagaggaacagaaaaggaaacaggaagaagatgaagaaaacaaacctaaggagaattcggaactaccagaggatgaagatgaagaggagaatga

SEQ ID NO: 293237 - DNA, 120 bp, Artificial Sequence
  ENSG00000131503_38 (sequence is synthesized)
ggatgaagatgaagaggagaatgatgaagatgtggagcaagaagttcccatagaacctcctagtgcaaccaccaccactacgattggaatctctgcaacatctgcaacattcacaaatgt

SEQ ID NO: 293238 - DNA, 120 bp, Artificial Sequence
  ENSG00000131503_39 (sequence is synthesized)
gtttgggaaaaaaagggccaatgtggtgacaactcccagcaccaatcggaaaaataagaagaacaaaacaaaagaaacccctcctacagcacatttaattttaccagaacaacatatgtc

SEQ ID NO: 293239 - DNA, 120 bp, Artificial Sequence
  ENSG00000131503_40 (sequence is synthesized)
tttagcccaacaaaaggcagataaaaataaaataaatggagaacctagaggtggtggtgcaggtgggaatagtgattcagataacttggacagcacagactgcaacagtgagagtagcag

SEQ ID NO: 293240 - DNA, 120 bp, Artificial Sequence
  ENSG00000131503_41 (sequence is synthesized)
tggtggtaaaagccaagagttaaattttgtgatggatgtgaattcctctaaatacccctcactgctccttcattcccaagaagaaaagacaagtactgctacttccaaaactcagacacg

SEQ ID NO: 293241 - DNA, 120 bp, Artificial Sequence
  ENSG00000131503_42 (sequence is synthesized)
acttgaaggtgaagtgactcctaattccttgtcaaccagctacaagacagtgtcattgccattaagctctccaaacataaagctgaatctcactagccctaaaaggggtcagaaaagaga

SEQ ID NO: 293242 - DNA, 120 bp, Artificial Sequence
  ENSG00000131503_43 (sequence is synthesized)
agaagggtggaaagaagttgtacgaaggtcaaagaaattgtctgttccagcctcagtggtgtcgaggataatgggaagaggaggatgcaacatcactgcaatacaggatgttactggtgc

SEQ ID NO: 293243 - DNA, 120 bp, Artificial Sequence
  ENSG00000131503_44 (sequence is synthesized)
ccatattgatgtggataaacaaaaagataagaatggcgagagaatgatcacaataaggggtggcacagaatcaacaagatatgcagttcaactaatcaatgcactcattcaagatcctgc

SEQ ID NO: 293244 - DNA, 120 bp, Artificial Sequence
  ENSG00000131503_45 (sequence is synthesized)
taaggaactggaagacttgattcctaaaaatcatatcagaacacctgccagcaccaaatcaattcatgctaacttctcatctggagtaggtaccacagcagcttccagtaaaaatgcatt

SEQ ID NO: 293245 - DNA, 120 bp, Artificial Sequence
  ENSG00000131503_46 (sequence is synthesized)
tcctttgggtgctccaactcttgtaacttcacaggcaacaacgttatctacgttccagcccgctaataaacttaataagaatgttccaacaaatgtacgttcttctttcccagtttctct

SEQ ID NO: 293246 - DNA, 120 bp, Artificial Sequence
  ENSG00000131503_47 (sequence is synthesized)
acccttagcttatcctcaccctcattttgccctgctggctgctcaaactatgcaacagattcggcatcctcgcttacccatggcccagtttggaggaaccttctcaccttctcctaacac

SEQ ID NO: 293247 - DNA, 120 bp, Artificial Sequence
  ENSG00000131503_48 (sequence is synthesized)
atggggaccattcccagtgagacctgtgaatcctggcaacacaaatagctctccaaagcataataacacaagccgtctacctaaccagaacgggactgttttaccctcagagtctgctgg

SEQ ID NO: 293248 - DNA, 120 bp, Artificial Sequence
  ENSG00000131503_49 (sequence is synthesized)
actagctactgccagttgtcctatcactgtctcttctgtagttgctgccagtcagcaactgtgtgtcactaatacccggactccttcatcagtcagaaagcagttgtttgcctgtgtgcc

SEQ ID NO: 293249 - DNA, 120 bp, Artificial Sequence
  ENSG00000131503_50 (sequence is synthesized)
taagacaagtcctccagcaacagtgatttcttctgtgacaagcacttgtagttccctgccttctgtctcctctgcacctatcactagcgggcaagctcccaccacatttctacctgcaag

SEQ ID NO: 293250 - DNA, 120 bp, Artificial Sequence
  ENSG00000131503_51 (sequence is synthesized)
tacttctcaagcacagctttcttcacaaaagatggagtctttctctgctgtgccacccaccaaagagaaagtgtccacacaggaccagcccatggcaaacctatgtaccccatcttcaac

SEQ ID NO: 293251 - DNA, 120 bp, Artificial Sequence
  ENSG00000131503_52 (sequence is synthesized)
tgcaaacagttgcagtagctctgccagcaacaccccgggagctccagaaactcacccatccagtagtcccactcctacttccagtaacacacaagaggaggcacagccatccagtgtgtc

SEQ ID NO: 293252 - DNA, 120 bp, Artificial Sequence
  ENSG00000131503_53 (sequence is synthesized)
tgatttaagtcctatgtcaatgccttttgcatctaactcagaacctgctccattgactttgacatcacccagaatggttgctgctgataatcaggacaccagtaatttacctcagttagc

SEQ ID NO: 293253 - DNA, 120 bp, Artificial Sequence
  ENSG00000131503_54 (sequence is synthesized)
tgtaccagcacctcgagtttctcatcgaatgcagcccagaggttctttttactccatggtaccaaatgcaactattcaccaggatccccagtctatttttgttacgaatccagttacttt

SEQ ID NO: 293254 - DNA, 120 bp, Artificial Sequence
  ENSG00000131503_55 (sequence is synthesized)
aacaccacctcaaggcccaccagctgcagtgcagctttcttcagctgtgaacattatgaatggttctcagatgcacataaacccagcaaataagtctttgccacctacatttggcccagc

SEQ ID NO: 293255 - DNA, 120 bp, Artificial Sequence
  ENSG00000131503_56 (sequence is synthesized)
cacacttttcaatcacttcagcagtctttttgatagtagtcaggtgccagctaaccagggctggggagatggtccactgtcctcacgagttgctacagatgcctctttcactgttcagtc

SEQ ID NO: 293256 - DNA, 120 bp, Artificial Sequence
  ENSG00000131503_57 (sequence is synthesized)
agcgttcctgggtaactcagtgcttggacacttggaaaacatgcaccctgataactcaaaggcacctggcttcagaccaccttcccagcgagtttctactagtccagttgggttaccatc

SEQ ID NO: 293257 - DNA, 120 bp, Artificial Sequence
  ENSG00000131503_58 (sequence is synthesized)
cattgacccatcaggcagctccccatcttcctcttctgctcctctggcaagtttttccggcataccaggaacaagggttttcctgcaagggccagctcctgttgggactcctagtttcaa

SEQ ID NO: 293258 - DNA, 120 bp, Artificial Sequence
  ENSG00000131503_59 (sequence is synthesized)
cagacaacatttttctccccatccttggacaagcgcctcaaactcatccacttctgccccaccaacgttgggccaaccaaaaggagtcagtgccagtcaagatcgaaagatacctccccc

SEQ ID NO: 293259 - DNA, 120 bp, Artificial Sequence
  ENSG00000131503_60 (sequence is synthesized)
aattggaacagagagactggcccgaattcggcaaggagggtctgttgcacaagccccggcggggaccagttttgtcgctcccgttggacacagtggaatctggtcatttggtgtcaatgc

SEQ ID NO: 293260 - DNA, 120 bp, Artificial Sequence
  ENSG00000131503_61 (sequence is synthesized)
tgtgtcagaaggcttatcaggttggtcgcaatctgtgatggggaaccatccaatgcatcaacaattatcagacccaagcacattctcccaacatcagccaatggagagagatgattctgg

SEQ ID NO: 293261 - DNA, 120 bp, Artificial Sequence
  ENSG00000131503_62 (sequence is synthesized)
aatggtagccccctctaacatttttcatcagcctatggcaagtggttttgtggatttttctaaaggtctgccaatttccatgtatggaggcaccataataccctctcatcctcagcttgc

SEQ ID NO: 293262 - DNA, 120 bp, Artificial Sequence
  ENSG00000131503_63 (sequence is synthesized)
tgatgttccaggaggccctctgtttaatggacttcacaatccagatcctgcttggaaccctatgataaaagttatccaaaattcaactgaatgcactgatgcccagcagatttggcctgg

SEQ ID NO: 293263 - DNA, 120 bp, Artificial Sequence
  ENSG00000131503_64 (sequence is synthesized)
cacgtgggcacctcatattggaaacatgcatctcaaatatgtcaactaagttagaaggtctttactctttagccttgtttaagaaacctatgaccttggaagaaccatggggattttttt

SEQ ID NO: 293264 - DNA, 120 bp, Artificial Sequence
  ENSG00000131503_65 (sequence is synthesized)
ttaatgtgcctaagaaattttctctgaggctttagcaatggaaatttgattgcccattgtataagaacaaattgatttcctatccacctgattatgttctctggttagtttagccatttt

SEQ ID NO: 293265 - DNA, 120 bp, Artificial Sequence
  ENSG00000131503_66 (sequence is synthesized)
gaacttaagatcatatgaccttagtgcttttggctaaacatacagaatactacttgtatgcagaagagaattagttgattacatgtttcaaccttttagggtgataaatacatgtataat

SEQ ID NO: 293266 - DNA, 120 bp, Artificial Sequence
  ENSG00000131503_67 (sequence is synthesized)
tgtttacatacttaaaaggaaaaagttgagtaaatttcttgtcatatagtggctctacgtaatgtagcctgtattaatgtgaaatatttaccagaatattcaataaaaagatgaacagtc

SEQ ID NO: 293267 - DNA, 120 bp, Artificial Sequence
  ENSG00000131503_68 (sequence is synthesized)
tggacaagcaggaggacatgaagactattttggagggcatagatccggccaagcatcaggtgagggtggcctttgatgcttgtaagctactacgtaaagaatagatgttgtaggtaacca

SEQ ID NO: 293268 - DNA, 120 bp, Artificial Sequence
  ENSG00000131503_69 (sequence is synthesized)
gaactctggatatctgaattccagccaagaagttccaggaccctgctgggtgacaaaggaaatcctcttcaattgaaaaagattatgaagtcccaataaaaagagatttgtattgctggt

SEQ ID NO: 293269 - DNA, 120 bp, Artificial Sequence
  ENSG00000131503_70 (sequence is synthesized)
cttggacaagcgcctcaaactcatgtgactctcctattccatctgtttcttcgggatcatcttcacctctttcagccacttctgccccaccaacgttgggccaaccaaaaggagtcagtg

SEQ ID NO: 293270 - DNA, 120 bp, Artificial Sequence
  ENSG00000131503_71 (sequence is synthesized)
gctagcataccccaattgaagaaatatattacatttttgttttcttttgatccatgtagaatttgaacaagggtaaattggctagtggatagtgaatatgtgacttgtacccctagctac

SEQ ID NO: 293271 - DNA, 120 bp, Artificial Sequence
  ENSG00000131503_72 (sequence is synthesized)
aattggaaccagcaaggcgttctattcagcaagggagtaatgttatttccatttagcttaaaatcattgactatttgtagattccccgactgtctaatcattagtctcaaaaattattgc

SEQ ID NO: 293272 - DNA, 120 bp, Artificial Sequence
  ENSG00000131503_73 (sequence is synthesized)
tcctaaagatggctggtgaatgtatcacctccatgagagcccaattcagaaatgcagccagaatggctgttgacagtggatgaagaccaagaactaagatgtagctggagtgatattcaa

SEQ ID NO: 293273 - DNA, 120 bp, Artificial Sequence
  ENSG00000131503_74 (sequence is synthesized)
atcctggaggaactcttcccaaagagttttgaataagttattaaatcatttatttcagttacaacaccatgttgtaactttagtaaactaagtggtatacagatgcccaaggtttgttct

SEQ ID NO: 293274 - DNA, 120 bp, Artificial Sequence
  ENSG00000131503_75 (sequence is synthesized)
gtggtcatgtgaaaaaattgtcagtcatttttagcatagaaaacttgagaattattctttcaagccaaaaatgttttacagtagaacttggatcaagaaaagaggtactaggctgggtgc

SEQ ID NO: 293275 - DNA, 76 bp, Artificial Sequence
  ENSG00000131503_76 (sequence is synthesized)
agaggatcgcttgagcccagcagttggagaccagcctgggcaacagcaagaccctgtctctattaaaaaaaaaaaa

SEQ ID NO: 293276 - DNA, 120 bp, Artificial Sequence
  ENSG00000131503_77 (sequence is synthesized)
gttaatatccatttatacttaacatttagaaaacactaaagatcaatggtttgcgtactttgtatacagtaacttaaaaaagcttggctacctgttctagttgttgtatgtattaaatgt

SEQ ID NO: 293277 - DNA, 120 bp, Artificial Sequence
  ENSG00000131503_78 (sequence is synthesized)
atttgaaaatacttagtgttgaacagggcatactgtttcttttcctaggtaaaactactagtttgtttcttcctttcactccacccccatttgacattcctgtgctttttaaactgccat

SEQ ID NO: 293278 - DNA, 120 bp, Artificial Sequence
  ENSG00000131503_79 (sequence is synthesized)
ctgttagatatatcataaattcaatgatgtgttcacagaatagagtaacaagtcaagtcactttgagtgatttattattattttaattgacacatgataattgaacatattaatggggta

SEQ ID NO: 293279 - DNA, 120 bp, Artificial Sequence
  ENSG00000131503_80 (sequence is synthesized)
gttttgagcagattatttagagctagaataaaaacaaatgtggcctgcttcctttctagcattgtttagttcaattgggaaaacattttttagactgttgtatacttattataggcagaa

SEQ ID NO: 293280 - DNA, 120 bp, Artificial Sequence
  ENSG00000131503_81 (sequence is synthesized)
atcgtgtaggataatgtctatagaaattatgttttatttgaatgttcttttaaaatgaaaattttctttacagaacttatgttgtggaatagatctttccaacaaggtttctcatattct

SEQ ID NO: 293281 - DNA, 120 bp, Artificial Sequence
  ENSG00000131503_82 (sequence is synthesized)
aatattgagtgaaagaagccagacgcaaaagagtacattgtatgattccgttcatataaagttcaaaaactaaaaccagtttggaagtcagggtagtggttaccattgggaggctgggta

SEQ ID NO: 293282 - DNA, 120 bp, Artificial Sequence
  ENSG00000131503_83 (sequence is synthesized)
gtgactgaaagggagcacaagatggggcttttggtatgtggataatgttctgtttcttcctctgggtgctggttacacaggtgtgtgttcattttgtgaaaaaaattcaaactatacact

SEQ ID NO: 293283 - DNA, 120 bp, Artificial Sequence
  ENSG00000131503_84 (sequence is synthesized)
taatgatttgtatatttttttgtatctacattatacttcacaaaaaatttttaaatgatattgactatgaactagcttgatgtcaacctttgctaagattgcgatttatttttcttcaaa

SEQ ID NO: 293284 - DNA, 120 bp, Artificial Sequence
  ENSG00000131503_85 (sequence is synthesized)
tgttacatattgagaaaatcatgactctaaattctttaggatttattttctttaaaggtacactgaaatttgttattgccttatttattgagaatagtggtttttaaaaaccacttaata

SEQ ID NO: 293285 - DNA, 120 bp, Artificial Sequence
  ENSG00000131503_86 (sequence is synthesized)
tcaaatataaacgtaagtattctaagttgttatcttattacaactaggtttttcagggttttttatttgttttttaacaagagaatcaagagaaagctttttcttttttcttttgttttt

SEQ ID NO: 293286 - DNA, 120 bp, Artificial Sequence
  ENSG00000131503_87 (sequence is synthesized)
cttttgttttttagatttgtcacatcattctttttgttttgtgagaagtataagtactgaatatcaaaagtcataattgaccatttcgatctggattgctttttcaatatcaagatgatg

SEQ ID NO: 293287 - DNA, 120 bp, Artificial Sequence
  ENSG00000131503_88 (sequence is synthesized)
ctactgaacactttatttaatatatgtgtattcttcctaggcagaaacagtgaattgccattgcatttatatattcattttgtaactgtctaaagattcctaattagaaattccaatttt

SEQ ID NO: 293288 - DNA, 80 bp, Artificial Sequence
  ENSG00000131504_0 (sequence is synthesized)
taaagagcgactgggcggcggcgggcgcggagctgccaggcgggagcggcgtaggcgcggggtcgccggccagcgtgaac

SEQ ID NO: 293289 - DNA, 120 bp, Artificial Sequence
  ENSG00000131504_1 (sequence is synthesized)
gcgggacccgggacaagaagaagggccggagcccagatgagctgccctcggcgggcggcgacggcggcaaatctaagaaatttactctgaagcggctcatggcagatgagctggagagat

SEQ ID NO: 293290 - DNA, 120 bp, Artificial Sequence
  ENSG00000131504_2 (sequence is synthesized)
ttaccagcatgagaattaagaaggagaaggaaaagcccaattctgctcatagaaattcttctgcatcatatggggatgatcccacagcacagtcattgcaagatgtttcagatgaacaag

SEQ ID NO: 293291 - DNA, 120 bp, Artificial Sequence
  ENSG00000131504_3 (sequence is synthesized)
tgctggttctctttgaacagatgctgctggatatgaacctgaatgaggagaaacagcaacctttgagggagaaggacatcatcatcaagagggagatggtgtcccaatacttgtacacct

SEQ ID NO: 293292 - DNA, 120 bp, Artificial Sequence
  ENSG00000131504_4 (sequence is synthesized)
ccaaggctggcatgagccagaaggagagctctaagtctgccatgatgtatattcaggagttgaggtcaggcttgcgggatatgcctctgctcagctgcctggagtcccttcgtgtgtctc

SEQ ID NO: 293293 - DNA, 120 bp, Artificial Sequence
  ENSG00000131504_5 (sequence is synthesized)
tcaacaacaaccctgtcagttgggtgcaaacatttggtgctgaaggcttggcctccttattggacattcttaaacgacttcatgatgagaaagaagagactgctgggagttacgatagcc

SEQ ID NO: 293294 - DNA, 120 bp, Artificial Sequence
  ENSG00000131504_6 (sequence is synthesized)
ggaacaagcatgagatcattcgctgcttgaaagcttttatgaacaacaagtttggaatcaagaccatgttggagacagaagaaggaatcctactgctggtcagagccatggatcctgctg

SEQ ID NO: 293295 - DNA, 120 bp, Artificial Sequence
  ENSG00000131504_7 (sequence is synthesized)
ttcccaacatgatgattgatgcagctaagctgctttctgctctttgtattctaccgcagccagaggacatgaatgaaagggttttggaggcaatgacagaaagagctgagatggatgaag

SEQ ID NO: 293296 - DNA, 120 bp, Artificial Sequence
  ENSG00000131504_8 (sequence is synthesized)
tggaacgtttccagccgctgctggatggattaaaaagtggaaccactattgcactgaaggttggatgcctacagctgatcaatgctctcatcacaccagcggaggaacttgacttccgag

SEQ ID NO: 293297 - DNA, 120 bp, Artificial Sequence
  ENSG00000131504_9 (sequence is synthesized)
ttcacatcagaagtgaactgatgcgtttggggctacatcaggtgttgcaggaccttcgagagattgaaaatgaagatatgagagtgcaactaaatgtgtttgatgaacaaggggaagagg

SEQ ID NO: 293298 - DNA, 120 bp, Artificial Sequence
  ENSG00000131504_10 (sequence is synthesized)
attcctatgacctgaagggacggctggatgacattcgcatggagatggatgactttaatgaagtctttcagattctcttaaacacagtgaaggattcaaaggcagagccacacttccttt

SEQ ID NO: 293299 - DNA, 120 bp, Artificial Sequence
  ENSG00000131504_11 (sequence is synthesized)
ccatcctgcagcacttactcttggtccgaaatgactatgaggccagacctcagtactataagttgattgaagaatgtatttcccagatagttctgcacaagaacggggctgatcctgact

SEQ ID NO: 293300 - DNA, 120 bp, Artificial Sequence
  ENSG00000131504_12 (sequence is synthesized)
tcaagtgccggcacctccagattgagattgagggattaattgatcaaatgattgataagacaaaggtggagaaatctgaagccaaagctgcagagctggaaaagaagttggactcagagt

SEQ ID NO: 293301 - DNA, 120 bp, Artificial Sequence
  ENSG00000131504_13 (sequence is synthesized)
taacagcccgacatgagctacaggtggaaatgaaaaagatggaaagtgactttgagcagaagcttcaagatcttcagggagaaaaagatgcactgcattctgaaaagcagcaaattgcca

SEQ ID NO: 293302 - DNA, 120 bp, Artificial Sequence
  ENSG00000131504_14 (sequence is synthesized)
cagagaaacaggacctggaagcagaggtgtcccagctcacaggagaggttgccaagctgacaaaggaactggaagatgccaagaaagaaatggcttccctctctgcggcagctattactg

SEQ ID NO: 293303 - DNA, 120 bp, Artificial Sequence
  ENSG00000131504_15 (sequence is synthesized)
tacctccttctgttcctagtcgtgctcctgttccccctgcccctcctttacctggtgactctggcactattattccaccaccacctgctcctggggatagtaccactcctcctcctcctc

SEQ ID NO: 293304 - DNA, 120 bp, Artificial Sequence
  ENSG00000131504_16 (sequence is synthesized)
ctcctcctcctcctcctccacctcctttgcctgggggtgtttgcatctcctcacccccttctttacctggaggtactgctatctctccaccccctcctttgtctggggatgctaccatcc

SEQ ID NO: 293305 - DNA, 120 bp, Artificial Sequence
  ENSG00000131504_17 (sequence is synthesized)
ctccaccccctcctttgcctgagggtgttggcatcccttcaccctcttctttgcctggaggtactgccatccccccacctcctcctttgcctgggagtgctagaatccccccaccaccac

SEQ ID NO: 293306 - DNA, 120 bp, Artificial Sequence
  ENSG00000131504_18 (sequence is synthesized)
ctcctttgcctgggagtgctggaattccccccccacctcctcccttgcctggagaagcaggaatgccacctcctcctccccctcttcctggtggtcctggaatccctccacctcctccat

SEQ ID NO: 293307 - DNA, 120 bp, Artificial Sequence
  ENSG00000131504_19 (sequence is synthesized)
ttcccggaggccctggcattcctccacctccacccggaatgggtatgcctccacctcccccatttggatttggagttcctgcagccccagttctgccatttggattaacccccaaaaagc

SEQ ID NO: 293308 - DNA, 120 bp, Artificial Sequence
  ENSG00000131504_20 (sequence is synthesized)
tttataagccagaggtgcagctccggaggccaaactggtccaagcttgtggctgaggacctctcccaggactgcttctggacaaaggtgaaggaggaccgctttgagaacaatgaacttt

SEQ ID NO: 293309 - DNA, 120 bp, Artificial Sequence
  ENSG00000131504_21 (sequence is synthesized)
tcgccaaacttacccttaccttctctgcccagaccaagacttccaaagccaagaaggatcaagaaggtggagaagaaaagaaatctgtgcaaaagaaaaaagtaaaagagttaaaggtgt

SEQ ID NO: 293310 - DNA, 120 bp, Artificial Sequence
  ENSG00000131504_22 (sequence is synthesized)
tggattcaaagacagcccagaatctctcaatctttttgggttccttccgcatgccctatcaagagattaagaatgtcatcctggaggtgaatgaggctgttctgactgagtctatgatcc

SEQ ID NO: 293311 - DNA, 120 bp, Artificial Sequence
  ENSG00000131504_23 (sequence is synthesized)
ggcgtggtgatgggcactgtgccccgactgcggcctcgcctcaatgccattctcttcaagctacaattcagcgagcaagtggagaatatcaagccagagattgtgtctgtcactgctgca

SEQ ID NO: 293312 - DNA, 120 bp, Artificial Sequence
  ENSG00000131504_24 (sequence is synthesized)
tgtgaggagttacgtaagagtgagagcttttccaatctcctagagattaccttgcttgttggaaattacatgaatgctggctccagaaatgctggtgcttttggcttcaatatcagcttc

SEQ ID NO: 293313 - DNA, 120 bp, Artificial Sequence
  ENSG00000131504_25 (sequence is synthesized)
ctctgtaagcttcgagacaccaagtccacagatcagaagatgacgttgttacacttcttggctgagttgtgtgagaatgactatcccgatgtcctcaagtttccagacgagcttgcccat

SEQ ID NO: 293314 - DNA, 120 bp, Artificial Sequence
  ENSG00000131504_26 (sequence is synthesized)
gtggagaaagccagccgagtttctgctgaaaacttgcaaaagaacctagatcagatgaagaaacaaatttctgatgtggaacgtgatgttcagaatttcccagctgccacagatgaaaaa

SEQ ID NO: 293315 - DNA, 120 bp, Artificial Sequence
  ENSG00000131504_27 (sequence is synthesized)
gacaagtttgttgaaaaaatgaccagctttgtgaaggatgcacaggaacagtataacaagctgcggatgatgcattctaacatggagaccctctataaggagctgggcgagtacttcctc

SEQ ID NO: 293316 - DNA, 120 bp, Artificial Sequence
  ENSG00000131504_28 (sequence is synthesized)
tttgaccccaagaagttgtctgttgaagaatttttcatggatcttcacaattttcggaatatgtttttgcaagcagtcaaggagaaccagaagcggcgggagacagaagaaaagatgagg

SEQ ID NO: 293317 - DNA, 120 bp, Artificial Sequence
  ENSG00000131504_29 (sequence is synthesized)
cgagcaaaactagccaaggagaaggcagagaaggagcggctagagaagcagcagaagagagagcaactcatagacatgaatgcagagggcgatgagacaggtgtgatggacagtcttcta

SEQ ID NO: 293318 - DNA, 120 bp, Artificial Sequence
  ENSG00000131504_30 (sequence is synthesized)
gaagccctgcagtcaggggcagcattccgacggaagagagggccccgtcaagccaacaggaaggccgggtgtgcagtcacatctctgctagcttcggagctgaccaaggatgatgccatg

SEQ ID NO: 293319 - DNA, 120 bp, Artificial Sequence
  ENSG00000131504_31 (sequence is synthesized)
gctgctgttcctgccaaggtgtccaagaacagtgagacattccccacaatccttgaggaagccaaggagttggttggccgtgcaagctaatgtgggtcctgtgaccgcggcagctcctca

SEQ ID NO: 293320 - DNA, 120 bp, Artificial Sequence
  ENSG00000131504_32 (sequence is synthesized)
gcggagccgcagactgtcctgccctgcagcatgtgcctaaaggctcaaggggatattcctctggggtggccactcccaccaccctgaccctgtctttctctctggcctgctgctctctca

SEQ ID NO: 293321 - DNA, 120 bp, Artificial Sequence
  ENSG00000131504_33 (sequence is synthesized)
acatcacatacagcttcagctgcctggaggccagaaggaaagggcagtgcaggggaggcctgagcccgacttagccagccctggctgttgtattaccaaagcagggtccatgtttgctgc

SEQ ID NO: 293322 - DNA, 120 bp, Artificial Sequence
  ENSG00000131504_34 (sequence is synthesized)
cttaaccctgtctcctctctgttactcagagggcctcatctcagacaaggcccagcctgctttttctcagccctgactttctaatgggctttcccccctaggtcagtcttgctggatttg

SEQ ID NO: 293323 - DNA, 120 bp, Artificial Sequence
  ENSG00000131504_35 (sequence is synthesized)
tgcttttcttttgtggtttctctggccctgagaatagcatggggcttgtaaacctttgggctagatccctcctttcattgctgttgtctctgctcttccctctcctggctgtggttattt

SEQ ID NO: 293324 - DNA, 120 bp, Artificial Sequence
  ENSG00000131504_36 (sequence is synthesized)
attattagtggtgtggcactgggagctgctcctaaggaagcagggagcaaatcccacctttaccccaccttcctgggaaaggcctccaaagcaaaggatctggaccagtttccctgctgt

SEQ ID NO: 293325 - DNA, 120 bp, Artificial Sequence
  ENSG00000131504_37 (sequence is synthesized)
gctgtggcccaggccagagcctgtgggcaggcaggcagggcatagcgacagtgtgggacctgcccccagcttctgccacgctttatgcccttgcctctctggacgctctgcaccaacccc

SEQ ID NO: 293326 - DNA, 120 bp, Artificial Sequence
  ENSG00000131504_38 (sequence is synthesized)
aggctactgagccaccttccctcctcatgccttccctgagctttggtgcatctcatctggactatgggttgtactgtgaccatcccaacacctcaccctctgtctacaaggaaatgggag

SEQ ID NO: 293327 - DNA, 120 bp, Artificial Sequence
  ENSG00000131504_39 (sequence is synthesized)
gtggagcctcctggctgagaaattgttttgcaaatggatctatttttgtatgaaaaaaaaaatttttttaaagaaaactgttccttccccctttcccctccataatgtaagaagctttgg

SEQ ID NO: 293328 - DNA, 120 bp, Artificial Sequence
  ENSG00000131504_40 (sequence is synthesized)
tggcaggttacagagttctgggatttcttctcacaggcccaatcctgaatgtgcccctggaccttctggacccttgagtccaaggcagatcctctctcccagggaatccgacacaggagg

SEQ ID NO: 293329 - DNA, 120 bp, Artificial Sequence
  ENSG00000131504_41 (sequence is synthesized)
aaccccttctctggttgagctgggccaggcctaagagtagcaggaactctaagaccacagagttttttataaatgtataaatgtatcaagccaaatgtgcagatgctaactggacattct

SEQ ID NO: 293330 - DNA, 120 bp, Artificial Sequence
  ENSG00000131504_42 (sequence is synthesized)
ggggaactgggcaccaggagtgccttcatacactgtaccccagctctcttctaaaagagaagtgggtgggcacactgaactgtttggtggccccaaccacaggaagctgcaattctctgg

SEQ ID NO: 293331 - DNA, 120 bp, Artificial Sequence
  ENSG00000131504_43 (sequence is synthesized)
cttagggtgatacttttgccctccttgtgcccctctcagctttccatccccagctaggaagaaagaatggcactcttgggcttggcccagaattagagttattagagcaagagagagctt

SEQ ID NO: 293332 - DNA, 120 bp, Artificial Sequence
  ENSG00000131504_44 (sequence is synthesized)
aggaagcatgagggcaactatagtgaggccttattgccaggagggagggttttggttgctggcgcttgtgtataaaggggcaagagcagctcctttggactattcctgggaggactctga

SEQ ID NO: 293333 - DNA, 120 bp, Artificial Sequence
  ENSG00000131504_45 (sequence is synthesized)
tgcagggcgtctgttgctcccctgggtcacctcctccctgctcgctgacatctggggctttgaccctttcttttttaatctacttttgctaagatgcatttaataaaaaaaaagagagag

SEQ ID NO: 293334 - DNA, 120 bp, Artificial Sequence
  ENSG00000131504_46 (sequence is synthesized)
agagagaggtgtgagggacaaaatgcaaacctatttcccttgcctcataggcttctgggatgtcatcacctccagtttgttggttttgtttccaactgttaataaagcattgaaacagta

SEQ ID NO: 293335 - DNA, 120 bp, Artificial Sequence
  ENSG00000131504_47 (sequence is synthesized)
agtatttatttaggttagcgtgggtgagatacagcagagattaaaactgatctggagcacctaaaaaaaagatgaagccaagaaggatcaagaaggtggagaagaaaagaaatctgtgca

SEQ ID NO: 293336 - DNA, 120 bp, Artificial Sequence
  ENSG00000131504_48 (sequence is synthesized)
aaagaaaaaagtaaaagagttaaaggtgttggattcaaagacagcccagaatctctaacctcattaagcaaatgccagagccagagcagttaaaaatgctttctgaactgaaggatgaat

SEQ ID NO: 293337 - DNA, 120 bp, Artificial Sequence
  ENSG00000131504_49 (sequence is synthesized)
tggaatatccttttgctgactaggttcaaggcagatgagacattcattgtatttagttccctgatccctgtgtggaatggtttgggagatgatgactcagaacagagcatcaggcttatg

SEQ ID NO: 293338 - DNA, 120 bp, Artificial Sequence
  ENSG00000131504_50 (sequence is synthesized)
tgtcttctcattaaataaggcaggtgtatttttattgcgctggctttacttagcttatcatagatcagggaagtcagtaaaggtgatctgagggttgttgagcatggaagccatcaaaat

SEQ ID NO: 293339 - DNA, 120 bp, Artificial Sequence
  ENSG00000131504_51 (sequence is synthesized)
agatgcagaggacttagacatcaggaagacttagccactggaggcagtacttcaggaaagtgcactctttgatcagtggtctttcctcggccctgctctgaaacctaaccagagggcgat

SEQ ID NO: 293340 - DNA, 120 bp, Artificial Sequence
  ENSG00000131504_52 (sequence is synthesized)
actcttttactcagcagttgctcatcagggacacaccttgctgcaggctgcctgcatcctgagcaatcgatgccgcaagtccttgccagcggagcacagagcaaaatgccaagaaggatc

SEQ ID NO: 293341 - DNA, 120 bp, Artificial Sequence
  ENSG00000131504_53 (sequence is synthesized)
gtattccagccaggctgctcctcttagatgcagaggacttagacatcaggaagacttagccactggaggcagtacttcaggaaagtgcactctttgatcagtggtctttcctcggccctg

SEQ ID NO: 293342 - DNA, 120 bp, Artificial Sequence
  ENSG00000131504_54 (sequence is synthesized)
ctctgaaacctaaccaggcaaaacactttaggataaaagggagtgatatagttgcttagtaatttcacaatcgtagtctctacttatcctggtcttggagttgggcagttgtataatttt

SEQ ID NO: 293343 - DNA, 120 bp, Artificial Sequence
  ENSG00000131504_55 (sequence is synthesized)
gttgctagtcctgattggggtggggaggatggcattgcgggaaaatatcccaaggtctgcattggataataggcaatgagatcttttgttttaaccattttttagcagatacaagtaaac

SEQ ID NO: 293344 - DNA, 120 bp, Artificial Sequence
  ENSG00000131504_56 (sequence is synthesized)
atgagcgtgtgagacttaaggctgagctctctttgcctcttcttagctgccagctgctgtgggagaggggaaatcaagcaatagccattcattttgtgtggggcttgatatttgccatgc

SEQ ID NO: 293345 - DNA, 120 bp, Artificial Sequence
  ENSG00000131504_57 (sequence is synthesized)
ctacattaactctttgtattccagccaggctgctcctcttagatgcagaggacttagacatcaggaagacttagccactggaggcagtacttcagagggcgatgagacaggtgtgatgga

SEQ ID NO: 293346 - DNA, 77 bp, Artificial Sequence
  ENSG00000131504_58 (sequence is synthesized)
agaagagactgctgggagttacgatagccggaacaagcatgagatcattcgctgcttgaaagcttttatgaacaact

SEQ ID NO: 293347 - DNA, 120 bp, Artificial Sequence
  ENSG00000131504_59 (sequence is synthesized)
agaaatggcaggggagatcaagaacaatgtttcttctagtttaaagaggtttgaaatcttaatactttggtcctcttatctttgaacatagatgagagtacagagtcagtatggtaagtt

SEQ ID NO: 293348 - DNA, 72 bp, Artificial Sequence
  ENSG00000131504_60 (sequence is synthesized)
agagaccccatctctgcaaaaaaatacaaaaatagccagatatggtggcacatgcttatagtcccagctact

SEQ ID NO: 293349 - DNA, 120 bp, Artificial Sequence
  ENSG00000131507_0 (sequence is synthesized)
aggggccgcgtcggagcctcggcggcggcggcggtgcttacagcctgagaagagcgtctcgcccgggagcggcggcggccatcgagacccacccaaggcgcgtccccctcggcctcccag

SEQ ID NO: 293350 - DNA, 120 bp, Artificial Sequence
  ENSG00000131507_1 (sequence is synthesized)
cgctcccaagccgcagcggccgcgccccttcagctagctcgctcgctcgctctgcttccctgctgccggctgcgccatggcgttggcgttggcggcgctggcggcggtcgagccggcctg

SEQ ID NO: 293351 - DNA, 120 bp, Artificial Sequence
  ENSG00000131507_2 (sequence is synthesized)
cggcagccggtaccagcagttgcagaatgaagaagagtctggagaacctgaacaggctgcaggtgatgctcctccaccttacagcagcatttctgcagagagcgcagcatattttgacta

SEQ ID NO: 293352 - DNA, 120 bp, Artificial Sequence
  ENSG00000131507_3 (sequence is synthesized)
caaggatgagtctgggtttccaaagcccccatcttacaatgtagctacaacactgcccagttatgatgaagcggagaggaccaaggctgaagctactatccctttggttcctgggagaga

SEQ ID NO: 293353 - DNA, 120 bp, Artificial Sequence
  ENSG00000131507_4 (sequence is synthesized)
tgaggattttgtgggtcgggatgattttgatgatgctgaccagctgaggataggaaatgatgggattttcatgttaacttttttcatggcattcctctttaactggattgggtttttcct

SEQ ID NO: 293354 - DNA, 120 bp, Artificial Sequence
  ENSG00000131507_5 (sequence is synthesized)
gtctttttgcctgaccacttcagctgcaggaaggtatggggccatttcaggatttggtctctctctaattaaatggatcctgattgtcaggttttccacctatttccctggatattttga

SEQ ID NO: 293355 - DNA, 120 bp, Artificial Sequence
  ENSG00000131507_6 (sequence is synthesized)
tggtcagtactggctctggtgggtgttccttgttttaggctttctcctgtttctcagaggatttatcaattatgcaaaagttcggaagatgccagaaactttctcaaatctccccaggac

SEQ ID NO: 293356 - DNA, 120 bp, Artificial Sequence
  ENSG00000131507_7 (sequence is synthesized)
cagagttctctttatttattaaagatgttttctggcaaaggccttcctgcatttatgaattctctctcaagaagcaagagaacacctgcaggaagtgaatcaagatgcagaacacagagg

SEQ ID NO: 293357 - DNA, 120 bp, Artificial Sequence
  ENSG00000131507_8 (sequence is synthesized)
aataatcacctgctttaaaaaaataaagtactgttgaaaagatcatttctctctatttgttcctaggtgtaaaattttaatagttaatgcagaattctgtaatcattgaatcattagtgg

SEQ ID NO: 293358 - DNA, 120 bp, Artificial Sequence
  ENSG00000131507_9 (sequence is synthesized)
ttaatgtttgaaaaagctcttgcaatcaagtctgtgatgtattaataatgccttatatattgtttgtagtcattttaagtagcatgagccatgtccctgtagtcggtagggggcagtctt

SEQ ID NO: 293359 - DNA, 120 bp, Artificial Sequence
  ENSG00000131507_10 (sequence is synthesized)
gctttattcatcctccatctcaaaatgaacttggaattaaatattgtaagatatgtataatgctggccattttaaaggggttttctcaaaagttaaacttttgctatgactgtgtttttg

SEQ ID NO: 293360 - DNA, 120 bp, Artificial Sequence
  ENSG00000131507_11 (sequence is synthesized)
cacataatccatatttgctgttcaagttaatctagaaatttattcaattctgtatgaacacctggaagcaaaatcatagtgcaaaaatacatttaaggtgtggtcaaaaataagtcttta

SEQ ID NO: 293361 - DNA, 120 bp, Artificial Sequence
  ENSG00000131507_12 (sequence is synthesized)
attggtaaataataagcattaattttttatagcctgtattcacaattctgcggtaccttattgtacctaagggattctaaaggtgttgtcactgtataaaacagaaagcactaggataca

SEQ ID NO: 293362 - DNA, 120 bp, Artificial Sequence
  ENSG00000131507_13 (sequence is synthesized)
aatgaagcttaattactaaaatgtaattcttgacactctttctataattagcgttcttcacccccacccccacccccaccccccttattttccttttgtctcctggtgattaggccaaag

SEQ ID NO: 293363 - DNA, 120 bp, Artificial Sequence
  ENSG00000131507_14 (sequence is synthesized)
ttacaatgtgttagcagaaaccagtgggttataatgtagaatgatgtgctttctgcccaagtggtaattcatcttggtttgctatgttaaaactgtaaatacaacagaacattaataaat

SEQ ID NO: 293364 - DNA, 120 bp, Artificial Sequence
  ENSG00000131507_15 (sequence is synthesized)
atctcttgtgtagcaccttttactgtagattagtgcttaatttcttggcttgcatttgttgattgctaaggcaattttttctaatcttagggaatcattcagtagatgcgattaaaaaac

SEQ ID NO: 293365 - DNA, 120 bp, Artificial Sequence
  ENSG00000131507_16 (sequence is synthesized)
taatgttgggtcaatttttttcttcattttcagcacaagaagtcctcttatatcctactaaatacattcctaaaaatgtatttgaacattggttctgtaaaagataatggactaaaaaag

SEQ ID NO: 293366 - DNA, 120 bp, Artificial Sequence
  ENSG00000131507_17 (sequence is synthesized)
tagagaggagttgtagagatcttaaatcattctggaattcctaattatgcttcaatttttagacataattttagataatttatttccagtgttttctgcatgttctcatttgttcttttt

SEQ ID NO: 293367 - DNA, 120 bp, Artificial Sequence
  ENSG00000131507_18 (sequence is synthesized)
ctcagttgaatgcaccaactggtttgagtcctgtgagcattcagtcagttgaaattaaagattcctcatttctcctgatttctattcttgtctcaatcttaaatttagagaccagttgtt

SEQ ID NO: 293368 - DNA, 120 bp, Artificial Sequence
  ENSG00000131507_19 (sequence is synthesized)
tttatgatatcagccatttgatttttttcattttctatttaagaaatatgaagaaaaaatacaccaagatggtcaaattactacacaaatcagcaccagcacagtctgatagctgcaaat

SEQ ID NO: 293369 - DNA, 120 bp, Artificial Sequence
  ENSG00000131507_20 (sequence is synthesized)
gtccattcatctgctgtgtatgtatatccagaatcagcataggaagtcgttcaggatatcagtatataatgcacagaagtgtgggttgtttgaaagccaaacaggaaaattaggagcctc

SEQ ID NO: 293370 - DNA, 120 bp, Artificial Sequence
  ENSG00000131507_21 (sequence is synthesized)
ctggattgacatttcaatgatccctctaaccagtttatggattattatgaataatagtgtagtgtgttctttttcagaagttatatttgataatagagaagggagttttatggaagtttc

SEQ ID NO: 293371 - DNA, 120 bp, Artificial Sequence
  ENSG00000131507_22 (sequence is synthesized)
tttgaagatttttttttttccatttcgaatcagattatagcaacaatggagtttggaagtttgtatggcctataatgttctaagttccagaatgaaaagatctgtaacaatctgaataga

SEQ ID NO: 293372 - DNA, 120 bp, Artificial Sequence
  ENSG00000131507_23 (sequence is synthesized)
tgtggacacatatagcagagagaactatgtaaattatcttgcagaacaaaatagaagggtcctaaatcacgttaactcaaacattgtagactagctttgtgtttattcttcaggtccttg

SEQ ID NO: 293373 - DNA, 120 bp, Artificial Sequence
  ENSG00000131507_24 (sequence is synthesized)
cgccttatttggttttgtatattcaacgaactgaaatatttggaattcctatttctacgtatttggtggtccataagactttgtcaaatgtaaacctacagtttgatacgctttaaaata

SEQ ID NO: 293374 - DNA, 120 bp, Artificial Sequence
  ENSG00000131507_25 (sequence is synthesized)
cctagttaagaggatgatttctctttaatcgtttaaatgttctgaaaattaaaatcttttgaggcacatgaagtgggcaccatatatcatctagagtccttactggtattcaggatgaaa

SEQ ID NO: 293375 - DNA, 120 bp, Artificial Sequence
  ENSG00000131507_26 (sequence is synthesized)
atgttcacgctgcattaattgtcatttttctctcccatgttctttctcactttgatacgttaatactgataatggataaagagtgagtttttataataaatggttttggaaaggtattca

SEQ ID NO: 293376 - DNA, 120 bp, Artificial Sequence
  ENSG00000131507_27 (sequence is synthesized)
taggaaccgcggttatttacttaaggttatggagtaaactagcttggaccttgggctgcaggacgactaggattcacccataacgacacagtgccctatgtttcttaacttcttgttgcc

SEQ ID NO: 293377 - DNA, 120 bp, Artificial Sequence
  ENSG00000131507_28 (sequence is synthesized)
atttgaaactctgtactcttatgtttaaagggttctgtatagccattttttttttcagaaagttacattgctttgtatagaaataaaaggcattattaaaatttgcttgttaaaaaatga

SEQ ID NO: 293378 - DNA, 120 bp, Artificial Sequence
  ENSG00000131507_29 (sequence is synthesized)
tttggatacacttatgagcatttgtgcccaatattcgggtcattttgggaacttcccttttgaagagaaccagtttaatggtgttttgtcttgcagagctctgtgcagagctcccaagct

SEQ ID NO: 293379 - DNA, 120 bp, Artificial Sequence
  ENSG00000131507_30 (sequence is synthesized)
ggctgctcttgagctatagttagcctatagtttatttgttccacagttatttttcaagtttttttaaattagttgccaacattttaaaaatcaaaattatttcacataaaacgcctgaat

SEQ ID NO: 293380 - DNA, 120 bp, Artificial Sequence
  ENSG00000131507_31 (sequence is synthesized)
gtttttacttttcttgaaagttggaatatcaagaaaagctagcctacatttcacatggcaccctttggctggagctgagttgttgctgtctcctccatacaggtcatgtgccttccagtt

SEQ ID NO: 293381 - DNA, 120 bp, Artificial Sequence
  ENSG00000131507_32 (sequence is synthesized)
cagtaagatcccaccaccataccccaacttagtatttgaaggggtaacccctgctcaatagtcacttgttgctttgggtcccaaacagaatgatgttccccaagctcagagctgacagct

SEQ ID NO: 293382 - DNA, 120 bp, Artificial Sequence
  ENSG00000131507_33 (sequence is synthesized)
cttggttactgctaaaaatcagttcaactgtccaagtaccattttctaccactgagtatcccagtaaaagtatttaaaaaaaaaaatgtgctaaaggctcagagaccatctctgaaagag

SEQ ID NO: 293383 - DNA, 120 bp, Artificial Sequence
  ENSG00000131507_34 (sequence is synthesized)
gaaggccaggaggagtatctgagtttccactggaggggcatatcacctctctgctgacagttttaggaggtacaaacttttgtgaatgtatagattctggtgtagtcacacaaaaagagt

SEQ ID NO: 293384 - DNA, 120 bp, Artificial Sequence
  ENSG00000131507_35 (sequence is synthesized)
tatagattctggtgtagtcacacaaaaagagtcttactaagaatagagaaataggctgggtacagtggttgacacctataatcccaactctttgggaggctgagacaggagaatcacttg

SEQ ID NO: 293385 - DNA, 120 bp, Artificial Sequence
  ENSG00000131507_36 (sequence is synthesized)
tagcgagacccctatctctacagaaaattaaaaaattagctgggcatgaacctgttatcttagctacttgggaagcagaggcaggaggatcatctgggcccaggaattcaagcttgcaga

SEQ ID NO: 293386 - DNA, 84 bp, Artificial Sequence
  ENSG00000131507_37 (sequence is synthesized)
gcaagaccctgtctgttagacaaagtttcaagttgagacgatgagaattgctgtaatagataaggggatcctgacatctagtgg

SEQ ID NO: 293387 - DNA, 120 bp, Artificial Sequence
  ENSG00000131507_38 (sequence is synthesized)
gaattgctgtaatagataaggggatcctgacatctagtggacaacattatatactgtcgacagaaaaaacagcccatgacaaggaaggttacattttttctttttacttgagaaaaacac

SEQ ID NO: 293388 - DNA, 120 bp, Artificial Sequence
  ENSG00000131507_39 (sequence is synthesized)
agttataacctctttttgttgttgttgttgttgttgttgtttggagttcattatcttggaatgcttttttggaactcaataggtagattttgatgtttctcaatgaggctttcatatgta

SEQ ID NO: 293389 - DNA, 120 bp, Artificial Sequence
  ENSG00000131507_40 (sequence is synthesized)
aatgtttggctccatcttattttttatttcctttttagaccaattcaattctgaatgtgcaaaagacactattgactcttacattataccttctcattgaaggatggataatttggtatg

SEQ ID NO: 293390 - DNA, 120 bp, Artificial Sequence
  ENSG00000131507_41 (sequence is synthesized)
aaaatcctctgcagattctggaggaaattgctaatgttttgattacctttagcagaaaaataacaatgtatcgctatcaggagagggatttctggggaggggacttaacatggaaattat

SEQ ID NO: 293391 - DNA, 120 bp, Artificial Sequence
  ENSG00000131507_42 (sequence is synthesized)
aacagggcaaggtgatcacggaatccttaaaaacactctgtgctttgacattacagtttaaaaaaaaaaaagcttcagaagcagttggaagaaaggttacaaagcaagtctggattttaa

SEQ ID NO: 293392 - DNA, 120 bp, Artificial Sequence
  ENSG00000131507_43 (sequence is synthesized)
ataattgagaagtggatacatttaaaaatcacccccagtctcttacattcatctaagaatgtcttttggttcaattgttatgtattaattggctttgtatgagcaagagtttgtgaaggg

SEQ ID NO: 293393 - DNA, 120 bp, Artificial Sequence
  ENSG00000131507_44 (sequence is synthesized)
tttcagtgtgttaaatgatttttggtttgtctgtggtttcatgatgaagctgaaccaaaatcatttgcaaatggttcatgcacacaagttttgttgtcaaatctattgaaaactggtcta

SEQ ID NO: 293394 - DNA, 120 bp, Artificial Sequence
  ENSG00000131507_45 (sequence is synthesized)
tcattaatattgttcaccatctgctttgtttgtttttaatgtttataatatgataatgtatatgttctgaaattagttgtttttataataaaaggaaggatattacccctttgatatctc

SEQ ID NO: 293395 - DNA, 120 bp, Artificial Sequence
  ENSG00000131508_0 (sequence is synthesized)
ggccccaccccggcggcgcagcccgcccgcccgcgcgtccctcggtccacctgcagcagggaggaagacaggcaatccctccggctgtccgaccaagagaggccggccgagcccgaggct

SEQ ID NO: 293396 - DNA, 120 bp, Artificial Sequence
  ENSG00000131508_1 (sequence is synthesized)
tgggcttttgctttctggcggagggatctgcggcggtttaggaggcggcgctgatcctgggaggaagaggcagctacggcggcggcggcggtggcggctagggcggcggcgaataaaggg

SEQ ID NO: 293397 - DNA, 120 bp, Artificial Sequence
  ENSG00000131508_2 (sequence is synthesized)
gccgccgccgggtgatgcggtgaccgctgcggcaggcccaggagctgagtgggccccggccctcagcccgtcccgccggacccgctttcctcaactctccatcttctcctgccgaccgag

SEQ ID NO: 293398 - DNA, 120 bp, Artificial Sequence
  ENSG00000131508_3 (sequence is synthesized)
atcgccgaggcggcctcaggctccctagccccttccccgtcccttccccgcccccgtccccgccccgggggccgccgccacccgcctcccaccatggctctgaagagaatccacaaggaa

SEQ ID NO: 293399 - DNA, 120 bp, Artificial Sequence
  ENSG00000131508_4 (sequence is synthesized)
ttgaatgatctggcacgggaccctccagcacagtgttcagcaggtcctgttggagatgatatgttccattggcaagctacaataatggggccaaatgacagtccctatcagggtggagta

SEQ ID NO: 293400 - DNA, 120 bp, Artificial Sequence
  ENSG00000131508_5 (sequence is synthesized)
tttttcttgacaattcatttcccaacagattaccccttcaaaccacctaaggttgcatttacaacaagaatttatcatccaaatattaacagtaatggcagcatttgtcttgatattcta

SEQ ID NO: 293401 - DNA, 120 bp, Artificial Sequence
  ENSG00000131508_6 (sequence is synthesized)
cgatcacagtggtctccagcactaactatttcaaaagtactcttgtccatctgttctctgttgtgtgatcccaatccagatgatcctttagtgcctgagattgctcggatctacaaaaca

SEQ ID NO: 293402 - DNA, 120 bp, Artificial Sequence
  ENSG00000131508_7 (sequence is synthesized)
gatagagaaaagtacaacagaatagctcgggaatggactcagaagtatgcgatgtaattaaagaaattattggataacctctacaaataaagataggggaactctgaaagagaaagtcct

SEQ ID NO: 293403 - DNA, 120 bp, Artificial Sequence
  ENSG00000131508_8 (sequence is synthesized)
tttgatttccatttgactgctttctatgagcccacgcctcatcttcccctgtgcacatgtttacctgatacagcagtgctgcgtgttgtacatacttggaacaacaaactagaaatactg

SEQ ID NO: 293404 - DNA, 120 bp, Artificial Sequence
  ENSG00000131508_9 (sequence is synthesized)
tacttctgtaccaacattgcctcctagcagagaagtgtgtgtgtgacaagccagttctacaggcattacctaggtgtgagactaaaagcttttcttattgacttaaatttggataacagc

SEQ ID NO: 293405 - DNA, 120 bp, Artificial Sequence
  ENSG00000131508_10 (sequence is synthesized)
gggggtggtgggtatggtgtgtgcttggatgggaaagaaaaggctccactcacctataggagattatttttaagtggaatccatttaaactcaaaacagttatgaaaagcaaggtgaaga

SEQ ID NO: 293406 - DNA, 120 bp, Artificial Sequence
  ENSG00000131508_11 (sequence is synthesized)
acatgaagctgtgtctgtattcattttattccgaaggagctacgtcttaggtgaaagttatgaccaaccagattaaactctacccacatcctgcattttaaggtctaagtttaactggtc

SEQ ID NO: 293407 - DNA, 120 bp, Artificial Sequence
  ENSG00000131508_12 (sequence is synthesized)
aacatttaaatggattggagctattagtacatcaagtgtgatgggctttgttcccaactcttttacatctccctaccccttcaacctttggcctttcagcccttctttctctcttccata

SEQ ID NO: 293408 - DNA, 120 bp, Artificial Sequence
  ENSG00000131508_13 (sequence is synthesized)
ttctttggtttgtatgtggtttctcagttaatacatagctaatagctcttatttttcttatgtttttaaccgcttaggtctatttggatgtaagggtgaaaattcatttgatggaaatac

SEQ ID NO: 293409 - DNA, 120 bp, Artificial Sequence
  ENSG00000131508_14 (sequence is synthesized)
ttgtgtatatttaaagacccaattgctcctctggagcttgtactttcaagaatgattaatctgtgtaataaactggttactacagtcattacatataattttgtgtgaataggctttttc

SEQ ID NO: 293410 - DNA, 120 bp, Artificial Sequence
  ENSG00000131508_15 (sequence is synthesized)
atttttaagaagtttgtctagctgagattagtggtggattttctcccacttctgaaatgttcatttatactggttgcattttaagatcatgaaacaattccagttacattgtaaaaagga

SEQ ID NO: 293411 - DNA, 120 bp, Artificial Sequence
  ENSG00000131508_16 (sequence is synthesized)
tatcttacgagtaattttattgaacaagttagaggcataagcttaagagcatttccatgaaacaacacatgcagcattccaggaacttgattgttaaattcaataagaaatttgctttat

SEQ ID NO: 293412 - DNA, 120 bp, Artificial Sequence
  ENSG00000131508_17 (sequence is synthesized)
taatgaaactaagctgcatttcatcaaaaccttgtgacattcccttggtacataggacataaaacacagaggcattgctatttggtaagttaagcttctgtgattgtaattataaaagag

SEQ ID NO: 293413 - DNA, 120 bp, Artificial Sequence
  ENSG00000131508_18 (sequence is synthesized)
caacattgaccaaacctgggaaacaagagcacagtcttgtttggagagtctacataattactttgcactaacatttgcaggatgttcacacaattttaaattgtactgtatgtggctttt

SEQ ID NO: 293414 - DNA, 120 bp, Artificial Sequence
  ENSG00000131508_19 (sequence is synthesized)
tgaagtcttcccttgaccctagtaaaatatagcttgaaacttgtaaacaactgtgtttgccagaaacatcattcatgtgaactaggcaagttaccttttttccccccttcttttcctaat

SEQ ID NO: 293415 - DNA, 120 bp, Artificial Sequence
  ENSG00000131508_20 (sequence is synthesized)
tgtaaactaggccaacctgaaagccatggctgatgctctagccatcaggttctttcaaatgcatctttacactcttgcacaaaagttaaggaataaatgtccactgcttttggttttaaa

SEQ ID NO: 293416 - DNA, 120 bp, Artificial Sequence
  ENSG00000131508_21 (sequence is synthesized)
agcgttcctccccggctgcccttccaggcccgcatggtgtggactcttagggcttctctccagtctgggactgccgctgcacttgagggccattgtcgggccaggatggcggggttgggg

SEQ ID NO: 293417 - DNA, 120 bp, Artificial Sequence
  ENSG00000131508_22 (sequence is synthesized)
ccgaggggggcgctggggcgttgggcggccccttcgacagaggtcgaaagggcttctcgccccatttctgttccctcctcccacacctgccctagctccctccacaaaaccgcctgagct

SEQ ID NO: 293418 - DNA, 120 bp, Artificial Sequence
  ENSG00000131508_23 (sequence is synthesized)
cgggctgacagaggaagccgttttgcccgatccacaagtatatcctgagttcacttacctcttgggtggcagcacacatcggtccaccctgcttgtccagaaactgttaagagttggaag

SEQ ID NO: 293419 - DNA, 120 bp, Artificial Sequence
  ENSG00000131508_24 (sequence is synthesized)
catccctgtgggggactccggccagcctgagtgacgcgatccaaagagcgctcccgggtaggaaattgccctggtggaatgcctcgccagagcagcgtgtagcaggcccccgcggaggat

SEQ ID NO: 293420 - DNA, 120 bp, Artificial Sequence
  ENSG00000131508_25 (sequence is synthesized)
tatcggccagatatttaaagtgaagtcctaatatactctcctggggctagaaaagagaaatatatgcattgagtattattataagtagatgatgccagtcttatccctgattgtttcacg

SEQ ID NO: 293421 - DNA, 120 bp, Artificial Sequence
  ENSG00000131508_26 (sequence is synthesized)
gcagcgtcacgccctccggggccgtggcggcgacggcggtgcgtagcttactcacaggggcggcccgtatccctccgccgccggcgcggctcggccctccctcccctggcccgccaatcc

SEQ ID NO: 293422 - DNA, 120 bp, Artificial Sequence
  ENSG00000131558_0 (sequence is synthesized)
ctagcggctctccccgcgtccaagatggcggcagaagcagctggtgggaaatacagaagcacagtcagcaaaagcaaagacccctcggggctgctcatctctgtgatcaggactctgtct

SEQ ID NO: 293423 - DNA, 120 bp, Artificial Sequence
  ENSG00000131558_1 (sequence is synthesized)
actagtgacgatgtcgaagacagggaaaatgaaaagggtcgccttgaagaagcctacgagaaatgtgaccgtgacctggatgaattgattgtacagcactacacagaattgacgacagcc

SEQ ID NO: 293424 - DNA, 120 bp, Artificial Sequence
  ENSG00000131558_2 (sequence is synthesized)
attcgcacataccagagcatcacagagcgcatcactaactcccgaaataaaataaagcaggtaaaagagaacctgctttcatgcaagatgctgctgcactgcaaacgggatgagcttcgg

SEQ ID NO: 293425 - DNA, 120 bp, Artificial Sequence
  ENSG00000131558_3 (sequence is synthesized)
aaactgtggattgaaggaattgagcataagcatgtcctgaacttgttggatgaaattgagaatatcaagcaagtgcctcaaaagctggaacagtgcatggccagcaagcactatctcagt

SEQ ID NO: 293426 - DNA, 120 bp, Artificial Sequence
  ENSG00000131558_4 (sequence is synthesized)
gccactgacatgttggtgtcagcagttgagtctttggagggccccctgctccaggtggaaggactgagtgaccttcgactagagcttcacagcaagaagatgaaccttcacttggttctc

SEQ ID NO: 293427 - DNA, 120 bp, Artificial Sequence
  ENSG00000131558_5 (sequence is synthesized)
atagatgaactacaccggcacctgtacatcaaatcgactagccgagttgtgcagcgtaacaaggaaaaagggaaaatcagctccctcgtgaaagatgcttctgttcctctgattgatgtt

SEQ ID NO: 293428 - DNA, 120 bp, Artificial Sequence
  ENSG00000131558_6 (sequence is synthesized)
acaaacctccctactcctcgaaaattccttgatacctctcactattctactgctggaagctcaagtgtgagggagataaatctgcaggacatcaaggaagatttagaattggatccagag

SEQ ID NO: 293429 - DNA, 120 bp, Artificial Sequence
  ENSG00000131558_7 (sequence is synthesized)
gaaaacagcaccctgtttatgggtatcctcattaagggcttggcgaaactgaagaagatcccagaaacagttaaggcaatcatagagcgcttggagcaggagttgaagcaaattgtgaag

SEQ ID NO: 293430 - DNA, 120 bp, Artificial Sequence
  ENSG00000131558_8 (sequence is synthesized)
aggtctacaacccaggtggcagacagtggctatcagcggggggagaacgttactgtggagaaccaaccaaggttgcttctagaactgctggagttactgtttgacaagtttaatgctgta

SEQ ID NO: 293431 - DNA, 120 bp, Artificial Sequence
  ENSG00000131558_9 (sequence is synthesized)
gccgctgcacactctgtggtcctgggatacctgcaggacactgtagtgactccactgactcagcaggaagatatcaaactgtatgatatggcagatgtatgggtgaagatccaagatgtt

SEQ ID NO: 293432 - DNA, 120 bp, Artificial Sequence
  ENSG00000131558_10 (sequence is synthesized)
ctacagatgctattaactgagtacttggatatgaaaaatactcgtacggcctctgaaccatcagctcaactaagctatgccagcactggacgagagtttgcagccttttttgccaagaag

SEQ ID NO: 293433 - DNA, 120 bp, Artificial Sequence
  ENSG00000131558_11 (sequence is synthesized)
aaacctcaaaggccaaaaaattctcttttcaagttcgaatcgtcctcccatgccatcagtatgagcgcctatctgcgagaacagagaagggagctctatagtcggagtggagaactgcaa

SEQ ID NO: 293434 - DNA, 120 bp, Artificial Sequence
  ENSG00000131558_12 (sequence is synthesized)
gggggtcctgatgacaacttaattgaaggtggaggaacaaaatttgtctgcaaacctggagccagaaacattaccgtcatattccacccattactaagatttattcaggagattgagcat

SEQ ID NO: 293435 - DNA, 120 bp, Artificial Sequence
  ENSG00000131558_13 (sequence is synthesized)
gctctgggtcttggcccagccaaacagtgtcctcttcgagagtttctcaccgtgtacatcaaaaacatctttctcaatcaagtcttggctgagatcaacaaggagattgaaggagtcact

SEQ ID NO: 293436 - DNA, 120 bp, Artificial Sequence
  ENSG00000131558_14 (sequence is synthesized)
aaaacatctgaccctttgaagattctggccaacgcagacaccatgaaggtgctgggagtgcagcggcctctcctacagagcacaatcattgtggagaagacagttcaagacctcctgaac

SEQ ID NO: 293437 - DNA, 120 bp, Artificial Sequence
  ENSG00000131558_15 (sequence is synthesized)
ctgatgcatgacttgagtgcatattcagatcaattcctcaacatggtgtgcgtgaagctccaggagtacaaggacacctgcactgcagcttacaggggtattgtccagtcagaagaaaaa

SEQ ID NO: 293438 - DNA, 120 bp, Artificial Sequence
  ENSG00000131558_16 (sequence is synthesized)
cttgtcatcagtgcatcctgggcaaaagatgatgatatcagcagactcttgaaatctctaccaaactggatgaatatggctcaacccaaacagctgaggccaaaaagagaggaggaagaa

SEQ ID NO: 293439 - DNA, 120 bp, Artificial Sequence
  ENSG00000131558_17 (sequence is synthesized)
ctcaaagccttggccaacatgcatgaaagcctggaatggttggcaagtcgaacaaagtcagctttctccaatctttctacatcccagatgctttctcctgctcaagacagccacacgaac

SEQ ID NO: 293440 - DNA, 120 bp, Artificial Sequence
  ENSG00000131558_18 (sequence is synthesized)
acggatctccccccagtgtcagagcagatcatgcagactctcagtgaacttgccaaatcgttccaggatatggctgaccgctgcttgcttgtcttacatctggaagtgagggttcactgt

SEQ ID NO: 293441 - DNA, 120 bp, Artificial Sequence
  ENSG00000131558_19 (sequence is synthesized)
ttccactatcttatccctcttgcaaaggaggggaactatgccattgtggctaatgtggaaagtatggattatgaccccctggtggtcaagctcaacaaagatatcagcgccattgaagag

SEQ ID NO: 293442 - DNA, 120 bp, Artificial Sequence
  ENSG00000131558_20 (sequence is synthesized)
gccatgagcgccagccttcagcagcacaagttccagtatatcttcgaaggcctgggccacctgatctcctgcatcctcattaatggtgcccagtacttcaggcgcatcagtgagtctggc

SEQ ID NO: 293443 - DNA, 120 bp, Artificial Sequence
  ENSG00000131558_21 (sequence is synthesized)
atcaagaaaatgtgtaggaacatttttgttcttcagcagaatttgaccaacatcaccatgtcgcgggaggcagacctggactttgcaaggcagtactacgagatgctttacaacacagct

SEQ ID NO: 293444 - DNA, 120 bp, Artificial Sequence
  ENSG00000131558_22 (sequence is synthesized)
gacgagctcctgaacctggtggtggaccagggtgtgaagtacacggagctggagtacatccacgctctgaccctgctgcaccgcagccagactggggtgggggaactgaccacccagaac

SEQ ID NO: 293445 - DNA, 120 bp, Artificial Sequence
  ENSG00000131558_23 (sequence is synthesized)
acgaggctgcagaggctcaaagagatcatctgcgagcaggctgccatcaagcaagccaccaaggacaagaagataactaccgtttagcagggcgtactgcggttggtgacgggggtcccc

SEQ ID NO: 293446 - DNA, 120 bp, Artificial Sequence
  ENSG00000131558_24 (sequence is synthesized)
tcagtcacactcacttttttccttggtatgttattgagtatattctgagcttagttttctctacagtgatactttagtggagaggaggtgtaaggattctttctctctggttttggcttt

SEQ ID NO: 293447 - DNA, 120 bp, Artificial Sequence
  ENSG00000131558_25 (sequence is synthesized)
tcatataaatgctaaaggaaggcgacagtacagagtgttttggttgaacaactactttaatgcagtcaaatctaacgggactagggtgggatagggaggaaggtggtatcaaattgttgg

SEQ ID NO: 293448 - DNA, 120 bp, Artificial Sequence
  ENSG00000131558_26 (sequence is synthesized)
actctgaaaaacaagtggatggattactaatatttgatttattactcaatatatatataattccagccttggaaagtaggaaagtaggctgctacctaacttttagtcccttccaaaacc

SEQ ID NO: 293449 - DNA, 120 bp, Artificial Sequence
  ENSG00000131558_27 (sequence is synthesized)
atttagtagggttctattacataaacagtagggtttttcctctcctgaccttatccgtttacagttcaatgaaataagtgtatgtgcattgctgtctgtctctattgccaaaatcaaata

SEQ ID NO: 293450 - DNA, 120 bp, Artificial Sequence
  ENSG00000131558_28 (sequence is synthesized)
aatggcttctcagctgctgtttacaacaaacttccctaaccaaaacagaacctctaatttagggctaggaatagaagtcttttgatcccagtccctgggacagttttgtatgctgtatct

SEQ ID NO: 293451 - DNA, 120 bp, Artificial Sequence
  ENSG00000131558_29 (sequence is synthesized)
tgtacacaggttgtaggttggtttattgccattttgttttatttctgctgtataaaaaccaagagccagacaattagacaactatggaggaatgaaaggcaattcaaacatctgcttgat

SEQ ID NO: 293452 - DNA, 120 bp, Artificial Sequence
  ENSG00000131558_30 (sequence is synthesized)
tcccgccccgccacccctaatttctgagagaataatggttagagaacattgcatctcacttgaaacatcctttgggggtaaatgattcttaggtgctcacttggtctgagctcagctgaa

SEQ ID NO: 293453 - DNA, 120 bp, Artificial Sequence
  ENSG00000131558_31 (sequence is synthesized)
tgcagggaagatgggacagagtgacatttctcctctgtgcggcctccagctgagcctgtctctgaattgttccctcccccgcaatgtgggcacttaccatgttcctggcacactggacct

SEQ ID NO: 293454 - DNA, 120 bp, Artificial Sequence
  ENSG00000131558_32 (sequence is synthesized)
caccatgtcccccggtcaccagtcctcttgctgcccatggttcataggtcatagaaggcagcaatgcactgactgggccacatcttgaaaactcgtggaaagggaaaggggaggagatgg

SEQ ID NO: 293455 - DNA, 120 bp, Artificial Sequence
  ENSG00000131558_33 (sequence is synthesized)
gactttgaccacacacagtgatgcctcacaccctgaaggtgggggattttgtacctgtttgtacaactttggtcttgatgggaaaaatggagaattaaaaagtgttttgagaagcttaaa

SEQ ID NO: 293456 - DNA, 120 bp, Artificial Sequence
  ENSG00000131558_34 (sequence is synthesized)
aacaaacacttagtgacttaataatttgtttcttctgtaatttcccagcatctgctgccaagcaggtaaaactattactgtggccataggacttgtagacctgctactgttcaagtggga

SEQ ID NO: 293457 - DNA, 120 bp, Artificial Sequence
  ENSG00000131558_35 (sequence is synthesized)
attcaaagcaaaaagagatgaggccaggctcgtcttgcttaaacagaagacctgagtccagtcacaatctaggagaatgttggtcttctgcgactgccactgttacttctaattgttgtt

SEQ ID NO: 293458 - DNA, 120 bp, Artificial Sequence
  ENSG00000131558_36 (sequence is synthesized)
tttgacaccttctagaatatgacaggagtacctgagatttgggaaagggaaaatgcaaccactgtcattatttaaagggaaaaagatgcctctaaatagtatgttataatcaatataact

SEQ ID NO: 293459 - DNA, 120 bp, Artificial Sequence
  ENSG00000131558_37 (sequence is synthesized)
gtgatgaacaggctatttgatacccatgtatagttaccaaagagttgtaagctgaagaagaaaatatttagaaaataaattaaatataaataaatatattagactgataacatttccttc

SEQ ID NO: 293460 - DNA, 120 bp, Artificial Sequence
  ENSG00000131558_38 (sequence is synthesized)
agactgataacatttccttctgtgacaaaaagatgctgatcatgtaaatgtaatgagttaagaaaggtttggaggtcaggtgtggtgactaacacctgtaatctcagcactttgggagac

SEQ ID NO: 293461 - DNA, 120 bp, Artificial Sequence
  ENSG00000131558_39 (sequence is synthesized)
agtccaggagttcaagaccagcctgggcgacatggcgaagccctgtctctataaaaaaatacaaaaattagttggacatggtggcacgtgcgtattcccagctactcaggaggctgaggt

SEQ ID NO: 293462 - DNA, 120 bp, Artificial Sequence
  ENSG00000131558_40 (sequence is synthesized)
aagatggcggcagaagcagctggtgggaaatacagaagcacagtcagcaaaagcaaagacccctcggggctgctcatctctgtgatcagcagcactcactgagaaaggcgtcttgtttcc

SEQ ID NO: 293463 - DNA, 120 bp, Artificial Sequence
  ENSG00000131558_41 (sequence is synthesized)
tggactttggggtgtaaggccttggagtccggagattcctgtcacgagttgcagatttgtgttttcacactctggatactttcaaccacctgtgcgtggccacagccacaaatacaagaa

SEQ ID NO: 293464 - DNA, 120 bp, Artificial Sequence
  ENSG00000131558_42 (sequence is synthesized)
taaaaaacagaaccaaaccaatttcaaattatcctccatgcactgcccctctgcacctcccagaagattagggtgggggtggagtgggagcggtggatcttttaggagcttttttttaaa

SEQ ID NO: 293465 - DNA, 120 bp, Artificial Sequence
  ENSG00000131558_43 (sequence is synthesized)
aaagcgaaatatattgaggatgggggaaccctttcaagaatcttggatatgatgcaggtactgactaaaaccaatctaaataaaatttattatggcacgttttttacgttgttggcattt

SEQ ID NO: 293466 - DNA, 120 bp, Artificial Sequence
  ENSG00000131558_44 (sequence is synthesized)
aatgaagacttgttgccaacatggagatagaggatattggtctacagggtactattggagaggtaactgtgaggcttttacacccagacagcccttctgtgcatggcaagttttactgaa

SEQ ID NO: 293467 - DNA, 120 bp, Artificial Sequence
  ENSG00000131558_45 (sequence is synthesized)
ataactctgagctggtgctgtcagcatcaaagtaacatgctgctttgcagttagctttttgcttagtttctagtatcagttttcatggaattttttcattgtctttacccactgatacat

SEQ ID NO: 293468 - DNA, 120 bp, Artificial Sequence
  ENSG00000131558_46 (sequence is synthesized)
cagtgtactcttctgcttggtaccaaaaacggggatacaaaacgtggagaaaccctgggactgagccttgggttcctgccctctgtgccactaactccccgtgtatcccctcctcctctg

SEQ ID NO: 293469 - DNA, 120 bp, Artificial Sequence
  ENSG00000131558_47 (sequence is synthesized)
agctcaaactcagggctgggtcagaatcaggcggagaacccggagtggtgacagtgatggcagcagagccagggtgagactgagagtgctcagactaattttcttggaagtagtggaaag

SEQ ID NO: 293470 - DNA, 120 bp, Artificial Sequence
  ENSG00000131558_48 (sequence is synthesized)
ctccgctaaaaaagaaacatgggtttggattgagcagaatgtcaagagccctgagaaccaaccaaaaaatggcagatgagctgtttcaggggcaacatttaggaaagtgaaatctctgct

SEQ ID NO: 293471 - DNA, 120 bp, Artificial Sequence
  ENSG00000131558_49 (sequence is synthesized)
ttgcttacaatgacgggactgaaaatggcaattctgcacaggaaagggactgtgggactcttccaagacatttaggacatccaagtttctttgaaggttggcacatcagtctttattctt

SEQ ID NO: 293472 - DNA, 120 bp, Artificial Sequence
  ENSG00000131558_50 (sequence is synthesized)
acagtcggattggtgaattgtgtcccaggaagtaggtacaagtggcatgtgaccacttgggacatgtattgctactattattctttattctgacatggatttttgacaggaaataggcta

SEQ ID NO: 293473 - DNA, 120 bp, Artificial Sequence
  ENSG00000131558_51 (sequence is synthesized)
gcataaagatacagcactggatgaatctgttcttctgattctgctttagaagacatctccttactaagactaagctccaagaggccgagactcttttctcagtgcctctaccaaagcagt

SEQ ID NO: 293474 - DNA, 120 bp, Artificial Sequence
  ENSG00000131558_52 (sequence is synthesized)
aagccacatggcttcctgaacatcggggctgtgtgtgtgttgccagcttggcactgaaaatgctctatcccaaatttctgttttgaagaaggcctccagaacatctctggggcatggagg

SEQ ID NO: 293475 - DNA, 120 bp, Artificial Sequence
  ENSG00000131558_53 (sequence is synthesized)
tttatagagggcatctgtcggttgcatttgatttatttaaaacgttttcttacatggccaatttagtaacagcaagcaaaaccaaaatgagcaaaggagaggatcccaataatcccagat

SEQ ID NO: 293476 - DNA, 120 bp, Artificial Sequence
  ENSG00000131558_54 (sequence is synthesized)
ctataaagcggatttctcaagggggtagagataaccacctagctattgctaaatgtgatctcactcagttgaaaaagaaacaatcagaagtgagcaatgggagccgtgaaaccatctcaa

SEQ ID NO: 293477 - DNA, 120 bp, Artificial Sequence
  ENSG00000131558_55 (sequence is synthesized)
taacattaaaaagctcaaattttacaaaagttaagttcctgccaacattttcaatttatcatacaattagaaatgtgactcagtctaacaacacccaagaggataaaaggattaaaaaaa

SEQ ID NO: 293478 - DNA, 120 bp, Artificial Sequence
  ENSG00000131558_56 (sequence is synthesized)
aacaaaaacctctgcaagactatcaaggactaagacagaagactaagaaaccctggtaggaaacaacaaacatattgcttatcacatttatcctcttaaatgggaaagacggaactagga

SEQ ID NO: 293479 - DNA, 120 bp, Artificial Sequence
  ENSG00000131558_57 (sequence is synthesized)
agctggaaatgaggtagaaggaaagagaaaggaccagttgtttgatgatttgaaataaacattttttattatgaggaatatagatttttttaattaagaaaaagtgcaattcagaaagaa

SEQ ID NO: 293480 - DNA, 120 bp, Artificial Sequence
  ENSG00000131558_58 (sequence is synthesized)
ccccagtgtcaactgcgaatgggcaatcaggctgctgtccaggagagagaggccctaggtgtgtcatggatccatttggagaagctgatgagtcatcttgtgaaagaaaaaatgaattga

SEQ ID NO: 293481 - DNA, 120 bp, Artificial Sequence
  ENSG00000131558_59 (sequence is synthesized)
aggacattgcttactttctgtgttgattcaggcctcatttcatcttaaccccctagttagaggacatcagtaatgattcagtctctgcaactcattcctaaataaaattaattggaaagt

SEQ ID NO: 293482 - DNA, 120 bp, Artificial Sequence
  ENSG00000131558_60 (sequence is synthesized)
tttttctggggttagctatagagagaggagccccgcctcagtcttttctttaggggcagcaccttctattacagtctcgggaccccaaagcacgctatttgggtttggtagagaaaacca

SEQ ID NO: 293483 - DNA, 120 bp, Artificial Sequence
  ENSG00000131558_61 (sequence is synthesized)
ttttatattgtaggcagcacgtcaaaaaactagcagccatttagaaaagaaactgttttttaggccatttagggagagattatagctgccttgcttttctggtgctgttattcagccaca

SEQ ID NO: 293484 - DNA, 120 bp, Artificial Sequence
  ENSG00000131558_62 (sequence is synthesized)
ggcagtcactggtgacttctgagctggatggttcgaatcgtcctcccatgccatcagtatgagcgcctatctgcgagaacagagaagggagctctatagtcggagtggagaactgcaagg

SEQ ID NO: 293485 - DNA, 120 bp, Artificial Sequence
  ENSG00000131558_63 (sequence is synthesized)
gttcttggcagggtgcagagaggggatcacgtaacccaagtgtttccctcacagactgacattcatctcagtattcatgttccttgtcaaggaaaggataaagaaggcataattaagaaa

SEQ ID NO: 293486 - DNA, 120 bp, Artificial Sequence
  ENSG00000131558_64 (sequence is synthesized)
agtgtttctaacctctgaaatagttcctgggttcgaatcgtcctcccatgccatcagtatgagcgcctatctgcgagaacagagaagggagctctatagtcggagtggagaactgcaagg

SEQ ID NO: 293487 - DNA, 120 bp, Artificial Sequence
  ENSG00000131558_65 (sequence is synthesized)
gagaaacttggaggatggagctctgcagtctgtgtttagtaagccctcctggtttttctgatatgcaggagaaccatggaattagacacagactgtaataatgaaacgctagtgttattt

SEQ ID NO: 293488 - DNA, 120 bp, Artificial Sequence
  ENSG00000131558_66 (sequence is synthesized)
caagaaacttcaacactcagactcacttatgctgatgaatatgacctgggccaaaccttaaatatcttatttccttccaccctcataacacttcggagagcctgccatcattattcttcc

SEQ ID NO: 293489 - DNA, 120 bp, Artificial Sequence
  ENSG00000131558_67 (sequence is synthesized)
acctggactttgcaaggtaggagggaaaactgggtttagtttcttatgccaaagctaagacctcgttgcctgtgaagtcatttttaaaaatagactcttggtgcagaaaaagcttagttt

SEQ ID NO: 293490 - DNA, 120 bp, Artificial Sequence
  ENSG00000131558_68 (sequence is synthesized)
aaagggggatgtcagttgctctgaagttaaattccaggattctgtcacatgctgatatagtgccaaagcatatggatctccatatggtgctgcttttggggtttataccacctgtaatct

SEQ ID NO: 293491 - DNA, 120 bp, Artificial Sequence
  ENSG00000131584_0 (sequence is synthesized)
cgcgggcgggacgagcggtccgggccggcgcggctgccgctcggcgccgcggtcctcgtgccagtgagcgccgcggccgccgcagccatgaccgtggagttcgaggagtgcgtcaaggac

SEQ ID NO: 293492 - DNA, 120 bp, Artificial Sequence
  ENSG00000131584_1 (sequence is synthesized)
cgtggagttcgaggagtgcgtcaaggactccccgcgcttcagggcgaccattgacgaggtggagacggacgtggtggagattgaggccaaactggacaagctggtgaagctgtgcagtgg

SEQ ID NO: 293493 - DNA, 120 bp, Artificial Sequence
  ENSG00000131584_2 (sequence is synthesized)
catggtggaagccggtaaggcctacgtcagcaccagcaggcttttcgtgagcggcgtccgcgacctgtcccagcagtgccagggcgacaccgtcatctcggaatgtctgcagaggttcgc

SEQ ID NO: 293494 - DNA, 120 bp, Artificial Sequence
  ENSG00000131584_3 (sequence is synthesized)
tgacagcctacaggaggtggtgaactaccacatgatcctgtttgaccaggcccagaggtccgtgcggcagcagctccagagctttgtcaaagaggatgtgcggaagttcaaggagacaaa

SEQ ID NO: 293495 - DNA, 120 bp, Artificial Sequence
  ENSG00000131584_4 (sequence is synthesized)
gaagcagtttgacaaggtgcgggaggacctggagctgtccctggtgaggaacgcccaggccccgaggcaccggccccacgaggtggaggaagccaccggggccctcaccctcaccaggaa

SEQ ID NO: 293496 - DNA, 120 bp, Artificial Sequence
  ENSG00000131584_5 (sequence is synthesized)
gtgcttccgccacctggcactggactatgtgctccagatcaatgttctgcaggccaagaagaagtttgagatcctggactctatgctgtccttcatgcacgcccagtccagcttcttcca

SEQ ID NO: 293497 - DNA, 120 bp, Artificial Sequence
  ENSG00000131584_6 (sequence is synthesized)
gcagggctacagcctcctgcaccagctggacccctacatgaagaagctggcagccgagctggaccagctggtgatcgactctgcggtggaaaagcgtgagatggagcgaaagcacgccgc

SEQ ID NO: 293498 - DNA, 120 bp, Artificial Sequence
  ENSG00000131584_7 (sequence is synthesized)
catccagcagcggacgctgctgcaggacttctcctacgatgagtccaaagtggagtttgacgtggacgcgcccagtggggtggtgatggagggctacctcttcaagagggccagcaacgc

SEQ ID NO: 293499 - DNA, 120 bp, Artificial Sequence
  ENSG00000131584_8 (sequence is synthesized)
tttcaagacatggaaccggcgctggttctccattcagaacagccagctggtctaccagaagaagctcaaggatgccctcaccgtggtggtggatgacctccgcctgtgctctgtgaagcc

SEQ ID NO: 293500 - DNA, 120 bp, Artificial Sequence
  ENSG00000131584_9 (sequence is synthesized)
gtgtgaggacatcgagcggaggttctgcttcgaggtgctgtcacccaccaagagctgcatgctgcaggctgactccgagaagctgcggcaagcctgggtccaggctgtgcaggccagcat

SEQ ID NO: 293501 - DNA, 120 bp, Artificial Sequence
  ENSG00000131584_10 (sequence is synthesized)
cgcctccgcctaccgcgagagccctgacagttgctatagcgagaggctggaccgcacagcatccccgtccacgagcagcatcgactccgccaccgacactcgggagcgtggcgtgaaggg

SEQ ID NO: 293502 - DNA, 120 bp, Artificial Sequence
  ENSG00000131584_11 (sequence is synthesized)
cgagagtgtgctgcagcgtgtgcagagtgtggccggcaacagccagtgcggcgactgcggccagccggacccccgctgggccagcatcaacctgggcgtgctgctctgcattgagtgctc

SEQ ID NO: 293503 - DNA, 120 bp, Artificial Sequence
  ENSG00000131584_12 (sequence is synthesized)
cggcatccacaggagcctgggtgtccactgctccaaggtgcggtccctgacgctggactcgtgggagcctgagctgctaaagctgatgtgtgagcttggaaacagcgctgtgaatcagat

SEQ ID NO: 293504 - DNA, 120 bp, Artificial Sequence
  ENSG00000131584_13 (sequence is synthesized)
ctatgaggcccagtgtgagggtgcaggcagcaggaaacccacagccagcagctcccggcaggacaaggaggcctggatcaaggacaaatacgtggaaaagaagtttctgcggaaggcgcc

SEQ ID NO: 293505 - DNA, 120 bp, Artificial Sequence
  ENSG00000131584_14 (sequence is synthesized)
catggcaccagccctggaggccccaagacgctggagggtgcagaagtgcctgcggccccacagctctccccgcgctcccactgcccgccgcaaggtccggcttgagcccgttctgccctg

SEQ ID NO: 293506 - DNA, 120 bp, Artificial Sequence
  ENSG00000131584_15 (sequence is synthesized)
ctggactcgctcttctcctacttcgacgcaggggccgcaggggctggccctcgcagtctgagtagcgacagtggccttgggggcagctcggatggcagctcggacgtcctggctttcggc

SEQ ID NO: 293507 - DNA, 120 bp, Artificial Sequence
  ENSG00000131584_16 (sequence is synthesized)
tcgggctctgtggtggacagcgtcactgaggaggagggtgcagagtcggaggagtccagcggtgaggcagacggggacactgaggccgaggcctggggcctggcggacgtgcgcgagctg

SEQ ID NO: 293508 - DNA, 120 bp, Artificial Sequence
  ENSG00000131584_17 (sequence is synthesized)
cacccggggctcttggcgcaccgcgcagcgcgtgcccgcgaccttcctgcgctggcggcggcgctggcccacggggccgaggtcaactgggcggacgcggaggatgagggcaagacgccg

SEQ ID NO: 293509 - DNA, 120 bp, Artificial Sequence
  ENSG00000131584_18 (sequence is synthesized)
ctggtgcaggccgtgctagggggctccttgatcgtctgtgagttcctgctgcaaaacggagcggacgtgaaccaaagagacagccggggccgggcgcccctgcaccacgccacgctgctg

SEQ ID NO: 293510 - DNA, 120 bp, Artificial Sequence
  ENSG00000131584_19 (sequence is synthesized)
ggccgcaccggccaggtttgcctgttcctgaagcggggcgcggaccagcacgccctggaccaagagcagcgggacccgttggccatcgcagtgcaggcggccaacgctgacatcgtgaca

SEQ ID NO: 293511 - DNA, 120 bp, Artificial Sequence
  ENSG00000131584_20 (sequence is synthesized)
ctgctccgtctggcgcgcatggcggaggaaatgcgcgaggccgaggctgcccctggtcccccgggcgccctggcgggcagccccacggagctccagttccgcaggtgtatccaggagttc

SEQ ID NO: 293512 - DNA, 120 bp, Artificial Sequence
  ENSG00000131584_21 (sequence is synthesized)
aggagttcatcagcctccacctggaagagagctagggccgggcaggccgggcagctgccaccccgcccggcccgacgccccgcatgccccgaagtccctggcgcccacccggccgcggcc

SEQ ID NO: 293513 - DNA, 120 bp, Artificial Sequence
  ENSG00000131584_22 (sequence is synthesized)
gacccgcgggtcgatacctggcagccccagtgctggggcgccgcggccctgctcgcccaggaggagagcgagggccccacactgagtctcttgaagcctcacgtttccctgggggggtgc

SEQ ID NO: 293514 - DNA, 120 bp, Artificial Sequence
  ENSG00000131584_23 (sequence is synthesized)
tgcatcgtcgggtgtccctcaccccacctggggaacctctgtcttcaggtcaccccttttcaggggcctgggttgctcatgtcacaagccacttttaaggcccgtgtcacctgtgtccct

SEQ ID NO: 293515 - DNA, 120 bp, Artificial Sequence
  ENSG00000131584_24 (sequence is synthesized)
gtgtcctcagggcctgtgttacttcgtgccccacttctgcccagaacactgacctgttagctggctccctcctgcacaccccagagcctcctcccagggcagaaagggtggcccatccag

SEQ ID NO: 293516 - DNA, 120 bp, Artificial Sequence
  ENSG00000131584_25 (sequence is synthesized)
ggaaccaacgagtacctcacttagtgaccccagcatccaggctggcgtcgcgggtgctgggcgggaggggctctggcctgggtcctcagccctggctggacgcgggcgtcccaaggccac

SEQ ID NO: 293517 - DNA, 120 bp, Artificial Sequence
  ENSG00000131584_26 (sequence is synthesized)
gtggctggccacgaaggtccccgtgccagacagccccagccgcatcccggcctcctccggaggcaccttctcctggtactcggcccagagcctgcgcataaagccactttgccactttgc

SEQ ID NO: 293518 - DNA, 120 bp, Artificial Sequence
  ENSG00000131584_27 (sequence is synthesized)
agccctcatctcatgttctttgtagcggaccgagtgggtttgctataggcctcgtctgactttgtcttgcgtcttttctctgtggactcttgaggacgcctgagccccagccctgcccct

SEQ ID NO: 293519 - DNA, 120 bp, Artificial Sequence
  ENSG00000131584_28 (sequence is synthesized)
gaccagcctcccccttgggtccaggggtctttcggctcatattgcagggcctgccaatgccttcacgcaccccttccccaaaggtgcccggcagggaggcagggcctcccccactcagcg

SEQ ID NO: 293520 - DNA, 120 bp, Artificial Sequence
  ENSG00000131584_29 (sequence is synthesized)
caggtcaggctaaggccagtcggctggtcactatgcaatgctgccctggggaggctccctgagggcacagtgggcgctggacccggccccccaactctcttgcctgctgcctgtgaccct

SEQ ID NO: 293521 - DNA, 120 bp, Artificial Sequence
  ENSG00000131584_30 (sequence is synthesized)
gaagaacagaattgattcttgcccctctccctgtgtgagcttggccccgcctcttgccccaggcccctgctggcgggtctcaccccccacccctcgctttgaataaagcacttgcgccca

SEQ ID NO: 293522 - DNA, 120 bp, Artificial Sequence
  ENSG00000131584_31 (sequence is synthesized)
agcagagagctggacacggggcttggggctcaggcagtcggcctccgggtctccaaggtgaagcaggaagtgggtggtcggggccgggtggtggctgagggcaggggccacagcggtgcc

SEQ ID NO: 293523 - DNA, 120 bp, Artificial Sequence
  ENSG00000131584_32 (sequence is synthesized)
acgccggagccggaacagtcagggagcagagagctggacacggggcttggggctcaggcagtcggcctccgggtctccaaggatgccctcaccgtggtggtggatgacctccgcctgtgc

SEQ ID NO: 293524 - DNA, 120 bp, Artificial Sequence
  ENSG00000131584_33 (sequence is synthesized)
cagcctgctggtccctgcagggctggggtggggccggcactctcgggcccccagctgtgaacgtgaggggtctgccccacgggttgcagggctgggggccttgctcaggtcaagaagtgg

SEQ ID NO: 293525 - DNA, 120 bp, Artificial Sequence
  ENSG00000131584_34 (sequence is synthesized)
ctgtggtgaacagagggtctctcgtctgagcgtgtggtccgtgggccgtgtggcagcctcagacaaggacctcacccccacctgtgctccgggaaagcacggagggtagcagggcccctg

SEQ ID NO: 293526 - DNA, 120 bp, Artificial Sequence
  ENSG00000131584_35 (sequence is synthesized)
cagggctgggggaagaacactgaggccacgctccctcccttggaggggaagggggtctggggcagagcagaggcaccttgggcccaggcctccaggctgtgcagcggctccacaaggcag

SEQ ID NO: 293527 - DNA, 120 bp, Artificial Sequence
  ENSG00000131584_36 (sequence is synthesized)
gccatgaccgtggagttcgaggagtgcgtcaaggactccccgcgcttcagacgtgtgcacaagtgtgcatcggctttgcttggtggacatttggcaaacgacaatggaggcaaagaaacc

SEQ ID NO: 293528 - DNA, 120 bp, Artificial Sequence
  ENSG00000131584_37 (sequence is synthesized)
actcactctgccgggagagtccagcataggttgcgttcaaacaccggcagctcatcacgccggtgacagccagtggccaggcggtacaggtaggtccgggacgtggctgcgtgacgagcg

SEQ ID NO: 293529 - DNA, 120 bp, Artificial Sequence
  ENSG00000131584_38 (sequence is synthesized)
ctctaggggaccaaggctgctccctttgatgtgtgcagtggaggggcacgtgtgggtggggccgctgctgggatctccttttgaggcggtggtcacctctgtggcctcagtcactggctc

SEQ ID NO: 293530 - DNA, 120 bp, Artificial Sequence
  ENSG00000131584_39 (sequence is synthesized)
cttgcggggcctttgcttgcctgtgggacagcagccccggccaccatcccgggcagaggttggctgcaggcaggagtggctattttgggataggggagagccccccaggagttggggacg

SEQ ID NO: 293531 - DNA, 120 bp, Artificial Sequence
  ENSG00000131584_40 (sequence is synthesized)
taagtgagcacgggccctgggcgggctgtgggtcgggggagaccagatggggcggtgcctttccctcctctaccccaagggcacttcagcaccaaggacacctcccaccagtctcggctc

SEQ ID NO: 293532 - DNA, 120 bp, Artificial Sequence
  ENSG00000131584_41 (sequence is synthesized)
ctgctgctgatgcggctgtgaggggctggctccggccagacctccacattccccgtggggttggcggcagctgtcccttcccatcccatgtggcctggggagcaggtggccgcccctccc

SEQ ID NO: 293533 - DNA, 120 bp, Artificial Sequence
  ENSG00000131584_42 (sequence is synthesized)
ctctgcttccctggcctgccagatggcgggacacacagggccctcagtgactcccaggcctcctgaatggggctctgtccgcccagctggccacatgaatggggcactcaggatgcggag

SEQ ID NO: 293534 - DNA, 120 bp, Artificial Sequence
  ENSG00000131584_43 (sequence is synthesized)
ctgtttccctgttgcctgctcccggagggggtggtcacgtgcccgatccatctgcctcctgtcttccggggattctcccgccgaggcttctctggtgatgtcatgccttaactcttctct

SEQ ID NO: 293535 - DNA, 120 bp, Artificial Sequence
  ENSG00000131584_44 (sequence is synthesized)
ccccaggcagccccactgtcaggctgtcctggtgggagtgggctctgaggaggatggcctacccgtctttccagcggaccatgccgcttgcagctgtgaggttgggggagccgggggcgt

SEQ ID NO: 293536 - DNA, 120 bp, Artificial Sequence
  ENSG00000131584_45 (sequence is synthesized)
ctctccccagctggtctgggtcctcctggtgctgccaggaccgagagcagctgccctactgcccccaccctgtcccacagtgcatgggtgccagacctggatgggctgcagtagtgcagt

SEQ ID NO: 293537 - DNA, 120 bp, Artificial Sequence
  ENSG00000131584_46 (sequence is synthesized)
ggggtgaggggaggtgccgcagggttgaggggctccagatgggtccagggttgactctgaactcctagaggagaggcgggtgaggctggctcagcccttggtgggcactgtccctgaggg

SEQ ID NO: 293538 - DNA, 120 bp, Artificial Sequence
  ENSG00000131584_47 (sequence is synthesized)
actcccagcggccggctgtcctgggagaggctggtccagccttcttccccgagggcacagcagcggctgcctctgcctgcctggggttgggggggcggggggaagtgcactgaacctggt

SEQ ID NO: 293539 - DNA, 120 bp, Artificial Sequence
  ENSG00000131584_48 (sequence is synthesized)
cccagtcctgcccccgtagcaggcaggcgtctgtctcccagcctgtttcctgaaagccccttcccatggtggagcccctcagggaggtgcggggggaggtgaagccccgagggggctgag

SEQ ID NO: 293540 - DNA, 120 bp, Artificial Sequence
  ENSG00000131584_49 (sequence is synthesized)
gctgcaggtgaccccagccagccccgttcttgctttagggcgaccattgacgaggtggagacggacgtggtggagattgaggccaaactggacaaggtgaagggcgggcctggagcgccc

SEQ ID NO: 293541 - DNA, 120 bp, Artificial Sequence
  ENSG00000131584_50 (sequence is synthesized)
tgtgcccggccaagcttgggatggccacatggccagactcgccctccaggccttactaagccacttacaccccccatatgtggagcatgcgtgtggtgctccaggtcctggtccctgtgt

SEQ ID NO: 293542 - DNA, 120 bp, Artificial Sequence
  ENSG00000131584_51 (sequence is synthesized)
cttagcatgtgtgttccagggtgcacatgtcacatgcacacatgtggctggccctgagtctcgtcccatctgggaggggctgggctgtggtgagtccccgacccacggtggctgcccgtc

SEQ ID NO: 293543 - DNA, 120 bp, Artificial Sequence
  ENSG00000131584_52 (sequence is synthesized)
tgtccatgagccccacatgggctgagaaagagggggcaacaggccgtggagaggggagccgtgtccatgagccccacatgggctgagaaagaggagggggcaacaggccgtggagctggg

SEQ ID NO: 293544 - DNA, 120 bp, Artificial Sequence
  ENSG00000131584_53 (sequence is synthesized)
agtgggcagccttatccatgagccccacatgggctggttctgctggtcctgctggccctgggtcccctgcctggctcctggtccctcccagccgagccgtggcggccccaccctcccctc

SEQ ID NO: 293545 - DNA, 120 bp, Artificial Sequence
  ENSG00000131584_54 (sequence is synthesized)
ccagacgggcctccaagccccaggcaggcccaggcgtgaggaagctgcaccggggcactgagtcctgagtgccaacgccctgagtggaacctaccctgggagctcttcctgcctctgagt

SEQ ID NO: 293546 - DNA, 120 bp, Artificial Sequence
  ENSG00000131584_55 (sequence is synthesized)
tgcatgtgtgggtggggtgtccagcccccacagcagagaggtccagtccacgttgggtttgggggtctggagtctggggcatggctggggtctgggctggacagatcttgagagtgaggt

SEQ ID NO: 293547 - DNA, 120 bp, Artificial Sequence
  ENSG00000131584_56 (sequence is synthesized)
ggggaggggctggggaggcctggagcagatgatcggggtcagcaggggtgcgggcaggcctgggataggctggtgaggaaggaggctatgcccaggagcaaagaaagggcctggagtgga

SEQ ID NO: 293548 - DNA, 81 bp, Artificial Sequence
  ENSG00000131584_57 (sequence is synthesized)
agcaaagaaagggcctggagtggaggggggtttgggaggccaaggccagagaatgccaggagtttgagaccagcctgggca

SEQ ID NO: 293549 - DNA, 120 bp, Artificial Sequence
  ENSG00000131584_58 (sequence is synthesized)
tgtaacgtggagcctggtcgccccagcccgggagagggggaccctgcccgcaccctcctggtctggggagggcctagtggcagcccaggtgcagtgggccggaggccaggggagcccgtg

SEQ ID NO: 293550 - DNA, 120 bp, Artificial Sequence
  ENSG00000131584_59 (sequence is synthesized)
taggggaaccgcctggcctctgttcagtgtgcccctcccctgggtggggcttcaggcgctgagtcatggctttggttggggggcagcctcaccctcctccccgtcctccaagctgctgag

SEQ ID NO: 293551 - DNA, 120 bp, Artificial Sequence
  ENSG00000131584_60 (sequence is synthesized)
gaaatcctgggctgagcacagcagaggaggcctaggtccccaggactgaggaagggagagctgaggggctcccagcagtgggagcggctctcggggcctctgccagggcccaccctgtcc

SEQ ID NO: 293552 - DNA, 120 bp, Artificial Sequence
  ENSG00000131584_61 (sequence is synthesized)
ccatgagcacgtccgtgagctcctgggtgcagccatccccccttgctggctctccagggacacgggcgccccaaacccgagggcggcagctctgggtgcagctgtctctgcatccggccc

SEQ ID NO: 293553 - DNA, 120 bp, Artificial Sequence
  ENSG00000131584_62 (sequence is synthesized)
tgctcaggggtggctgcaactcctggggtgtggcgctctctgctgccttctcctgggaggatggtcccttctctgttctgggatcctccagctgaggtagaggtcagggtccaggggctg

SEQ ID NO: 293554 - DNA, 120 bp, Artificial Sequence
  ENSG00000131584_63 (sequence is synthesized)
caggctgggcactggcggtcagcggacaccacagcgagattccctccatcgccccctgcttcgggattcagagtcctcttagccccttgggaacaagagagggctgctcagagaggacct

SEQ ID NO: 293555 - DNA, 120 bp, Artificial Sequence
  ENSG00000131584_64 (sequence is synthesized)
agtgtccttctggggtggctgggacccttcaaggtccctggctggggcagcctggtgcctgcagctccagctcctaattgaggacacgccccatgtaaaccacaggcccctcccccgagg

SEQ ID NO: 293556 - DNA, 120 bp, Artificial Sequence
  ENSG00000131584_65 (sequence is synthesized)
cctgggacaccggtcagggtagcaaggtacgagggactgtaggccctgatggcctctgctcctggacccctgccctagacctggagtcctggccccagcccgggccctgtggtgcccaat

SEQ ID NO: 293557 - DNA, 120 bp, Artificial Sequence
  ENSG00000131584_66 (sequence is synthesized)
gcagccatgaccgtggagttcgaggagtgcgtcaaggactccccgcgcttcagagcagcgcgtggggaacaggcagctggagccgcgtttaaggcctgggggcgaccattgacgaggtgg

SEQ ID NO: 293558 - DNA, 120 bp, Artificial Sequence
  ENSG00000131584_67 (sequence is synthesized)
cctttgagctgttatttggttttctctcctttgctcctagcctgcagctggctccccccggccctgggtgggagctggtcctgtccctaggggtggcccctggagggtgggtggagttcc

SEQ ID NO: 293559 - DNA, 120 bp, Artificial Sequence
  ENSG00000131591_0 (sequence is synthesized)
ggtagagggatcaagttgtcttcaattttatctcctctgctgactttttagttctgcctctttgtgttgttttttaagtggttcctctggagattaaatgtacttcacagaacctcagcg

SEQ ID NO: 293560 - DNA, 120 bp, Artificial Sequence
  ENSG00000131591_1 (sequence is synthesized)
agcggactccagttatattccgtgctcttgtcggcacgcatttcacttctaggactgggccggggtctgcagggctcagctgagcccatgagctcccagagctaacccctgaacacccag

SEQ ID NO: 293561 - DNA, 120 bp, Artificial Sequence
  ENSG00000131591_2 (sequence is synthesized)
gcgggcaaagggctgatgtcggtagtccccatcctggaggggcaggctctgcgcatctgctcctggcatggcgctgcggcacctcgccctcctggctggccttctcgtgggagtcgccag

SEQ ID NO: 293562 - DNA, 120 bp, Artificial Sequence
  ENSG00000131591_3 (sequence is synthesized)
caagtccatggagaacacggcccagctgcccgagtgctgtgtggatgtggtgggcgtcaacgccagctgcccaggcgcaagtctgtgtggtccaggctgttacaggcgctggaacgcgga

SEQ ID NO: 293563 - DNA, 120 bp, Artificial Sequence
  ENSG00000131591_4 (sequence is synthesized)
tccgctgtgggaacggaaccctcccagcctacaacggctccgagtgtagaagctttgctggcccgggtgcgccattccccatgaacagaagctcagggacccccgggcggccacatcctg

SEQ ID NO: 293564 - DNA, 120 bp, Artificial Sequence
  ENSG00000131591_5 (sequence is synthesized)
gggctccgcgcgtggccgcctccctcttcctgggcacgttcttcattagctccggcctcatcctctccgtagctgggttcttctacctcaagcgctccagtaaactccccagggcctgct

SEQ ID NO: 293565 - DNA, 120 bp, Artificial Sequence
  ENSG00000131591_6 (sequence is synthesized)
acagaagaaacaaagctccggccctgcagcctggcgaagccgctgcaatgatccccccgccacagtcctcagtacggaagccgcgctacgtcaggcgggagcggcccctggacagggcca

SEQ ID NO: 293566 - DNA, 120 bp, Artificial Sequence
  ENSG00000131591_7 (sequence is synthesized)
cggatcccgctgccttcccgggggaggcccgtatcagcaatgtctgacctggaggccgagaccacgccacgcacttggcggcagggacccggaggccgaccccttggcgggaaccagcac

SEQ ID NO: 293567 - DNA, 120 bp, Artificial Sequence
  ENSG00000131591_8 (sequence is synthesized)
aaagtgttggcatcgcccggcgcccgggacagtcctgggcacagcctcggctctgagtccctccgcctcccagcgacggacgccaaagggtcccgggccgcctgaggctcctccccacca

SEQ ID NO: 293568 - DNA, 120 bp, Artificial Sequence
  ENSG00000131591_9 (sequence is synthesized)
tgagacctcagagcttcagatcgaggccttggggggtccgggcccccccaggaaacacggtgaggccccagcgcctgcagccaaagctggcacgatctatggggcaggtgccgctctgcc

SEQ ID NO: 293569 - DNA, 120 bp, Artificial Sequence
  ENSG00000131591_10 (sequence is synthesized)
tagaaaagccaggggctctgctgccgtgccctccagagcccacagcgggcaggactcctccagcaccaccacacccagtggcccgagacccctctgagaacagtgaggctggtcctcgtg

SEQ ID NO: 293570 - DNA, 120 bp, Artificial Sequence
  ENSG00000131591_11 (sequence is synthesized)
ccgttccagccggtgcccggccagtggggaggacacagcctaggaaccagctgcctgagaccagggtgcctctgggctgtcctcccgcgtggcggagaccccaagcacgcagccacccat

SEQ ID NO: 293571 - DNA, 120 bp, Artificial Sequence
  ENSG00000131591_12 (sequence is synthesized)
ttccggagctgcaggatagagcttcctcttgatctctgtttttaagcagaaattcattgtgcagaaaagtcctccagagctctgtggccccgctcggatccgctggacccccatgcctgg

SEQ ID NO: 293572 - DNA, 120 bp, Artificial Sequence
  ENSG00000131591_13 (sequence is synthesized)
ctgatccctgcccacgtggggcaggcccacatctaacccccacaagtcactgcctcactgcacctgccaaggctgccctggcgctgagtcctggggtccctcccggagttcctgggagaa

SEQ ID NO: 293573 - DNA, 120 bp, Artificial Sequence
  ENSG00000131591_14 (sequence is synthesized)
aggcgccgtcgtggccgcctcccgcacgccaggcccgggctccaccgtgggtctcagacgccctgcggcaccggcaccgtctgctttagcatgggacccccctctgaggggtggcctggc

SEQ ID NO: 293574 - DNA, 120 bp, Artificial Sequence
  ENSG00000131591_15 (sequence is synthesized)
cttcggggtccccacgctcctttgcgaagtccactgtgggtgccatcatggtctccgggacctgggccagcgggaacgtgggggcactgggtgtgctgatataaagtcggcattactcaa

SEQ ID NO: 293575 - DNA, 120 bp, Artificial Sequence
  ENSG00000131591_16 (sequence is synthesized)
ctctttcaccccacctccatttggctccaccttccctgtcgtggccctgcacccctgccacggccctgccccatctccatttaactcagtcatctgccgcggccccgccccaccccatct

SEQ ID NO: 293576 - DNA, 120 bp, Artificial Sequence
  ENSG00000131591_17 (sequence is synthesized)
ccatttggccccaccctccctgccacagccccgcccacttccatttggccccaccctccaccacagccccgcccacttccatttggccccaccctccaccacagccccacccatctccat

SEQ ID NO: 293577 - DNA, 120 bp, Artificial Sequence
  ENSG00000131591_18 (sequence is synthesized)
ttggctctgccctccttgccttggcccgcacccccccaacatctcttgaccccactttcatttggccccacccaccctgcctcagccccactccatctctttggctccgcatgctcctcc

SEQ ID NO: 293578 - DNA, 120 bp, Artificial Sequence
  ENSG00000131591_19 (sequence is synthesized)
agtcctcaggtaacagcagctgtcgcatccccctgtggggtttcccatctctgggccagtcccagggtgctctgtgggtttgtccccaaacgggtttgcctggctctggatctcggccac

SEQ ID NO: 293579 - DNA, 120 bp, Artificial Sequence
  ENSG00000131591_20 (sequence is synthesized)
ccctgcccgggtccccaggagacccacccacaaggcagggccagggccggatttggctggtgccccctgctctggatctcagctggatttggccggcgccccctgcccgcccccctttaa

SEQ ID NO: 293580 - DNA, 120 bp, Artificial Sequence
  ENSG00000131591_21 (sequence is synthesized)
tccccgtgacttccatgctctttcctgttcccgagacgtggggtctgcaggaaaggaggacccaccacgacagggcagacccccaatacctgctcctccttgaagtccagctccacccga

SEQ ID NO: 293581 - DNA, 120 bp, Artificial Sequence
  ENSG00000131591_22 (sequence is synthesized)
ggacagacgcagccggcctccgccaggccctcctgagcagccatcgcttcagtggtgctgggtcaggcggacccaagagtcagcccgtacggaagccgcgctacgtcaggcgggagcggc

SEQ ID NO: 293582 - DNA, 120 bp, Artificial Sequence
  ENSG00000131591_23 (sequence is synthesized)
gagaaacccggagggcgccgggtattaccagggtgtgcagagaaggcagagctgcgtcttcctcttttatttttccgactgggccggggtctgcagggctcagctgagcccatgagctcc

SEQ ID NO: 293583 - DNA, 120 bp, Artificial Sequence
  ENSG00000131591_24 (sequence is synthesized)
gcgaggaatccgggggaatgtagtccctccgtgtcagggacccgagacatgcgctggttcttctaggactacatttcccagggcgcttcgcgccccgccccggcgccccacccacggccg

SEQ ID NO: 293584 - DNA, 120 bp, Artificial Sequence
  ENSG00000131591_25 (sequence is synthesized)
cgcgcgatggtaccaccaggcgagggcggctctcgcgcgggccgccgggagttgtagttttctttgggagctgcggggcctggcgccggggccggggcggaagaaagactacaagtccca

SEQ ID NO: 293585 - DNA, 120 bp, Artificial Sequence
  ENSG00000131591_26 (sequence is synthesized)
tttgctttggctgacatgcccgtcctctgccccacgcaggctgttacaggcgctggaacgcggacgggagcgccagctgcgtccgctgtgggaacggaaccctcccagcctacaacggct

SEQ ID NO: 293586 - DNA, 120 bp, Artificial Sequence
  ENSG00000131591_27 (sequence is synthesized)
ccgagtgtagaagctgtaggtctgcccggctccccccggctcccttctcacagctccagctgtgggagacactgtgggagttgctgtctgtgtccccaccttgccccagagccactgtcc

SEQ ID NO: 293587 - DNA, 120 bp, Artificial Sequence
  ENSG00000131591_28 (sequence is synthesized)
actggggaacagccccgggagccccctcttcccgagtctgctgggccattcgggacagctctgtggtgagggctgctccgccccctcagcccctcgctttcatatttccgtcctgagatc

SEQ ID NO: 293588 - DNA, 120 bp, Artificial Sequence
  ENSG00000131591_29 (sequence is synthesized)
ccttcagggtgcacgtgggtgtccccgtgggctccgtgcacacaggcttcccacagttctgctatcccacagttgctggcccgggtgcgccattccccatgaacagaagctcagggaccc

SEQ ID NO: 293589 - DNA, 120 bp, Artificial Sequence
  ENSG00000131591_30 (sequence is synthesized)
tcaggcggacccaagagtcagcccggttaggacccattttatgtgcggggccacagacacaggctgagtgaccggcgcacagccacacagctccaaggccatgagcagggctcacccggc

SEQ ID NO: 293590 - DNA, 120 bp, Artificial Sequence
  ENSG00000131591_31 (sequence is synthesized)
ctccgtccccctgtgcagaagtctgtcatgggggcaggtgaccgtgcctttaggggacagaccgttctccatcaaggctggacgtgccccgtccctaaagcagccctgtctgcaagtgcc

SEQ ID NO: 293591 - DNA, 120 bp, Artificial Sequence
  ENSG00000131591_32 (sequence is synthesized)
cagcagaccccacggtgcccgagtgccccggggctgccagcttcaacagcagacctttaatctgactatcctagagttcagaagtccaaaaccaaggggcaaacaaggccacacgcttcc

SEQ ID NO: 293592 - DNA, 120 bp, Artificial Sequence
  ENSG00000131591_33 (sequence is synthesized)
ctgtcccctggtcccacggcgtctcccccacctctgcgtcttctctctctgcctctctctcaggtgggccctggccgttgtttcagggcctgcccggggaaccctgggcgatcacacctg

SEQ ID NO: 293593 - DNA, 120 bp, Artificial Sequence
  ENSG00000131591_34 (sequence is synthesized)
agaccctgacgtaaccccctgcaaagccccttcttctaaataaggtcacattcgaggtcttgggactacggcctgcttgtcgccccctgaggtgcatgatactctgggacccacatctct

SEQ ID NO: 293594 - DNA, 120 bp, Artificial Sequence
  ENSG00000131591_35 (sequence is synthesized)
gtcttcggggatcgcctggcccttgtccaggccccggggcccagggtgtaaatgagaggacacagccgggcaggaggaagccgtccctttcccgagctggagctctgagggcgccttagg

SEQ ID NO: 293595 - DNA, 120 bp, Artificial Sequence
  ENSG00000131591_36 (sequence is synthesized)
ggcagggggcatctgggttcccacctggtcagagtaaacagccccgggcgcctgtgccatatgcccactcccgagagcctccggtgagggctgaggcctgcactgtccctgctgtccagg

SEQ ID NO: 293596 - DNA, 120 bp, Artificial Sequence
  ENSG00000131591_37 (sequence is synthesized)
actgatgtcccagccccagaggtgctgaccaggtccactgctggggtcagaggggcctgtgcctcgcagaggggagccctccgctgcctgctgggtgagcgcctgctcaggaatggctgg

SEQ ID NO: 293597 - DNA, 120 bp, Artificial Sequence
  ENSG00000131591_38 (sequence is synthesized)
gtcaggcggggcccccacggtgaggcatcctggcccgcaatgggagcacctctgccagcggtgacagcacagcgtgccgcgcatcgctatcggggagtgtagctgcggcggctccagact

SEQ ID NO: 293598 - DNA, 120 bp, Artificial Sequence
  ENSG00000131591_39 (sequence is synthesized)
cccaggcggagcgggtggagggtggggacccctcactgtcctggctggggcgtttgagggaccggacctgggcccctccctggcggtgtggattctatcccgcactccgcagtcacccct

SEQ ID NO: 293599 - DNA, 120 bp, Artificial Sequence
  ENSG00000131591_40 (sequence is synthesized)
ggacgccctcaccgttcactgcattcaggtcacgagaaacagcacagctgtgatcaacacacaagctgagggtaccctgagccccccaggcctgtccagtctgcctgtggtcagggaatg

SEQ ID NO: 293600 - DNA, 120 bp, Artificial Sequence
  ENSG00000131591_41 (sequence is synthesized)
ggccctcacacacaccgtaagtgccagcacccagcgcacctgtgcagtacctgggcacctgggcgtgaattcgtcccctgaaatgccagccaggcccgggcacttcctctgtggggtcaa

SEQ ID NO: 293601 - DNA, 120 bp, Artificial Sequence
  ENSG00000131591_42 (sequence is synthesized)
gcggaaacccctgatggagagcctccggagacttgcagagaatgtcggtggcgctgccatggcctgcgggtgccgcctcctgggggtggtttactcttccaggcccagcttttccttgga

SEQ ID NO: 293602 - DNA, 120 bp, Artificial Sequence
  ENSG00000131591_43 (sequence is synthesized)
gaccgcccacccagggtcccacagggatgtgcactgtggctgtgaggcccctccttgctcccaggcccacaggggacagagggccacccgatgctgactccagaagaggccggagctgcg

SEQ ID NO: 293603 - DNA, 120 bp, Artificial Sequence
  ENSG00000131591_44 (sequence is synthesized)
gacattgagatgtgctcccacggcacccctcagccgctgctgctctgggcgtgagcctgcctggcaggcgcgtcctggagtttcactgccgtgtcccctccaggcccagctgcccgagtg

SEQ ID NO: 293604 - DNA, 120 bp, Artificial Sequence
  ENSG00000131591_45 (sequence is synthesized)
gagtcctccggcaggctcacacctgggcagcctggtcagtttgtgaggccatgacctgaatccagcatggaatgggtgacagagtggaccgtccctgtgcggagagtggaccgtccctgt

SEQ ID NO: 293605 - DNA, 120 bp, Artificial Sequence
  ENSG00000131591_46 (sequence is synthesized)
gcagagactggagctgtgtcctccagggcctccgtctccctgctgctcacagcccttgtcccaggaccccggcctaggcccatcaagaggagccccacaggcctggctgggcctcagccc

SEQ ID NO: 293606 - DNA, 120 bp, Artificial Sequence
  ENSG00000131591_47 (sequence is synthesized)
gttcggaccccaagctccggccctgcagcctggcgaagccgtaagtaacccacatcatccgggctgagcgtccctggccgcgtgtgcctgtgccaggccatcccgagtcctcactctgcc

SEQ ID NO: 293607 - DNA, 120 bp, Artificial Sequence
  ENSG00000131591_48 (sequence is synthesized)
gtacgaaagagaaacccggagggcgccgggtattaccagggtgtgcagagaaggcagagctgcgtcttcctcttttatttttccgtgctctgagtgcggggcccgccgagcctgcaccca

SEQ ID NO: 293608 - DNA, 81 bp, Artificial Sequence
  ENSG00000131591_49 (sequence is synthesized)
ttccgtgctctgagtgcggggcccgccgagcctgcacccacccagaactcacgctgcatgcagccccggttcccgcctgca

SEQ ID NO: 293609 - DNA, 120 bp, Artificial Sequence
  ENSG00000131591_50 (sequence is synthesized)
ccaggaaacacgaaattcattgtgcagaaaagtcctccagagctctgtggccccgctcggatccgctggacccccatgcctggctgatccctgcccacgtggggcaggcccacatctaac

SEQ ID NO: 293610 - DNA, 120 bp, Artificial Sequence
  ENSG00000131591_51 (sequence is synthesized)
ggaggccaggaggccagctcgggggaaacactcgtggagacagcccctccaggacgccctgctcgacagccaggggccggcaagggtgtggacagagggcccggaccggacccagacccc

SEQ ID NO: 293611 - DNA, 120 bp, Artificial Sequence
  ENSG00000131620_0 (sequence is synthesized)
tgagtccaggtcctcctgaaggtcaccagcacagcggggccctgtgttactgtagagagaagtcagttgcttagtttcagcctcctgccggcaccagatgctgaccaggccctcccaggt

SEQ ID NO: 293612 - DNA, 120 bp, Artificial Sequence
  ENSG00000131620_1 (sequence is synthesized)
ggtgagcaatgctgtttccaggagaggcatcctagggccagagaggccaaggtgccagggacatggccccaactgtcccctaaccaggggtagaggagtctagacccttgacatcaacac

SEQ ID NO: 293613 - DNA, 120 bp, Artificial Sequence
  ENSG00000131620_2 (sequence is synthesized)
ctatgaaagctgctgaactccttatctgtggaccctgatgccgagtgcaagtatggcctgtacttcagggacggccggcgcaaggtggactacatcctggtgtaccatcacaagaggccc

SEQ ID NO: 293614 - DNA, 120 bp, Artificial Sequence
  ENSG00000131620_3 (sequence is synthesized)
tcgggcaaccggaccctggtcaggagggtgcagcacagcgacaccccctctggggctcgcagcgtcaagcaggaccaccccctgccgggcaagggggcgtcgctggatgcaggctcgggg

SEQ ID NO: 293615 - DNA, 120 bp, Artificial Sequence
  ENSG00000131620_4 (sequence is synthesized)
gagcccccgatggactaccacgaggatgacaagcgcttccgcagggaggagtacgagggcaacctcctggaggcgggcctggagctggagcgggacgaggacactaaaatccacggagtc

SEQ ID NO: 293616 - DNA, 120 bp, Artificial Sequence
  ENSG00000131620_5 (sequence is synthesized)
gggtttgtgaaaatccatgccccctggaacgtgctgtgcagagaggccgagtttctgaaactgaagatgccgacgaagaagatgtaccacattaatgagacccgtggcctcctgaaaaaa

SEQ ID NO: 293617 - DNA, 120 bp, Artificial Sequence
  ENSG00000131620_6 (sequence is synthesized)
atcaactctgtgctccagaaaatcacagatcccatccagcccaaagtggctgagcacaggccccagaccatgaagagactctcctatcccttctcccgggagaagcagcatctatttgac

SEQ ID NO: 293618 - DNA, 120 bp, Artificial Sequence
  ENSG00000131620_7 (sequence is synthesized)
ttgtctgataaggattcctttttcgacagcaaaacccggagcacgattgtctatgagatcttgaagagaacgacgtgtacaaaggccaagtacagcatgggcatcacgagcctgctggcc

SEQ ID NO: 293619 - DNA, 120 bp, Artificial Sequence
  ENSG00000131620_8 (sequence is synthesized)
aatggtgtgtacgcggctgcatacccactgcacgatggagactacaacggtgaaaacgtcgagttcaacgacagaaaactcctgtacgaagagtgggcacgctatggagttttctataag

SEQ ID NO: 293620 - DNA, 120 bp, Artificial Sequence
  ENSG00000131620_9 (sequence is synthesized)
taccagcccatcgacctggtcaggaagtattttggggagaagatcggcctgtacttcgcctggctgggcgtgtacacccagatgctcatccctgcctccatcgtgggaatcattgtcttc

SEQ ID NO: 293621 - DNA, 120 bp, Artificial Sequence
  ENSG00000131620_10 (sequence is synthesized)
ctgtacggatgcgccaccatggatgaaaacatccccagcatggagatgtgtgaccagagacacaatatcaccatgtgcccgctttgcgacaagacctgcagctactggaagatgagctca

SEQ ID NO: 293622 - DNA, 120 bp, Artificial Sequence
  ENSG00000131620_11 (sequence is synthesized)
gcctgcgccacggcccgcgccagccacctcttcgacaaccccgccacggtcttcttctctgtcttcatggccctctgggctgccaccttcatggagcactggaagcggaaacagatgcga

SEQ ID NO: 293623 - DNA, 120 bp, Artificial Sequence
  ENSG00000131620_12 (sequence is synthesized)
ctcaactaccgctgggacctcacgggctttgaagaggaagaggatcatcctagagctgaatacgaagccagagtcttggagaagtctctgaagaaagagtccagaaacaaagagactgac

SEQ ID NO: 293624 - DNA, 120 bp, Artificial Sequence
  ENSG00000131620_13 (sequence is synthesized)
tggtctccatcatcttcatgattgcagtgacgtttgccatcgtcctcggcgtcatcatctacagaatctccatggccgccgccttggccatgaactcctccccctccgtgcggtccaaca

SEQ ID NO: 293625 - DNA, 120 bp, Artificial Sequence
  ENSG00000131620_14 (sequence is synthesized)
tccgggtcacagtcacagccaccgcagtcatcatcaacctagtggtcatcatcctcctggacgaggtgtatggctgcatagcccgatggctcaccaagatcgaggtcccaaagacggaga

SEQ ID NO: 293626 - DNA, 120 bp, Artificial Sequence
  ENSG00000131620_15 (sequence is synthesized)
aaagctttgaggagaggctgatcttcaaggctttcctgctgaagtttgtgaattcctacacccccatcttttacgtggcgttcttcaaaggccggtttgttggacgcccgggcgactacg

SEQ ID NO: 293627 - DNA, 120 bp, Artificial Sequence
  ENSG00000131620_16 (sequence is synthesized)
tgtacattttccgttccttccgaatggaagagtgtgcgccagggggctgcctgatggagctatgcatccagctcagcatcatcatgctggggaaacagctgatccagaacaacctgttcg

SEQ ID NO: 293628 - DNA, 120 bp, Artificial Sequence
  ENSG00000131620_17 (sequence is synthesized)
agatcggcatcccgaagatgaagaagctcatccgctacctgaagctgaagcagcagagcccccctgaccacgaggagtgtgtgaagaggaaacagcggtacgaggtggattacaacctgg

SEQ ID NO: 293629 - DNA, 120 bp, Artificial Sequence
  ENSG00000131620_18 (sequence is synthesized)
agcccttcgcgggcctcaccccagagtacatggaaatgatcatccagtttggcttcgtcaccctgtttgtcgcctccttccccctggccccactgtttgcgctgctgaacaacatcatcg

SEQ ID NO: 293630 - DNA, 120 bp, Artificial Sequence
  ENSG00000131620_19 (sequence is synthesized)
agatccgcctggacgccaaaaagtttgtcactgagctccgaaggccggtagctgtcagagccaaagacatcggaatctggtacaatatcctcagaggcattgggaagcttgctgtcatca

SEQ ID NO: 293631 - DNA, 120 bp, Artificial Sequence
  ENSG00000131620_20 (sequence is synthesized)
tcaatgccttcgtgatctccttcacgtctgacttcatcccgcgcctggtgtacctctacatgtacagtaagaacgggaccatgcacggcttcgtcaaccacaccctctcctccttcaacg

SEQ ID NO: 293632 - DNA, 120 bp, Artificial Sequence
  ENSG00000131620_21 (sequence is synthesized)
tcagtgacttccagaacggcacggcccccaatgaccccctggacctgggctacgaggtgcagatctgcaggtataaagactaccgagagccgccgtggtcggaaaacaagtacgacatct

SEQ ID NO: 293633 - DNA, 120 bp, Artificial Sequence
  ENSG00000131620_22 (sequence is synthesized)
ccaaggacttctgggccgtcctggcagcccggctggcgtttgtcatcgtcttccagaacctggtcatgttcatgagcgactttgtggactgggtcatcccggacatccccaaggacatca

SEQ ID NO: 293634 - DNA, 120 bp, Artificial Sequence
  ENSG00000131620_23 (sequence is synthesized)
gccagcagatccacaaggagaaggtgctcatggtggagctgttcatgcgggaggagcaagacaagcagcagctgctggaaacctggatggagaaggagcggcagaaggacgagccgccgt

SEQ ID NO: 293635 - DNA, 120 bp, Artificial Sequence
  ENSG00000131620_24 (sequence is synthesized)
gcaaccaccacaacaccaaagcctgcccagacagcctcggcagcccagcccccagccatgcctaccacgggggcgtcctgtagctatgccagcggggctgggcaggccagccgggcatcc

SEQ ID NO: 293636 - DNA, 120 bp, Artificial Sequence
  ENSG00000131620_25 (sequence is synthesized)
tgaccgatgggcaccctctcccagggcaggcggcttcccgctcccaccagggcccggaatgtcactgttggacaattattttaaaagtgtataaaaccaagtctcataaatgatatgagt

SEQ ID NO: 293637 - DNA, 120 bp, Artificial Sequence
  ENSG00000131620_26 (sequence is synthesized)
gatctaaatttgcagcaatgatactaaacaactctctgaaatttctcaagcaccaagagaaacatcattttagcaaaggccaggaggaaaaatagaaataaatttgtcttgaagatctca

SEQ ID NO: 293638 - DNA, 80 bp, Artificial Sequence
  ENSG00000131620_27 (sequence is synthesized)
aaaggcgggccggctggcgtccaagttcctgaccaggcgcgggccggcccgcgggaccagcagccgggtggcggcgcgat

SEQ ID NO: 293639 - DNA, 120 bp, Artificial Sequence
  ENSG00000131620_28 (sequence is synthesized)
aggccgccggggccgtggatggggagggcgcgccgcccggcggtcccagcgcacaggcggccacgatgagggtcaacgagaagtactcgacgctcccggccgaggaccgcagcgtccaca

SEQ ID NO: 293640 - DNA, 120 bp, Artificial Sequence
  ENSG00000131620_29 (sequence is synthesized)
aagccagagtcttggagaagtctctgaagaaagagtccagaaacaaagagaagcgccggcatattccagaggagtcaacaaacaaatggaagcagagggttaagacagccatggcggggg

SEQ ID NO: 293641 - DNA, 120 bp, Artificial Sequence
  ENSG00000131620_30 (sequence is synthesized)
cagggcccggtgggtcctgggttttctgcaaacatggaggaccactttctgataggacattttcctttcttctttctgttttctttcccttgtttttgcacaaagccattatgcagggaa

SEQ ID NO: 293642 - DNA, 120 bp, Artificial Sequence
  ENSG00000131620_31 (sequence is synthesized)
tattttttaatctgtagtattcaagatgaatcaaaatgatggctggtaatacggcaataaggtagcaaaggcaggtgctttgcagaaagaatgcttggaaacttgagtctccctagaggt

SEQ ID NO: 293643 - DNA, 120 bp, Artificial Sequence
  ENSG00000131620_32 (sequence is synthesized)
gaaaagtgagcagaggcccgtagaaaccctcctctgaatcctcctaattccttaagatagatgcaaaatggtaagccgaggcatcgcgcaaaagctggtgcgatgcttcagggaaaatgg

SEQ ID NO: 293644 - DNA, 120 bp, Artificial Sequence
  ENSG00000131620_33 (sequence is synthesized)
aaaacccacgcaagaataatgattgattccggttccaaaaggtgtcacctacctgtttcagaaaagttagactttccatcgccttttccttccatcagttgagtggctgagagagaagtg

SEQ ID NO: 293645 - DNA, 120 bp, Artificial Sequence
  ENSG00000131620_34 (sequence is synthesized)
cctcatccctgagccacacagggggcgtgggagcatcccagttatccctggaaagctagaaggggacagaggtgtccctgattaagcaggaaacagcacccttggcgtccccagcaggct

SEQ ID NO: 293646 - DNA, 120 bp, Artificial Sequence
  ENSG00000131620_35 (sequence is synthesized)
ccccactgtcagccacacacctgcccccatcacaccaagccgacctcagagttgttcatcttccttatgggacaaaaccggttgaccagaaaatgggcagagagagatgacctcggaagc

SEQ ID NO: 293647 - DNA, 120 bp, Artificial Sequence
  ENSG00000131620_36 (sequence is synthesized)
atttccacagatggtgtcagggtttcaagaagtcttagggcttccaggggtcccctggaagctttagaatatttatgggttttttttcaaatatcaattatatggtagattgaggatttt

SEQ ID NO: 293648 - DNA, 120 bp, Artificial Sequence
  ENSG00000131620_37 (sequence is synthesized)
ttttctgtagctcaaaggtggagggagtttattagttaaccaaatatcgttgagaggaatttaaaatactgttactaccaaagatttttattaataaaggcttatattttggtaacactt

SEQ ID NO: 293649 - DNA, 120 bp, Artificial Sequence
  ENSG00000131620_38 (sequence is synthesized)
gtggtcaaagttcataggtgtcgtacatttccattatttgctaaaatcatgcaatctgatgcttctcttttctcttgtacagtaagtagtttgaagtgggttttgtatataaatactgta

SEQ ID NO: 293650 - DNA, 120 bp, Artificial Sequence
  ENSG00000131620_39 (sequence is synthesized)
ttaaaaattaggcaattaccaaaaatccttttatggaaaccatttttttaaaaagtgaatgtacacaaatccacagaggactgtggctggacattcatctaaataaatttgaatatacga

SEQ ID NO: 293651 - DNA, 120 bp, Artificial Sequence
  ENSG00000131620_40 (sequence is synthesized)
agactacaacggtgaaaacgtcgagttcaacgacagaaaagtaagttgatggagcggagcaggaggtggctctgtcagagcctggaggcgttctggggcggggtgggcctgcagctggac

SEQ ID NO: 293652 - DNA, 120 bp, Artificial Sequence
  ENSG00000131620_41 (sequence is synthesized)
tttggaggacgcaggtcaacccacagcatgagggtgggcctccctgcagggctggggtccctctctcggtgtccctgtagcgtggctgatgctgctctctgtccacagtgtgcgccaggg

SEQ ID NO: 293653 - DNA, 120 bp, Artificial Sequence
  ENSG00000131620_42 (sequence is synthesized)
tgggtcaaccctccctgaataaatgccattgtctttccttggaagatagcaccaaggaggtcttcatgcgtaacgtgtgaccaggtcctctccagccacagcagactgtttctgctcgtg

SEQ ID NO: 293654 - DNA, 120 bp, Artificial Sequence
  ENSG00000131620_43 (sequence is synthesized)
accttctcctagagcctagccccatgctggatgcagcatccaaagccagagaagccccagaggcagctcccgggtgggatgatccccagggggagggccgcaggggcagaggcgagggac

SEQ ID NO: 293655 - DNA, 120 bp, Artificial Sequence
  ENSG00000131620_44 (sequence is synthesized)
tgtcctgggcagtgggtccccacccggatccaggagtcctgatgcaaggggaagtttgggctctggaagattcagccatgcagtcatccagtttggcttcgtcaccctgtttgtcgcctc

SEQ ID NO: 293656 - DNA, 120 bp, Artificial Sequence
  ENSG00000131620_45 (sequence is synthesized)
gaggtaaccgaaattttattcatctctggcagccccttctgtcttgcttacgatttgtctacaccatgcacttgggagaagcagctgcagcacatttgttcagcaaagagcagcaggttt

SEQ ID NO: 293657 - DNA, 120 bp, Artificial Sequence
  ENSG00000131620_46 (sequence is synthesized)
ctttccttcttgctggaaacttttctgttcccctgatgtggtggggtgggctttaatcttatctggtgtgttcatatagaatcacctagaaggataaagtcgctgtagagttaatgaaag

SEQ ID NO: 293658 - DNA, 120 bp, Artificial Sequence
  ENSG00000131620_47 (sequence is synthesized)
tctaaatcaagacaggagcaacaggaaagaacctactgcggctgagaggtgtgagcggagaggggagggacaaagcccccatcccgggcccttttcacactggctgtcaaggctgccacc

SEQ ID NO: 293659 - DNA, 80 bp, Artificial Sequence
  ENSG00000131626_0 (sequence is synthesized)
ccggggccgcggcgtggggcgggcaggcggacgccggccgcgggctgctttcgtcggctcccaagctctcccggagcgag

SEQ ID NO: 293660 - DNA, 120 bp, Artificial Sequence
  ENSG00000131626_1 (sequence is synthesized)
cgggctgctttcgtcggctcccaagctctcccggagcgagcagccgcccgcgagccgccgcggagcctcctcgcccgctcccgccggcgagcaagatgatgtgcgaggtgatgccgacca

SEQ ID NO: 293661 - DNA, 120 bp, Artificial Sequence
  ENSG00000131626_2 (sequence is synthesized)
tcagcgaagcagaaggcccccctggaggaggtggaggccatggttccggctccccttcacagccagatgcagattcacattttgaacagttgatggtctccatgctagaagaaagggacc

SEQ ID NO: 293662 - DNA, 120 bp, Artificial Sequence
  ENSG00000131626_3 (sequence is synthesized)
gccttcttgatacactgagagagactcaagaaacgctggccttaacccaggggaagttacacgaggttggtcatgaaagagattccttgcagagacagctcaacacggcacttccacagg

SEQ ID NO: 293663 - DNA, 120 bp, Artificial Sequence
  ENSG00000131626_4 (sequence is synthesized)
agttcgcagcacttactaaagaactcaatgtatgcagggaacagctccttgaaagggaagaagaaattgctgaactgaaagcagaaaggaataacaccaggctgctgttagagcatttgg

SEQ ID NO: 293664 - DNA, 120 bp, Artificial Sequence
  ENSG00000131626_5 (sequence is synthesized)
aatgccttgtctccaggcatgagcggtctcttaggatgaccgtggtgaagagacaagcgcagtctccagcaggcgtgtccagcgaagtggaagtgctgaaagcactgaagtccttatttg

SEQ ID NO: 293665 - DNA, 120 bp, Artificial Sequence
  ENSG00000131626_6 (sequence is synthesized)
aacaccacaaagctctggatgaaaaggtgagagagcgattacgagtagcacttgaaagatgtagtttgttagaagaggaattaggtgccacacacaaagagctaatgattcttaaagaac

SEQ ID NO: 293666 - DNA, 120 bp, Artificial Sequence
  ENSG00000131626_7 (sequence is synthesized)
agaataatcagaaaaaaactctaacagatggagtgctggacataaaccatgaacaagaaaatacaccaagcacgagtggaaagagatcttctgatggttctttaagccacgaggaagacc

SEQ ID NO: 293667 - DNA, 120 bp, Artificial Sequence
  ENSG00000131626_8 (sequence is synthesized)
ttgctaaagtaattgagctccaagaaatcataagtaagcagtcaagggaacagagccaaatgaaagaacgcctggcttccctttccagtcatgtgacagaactggaagaggatctggaca

SEQ ID NO: 293668 - DNA, 120 bp, Artificial Sequence
  ENSG00000131626_9 (sequence is synthesized)
cggctagaaaagatctcatcaaatctgaagaaatgaacacaaaattgcaacgagatgtccgtgaagccatggcccaaaaggaagatatggaagagagaatcactactcttgaaaaacgct

SEQ ID NO: 293669 - DNA, 120 bp, Artificial Sequence
  ENSG00000131626_10 (sequence is synthesized)
acctcgctgcacagcgtgaagccacatctgtgcatgacctcaatgataaacttgaaaatgaaattgcaaataaagattctatgcatcgacagactgaagataaaaaccgccagttacagg

SEQ ID NO: 293670 - DNA, 120 bp, Artificial Sequence
  ENSG00000131626_11 (sequence is synthesized)
agcgcttggaattggcagagcaaaagctgcaacagacactgaggaaggcagagacgctcccggaggtggaggcggagctggcccagagggtggcagcgctttccaaggctgaagagagac

SEQ ID NO: 293671 - DNA, 120 bp, Artificial Sequence
  ENSG00000131626_12 (sequence is synthesized)
acggcaacattgaagaaaggttacgacagatggaagcacagttggaggagaagaatcaagaactgcagcgggcaaggcaaagagaaaaaatgaacgaagaacataataaacgtttatcag

SEQ ID NO: 293672 - DNA, 120 bp, Artificial Sequence
  ENSG00000131626_13 (sequence is synthesized)
acactgttgacaagctgctttcagaatctaatgagaggcttcaacttcatcttaaagagagaatggctgctttggaagataagaactctcttttaagagaagttgaaagtgcaaaaaagc

SEQ ID NO: 293673 - DNA, 120 bp, Artificial Sequence
  ENSG00000131626_14 (sequence is synthesized)
agttagaagaaacacaacacgataaggatcagcttgtcctaaacattgaagcactgagggctgaactagaccacatgagactaagaggtgcttcacttcatcatggccgaccccacttgg

SEQ ID NO: 293674 - DNA, 120 bp, Artificial Sequence
  ENSG00000131626_15 (sequence is synthesized)
gcagtgtcccagatttcaggttccccatggcagacggccacacagactcctacagcaccagtgcagtgctgcggcgcccacagaaaggccggctggcagccctgcgagatgagccttcca

SEQ ID NO: 293675 - DNA, 120 bp, Artificial Sequence
  ENSG00000131626_16 (sequence is synthesized)
aggtacaaactcttaatgagcaggattgggaacgtgcccagcaagctagtgtcttggcaaatgtagcacaagcattcgagagtgatgctgacgtgtctgatggtgaagatgacagggaca

SEQ ID NO: 293676 - DNA, 120 bp, Artificial Sequence
  ENSG00000131626_17 (sequence is synthesized)
ctctcctcagctcagttgacctgctatcgcccagcgggcaggccgacgcgcacacactagccatgatgcttcaggagcagctggacgccatcaacaaagagatcaggttgattcaggaag

SEQ ID NO: 293677 - DNA, 120 bp, Artificial Sequence
  ENSG00000131626_18 (sequence is synthesized)
aaaaagaaaatacagagcagcgggcagaggagattgaaagtcgagttggcagtggaagtctagacaatcttggtcgttttagatcaatgagctccattcccccctaccctgcttcctcgc

SEQ ID NO: 293678 - DNA, 120 bp, Artificial Sequence
  ENSG00000131626_19 (sequence is synthesized)
ttgctagctcctcccctccgggcagtgggcgctccaccccacgaaggatccctcacagcccagctcgggaagtggacagactgggcgtcatgacccttttgccaccttccagagaagagg

SEQ ID NO: 293679 - DNA, 120 bp, Artificial Sequence
  ENSG00000131626_20 (sequence is synthesized)
tacgagatgacaagacaaccataaagtgtgaaacctccccgccttcctccccgagagcccttcggttagaccggctgcacaaaggggcgctgcacaccgtcagccacgaggacatcaggg

SEQ ID NO: 293680 - DNA, 120 bp, Artificial Sequence
  ENSG00000131626_21 (sequence is synthesized)
ctccacaaagccccaaagaagaaaggcattaagtcctccattggccgcttgtttggcaagaaagaaaagggccgacctggacaaactggcaaagaagcattaggacaagctggtgtttcc

SEQ ID NO: 293681 - DNA, 120 bp, Artificial Sequence
  ENSG00000131626_22 (sequence is synthesized)
gagacggataactcatctcaggatgccttgggacttagcaaattggggggacaggctgaaaaaaatcgtaaacttcaaaaaaagcatgaattgctggaggaagcccggagacaaggttta

SEQ ID NO: 293682 - DNA, 120 bp, Artificial Sequence
  ENSG00000131626_23 (sequence is synthesized)
ccttttgcccaatgggacgggccaacggttgtggtctggctagagctctgggttgggatgccagcctggtatgtggctgcctgccgagcaaacgtgaaaagcggggccatcatgtcggcc

SEQ ID NO: 293683 - DNA, 120 bp, Artificial Sequence
  ENSG00000131626_24 (sequence is synthesized)
ctgtccgacacagagatccagcgtgagattggcatcagcaaccccctgcacaggctgaagctgaggctggccatccaggagatcatgtcgctgaccagcccgtctgccccgcccacatct

SEQ ID NO: 293684 - DNA, 120 bp, Artificial Sequence
  ENSG00000131626_25 (sequence is synthesized)
agaacgacactcgcctatggggacatgaaccacgagtggatcggcaacgagtggctccccagcctgggcctcccccagtaccgcagctacttcatggagtgccttgtagacgccaggatg

SEQ ID NO: 293685 - DNA, 120 bp, Artificial Sequence
  ENSG00000131626_26 (sequence is synthesized)
ctggaccacttgaccaagaaagaccttcgagggcagctgaaaatggtcgacagttttcacagaaacagtttccagtgtggaattatgtgcctgagaaggttaaattatgaccggaaagaa

SEQ ID NO: 293686 - DNA, 120 bp, Artificial Sequence
  ENSG00000131626_27 (sequence is synthesized)
ctggaaagaaaaagagaagaaagtcagagtgaaataaaagacgtgcttgtttggagcaatgatcgagtgattcgctggatcctgtcaattggccttaaagaatatgcaaacaatcttata

SEQ ID NO: 293687 - DNA, 120 bp, Artificial Sequence
  ENSG00000131626_28 (sequence is synthesized)
gagagtggtgttcacggagcacttctggccttagatgaaaccttcgacttcagtgcactggcactgctgttacagatcccgacgcagaacacacaggctcgtgctgtcttggaaagagaa

SEQ ID NO: 293688 - DNA, 120 bp, Artificial Sequence
  ENSG00000131626_29 (sequence is synthesized)
tttaacaaccttttggtcatggggactgatagaaggtttgatgaagatgatgataaaagctttaggagagcaccttcatggagaaaaaagtttagaccaaaggacattcgtggcttagct

SEQ ID NO: 293689 - DNA, 120 bp, Artificial Sequence
  ENSG00000131626_30 (sequence is synthesized)
gctgggtcagcagagactctccctgcaaacttccgggtgacttcttctatgtcttccccctctatgcagccaaagaagatgcagatggacggcaatgtatcaggaacacagaggttggat

SEQ ID NO: 293690 - DNA, 120 bp, Artificial Sequence
  ENSG00000131626_31 (sequence is synthesized)
tctgctacagtcaggacttactcctgctaaagtctcctgttgtttacccacactacttctacagatgattatgcagcatttgaatccaacaaagactacattttggaatccagtggaatc

SEQ ID NO: 293691 - DNA, 120 bp, Artificial Sequence
  ENSG00000131626_32 (sequence is synthesized)
gtggaatctttaatcttgttaatacttgttatatggaccctaagatattttattacagagtttttaattagtgaaaaattcatgaataccatagagaaaatattttagaatttaatgttt

SEQ ID NO: 293692 - DNA, 120 bp, Artificial Sequence
  ENSG00000131626_33 (sequence is synthesized)
tatgtaaacttatgactcttcatttatatagttacttactttttcatgtatatccaggctataaatatcctttcaaatcatgttcttatacctaattttagtctttcaaatgaatgtact

SEQ ID NO: 293693 - DNA, 120 bp, Artificial Sequence
  ENSG00000131626_34 (sequence is synthesized)
gtaatgcttgtatgtataaatcctatgaatagagggcttttgtaaattatgcatttattgtaattatcattaattttttaatgataaaccatgacaaaggattttacgtttataaaatta

SEQ ID NO: 293694 - DNA, 120 bp, Artificial Sequence
  ENSG00000131626_35 (sequence is synthesized)
tgacagaagccatgtgcattatcctttacggacgcagcctagctctacagcaatcatcctgaaataagcatacctaatttcaagcaattgttgtattttcatgactgaccttaactgtac

SEQ ID NO: 293695 - DNA, 120 bp, Artificial Sequence
  ENSG00000131626_36 (sequence is synthesized)
tttttctagcaagagatgctttattctgcagcatgaacagatttaaaatggctggtgttaaatatcagctcctaataagatgtggactgaaaacactatcacaacactatgagaagcccc

SEQ ID NO: 293696 - DNA, 120 bp, Artificial Sequence
  ENSG00000131626_37 (sequence is synthesized)
tagcactggttaacgctttcctagcctagtctctggatttggggagcttgtcttcagtggctgagactgtgagctgggagcagttctctcagctggagagactcgggatggggtaacctg

SEQ ID NO: 293697 - DNA, 120 bp, Artificial Sequence
  ENSG00000131626_38 (sequence is synthesized)
gggaccagtctagcccctgcaccctcttccctgcctctgctccttgggagcgggtggagagacacccatgtggctccccttagggccagcaccaagcaccacgctctcatcctgcaagtc

SEQ ID NO: 293698 - DNA, 120 bp, Artificial Sequence
  ENSG00000131626_39 (sequence is synthesized)
ggcgcacacagtggatgaaggcaggagacccagaaagcagtgcagtgcagctctaataaaggccttatttttcttatgtaaatcatctttttacatttgtttgtaaacatgtttaaagaa

SEQ ID NO: 293699 - DNA, 120 bp, Artificial Sequence
  ENSG00000131626_40 (sequence is synthesized)
cgaacctagtgggacatttttagactttgatgctctagccattttggattgtgtaagttgcagatgtggcttttactttttaaatggcatattaacaagccagcaaagtgtgtcagacca

SEQ ID NO: 293700 - DNA, 120 bp, Artificial Sequence
  ENSG00000131626_41 (sequence is synthesized)
tggcgtggtatttattgtgcagcagatccagagacagaggcagcctgtcttttcagttggtttctgcttttaatttacttgtacaattcattgttactgttctgtttttctattaatctt

SEQ ID NO: 293701 - DNA, 120 bp, Artificial Sequence
  ENSG00000131626_42 (sequence is synthesized)
ttgtcaacttcctgattatgtaacaaagtatgtacagtctacttttgaactatttttatcacagtattatttattgctttctttcaataaagtactgaagcattttccactgccaatgaa

SEQ ID NO: 293702 - DNA, 120 bp, Artificial Sequence
  ENSG00000131626_43 (sequence is synthesized)
tgtttacattgcttctccagttccttaacagcatatgaagtatagttctaattcaaaattttagcatcacatacattagaacttttaattttggggaattggatggtcaaaagaaacttt

SEQ ID NO: 293703 - DNA, 120 bp, Artificial Sequence
  ENSG00000131626_44 (sequence is synthesized)
attaaatgcttttatgaaagattggctagaatggcttcatagtataaaaatatgagcttttttaaacatagaaaagcaattacaaatttaaatatggaaatatgaaatacgaaaatacca

SEQ ID NO: 293704 - DNA, 120 bp, Artificial Sequence
  ENSG00000131626_45 (sequence is synthesized)
agaccaaaggacattcgtggcttagctgctgggtcagcagagactctccctgcaaacttccgggtgacttcttctatgtcttccccctctatgcagccaaagaagatgcagatggacgtt

SEQ ID NO: 293705 - DNA, 120 bp, Artificial Sequence
  ENSG00000131626_46 (sequence is synthesized)
tcaacggtcctcaccccccggggttcggggcttccgccgcacctgatacaggaggggaggagtgcggctcgagcaggctggaggtcaccatccccatcagatgatgtgcgaggtgatgcc

SEQ ID NO: 293706 - DNA, 120 bp, Artificial Sequence
  ENSG00000131626_47 (sequence is synthesized)
ggcttgcccttttttgtgagggtagtcctttgggatcttgaccccttccctggatttttgtctgtgttaatgtcttcatgttgtgtatttttgcacttaatatttgccctgtgtatgttt

SEQ ID NO: 293707 - DNA, 120 bp, Artificial Sequence
  ENSG00000131626_48 (sequence is synthesized)
tcccagcttatttacacacaaagcataacagatctgagcataatgagactgcccatctttttagctacagatacctgtaaagttgcatatttgtgggaacctgtattctgagcttaatta

SEQ ID NO: 293708 - DNA, 120 bp, Artificial Sequence
  ENSG00000131626_49 (sequence is synthesized)
tcacttgttgggagcatgagcagctttctgtctggaacattaataatgatctaaaacggcctatttaatatgttacaaggcacttgagtatggttgcatgtccaaatataaatgttttta

SEQ ID NO: 293709 - DNA, 120 bp, Artificial Sequence
  ENSG00000131626_50 (sequence is synthesized)
aattaactctaacatttgtttataaaagtttaaccataataatagaatttttaaaacacgcttgtctggttgaatcttagcatatttttccaactaataaagctcagtattcgtctgtgt

SEQ ID NO: 293710 - DNA, 120 bp, Artificial Sequence
  ENSG00000131626_51 (sequence is synthesized)
tctcagagagagactgaggcatacttgtaaatttgtgtctgtgacaggccgtgctagaaagctctttcaggaaatagtagtgtagtagtagcttccaaaccacataatttactgctctcc

SEQ ID NO: 293711 - DNA, 120 bp, Artificial Sequence
  ENSG00000131626_52 (sequence is synthesized)
gcgtcatgacccttccatctccagattcatttttaatccagacctcaggtccccatcagtcagtagtttactcatccacctcccctcccagttccaccccatgctatagcgattcttcac

SEQ ID NO: 293712 - DNA, 120 bp, Artificial Sequence
  ENSG00000131626_53 (sequence is synthesized)
ggaaagaaaaagagaagaaagtcagagtgaaataaaagaaataataacttcattcctctcgtgctcactggaaggatgagttctaatgggagagtctccctgagagtggagcagggccag

SEQ ID NO: 293713 - DNA, 120 bp, Artificial Sequence
  ENSG00000131626_54 (sequence is synthesized)
gacaccattgtctcagtgcagcaaatggttgtctatttagcagtgtctcccagcacttttctcaggagccgaaggattaggaaccatgacgtgcttgtttggagcaatgatcgagtgatt

SEQ ID NO: 293714 - DNA, 120 bp, Artificial Sequence
  ENSG00000131626_55 (sequence is synthesized)
ttgacagaataaagcagccaggagatgaagtgcaggttcagggcgtcatcctgcccgctgctctggaggtcccgagcctgcatcactgcaggagacaggtgcctggtgttaaattgttaa

SEQ ID NO: 293715 - DNA, 120 bp, Artificial Sequence
  ENSG00000131626_56 (sequence is synthesized)
atgcaaatgtgggggctcacatacacagtcggtgggtagggcccaaaggcagagcctaggccgtggaccgcgcgcatgcacgcatgtcccttaacaccgtttcccagctctgcttccttc

SEQ ID NO: 293716 - DNA, 120 bp, Artificial Sequence
  ENSG00000131626_57 (sequence is synthesized)
ctcggtgctggcttcacactcccacctgctctccctgcctgctcacaaaggtggctcccaggcctgcacccttccacactgatggcctctggaaatcaggaagcctggttccctaatagc

SEQ ID NO: 293717 - DNA, 120 bp, Artificial Sequence
  ENSG00000131626_58 (sequence is synthesized)
tcacatccggtcctgagttgtgaagcagcccagggtggcagaggggaggcgacacgctgacaggctgggggagtcaagcagggcccacccatggaagttggtgagctgaggctgaagggc

SEQ ID NO: 293718 - DNA, 120 bp, Artificial Sequence
  ENSG00000131626_59 (sequence is synthesized)
tggaagctgatgcccaagaggaaagccagacaccagcaagtgtcccttcccctcctcccacctcagtgttgccattgagcctgggattcgcagagcccatggccaccaccaccccacctg

SEQ ID NO: 293719 - DNA, 120 bp, Artificial Sequence
  ENSG00000131626_60 (sequence is synthesized)
gagcaggcatcagcggccactgccgacgtcaccttggtctccgtttcctcattctgtctccgttgctgacacctcgtctgagtggcacgtgctgtcacgtgggtcagtgtgtcctgggac

SEQ ID NO: 293720 - DNA, 120 bp, Artificial Sequence
  ENSG00000131626_61 (sequence is synthesized)
gtttctctcaggcagccatcgggtgttcagtgctttcctgtttcgaacctgtgtttgctgatcttcctgcttaatgtagggaaagccttgttttctgtactttctagttcttgaggttaa

SEQ ID NO: 293721 - DNA, 120 bp, Artificial Sequence
  ENSG00000131626_62 (sequence is synthesized)
gttaataaaaacaagaatggttattgggagataagggcaggccaactccagatttataaagttgagactttttacactggctggattcccagtctctgcttttagtctcctcaggagaaa

SEQ ID NO: 293722 - DNA, 120 bp, Artificial Sequence
  ENSG00000131626_63 (sequence is synthesized)
acaaattcttgttgcaatgaagagcctcacacatttctccaaggagcacgtcagcgctggatttagggctcccagttaccttacaaaaaaagttttgaggggttttacttgttttattta

SEQ ID NO: 293723 - DNA, 120 bp, Artificial Sequence
  ENSG00000131626_64 (sequence is synthesized)
tttttttcttcttaatgaacaaattatggtgatgaacaataagctttgtcctcccctgttgctccaagagctcctttcccacagcctgcctcaggagcagtgtctgagctcttccctggt

SEQ ID NO: 293724 - DNA, 120 bp, Artificial Sequence
  ENSG00000131626_65 (sequence is synthesized)
tgtttcacatgacagtggccttgctgaaaatgaaggtgctgagtggtttctcccatgtttatccactgtcttcagtaatgatggagaacacctcacataaggcagactcttcacaccatg

SEQ ID NO: 293725 - DNA, 120 bp, Artificial Sequence
  ENSG00000131626_66 (sequence is synthesized)
tcaaaatgcaaggaaaaaatctccctcaagtagacacacaggccactgtctgtctcgtgtctggttctgatggctgcacagagccatcgacactgcttagcagtgaccccctctgccctg

SEQ ID NO: 293726 - DNA, 120 bp, Artificial Sequence
  ENSG00000131626_67 (sequence is synthesized)
tggcctgccttcagcctttcaggccgtcacggaacatctgcgagaaagccctccaatagccaaagcaagagtttcatgctgggttctttgttgttaatctgctttaaatatattgaatca

SEQ ID NO: 293727 - DNA, 120 bp, Artificial Sequence
  ENSG00000131626_68 (sequence is synthesized)
atagttacttgagaattactcaaagtttccagaagtacacaacgtgttttcttctcttgatatttcacatacctcgggtaagcatggcatctaaagctctcgtcatcgtgtgctcttctc

SEQ ID NO: 293728 - DNA, 120 bp, Artificial Sequence
  ENSG00000131626_69 (sequence is synthesized)
ctgatggtgttgacgacccagtgttaacagggaatggttattctgtacgggcatctgaactgaaaagtgagaagagcgaactttgcctcctcggccccttctctgtgcctgtggcttatg

SEQ ID NO: 293729 - DNA, 120 bp, Artificial Sequence
  ENSG00000131626_70 (sequence is synthesized)
cgtgtgcccctctcctctttgtcactgcttcccttgccctggatgtggttggtgcactggggtcaccttagaccacaggaaatgtctggttaacacacgaagagatggaaacgctcgcag

SEQ ID NO: 293730 - DNA, 120 bp, Artificial Sequence
  ENSG00000131626_71 (sequence is synthesized)
ccacgccgcaaacggttagtcacgccccacagcctgcactcctcccagcgcgttttccacttaagaccgtctgggttctttgcctttttgttgaaaacaaaatgttgttttccattcagt

SEQ ID NO: 293731 - DNA, 120 bp, Artificial Sequence
  ENSG00000131626_72 (sequence is synthesized)
cgttccagataagtatttcctttagttattagttgaaatgtgtaagtagaatttgtattttattttagattttttccaggaacttcaagttggtagactctgtcttttagaatagcttta

SEQ ID NO: 293732 - DNA, 120 bp, Artificial Sequence
  ENSG00000131626_73 (sequence is synthesized)
atctagctctccttttggagagatctcagttgagcctccatgtgactgactgtgtggccctttctccttccatgaatatgcttggcacggagagagtctgctccttgcatgagaagttga

SEQ ID NO: 293733 - DNA, 120 bp, Artificial Sequence
  ENSG00000131626_74 (sequence is synthesized)
aattgttggttttgcatgagttttgcatgatgctttgatagtctgaactttttcactcagtgaagctgcatcttccctgcagagttgcgttgcctgcattaccgagctcaccaatactaa

SEQ ID NO: 293734 - DNA, 120 bp, Artificial Sequence
  ENSG00000131626_75 (sequence is synthesized)
agggcgaggagaaagtcccacagcctttccagtcctggtcttggaagccacagccttcacttcctctctattctgttcatttgagtgaggtgctgagtcctgcccacactcagcgtttgg

SEQ ID NO: 293735 - DNA, 120 bp, Artificial Sequence
  ENSG00000131626_76 (sequence is synthesized)
tattctgttgttgggtggcatgttctatattctgttgttgggtagagtgttctatattctgttgtttggtggattgttctatattctgttgttgagtggcgtgttctatgttctcttgtt

SEQ ID NO: 293736 - DNA, 120 bp, Artificial Sequence
  ENSG00000131626_77 (sequence is synthesized)
gggtggcgtgttctgtattctcttgttgggtggcgtgttctatcttctgttgttgggtggcgtgttctacattccattgttgggtggagtgttctatattctgttgttgggtggtgtgtt

SEQ ID NO: 293737 - DNA, 120 bp, Artificial Sequence
  ENSG00000131626_78 (sequence is synthesized)
ctatgaaacgtcaggtcaagtttgttaagggttgttagtttaggttttctatattcttaatttttttctttttttgcttctttcatcagttgctatgagaaagaagtgttgaattttttc

SEQ ID NO: 293738 - DNA, 120 bp, Artificial Sequence
  ENSG00000131626_79 (sequence is synthesized)
aactataattgtgaatttgcctgtttccccatttagtcctgttggttgttgctttatctcttctctaaaactatattttaactgacttttactgattttgaaatggattttttctttagg

SEQ ID NO: 293739 - DNA, 120 bp, Artificial Sequence
  ENSG00000131626_80 (sequence is synthesized)
aaaacaaagtgttaaaatgtaaaccaaccagagataattttagtgagcagtgttgaattgagccttcaaacttgttcatgagtcgtgatcaatctttgtcacattattatactaaaaact

SEQ ID NO: 293740 - DNA, 120 bp, Artificial Sequence
  ENSG00000131626_81 (sequence is synthesized)
atctcagagaggaaatttatagccagttacagtttttttgtagtttgatttaaaagttaaatttatcacaacgaatcatatatttttcatgttactattcctgttgtataaaaattttac

SEQ ID NO: 293741 - DNA, 120 bp, Artificial Sequence
  ENSG00000131626_82 (sequence is synthesized)
aaggtgagaagagatcaaattattttgcaattataaaattatcattagtttagcctttgagaatataggtaatagattaaaaattcattttaaaaatgatataaactacttttgagactt

SEQ ID NO: 293742 - DNA, 120 bp, Artificial Sequence
  ENSG00000131626_83 (sequence is synthesized)
aggtgggagacgggacaaagggacagctggtggccttagtaacggggagcacgttggaactgccatagaatagtcccgctggcagggaagtaagcgctgaaagctggcctgcagcaaggt

SEQ ID NO: 293743 - DNA, 120 bp, Artificial Sequence
  ENSG00000131626_84 (sequence is synthesized)
ctagagaagtggggagaggaagacagaatggaggtggctcaccaggatcttttactctggttgggagcaaaacagtggaggcgtgggtgaaaggagacccgcccgggcagggactgggga

SEQ ID NO: 293744 - DNA, 120 bp, Artificial Sequence
  ENSG00000131626_85 (sequence is synthesized)
accagaaatctgtattcttggccatgccctgcagagaatcaaaggagcttctgggaaacgacgattccgactcccagtgagagggtgcattttaggcagtccccacctccccttccaaaa

SEQ ID NO: 293745 - DNA, 120 bp, Artificial Sequence
  ENSG00000131626_86 (sequence is synthesized)
tgcacactcatgctcacagacacaacagtgaactttaagctgtgttctttaaaaattatttaaatgctgacggaaaataagcacaaagaaggatattgtttctttcccaagaggaagtat

SEQ ID NO: 293746 - DNA, 120 bp, Artificial Sequence
  ENSG00000131626_87 (sequence is synthesized)
cagcaaatcgattttcaaagaagtttatggctataatttaaggcctgagtttttcacagtctgctgttaactaactttgcacttctctcacccctcagttgccaccttccagagaagagg

SEQ ID NO: 293747 - DNA, 120 bp, Artificial Sequence
  ENSG00000131626_88 (sequence is synthesized)
ctgtttcagtgctgggagtaaacactgtgcagtgggtgtctcttctagttcagatgttctctggactgacatcacctggtatgttttttttccagaaggctgctaaggcagcccaggaga

SEQ ID NO: 293748 - DNA, 120 bp, Artificial Sequence
  ENSG00000131626_89 (sequence is synthesized)
attccatcctaggtgatagagggagactctgactcaaaaaacaaaataaaatatttttgtagagacaaggtcttgaactccttgcctgaagccatcctcccgccttagcctcccaaagtg

SEQ ID NO: 293749 - DNA, 120 bp, Artificial Sequence
  ENSG00000131626_90 (sequence is synthesized)
ctgtgattataggagtgagctgctgtatctggcctgaggatgctaatttttaatttgattggaaatttgggatttacttcagtttttttctctcttaagtatcttaatgtgtaatcgtta

SEQ ID NO: 293750 - DNA, 120 bp, Artificial Sequence
  ENSG00000131634_0 (sequence is synthesized)
acagtcttagcagggcagcagccctgcagcctccccgctggcacggtcacaggccgctctgaggactggagggaccagccgcccacagagccccgagcccgtggtcccggcgagaagagg

SEQ ID NO: 293751 - DNA, 120 bp, Artificial Sequence
  ENSG00000131634_1 (sequence is synthesized)
cacgcgcggcacaggccggcctccgcttcccgggaagacggcgcactcctggccctgggttcttgctgctgcccaccctctgctccctgggatgggccccgaggcgagcagcttcagcac

SEQ ID NO: 293752 - DNA, 120 bp, Artificial Sequence
  ENSG00000131634_2 (sequence is synthesized)
aggcctggccctgctccaggtgcaggaaggaggataaggccgggccgagaggcggcacacctggaccatcccatgggcctccgcccgcgccgccccgaggatgagtggtgatgtcctcta

SEQ ID NO: 293753 - DNA, 120 bp, Artificial Sequence
  ENSG00000131634_3 (sequence is synthesized)
gccacccctagcagcgtcggctctccctggacgtgcggccgcggactgggacttggctttctccggataagcggcggcaccggcgtcagcgatgaccgtgcagagactcgtggccgcggc

SEQ ID NO: 293754 - DNA, 120 bp, Artificial Sequence
  ENSG00000131634_4 (sequence is synthesized)
cgtgctggtggccctggtctcactcatcctcaacaacgtggcggccttcacctccaactgggtgtgccagacgctggaggatgggcgcaggcgcagcgtggggctgtggaggtcctgctg

SEQ ID NO: 293755 - DNA, 120 bp, Artificial Sequence
  ENSG00000131634_5 (sequence is synthesized)
gctggtggacaggacccggggagggccgagccctggggccagagccggccaggtggacgcacatgactgtgaggcgctgggctggggctccgaggcagccggcttccaggagtcccgagg

SEQ ID NO: 293756 - DNA, 120 bp, Artificial Sequence
  ENSG00000131634_6 (sequence is synthesized)
caccgtcaaactgcagttcgacatgatgcgcgcctgcaacctggtggccacggccgcgctcaccgcaggccagctcaccttcctcctggggctggtgggcctgcccctgctgtcacccga

SEQ ID NO: 293757 - DNA, 120 bp, Artificial Sequence
  ENSG00000131634_7 (sequence is synthesized)
gtgctgggaggaggccatggccgctgcattccaactggcgagttttgtcctggtcatcgggctcgtgactttctacagaattggcccatacaccaacctgtcctggtcctgctacctgaa

SEQ ID NO: 293758 - DNA, 120 bp, Artificial Sequence
  ENSG00000131634_8 (sequence is synthesized)
cattggcgcctgccttctggccacgctggcggcagccatgctcatctggaacattctccacaagagggaggactgcatggccccccgggtgattgtcatcagccgctccctgacagcgcg

SEQ ID NO: 293759 - DNA, 120 bp, Artificial Sequence
  ENSG00000131634_9 (sequence is synthesized)
ctttcgccgtgggctggacaatgactacgtggagtcaccatgctgagtcgcccttctcagcgctccatcaacgcacacctgctatcgtggaacagcctagaaaccaagggactccaccac

SEQ ID NO: 293760 - DNA, 120 bp, Artificial Sequence
  ENSG00000131634_10 (sequence is synthesized)
caagtcacttcccctgctcgtgcagaggcacgggatgagtctgggtgacctctgcgccatgcgtgcgagacacgtgtgcgtttactgttatgtcggtcatatgtctgtacgtgtcgtggg

SEQ ID NO: 293761 - DNA, 120 bp, Artificial Sequence
  ENSG00000131634_11 (sequence is synthesized)
ccaacctcgttctgcctccagctttcctggttagcgcaacgcggctccacgaccacacgcacttcagggtggaagctggaagctgagacacaggttaggtggcgcgaggctgccctgcgc

SEQ ID NO: 293762 - DNA, 120 bp, Artificial Sequence
  ENSG00000131634_12 (sequence is synthesized)
tccgctttgctttgggattaatttattctgcatctgctgagaggggcaccccagccatatcttacactttggtaaagcagaaaaccaggaaaattttcttaaaatatccacaatattcct

SEQ ID NO: 293763 - DNA, 120 bp, Artificial Sequence
  ENSG00000131634_13 (sequence is synthesized)
tgagtgagtcagaatctatagccggttagtgatggtttcagacagaatcgtgttcgtgtctgttttgctcgattcttttcctaagttaaataaatgcaagcctctgaactctgtctataa

SEQ ID NO: 293764 - DNA, 120 bp, Artificial Sequence
  ENSG00000131634_14 (sequence is synthesized)
catttcctctctgctgagagccagggaaggcgagctctgcgcacacgggcgtccctgcagcagccactctgctttccaggaccggccaactgccctggaggcatccacacaggggcccag

SEQ ID NO: 293765 - DNA, 120 bp, Artificial Sequence
  ENSG00000131634_15 (sequence is synthesized)
gcagcacagaggagctgtgaacccgctccacaccggccaccctgcccggagcctggcactcacagcaggccggtgctaaggagtgtggcgcgggctcgactcccactgctgccggcctcc

SEQ ID NO: 293766 - DNA, 120 bp, Artificial Sequence
  ENSG00000131650_0 (sequence is synthesized)
agattccccccggagagacccgggtagggacagggacagagagacgcctctaggggcagaggccctgggaggcaaagacccccaggagagatttacccaccccagacggaaagcgcggct

SEQ ID NO: 293767 - DNA, 120 bp, Artificial Sequence
  ENSG00000131650_1 (sequence is synthesized)
cagagtcggacgaggggagactgtcagaggacaacgccccctaggtctcctgggagaccccgaagcgaccccgggggcagcccgggccgtgtccgggcgagggtgacctatccttggttg

SEQ ID NO: 293768 - DNA, 120 bp, Artificial Sequence
  ENSG00000131650_2 (sequence is synthesized)
agagcgatggggacacaagccctgcagggcttcctctttctcctcttcctcccgctgctgcagccgcgtggggcctcggctgggagcctgcacagtccaggcctgtccgaatgcttccag

SEQ ID NO: 293769 - DNA, 120 bp, Artificial Sequence
  ENSG00000131650_3 (sequence is synthesized)
gtgaatggggctgactaccgcggccaccagaaccgcactggcccgcgcggggcgggccgcccgtgcctcttctgggaccagacgcagcaacacagctacagcagcgccagcgacccccac

SEQ ID NO: 293770 - DNA, 120 bp, Artificial Sequence
  ENSG00000131650_4 (sequence is synthesized)
ggccgctgggggctgggcgcgcacaacttctgccgtaacccagacggtgacgtgcagccgtggtgctacgtggctgagacagaggagggcatctactggcgctactgcgacatcccctcc

SEQ ID NO: 293771 - DNA, 120 bp, Artificial Sequence
  ENSG00000131650_5 (sequence is synthesized)
tgtcacatgccaggctacctgggatgctttgtggactcaggggcacccccagccctcagcggccccagcggcacctccacgaagctcacggtccaggtgtgcctacgcttctgccgcatg

SEQ ID NO: 293772 - DNA, 120 bp, Artificial Sequence
  ENSG00000131650_6 (sequence is synthesized)
aaggggtaccagctggcgggcgtggaggccggttacgcctgcttctgtggctctgaaagcgacctggcccggggacgcctggcccccgccaccgactgtgaccagatctgtttcggccac

SEQ ID NO: 293773 - DNA, 120 bp, Artificial Sequence
  ENSG00000131650_7 (sequence is synthesized)
cctggacagctgtgtggcggcgatgggcggctgggcgtctatgaagtgtcggtgggctcctgccaggggaactggacagcgcctcagggcgtcatctactccccggacttcccggacgag

SEQ ID NO: 293774 - DNA, 120 bp, Artificial Sequence
  ENSG00000131650_8 (sequence is synthesized)
caccttccgcctcttcgagctggccgacccgcgcgaccggctggagctgcgcgacgcggcttcgggcagcctgctccgcgccttcgatggcgcccgcccaccgccgtccgggccgctgcg

SEQ ID NO: 293775 - DNA, 120 bp, Artificial Sequence
  ENSG00000131650_9 (sequence is synthesized)
ctgctgctcaccttccgaagcgacgcgcgcggccacgcgcaaggcttcgcgctcacctaccgcgggctgcaggacgccgctgaggacccagaggcccccgagggctcggcccagaccccc

SEQ ID NO: 293776 - DNA, 120 bp, Artificial Sequence
  ENSG00000131650_10 (sequence is synthesized)
gcggcgcccctcgacggggccaacgtgagctgcagccccaggcctggggctccgccggccgcgattggggcccgggtcttctcgacggtgacggctgtctcggtgctgctgctgctgctc

SEQ ID NO: 293777 - DNA, 120 bp, Artificial Sequence
  ENSG00000131650_11 (sequence is synthesized)
ctggggctgctgcgtccgctgcgccgacggagctgtctgctggctccgggaaaagggcccccggcgctgggggcttccaggggccccaggagaagctgggctgtgtggtaccaacagccc

SEQ ID NO: 293778 - DNA, 120 bp, Artificial Sequence
  ENSG00000131650_12 (sequence is synthesized)
cgaggggtggccttgccctgctcccccggggacccccaggctgagggttctgccgcgggctaccggcctctgagtgcctccagccagagctccctgcgctcgctcatctccgctctctga

SEQ ID NO: 293779 - DNA, 120 bp, Artificial Sequence
  ENSG00000131650_13 (sequence is synthesized)
ctctgggccccgagggtccgctgggcccgccgccggcgagatggacacctgagatgctgtgctgcgccctgcctcggccttgcgcctgtgtaggggcagctcggcctctggtcgccttgg

SEQ ID NO: 293780 - DNA, 120 bp, Artificial Sequence
  ENSG00000131650_14 (sequence is synthesized)
ggagaccaaaagtcggacaggaaacatctggtgctattatctgggacttggcctgaccgtgggggtccagatggtccaggccctctccatggacctgtatgtgggggtggtctctggttt

SEQ ID NO: 293781 - DNA, 120 bp, Artificial Sequence
  ENSG00000131650_15 (sequence is synthesized)
cggaggtctttgaacccctctgggggtggtcctggactgccgtcctcagtgagaggtcacaggtcagcaaaaacagtcaaaaaacccccacagattttgaataaaggatctactttggta

SEQ ID NO: 293782 - DNA, 120 bp, Artificial Sequence
  ENSG00000131650_16 (sequence is synthesized)
ggggctccgccggccgcgattgggggtgaggcgggcgcgcgggacgggagtgagtcagggagccgccccctcgcgcccatcctcaccgcagccgtgtgcccgcagcccgggtcttctcga

SEQ ID NO: 293783 - DNA, 120 bp, Artificial Sequence
  ENSG00000131650_17 (sequence is synthesized)
cagaagggaacagagctaggaaggaactcctgggttcttaagggagcgaggctttgggtccacgcacaggatcgcgcgcgggatcgcaggtagagcaggacgctgcagcgggattggacc

SEQ ID NO: 293784 - DNA, 120 bp, Artificial Sequence
  ENSG00000131652_0 (sequence is synthesized)
acagccgcgaggttctgcgcgggcgcggaagacgggcggcgcgtggcggaaggcaggcttgctcctcggggtgggggagggtatccggcttaagggggctgcggtggacaccacttctta

SEQ ID NO: 293785 - DNA, 120 bp, Artificial Sequence
  ENSG00000131652_1 (sequence is synthesized)
atgtcgggggtcttcgcggcgctcacctcggctcctagggttcgggacggtacgcaccagccaccttcgcgccgaaggcggtagggcgccacggagaggaaccgctctaggcacgtaagg

SEQ ID NO: 293786 - DNA, 120 bp, Artificial Sequence
  ENSG00000131652_2 (sequence is synthesized)
cctcgtgaggttgcgtcgcgcgcggagcactctgggacttgtagttctggagatggagcgagctgtgccgctcgcggtgcctctgggtcagacagaggtgttccaggccttgcagcggct

SEQ ID NO: 293787 - DNA, 120 bp, Artificial Sequence
  ENSG00000131652_3 (sequence is synthesized)
ccatatgaccatcttctcccagagcgtctcaccatgtgggaagtttctggcggctggcaacaattacgggcagattgccatcttcagcttgtcctctgctttgagctcagaagccaaaga

SEQ ID NO: 293788 - DNA, 120 bp, Artificial Sequence
  ENSG00000131652_4 (sequence is synthesized)
ggaaagtaagaagccggtggtgactttccaagcccatgatgggcccgtctatagcatggtttccaccgatcgacatctgcttagtgctggggatggggaggtgaaggcctggctttgggc

SEQ ID NO: 293789 - DNA, 120 bp, Artificial Sequence
  ENSG00000131652_5 (sequence is synthesized)
ctggtccccaaggagaattccctcatcctggctgggggagactgtcagttgcacactatggaccttgaaactgggactttcacgagggtcctccggggccacacagactacatccactgc

SEQ ID NO: 293790 - DNA, 120 bp, Artificial Sequence
  ENSG00000131652_6 (sequence is synthesized)
ctggcactgcgggaaaggagcccagaggtgctgtcaggtggcgaggatggagctgttcgactttgggacctgcgcacagccaaggaggtccagacgatcgaggtctataagcacgaggag

SEQ ID NO: 293791 - DNA, 120 bp, Artificial Sequence
  ENSG00000131652_7 (sequence is synthesized)
tgctcgaggccccacaatgggcgctggattggatgtttggcaactgattccgactggatggtctgtggagggggcccagccctcaccctctggcacctccgatcctccacacccaccacc

SEQ ID NO: 293792 - DNA, 120 bp, Artificial Sequence
  ENSG00000131652_8 (sequence is synthesized)
atcttccccatccgggcgccacagaagcacgtcaccttctaccaggacctgattctgtcagctggccagggccgctgcgtcaaccagtggcagctgagcggggagctgaaggcccaggtg

SEQ ID NO: 293793 - DNA, 120 bp, Artificial Sequence
  ENSG00000131652_9 (sequence is synthesized)
cctggctcctccccagggctgctcagcctcagcctcaaccagcagcctgccgcgcctgagtgcaaggtcctgacagctgcaggcaacagctgccgggtggatgtcttcaccaacctgggt

SEQ ID NO: 293794 - DNA, 120 bp, Artificial Sequence
  ENSG00000131652_10 (sequence is synthesized)
ccgggtggatgtcttcaccaacctgggttaccgagccttctccctgtccttctgatctctgacgacacccccagccagctcagggttttagagtgtttttcattttcttttttttttttt

SEQ ID NO: 293795 - DNA, 120 bp, Artificial Sequence
  ENSG00000131652_11 (sequence is synthesized)
aaggcctggctttgggcggagatgctcaagaaggtaaggagtcgagcttgggaaagggctggggtgcctggacccagagagagcctttgaggtcacctggtattttctcttttgaagggc

SEQ ID NO: 293796 - DNA, 120 bp, Artificial Sequence
  ENSG00000131652_12 (sequence is synthesized)
agcctccatacaggtgagcagggccacgtggatagagggtgcatcagggtgaagccacttcctcactgaccttgcctttccttccccaggaccagcctggaagtgcctgagatcaacgct

SEQ ID NO: 293797 - DNA, 120 bp, Artificial Sequence
  ENSG00000131652_13 (sequence is synthesized)
ttgctgctggtccccaaggtctgagccccatgtgactgttcttggtccaaactttgatccttcaccctctgcctatcctgatttgacattgactttctgcctcatcctgctcctccacag

SEQ ID NO: 293798 - DNA, 120 bp, Artificial Sequence
  ENSG00000131653_0 (sequence is synthesized)
ccctttcccggccggcggccgagggggcatcatgaagcgggctggcggcgctgccgctcccgggcggccgcgggcgggaggtgcttcccaaggaccgtagatgcctctctagagcatgag

SEQ ID NO: 293799 - DNA, 120 bp, Artificial Sequence
  ENSG00000131653_1 (sequence is synthesized)
ctcaggcaagagtgcccgctacaaccgcttctccggggggcccagcaatcttcccaccccagacgtcaccacagggaccagaatggaaacgaccttcggacccgccttttcagccgtcac

SEQ ID NO: 293800 - DNA, 120 bp, Artificial Sequence
  ENSG00000131653_2 (sequence is synthesized)
caccatcacaaaagctgacgggaccagcacctacaagcagcactgcaggacaccctcctcctccagcacccttgcctactccccgcgggacgaggaggacagcatgccccccatcagcac

SEQ ID NO: 293801 - DNA, 120 bp, Artificial Sequence
  ENSG00000131653_3 (sequence is synthesized)
tccccgccgctccgactccgccatctctgtccgctccctgcactcagagtccagcatgtctctgcgctccacattctcactgcccgaggaggaggaggagccggagccactggtgtttgc

SEQ ID NO: 293802 - DNA, 120 bp, Artificial Sequence
  ENSG00000131653_4 (sequence is synthesized)
ggagcagccctcggtgaagctgtgctgtcagctctgctgcagcgtcttcaaagaccccgtgatcaccacgtgtgggcacacgttctgtaggagatgcgccttgaagtcagagaagtgtcc

SEQ ID NO: 293803 - DNA, 120 bp, Artificial Sequence
  ENSG00000131653_5 (sequence is synthesized)
cgtggacaacgtcaaactgaccgtggtggtgaacaacatcgcggtggccgagcagatcggggagctcttcatccactgccggcacggctgccgggtagcgggcagcgggaagccccccat

SEQ ID NO: 293804 - DNA, 120 bp, Artificial Sequence
  ENSG00000131653_6 (sequence is synthesized)
ctttgaggtggacccccgagggtgccccttcaccatcaagctcagcgcccggaaggaccacgagggcagctgtgactacaggcctgtgcggtgtcccaacaaccccagctgccccccgct

SEQ ID NO: 293805 - DNA, 120 bp, Artificial Sequence
  ENSG00000131653_7 (sequence is synthesized)
gctcaggatgaacctggaggcccacctcaaggagtgcgagcacatcaaatgcccccactccaagtacgggtgcacgttcatcgggaaccaggacacttacgagacccacctggagacttg

SEQ ID NO: 293806 - DNA, 120 bp, Artificial Sequence
  ENSG00000131653_8 (sequence is synthesized)
ccgcttcgagggcctgaaggagtttctgcagcagacggatgaccgcttccacgagatgcacgtggctctggcccagaaggaccaggagatcgccttcctgcgctccatgctgggaaagct

SEQ ID NO: 293807 - DNA, 120 bp, Artificial Sequence
  ENSG00000131653_9 (sequence is synthesized)
ctcggagaagatcgaccagctagagaagagcctggagctcaagtttgacgtcctggacgaaaaccagagcaagctcagcgaggacctcatggagttccggcgggacgcatccatgttaaa

SEQ ID NO: 293808 - DNA, 120 bp, Artificial Sequence
  ENSG00000131653_10 (sequence is synthesized)
tgacgagctgtcccacatcaacgcgcggctgaacatgggcatcctaggctcctacgaccctcagcagatcttcaagtgcaaagggacctttgtgggccaccagggccctgtgtggtgtct

SEQ ID NO: 293809 - DNA, 120 bp, Artificial Sequence
  ENSG00000131653_11 (sequence is synthesized)
ctgcgtctactccatgggtgacctgctcttcagtggctcctctgacaagaccatcaaggtgtgggacacatgtaccacctacaagtgtcagaagacactggagggccatgatggcatcgt

SEQ ID NO: 293810 - DNA, 120 bp, Artificial Sequence
  ENSG00000131653_12 (sequence is synthesized)
gctggctctctgcatccaggggtgcaaactctacagcggctctgcagactgcaccatcattgtgtgggacatccagaacctgcagaaggtgaacaccatccgggcccatgacaacccggt

SEQ ID NO: 293811 - DNA, 120 bp, Artificial Sequence
  ENSG00000131653_13 (sequence is synthesized)
gtgcacgctggtctcctcacacaacgtgctcttcagcggctccctgaaggccatcaaggtctgggacatcgtgggcactgagctgaagttgaagaaggagctcacaggcctcaaccactg

SEQ ID NO: 293812 - DNA, 120 bp, Artificial Sequence
  ENSG00000131653_14 (sequence is synthesized)
ggtgcgggccctggtggctgcccagagctacctgtacagcggctcctaccagacaatcaagatctgggacatccgaacccttgactgcatccacgtcctgcagacgtctggtggcagcgt

SEQ ID NO: 293813 - DNA, 120 bp, Artificial Sequence
  ENSG00000131653_15 (sequence is synthesized)
agcaggtgcggaccctcacgggccacgtgggcaccgtgtatgccctggcggtcatctcgacgccagaccagaccaaagtcttcagtgcatcctacgaccggtccctcagggtctggagta

SEQ ID NO: 293814 - DNA, 120 bp, Artificial Sequence
  ENSG00000131653_16 (sequence is synthesized)
tggacaacatgatctgcacgcagaccctgctgcgtcaccagggcagtgtcaccgcgctggctgtgtcccggggccgactcttctcaggggctgtggatagcactgtgaaggtttggactt

SEQ ID NO: 293815 - DNA, 120 bp, Artificial Sequence
  ENSG00000131653_17 (sequence is synthesized)
gctaacaggatccaggccaggctgtggtttcccctgaaccagccctggacctttctgagccaggctggccacatggggtggtctcggggtttctgcctgccccgtgggcataggtggaca

SEQ ID NO: 293816 - DNA, 120 bp, Artificial Sequence
  ENSG00000131653_18 (sequence is synthesized)
ggctctggcagccgggcagtgccctccccgtcccatgctcggcgagcctccctctactcggcactgtccttgctgcccagcccctctctgggtgccaggtacgacgcttgccccggccca

SEQ ID NO: 293817 - DNA, 120 bp, Artificial Sequence
  ENSG00000131653_19 (sequence is synthesized)
ccctccatccccaccctccatccccaccctagatggagcgagggcctttttactcaccttttctaccgtttttagactgtatgtagatttggttacctcctggttgaaataaatgctcca

SEQ ID NO: 293818 - DNA, 120 bp, Artificial Sequence
  ENSG00000131653_20 (sequence is synthesized)
cagactgtggctgtgagtggggacagctcctcgggacaagggggctgtgtgtggccttgaggttggtgtgcacaggcactggctgctgtgagtgggggggcatggggcagtttcctttgg

SEQ ID NO: 293819 - DNA, 120 bp, Artificial Sequence
  ENSG00000131653_21 (sequence is synthesized)
tggaccccaggacttcggcccactccggggcctcccctccctgctaggaggcaactcgtcacacccaagctgctggcctccagtcccatctcccccaacacatgtgcccccaaaaagtga

SEQ ID NO: 293820 - DNA, 120 bp, Artificial Sequence
  ENSG00000131653_22 (sequence is synthesized)
gccaggcacctctgtttcctgctgtttattgacagccgacggcagcgccttgcccagacctcccctgcccacctgctggagcccagcctgtgccgccctctgaggagaggcctgggggga

SEQ ID NO: 293821 - DNA, 120 bp, Artificial Sequence
  ENSG00000131653_23 (sequence is synthesized)
cagctgggcacgtccactcgcagggaaacacggggtgagacagcaggaaggggccctgcacgccgggacgccacctccgccagccgcctccacccgccccacaccacaatcgctggtttt

SEQ ID NO: 293822 - DNA, 120 bp, Artificial Sequence
  ENSG00000131653_24 (sequence is synthesized)
cggcattttttaaattttttttttaagaaacgtcaaagttgtgcccaacactgtggatcagcaaacacgatagaggagaccagtcagtacttcttggagggggcaggaggagagaggaaa

SEQ ID NO: 293823 - DNA, 120 bp, Artificial Sequence
  ENSG00000131653_25 (sequence is synthesized)
agggagggcgagaatgaccacacaacacagccttggaccatgagcagaagcgtccgtgggaactccactggggtggatgggctgcctgcacagcccctggagagggggccaggcacaccc

SEQ ID NO: 293824 - DNA, 120 bp, Artificial Sequence
  ENSG00000131653_26 (sequence is synthesized)
tcagaggagctgcaagcccgtggcctggcctgctacatgccctgcttccacgtggctgccacgctgacacacccacattcaccaaacccacccgcgccctgggacgcagccacgccagga

SEQ ID NO: 293825 - DNA, 120 bp, Artificial Sequence
  ENSG00000131653_27 (sequence is synthesized)
ggaggacacggccgccgagagcaaggcacaacctcgagttcttggggcgcagagaacttaggagagaagcacggaggagcccccggcagagcacccgcccccgggccccagccttccacc

SEQ ID NO: 293826 - DNA, 120 bp, Artificial Sequence
  ENSG00000131653_28 (sequence is synthesized)
tgtgctagcagcctggggcctccactctggccggaggaaggaccgcaggcagacagcctgggcctctaacagcttttgtccggagctagacttcgtgtcctttcagttggtaaatggttt

SEQ ID NO: 293827 - DNA, 120 bp, Artificial Sequence
  ENSG00000131653_29 (sequence is synthesized)
tctatagaatcaataatatttctttctttaaatatatatttgttaaagttatacctttttgtttctctggggaaatccgcctcagctcattcccaataaattaatactcttgatagctta

SEQ ID NO: 293828 - DNA, 120 bp, Artificial Sequence
  ENSG00000131653_30 (sequence is synthesized)
ggtgactggctgtgactcaggacccagaggagtagagggagccaggcaggggtccctccacctcggggaagagctggatgggctcttcgggagctcagaaaggctaagccttgagggacg

SEQ ID NO: 293829 - DNA, 120 bp, Artificial Sequence
  ENSG00000131653_31 (sequence is synthesized)
gtgacgcagagccgcctgcctgcccgggcctctgcatacctgggatcggggtgaaggacctttgcctcctagaggcctgcctgagccggggctggtggtggaaggctgctgcggcggccc

SEQ ID NO: 293830 - DNA, 120 bp, Artificial Sequence
  ENSG00000131653_32 (sequence is synthesized)
ggaggacagcatggtaggtccctacccccaggagcccgtgtgagcctcagcctccccccatcctccctcctgggggaaccaggtcccaggaggagttgacagtgagctggtgaggcacag

SEQ ID NO: 293831 - DNA, 120 bp, Artificial Sequence
  ENSG00000131653_33 (sequence is synthesized)
gagaagaagagcacctgtggataccctgaggcctcggcagacatggcaagtctgtgagaaaggaggctcctgtggctggactgtgggtggcagggggcagccagtgagggcagctgggtc

SEQ ID NO: 293832 - DNA, 120 bp, Artificial Sequence
  ENSG00000131653_34 (sequence is synthesized)
agagggcctggcacctgcaggccaggatgaggcatatttggctccatcttaagggaggtggaaaccacagaaagttcagtcaggaggatagcacaataaaatacatgctttgaaagcttc

SEQ ID NO: 293833 - DNA, 120 bp, Artificial Sequence
  ENSG00000131653_35 (sequence is synthesized)
tgcatccaggggtgcaaactctacagcggctctgcagactgcaccatcattgtgagtggggcctacaggcgggtgggcaggaggcggcccaggcccgccccagtctgtaggtgccccagg

SEQ ID NO: 293834 - DNA, 120 bp, Artificial Sequence
  ENSG00000131668_0 (sequence is synthesized)
gcttcggcccgcccgagggctgcgcggaccaccggccgcaccgctatcgcagcttcatgattgaggagatcctcacggagccacccgggcccaagggcgccgcgcccgcagccgccgctg

SEQ ID NO: 293835 - DNA, 120 bp, Artificial Sequence
  ENSG00000131668_1 (sequence is synthesized)
ccgcggcgggcgagctgctgaagttcggcgtgcaggcgctgctggcggcgcggcccttccacagccacctggccgtgctgaaggccgagcaggcggcggtgttcaagttcccactggcgc

SEQ ID NO: 293836 - DNA, 120 bp, Artificial Sequence
  ENSG00000131668_2 (sequence is synthesized)
cgctgggctgttcagggctgagctctgcgttgctggcggcagggcccgggctgcccggcgccgcgggtgcgccacacctgccgctcgagttgcagctccgcgggaagctggaggcggcag

SEQ ID NO: 293837 - DNA, 120 bp, Artificial Sequence
  ENSG00000131668_3 (sequence is synthesized)
gccctggggagccaggcaccaaagccaagaaggggcgtcggagccgcactgtgttcaccgagctgcagctgatgggcctggagaaacgcttcgagaagcagaagtacctttccacgccgg

SEQ ID NO: 293838 - DNA, 120 bp, Artificial Sequence
  ENSG00000131668_4 (sequence is synthesized)
atgaagtggaagaaaatagtgctgcagggcggcggcctggagtctcccaccaagcccaaggggcggcccaagaagaactcaattccaacgagcgagcagcttactgagcaggagcgcgcc

SEQ ID NO: 293839 - DNA, 120 bp, Artificial Sequence
  ENSG00000131668_5 (sequence is synthesized)
aaggatgcagagaaaccggcggaggtgccgggcgagcccagcgacaggagccgcgaggactgagggcggtatacggtgcggggcctgggatgcccgcgccacccgcagccccctcactcg

SEQ ID NO: 293840 - DNA, 120 bp, Artificial Sequence
  ENSG00000131668_6 (sequence is synthesized)
gcggaaacccgcgagccggcccttccgcgtccaagaagtttacttcctaagcctttttattatgatcttgaatgcggacaattggggccaaacgaggaaggacacagacccaaaagccag

SEQ ID NO: 293841 - DNA, 120 bp, Artificial Sequence
  ENSG00000131668_7 (sequence is synthesized)
acccaggtcccagcgcgcttctgggctctaacctgggagactcgcatccagcccggcggaagctacagtctctaccctgagctccgtggcgcagagcgctccacgcgtattcacgccccg

SEQ ID NO: 293842 - DNA, 120 bp, Artificial Sequence
  ENSG00000131668_8 (sequence is synthesized)
ctcctcgcctgcacccccaccccgtctggggcctgccctcccggccggggagcctccaggcacacacccgcttctggacgtcggggacccagcggttgggctcaggccacaacggcctga

SEQ ID NO: 293843 - DNA, 120 bp, Artificial Sequence
  ENSG00000131668_9 (sequence is synthesized)
gattgccccggggcaacccgtcggctcggcctggaggccgggtccccgatgtcgctggggcccctaccccctcttgcgaagacggtgactttttttccaataaaatattttatgacacaa

SEQ ID NO: 293844 - DNA, 120 bp, Artificial Sequence
  ENSG00000131668_10 (sequence is synthesized)
gcctggggaactccaggacagaacacggacagggtcgaggagatactccctcccaaatctggggaacggcaacgttgaggagggtctccatctgcgccaccggcgccgaccggcagggcg

SEQ ID NO: 293845 - DNA, 120 bp, Artificial Sequence
  ENSG00000131668_11 (sequence is synthesized)
tggaggttttgcgctgggaggcactggccaagcgcgagcacccccgcggcacgtggtgcggcagtccctggggcagaggagcgcggccgtagctcacccgggtcctcattctctttcttc

SEQ ID NO: 293846 - DNA, 120 bp, Artificial Sequence
  ENSG00000131669_0 (sequence is synthesized)
aggcccggatcctggcggcctgggcggccgcaccatggactcgggaaccgaggagtacgagctcaacggcggcctgcctccgggcacacccggctccccggacgcctcgccggcccgctg

SEQ ID NO: 293847 - DNA, 120 bp, Artificial Sequence
  ENSG00000131669_1 (sequence is synthesized)
gggctggaggcacgggcccatcaacgtgaaccattacgccagcaagaagagcgcagccgagagcatgctggacatcgcgctgctgatggccaacgcgtcccagctgaaggccgtcgtgga

SEQ ID NO: 293848 - DNA, 120 bp, Artificial Sequence
  ENSG00000131669_2 (sequence is synthesized)
acagggccccagcttcgccttctatgtgcccctggtggtcctcatctccatctcccttgtgctgcagatcggcgtgggggtgctgctcatcttccttgtcaagtacgaccttaacaaccc

SEQ ID NO: 293849 - DNA, 120 bp, Artificial Sequence
  ENSG00000131669_3 (sequence is synthesized)
ggccaagcacgccaagctggacttcctcaacaacctggccacgggcctggtgttcatcatcgtggtagtcaacatcttcatcacggccttcggggtccagaagcccttgatggacatggc

SEQ ID NO: 293850 - DNA, 120 bp, Artificial Sequence
  ENSG00000131669_4 (sequence is synthesized)
accccagcagtaggacacccaggaccctggatgttgcctgccctgcaactcagctgcccgaccccaggagtcgccatacctgtgaggtgtccacctccctgcacatggcactacccagac

SEQ ID NO: 293851 - DNA, 120 bp, Artificial Sequence
  ENSG00000131669_5 (sequence is synthesized)
ccggaccagcccttgctctgactgcggccaagcaccacgcaggaggccactcttgtctctcagcagctgttcccaggaggcagctccctcctggcacatgggggctggccacaatagccc

SEQ ID NO: 293852 - DNA, 120 bp, Artificial Sequence
  ENSG00000131669_6 (sequence is synthesized)
agagggtcagaactggacagctgcagagacctgtgcccagagaagggtctcgacccactcaaggacacacagcaggtccgtggatgggctggatgagtgaccagggccagcctctgtctc

SEQ ID NO: 293853 - DNA, 120 bp, Artificial Sequence
  ENSG00000131669_7 (sequence is synthesized)
aggacattccagaaggacaaggagatgtctctccctctcccaaagcaccagcgtccctgcctcccgtgggccctgtccgggttgccctggtgaccccagcctctgtccacttcctaaccc

SEQ ID NO: 293854 - DNA, 120 bp, Artificial Sequence
  ENSG00000131669_8 (sequence is synthesized)
agggaccctgcacagccagaactgcctttggccctacggatggccactggctctggtcttaagtgcctgggcttggtggccatcaagagggagccagtcaggcctgtgagggccgtagac

SEQ ID NO: 293855 - DNA, 120 bp, Artificial Sequence
  ENSG00000131669_9 (sequence is synthesized)
cttgtatataccctgcaccagcagtgaccgggcagagcccaaccccctccacgggggtcccagcacccacttttctaatcatgaatgaacaataaagcccacgctctttgtcaggctcca

SEQ ID NO: 293856 - DNA, 86 bp, Artificial Sequence
  ENSG00000131669_10 (sequence is synthesized)
gtggcgcagtctcggctcactgcaagctgcatccaaagtaactgggattacaggcgctcatcaccatgcccggctaatttttgtat

SEQ ID NO: 293857 - DNA, 120 bp, Artificial Sequence
  ENSG00000131669_11 (sequence is synthesized)
ttttgtattttttgtagagatgaggttacgccatgttgcccagtcgaatttttgagctcaagtgatccaacagcctcagtctcccaaaatactgggattacaggcatgagtcaccacgct

SEQ ID NO: 293858 - DNA, 120 bp, Artificial Sequence
  ENSG00000131669_12 (sequence is synthesized)
ttttgttttgttttgttttgtttttgaaaccgggtcttgctgtgtcttgatcacagctcactgcagtctcaacctcccaggctcaagcgagccttctgcctcagcctcccaggtaggctg

SEQ ID NO: 293859 - DNA, 120 bp, Artificial Sequence
  ENSG00000131669_13 (sequence is synthesized)
gctcaagcgagccttctgcctcagcctcccaggtaggctggaccacagctatatgccatcatgccagctaatttttttatttttggtagacacggggtcttgctatgctgcccaggctgg

SEQ ID NO: 293860 - DNA, 84 bp, Artificial Sequence
  ENSG00000131669_14 (sequence is synthesized)
ccaccctgcactttgaaagagcacagagtggggtcagggcctggcctgtgggcattagggcaggtgtttcaccgggttcttgtt

SEQ ID NO: 293861 - DNA, 120 bp, Artificial Sequence
  ENSG00000131669_15 (sequence is synthesized)
cctgtgggcattagggcaggtgtttcaccgggttcttgttgacccatgccatgagatggcctcagtcatgccagtcctaccttctgggcccagggtccccttcatggctgcgtaaccttg

SEQ ID NO: 293862 - DNA, 120 bp, Artificial Sequence
  ENSG00000131669_16 (sequence is synthesized)
ggcaagtggctgaacctcccgggcctcacttataaaacaggcatcataatagaactgcagcttgtggcaggaatcactagattaaggcacgcaaagggctcagtgcatttgcccaaacct

SEQ ID NO: 293863 - DNA, 120 bp, Artificial Sequence
  ENSG00000131669_17 (sequence is synthesized)
ggcctttggttgacgtccatagcttcaattcgtataaggaaaatatgggggctacagaaggtggggtcatagaccgtggggttgcccaagccaggggcgctgttgtccatgtttcagcaa

SEQ ID NO: 293864 - DNA, 120 bp, Artificial Sequence
  ENSG00000131669_18 (sequence is synthesized)
ggcggcctgggcggccgcaccatggactcgggaaccgaggagtacgagctcaacggcggcctgcctccgggcacacccggctccccggacgcctcgcaagaagagcgcagccgagagcat

SEQ ID NO: 293865 - DNA, 120 bp, Artificial Sequence
  ENSG00000131669_19 (sequence is synthesized)
cctgggacaggtgcccaccaccttgcacacttggctctcaaggagctgccgagttcctggccctcatcacccagacatgcagtccaggaagtggcaccccccctccccccaccctgcact

SEQ ID NO: 293866 - DNA, 120 bp, Artificial Sequence
  ENSG00000131669_20 (sequence is synthesized)
ccatggactcgggaaccgaggagtacgagctcaacggcggcctgcctccgggcacacccggctccccggacgcctcgcccgcaggttgaaggttcctggggccacatctgggccgagagg

SEQ ID NO: 293867 - DNA, 120 bp, Artificial Sequence
  ENSG00000131686_0 (sequence is synthesized)
attacagatgtgcagcaccatgagggccctggtgcttctgctgtccctgttcctgctgggtggccaggcccagcatgtgtctgactggacctactcagaaggggcactggacgaagcgca

SEQ ID NO: 293868 - DNA, 120 bp, Artificial Sequence
  ENSG00000131686_1 (sequence is synthesized)
ctggccacagcactaccccgcctgtgggggccagagacagtcgcctatcaacctacagaggacgaaggtgcggtacaacccctccttgaaggggctcaatatgacaggctatgagaccca

SEQ ID NO: 293869 - DNA, 120 bp, Artificial Sequence
  ENSG00000131686_2 (sequence is synthesized)
ggcaggggagttccccatggtcaacaatggccacacagtgcagatcagcctgccctccaccatgcgcatgacagtggctgacggcactgtatacatagcccagcagatgcactttcactg

SEQ ID NO: 293870 - DNA, 120 bp, Artificial Sequence
  ENSG00000131686_3 (sequence is synthesized)
gggaggtgcgtcctcggagatcagcggctctgagcacaccgtggacgggatcagacatgtgatcgagattcacattgttcactacaattctaaatacaagagctatgatatagcccaaga

SEQ ID NO: 293871 - DNA, 120 bp, Artificial Sequence
  ENSG00000131686_4 (sequence is synthesized)
tgcgccggatggtttggctgtactggcagccttcgttgaggtgaagaattaccctgaaaacacttattacagcaacttcatttctcatctggccaacatcaagtacccaggacaaagaac

SEQ ID NO: 293872 - DNA, 120 bp, Artificial Sequence
  ENSG00000131686_5 (sequence is synthesized)
ttgacgttcaggacatgctgcccaggaacctccagcactactacacctaccatggctcactcaccacgcctccctgcactgagaacgtccactggtttgtgctggcagattttgtcaagc

SEQ ID NO: 293873 - DNA, 120 bp, Artificial Sequence
  ENSG00000131686_6 (sequence is synthesized)
tctccaggacacaggtttggaagctggagaattccttactggatcaccgcaacaagaccatccacaacgattaccgcaggacccagcccctgaaccacagagtggtggaatccaacttcc

SEQ ID NO: 293874 - DNA, 120 bp, Artificial Sequence
  ENSG00000131686_7 (sequence is synthesized)
cgaatcaggaatacactctaggctctgaattccagttttacctacataagattgaggaaattcttgactacttaagaagagcattgaactgaggaaagctaagaggaagattcaatatta

SEQ ID NO: 293875 - DNA, 120 bp, Artificial Sequence
  ENSG00000131686_8 (sequence is synthesized)
actagcttgaagcctgacctagccagaagtgcctgtccgctgcagccgcaccctaccttgtctaagaaaccatgtgtgtctggaacacgctgctccccctggggcagctgttgggattct

SEQ ID NO: 293876 - DNA, 120 bp, Artificial Sequence
  ENSG00000131686_9 (sequence is synthesized)
gattaaaagaggggaaacgatcatcctggacaggaagtgagatggcttcagttcatgagacgggatctgagttagacatcaccagtggaaattgattggaatagaaacttaaaggaaatg

SEQ ID NO: 293877 - DNA, 120 bp, Artificial Sequence
  ENSG00000131686_10 (sequence is synthesized)
gaaccctaactattctcccatcaaatcatatatgttgacctgtctgaattataaaccagcctgacctttcctttagcattagatgtaataaaataactttggaaatttgtcatttaaaaa

SEQ ID NO: 293878 - DNA, 120 bp, Artificial Sequence
  ENSG00000131686_11 (sequence is synthesized)
ccatggtcaacaatggccacacagattggcaggcggaactcttcctcccctccttgtcctctccttgtggagaaggggcgaagcacaaaggccaaaggcagtggctttgttcaccctccc

SEQ ID NO: 293879 - DNA, 120 bp, Artificial Sequence
  ENSG00000131686_12 (sequence is synthesized)
tggacagctggtgggaagcaatcattgatggaggatctctatgggcaacgcttgctgagtgcgggcttcgtgctgagggcccagaagagggaaggcatatggaagagaagagcccagctt

SEQ ID NO: 293880 - DNA, 120 bp, Artificial Sequence
  ENSG00000131686_13 (sequence is synthesized)
cccaaggggcttgcagcggctcccgcctcccaatttccagaggaccctgtaccttcttcctttagggctctgctcaaatttctgtggtccggaagcctgttcctttggggttctcacctc

SEQ ID NO: 293881 - DNA, 120 bp, Artificial Sequence
  ENSG00000131686_14 (sequence is synthesized)
ctgttcctttggggttctcacctcacacgacagcatgtcggacattagagtggacccaaagttcacattaattatatatatattaaaaacaatttttttttttgagatggagtcttgctc

SEQ ID NO: 293882 - DNA, 72 bp, Artificial Sequence
  ENSG00000131686_15 (sequence is synthesized)
tgtcatactggccagtctggtctcgaactccttgcctcaagtgctctgcccaccttggcctcccaaagtgct

SEQ ID NO: 293883 - DNA, 71 bp, Artificial Sequence
  ENSG00000131686_16 (sequence is synthesized)
tcaagtgccaaggctggccataattccatttttcgatgtaaagggtttttttctgagatggagtctcactc

SEQ ID NO: 293884 - DNA, 120 bp, Artificial Sequence
  ENSG00000131686_17 (sequence is synthesized)
tatgcataagccaccgtgcccagcctgatataaagtattttgaaagatttttataatttagcttttgaagttatttggctattgccattggctacttttcagcaagctccaagcacattc

SEQ ID NO: 293885 - DNA, 120 bp, Artificial Sequence
  ENSG00000131686_18 (sequence is synthesized)
aggaattctactgaagggggaaaaaaagctaatctacaaactttgaatctaatgagattttgatgaacactaagcttaacagtaaagttgacatgacgtattaaagatttgttaattttt

SEQ ID NO: 293886 - DNA, 120 bp, Artificial Sequence
  ENSG00000131686_19 (sequence is synthesized)
attacagatgtgcagcaccatgagggccctggtgcttctgctgtccctgttcctgctgggtggccaggcccagcatgtgtctgactggacctactcagattcacattgttcactacaatt

SEQ ID NO: 293887 - DNA, 120 bp, Artificial Sequence
  ENSG00000131697_0 (sequence is synthesized)
cttccgaggctcctcccgcgggtggcagcggacggggcgcgcccctcggccagtcctcggtcctcaggcttgtggctccgttgagcaccggccgccgggcctctgggtccgtcgagtgga

SEQ ID NO: 293888 - DNA, 120 bp, Artificial Sequence
  ENSG00000131697_1 (sequence is synthesized)
gactctctgaaaagcgtgggctccgtggcctccggcgcggccgcggcgggtcggtctcctagatcatccgggaagcccacgggaccctcaggcgggcaggatgaacgactggcacaggat

SEQ ID NO: 293889 - DNA, 120 bp, Artificial Sequence
  ENSG00000131697_2 (sequence is synthesized)
cttcacccaaaacgtgcttgtccctccccacccacagagagcgcgccagccttggaaggaatccacggcattccagtgtgtcctcaagtggctggacggaccggtaattaggcagggcgt

SEQ ID NO: 293890 - DNA, 120 bp, Artificial Sequence
  ENSG00000131697_3 (sequence is synthesized)
gctggaggtactgtcagaggttgaatgccatctgcgagtgtctttctttgatgtcacctaccggcacttctttgggaggacgtggaaaaccacagtgaagccgacgaagagaccgccgtc

SEQ ID NO: 293891 - DNA, 120 bp, Artificial Sequence
  ENSG00000131697_4 (sequence is synthesized)
caggatcgtctttaatgagcccttgtattttcacacatccctaaaccaccctcatatcgtggctgtggtggaagtggtcgctgagggcaagaaacgggatgggagcctccagacattgtc

SEQ ID NO: 293892 - DNA, 120 bp, Artificial Sequence
  ENSG00000131697_5 (sequence is synthesized)
ctgtgggtttggaattcttcggatcttcagcaaccagccggactctcctatctctgcttcccaggacaaaaggttgcggctgtaccatggcacccccagagccctcctgcacccgcttct

SEQ ID NO: 293893 - DNA, 120 bp, Artificial Sequence
  ENSG00000131697_6 (sequence is synthesized)
ccaggaccccgcagagcaaaacagacacatgaccctcattgagaactgcagcctgcagtacacgctgaagccacacccggccctggagcctgcgttccaccttcttcctgagaaccttct

SEQ ID NO: 293894 - DNA, 120 bp, Artificial Sequence
  ENSG00000131697_7 (sequence is synthesized)
ggtgtctggtctgcagcagatacctggcctgcttccagctcatggagaatccggcgacgctctccgaaagcctcgcctccagaagcccatcacggggcacttggatgacttattcttcac

SEQ ID NO: 293895 - DNA, 120 bp, Artificial Sequence
  ENSG00000131697_8 (sequence is synthesized)
cctgtacccctccctggagaagtttgaggaagagctgctggagctccacgtccaggaccacttccaggagggatgtggcccactggacggtggtgccctggagatcctggagcggcgcct

SEQ ID NO: 293896 - DNA, 120 bp, Artificial Sequence
  ENSG00000131697_9 (sequence is synthesized)
gcgtgtgggcgtgcacaatggtctgggcttcgtgcagaggccgcaggtcgttgtactggtgcctgagatggatgtggccttgacgcgctcagctagcttcagcaggaaagtggtctcctc

SEQ ID NO: 293897 - DNA, 120 bp, Artificial Sequence
  ENSG00000131697_10 (sequence is synthesized)
ttccaagaccagctccgggagccaagctctggttttgagaagccgcctccgcctcccagagatggtcggccaccctgcatttgcggtcatcttccagctggagtacgtgttcagcagccc

SEQ ID NO: 293898 - DNA, 120 bp, Artificial Sequence
  ENSG00000131697_11 (sequence is synthesized)
tgcaggagtggacggcaatgcagcttcggtcacctctctgtccaacctggcatgcatgcacatggtccgctgggctgtttggaaccccttgctggaagctgattctggaagggtgaccct

SEQ ID NO: 293899 - DNA, 120 bp, Artificial Sequence
  ENSG00000131697_12 (sequence is synthesized)
gcctctgcagggtgggatccagcccaacccctcgcactgtctggtctacaaggtaccctcagccagcatgagctctgaagaggtgaagcaggtggagtcgggtacactccggttccagtt

SEQ ID NO: 293900 - DNA, 120 bp, Artificial Sequence
  ENSG00000131697_13 (sequence is synthesized)
ctcgctgggctcagaagaacacctggatgcacccacggagcctgtcagtggccccaaagtggagcggcggccttccaggaaaccacccacgtccccttcgagcccgccagcgccagtacc

SEQ ID NO: 293901 - DNA, 120 bp, Artificial Sequence
  ENSG00000131697_14 (sequence is synthesized)
tcgagttctcgctgccccgcagaactcacctgtgggaccagggttgtcaatttcccagctggcggcctccccgcggtccccgactcagcactgcttggccaggcctacttcacagctacc

SEQ ID NO: 293902 - DNA, 120 bp, Artificial Sequence
  ENSG00000131697_15 (sequence is synthesized)
ccatggctctcaggcctccccggcccaggcacaggagttcccgttggaggccggtatctcccacctggaagccgacctgagccagacctccctggtcctggaaacatccattgccgaaca

SEQ ID NO: 293903 - DNA, 120 bp, Artificial Sequence
  ENSG00000131697_16 (sequence is synthesized)
gttacaggagctgccgttcacgcctttgcatgcccctattgttgtgggaacccagaccaggagctctgcagggcagccctcgagagcctccatggtgctcctgcagtcctccggctttcc

SEQ ID NO: 293904 - DNA, 120 bp, Artificial Sequence
  ENSG00000131697_17 (sequence is synthesized)
cgagattctggatgccaataaacagccagccgaggctgtcagcgctacagaacctgtgacgtttaaccctcagaaggaagaatcagattgtctacaaagcaacgagatggtgctacagtt

SEQ ID NO: 293905 - DNA, 120 bp, Artificial Sequence
  ENSG00000131697_18 (sequence is synthesized)
tcttgcctttagcagagtggcccaggactgccgaggaacatcatggccaaagactgtgtatttcaccttccagttctaccgcttcccacccgcaacgacgccacgactgcagctggtcca

SEQ ID NO: 293906 - DNA, 120 bp, Artificial Sequence
  ENSG00000131697_19 (sequence is synthesized)
gctggatgaggccggccagcccagctctggcgccctgacccacatcctcgtgcctgtgagcagagatggcacctttgatgctgggtctcctggcttccagctgaggtacatggtgggccc

SEQ ID NO: 293907 - DNA, 120 bp, Artificial Sequence
  ENSG00000131697_20 (sequence is synthesized)
cccgctacctggccgtgcagaccctgcagattgacgtctgggacggagactccctgctgctcatcggatctgctgccgtccagatgaagcatctcctccgccaaggccggccggctgtgc

SEQ ID NO: 293908 - DNA, 120 bp, Artificial Sequence
  ENSG00000131697_21 (sequence is synthesized)
aggcctcccacgagcttgaggtcgtggcaactgaatacgagcaggacaacatggtggtgagtggagacatgctggggtttggccgcgtcaagcccatcggcgtccactcggtggtgaagg

SEQ ID NO: 293909 - DNA, 120 bp, Artificial Sequence
  ENSG00000131697_22 (sequence is synthesized)
gccggctgcacctgactttggccaacgtgggtcacccgtgtgaacagaaagtgagaggttgtagcacattgccaccgtccagatctcgggtcatctcaaacgatggagccagccgcttct

SEQ ID NO: 293910 - DNA, 120 bp, Artificial Sequence
  ENSG00000131697_23 (sequence is synthesized)
ctggaggcagcctcctcacgactggaagctcaaggcgaaaacacgtggtgcaagcacagaagctggcggacgtggacagtgagctggctgccatgctactgacccatgcccggcagggca

SEQ ID NO: 293911 - DNA, 120 bp, Artificial Sequence
  ENSG00000131697_24 (sequence is synthesized)
aggggccccaggacgtcagccgcgagtcggatgccacccgcaggcgtaagctggagcggatgaggtctgtgcgcctgcaggaggccgggggagacttgggccggcgcgggacgagcgtgt

SEQ ID NO: 293912 - DNA, 120 bp, Artificial Sequence
  ENSG00000131697_25 (sequence is synthesized)
tggcgcagcagagcgtccgcacacagcacttgcgggacctacaggtcatcgccgcctaccgggaacgcacgaaggccgagagcatcgccagcctgctgagcctggccatcaccacggagc

SEQ ID NO: 293913 - DNA, 120 bp, Artificial Sequence
  ENSG00000131697_26 (sequence is synthesized)
acacgctccacgccacgctgggggtcgccgagttctttgagtttgtgcttaagaacccccacaacacacagcacacggtgactgtggagatcgacaaccccgagctcagcgtcatcgtgg

SEQ ID NO: 293914 - DNA, 120 bp, Artificial Sequence
  ENSG00000131697_27 (sequence is synthesized)
acagtcaggagtggagggacttcaagggtgctgctggcctgcacacaccggtggaggaggacatgttccacctgcgtggcagcctggccccccagctctacctgcgcccccacgagaccg

SEQ ID NO: 293915 - DNA, 120 bp, Artificial Sequence
  ENSG00000131697_28 (sequence is synthesized)
cccacgtccccttcaagttccagagcttctctgcagggcagctggccatggtgcaggcctctcctgggttgagcaacgagaagggcatggacgccgtgtcaccttggaagtccagcgcag

SEQ ID NO: 293916 - DNA, 120 bp, Artificial Sequence
  ENSG00000131697_29 (sequence is synthesized)
tgcccactaaacacgccaaggtcttgttccgagcgagtggtggcaagcccatcgccgtgctctgcctgactgtggagctgcagccccacgtggtggaccaggtcttccgcttctatcacc

SEQ ID NO: 293917 - DNA, 120 bp, Artificial Sequence
  ENSG00000131697_30 (sequence is synthesized)
cggagctctccttcctgaagaaggccatccgcctgccgccctggcacacatttccaggtgctccggtgggaatgcttggtgaggaccccccagtccatgttcgctgcagcgacccgaacg

SEQ ID NO: 293918 - DNA, 120 bp, Artificial Sequence
  ENSG00000131697_31 (sequence is synthesized)
tcatctgtgagacccagaatgtgggccccggggaaccacgggacatatttctgaaggtggccagtggtccaagcccggagatcaaagacttctttgtcatcatttactcggatcgctggc

SEQ ID NO: 293919 - DNA, 120 bp, Artificial Sequence
  ENSG00000131697_32 (sequence is synthesized)
tggcgacacccacacagacgtggcaggtctacctccactccctgcagcgcgtggatgtctcctgcgtcgcaggccagctgacccgcctgtcccttgtccttcgggggacacagacagtga

SEQ ID NO: 293920 - DNA, 120 bp, Artificial Sequence
  ENSG00000131697_33 (sequence is synthesized)
ggaaagtgagagctttcacctctcatccccaggagctgaagacagaccccaaaggtgtcttcgtgctgccgcctcgtggggtgcaggacctgcatgttggcgtgaggccccttagggccg

SEQ ID NO: 293921 - DNA, 120 bp, Artificial Sequence
  ENSG00000131697_34 (sequence is synthesized)
gcagccgctttgtccatctcaacctggtggacgtggattgccaccagctggtggcctcctggctcgtgtgcctctgctgccgccagccgctcatctccaaggcctttgagatcatgttgg

SEQ ID NO: 293922 - DNA, 120 bp, Artificial Sequence
  ENSG00000131697_35 (sequence is synthesized)
ctgcgggcgaagggaagggtgtcaacaagaggatcacctacaccaacccctacccctcccggaggacattccacctgcacagcgaccacccggagctgctgcggttcagagaggactcct

SEQ ID NO: 293923 - DNA, 120 bp, Artificial Sequence
  ENSG00000131697_36 (sequence is synthesized)
tccaggtcgggggtggagagacctacaccatcggcttgcagtttgcgcctagtcagagagtgggtgaggaggagatcctgatctacatcaatgaccatgaggacaaaaacgaagaggcat

SEQ ID NO: 293924 - DNA, 120 bp, Artificial Sequence
  ENSG00000131697_37 (sequence is synthesized)
tttgcgtgaaggtcatctaccagtgagggcttgagggtgacgtccttcctgcggcacccagctggggcctgtctgtgcccctcctgccctgcaggctgtcctccccgcctctctgcagcc

SEQ ID NO: 293925 - DNA, 120 bp, Artificial Sequence
  ENSG00000131697_38 (sequence is synthesized)
tttcacttcagtgcccacctggctgacctgtgcacttggctgaggaagcagagaccgagcgctggtcattttgtagtacctgcatccagcttagctgctgctgacacccagcaggcctgg

SEQ ID NO: 293926 - DNA, 120 bp, Artificial Sequence
  ENSG00000131697_39 (sequence is synthesized)
gttccgtgagcgcgaactccgtggtggtgggtctggctctggtgctgccatctacgcatgtgggaccctcgttatcgctgttgctcaaaatgtattttatgaatcatcctaaatgagaaa

SEQ ID NO: 293927 - DNA, 120 bp, Artificial Sequence
  ENSG00000131697_40 (sequence is synthesized)
attatgtttttcttactggattttgtacaaacataatctattatttgctatgcaatattttatgctggtattatatctgttttttaaattgttgaacaaaatactaaacttttacacgtc

SEQ ID NO: 293928 - DNA, 120 bp, Artificial Sequence
  ENSG00000131697_41 (sequence is synthesized)
ctgcaggcgactgtgctgtttggagaagtgggaaccctgccagtggcatttgtgtctggttggctgctcatctgcaagggaaggagaaatggagagaaggtcaggaggaacatagactga

SEQ ID NO: 293929 - DNA, 120 bp, Artificial Sequence
  ENSG00000131697_42 (sequence is synthesized)
catctttatctggatctcagaactctgcagattggagctgcaaaaagcatgagccgcactcttgagctccctccctatataggtggtcctgggaggcctgccctggtgtctgctcctgga

SEQ ID NO: 293930 - DNA, 120 bp, Artificial Sequence
  ENSG00000131697_43 (sequence is synthesized)
atctgctgccgtccagatgaaggagacttctcatatcttctcagtctcccagtgactgaggttccggaatcatcgatgtctatgcagtgatcgtatgcagtgtagacgagtgtggcaaag

SEQ ID NO: 293931 - DNA, 120 bp, Artificial Sequence
  ENSG00000131697_44 (sequence is synthesized)
gggagagacttccctgtgcctcatgatggaggacagacaagggaagtgttcctaacttccctgcagcccgggaggaggagagtgaagaggcgcatttcttctcggcccagcaccatgact

SEQ ID NO: 293932 - DNA, 120 bp, Artificial Sequence
  ENSG00000131697_45 (sequence is synthesized)
ttgtagaaaatggtgccccgggattgctcgttagagggcctgagcaaagccctggacttcactccacgtccaggactgtggtgggtgggacaggtgggttgggtggctcaggagggtccc

SEQ ID NO: 293933 - DNA, 120 bp, Artificial Sequence
  ENSG00000131697_46 (sequence is synthesized)
acctgggacgttccaggggcttcgactgaggcctatgctgggataggggctgctgatggggtgtcaagggacacaaggctgggtgcctgcctgtgcgcacctcagggcagaggaccgaca

SEQ ID NO: 293934 - DNA, 120 bp, Artificial Sequence
  ENSG00000131697_47 (sequence is synthesized)
tgggaccctgtagggccagtgacaagctcactgaacctcccgagggtcctctggaacgtttgggatttttcagggcagaattgaaaacacaataaaactaagccgtgtgatgtttctgaa

SEQ ID NO: 293935 - DNA, 120 bp, Artificial Sequence
  ENSG00000131697_48 (sequence is synthesized)
ggcttcatgccctggtgctgtcagagcagcacgtggggcctggggaattctctctcctgcctttatggtttgaaacggtgtccctcttgccacctctgagatgactaggtgcgcatttgc

SEQ ID NO: 293936 - DNA, 120 bp, Artificial Sequence
  ENSG00000131697_49 (sequence is synthesized)
cggctgagtctgcccttctaaaaaatcccagctcccgcggcccaggtccaggtgtgcctggaggaacacctacctcctcacctgacggcccgcgtgtttctggtaggtgccccttacagc

SEQ ID NO: 293937 - DNA, 120 bp, Artificial Sequence
  ENSG00000131697_50 (sequence is synthesized)
agagtgcaggcttccctgctccagggagctgtgttttcttttttgtggccccctcgattattccctgtggagatggctgcagccgagccgcagtgggctggatgggcggtgtccatgcag

SEQ ID NO: 293938 - DNA, 120 bp, Artificial Sequence
  ENSG00000131697_51 (sequence is synthesized)
ggaacacagtgcttggatgctgtcctgggaaaggtggcggcgtccgtttccccagcaggtgtcttgctgagcacctgtgacgagcctgtcctgtcctatagtgtgtaatgtgtggggcct

SEQ ID NO: 293939 - DNA, 120 bp, Artificial Sequence
  ENSG00000131697_52 (sequence is synthesized)
ggctttggggacctggaggcggtggcggaggagaggaggaggcaggcctggggctgctggtggattgaaagtgggcttggccccttcctaaaattgggggagctttcgggccttcgcttt

SEQ ID NO: 293940 - DNA, 120 bp, Artificial Sequence
  ENSG00000131697_53 (sequence is synthesized)
gtgaggcgggattctgctgcgagttcagggcccgcaggggtctagggaaggcaccttggaggggcacgtgcagcctgagggacttgggatgcagctcctgccaccaaggagagacaccag

SEQ ID NO: 293941 - DNA, 120 bp, Artificial Sequence
  ENSG00000131697_54 (sequence is synthesized)
tcagcctctgtccccagatagtggcaagggccacccagaagcccctcattacctttttcttgctgagtccctaggctgaacagcatgaatgaagctgtggtccctcctgcggagaggcag

SEQ ID NO: 293942 - DNA, 120 bp, Artificial Sequence
  ENSG00000131697_55 (sequence is synthesized)
gactgtggtggaaatgcccatccctctctcctccaggctaaatgacccggcccctttcccctcccctcctaagtcggatccccaagccctgtgagaatcctttcaaactggtgtgagctc

SEQ ID NO: 293943 - DNA, 120 bp, Artificial Sequence
  ENSG00000131697_56 (sequence is synthesized)
ggagatttcctgcagtgcttctgaggatggggcaggggctaacctgcactcagtgcccaccacagaggggccacgtgaccacgtctcagagtggcttcctcgtgagcccatgaagatgcc

SEQ ID NO: 293944 - DNA, 120 bp, Artificial Sequence
  ENSG00000131697_57 (sequence is synthesized)
tcacccagccccatttgactgtgaagcagcaggctcttggccctaaaatgctaacaggggcttccgtgctcaggccggcatgacctccagccccaccctgtctcctgcgtggcgctgccc

SEQ ID NO: 293945 - DNA, 120 bp, Artificial Sequence
  ENSG00000131697_58 (sequence is synthesized)
ttggcttagcctcagaacccctattgggggtggacacttgtccaggatgtgtgtttggccaaagcgtgccttgtcatttgtttgacatgtggttcctaagcagccctgctgcgccctgag

SEQ ID NO: 293946 - DNA, 120 bp, Artificial Sequence
  ENSG00000131697_59 (sequence is synthesized)
agcctctgctgtgggtgggagatgggcagccaggggtggagccaccaggccctagctctgcctcctggggcctggtcctccggggctttccctgcgtggccccagctctgcctcctgtgg

SEQ ID NO: 293947 - DNA, 120 bp, Artificial Sequence
  ENSG00000131697_60 (sequence is synthesized)
cctggtcctctggggctttccctgcacagcctcctgtctgcccacgctcctggcagcccttgttggcctctcgtgggccggtgctgagtcctccgggacaagtgcagatggctcccatcc

SEQ ID NO: 293948 - DNA, 120 bp, Artificial Sequence
  ENSG00000131697_61 (sequence is synthesized)
tcagctggagcacagtgggtggccctgacagcagcttttccagcgcctccagcgcgcagacgctgttaccagaggcctctcggcagttgcctttcgttagatgtgccattgtggggtgag

SEQ ID NO: 293949 - DNA, 120 bp, Artificial Sequence
  ENSG00000131697_62 (sequence is synthesized)
tgacgtacacaccaaccccaaaggccggtgttcagaattcctggcaaggtgaacagtgacaggagctctggtgttagtgaagccacagttagacggggtgggagggcggcccctggtgcc

SEQ ID NO: 293950 - DNA, 120 bp, Artificial Sequence
  ENSG00000131697_63 (sequence is synthesized)
accagctggccggggttttaagcccaagatggcttcagttctgtctgcggaggcagcgcttagggaatagtcgccgtgtgagaggagggacttgcctggtgtggacccaagtcgcggcca

SEQ ID NO: 293951 - DNA, 120 bp, Artificial Sequence
  ENSG00000131697_64 (sequence is synthesized)
cagtcatgtcagggttggttgtggcctcagatttggccgccccggaaccacccatgaccttgggctcccctggctgattgggctgcaggcgcccaggagccccttgcttgcacatcctga

SEQ ID NO: 293952 - DNA, 120 bp, Artificial Sequence
  ENSG00000131697_65 (sequence is synthesized)
ggtgtggtggggctgtgcctgggactcctaggggaagacccggggacctgaatggagggcagttagcctgcatttaggagcgagttcctcaaatcaccagcagtcttccaaaagccccag

SEQ ID NO: 293953 - DNA, 120 bp, Artificial Sequence
  ENSG00000131697_66 (sequence is synthesized)
ggcggtgacaggtaccatcccatagttgggtgggcccgttgtatctttagtagctggagatttagcaaagtttctcctgagtgtgggaaagggtgttgtgcccagggcttttcatggtaa

SEQ ID NO: 293954 - DNA, 120 bp, Artificial Sequence
  ENSG00000131697_67 (sequence is synthesized)
tgttagacagctcagtctcggaaataagtgtgccttcgagtccaagtaacgcgtcacactggctgagcactggttcccatccttgtaccgggcgctgaagtcaaaggcaggccttggatg

SEQ ID NO: 293955 - DNA, 120 bp, Artificial Sequence
  ENSG00000131697_68 (sequence is synthesized)
cacccgcagggctcccctgccttgtcagctccccttggaaataaacacgaccatgcagagaggttgctggtgagagcgtgggacagcccgggggtggatgctgggatttggatgcttatt

SEQ ID NO: 293956 - DNA, 120 bp, Artificial Sequence
  ENSG00000131697_69 (sequence is synthesized)
tatgttgtgaacagaagaaagaagccaattatggagcttgggaaagaaagacctggtttggagaggaagacctgggtttggtgaaaatgtgtttcacagcagggaggctctgaagttttt

SEQ ID NO: 293957 - DNA, 120 bp, Artificial Sequence
  ENSG00000131697_70 (sequence is synthesized)
actcagcctccctgccagcaaggcgttggtgctcaaaggtggatgcagacgcctcggtccctccctaggctcagttcagtctgatggggcgaggaagaggcatggtgagaagacacgggc

SEQ ID NO: 293958 - DNA, 120 bp, Artificial Sequence
  ENSG00000131697_71 (sequence is synthesized)
acagcctgtcagaggttccactcctgaaaagctctgaggatgaaattctgatggaggccccaagtgtgaaaggccagctccaatccccctgcaaaggaacagccagagccttggatgttg

SEQ ID NO: 293959 - DNA, 120 bp, Artificial Sequence
  ENSG00000131697_72 (sequence is synthesized)
gtttgggcagaggctctgcagcctccactgggagggtgcaggctttaacttgaggggaagctggagacccctgcgaagcatgtgggagcagaggtggccatggcgggcaggacaggaggg

SEQ ID NO: 293960 - DNA, 120 bp, Artificial Sequence
  ENSG00000131697_73 (sequence is synthesized)
agggtctgagagcaacagggagaggaccgaaatagcccttgttctaggtgctcgttcccaggaagctggcttggagtgaggactgagtggacgctgcaggtgccaggaggcggttggtag

SEQ ID NO: 293961 - DNA, 120 bp, Artificial Sequence
  ENSG00000131697_74 (sequence is synthesized)
cccgaaggcagaagcacagtgtagggcatgtgggcgacatggaggctgcgtctttatggggatgtagcagggacctgggccgagggggaagtcagcacggctgtcctgctgcacagcatg

SEQ ID NO: 293962 - DNA, 120 bp, Artificial Sequence
  ENSG00000131697_75 (sequence is synthesized)
gtgctgacgtcgaggtcaaggagaaagaacaagaggcggggggtgtcagctactgggacattggcaagaacgaaattaattcccctggaaagagatggctgggtaagcgcaccactgaga

SEQ ID NO: 293963 - DNA, 120 bp, Artificial Sequence
  ENSG00000131697_76 (sequence is synthesized)
gatggctgggtaagcgcgtcactgagagatggctgggtaagcgcgccactgagagatggctgggtaagcgcgccactgagagatggctgggtaagcgcgccactgagagatggctgggta

SEQ ID NO: 293964 - DNA, 120 bp, Artificial Sequence
  ENSG00000131697_77 (sequence is synthesized)
agcgcgccactgagagatggctgggtaagcgcgccactgagagatggctgggtaagcgcgccactgagagatggctgggtaagtgcaccactggcctttctggttgccacctagggcgtg

SEQ ID NO: 293965 - DNA, 120 bp, Artificial Sequence
  ENSG00000131697_78 (sequence is synthesized)
ggaggaggcagccagccttcccatccttcgcagtgacggctgtgagcgtggccgtcagaacctggccttgagggccgaattctcagcacaggtgagcaggcggcttgaccctacagctgc

SEQ ID NO: 293966 - DNA, 120 bp, Artificial Sequence
  ENSG00000131697_79 (sequence is synthesized)
ccagagtgagctttcaagctgcctccagggatggcgctgagccagggaattctgcatttgtgctcgtgcgcagacagtaggaggcggccaacgtgccagtgcctttgccatagttgcttt

SEQ ID NO: 293967 - DNA, 120 bp, Artificial Sequence
  ENSG00000131697_80 (sequence is synthesized)
tggagcttcagttttgaaagagcttacaaagactgaagcagggacagatgaccaagaacagctcgtctgcaggaggtggcaggaaggccagcctggcttggactgagatccggagagagc

SEQ ID NO: 293968 - DNA, 120 bp, Artificial Sequence
  ENSG00000131697_81 (sequence is synthesized)
actcaagatgaccaaaggaacttaagaattaggagaatgtgagttctttgagggcagcagggattgttcgctgctgcgtcaccagctttccatctgtctgtgaagtgaagctcttctaga

SEQ ID NO: 293969 - DNA, 120 bp, Artificial Sequence
  ENSG00000131697_82 (sequence is synthesized)
agttttctagagattgattccaggcagtctgtgatttctaaatctagcctctctctaccaccacatcggggcctttgccctcaacagccctttttgggggctggtctgctgtcccgccaa

SEQ ID NO: 293970 - DNA, 120 bp, Artificial Sequence
  ENSG00000131697_83 (sequence is synthesized)
tgtctttggtgtcgccagctgcgattcagtatctggctttcaggtcctttccaaaatccaggcgctgttccctgggatgtagaggggctgaactcaggtagagcagctcggagacctgcc

SEQ ID NO: 293971 - DNA, 120 bp, Artificial Sequence
  ENSG00000131697_84 (sequence is synthesized)
tggctcccttggtaggacgggcactccctttccagcctcagctcagacccattctagagagacacctccgtcagccagctctggttttgtcaccaggagaacctgggttggacggaggat

SEQ ID NO: 293972 - DNA, 120 bp, Artificial Sequence
  ENSG00000131697_85 (sequence is synthesized)
ctcccagcactgggctcgtccttgaaaacagcagcttctgacgggcaagaggggaaggaacctggcgcagcaggtggatctgctgcagccaaggagggacctggccagtgtggaagtccc

SEQ ID NO: 293973 - DNA, 120 bp, Artificial Sequence
  ENSG00000131697_86 (sequence is synthesized)
tccctcccctagggctgagggtaggcaggagtgaagggatgcagagaggcaggaagcccaggggaaggggttcccgtttttaacagctcccgggaaaatggtgaggacatcccaggcccg

SEQ ID NO: 293974 - DNA, 120 bp, Artificial Sequence
  ENSG00000131697_87 (sequence is synthesized)
agggcactcaacactgcctcgtcggaattaaggaaattgatggcacaagcattttgtgcgtaccctgggtggttcattttgggacacagcttcgttggcggtgctctgcctcgccccttg

SEQ ID NO: 293975 - DNA, 120 bp, Artificial Sequence
  ENSG00000131697_88 (sequence is synthesized)
gggaagtaaaggccacaccgaggttgtgggtcccatccttgcaggagagtgtgccgtgggcaagcacggcttcccccaggacactcaggtttgcaagttgcaagtttgtagggtgccaca

SEQ ID NO: 293976 - DNA, 120 bp, Artificial Sequence
  ENSG00000131697_89 (sequence is synthesized)
cccaccggccgtgagacacgcttgtcccgaggccacaccacttgcttgccaaagccttctgttatgaacacaactctggtgaaggctccagtttatgggggctctttcaccctgggtgtg

SEQ ID NO: 293977 - DNA, 120 bp, Artificial Sequence
  ENSG00000131697_90 (sequence is synthesized)
tgtggagccagacatttgcacgtgtaaatgcacacaggcctatccttgatcaatgtggccatcgagaggccgaggttagagtttgtgaggcagcccgccttgcgacccagagatccagaa

SEQ ID NO: 293978 - DNA, 120 bp, Artificial Sequence
  ENSG00000131697_91 (sequence is synthesized)
gtaagaatccatgtgcagcgaactgtgagtgccacacgctttcattcgtcaccaggaaacggaggctgccactgacacggcaggagaatgaagacctagctgaaagttcgcagcagaacg

SEQ ID NO: 293979 - DNA, 120 bp, Artificial Sequence
  ENSG00000131697_92 (sequence is synthesized)
agctcccacctgtctctcaattgcaaaacattcaaaacagaggcggtggggccttagcgtgtcagggtgtagataggccatttgaaagccacagccgcttatgtggtgggttgatctgtt

SEQ ID NO: 293980 - DNA, 120 bp, Artificial Sequence
  ENSG00000131697_93 (sequence is synthesized)
accttcctcccaaatcctggggacagaatataagaaaatcggactttttcagccaccgggggaaatctttaagtgagaattatctggagagcttttaataaaagccagttcttgggcgtc

SEQ ID NO: 293981 - DNA, 120 bp, Artificial Sequence
  ENSG00000131697_94 (sequence is synthesized)
tttggtttaggcacagcctctttttgccatctggaatcaaagagcttgtgctgacgtgcttgaccgcgaacttggccctgccaccacccactccaggacctcctggcctgacttgcgcac

SEQ ID NO: 293982 - DNA, 120 bp, Artificial Sequence
  ENSG00000131697_95 (sequence is synthesized)
atgcacacagggtgtcgggaggtgggatcatggcaggagtagttttgacttgggactgcagaccttctccactggcatttaagaagtgtgctgtactcgcgaggaataatggcagtgtgg

SEQ ID NO: 293983 - DNA, 120 bp, Artificial Sequence
  ENSG00000131697_96 (sequence is synthesized)
ctgcttgggtgccctgtgtgggtgccggcccagaccttgcttagcggtcccctcctggtggagacctgctgctgcagactcagtccctgcctttgacgatgcccgaccttccccgctcat

SEQ ID NO: 293984 - DNA, 120 bp, Artificial Sequence
  ENSG00000131697_97 (sequence is synthesized)
ggcagtggagggtgagggggtcttggcaacagtggagatacgtgtgctgtctaaggagggacaagaagctgctcacaagcctcgtgcccatcccaacactcagcgtggcctcctcacagg

SEQ ID NO: 293985 - DNA, 120 bp, Artificial Sequence
  ENSG00000131697_98 (sequence is synthesized)
accactggatacagtgttctgacccagcagggccgggtgcatgagtgtttgctcctgtgctgtgtctctcccggatggaagctccagagagcgtctgtcttatctctgtgggggtccccg

SEQ ID NO: 293986 - DNA, 120 bp, Artificial Sequence
  ENSG00000131697_99 (sequence is synthesized)
gtgcagggagtatgtgaggtgtgtgtgcaggtgtgcacttgtgtgcagggggtggtgtgtgaggtgtgcctgcagggggtgtgtcatgcccgggtgcgtgaggccggcatggggtgtgga

SEQ ID NO: 293987 - DNA, 120 bp, Artificial Sequence
  ENSG00000131697_100 (sequence is synthesized)
gtgtgtgtttcagcttttgaccttttggggtcagctctctagggtggtggtcatcgcttaaggtggacttgagatgtccctagaggctcactcacaggatgccatgctggctcttgggat

SEQ ID NO: 293988 - DNA, 120 bp, Artificial Sequence
  ENSG00000131697_101 (sequence is synthesized)
gggctgtgaggactgcaggtgggacctcaggcctttggcttcaggcagagccgggtttccacctgggatctgctgttccctttgttcctggcagcctcagccttctctggcacagtgagg

SEQ ID NO: 293989 - DNA, 120 bp, Artificial Sequence
  ENSG00000131697_102 (sequence is synthesized)
gggtggcagtggtgtctctaagcacaggtgctggtcgcctaatggtgttgcttcctgacctgcttgtgctgttcggttcctgcaggcctctcctgggttgagcaacgagaagggcatgga

SEQ ID NO: 293990 - DNA, 120 bp, Artificial Sequence
  ENSG00000131711_0 (sequence is synthesized)
gcagtggagaggagcggccggagcgagacacttcgccgaggcacagcagccggcaggatggcgaccgtggtggtggaagccaccgagccggagccgtccggcagcatcgccaacccggcg

SEQ ID NO: 293991 - DNA, 120 bp, Artificial Sequence
  ENSG00000131711_1 (sequence is synthesized)
gcgtccacctcgcctagcctgtcgcaccgcttccttgacagcaagttctacttgctggtggtcgtcggcgagatcgtgaccgaggagcacctgcggcgtgccatcggcaacatcgagctc

SEQ ID NO: 293992 - DNA, 120 bp, Artificial Sequence
  ENSG00000131711_2 (sequence is synthesized)
ggaatccgatcatgggacacaaacctgattgaatgcaacttggaccaagaactcaaactttttgtatctcgacactctgcaagattctctcctgaagtcccaggacaaaagatccttcat

SEQ ID NO: 293993 - DNA, 120 bp, Artificial Sequence
  ENSG00000131711_3 (sequence is synthesized)
caccgaagtgacgttttagaaacagtggtcctgatcaacccttctgatgaagcagtcagcaccgaggtgcgcttaatgatcactgatgctgcccgacacaagctgctcgtgctgaccggg

SEQ ID NO: 293994 - DNA, 120 bp, Artificial Sequence
  ENSG00000131711_4 (sequence is synthesized)
cagtgctttgaaaataccggagagctcattctccagtccggctctttctccttccagaacttcatagagattttcaccgatcaagagatcggggagttactaagcaccacccatcctgcc

SEQ ID NO: 293995 - DNA, 120 bp, Artificial Sequence
  ENSG00000131711_5 (sequence is synthesized)
aacaaagccagcttaaccctgttctgtcctgaagaaggggactggaagaactccaatcttgacagacacaatctccaagacttcatcaatattaaactcaattcagcttctatcttgcca

SEQ ID NO: 293996 - DNA, 120 bp, Artificial Sequence
  ENSG00000131711_6 (sequence is synthesized)
gaaatggaaggactttctgagtttaccgagtatctctcagaatcagtggaagtcccatctccctttgacatcttggaacctcccacatcgggtggatttctgaagctctccaagccctgc

SEQ ID NO: 293997 - DNA, 120 bp, Artificial Sequence
  ENSG00000131711_7 (sequence is synthesized)
tgttatatttttccaggagggaggggcgattctgccttgtttgcagtgaatggtttcaatatgctcatcaatggcggatcagagagaaaatcctgcttctggaagctcatccgacactta

SEQ ID NO: 293998 - DNA, 120 bp, Artificial Sequence
  ENSG00000131711_8 (sequence is synthesized)
gaccgagtggactccatcctgctcacccacattggggatgacaatttgcctggaataaacagcatgttacagcggaaaattgcagagctcgaggaagaacagtcccagggctccaccaca

SEQ ID NO: 293999 - DNA, 120 bp, Artificial Sequence
  ENSG00000131711_9 (sequence is synthesized)
aatagtgactggatgaaaaacctcatctcccctgacttaggagttgtatttctcaatgtacctgaaaatctcaaaaatccagagccaaacatcaagatgaagagaagcatagaagaagcc

SEQ ID NO: 294000 - DNA, 120 bp, Artificial Sequence
  ENSG00000131711_10 (sequence is synthesized)
tgcttcactctccagtacctaaacaaattgtccatgaaaccagaacctctgtttagaagtgtaggcaatactattgatcctgtcattcttttccaaaaaatgggagtaggtaaacttgag

SEQ ID NO: 294001 - DNA, 120 bp, Artificial Sequence
  ENSG00000131711_11 (sequence is synthesized)
atgtatgtgcttaatccagtcaagagcagcaaggaaatgcagtattttatgcagcagtggactggtaccaacaaagacaaggctgaattcattctgcctaatggtcaagaagtagatctc

SEQ ID NO: 294002 - DNA, 120 bp, Artificial Sequence
  ENSG00000131711_12 (sequence is synthesized)
ccgatttcctacttaacttcagtctcatctttgattgtgtggcatccagcaaaccctgcggagaaaatcatccgagtcctgtttcctgggaacagcacccagtacaacatcctggaaggg

SEQ ID NO: 294003 - DNA, 120 bp, Artificial Sequence
  ENSG00000131711_13 (sequence is synthesized)
ttggaaaagctcaaacatctagactttctgaagcagccactggccacccaaaaggatctcactggccaggtgcccactcctgtggtgaaacaaacaaaactgaaacagagggctgatagc

SEQ ID NO: 294004 - DNA, 120 bp, Artificial Sequence
  ENSG00000131711_14 (sequence is synthesized)
cgagaaagtctgaagccagccgcaaaaccacttcctagcaaatccgtgcgcaaggagtcaaaagaagaaacccctgaggtcacaaaagtgaatcacgtggaaaagccacccaaagttgaa

SEQ ID NO: 294005 - DNA, 120 bp, Artificial Sequence
  ENSG00000131711_15 (sequence is synthesized)
agcaaagaaaaggtaatggtgaaaaaagacaagccaataaaaacagagaccaaaccttcagtgactgaaaaggaggttcccagcaaagaagagccatctccagtgaaagccgaggtggct

SEQ ID NO: 294006 - DNA, 120 bp, Artificial Sequence
  ENSG00000131711_16 (sequence is synthesized)
gagaagcaagccacagatgtcaaacccaaagctgccaaggagaagacggtgaaaaaggaaacaaaggtaaagcctgaagacaagaaagaggagaaagaaaagccaaagaaagaagtggct

SEQ ID NO: 294007 - DNA, 120 bp, Artificial Sequence
  ENSG00000131711_17 (sequence is synthesized)
aaaaaggaggacaaaacacctatcaagaaggaggaaaaaccaaaaaaggaagaggtgaaaaaagaagtcaaaaaagagatcaagaaagaagagaaaaaagaacccaagaaagaggttaag

SEQ ID NO: 294008 - DNA, 120 bp, Artificial Sequence
  ENSG00000131711_18 (sequence is synthesized)
aaagaaacaccgccaaaggaagtcaagaaggaagttaagaaggaagagaagaaggaagtgaaaaaggaagaaaaggaacccaaaaaagaaattaagaagctccctaaagacgcaaagaaa

SEQ ID NO: 294009 - DNA, 120 bp, Artificial Sequence
  ENSG00000131711_19 (sequence is synthesized)
tcatctactcctctgtctgaagcaaaaaaaccagctgctttaaaaccaaaagtacccaagaaggaagagtctgtcaagaaagattctgttgctgccggaaagccaaaggagaaggggaaa

SEQ ID NO: 294010 - DNA, 120 bp, Artificial Sequence
  ENSG00000131711_20 (sequence is synthesized)
ataaaagtcattaagaaggaaggcaaggccgcagaggctgtcgctgcagctgtcggcactggagccaccacagcagctgtcatggcggcagctggaatagcagccattggccctgccaaa

SEQ ID NO: 294011 - DNA, 120 bp, Artificial Sequence
  ENSG00000131711_21 (sequence is synthesized)
gaactcgaagctgagaggtcccttatgtcatctcctgaggatctaaccaaggactttgaagagttaaaggctgaagaggtcgatgtaacaaaggacatcaagcctcagctggagctaatc

SEQ ID NO: 294012 - DNA, 120 bp, Artificial Sequence
  ENSG00000131711_22 (sequence is synthesized)
gaagacgaagagaaactgaaggaaactgagccagtcgaagcctacgtcatccagaaggagagagaagtcaccaaaggtcctgccgagtcccctgatgagggaatcactaccactgaaggg

SEQ ID NO: 294013 - DNA, 120 bp, Artificial Sequence
  ENSG00000131711_23 (sequence is synthesized)
gagggcgaatgtgaacagacacctgaggagctggagcccgtcgagaagcagggagtagacgacattgaaaaatttgaagatgaaggagccggttttgaagaatcttcagagactggagac

SEQ ID NO: 294014 - DNA, 120 bp, Artificial Sequence
  ENSG00000131711_24 (sequence is synthesized)
tatgaagagaaggcagaaactgaggaggctgaggagccagaagaggatggggaggaacacgtatgtgtgagcgcctccaagcacagccccactgaggatgaggaaagtgccaaggcggag

SEQ ID NO: 294015 - DNA, 120 bp, Artificial Sequence
  ENSG00000131711_25 (sequence is synthesized)
gctgatgcatacatcagggagaagagggagtctgtggccagtggggatgaccgagccgaagaagacatggatgaggccattgagaaaggagaggctgaacaatctgaagaggaggctgat

SEQ ID NO: 294016 - DNA, 120 bp, Artificial Sequence
  ENSG00000131711_26 (sequence is synthesized)
gaggaggacaaagctgaagatgccagagaggaggaatatgagccggaaaaaatggaagctgaagactatgtgatggctgtggtcgacaaggctgcagaggctggtggtgccgaggagcag

SEQ ID NO: 294017 - DNA, 120 bp, Artificial Sequence
  ENSG00000131711_27 (sequence is synthesized)
tatggattcctcaccacaccaaccaagcaactaggagcccagtctcctggccgagaacctgcatcttcaattcatgatgagactttacctggaggctcagagagcgaggccaccgcttct

SEQ ID NO: 294018 - DNA, 120 bp, Artificial Sequence
  ENSG00000131711_28 (sequence is synthesized)
gatgaggagaatcgagaagaccagcctgaggaattcactgccacctctggctacactcagtctactattgagatatccagtgagcccacccccatggatgagatgtctacccctcgagac

SEQ ID NO: 294019 - DNA, 120 bp, Artificial Sequence
  ENSG00000131711_29 (sequence is synthesized)
gtgatgagtgatgagaccaacaatgaagagacggagtccccttctcaggaattcgtaaatatcaccaaatatgaatcttcattgtattctcaggaatactctaaacctgctgatgttaca

SEQ ID NO: 294020 - DNA, 120 bp, Artificial Sequence
  ENSG00000131711_30 (sequence is synthesized)
ccgctcaacggattttctgaaggatcaaaaacagatgccactgatggcaaggattacaatgcttcagcctctaccatatcaccaccctcttccatggaggaagacaaattcagcagatct

SEQ ID NO: 294021 - DNA, 120 bp, Artificial Sequence
  ENSG00000131711_31 (sequence is synthesized)
gctttacgtgatgcttactgctctgaagtgaaagccagcaccactttggacatcaaagatagcatctcagctgtttcaagtgaaaaggtcagcccatcgaagagcccgtccctgagtcca

SEQ ID NO: 294022 - DNA, 120 bp, Artificial Sequence
  ENSG00000131711_32 (sequence is synthesized)
tctccaccatcacccttagaaaagacccccctgggtgaacgtagtgtgaacttctctctgacgcccaatgagattaaagtctctgcagaggcagaagtagccccggtgtctcctgaggtg

SEQ ID NO: 294023 - DNA, 120 bp, Artificial Sequence
  ENSG00000131711_33 (sequence is synthesized)
acccaagaagtagttgaagaacattgtgctagtcctgaggacaagactctggaagtggtgtcaccatctcagtccgtgactggcagtgctggtcacacaccttactatcaatctcctact

SEQ ID NO: 294024 - DNA, 120 bp, Artificial Sequence
  ENSG00000131711_34 (sequence is synthesized)
gacgagaaatccagtcatctccctacagaagtcattgaaaaaccaccagcagttccagtgagttttgaattcagtgatgccaaagatgagaatgaaagggcttcagtaagccccatggat

SEQ ID NO: 294025 - DNA, 120 bp, Artificial Sequence
  ENSG00000131711_35 (sequence is synthesized)
gagcccgtgcctgactcagagtctcctattgaaaaagttttgtctcctttacgcagcccgcccctcattggatccgagtctgcttatgaaagttttctaagtgctgatgacaaggcttct

SEQ ID NO: 294026 - DNA, 120 bp, Artificial Sequence
  ENSG00000131711_36 (sequence is synthesized)
ggcagaggtgccgaaagtccttttgaagaaaagagtggaaaacaaggctctccagaccaagtaagtccagtttctgaaatgacttctactagtctttaccaagacaaacaggaagggaaa

SEQ ID NO: 294027 - DNA, 120 bp, Artificial Sequence
  ENSG00000131711_37 (sequence is synthesized)
agcacagactttgcaccaataaaagaagactttggccaagaaaagaaaactgatgatgttgaagccatgagttctcaaccagcactggctctggatgaaaggaaattaggagatgtttct

SEQ ID NO: 294028 - DNA, 120 bp, Artificial Sequence
  ENSG00000131711_38 (sequence is synthesized)
cccacacaaatagatgtcagtcagtttggatcttttaaagaagacactaagatgtccatttctgaaggtactgtctcagacaagtcagctactcctgttgatgagggcgtagcagaagac

SEQ ID NO: 294029 - DNA, 120 bp, Artificial Sequence
  ENSG00000131711_39 (sequence is synthesized)
acgtactctcatatggagggtgtggcctcagtgtccacagcctcagtggctacgagctcatttccagagccaacaacagatgatgtgtctccatctctgcatgctgaggttggctcccca

SEQ ID NO: 294030 - DNA, 120 bp, Artificial Sequence
  ENSG00000131711_40 (sequence is synthesized)
cattccacagaagtagatgactccctttcagtgtctgttgtgcaaacacctaccacattccaggaaacagaaatgtctccatctaaagaagaatgcccaagaccgatgtcaatttctcca

SEQ ID NO: 294031 - DNA, 120 bp, Artificial Sequence
  ENSG00000131711_41 (sequence is synthesized)
ccagatttctcccctaaaactgcaaagtccaggacacccgttcaagatcacagatctgaacagtcctcaatgtctattgaatttggccaagaatctcctgagcaatcccttgctatggac

SEQ ID NO: 294032 - DNA, 120 bp, Artificial Sequence
  ENSG00000131711_42 (sequence is synthesized)
ttcagtcgacagtctccagatcaccctacagtgggtgcaggcgtgcttcacatcactgaaaatgggccaactgaagtggactacagtccttctgacatgcaggactccagtttatcacat

SEQ ID NO: 294033 - DNA, 120 bp, Artificial Sequence
  ENSG00000131711_43 (sequence is synthesized)
aagataccacctatggaggagccgtcctacacccaagataatgatctttctgagctcatctcagtatctcaggtagaggcctccccgtccacctcttctgctcataccccttctcagatc

SEQ ID NO: 294034 - DNA, 120 bp, Artificial Sequence
  ENSG00000131711_44 (sequence is synthesized)
gcttctcctctccaagaagatactctatccgatgttgctcctcccagagatatgtccttatatgcctcactcacctctgaaaaagtgcaaagtctggaaggagagaagctctctccaaaa

SEQ ID NO: 294035 - DNA, 120 bp, Artificial Sequence
  ENSG00000131711_45 (sequence is synthesized)
tctgatatctctccactcaccccacgagagtcctctcctttatattcacctactttttcagattctacctctgcagtcaaagagaaaacagcaacttgccacagttcctcttctccacca

SEQ ID NO: 294036 - DNA, 120 bp, Artificial Sequence
  ENSG00000131711_46 (sequence is synthesized)
atagatgcagcatccgcagagccctatggcttccgtgcctcagtgttattcgatacaatgcaacaccatctagccttgaatagagatttgtccacacctggcctggagaaggacagtgga

SEQ ID NO: 294037 - DNA, 120 bp, Artificial Sequence
  ENSG00000131711_47 (sequence is synthesized)
gggaagacacctggtgactttagctatgcctatcaaaagcctgaggaaacaaccaggtccccagatgaagaagattatgactatgagtcttatgagaagaccacccggacctcagatgtg

SEQ ID NO: 294038 - DNA, 120 bp, Artificial Sequence
  ENSG00000131711_48 (sequence is synthesized)
ggtggctattactatgagaagatagagagaaccacaaaatctccaagtgacagtggctactcctatgagaccattgggaaaactaccaagacccctgaagatggtgactattcctatgaa

SEQ ID NO: 294039 - DNA, 120 bp, Artificial Sequence
  ENSG00000131711_49 (sequence is synthesized)
gagggtgggtactcatatgacataagtgaaaagaccaccagcccccccgaagtgagtggttacagctatgaaaagactgagaggtctagaaggcttctggatgacatcagcaatggctat

SEQ ID NO: 294040 - DNA, 120 bp, Artificial Sequence
  ENSG00000131711_50 (sequence is synthesized)
gatgactctgaggatggtggccacacacttggggaccccagctactcttatgaaaccactgagaaaattaccagtttccctgagtctgaaggttattcctatgagacatctacaaagaca

SEQ ID NO: 294041 - DNA, 120 bp, Artificial Sequence
  ENSG00000131711_51 (sequence is synthesized)
acacgaacccctgatacttccacatactgttacgagactgcagagaaaatcactagaacccctcaggcatccacatattcctacgagacttcagacctatgctacactgcagaaaagaag

SEQ ID NO: 294042 - DNA, 120 bp, Artificial Sequence
  ENSG00000131711_52 (sequence is synthesized)
tccccctcagaagcccgtcaggatgtcgatttatgcctcgtgtcctcttgtgaatacaagcaccccaagacagagctttcaccctctttcattaatcccaatcctcttgagtggtttgcc

SEQ ID NO: 294043 - DNA, 120 bp, Artificial Sequence
  ENSG00000131711_53 (sequence is synthesized)
agtgaagaacccactgaagaatctgaaaagcccctcactcaatcagggggagccccaccgcctccaggaggaaagcaacagggccgacagtgtgatgaaacccctcccacctcagtcagc

SEQ ID NO: 294044 - DNA, 120 bp, Artificial Sequence
  ENSG00000131711_54 (sequence is synthesized)
gagtcagccccatcccagaccgactctgatgttcccccggagactgaagagtgcccctccatcacggccgatgccaatatcgactctgaagacgagtcggaaaccatccccacagacaaa

SEQ ID NO: 294045 - DNA, 120 bp, Artificial Sequence
  ENSG00000131711_55 (sequence is synthesized)
actgtcacgtacaaacacatggacccacctccagctcccgtgcaagaccgcagcccttcgccacgccaccctgatgtgtccatggtggacccagaggccttggccattgagcagaacctg

SEQ ID NO: 294046 - DNA, 120 bp, Artificial Sequence
  ENSG00000131711_56 (sequence is synthesized)
ggcaaagctctaaagaaagatctgaaagagaagaccaaaaccaaaaagccaggtacaaagaccaagtcatcttcacctgtcaaaaagagtgatgggaagtctaagcccttggcagcttca

SEQ ID NO: 294047 - DNA, 120 bp, Artificial Sequence
  ENSG00000131711_57 (sequence is synthesized)
ccaaaaccagcgggcttgaaagaatcctcggataaagtgtccagggtggcttctcctaagaagaaagaatctgtggaaaaggcagcaaaacccaccaccactcctgaggtcaaagctgca

SEQ ID NO: 294048 - DNA, 120 bp, Artificial Sequence
  ENSG00000131711_58 (sequence is synthesized)
cgtggggaagagaaagacaaggagaccaagaatgctgccaatgcctctgcatccaagtcggccaagaccgccactgcaggaccaggaactaccaagacgaccaagtcatctgctgtgccc

SEQ ID NO: 294049 - DNA, 120 bp, Artificial Sequence
  ENSG00000131711_59 (sequence is synthesized)
ccaggcctccctgtgtatttggacctgtgctacattcctaaccacagcaatagtaagaatgttgatgtggaatttttcaagagagtgcggtcttcctactacgtggtgagtgggaatgac

SEQ ID NO: 294050 - DNA, 120 bp, Artificial Sequence
  ENSG00000131711_60 (sequence is synthesized)
cctgctgctgaggagcccagccgggctgtcctggacgctttgttggaaggaaaggctcagtggggcagcaacatgcaggtgacactgatcccaactcatgactcagaagtgatgagggaa

SEQ ID NO: 294051 - DNA, 120 bp, Artificial Sequence
  ENSG00000131711_61 (sequence is synthesized)
tggtaccaggagacccatgagaaacagcaagatctcaacatcatggttttagcaagcagcagcacagtggttatgcaagatgaatccttccctgcatgcaagattgaactgtaaaaacca

SEQ ID NO: 294052 - DNA, 120 bp, Artificial Sequence
  ENSG00000131711_62 (sequence is synthesized)
aggccagccacaccacaggatctgaactttgtttccagaaattcttcaatttgaaatcaccttttctaaaaagtcaattcatctagttaagtcgctgaacaattacctgccaaatgctat

SEQ ID NO: 294053 - DNA, 120 bp, Artificial Sequence
  ENSG00000131711_63 (sequence is synthesized)
actgtgtcatggtgatgcaagtcactaaatttctcagtttttgctgattgctaagggaaataacagtatttccacaatagggttcaaattcctgcaaaattacctaccccagttcatctc

SEQ ID NO: 294054 - DNA, 120 bp, Artificial Sequence
  ENSG00000131711_64 (sequence is synthesized)
tgctgaacatttggaaaccatgcactagccaacccaactgacttctgctaggtagaggcatttgtcttagagagagagagagcgcgggagagagtgagagagagtgagagcacaaagata

SEQ ID NO: 294055 - DNA, 120 bp, Artificial Sequence
  ENSG00000131711_65 (sequence is synthesized)
acgcaggagagagagagagaaagaatgagaaagaaaaggaatgcaagagaaggagatgtaatgacagagagttctggtgagatacccagagagaaaaagagagagcagggtggggtaagg

SEQ ID NO: 294056 - DNA, 120 bp, Artificial Sequence
  ENSG00000131711_66 (sequence is synthesized)
aggagaaaataaaccaacaattaggtctgcattttctcaggcagtaggcattctttagtctacataggcaaagttttccatttttgtcagtctgagtcatcaaaaagagtcttaattttc

SEQ ID NO: 294057 - DNA, 120 bp, Artificial Sequence
  ENSG00000131711_67 (sequence is synthesized)
taaaacaagttggctagaagaaagtaaaaagaacaacacttgttatgagggcatgtgatattttcacatcttaattaagctccttcagtttgaaggctgcacactgacataatgtagtga

SEQ ID NO: 294058 - DNA, 120 bp, Artificial Sequence
  ENSG00000131711_68 (sequence is synthesized)
gtgtagactggccatgcaagtggtttgggccccattcagaactctcagactctaaacacacaagtagattgatctaaggcatgctcccagcatttgtccacccacttagtccactctgag

SEQ ID NO: 294059 - DNA, 120 bp, Artificial Sequence
  ENSG00000131711_69 (sequence is synthesized)
tcgattaacctgcatgcagcaacacccaagtccaccccaattaactgaagcaaataccaaagcagttgggagtacatatggtagacaatttgccttaggaagtgacttgaatgtacaaag

SEQ ID NO: 294060 - DNA, 120 bp, Artificial Sequence
  ENSG00000131711_70 (sequence is synthesized)
atacttgatgcacttattttttaatgtgagacagcaagtttataaaacatccatataggattatagatacttaaaggaacacgtgggtgagcgtgtgtgggggtactagaagctgatctg

SEQ ID NO: 294061 - DNA, 120 bp, Artificial Sequence
  ENSG00000131711_71 (sequence is synthesized)
attggtccaacagtttgatgctgagtcatgcgtgttgaatcccacttcagtgcacctgtggcctctcagtcaaacaagttgtgcctttcacagcttctttactactgcaagttcaagact

SEQ ID NO: 294062 - DNA, 120 bp, Artificial Sequence
  ENSG00000131711_72 (sequence is synthesized)
gaaatggcttctatgatcagaactgggaaaacagtgaatcttatggtggaagaggttctcagcaagtgtacagtatttaccttcctttgtcttacattggctttttaaattttccattaa

SEQ ID NO: 294063 - DNA, 120 bp, Artificial Sequence
  ENSG00000131711_73 (sequence is synthesized)
tttcaacataattatgggaacaagtgtacagaagaattttttttttaagatatgtgagaacttttcatagatgaactttttaacaaatgttttcatttacaggaaattgcaaagaaaatt

SEQ ID NO: 294064 - DNA, 120 bp, Artificial Sequence
  ENSG00000131711_74 (sequence is synthesized)
ctcaagtgatagtctttttttttaagtgtttcgtaagacaaaaattgaataatgttttttgaagttctggcaagattgaagtctgatattgcagtaatgatatttattaaaaacccataa

SEQ ID NO: 294065 - DNA, 120 bp, Artificial Sequence
  ENSG00000131711_75 (sequence is synthesized)
ctaccaggaataatgatacctcccaccccttgattcccataacataaaagtgctacttgagagtgggggagaatggcatggtaggctacttttcagggccttgacaagtacatcacccag

SEQ ID NO: 294066 - DNA, 120 bp, Artificial Sequence
  ENSG00000131711_76 (sequence is synthesized)
tggtatcctacatacttctttcaagatcttcaaccatgaggtaaaagagccaagttcaaagaaccctagcacaaatttgctttgggattttcttttctggaaaaaaaaaataaaagaaat

SEQ ID NO: 294067 - DNA, 120 bp, Artificial Sequence
  ENSG00000131711_77 (sequence is synthesized)
agtacattgaaaacaaatgaattctcaactcctacggttcatgtagagtttagagaaaatttccatcattgtcatcattgaactgtgaacctgggaagccagatcatgattaacactgac

SEQ ID NO: 294068 - DNA, 120 bp, Artificial Sequence
  ENSG00000131711_78 (sequence is synthesized)
atcaagtttcaagttgcagatcaatgcacccagtgttcagatgaggcaaacttctccgtgacaactgtgctgtgctctgtcacattacatttcctgcagactctaagatctacggagtag

SEQ ID NO: 294069 - DNA, 120 bp, Artificial Sequence
  ENSG00000131711_79 (sequence is synthesized)
agaacaatgacctcattttattttctatgttagttatttatttcaaaattaacattttagttgatttttgtctgataagtctatgttttgcactgctaactatgatgagggtttaaaaaa

SEQ ID NO: 294070 - DNA, 120 bp, Artificial Sequence
  ENSG00000131711_80 (sequence is synthesized)
atgcttcttcagggtcctttcactgaggacctatgcagtctacttaatgctgtgaattacatttttcaaatgtttaattttttaaagaaaattaatattctatttttgttaggcttctct

SEQ ID NO: 294071 - DNA, 120 bp, Artificial Sequence
  ENSG00000131711_81 (sequence is synthesized)
agaaatgcagcttttatttattaccccatttctttcaagtccttggaaaataacatattaagggtacaagaaattaacacatgatggaaaagtcattgtgacgccaatgaatttcattga

SEQ ID NO: 294072 - DNA, 120 bp, Artificial Sequence
  ENSG00000131711_82 (sequence is synthesized)
gtataaactcatctacttcaaatttattttataacacaacctaagatactcaagataattatttaatggttagctcttaagttgaattggtctacataatgcgtgggaagaaaaccagat

SEQ ID NO: 294073 - DNA, 120 bp, Artificial Sequence
  ENSG00000131711_83 (sequence is synthesized)
ttttagccttcttgccaaatccagacctctggttgatttttctttgacagaagatgcaagttattttccaatttcacaattaaatgtatttaacctgaacattattttgctttaaaaact

SEQ ID NO: 294074 - DNA, 120 bp, Artificial Sequence
  ENSG00000131711_84 (sequence is synthesized)
tgtatttaacctgaacattattttgctttaaaaactataaacattgtaggagaattatagccagtcttcagttataaccactccaccctcctcactttctctctctctctctcttttttt

SEQ ID NO: 294075 - DNA, 120 bp, Artificial Sequence
  ENSG00000131711_85 (sequence is synthesized)
atatgtaaaaactgtcactagtcagctggctctttttcctatgaaatctatcagtacctttctccatccgttgttctcaatatgaccacagagcctgagtataccaagaaaaccaatatt

SEQ ID NO: 294076 - DNA, 120 bp, Artificial Sequence
  ENSG00000131711_86 (sequence is synthesized)
cgcattacaggttgctcctgtccttccagacacctttcctgcctgtgtgactaacctaattttgctagttccataaatacacgattagtttagtaacagccatcacaatgtaccatgtac

SEQ ID NO: 294077 - DNA, 120 bp, Artificial Sequence
  ENSG00000131711_87 (sequence is synthesized)
attcatggtgagagctaaagatcgacacagacttctaggagctttgttcatactgattacttaatccaattgtatagattgaatatttgagtggaaggaatttacactctgtttaaatga

SEQ ID NO: 294078 - DNA, 120 bp, Artificial Sequence
  ENSG00000131711_88 (sequence is synthesized)
tgggattctatcgagatagcactcatgatcatgacctttttggtagtattcttaaacaaaattctacagagactaaatgttagcgatgatcctccattttcaattttaaccaattctgtc

SEQ ID NO: 294079 - DNA, 120 bp, Artificial Sequence
  ENSG00000131711_89 (sequence is synthesized)
ccctttctcaaaaccctgagccctgtgcatgctttctcagtcttgtggtgggactggatacaatgactaacttcccctcctcccctctttaaacaccattttccatggagttcaaaaaaa

SEQ ID NO: 294080 - DNA, 120 bp, Artificial Sequence
  ENSG00000131711_90 (sequence is synthesized)
ttttttttcttaacgttacatatcatagtgaatggtttccccagtgtatatgaatgttttaagtgtctccaatagcttatgcagtctaggagctttccaatactcatttaattaagattt

SEQ ID NO: 294081 - DNA, 120 bp, Artificial Sequence
  ENSG00000131711_91 (sequence is synthesized)
aatcatttgctaatggaaatcttaccacctttcattttccctctgttaccaaatttcagctcttaggagctgctctacaattctgaatttgcttttcttgcctctctttagtcacctgtc

SEQ ID NO: 294082 - DNA, 120 bp, Artificial Sequence
  ENSG00000131711_92 (sequence is synthesized)
acaggaggttcctgctcagtaatgatattgtgagttaggataataactttttttttttgtgcttcagatttagaagaaaagatcctgtttccatttgaaaggaactgtaagcttttatct

SEQ ID NO: 294083 - DNA, 120 bp, Artificial Sequence
  ENSG00000131711_93 (sequence is synthesized)
tttaaccaactgaacaatacaccaaaagcagcctagggatgagcatttctttgaaagcaattaggttattcacctggtattaaaactatttactgttaaaaaatctgtgacttcatgaag

SEQ ID NO: 294084 - DNA, 120 bp, Artificial Sequence
  ENSG00000131711_94 (sequence is synthesized)
ttgatttttaaaggcagcatcaaaaactgaaaaggaagggaaaaaataggcagcttctctgcacttgtttggagctccccaaaacaggagccatggagaagtggcatcaagaccgggctg

SEQ ID NO: 294085 - DNA, 120 bp, Artificial Sequence
  ENSG00000131711_95 (sequence is synthesized)
ccctttcgagaacaccctgtggcagttcagagacacgcttttcctacactgcatgcagcccctctttccagcactggaaagaagtggtcttgagcccagctgagaagcacttcacactcc

SEQ ID NO: 294086 - DNA, 120 bp, Artificial Sequence
  ENSG00000131711_96 (sequence is synthesized)
tctctcttgttctgaatggtgtttgtgtcagtctgcagctgtgtatggtattatgtcttataatcctgcatcacttctatcctatccagtcatatctaatgtagaaaattagtttccagt

SEQ ID NO: 294087 - DNA, 120 bp, Artificial Sequence
  ENSG00000131711_97 (sequence is synthesized)
gaaagtaatatgtagtgcttttatgatatttgtgtgcaatatcccctcttccattgaggatatttgatgtaaaggaaaaaaaaaaactcagttccacaataaaatacaaaagtggcaaaa

SEQ ID NO: 294088 - DNA, 120 bp, Artificial Sequence
  ENSG00000131711_98 (sequence is synthesized)
gtgaggatgtgccgggtggtcctttcctcctcctcttcctcctcctcccggctccctgcctagtctccatataaaagcggcgcgcggcgccagaggaggggggacgcagggggcggagcg

SEQ ID NO: 294089 - DNA, 120 bp, Artificial Sequence
  ENSG00000131711_99 (sequence is synthesized)
aagtcccaggtgaggcttccgctcagtgttggtcagcctagaattccaaaggacaaggagcaagctagaaagctttgtctgaggcagcaaaaagactctcttattgctaaaaggatactt

SEQ ID NO: 294090 - DNA, 120 bp, Artificial Sequence
  ENSG00000131711_100 (sequence is synthesized)
tgtatttgttattatcaactaggttagccagcagccacagtttaggaagtcactctaggttatcactgtgtgggttatctattttgtggattcttaatgagtttttaagttctagggttg

SEQ ID NO: 294091 - DNA, 120 bp, Artificial Sequence
  ENSG00000131711_101 (sequence is synthesized)
agatgctggggcggcccagccccaggttacgtcgtccccagaaagaatctggccaacagtctggccgtgacaagagctggaagcttctctctctccctttaaatcccctccttcattcaa

SEQ ID NO: 294092 - DNA, 120 bp, Artificial Sequence
  ENSG00000131711_102 (sequence is synthesized)
atccgatcctataaaaaggcttttgttgaaggagcagccatggcatcttggtgcacgtctgtgccattcctctcaatatttccaaagatggacaaaagagaacatcgttagttgaattcc

SEQ ID NO: 294093 - DNA, 120 bp, Artificial Sequence
  ENSG00000131721_0 (sequence is synthesized)
ggatacactgttgctgagtctagacaccagaagaacgttgcaggcggcgactcacagttctagcactgcctaggagagcgtggtggccccagctcagaatctgcagaagtgcacagctcc

SEQ ID NO: 294094 - DNA, 120 bp, Artificial Sequence
  ENSG00000131721_1 (sequence is synthesized)
atccacaccactcagggtatggagcctccggaccagtgtagccagtatatgaccagcttgctcagccctgcagtcgacgacgagaaagaactacaggatatgaatgctatggtgctgtcg

SEQ ID NO: 294095 - DNA, 120 bp, Artificial Sequence
  ENSG00000131721_2 (sequence is synthesized)
cttactgaagaggtcaaagaggaggaagaggatgcacagcctgagcctgagcaaggcacagcagcaggagaaaagttaaagtcggcaggagcccaaggcggagaagaaaaagatggcggc

SEQ ID NO: 294096 - DNA, 120 bp, Artificial Sequence
  ENSG00000131721_3 (sequence is synthesized)
ggagaagaaaaagatggcggcggcgccggagttcctggccacctatgggaaggagacctcgagggcaccagcggcagcgatggcaacgttgaggacagcgaccagagcgagaaggaacct

SEQ ID NO: 294097 - DNA, 120 bp, Artificial Sequence
  ENSG00000131721_4 (sequence is synthesized)
gggcagcagtattcgcgcccacagggcgccgtcggggggctggagcctggcaacgcgcagcagcccaacgtccacgccttcaccccattgcagctgcaggagctggagcgcattttccaa

SEQ ID NO: 294098 - DNA, 120 bp, Artificial Sequence
  ENSG00000131721_5 (sequence is synthesized)
cgcgagcagttccccagtgagttcctgcgaaggaggctggcaagaagcatgaatgtgactgaactcgcagtgcagatttggtttgagaatagaagagccaaatggaggagacatcagagg

SEQ ID NO: 294099 - DNA, 120 bp, Artificial Sequence
  ENSG00000131721_6 (sequence is synthesized)
gcattaatggcaagaaacatgctgcccttcatggcagtgggccagcctgtcatggtaaccgcagctgaggccataacggcacccttgttcatcagcgggatgagagatgattacttctgg

SEQ ID NO: 294100 - DNA, 120 bp, Artificial Sequence
  ENSG00000131721_7 (sequence is synthesized)
gaccacagccattccagcagcctgtgtttccccatgccaccctttcctcctccgtccttgccccttccactcatgcttcttccacctatgccacccgctggccaggctgaatttggccca

SEQ ID NO: 294101 - DNA, 120 bp, Artificial Sequence
  ENSG00000131721_8 (sequence is synthesized)
ttcccttttgttatcgtgccttctttcacattccccaatgtctaagggatagcctctgtgccactttttgccagagtgtctttgagccagattcatattttgcatagcaccccatcaaaa

SEQ ID NO: 294102 - DNA, 120 bp, Artificial Sequence
  ENSG00000131721_9 (sequence is synthesized)
gtagttcatcaaatgtctattaaacgttttaaagaaaagtacatcattgacccatttttagggcacttgtaaaaatgtttctataaatatgtgaagggtatgtacatttgttttgtgtgt

SEQ ID NO: 294103 - DNA, 120 bp, Artificial Sequence
  ENSG00000131721_10 (sequence is synthesized)
cacatggggtcagtaagttctcaataaaaattgttaagaaatgccattcaaaccgaatgtcacggactctcgtctcatgcagtaatcttgagtcaccatctgggggctgtgcatgtcaca

SEQ ID NO: 294104 - DNA, 120 bp, Artificial Sequence
  ENSG00000131721_11 (sequence is synthesized)
ctgcccccattgataccaggtacatgtgcaggatggggtggtgtgagtccctaatgagagaatagtgtgtttcaagttactgccagggtggaaaacagcaaaaccaaaatggtatcggga

SEQ ID NO: 294105 - DNA, 120 bp, Artificial Sequence
  ENSG00000131721_12 (sequence is synthesized)
aggaagccatgcccactcttaaaaattcattaagttttttcttgctatggaagacttctttaaagtaattttcttgtaaaagtgtaagtgtaaataatgccatgaaattatacacttatt

SEQ ID NO: 294106 - DNA, 120 bp, Artificial Sequence
  ENSG00000131721_13 (sequence is synthesized)
taatggctaaaatggcaaatttttatatggtttaccacaacaaaagaaaagaaaaaatataccaaaaagtttttaaaaagtgatcatgaacattgtggtcatcctgtgaagtgattgcaa

SEQ ID NO: 294107 - DNA, 120 bp, Artificial Sequence
  ENSG00000131721_14 (sequence is synthesized)
tgcctgcagataaggagtgatggttacaacagtattttctctgaaaattatttgatggccagtttcataatgattatgttttcagcctgaaggaaaattccattttcttgggtgagcatg

SEQ ID NO: 294108 - DNA, 120 bp, Artificial Sequence
  ENSG00000131721_15 (sequence is synthesized)
aactttctgtcaggctgtctgctgcttttcattccccacttctctcttcacaattgtgggtgtcaagcttcagccacgcaattgcatttggtgtgagggttttgcaaggagaaggaggtt

SEQ ID NO: 294109 - DNA, 120 bp, Artificial Sequence
  ENSG00000131721_16 (sequence is synthesized)
tattcatacccctgaagccacaagccttggtgggaataaggaaagtccatgaattcactatgcattaatgcatgcctcttggccaagtggattcttttttcttctccgattgagattttc

SEQ ID NO: 294110 - DNA, 120 bp, Artificial Sequence
  ENSG00000131721_17 (sequence is synthesized)
tttttttttttttttttgctcttgttctcattgtattgtgctttgtataattatttacagtaagtcgcgcatgtcagtgtacattccgtctggaaattgtttccatttggtacattttgt

SEQ ID NO: 294111 - DNA, 120 bp, Artificial Sequence
  ENSG00000131721_18 (sequence is synthesized)
cattttgtgccagtcggtctattcctgctcattattttgttttttctacattcagactgaaacatttggtagcctagagatactcagaaataggcaaagaaaggtaaaaggggaggaggg

SEQ ID NO: 294112 - DNA, 120 bp, Artificial Sequence
  ENSG00000131721_19 (sequence is synthesized)
gagattgaaatcatacttccattatccctccccgtggttatcagattcataaaatttttacaccatcaaaagacatttttagccatatatgtttcctttatgtagaaaatgagatctcct

SEQ ID NO: 294113 - DNA, 120 bp, Artificial Sequence
  ENSG00000131721_20 (sequence is synthesized)
atactcagttggcatttgttttcatgtatctgataagtacctgttagaattataggtcaagatgttgtctagctctggtaacctagatcctgaacttcaaagcagagttcttggacctta

SEQ ID NO: 294114 - DNA, 120 bp, Artificial Sequence
  ENSG00000131721_21 (sequence is synthesized)
agaaattcaaattcgtagaattatagttaggatgtcatttactgaccttgaacaacacattgtttaggtagcatacaatgggactagttcaaggggctgggtggagaacaagttacaatt

SEQ ID NO: 294115 - DNA, 120 bp, Artificial Sequence
  ENSG00000131721_22 (sequence is synthesized)
ttttctgatggagaacattactggagacagtaccctttaaaactttcattccctttttattagcagctaacgtcttgtatgcctttactatgtgacaagcaataaaataatgtccttgga

SEQ ID NO: 294116 - DNA, 120 bp, Artificial Sequence
  ENSG00000131724_0 (sequence is synthesized)
agaggctgcatggagtggccggcgcggctctgcgggctgtgggcgctgctgctctgcgccggcggcgggggcgggggcgggggcgccgcgcctacggaaactcagccacctgtgacaaat

SEQ ID NO: 294117 - DNA, 120 bp, Artificial Sequence
  ENSG00000131724_1 (sequence is synthesized)
gaaactcagccacctgtgacaaatttgagtgtctctgttgaaaacctctgcacagtaatatggacatggaatccacccgagggagccagctcaaattgtagtctatggtattttagtcat

SEQ ID NO: 294118 - DNA, 120 bp, Artificial Sequence
  ENSG00000131724_2 (sequence is synthesized)
tttggcgacaaacaagataagaaaatagctccggaaactcgtcgttcaatagaagtacccctgaatgagaggatttgtctgcaagtggggtcccagtgtagcaccaatgagagtgagaag

SEQ ID NO: 294119 - DNA, 120 bp, Artificial Sequence
  ENSG00000131724_3 (sequence is synthesized)
cctagcattttggttgaaaaatgcatctcacccccagaaggtgatcctgagtctgctgtgactgagcttcaatgcatttggcacaacctgagctacatgaagtgttcttggctccctgga

SEQ ID NO: 294120 - DNA, 120 bp, Artificial Sequence
  ENSG00000131724_4 (sequence is synthesized)
aggaataccagtcccgacactaactatactctctactattggcacagaagcctggaaaaaattcatcaatgtgaaaacatctttagagaaggccaatactttggttgttcctttgatctg

SEQ ID NO: 294121 - DNA, 120 bp, Artificial Sequence
  ENSG00000131724_5 (sequence is synthesized)
accaaagtgaaggattccagttttgaacaacacagtgtccaaataatggtcaaggataatgcaggaaaaattaaaccatccttcaatatagtgcctttaacttcccgtgtgaaacctgat

SEQ ID NO: 294122 - DNA, 120 bp, Artificial Sequence
  ENSG00000131724_6 (sequence is synthesized)
cctccacatattaaaaacctctccttccacaatgatgacctatatgtgcaatgggagaatccacagaattttattagcagatgcctattttatgaagtagaagtcaataacagccaaact

SEQ ID NO: 294123 - DNA, 120 bp, Artificial Sequence
  ENSG00000131724_7 (sequence is synthesized)
gagacacataatgttttctacgtccaagaggctaaatgtgagaatccagaatttgagagaaatgtggagaatacatcttgtttcatggtccctggtgttcttcctgatactttgaacaca

SEQ ID NO: 294124 - DNA, 120 bp, Artificial Sequence
  ENSG00000131724_8 (sequence is synthesized)
gtcagaataagagtcaaaacaaataagttatgctatgaggatgacaaactctggagtaattggagccaagaaatgagtataggtaagaagcgcaattccacactctacataaccatgtta

SEQ ID NO: 294125 - DNA, 120 bp, Artificial Sequence
  ENSG00000131724_9 (sequence is synthesized)
ctcattgttccagtcatcgtcgcaggtgcaatcatagtactcctgctttacctaaaaaggctcaagattattatattccctccaattcctgatcctggcaagatttttaaagaaatgttt

SEQ ID NO: 294126 - DNA, 120 bp, Artificial Sequence
  ENSG00000131724_10 (sequence is synthesized)
ggagaccagaatgatgatactctgcactggaagaagtacgacatctatgagaagcaaaccaaggaggaaaccgactctgtagtgctgatagaaaacctgaagaaagcctctcagtgatgg

SEQ ID NO: 294127 - DNA, 120 bp, Artificial Sequence
  ENSG00000131724_11 (sequence is synthesized)
agataatttatttttaccttcactgtgaccttgagaagattcttcccattctccatttgttatctgggaacttattaaatggaaactgaaactactgcaccatttaaaaacaggcagctc

SEQ ID NO: 294128 - DNA, 120 bp, Artificial Sequence
  ENSG00000131724_12 (sequence is synthesized)
ataagagccacaggtctttatgttgagtcgcgcaccgaaaaactaaaaataatgggcgctttggagaagagtgtggagtcattctcattgaattataaaagccagcaggcttcaaactag

SEQ ID NO: 294129 - DNA, 120 bp, Artificial Sequence
  ENSG00000131724_13 (sequence is synthesized)
gggacaaagcaaaaagtgatgatagtggtggagttaatcttatcaagagttgtgacaacttcctgagggatctatacttgctttgtgttctttgtgtcaacatgaacaaattttatttgt

SEQ ID NO: 294130 - DNA, 120 bp, Artificial Sequence
  ENSG00000131724_14 (sequence is synthesized)
aggggaactcatttggggtgcaaatgctaatgtcaaacttgagtcacaaagaacatgtagaaaacaaaatggataaaatctgatatgtattgtttgggatcctattgaaccatgtttgtg

SEQ ID NO: 294131 - DNA, 84 bp, Artificial Sequence
  ENSG00000131724_15 (sequence is synthesized)
tgatatgtattgtttgggatcctattgaaccatgtttgtggctattaaaactcttttaacagtctgggctgggtctccgaggcg

SEQ ID NO: 294132 - DNA, 65 bp, Artificial Sequence
  ENSG00000131724_16 (sequence is synthesized)
tgaccaaaatggtgaaacctcctctctactaaaactacaaaaattatgaattgtttgaacctggg

SEQ ID NO: 294133 - DNA, 120 bp, Artificial Sequence
  ENSG00000131724_17 (sequence is synthesized)
aacaaaacaaaacaaaacaaaaaaacctcttaatattctggagtcatcattcccttcgacagcattttcctctgctttgaaagccccagaaatcagtgttggccatgatgacaactacag

SEQ ID NO: 294134 - DNA, 120 bp, Artificial Sequence
  ENSG00000131724_18 (sequence is synthesized)
aagccccagaaatcagtgttggccatgatgacaactacagaaaaaccagaggcagcttctttgccaagacctttcaaagccattttaggctgttaggggcagtggaggtagaatgactcc

SEQ ID NO: 294135 - DNA, 120 bp, Artificial Sequence
  ENSG00000131724_19 (sequence is synthesized)
ttgggtattagagtttcaaccatgaagtctctaacaatgtattttcttcacctctgctactcaagtagcatttactgtgtctttggtttgtgctaggcccccgggtgtgaagcacagacc

SEQ ID NO: 294136 - DNA, 120 bp, Artificial Sequence
  ENSG00000131724_20 (sequence is synthesized)
ccttccaggggtttacagtctatttgagactcctcagttcttgccacttttttttttaatctccaccagtcatttttcagaccttttaactcctcaattccaacactgatttcccctttt

SEQ ID NO: 294137 - DNA, 120 bp, Artificial Sequence
  ENSG00000131724_21 (sequence is synthesized)
gcattctccctccttcccttccttgtagccttttgactttcattggaaattaggatgtaaatctgctcaggagacctggaggagcagaggataattagcatctcaggttaagtgtgagta

SEQ ID NO: 294138 - DNA, 120 bp, Artificial Sequence
  ENSG00000131724_22 (sequence is synthesized)
atctgagaaacaatgactaattcttgcatattttgtaacttccatgtgagggttttcagcattgatatttgtgcattttctaaacagagatgaggtggtatcttcacgtagaacattggt

SEQ ID NO: 294139 - DNA, 120 bp, Artificial Sequence
  ENSG00000131724_23 (sequence is synthesized)
attcgcttgagaaaaaaagaatagttgaacctatttctctttctttacaagatgggtccaggattcctcttttctctgccataaatgattaattaaatagcttttgtgtcttacattggt

SEQ ID NO: 294140 - DNA, 120 bp, Artificial Sequence
  ENSG00000131724_24 (sequence is synthesized)
agccagccagccaaggctctgtttatgcttttggggggcatatattgggttccattctcacctatccacacaacatatccgtatatatcccctctactcttacttcccccaaatttaaag

SEQ ID NO: 294141 - DNA, 120 bp, Artificial Sequence
  ENSG00000131724_25 (sequence is synthesized)
aagtatgggaaatgagaggcatttcccccaccccatttctctcctcacacacagactcatattactggtaggaacttgagaactttatttccaagttgttcaaacatttaccaatcatat

SEQ ID NO: 294142 - DNA, 120 bp, Artificial Sequence
  ENSG00000131724_26 (sequence is synthesized)
taatacaatgatgctatttgcaattcctgctcctaggggaggggagataagaaaccctcactctctacaggtttgggtacaagtggcaacctgcttccatggccgtgtagaagcatggtg

SEQ ID NO: 294143 - DNA, 120 bp, Artificial Sequence
  ENSG00000131724_27 (sequence is synthesized)
ccctggcttctctgaggaagctggggttcatgacaatggcagatgtaaagttattcttgaagtcagattgaggctgggagacagccgtagtagatgttctactttgttctgctgttctct

SEQ ID NO: 294144 - DNA, 120 bp, Artificial Sequence
  ENSG00000131724_28 (sequence is synthesized)
agaaagaatatttggttttcctgtataggaatgagattaattcctttccaggtattttataattctgggaagcaaaacccatgcctccccctagccatttttactgttatcctatttaga

SEQ ID NO: 294145 - DNA, 120 bp, Artificial Sequence
  ENSG00000131724_29 (sequence is synthesized)
tggccatgaagaggatgctgtgaaattcccaacaaacattgatgctgacagtcatgcagtctgggagtggggaagtgatcttttgttcccatcctcttcttttagcagtaaaatagctga

SEQ ID NO: 294146 - DNA, 120 bp, Artificial Sequence
  ENSG00000131724_30 (sequence is synthesized)
gggaaaagggagggaaaaggaagttatgggaatacctgtggtggttgtgatccctaggtcttgggagctcttggaggtgtctgtatcagtggatttcccatcccctgtgggaaattagta

SEQ ID NO: 294147 - DNA, 120 bp, Artificial Sequence
  ENSG00000131724_31 (sequence is synthesized)
ggctcatttactgttttaggtctagcctatgtggattttttcctaacatacctaagcaaacccagtgtcaggatggtaattcttattctttcgttcagttaagtttttcccttcatctgg

SEQ ID NO: 294148 - DNA, 120 bp, Artificial Sequence
  ENSG00000131724_32 (sequence is synthesized)
gcactgaagggatatgtgaaacaatgttaacatttttggtagtcttcaaccagggattgtttctgtttaacttcttataggaaagcttgagtaaaataaatattgtctttttgtatgtca

SEQ ID NO: 294149 - DNA, 120 bp, Artificial Sequence
  ENSG00000131724_33 (sequence is synthesized)
agcaaacaagggctcagaggtcaagggctggaagccaggtctccagactcccaggccaaggctcttttccgcagatgactctgtcctggtgtccagcagggcacagcccctagcacctcc

SEQ ID NO: 294150 - DNA, 120 bp, Artificial Sequence
  ENSG00000131724_34 (sequence is synthesized)
gaggccccgcaagtgtgctggcagcggcgacgccggctccgccacgcggagggaggaggcccaggcagcgcccggagtgggcggcgacgtggtggaagaagttttgttcgatgggatttt

SEQ ID NO: 294151 - DNA, 120 bp, Artificial Sequence
  ENSG00000131724_35 (sequence is synthesized)
gttttctacgtaaggttttaaaattattgtttttatttggctatttttcttttacttgaatttcttacattgaaatatcaatgaaacatagctcttacatttgtcaccttatgatgatga

SEQ ID NO: 294152 - DNA, 120 bp, Artificial Sequence
  ENSG00000131724_36 (sequence is synthesized)
tggtaatgaaacttcttgtctaaaataaggcatggtggaagatttgaagatttatggtatgatagtatcagctgcaagtttcaagccatttattcatctgtaagcttcttagaaaggcct

SEQ ID NO: 294153 - DNA, 120 bp, Artificial Sequence
  ENSG00000131725_0 (sequence is synthesized)
ggtattttgcgggcaactagctcttccagctgctgtaaattgctgctgcgggagaaactggagccgctgtagccggcgcgcccttcttcccttactgcgaggagccaccgcctctttcgc

SEQ ID NO: 294154 - DNA, 120 bp, Artificial Sequence
  ENSG00000131725_1 (sequence is synthesized)
gctccttatacacctatcactgggagcggtggcagcaacattccctggaccaaccgccgcctcttcaggcggccgctttgccggtcattcccgaagcccggcaactgagggcggccccct

SEQ ID NO: 294155 - DNA, 120 bp, Artificial Sequence
  ENSG00000131725_2 (sequence is synthesized)
ttccttaacagtctcctcgctacagatcgtctgctccctcagcctcgcccgagacccacttccccagtctcgcccgggtggaggtcgacgaggaggagacaagagtcacccttcctccag

SEQ ID NO: 294156 - DNA, 120 bp, Artificial Sequence
  ENSG00000131725_3 (sequence is synthesized)
gcggcgccggccccctcacccgcgggtgtgtcctataaatggcgtcggaaagcgacaccgaggaattctatgatgcccctgaagatgtgcacctagggggcggctaccccgtggggtctc

SEQ ID NO: 294157 - DNA, 120 bp, Artificial Sequence
  ENSG00000131725_4 (sequence is synthesized)
caggaaaagttgggctttcaacattcaaggaaacagagaacactgcatacaaagttggaaatgagtcccctgtacaagaattgaaacaagatgtgtctaaaaagattattgaaagtatta

SEQ ID NO: 294158 - DNA, 120 bp, Artificial Sequence
  ENSG00000131725_5 (sequence is synthesized)
ttgaggagagtcagaaagtactacagcttgaagatgactctttggattccaaaggaaaagaactctctgatcaagctactgccagtcctattgtggctagaacagatctgagcaatatac

SEQ ID NO: 294159 - DNA, 120 bp, Artificial Sequence
  ENSG00000131725_6 (sequence is synthesized)
ccggactgttagccatagatcaagtactaccggaagaatcccaaaaggcagagagtcagaatacatttgaagagactgaattagaattaaaaaaatgctttccttctgatgaaacctgtg

SEQ ID NO: 294160 - DNA, 120 bp, Artificial Sequence
  ENSG00000131725_7 (sequence is synthesized)
agaaaccagtagatgaaaccacgaagttaactcaaacaagttcaactgagcagcttaatgtgcttgaaactgaaacagaagtattgaacaaggaagcagtggaagtcaaaggaggtggtg

SEQ ID NO: 294161 - DNA, 120 bp, Artificial Sequence
  ENSG00000131725_8 (sequence is synthesized)
atgttttagagcctgtgtcctcagactccttatctactaaagattttgccgctgtggaagaagtggcccctgccaaacccccaagacaccttactccagagcctgatatagtggctagta

SEQ ID NO: 294162 - DNA, 120 bp, Artificial Sequence
  ENSG00000131725_9 (sequence is synthesized)
caaagaagcctgttccagcacgcccacctcctccaactaatttcccacctcctagacccccacctccttctcgacctgctccaccaccaagaaaaaggaaaagcgaattggaatttgaga

SEQ ID NO: 294163 - DNA, 120 bp, Artificial Sequence
  ENSG00000131725_10 (sequence is synthesized)
ctctgaaaactcctgatatagatgttcccaaagagaatattacgtctgattctctcctaaccgcaagcatggcttcagaaagtacggttaaggattctcagccttctcttgatttggcaa

SEQ ID NO: 294164 - DNA, 120 bp, Artificial Sequence
  ENSG00000131725_11 (sequence is synthesized)
gtgctaccagtggagataaaatagttaccgcccaggaaaatggaaaagcacctgatgggcagactgtagcaggtgaagtgatgggccctcagagacctagatccaactctgggagagagc

SEQ ID NO: 294165 - DNA, 120 bp, Artificial Sequence
  ENSG00000131725_12 (sequence is synthesized)
ttactgatgaggaaattttagccagtgtaatgattaagaacctggatactggagaagaaatacctttgagtcttgcagaagagaaactaccaacaggcattaatcctctcactctacaca

SEQ ID NO: 294166 - DNA, 120 bp, Artificial Sequence
  ENSG00000131725_13 (sequence is synthesized)
tcatgagaaggacaaaagaatatgtaagtaatgacgcggcacagtcagatgatgaagagaagttacagtctcagccaacagatactgatggtggaaggttaaaacagaaaacgactcaac

SEQ ID NO: 294167 - DNA, 120 bp, Artificial Sequence
  ENSG00000131725_14 (sequence is synthesized)
taaagaagtttcttggaaaatcagtaaagagagcaaagcaccttgctgaggaatatggtgaacgtgctataaataaagttaaaagtgttagagatgaagtgtttcatactgatcaagatg

SEQ ID NO: 294168 - DNA, 120 bp, Artificial Sequence
  ENSG00000131725_15 (sequence is synthesized)
atccttcatcaagtgatgatgaaggaatgccatacacaagaccagttaaattcaaagcagcacacggtttcaaaggaccttatgattttgatcagatcaaagtggtgcaagatcttagtg

SEQ ID NO: 294169 - DNA, 120 bp, Artificial Sequence
  ENSG00000131725_16 (sequence is synthesized)
gtgaacatatgggagctgtttggaccatgaaattttctcactgtggccgattacttgcctcagctggacaagacaatgtagtgagaatatgggctttaaaaaatgcttttgactatttca

SEQ ID NO: 294170 - DNA, 120 bp, Artificial Sequence
  ENSG00000131725_17 (sequence is synthesized)
tgtgtccccatcaccctctcaggaaagtctaagttcatcaaaatcggatacagatacaggggtatgcagtggaactgatgaagaccctgatgataaaaacgcaccctttcggcaacggcc

SEQ ID NO: 294171 - DNA, 120 bp, Artificial Sequence
  ENSG00000131725_18 (sequence is synthesized)
attttgcaaatataaaggacatactgctgatctccttgatctttcatggtctaaaaactactttcttctttcttcttcaatggataaaacagtcagattatggcacatttctcgaagaga

SEQ ID NO: 294172 - DNA, 120 bp, Artificial Sequence
  ENSG00000131725_19 (sequence is synthesized)
atgcctttgctgttttcaacatatagattttgtcactgccatagcttttcatccaagagatgacaggtattttctaagtgggtctttggatggaaagctccgcctttggaacatacctga

SEQ ID NO: 294173 - DNA, 120 bp, Artificial Sequence
  ENSG00000131725_20 (sequence is synthesized)
caaaaaagtggctttgtggaatgaagtagatggtcagacaaaattgatcacagctgcaaatttctgtcagaatggcaaatatgcagtgattgggacatatgatggcagatgtattttcta

SEQ ID NO: 294174 - DNA, 120 bp, Artificial Sequence
  ENSG00000131725_21 (sequence is synthesized)
tgatacagagcatttgaaataccatacacaaatacatgtccgatctactagagggcgcaacaaggttggaagaaaaattactggcattgagcctttacctggagaaaataagatattggt

SEQ ID NO: 294175 - DNA, 120 bp, Artificial Sequence
  ENSG00000131725_22 (sequence is synthesized)
aacctcaaatgactccagaatcagactatatgatttgagagatttgtcactatccatgaagtataagggttacgtcaatagcagcagccagatcaaagcaagtttcagccatgattttac

SEQ ID NO: 294176 - DNA, 120 bp, Artificial Sequence
  ENSG00000131725_23 (sequence is synthesized)
ttacctcgttagtggttcagaagataagtatgtttatatctggagtacctaccatgacctaagcaagtttacttcagtcaggagagatcgtaatgacttctgggaaggtattaaagccca

SEQ ID NO: 294177 - DNA, 120 bp, Artificial Sequence
  ENSG00000131725_24 (sequence is synthesized)
caatgcagttgttacatcagccatctttgcaccaaacccaagtttgatgttatctttggatgtgcaatctgaaaaatcagaagggaacgagaaaagtgaagatgctgaagttttggatgc

SEQ ID NO: 294178 - DNA, 120 bp, Artificial Sequence
  ENSG00000131725_25 (sequence is synthesized)
cacaccttctggtattatgaagacagataacacagaagttcttctctctgctgacttcactggagcaatcaaagtgtttgttaataaaagaaaaaatgtatcttaatttgaaatggcatt

SEQ ID NO: 294179 - DNA, 120 bp, Artificial Sequence
  ENSG00000131725_26 (sequence is synthesized)
ataaacatatcagtaagtttctatatgtatcaaaactgaaaaaatagtgttccaggctaacatacttttttaatttttattgaaagttgttcaaatataatatattttttgagaggcagt

SEQ ID NO: 294180 - DNA, 120 bp, Artificial Sequence
  ENSG00000131725_27 (sequence is synthesized)
cagtgttaatgatctaggaaaccctgggctgatagagtagaaaggaatatggctagaataacattgccaaacattaggctttatgttttgttatgtttgtgttttcgttgtataattatg

SEQ ID NO: 294181 - DNA, 120 bp, Artificial Sequence
  ENSG00000131725_28 (sequence is synthesized)
aacatgcacaagtttctgcatgaaaagatattaatatattaatcacatgtatgtgccttttggttacatgcattaaatctaacagagttaaattatttcagtggctcttttggcctctta

SEQ ID NO: 294182 - DNA, 120 bp, Artificial Sequence
  ENSG00000131725_29 (sequence is synthesized)
ctaggggggatagtcttgtttctagcttaaacaattttttttttgcacaaaatttcatttttaataaaagtggtatcttttgactgagttattgttttgaaaatggtatataggtttcca

SEQ ID NO: 294183 - DNA, 120 bp, Artificial Sequence
  ENSG00000131725_30 (sequence is synthesized)
gtaggtcaacaaccatatgtaaatggtttttataaatttctcaatttggggacaagatttttttgtggtctaaattgtgggcttaagattcttttctttatatgtgtacatataattttt

SEQ ID NO: 294184 - DNA, 120 bp, Artificial Sequence
  ENSG00000131725_31 (sequence is synthesized)
ttttctttgccacactggagcacaatgtttctatgtaaagaattattttcattctttatccatgagcaccaggctttgctcacttaaaaaaaaattaagccacattaaggagtgagtctt

SEQ ID NO: 294185 - DNA, 120 bp, Artificial Sequence
  ENSG00000131725_32 (sequence is synthesized)
cttttttacaataatgtaaaaattaaactgtttacatttttttaaagcattgtagtttttaaaaattaagctgttttgttttgtgttgttgaatttgaaagcctttgtaaatatcaatat

SEQ ID NO: 294186 - DNA, 120 bp, Artificial Sequence
  ENSG00000131725_33 (sequence is synthesized)
aatgtaccaatgaaataacatctggggcaatgaaaccctgatcatgttgttgatggttagcatatgtttctgaaaattaaatatgtattattaaaagttggtctccaacacttgtttaaa

SEQ ID NO: 294187 - DNA, 120 bp, Artificial Sequence
  ENSG00000131730_0 (sequence is synthesized)
gcatacacttcttggctgtgtgcgctcagcaggacgtgggaggctccggcttcaagacactcatccaagaggaaggatggccagtatcttttctaagttgctaactggccgcaatgcttc

SEQ ID NO: 294188 - DNA, 120 bp, Artificial Sequence
  ENSG00000131730_1 (sequence is synthesized)
tctgctgtttgctaccatgggcaccagtgtcctgaccaccgggtacctgctgaaccggcagaaagtgtgtgccgaggtccgggagcagcctaggctatttcctccaagcgcagactaccc

SEQ ID NO: 294189 - DNA, 120 bp, Artificial Sequence
  ENSG00000131730_2 (sequence is synthesized)
agacctgcgcaagcacaacaactgcatggccgagtgcctcacccccgccatttatgccaagcttcgcaacaaggtgacacccaacggctacacgctggaccagtgcatccagactggagt

SEQ ID NO: 294190 - DNA, 120 bp, Artificial Sequence
  ENSG00000131730_3 (sequence is synthesized)
ggacaaccctggccaccccttcataaagactgtgggcatggtggctggtgacgaggagtcctatgaggtgtttgctgacctttttgaccccgtcatcaaactaagacacaacggctatga

SEQ ID NO: 294191 - DNA, 120 bp, Artificial Sequence
  ENSG00000131730_4 (sequence is synthesized)
ccccagggtgatgaagcacacaacggatctggatgcatcaaagatcacccaagggcagttcgacgagcattacgtgctgtcttctcgggtgcgcactggccgcagcatccgtgggctgag

SEQ ID NO: 294192 - DNA, 120 bp, Artificial Sequence
  ENSG00000131730_5 (sequence is synthesized)
cctgcctccagcctgcacccgggccgagcgaagggaggtagagaacgtggccatcactgccctggagggcctcaagggggacctggctggccgctactacaagctgtccgagatgacgga

SEQ ID NO: 294193 - DNA, 120 bp, Artificial Sequence
  ENSG00000131730_6 (sequence is synthesized)
gtttgataagccagtgtcccctttattaacatgtgctgggatggcccgtgactggccagatgccaggggaatctggcataattatgataagacatttctcatctggataaatgaggagga

SEQ ID NO: 294194 - DNA, 120 bp, Artificial Sequence
  ENSG00000131730_7 (sequence is synthesized)
tcacaccagggtaatctcaatggaaaaaggaggcaatatgaaacgagtatttgagcgattctgtcgtggactaaaagaagtagaacggttaatccaagaacgaggctgggagttcatgtg

SEQ ID NO: 294195 - DNA, 120 bp, Artificial Sequence
  ENSG00000131730_8 (sequence is synthesized)
gaatgagcgcctaggatacattttgacctgtccttcgaaccttggaacaggactacgagctggtgtccacgttaggatcccaaagctcagcaaggacccacgcttttctaagatcctgga

SEQ ID NO: 294196 - DNA, 120 bp, Artificial Sequence
  ENSG00000131730_9 (sequence is synthesized)
aaacctaagactccagaagcgtggcacaggtggtgtggacactgccgcggtcgcagatgtgtacgacatttccaacatagatagaattggtcgatcagaggttgagcttgttcagatagt

SEQ ID NO: 294197 - DNA, 120 bp, Artificial Sequence
  ENSG00000131730_10 (sequence is synthesized)
catcgatggagtcaattacctggtggattgtgaaaagaagttggagagaggccaagatattaaggtgccaccccctctgcctcagtttggcaaaaagtaaactttccctttcccaattta

SEQ ID NO: 294198 - DNA, 120 bp, Artificial Sequence
  ENSG00000131730_11 (sequence is synthesized)
taaataatctgtctgctggtacgacagacataaatctctactctgagagtttttatacacttggaaaaatataaaattgtagatcctgcctatctttacaataaaactctccttaatata

SEQ ID NO: 294199 - DNA, 120 bp, Artificial Sequence
  ENSG00000131730_12 (sequence is synthesized)
atacacttcttggctgtgtgcgctcagcaggacgtgggaggctccggcttcaagatcaaaggaaatgtttccctttgtcccgtttcacactaaacgggttggggaggaaccaggggagat

SEQ ID NO: 294200 - DNA, 120 bp, Artificial Sequence
  ENSG00000131730_13 (sequence is synthesized)
gtcaaccgtctgccggtgactgggaagttttctgcaagtcctccacagcataggccagcaggccacttttcactaacagaagtcacaagccaagtgagacactcatccaagaggaaggat

SEQ ID NO: 294201 - DNA, 120 bp, Artificial Sequence
  ENSG00000131730_14 (sequence is synthesized)
aaattaaacagtgcccaagttcacatagctagtacagcgaaatgcaaatccaggccccctgattccagacccatgcctctctcactgctctaccaccttctggaaaaagggatatcatag

SEQ ID NO: 294202 - DNA, 120 bp, Artificial Sequence
  ENSG00000131730_15 (sequence is synthesized)
tactgactttaagtatcggctctaaaggacactgcagatggaaagtggaggagtggcacgagagggatgaaaatagatgtgttttctcagcccttggaaccctgccatggatgagatacc

SEQ ID NO: 294203 - DNA, 120 bp, Artificial Sequence
  ENSG00000131730_16 (sequence is synthesized)
atgcgctgagcagagtttgagtggcatgcagaattccacataggcaggtatggatgagagagacaaggaaaaccactgaggtgtctctgagacatttagtgtctcttatgaaaatcagga

SEQ ID NO: 294204 - DNA, 120 bp, Artificial Sequence
  ENSG00000131730_17 (sequence is synthesized)
agtcagatacccctggaaagcactgtgactgccctggcacagccttccctctggagggccacagagaaggttaggagggtccgaaagtctgttttctttaataaatacaactagggaagg

SEQ ID NO: 294205 - DNA, 120 bp, Artificial Sequence
  ENSG00000131730_18 (sequence is synthesized)
gttggtcattgggaactttaaacctttcctaaagctactccctttttcatcccaaaccacccagtgacggtcaaggaccccagaccacgctatataaaacagctttcccctttactagtc

SEQ ID NO: 294206 - DNA, 120 bp, Artificial Sequence
  ENSG00000131730_19 (sequence is synthesized)
gaaggtccgtgccccaagacttccggaatgtgtccaatttacggattgtgcagtcgtgcacagtgcctgagggtccccagggaaactgcagattggcgattagaacccactgtggctgtg

SEQ ID NO: 294207 - DNA, 120 bp, Artificial Sequence
  ENSG00000131730_20 (sequence is synthesized)
gtgcccagtggccctgatgggccaggatcagctcagatgcgactgctttgtggaggaagaaaacatcactgcccattccttaacccttactttctctatctacaatataaaaataagaaa

SEQ ID NO: 294208 - DNA, 120 bp, Artificial Sequence
  ENSG00000131732_0 (sequence is synthesized)
ctccaataccgcaggagggcggtcttccccggctcgccaactcggctgctctgggggattcgtgcgcggtaagaagctgcgcggtagcgcggtgaggtgaggttctcagccaccaaagct

SEQ ID NO: 294209 - DNA, 120 bp, Artificial Sequence
  ENSG00000131732_1 (sequence is synthesized)
gcagggtctcgtcgttcgttccctctggcctggcggaacttgcgtgggaagctgggaggacagaaggcttagccgctgggtccctgagctggctggagcgcgggctgtctaggggcggcg

SEQ ID NO: 294210 - DNA, 120 bp, Artificial Sequence
  ENSG00000131732_2 (sequence is synthesized)
acctcagctgttgggctccggctgctgggggctgtgcgtccagccgccctggaatccgcctgtgggtgggccgcttggctctcccacttcaccctcttgataacccagagcctccccctt

SEQ ID NO: 294211 - DNA, 120 bp, Artificial Sequence
  ENSG00000131732_3 (sequence is synthesized)
cccacgtacgtaggggaaggataatctacttccttttgaacagcttcggtccccactatgacagtcgcataaacttcagcgaagagtgcgctggtaaagtggcatggagtttctcacacc

SEQ ID NO: 294212 - DNA, 120 bp, Artificial Sequence
  ENSG00000131732_4 (sequence is synthesized)
aattcattgggtccacccttcagcttctgtggaaggggtctttctgttactaggagctgagacttggggggttgccagggatgctggtcttaaaaggtgataatttaggccgggcgcggt

SEQ ID NO: 294213 - DNA, 120 bp, Artificial Sequence
  ENSG00000131732_5 (sequence is synthesized)
aatcccagctattcgggaggctgaggcccgagaatcgcttgagccctggcggcagaggttgcagtgagccaagatcgcccactgcactccaggttgggctacagagtgagactccgtctc

SEQ ID NO: 294214 - DNA, 120 bp, Artificial Sequence
  ENSG00000131732_6 (sequence is synthesized)
gttgggctacagagtgagactccgtctcaacaacgaccacaacaacaacaaaaaaggtggtggcttaatacagccatgctccccttaagaactggtatagttatgagaaatggttgggcc

SEQ ID NO: 294215 - DNA, 120 bp, Artificial Sequence
  ENSG00000131732_7 (sequence is synthesized)
gtttcgtggttgtgtgaacatcatagtgtacttgcacaaacctacacagctgggccgtatgggatagcctgttactcctagtctacagacctgtacagtataactactaaatactgtagg

SEQ ID NO: 294216 - DNA, 120 bp, Artificial Sequence
  ENSG00000131732_8 (sequence is synthesized)
cagttgtaaaaggatggtgtgtatctaaacacagaaaagatactgtaaaaatatagtgtaaaagaaaacatggtacagctgaatagggcacttacgcatggagcttgcagggctgtcggt

SEQ ID NO: 294217 - DNA, 120 bp, Artificial Sequence
  ENSG00000131732_9 (sequence is synthesized)
cacttacgcatggagcttgcagggctgtcggtagctattaagtgagtcagtgagtggtatgtgagtgtgaaggcctacgatattatttagggtattactgtacactactgtagactttat

SEQ ID NO: 294218 - DNA, 120 bp, Artificial Sequence
  ENSG00000131732_10 (sequence is synthesized)
cttagtctaagtttattaaaaataaggtaataaccttagcttactgtgcttttttaactttataaacttttaaattaattttaactccttgaccttttttttttttttttgagacggagt

SEQ ID NO: 294219 - DNA, 120 bp, Artificial Sequence
  ENSG00000131732_11 (sequence is synthesized)
tacaggcgtgagccaccatacccggcccactcttttgtaataacacttagcttaaaatgctaatgtgttgtatagctatataaaaatattttctttattcccttacattattctatagct

SEQ ID NO: 294220 - DNA, 120 bp, Artificial Sequence
  ENSG00000131732_12 (sequence is synthesized)
ttttctttattcccttacattattctatagctttttcctgtaaaaattttttttgttgttataaactaagacacacacattgtgcctacaccgggtcaggagcatcaatatcactctttt

SEQ ID NO: 294221 - DNA, 120 bp, Artificial Sequence
  ENSG00000131732_13 (sequence is synthesized)
cttcctccacatcttgtcctactggaaggttttcaggggcagtaacatgaatggagctgtcatctcctataataactgcttttttctggaatacttataattgtctagtattatgtacag

SEQ ID NO: 294222 - DNA, 120 bp, Artificial Sequence
  ENSG00000131732_14 (sequence is synthesized)
tacatcattgtaagcattatgcttgtatatgactggcatcccaggtttgtttacaccagcattaccacagacatgagtaatgtgttacactacaagttatgagggctacaaagtcaatag

SEQ ID NO: 294223 - DNA, 120 bp, Artificial Sequence
  ENSG00000131732_15 (sequence is synthesized)
gaatttttcagctccattataatcatctgagaccagtatcatgtgtgcagtcgctgttgacctaaatgttatgtagcatgtgactagctgatgaatctttgattatggctgaatgttctc

SEQ ID NO: 294224 - DNA, 120 bp, Artificial Sequence
  ENSG00000131732_16 (sequence is synthesized)
aagtgaccaaaacttttttccattttatgttggagccaaatcattagtgttaggataaattacttctttatgtatgtgctctaaaatgaaaagttatttctgaatattaaagcatatgta

SEQ ID NO: 294225 - DNA, 120 bp, Artificial Sequence
  ENSG00000131732_17 (sequence is synthesized)
ttaagagtataaaaacaagatacagattttggtgtgaaatatatcttatgattcaagtcataatttaaatagaattgaagatgatgtgaaatcactgggctggaagtagcttataccttg

SEQ ID NO: 294226 - DNA, 120 bp, Artificial Sequence
  ENSG00000131732_18 (sequence is synthesized)
attagtaagaggaagcccgggatcatcctgtgatggtaaacacttttatatgttttacttataactttgccaggaaatttcaacaaacttcatattaaaggacatgatttctgtatactt

SEQ ID NO: 294227 - DNA, 120 bp, Artificial Sequence
  ENSG00000131732_19 (sequence is synthesized)
agtaatctgctatgcaaattgttgcattgaaatggcagacgaagcaagaagattgggagaaagtagctgtgggacttggagataggaaaataaacagccgggaaaactgcagaatgtggg

SEQ ID NO: 294228 - DNA, 120 bp, Artificial Sequence
  ENSG00000131732_20 (sequence is synthesized)
aggaataattgcattcattgtattactatctgatttatattttatgaaataatttggtttcttaagatagtttttcaattttaagcacaccttttttaactggtgtggcagcttttctgg

SEQ ID NO: 294229 - DNA, 120 bp, Artificial Sequence
  ENSG00000131732_21 (sequence is synthesized)
taagtggtagatttatgttagaagcatgtctatgcagcatattatagcattaaatatgtatacagatatctaactgaaataaaaagtgttttaataattaaaagtttaacatatgggcat

SEQ ID NO: 294230 - DNA, 120 bp, Artificial Sequence
  ENSG00000131732_22 (sequence is synthesized)
atgtgacatatagtgatatagcatgtctctttagttttgttgtttttgttgttgatggctaaccacccatgcttgtcttaaaaattgataaggtaccactgatgaaattatgaccaggtg

SEQ ID NO: 294231 - DNA, 120 bp, Artificial Sequence
  ENSG00000131732_23 (sequence is synthesized)
ggcccgagttagtaccacatataacaagagacccttgcctgcaacatcatgggaggacatgaagaagggatcctttgagggaacaagccaaaacctaccaaagcgtaaacaacttgaagc

SEQ ID NO: 294232 - DNA, 120 bp, Artificial Sequence
  ENSG00000131732_24 (sequence is synthesized)
caataggctatccctcaaaaatgatgcaccccaagcaaaacataaaaagaacaaaaagaaaaaagagtacttaaatgaagatgtgaatggattcatggaatacctaagacagaattcaca

SEQ ID NO: 294233 - DNA, 120 bp, Artificial Sequence
  ENSG00000131732_25 (sequence is synthesized)
gatggttcacaatgggcaaattatagcaacagacagtgaggaagtaagggaagaaattgcagttgctttaaagaaagacagtcgacgggaaggaagaagattaaaaagacaagcggcaaa

SEQ ID NO: 294234 - DNA, 120 bp, Artificial Sequence
  ENSG00000131732_26 (sequence is synthesized)
gaaaaatgcaatggtgtgtttccattgtagaaaacctggtcatggaattgcagattgccccgccgcccttgaaaatcaagacatgggcactgggatatgttacaggtgtgggtccacaga

SEQ ID NO: 294235 - DNA, 120 bp, Artificial Sequence
  ENSG00000131732_27 (sequence is synthesized)
gcacgaaataaccaagtgtaaggctaaagtagacccggctcttggcgaatttccttttgcaaaatgttttgtttgtggagaaatggggcacctgtctagatcttgtcctgataatcccaa

SEQ ID NO: 294236 - DNA, 120 bp, Artificial Sequence
  ENSG00000131732_28 (sequence is synthesized)
aggactctatgctgatggtggcggttgcaaactttgtggctctgtggaacatttaaagaaagattgccctgaaagtcagaattcagagcgaatggtcacagttggtcgctgggcaaaggg

SEQ ID NO: 294237 - DNA, 120 bp, Artificial Sequence
  ENSG00000131732_29 (sequence is synthesized)
aatgagtgcagactatgaagaaattttggatgtacctaaaccgcaaaaacccaaaacaaaaatacctaaagttgttaatttttgataacagctagcactatcatgagttactacctcatt

SEQ ID NO: 294238 - DNA, 120 bp, Artificial Sequence
  ENSG00000131732_30 (sequence is synthesized)
gttactttctaaaccaggcccgcttcacgagttagagttgagctcccctgtagccaggactatgctgtagatatcagtatgatctgggtgtggccaaaaacaattttctttattctgtct

SEQ ID NO: 294239 - DNA, 120 bp, Artificial Sequence
  ENSG00000131732_31 (sequence is synthesized)
atcaaatagtacttctaccactgtttggagaaaattgaagaaaagaataagatgattaaatgaattctctaaaagaacatattttaagagacagaacttagacataaccaagtagttgta

SEQ ID NO: 294240 - DNA, 120 bp, Artificial Sequence
  ENSG00000131732_32 (sequence is synthesized)
tacctgattgtaacaatcatcttttataaaagcaaaattatgcataaatgtaaaacacccctaaacaaagggaacaaatgaatttttggttatattgttttcttggctcaaagtatcaat

SEQ ID NO: 294241 - DNA, 120 bp, Artificial Sequence
  ENSG00000131732_33 (sequence is synthesized)
tataagttgctagaaagtctatatttttaaagtacggaataaaaatatgttttctattaagcaatagaaatatttttgtgtataatttttctgaatacttgattctcgattgaaatatcc

SEQ ID NO: 294242 - DNA, 120 bp, Artificial Sequence
  ENSG00000131732_34 (sequence is synthesized)
gattctcgattgaaatatccattgttcgttaatatccatgtaacaatcccattggaaacaagattttttttgaatcctagatgagaataaacagggatttggtttttgttttagttttga

SEQ ID NO: 294243 - DNA, 120 bp, Artificial Sequence
  ENSG00000131732_35 (sequence is synthesized)
actatgtgcttccggtctccaataccgcaggagggcggtcttccccggctcgccaactcggctgctctgggggattcgtgcgcggtaagaagctgcgcggtagcgcggtgaggtaccact

SEQ ID NO: 294244 - DNA, 120 bp, Artificial Sequence
  ENSG00000131732_36 (sequence is synthesized)
gcacgaaataaccaagtgtaaggctaaagtagacccggctcttggtatgtgtttctttcagttttttgttttgttcatggggaaagccaataaatagcaccttgggtatttttttaacac

SEQ ID NO: 294245 - DNA, 120 bp, Artificial Sequence
  ENSG00000131732_37 (sequence is synthesized)
aatttgttacgagtgtgccacttagtatttggaaatcatatgagattaaattttaagttatgtaaatatattttttattcagagtattttaaaataatgttaattttatgacttgccata

SEQ ID NO: 294246 - DNA, 120 bp, Artificial Sequence
  ENSG00000131732_38 (sequence is synthesized)
gtaagtactgttaccctcatatagcagaaatggtgagtcatcgtgcagttgtgatttaatttacactcaatcacagttcttgaataaattcttgaataaattgcaaaaccttgagaatta

SEQ ID NO: 294247 - DNA, 120 bp, Artificial Sequence
  ENSG00000131732_39 (sequence is synthesized)
aggaacgtatgaaagcttttttctacaaatattgagatttcagaaaaatagcttaataagatgagaaatgttttaaatatgtttttgataacaagaattaataaagtcactggtatagtt

SEQ ID NO: 294248 - DNA, 120 bp, Artificial Sequence
  ENSG00000131737_0 (sequence is synthesized)
aaaattagctgaagcattaggaaaggaaactatgctgtatgccaagcccccacccacaattaatggtataaaaggactgcagaggaaggagagactcaaacctgcccacatccacctcca

SEQ ID NO: 294249 - DNA, 120 bp, Artificial Sequence
  ENSG00000131737_1 (sequence is synthesized)
gcagcttacctgcttttccattacctgttccagcaccatgtcttacagttgttgcctgcccagcctgggctgccgcaccagctgctcctcccggccctgcgtgccccccagctgccacgg

SEQ ID NO: 294250 - DNA, 120 bp, Artificial Sequence
  ENSG00000131737_2 (sequence is synthesized)
ctacaccctgcctggggcctgcaacatccccgccaatgtgagcaactgcaactggttctgtgagggctccttcaatggcagcgagaaggagactatgcagttcctgaacgaccgcctggc

SEQ ID NO: 294251 - DNA, 120 bp, Artificial Sequence
  ENSG00000131737_3 (sequence is synthesized)
cagctacctggagaaggtgcgtcagctggagcgggacaacgcggagctggagaaactcatccaggagcggtcccagcagcaggagcccttgctgtgccccagctaccagtcctacttcaa

SEQ ID NO: 294252 - DNA, 120 bp, Artificial Sequence
  ENSG00000131737_4 (sequence is synthesized)
gaccattgaggagctccagcagaagattctgtgtgccaaggctgagaatgccaggctggtggtgaacattgacaatgccaagctggcctctgacgacttcagaagcaagtaccagacgga

SEQ ID NO: 294253 - DNA, 120 bp, Artificial Sequence
  ENSG00000131737_5 (sequence is synthesized)
gcagtccctgaggctgttggtggagtcggacatcaacagcatacgcaggatcctggatgagctgaccctctgcaagtctgacctggagtcccaggtggagtccctgagggaggagctgat

SEQ ID NO: 294254 - DNA, 120 bp, Artificial Sequence
  ENSG00000131737_6 (sequence is synthesized)
ctgcttgaagaagaaccatgaggaggaggttaacaccctgcgctcccagcttggagaccgcctcaacgtggaggtggacactgcccccactgtggacctgaaccaggtcctgaacgagac

SEQ ID NO: 294255 - DNA, 120 bp, Artificial Sequence
  ENSG00000131737_7 (sequence is synthesized)
aggagctgaacaagcaggtggtatccagctcagagcagctgcagtcctgccaggcggagatcatcgagctgagacgcacagtcaacgccctggagatcgagctgcaggcccagcacaacc

SEQ ID NO: 294256 - DNA, 120 bp, Artificial Sequence
  ENSG00000131737_8 (sequence is synthesized)
tgcgagactctctggaaaacacgctgacggagagcgaggcccactacagctcccagctgtcccaggtgcagagcctgatcaccaacgtggagtctcagctggcagagatccgctgtgacc

SEQ ID NO: 294257 - DNA, 120 bp, Artificial Sequence
  ENSG00000131737_9 (sequence is synthesized)
tggagcggcagaaccaggagtaccaggtgctgctggacgtgcgtgcccggctggagtgtgagatcaacacgtaccggagcctcctggagagtgaggactgcaagctcccctgcaacccat

SEQ ID NO: 294258 - DNA, 120 bp, Artificial Sequence
  ENSG00000131737_10 (sequence is synthesized)
gcgccaccaccaatgctagtggcaactcctgtggaccctgtggcacctctcaaaagggttgctgtaattgaaaagcttgtatcctctttgaagacatctacaaagccatttagatcaacc

SEQ ID NO: 294259 - DNA, 120 bp, Artificial Sequence
  ENSG00000131737_11 (sequence is synthesized)
acaggaaggatcctcaagtcctgacttttctggagctcagctgacatcaagaaacctcatcttgcctctatgttatttctagaatgctgaaaagctttcctgacccaagcaaagacacac

SEQ ID NO: 294260 - DNA, 120 bp, Artificial Sequence
  ENSG00000131737_12 (sequence is synthesized)
atcatcaacttccaatgtctggacaactccttcctgttgagggtcgagcctgtttgtttctaaagatgttcagctccctgtaatctgagctccagttactacttaaggtgtttcctgaac

SEQ ID NO: 294261 - DNA, 120 bp, Artificial Sequence
  ENSG00000131737_13 (sequence is synthesized)
gtactactgcatttcctgttttccttttttctttggcattctctggaatgcaaggaggagacttcatttacttcccaataaacttcatttctctggcataataaatgtttctcattcata

SEQ ID NO: 294262 - DNA, 120 bp, Artificial Sequence
  ENSG00000131738_0 (sequence is synthesized)
atcccagggaaaaggaatcaggttttgaaactgacttccagagctccactgcctccctgcaccatgccctacaacttctgcctgcccagcctgagctgccgcaccagctgctcctcccgg

SEQ ID NO: 294263 - DNA, 120 bp, Artificial Sequence
  ENSG00000131738_1 (sequence is synthesized)
ccctgtgtgccccccagctgccacggctacaccctgcccggggcctgcaacatccctgccaatgtgagcaactgcaactggttctgcgagggctccttcaatggcagcgagaaggagact

SEQ ID NO: 294264 - DNA, 120 bp, Artificial Sequence
  ENSG00000131738_2 (sequence is synthesized)
atgcagttcctgaacgaccgcctggccagctacctggagaaggtgcgtcagctggagcgggacaacgcggagctggagaacctcatccgggagcggtctcagcagcaggagcccttgctg

SEQ ID NO: 294265 - DNA, 120 bp, Artificial Sequence
  ENSG00000131738_3 (sequence is synthesized)
tgccccagctaccagtcctacttcaagaccattgaggagctccagcagaagatcctgtgcagcaagtctgagaatgccaggctggtggtgcagatcgacaatgccaagctggctgcagat

SEQ ID NO: 294266 - DNA, 120 bp, Artificial Sequence
  ENSG00000131738_4 (sequence is synthesized)
gacttcagaaccaagtaccagacggagcagtccctgcggcagctggtggagtccgacatcaacagcctgcgcaggattctggatgagctgaccctgtgcaggtctgacctggaggcccag

SEQ ID NO: 294267 - DNA, 120 bp, Artificial Sequence
  ENSG00000131738_5 (sequence is synthesized)
atggagtccctgaaggaggagctgctgtccctcaagcagaaccatgagcaggaagtcaacaccttgcgctgccagcttggagaccgcctcaacgtggaggtggacgctgctcccgctgtg

SEQ ID NO: 294268 - DNA, 120 bp, Artificial Sequence
  ENSG00000131738_6 (sequence is synthesized)
caaccgcagggaagtggagcaatggttcgccacgcagaccgaggagctgaacaagcaggtggtatccagctcggagcagctgcagtcctaccaggcggagatcatcgagctgagacgcac

SEQ ID NO: 294269 - DNA, 120 bp, Artificial Sequence
  ENSG00000131738_7 (sequence is synthesized)
agtcaatgccctggagatcgagctgcaggcccagcacaacctgcgatactctctggaaaacacgctgacagagagcgaggcccgctacagctcccagctgtcccaggtgcagagcctgat

SEQ ID NO: 294270 - DNA, 120 bp, Artificial Sequence
  ENSG00000131738_8 (sequence is synthesized)
caccaacgtggagtcccagctggcggagatccgcagtgacctggagcggcagaaccaggagtatcaggtgctgctggacgtgcgggcgcggctggagtgtgagatcaacacataccggag

SEQ ID NO: 294271 - DNA, 120 bp, Artificial Sequence
  ENSG00000131738_9 (sequence is synthesized)
cctgctggagagcgaggactgcaagctgccctccaacccctgcgccaccaccaatgcatgtgaaaagcccattggatcctgtgtcaccaatccttgtggtcctcgttcccgctgtgggcc

SEQ ID NO: 294272 - DNA, 120 bp, Artificial Sequence
  ENSG00000131738_10 (sequence is synthesized)
ttgcaacacctttgggtactagataccctggggccagcagaagtatagcatgaagacagaactaccatcggtgggccagttctgcctctctgacaaccatcagccaccggaccccacccc

SEQ ID NO: 294273 - DNA, 120 bp, Artificial Sequence
  ENSG00000131738_11 (sequence is synthesized)
gaggcatcaccacaaatcatggtctggaaggagaacaaatgcccagcgtttgggtctgactctgagcctagggctacttgatcctcctcaccccaggtccctctcctgtagtcagtctga

SEQ ID NO: 294274 - DNA, 120 bp, Artificial Sequence
  ENSG00000131738_12 (sequence is synthesized)
gttctgatggtcagaggttggagctgtgacagtggcatacgaggtgttttgttctctctgctgcttctacctttattgcagttccccaaatcgcctaataaactttcctcttgcaaagca

SEQ ID NO: 294275 - DNA, 120 bp, Artificial Sequence
  ENSG00000131746_0 (sequence is synthesized)
gcctctcctgactcttcacctggactctgagtcgtcttggtcccaggagccagtagtgaaggcaacagtctgcccacctgtggacaccagatcctgggagctcctggttagcaagtgaga

SEQ ID NO: 294276 - DNA, 120 bp, Artificial Sequence
  ENSG00000131746_1 (sequence is synthesized)
tctctgggatgtcagtgaggctggttgaagaccagaggtaaactgcagaggtcaccacccccaccatgtcccaggtgatgtccagcccactgctggcaggaggccatgctgtcagcttgg

SEQ ID NO: 294277 - DNA, 120 bp, Artificial Sequence
  ENSG00000131746_2 (sequence is synthesized)
cgccttgtgatgagcccaggaggaccctgcacccagcacccagccccagcctgccaccccagtgttcttactacaccacggaaggctggggagcccaggccctgatggcccccgtgccct

SEQ ID NO: 294278 - DNA, 120 bp, Artificial Sequence
  ENSG00000131746_3 (sequence is synthesized)
gcatggggccccctggccgactccagcaagccccacaggtggaggccaaagccacctgcttcctgccgtcccctggtgagaaggccttggggaccccagaggaccttgactcctacattg

SEQ ID NO: 294279 - DNA, 120 bp, Artificial Sequence
  ENSG00000131746_4 (sequence is synthesized)
acttctcactggagagcctcaatcagatgatcctggaactggaccccaccttccagctgcttcccccagggactgggggctcccaggctgagctggcccagagcaccatgtcaatgagaa

SEQ ID NO: 294280 - DNA, 120 bp, Artificial Sequence
  ENSG00000131746_5 (sequence is synthesized)
agaaggaggaatctgaagccttggacataaagtacatcgaggtgacctccgccagatcaaggtgccacgatggcccccagcactgctccagcccctctgtcaccccgcccttcggctccc

SEQ ID NO: 294281 - DNA, 120 bp, Artificial Sequence
  ENSG00000131746_6 (sequence is synthesized)
ttcgcagtggtggcctcctcctttccagagacgtcccccgagagacacgaagcagcagtgagagcctcatcttctctgggaaccagggcagggggcaccagcgccctctgcccccctcag

SEQ ID NO: 294282 - DNA, 120 bp, Artificial Sequence
  ENSG00000131746_7 (sequence is synthesized)
agggtctctcccctcgacccccaaattcccccagcatctcaatcccttgcatggggagcaaggcctcgagcccccatggtttgggctccccgctggtggcttctccaagactggagaagc

SEQ ID NO: 294283 - DNA, 120 bp, Artificial Sequence
  ENSG00000131746_8 (sequence is synthesized)
ggctgggaggcctggccccacagcggggcagcaggatctctgtgctgtcagccagcccagtgtctgatgtcagctatatgtttggaagcagccagtccctcctgcactccagcaactcca

SEQ ID NO: 294284 - DNA, 120 bp, Artificial Sequence
  ENSG00000131746_9 (sequence is synthesized)
gccatcagtcatcttccagatccttggaaagtccagccaactcttcctccagcctccacagccttggctcagtgtccctgtgtacaagacccagtgacttccaggctcccagaaacccca

SEQ ID NO: 294285 - DNA, 120 bp, Artificial Sequence
  ENSG00000131746_10 (sequence is synthesized)
ccctaaccatgggccaacccagaacaccccactctccaccactggccaaagaacatgccagcagctgccccccatccatcaccaactccatggtggacatacccattgtgctgatcaacg

SEQ ID NO: 294286 - DNA, 120 bp, Artificial Sequence
  ENSG00000131746_11 (sequence is synthesized)
gctgcccagaaccagggtcttctccaccccagcggaccccaggacaccagaactccgttcaacctggagctgcttctcccagcaacccctgtccagccaccaggagcaacagccagaccc

SEQ ID NO: 294287 - DNA, 120 bp, Artificial Sequence
  ENSG00000131746_12 (sequence is synthesized)
tgtcagatgccccctttaccacatgcccagagggtcccgccagggacatgcagcccaccatgaagttcgtgatggacacatctaaatactggtttaagccaaacatcacccgagagcaag

SEQ ID NO: 294288 - DNA, 120 bp, Artificial Sequence
  ENSG00000131746_13 (sequence is synthesized)
caatcgagctgctgaggaaggaggagccaggggcttttgtcataagggacagctcttcataccgaggctccttcggcctggccctgaaggtgcaggaggttcccgcgtctgctcagagtc

SEQ ID NO: 294289 - DNA, 120 bp, Artificial Sequence
  ENSG00000131746_14 (sequence is synthesized)
gaccaggtgaggacagcaatgacctcatccgacacttcctcatcgagtcgtctgccaaaggagtgcatctcaaaggagcagatgaggagccctactttgggagcctctctgccttcgtgt

SEQ ID NO: 294290 - DNA, 120 bp, Artificial Sequence
  ENSG00000131746_15 (sequence is synthesized)
gccagcattccatcatggccctggccctgccctgcaaactcaccatcccacagagagaactgggaggtgcagatggggcctcggactctacagacagcccagcctcctgccagaagaaat

SEQ ID NO: 294291 - DNA, 120 bp, Artificial Sequence
  ENSG00000131746_16 (sequence is synthesized)
ctgcgggctgccacaccctgtacctgagctcagtgagcgtggagaccctgactggagccctggccgtgcagaaagccatctccaccacctttgagagggacatcctccccacgcccaccg

SEQ ID NO: 294292 - DNA, 120 bp, Artificial Sequence
  ENSG00000131746_17 (sequence is synthesized)
cttcaaagtcacagagcagggcatcactctgactgatgtccagaggaaggtgtttttccggcgccattacccactcaccaccctccgcttctgtggtatggaccctgagcaacggaagtg

SEQ ID NO: 294293 - DNA, 120 bp, Artificial Sequence
  ENSG00000131746_18 (sequence is synthesized)
gcagaagtactgcaaaccctcctggatctttgggtttgtggccaagagccagacagagcctcaggagaacgtatgccacctctttgcggagtatgacatggtccagccagcctcgcaggt

SEQ ID NO: 294294 - DNA, 120 bp, Artificial Sequence
  ENSG00000131746_19 (sequence is synthesized)
catcggcctggtgactgctctgctgcaggacgcagaaaggatgtaggggagagactgcctgtgcacctaaccaacacctccaggggctcgctaaggagcccccctccaccccctgaatgg

SEQ ID NO: 294295 - DNA, 120 bp, Artificial Sequence
  ENSG00000131746_20 (sequence is synthesized)
gtgtggcttgtggccatattgacagaccaatctatgggactagggggattggcatcaagttgacacccttgaacctgctatggccttcagcagtcaccatcatccagaccccccgggcct

SEQ ID NO: 294296 - DNA, 120 bp, Artificial Sequence
  ENSG00000131746_21 (sequence is synthesized)
cagtttcctcaatcatagaagaagaccaatagacaagatcagctgttcttagatgctggtgggcatttgaacatgctcctccatgattctgaagcatgcacacctctgaagacccctgca

SEQ ID NO: 294297 - DNA, 120 bp, Artificial Sequence
  ENSG00000131746_22 (sequence is synthesized)
tgaaaataacctccaaggaccctctgaccccatcgacctgggccctgcccacacaacagtctgagcaagagacctgcagcccctgtttcgtggcagacagcaggtgcctggcggtgaccc

SEQ ID NO: 294298 - DNA, 120 bp, Artificial Sequence
  ENSG00000131746_23 (sequence is synthesized)
acggggctcctggcttgcagctggtgatggtcaagaactgactacaaaacaggaatggatagactctatttccttccatatctgttcctctgttccttttcccactttctgggtggcttt

SEQ ID NO: 294299 - DNA, 120 bp, Artificial Sequence
  ENSG00000131746_24 (sequence is synthesized)
ttgggtccacccagccaggatgctgcaggccaagctgggtgtggtatttagggcagctcagcagggggaacttgtccccatggtcagaggagacccagctgtcctgcacccccttgcaga

SEQ ID NO: 294300 - DNA, 72 bp, Artificial Sequence
  ENSG00000131746_25 (sequence is synthesized)
tggtcagaggagacccagctgtcctgcacccccttgcagatgagtatcaccccatcttttctttccacttgg

SEQ ID NO: 294301 - DNA, 79 bp, Artificial Sequence
  ENSG00000131746_26 (sequence is synthesized)
cagcccagcttctttccattccttgataggcgagtattccaaagctggtatcgtagctgccctaatgttgcatattagg

SEQ ID NO: 294302 - DNA, 120 bp, Artificial Sequence
  ENSG00000131746_27 (sequence is synthesized)
caaagctggtatcgtagctgccctaatgttgcatattaggcggcgggggcagagataagggccatctctctgtgattctgcctcagctcctgtcttgctgagccctcccccaacccacgc

SEQ ID NO: 294303 - DNA, 90 bp, Artificial Sequence
  ENSG00000131746_28 (sequence is synthesized)
ctactgctatgtggcttcaaccagcctcacagccacacgggggaagcagagagtcaagaatgcaaagaggccgcttccctaagaggcttg

SEQ ID NO: 294304 - DNA, 120 bp, Artificial Sequence
  ENSG00000131746_29 (sequence is synthesized)
gagtcaagaatgcaaagaggccgcttccctaagaggcttggaggagctgggctctatcccacacccacccccaccccacccccacccagcctccagaagctggaaccatttctcccgcag

SEQ ID NO: 294305 - DNA, 120 bp, Artificial Sequence
  ENSG00000131746_30 (sequence is synthesized)
gcctgagttcctaaggaaaccaccctaccggggtggaagggagggtcagggaagaaacccactcttgctctacgaggagcaagtgcctgccccctcccagcagccagccctgccaaagtt

SEQ ID NO: 294306 - DNA, 120 bp, Artificial Sequence
  ENSG00000131746_31 (sequence is synthesized)
gcattatctttggccaaggctgggcctgacggttatgatttcagccctgggcctgcaggagaggctgagaccagcccacccagccagtggtcgagcactgccccgccgccaaagtctgca

SEQ ID NO: 294307 - DNA, 120 bp, Artificial Sequence
  ENSG00000131746_32 (sequence is synthesized)
gaatgtgagatgaggttctcaaggtcacaggccccagtcccagcctgggggctggcagaggcccccatatactctgctacagctcctatcatgaaaaataaaatgtttgtctttgcaaaa

SEQ ID NO: 294308 - DNA, 120 bp, Artificial Sequence
  ENSG00000131746_33 (sequence is synthesized)
ggaggtgggagatcttcaaagggattcatgaggcctgttcctgtgagaggggtccattcactccacccccgcccctttggggggcctgtttctttgccttggctcagaactgggaggtgc

SEQ ID NO: 294309 - DNA, 120 bp, Artificial Sequence
  ENSG00000131746_34 (sequence is synthesized)
ccaaacccaacatggggagggaactgcagaaggaaagaggcaccattctgactttaatagtccaaagtgttgatgagggcacaggccctggtcctcagggagctcccatctgatgggaaa

SEQ ID NO: 294310 - DNA, 120 bp, Artificial Sequence
  ENSG00000131746_35 (sequence is synthesized)
cagtctgatgatcaagatgcatccttgccctcagggagcttccactctaatggggaatgcacaggtcctgtcctcaaggagccctcactcaaaacaaaggaaacccagagcttgaactca

SEQ ID NO: 294311 - DNA, 120 bp, Artificial Sequence
  ENSG00000131746_36 (sequence is synthesized)
gaaatctcccagtctgacgggagaggcatctccttccccagggagccccaccataaggaggtgctggagtcaattggctaagggaggggcagggaggaatgagatgcaggctgagggccc

SEQ ID NO: 294312 - DNA, 120 bp, Artificial Sequence
  ENSG00000131746_37 (sequence is synthesized)
gttggcctcaaactgtgatcacccacacacccactttctgttgggtggcggctctaagaggagctccactggattcctgaacaggagactcaccccctcccctggccctgggcagaggga

SEQ ID NO: 294313 - DNA, 120 bp, Artificial Sequence
  ENSG00000131747_0 (sequence is synthesized)
aaccgacgcgcgtctgtggagaagcggcttggtcgggggtggtctcgtggggtcctgcctgtttagtcgctttcagggttcttgagccccttcacgaccgtcaccatggaagtgtcacca

SEQ ID NO: 294314 - DNA, 120 bp, Artificial Sequence
  ENSG00000131747_1 (sequence is synthesized)
ttgcagcctgtaaatgaaaatatgcaagtcaacaaaataaagaaaaatgaagatgctaagaaaagactgtctgttgaaagaatctatcaaaagaaaacacaattggaacatattttgctc

SEQ ID NO: 294315 - DNA, 120 bp, Artificial Sequence
  ENSG00000131747_2 (sequence is synthesized)
cgcccagacacctacattggttctgtggaattagtgacccagcaaatgtgggtttacgatgaagatgttggcattaactatagggaagtcacttttgttcctggtttgtacaaaatcttt

SEQ ID NO: 294316 - DNA, 120 bp, Artificial Sequence
  ENSG00000131747_3 (sequence is synthesized)
gatgagattctagttaatgctgcggacaacaaacaaagggacccaaaaatgtcttgtattagagtcacaattgatccggaaaacaatttaattagtatatggaataatggaaaaggtatt

SEQ ID NO: 294317 - DNA, 120 bp, Artificial Sequence
  ENSG00000131747_4 (sequence is synthesized)
cctgttgttgaacacaaagttgaaaagatgtatgtcccagctctcatatttggacagctcctaacttctagtaactatgatgatgatgaaaagaaagtgacaggtggtcgaaatggctat

SEQ ID NO: 294318 - DNA, 120 bp, Artificial Sequence
  ENSG00000131747_5 (sequence is synthesized)
ggagccaaattgtgtaacatattcagtaccaaatttactgtggaaacagccagtagagaatacaagaaaatgttcaaacagacatggatggataatatgggaagagctggtgagatggaa

SEQ ID NO: 294319 - DNA, 120 bp, Artificial Sequence
  ENSG00000131747_6 (sequence is synthesized)
ctcaagcccttcaatggagaagattatacatgtatcacctttcagcctgatttgtctaagtttaaaatgcaaagcctggacaaagatattgttgcactaatggtcagaagagcatatgat

SEQ ID NO: 294320 - DNA, 120 bp, Artificial Sequence
  ENSG00000131747_7 (sequence is synthesized)
attgctggatccaccaaagatgtcaaagtctttcttaatggaaataaactgccagtaaaaggatttcgtagttatgtggacatgtatttgaaggacaagttggatgaaactggtaactcc

SEQ ID NO: 294321 - DNA, 120 bp, Artificial Sequence
  ENSG00000131747_8 (sequence is synthesized)
ttgaaagtaatacatgaacaagtaaaccacaggtgggaagtgtgtttaactatgagtgaaaaaggctttcagcaaattagctttgtcaacagcattgctacatccaagggtggcagacat

SEQ ID NO: 294322 - DNA, 120 bp, Artificial Sequence
  ENSG00000131747_9 (sequence is synthesized)
gttgattatgtagctgatcagattgtgactaaacttgttgatgttgtgaagaagaagaacaagggtggtgttgcagtaaaagcacatcaggtgaaaaatcacatgtggatttttgtaaat

SEQ ID NO: 294323 - DNA, 120 bp, Artificial Sequence
  ENSG00000131747_10 (sequence is synthesized)
gccttaattgaaaacccaacctttgactctcagacaaaagaaaacatgactttacaacccaagagctttggatcaacatgccaattgagtgaaaaatttatcaaagctgccattggctgt

SEQ ID NO: 294324 - DNA, 120 bp, Artificial Sequence
  ENSG00000131747_11 (sequence is synthesized)
ggtattgtagaaagcatactaaactgggtgaagtttaaggcccaagtccagttaaacaagaagtgttcagctgtaaaacataatagaatcaagggaattcccaaactcgatgatgccaat

SEQ ID NO: 294325 - DNA, 120 bp, Artificial Sequence
  ENSG00000131747_12 (sequence is synthesized)
gatgcagggggccgaaactccactgagtgtacgcttatcctgactgagggagattcagccaaaactttggctgtttcaggccttggtgtggttgggagagacaaatatggggttttccct

SEQ ID NO: 294326 - DNA, 120 bp, Artificial Sequence
  ENSG00000131747_13 (sequence is synthesized)
cttagaggaaaaatactcaatgttcgagaagcttctcataagcagatcatggaaaatgctgagattaacaatatcatcaagattgtgggtcttcagtacaagaaaaactatgaagatgaa

SEQ ID NO: 294327 - DNA, 120 bp, Artificial Sequence
  ENSG00000131747_14 (sequence is synthesized)
gattcattgaagacgcttcgttatgggaagataatgattatgacagatcaggaccaagatggttcccacatcaaaggcttgctgattaattttatccatcacaactggccctctcttctg

SEQ ID NO: 294328 - DNA, 120 bp, Artificial Sequence
  ENSG00000131747_15 (sequence is synthesized)
cgacatcgttttctggaggaatttatcactcccattgtaaaggtatctaaaaacaagcaagaaatggcattttacagccttcctgaatttgaagagtggaagagttctactccaaatcat

SEQ ID NO: 294329 - DNA, 120 bp, Artificial Sequence
  ENSG00000131747_16 (sequence is synthesized)
aaaaaatggaaagtcaaatattacaaaggtttgggcaccagcacatcaaaggaagctaaagaatactttgcagatatgaaaagacatcgtatccagttcaaatattctggtcctgaagat

SEQ ID NO: 294330 - DNA, 120 bp, Artificial Sequence
  ENSG00000131747_17 (sequence is synthesized)
gatgctgctatcagcctggcctttagcaaaaaacagatagatgatcgaaaggaatggttaactaatttcatggaggatagaagacaacgaaagttacttgggcttcctgaggattacttg

SEQ ID NO: 294331 - DNA, 120 bp, Artificial Sequence
  ENSG00000131747_18 (sequence is synthesized)
tatggacaaactaccacatatctgacatataatgacttcatcaacaaggaacttatcttgttctcaaattctgataacgagagatctatcccttctatggtggatggtttgaaaccaggt

SEQ ID NO: 294332 - DNA, 120 bp, Artificial Sequence
  ENSG00000131747_19 (sequence is synthesized)
cagagaaaggttttgtttacttgcttcaaacggaatgacaagcgagaagtaaaggttgcccaattagctggatcagtggctgaaatgtcttcttatcatcatggtgagatgtcactaatg

SEQ ID NO: 294333 - DNA, 120 bp, Artificial Sequence
  ENSG00000131747_20 (sequence is synthesized)
atgaccattatcaatttggctcagaattttgtgggtagcaataatctaaacctcttgcagcccattggtcagtttggtaccaggctacatggtggcaaggattctgctagtccacgatac

SEQ ID NO: 294334 - DNA, 120 bp, Artificial Sequence
  ENSG00000131747_21 (sequence is synthesized)
atctttacaatgctcagctctttggctcgattgttatttccaccaaaagatgatcacacgttgaagtttttatatgatgacaaccagcgtgttgagcctgaatggtacattcctattatt

SEQ ID NO: 294335 - DNA, 120 bp, Artificial Sequence
  ENSG00000131747_22 (sequence is synthesized)
cccatggtgctgataaatggtgctgaaggaatcggtactgggtggtcctgcaaaatccccaactttgatgtgcgtgaaattgtaaataacatcaggcgtttgatggatggagaagaacct

SEQ ID NO: 294336 - DNA, 120 bp, Artificial Sequence
  ENSG00000131747_23 (sequence is synthesized)
caaatcaatatgtgattagtggtgaagtagctattcttaattctacaaccattgaaatctcagagcttcccgtcagaacatggacccagacatacaaagaacaagttctagaacccatgt

SEQ ID NO: 294337 - DNA, 120 bp, Artificial Sequence
  ENSG00000131747_24 (sequence is synthesized)
tgaatggcaccgagaagacacctcctctcataacagactatagggaataccatacagataccactgtgaaatttgttgtgaagatgactgaagaaaaactggcagaggcagagagagttg

SEQ ID NO: 294338 - DNA, 120 bp, Artificial Sequence
  ENSG00000131747_25 (sequence is synthesized)
gactacacaaagtcttcaaactccaaactagtctcacatgcaactctatggtgctttttgaccacgtaggctgtttaaagaaatatgacacggtgttggatattctaagagacttttttg

SEQ ID NO: 294339 - DNA, 120 bp, Artificial Sequence
  ENSG00000131747_26 (sequence is synthesized)
aactcagacttaaatattatggattaagaaaagaatggctcctaggaatgcttggtgctgaatctgctaaactgaataatcaggctcgctttatcttagagaaaatagatggcaaaataa

SEQ ID NO: 294340 - DNA, 120 bp, Artificial Sequence
  ENSG00000131747_27 (sequence is synthesized)
tcattgaaaataagcctaagaaagaattaattaaagttctgattcagaggggatatgattcggatcctgtgaaggcctggaaagaagcccagcaaaaggttccagatgaagaagaaaatg

SEQ ID NO: 294341 - DNA, 120 bp, Artificial Sequence
  ENSG00000131747_28 (sequence is synthesized)
aagagagtgacaacgaaaaggaaactgaaaagagtgactccgtaacagattctggaccaaccttcaactatcttcttgatatgcccctttggtatttaaccaaggaaaagaaagatgaac

SEQ ID NO: 294342 - DNA, 120 bp, Artificial Sequence
  ENSG00000131747_29 (sequence is synthesized)
tctgcaggctaagaaatgaaaaagaacaagagctggacacattaaaaagaaagagtccatcagatttgtggaaagaagacttggctacatttattgaagaattggaggctgttgaagcca

SEQ ID NO: 294343 - DNA, 120 bp, Artificial Sequence
  ENSG00000131747_30 (sequence is synthesized)
aggaaaaacaagatgaacaagtcggacttcctgggaaaggggggaaggccaaggggaaaaaaacacaaatggctgaagttttgccttctccgcgtggtcaaagagtcattccacgaataa

SEQ ID NO: 294344 - DNA, 120 bp, Artificial Sequence
  ENSG00000131747_31 (sequence is synthesized)
ccatagaaatgaaagcagaggcagaaaagaaaaataaaaagaaaattaagaatgaaaatactgaaggaagccctcaagaagatggtgtggaactagaaggcctaaaacaaagattagaaa

SEQ ID NO: 294345 - DNA, 120 bp, Artificial Sequence
  ENSG00000131747_32 (sequence is synthesized)
agaaacagaaaagagaaccaggtacaaagacaaagaaacaaactacattggcatttaagccaatcaaaaaaggaaagaagagaaatccctggtctgattcagaatcagataggagcagtg

SEQ ID NO: 294346 - DNA, 120 bp, Artificial Sequence
  ENSG00000131747_33 (sequence is synthesized)
acgaaagtaattttgatgtccctccacgagaaacagagccacggagagcagcaacaaaaacaaaattcacaatggatttggattcagatgaagatttctcagattttgatgaaaaaactg

SEQ ID NO: 294347 - DNA, 120 bp, Artificial Sequence
  ENSG00000131747_34 (sequence is synthesized)
atgatgaagattttgtcccatcagatgctagtccacctaagaccaaaacttccccaaaacttagtaacaaagaactgaaaccacagaaaagtgtcgtgtcagaccttgaagctgatgatg

SEQ ID NO: 294348 - DNA, 120 bp, Artificial Sequence
  ENSG00000131747_35 (sequence is synthesized)
ttaagggcagtgtaccactgtcttcaagccctcctgctacacatttcccagatgaaactgaaattacaaacccagttcctaaaaagaatgtgacagtgaagaagacagcagcaaaaagtc

SEQ ID NO: 294349 - DNA, 120 bp, Artificial Sequence
  ENSG00000131747_36 (sequence is synthesized)
agtcttccacctccactaccggtgccaaaaaaagggctgccccaaaaggaactaaaagggatccagctttgaattctggtgtctctcaaaagcctgatcctgccaaaaccaagaatcgcc

SEQ ID NO: 294350 - DNA, 120 bp, Artificial Sequence
  ENSG00000131747_37 (sequence is synthesized)
gcaaaaggaagccatccacttctgatgattctgactctaattttgagaaaattgtttcgaaagcagtcacaagcaagaaatccaagggggagagtgatgacttccatatggactttgact

SEQ ID NO: 294351 - DNA, 120 bp, Artificial Sequence
  ENSG00000131747_38 (sequence is synthesized)
cagctgtggctcctcgggcaaaatctgtacgggcaaagaaacctataaagtacctggaagagtcagatgaagatgatctgttttaaaatgtgaggcgattattttaagtaattatcttac

SEQ ID NO: 294352 - DNA, 120 bp, Artificial Sequence
  ENSG00000131747_39 (sequence is synthesized)
caagcccaagactggttttaaagttacctgaagctcttaacttcctcccctctgaatttagtttggggaaggtgtttttagtacaagacatcaaagtgaagtaaagcccaagtgttcttt

SEQ ID NO: 294353 - DNA, 120 bp, Artificial Sequence
  ENSG00000131747_40 (sequence is synthesized)
agctttttataatactgtctaaatagtgaccatctcatgggcattgttttcttctctgctttgtctgtgttttgagtctgctttcttttgtctttaaaacctgatttttaagttcttctg

SEQ ID NO: 294354 - DNA, 120 bp, Artificial Sequence
  ENSG00000131747_41 (sequence is synthesized)
aactgtagaaatagctatctgatcacttcagcgtaaagcagtgtgtttattaaccatccactaagctaaaactagagcagtttgatttaaaagtgtcactcttcctccttttctactttc

SEQ ID NO: 294355 - DNA, 120 bp, Artificial Sequence
  ENSG00000131747_42 (sequence is synthesized)
agtagatatgagatagagcataattatctgttttatcttagttttatacataatttaccatcagatagaactttatggttctagtacagatactctactacactcagcctcttatgtgcc

SEQ ID NO: 294356 - DNA, 120 bp, Artificial Sequence
  ENSG00000131747_43 (sequence is synthesized)
aagtttttctttaagcaatgagaaattgctcatgttcttcatcttctcaaatcatcagaggccgaagaaaaacactttggctgtgtctataacttgacacagtcaatagaatgaagaaaa

SEQ ID NO: 294357 - DNA, 120 bp, Artificial Sequence
  ENSG00000131747_44 (sequence is synthesized)
ttagagtagttatgtgattatttcagctcttgacctgtcccctctggctgcctctgagtctgaatctcccaaagagagaaaccaatttctaagaggactggattgcagaagactcgggga

SEQ ID NO: 294358 - DNA, 120 bp, Artificial Sequence
  ENSG00000131747_45 (sequence is synthesized)
caacatttgatccaagatcttaaatgttatattgataaccatgctcagcaatgagctattagattcattttgggaaatctccataatttcaatttgtaaactttgttaagacctgtctac

SEQ ID NO: 294359 - DNA, 120 bp, Artificial Sequence
  ENSG00000131747_46 (sequence is synthesized)
attgttatatgtgtgtgacttgagtaatgttatcaacgtttttgtaaatatttactatgtttttctattagctaaattccaacaattttgtactttaataaaatgttctaaacattgcaa

SEQ ID NO: 294360 - DNA, 120 bp, Artificial Sequence
  ENSG00000131747_47 (sequence is synthesized)
gtgacgggtgaagctctggggctgcggtcaggccggcgaccggcttgggagcccatattctccattcccggttccggggtgatcgtggagaggcggaagccccttctggtgctagtagtg

SEQ ID NO: 294361 - DNA, 120 bp, Artificial Sequence
  ENSG00000131747_48 (sequence is synthesized)
aaagaactgaaaccacagaaaagtgtcgtgtcaggtatgtatttaagtaaaagtagtgagacatctgccttactgggacactcagatccaactgggttctaatcctggctacattatcca

SEQ ID NO: 294362 - DNA, 120 bp, Artificial Sequence
  ENSG00000131747_49 (sequence is synthesized)
agtacttcctttggaaataaatttgagttcttattaacattatgttgatactgttcactgggtttagtttcacatgtaaataggtactgcattcagtatactaaaagtaatcatagtgct

SEQ ID NO: 294363 - DNA, 120 bp, Artificial Sequence
  ENSG00000131747_50 (sequence is synthesized)
tgccaggtactttgctaggtgctagagatacaaaaaataaaaactgttcttgctgataaaaaattcagaaattagaacaaagttttaagagtatgttttaaatattccagaaaagtcaca

SEQ ID NO: 294364 - DNA, 120 bp, Artificial Sequence
  ENSG00000131747_51 (sequence is synthesized)
gatatacaaatttatgcaagcacgaagacagtttaatttccagttttaaacttttgacttgtgtaaaaccttatccccttcctaaaatattactcaaaatcattatctctgtttactttt

SEQ ID NO: 294365 - DNA, 120 bp, Artificial Sequence
  ENSG00000131748_0 (sequence is synthesized)
cttcttccgctctgaggcgctactgaggccgcggagccggactgcggttggggcgggaagagccggggccgtggctgacatggagcagccctgctgctgaggccgcgccctccccgccct

SEQ ID NO: 294366 - DNA, 120 bp, Artificial Sequence
  ENSG00000131748_1 (sequence is synthesized)
gaggtgggggcccaccaggatgagcaagctgcccagggagctgacccgagacttggagcgcagcctgcctgccgtggcctccctgggctcctcactgtcccacagccagagcctctcctc

SEQ ID NO: 294367 - DNA, 120 bp, Artificial Sequence
  ENSG00000131748_2 (sequence is synthesized)
gcacctccttccgccgcctgagaagcgaagggccatctctgatgtccgccgcaccttctgtctcttcgtcaccttcgacctgctcttcatctccctgctctggatcatcgaactgaatac

SEQ ID NO: 294368 - DNA, 120 bp, Artificial Sequence
  ENSG00000131748_3 (sequence is synthesized)
caacacaggcatccgtaagaacttggagcaggagatcatccagtacaactttaaaacttccttcttcgacatctttgtcctggccttcttccgcttctctggactgctcctaggctatgc

SEQ ID NO: 294369 - DNA, 120 bp, Artificial Sequence
  ENSG00000131748_4 (sequence is synthesized)
cgtgctgcggctccggcactggtgggtgattgcggtcacgacgctggtgtccagtgcattcctcattgtcaaggtcatcctctctgagctgctcagcaaaggggcatttggctacctgct

SEQ ID NO: 294370 - DNA, 120 bp, Artificial Sequence
  ENSG00000131748_5 (sequence is synthesized)
ccccatcgtctcttttgtcctcgcctggttggagacctggttccttgacttcaaagtcctaccccaggaagctgaagaggagcgatggtatcttgccgcccaggttgctgttgcccgtgg

SEQ ID NO: 294371 - DNA, 120 bp, Artificial Sequence
  ENSG00000131748_6 (sequence is synthesized)
acccctgctgttctccggtgctctgtccgagggacagttctattcacccccagaatcctttgcagggtctgacaatgaatcagatgaagaagttgctgggaagaaaagtttctctgctca

SEQ ID NO: 294372 - DNA, 120 bp, Artificial Sequence
  ENSG00000131748_7 (sequence is synthesized)
ggagcgggagtacatccgccaggggaaggaggccacggcagtggtggaccagatcttggcccaggaagagaactggaagtttgagaagaataatgaatatggggacaccgtgtacaccat

SEQ ID NO: 294373 - DNA, 120 bp, Artificial Sequence
  ENSG00000131748_8 (sequence is synthesized)
tgaagttccctttcacggcaagacgtttatcctgaagaccttcctgccctgtcctgcggagctcgtgtaccaggaggtgatcctgcagcccgagaggatggtgctgtggaacaagacagt

SEQ ID NO: 294374 - DNA, 120 bp, Artificial Sequence
  ENSG00000131748_9 (sequence is synthesized)
gactgcctgccagatcctgcagcgagtggaagacaacaccctcatctcctatgacgtgtctgcaggggctgcgggcggcgtggtctccccaagggacttcgtgaatgtccggcgcattga

SEQ ID NO: 294375 - DNA, 120 bp, Artificial Sequence
  ENSG00000131748_10 (sequence is synthesized)
gcggcgcagggaccgatacttgtcatcagggatcgccacctcacacagtgccaagcccccgacgcacaaatatgtccggggagagaatggccctgggggcttcatcgtgctcaagtcggc

SEQ ID NO: 294376 - DNA, 120 bp, Artificial Sequence
  ENSG00000131748_11 (sequence is synthesized)
cgtgtttgcacctttgtctggattcttaatacagatctcaagggccgcctgccccggtacctcatccaccagagcctcgcggccaccatgtttgaatttgcctttcacctgcgacagcgc

SEQ ID NO: 294377 - DNA, 120 bp, Artificial Sequence
  ENSG00000131748_12 (sequence is synthesized)
atcagcgagctgggggcccgggcgtgactgtgccccctcccaccctgcgggccagggtcctgtcgccaccacttccagagccagaaagggtgccagttgggctcgcactgcccacatggg

SEQ ID NO: 294378 - DNA, 120 bp, Artificial Sequence
  ENSG00000131748_13 (sequence is synthesized)
acctggccccaggctgtcaccctccaccgagccacgcagtgcctggagttgactgactgagcaggctgtggggtggagcactggactccggggccccactggctggaggaagtggggtct

SEQ ID NO: 294379 - DNA, 120 bp, Artificial Sequence
  ENSG00000131748_14 (sequence is synthesized)
ggcctgttgatgtttacatggcgccctgcctcctggaggaccagattgctctgccccaccttgccagggcagggtctgggctgggcacctgacttggctggggaggaccagggccctggg

SEQ ID NO: 294380 - DNA, 120 bp, Artificial Sequence
  ENSG00000131748_15 (sequence is synthesized)
cagggcagggcagcctgtcacccgtgtgaagatgaaggggctcttcatctgcctgcgctctcgtcggtttttttaggattattgaaagagtctgggacccttgttggggagtgggtggca

SEQ ID NO: 294381 - DNA, 120 bp, Artificial Sequence
  ENSG00000131748_16 (sequence is synthesized)
ggtgggggtgggctgctggccatgaatctctgcctctcccaggctgtccccctcctcccagggcctcctgggggacctttgtattaagccaattaaaaacatgaatttaaaaaaaaaaaa

SEQ ID NO: 294382 - DNA, 120 bp, Artificial Sequence
  ENSG00000131748_17 (sequence is synthesized)
aaattccagcccctcccactgccttgcctcttgagggaagagaaaggcaggcagcagcttggatgaagagggaagacccctcacacagcctctcctgggctcacaggagggcggagcccg

SEQ ID NO: 294383 - DNA, 120 bp, Artificial Sequence
  ENSG00000131748_18 (sequence is synthesized)
gggagccagttcctgaaacatgccccccattccccccccgcccaccccccactccccgctttcctgaccagttcaactgagcagatgactggtcagaaaaaaatgccccgccccctgcca

SEQ ID NO: 294384 - DNA, 120 bp, Artificial Sequence
  ENSG00000131748_19 (sequence is synthesized)
ggcttcagcggggcaagtttaaagtctctagtccaggaatggaggtgggggtatgggcacctggcagtgcccacagcaagccttgactgtgtggcctggagatggggcctgagcttcagg

SEQ ID NO: 294385 - DNA, 120 bp, Artificial Sequence
  ENSG00000131748_20 (sequence is synthesized)
gtcactgaggcacctctgggatccaggccacctggagccccggacctcccagactccactcacccattccctctccccgcacggcactcacaccaggggcggcctggagcccggatcgca

SEQ ID NO: 294386 - DNA, 120 bp, Artificial Sequence
  ENSG00000131748_21 (sequence is synthesized)
gggcggggccaggccactgcctgccttcctcctccctcccggctggcctgcccccttgcctgcctgcatgcaggcttccagcagagccagcttcttcagagccaggtggatcctgtttcg

SEQ ID NO: 294387 - DNA, 120 bp, Artificial Sequence
  ENSG00000131748_22 (sequence is synthesized)
gtcctgcctaggtgtgtgaccctgggcgaatctacctctctcagcttctgcttcccactttatgaaaatgggactgatgtcacagggttgttatgagattaaaagatatgaagaaccggg

SEQ ID NO: 294388 - DNA, 120 bp, Artificial Sequence
  ENSG00000131748_23 (sequence is synthesized)
gagaggagcatttctctaatttggggtgtctgtccctgttgtccgggttagggggagagggaatcctgtcctttggtatctataaggaatcatccttcacccgcttccctgacttagccc

SEQ ID NO: 294389 - DNA, 120 bp, Artificial Sequence
  ENSG00000131748_24 (sequence is synthesized)
cttgcagctctaggaatcagaaggttctttctccagcctaaccccagtttatcctgctgcagacttgagagggttcccaagcagctgctaccaggaatggggtgtatgccagtttggctg

SEQ ID NO: 294390 - DNA, 88 bp, Artificial Sequence
  ENSG00000131748_25 (sequence is synthesized)
cttccgctctgaggcgctactgaggccgcggagccggactgcggttggggcgggaagagccggggccgtggctgacatggagcagaga

SEQ ID NO: 294391 - DNA, 120 bp, Artificial Sequence
  ENSG00000131748_26 (sequence is synthesized)
tttgtgcttggaaaacaaagaacagagcttggggccctcttctcctgggggtggtggcaggcccagaggctgttgacaggaccagaggctggagctcagggctaggcctggtaggagcag

SEQ ID NO: 294392 - DNA, 120 bp, Artificial Sequence
  ENSG00000131748_27 (sequence is synthesized)
agaggggagttgcgggcatgagagtcagtctgaagcatctcgccacctctgagcagcctccagtagcctgagggggagcttgggtgggggtaccccaggctgctagggtgtaactgtcct

SEQ ID NO: 294393 - DNA, 120 bp, Artificial Sequence
  ENSG00000131748_28 (sequence is synthesized)
aacccaaagattacatgggttggagccatattcctgccccaagagagggagctgggccctcgggtcggcaggaggctgggctggattggacgtttcccccgtgccccttggccccccttc

SEQ ID NO: 294394 - DNA, 120 bp, Artificial Sequence
  ENSG00000131748_29 (sequence is synthesized)
cccgcaccccccatgtttacttccctgctgttctgcccccttggctccaggctttgaaggggaagccaggcttctgctctgcatccgttgtttcgtttcatgatcaaaacaacattatct

SEQ ID NO: 294395 - DNA, 120 bp, Artificial Sequence
  ENSG00000131748_30 (sequence is synthesized)
acaaagatcgtagagagcttggaaaacagagagcaacatgccccagtccctctctctggccagttcttgtggcagccccattggcctggagacatggttttttgtggttgcagctgcagc

SEQ ID NO: 294396 - DNA, 120 bp, Artificial Sequence
  ENSG00000131748_31 (sequence is synthesized)
tgtccccccgtcttttaactcgacatcaaaagcctctctcctgccagtgccataggtttgttagagctactgttttgtaacagctgctcaggtgtccccaaactcctggagttttccacc

SEQ ID NO: 294397 - DNA, 120 bp, Artificial Sequence
  ENSG00000131748_32 (sequence is synthesized)
ctgagctgttaaaaacctgccctgcctgtcacccatttctgtgccaccagcccaccccctgcctccactctcctccctgccaccttctgtccctgccataggaatatggggacaccgtgt

SEQ ID NO: 294398 - DNA, 120 bp, Artificial Sequence
  ENSG00000131748_33 (sequence is synthesized)
aggtgagtgaggggagcgggtgtcctggagccccagacagcacaggaggctccaggaaggtgccgaggggccctctggtgggtgccccccaccaagagggaagggttggtctgcccgagc

SEQ ID NO: 294399 - DNA, 120 bp, Artificial Sequence
  ENSG00000131748_34 (sequence is synthesized)
cttcctctgtctggcctcgcgccgccccgcgcgggttggggtctccagcaatgactcttggcgaccccgcctatcctggggagcccggggaggacgttcgggatctccttccaaagcctc

SEQ ID NO: 294400 - DNA, 120 bp, Artificial Sequence
  ENSG00000131748_35 (sequence is synthesized)
gctgccaggtgggttctgtggagtggaggggaccctgctgctgacttggttgctgcatgactttgggggctctctgccatgcctgggcctcccctttgtcagccacctttcttacttgaa

SEQ ID NO: 294401 - DNA, 120 bp, Artificial Sequence
  ENSG00000131748_36 (sequence is synthesized)
caagcccccgacgcacaaatatgtccgggccgcctgccccggtacctcatccaccagagcctcgcggccaccatgtttgaatttgcctttcacctgcgacagcgcatcagcgagctgggg

SEQ ID NO: 294402 - DNA, 120 bp, Artificial Sequence
  ENSG00000131748_37 (sequence is synthesized)
atcatgttatgctgtgatttggagcaggagggtgggaggctttctgaggagaggacttttgagctgcctgttgaagggtctgtgggagaacattccaggcatggggagagccagatcgaa

SEQ ID NO: 294403 - DNA, 120 bp, Artificial Sequence
  ENSG00000131748_38 (sequence is synthesized)
ggtcccaaggcaggacagggcagctgtattgagggatgtaaaaaaggccagagtggcggtggcagcaagacagagagaagggctgggcagaggccacctgcaggcctggactgagagggc

SEQ ID NO: 294404 - DNA, 120 bp, Artificial Sequence
  ENSG00000131748_39 (sequence is synthesized)
gatggaggaggactcacttcccagcctctgccttccccttcctccctccctcccctgggcaggtcacgacgctggtgtccagtgcattcctcattgtcaaggtcatcctctctgaggtca

SEQ ID NO: 294405 - DNA, 120 bp, Artificial Sequence
  ENSG00000131748_40 (sequence is synthesized)
agggcatgtgcccccccttcttacctctgagtcctgaggccctgaggaagggtggctggtggccagcccggccccaccctggtctgtttgtgttgctggtgccaagagccaggcccagca

SEQ ID NO: 294406 - DNA, 120 bp, Artificial Sequence
  ENSG00000131748_41 (sequence is synthesized)
tgttcttcctgccaggggtgagtgggagagggcgacccaggctggattccagagctgcacctgcattctggcccagagcccccctgctggtgccagctgcaaggggagaccctgctgagg

SEQ ID NO: 294407 - DNA, 120 bp, Artificial Sequence
  ENSG00000131748_42 (sequence is synthesized)
cccgcttcgctctcgggggcggactcagcggcggaagtggcgctgccggaagatcttcttccgctctgaggcgctactgaggccgcggagccggactgcggttggggcgggaagagccgg

SEQ ID NO: 294408 - DNA, 90 bp, Artificial Sequence
  ENSG00000131748_43 (sequence is synthesized)
atcttcttccgctctgaggcgctactgaggccgcggagccggactgcggttggggcgggaagagccggggccgtggctgacatggagcaa

SEQ ID NO: 294409 - DNA, 120 bp, Artificial Sequence
  ENSG00000131748_44 (sequence is synthesized)
tccggtgagcctcactttgcctggggtcacccctgccagcccctcccctgggagcattgagcagtgcagggtacagcatgtacagctgggcacttcccctgctgaggctgcgttcctgtt

SEQ ID NO: 294410 - DNA, 120 bp, Artificial Sequence
  ENSG00000131748_45 (sequence is synthesized)
ccctgtcccgctgggctctgctcctcctggctactaatcctgctaatcttgctgctctgtctgtggagatggggggtggtggacagctggaaccaagccaccaaggctggacgggatgtg

SEQ ID NO: 294411 - DNA, 120 bp, Artificial Sequence
  ENSG00000131759_0 (sequence is synthesized)
gcagcagcctaacccagaagcaggggggaatcctgaatcgagctgagagggcttccccggttctcctgggaaccccatcggccccctgccagcacacacctgagcagcatcacaggacat

SEQ ID NO: 294412 - DNA, 120 bp, Artificial Sequence
  ENSG00000131759_1 (sequence is synthesized)
ggccccctcagccacctagctggggcccatctaggagtggcatcttttttggtgccctgaaggccagctctggaccttcccaggaaaagtgccagctcacagaactgcttgaccaaagga

SEQ ID NO: 294413 - DNA, 120 bp, Artificial Sequence
  ENSG00000131759_2 (sequence is synthesized)
ccggctcttgagacatcccccaacccacctggcccccagctagggtgggggctccaggagactgagattagcctgccctctttggacagcagctccaggacagggcgggtgggctgacca

SEQ ID NO: 294414 - DNA, 120 bp, Artificial Sequence
  ENSG00000131759_3 (sequence is synthesized)
cccaaaccccatctgggcccaggccccatgccccgaggaggggtggtctgaagcccaccagagccccctgccagactgtctgcctcccttctgactgtggccgcttggcatggccagcaa

SEQ ID NO: 294415 - DNA, 120 bp, Artificial Sequence
  ENSG00000131759_4 (sequence is synthesized)
cagcagctcctgcccgacacctgggggcgggcacctcaatgggtacccggtgcctccctacgccttcttcttcccccctatgctgggtggactctccccgccaggcgctctgaccactct

SEQ ID NO: 294416 - DNA, 120 bp, Artificial Sequence
  ENSG00000131759_5 (sequence is synthesized)
ccagcaccagcttccagttagtggatatagcacaccatccccagccaccattgagacccagagcagcagttctgaagagatagtgcccagccctccctcgccaccccctctaccccgcat

SEQ ID NO: 294417 - DNA, 120 bp, Artificial Sequence
  ENSG00000131759_6 (sequence is synthesized)
ctacaagccttgctttgtctgtcaggacaagtcctcaggctaccactatggggtcagcgcctgtgagggctgcaagggcttcttccgccgcagcatccagaagaacatggtgtacacgtg

SEQ ID NO: 294418 - DNA, 120 bp, Artificial Sequence
  ENSG00000131759_7 (sequence is synthesized)
tcaccgggacaagaactgcatcatcaacaaggtgacccggaaccgctgccagtactgccgactgcagaagtgctttgaagtgggcatgtccaaggagtctgtgagaaacgaccgaaacaa

SEQ ID NO: 294419 - DNA, 120 bp, Artificial Sequence
  ENSG00000131759_8 (sequence is synthesized)
gaagaagaaggaggtgcccaagcccgagtgctctgagagctacacgctgacgccggaggtgggggagctcattgagaaggtgcgcaaagcgcaccaggaaaccttccctgccctctgcca

SEQ ID NO: 294420 - DNA, 120 bp, Artificial Sequence
  ENSG00000131759_9 (sequence is synthesized)
gctgggcaaatacactacgaacaacagctcagaacaacgtgtctctctggacattgacctctgggacaagttcagtgaactctccaccaagtgcatcattaagactgtggagttcgccaa

SEQ ID NO: 294421 - DNA, 120 bp, Artificial Sequence
  ENSG00000131759_10 (sequence is synthesized)
gcagctgcccggcttcaccaccctcaccatcgccgaccagatcaccctcctcaaggctgcctgcctggacatcctgatcctgcggatctgcacgcggtacacgcccgagcaggacaccat

SEQ ID NO: 294422 - DNA, 120 bp, Artificial Sequence
  ENSG00000131759_11 (sequence is synthesized)
gaccttctcggacgggctgaccctgaaccggacccagatgcacaacgctggcttcggccccctcaccgacctggtctttgccttcgccaaccagctgctgcccctggagatggatgatgc

SEQ ID NO: 294423 - DNA, 120 bp, Artificial Sequence
  ENSG00000131759_12 (sequence is synthesized)
ggagacggggctgctcagcgccatctgcctcatctgcggagaccgccaggacctggagcagccggaccgggtggacatgctgcaggagccgctgctggaggcgctaaaggtctacgtgcg

SEQ ID NO: 294424 - DNA, 120 bp, Artificial Sequence
  ENSG00000131759_13 (sequence is synthesized)
agatgctaatgaagattactgacctgcgaagcatcagcgccaagggggctgagcgggtgatcacgctgaagatggagatcccgggctccatgccgcctctcatccaggaaatgttggaga

SEQ ID NO: 294425 - DNA, 120 bp, Artificial Sequence
  ENSG00000131759_14 (sequence is synthesized)
actcagagggcctggacactctgagcggacagccggggggtggggggcgggacgggggtggcctggcccccccgccaggcagctgtagccccagcctcagccccagctccaacagaagca

SEQ ID NO: 294426 - DNA, 120 bp, Artificial Sequence
  ENSG00000131759_15 (sequence is synthesized)
gcccggccacccactccccgtgaccgcccacgccacatggacacagccctcgccctccgccccggcttttctctgcctttctaccgaccatgtgaccccgcaccagccctgcccccacct

SEQ ID NO: 294427 - DNA, 120 bp, Artificial Sequence
  ENSG00000131759_16 (sequence is synthesized)
gccctcccgggcagtactggggaccttccctgggggacggggagggaggaggcagcgactccttggacagaggcctgggccctcagtggactgcctgctcccacagcctgggctgacgtc

SEQ ID NO: 294428 - DNA, 120 bp, Artificial Sequence
  ENSG00000131759_17 (sequence is synthesized)
agaggccgaggccaggaactgagtgaggcccctggtcctgggtctcaggatgggtcctgggggcctcgtgttcatcaagacacccctctgcccagctcaccacatcttcatcaccagcaa

SEQ ID NO: 294429 - DNA, 120 bp, Artificial Sequence
  ENSG00000131759_18 (sequence is synthesized)
acgccaggacttggctcccccatcctcagaactcacaagccattgctccccagctggggaacctcaacctcccccctgcctcggttggtgacagagggggtgggacaggggcggggggtt

SEQ ID NO: 294430 - DNA, 120 bp, Artificial Sequence
  ENSG00000131759_19 (sequence is synthesized)
ccccctgtacataccctgccataccaaccccaggtattaattctcgctggttttgtttttattttaatttttttgttttgatttttttaataagaattttcattttaagcacatttatac

SEQ ID NO: 294431 - DNA, 120 bp, Artificial Sequence
  ENSG00000131759_20 (sequence is synthesized)
tgaaggaatttgtgctgtgtattggggggagctggatccagagctggagggggtgggtccgggggagggagtggctcggaaggggcccccactctcctttcatgtccctgtgccccccag

SEQ ID NO: 294432 - DNA, 120 bp, Artificial Sequence
  ENSG00000131759_21 (sequence is synthesized)
ttctcctcctcagccttttcctcctcagttttctctttaaaactgtgaagtactaactttccaaggcctgccttcccctccctcccactggagaagccgccagcccctttctccctctgc

SEQ ID NO: 294433 - DNA, 120 bp, Artificial Sequence
  ENSG00000131759_22 (sequence is synthesized)
ctgaccactgggtgtggacggtgtggggcagccctgaaaggacaggctcctggccttggcacttgcctgcacccaccatgaggcatggagcagggcagagcaagggccccgggacagagt

SEQ ID NO: 294434 - DNA, 120 bp, Artificial Sequence
  ENSG00000131759_23 (sequence is synthesized)
tttcccagacctggctcctcggcagagctgcctcccgtcagggcccacatcatctaggctccccagcccccactgtgaaggggctggccaggggcccgagctgcccccacccccggcctc

SEQ ID NO: 294435 - DNA, 120 bp, Artificial Sequence
  ENSG00000131759_24 (sequence is synthesized)
agccaccagcacccccatagggcccccagacaccacacacatgcgcgtgcgcacacacacaaacacacacacactggacagtagatgggccgacacacacttggcccgagttcctccatt

SEQ ID NO: 294436 - DNA, 120 bp, Artificial Sequence
  ENSG00000131759_25 (sequence is synthesized)
tccctggcctgccccccacccccaacctgtcccacccccgtgccccctccttaccccgcaggacgggcctacaggggggtctcccctcacccctgcacccccagctgggggagctggctc

SEQ ID NO: 294437 - DNA, 120 bp, Artificial Sequence
  ENSG00000131759_26 (sequence is synthesized)
tgccccgacctccttcaccaggggttggggccccttcccctggagcccgtgggtgcacctgttactgttgggctttccactgagatctactggataaagaataaagttctatttattcta

SEQ ID NO: 294438 - DNA, 120 bp, Artificial Sequence
  ENSG00000131759_27 (sequence is synthesized)
gtgactcgctatggccgctgccatcgccccgcgcccctgagccgcggccccctggacggctcctctcccgggaccccgcaccctgatgccgagcagcaccagggcgccgggttagggcag

SEQ ID NO: 294439 - DNA, 120 bp, Artificial Sequence
  ENSG00000131759_28 (sequence is synthesized)
agacgggagtcccctcgaggtgaagccgctgagttcccgggccccgccaggcttccctgggagagccgacggaccccccctcccagcacacacaacttccctgcttttcaccgggactgg

SEQ ID NO: 294440 - DNA, 120 bp, Artificial Sequence
  ENSG00000131759_29 (sequence is synthesized)
cggagcggccggcggacttagacgcggggacttcagggcagggggcgccccctgcccgggtcaccagtcggggcgaggggacgtctcctctcccccagctgctctgctcggatggcgccg

SEQ ID NO: 294441 - DNA, 120 bp, Artificial Sequence
  ENSG00000131759_30 (sequence is synthesized)
ctgggctaggggccttcttccgctgccgcggtacacccagagctacccccgcctctccccgggaggaggaaggacgccattgagacccagagcagcagttctgaagagatagtgcccagc

SEQ ID NO: 294442 - DNA, 120 bp, Artificial Sequence
  ENSG00000131759_31 (sequence is synthesized)
cccagaagcaggggggaatcctgaatcgagctgagagggcttccccggttctcctgggaaccccatcggccccctgccagcacacacctgagcaggtgtgtgactctggggtgtaacgcg

SEQ ID NO: 294443 - DNA, 120 bp, Artificial Sequence
  ENSG00000131759_32 (sequence is synthesized)
tcagctccccagctaatgggccaagagattctccccgccaggtcccccactctcaggctggggagccctactccccacttgccccaggagctgctcagagccagtcccaagggaccccca

SEQ ID NO: 294444 - DNA, 120 bp, Artificial Sequence
  ENSG00000131759_33 (sequence is synthesized)
acatgatgtcacagacaatgacacaagccggtgtctcattccgacacagcgtccgagctgcacaatgtcacacccgggtgccaaacacttggccccgcgcgacccggccctacgcctcct

SEQ ID NO: 294445 - DNA, 120 bp, Artificial Sequence
  ENSG00000131759_34 (sequence is synthesized)
cgcgtctccgggggaggtggcccggttcggccgggcagggggctggcgggcgagccccgcgggcgggctggcgagcgggtgatgtcacgggcagcgccattgagacccagagcagcagtt

SEQ ID NO: 294446 - DNA, 120 bp, Artificial Sequence
  ENSG00000131759_35 (sequence is synthesized)
gtggggggtcccacccctaatcccttcctagtggtggatttttataaccagaaccgggcctgtttgctcccagagaaggggctccccgccccgggtccgtactccaccccgctccggact

SEQ ID NO: 294447 - DNA, 120 bp, Artificial Sequence
  ENSG00000131759_36 (sequence is synthesized)
gttgttggttgccatggtgatgtctgccgtgggcactacccctggttcttgtggggaaggagctacccctccccaccaggctgggggggtacttgggggacttgactagggggtcctttc

SEQ ID NO: 294448 - DNA, 120 bp, Artificial Sequence
  ENSG00000131759_37 (sequence is synthesized)
aggctgagtgtgtgtggtctctgatgccccagattccccaggaccccccagacttctgtctgtggggaggagtcactgccacctactcagactgagtgctggggagactgtgaccgcatc

SEQ ID NO: 294449 - DNA, 120 bp, Artificial Sequence
  ENSG00000131771_0 (sequence is synthesized)
agaggcagagacacacgcggagaggaggagaggctgagggagggaggtggagaaggacgggagaggcagagagaggagacacgcagagacactcaggaggggagagacaccgagacgcag

SEQ ID NO: 294450 - DNA, 120 bp, Artificial Sequence
  ENSG00000131771_1 (sequence is synthesized)
agacactcaggaggggagagacaccgagacgcagagacacccaggccggggagcgcgagggagcgaggcacagacctggctcagcgagcgcggggggcgagccccgagtcccgagagcct

SEQ ID NO: 294451 - DNA, 120 bp, Artificial Sequence
  ENSG00000131771_2 (sequence is synthesized)
gggggcgcgcccagcccgggcgccgaccctcctcccgctcccgcgccctcccctcggcgggcacggtatttttatccgtgcgcgaacagccctcctcctcctctcgccgcacagcccgcc

SEQ ID NO: 294452 - DNA, 120 bp, Artificial Sequence
  ENSG00000131771_3 (sequence is synthesized)
gcctgcgcgggggagcccagcacagaccgccgccgggaccccgagtcgcgcaccccagccccaccgcccaccccgcgcgccatggaccccaaggaccgcaagaagatccagttctcggtg

SEQ ID NO: 294453 - DNA, 120 bp, Artificial Sequence
  ENSG00000131771_4 (sequence is synthesized)
cccgcgccccctagccagctcgacccccgccaggtggagatgatccggcgcaggagaccaacgcctgccatgctgttccggctctcagagcactcctcaccagaggaggaagcctccccc

SEQ ID NO: 294454 - DNA, 120 bp, Artificial Sequence
  ENSG00000131771_5 (sequence is synthesized)
caccagagagcctcaggagaggggcaccatctcaagtcgaagagacccaacccctgtgcctacacaccaccttcgctgaaagctgtgcagcgcattgctgagtctcacctgcagtctatc

SEQ ID NO: 294455 - DNA, 120 bp, Artificial Sequence
  ENSG00000131771_6 (sequence is synthesized)
agcaatttgaatgagaaccaggcctcagaggaggaggatgagctgggggagcttcgggagctgggttatccaagagaggaagatgaggaggaagaggaggatgatgaagaagaggaagaa

SEQ ID NO: 294456 - DNA, 120 bp, Artificial Sequence
  ENSG00000131771_7 (sequence is synthesized)
gctgaagtcctgaaggtcatcaggcagtctgctgggcaaaagacaacctgtggccagggtctggaagggccctgggagcgcccaccccctctggatgagtccgagagagatggaggctct

SEQ ID NO: 294457 - DNA, 120 bp, Artificial Sequence
  ENSG00000131771_8 (sequence is synthesized)
gaggaccaagtggaagacccagcactaagtgagcctggggaggaacctcagcgcccttccccctctgagcctggcacataggcacccagcctgcatctcccaggaggaagtggaggggac

SEQ ID NO: 294458 - DNA, 120 bp, Artificial Sequence
  ENSG00000131771_9 (sequence is synthesized)
atcgctgttccccagaaacccactctatcctcaccctgttttgtgctcttcccctcgcctgctagggctgcggcttctgacttctagaagactaaggctggtctgtgtttgcttgtttgc

SEQ ID NO: 294459 - DNA, 120 bp, Artificial Sequence
  ENSG00000131771_10 (sequence is synthesized)
ccacctttggctgatacccagagaacctgggcacttgctgcctgatgcccacccctgccagtcattcctccattcacccagcgggaggtgggatgtgagacagcccacattggaaaatcc

SEQ ID NO: 294460 - DNA, 120 bp, Artificial Sequence
  ENSG00000131771_11 (sequence is synthesized)
agaaaaccgggaacagggatttgcccttcacaattctactccccagatcctctcccctggacacaggagacccacagggcaggaccctaagatctggggaaaggaggtcctgagaacctt

SEQ ID NO: 294461 - DNA, 120 bp, Artificial Sequence
  ENSG00000131771_12 (sequence is synthesized)
gaggtacccttagatccttttctacccactttcctatggaggattccaagtcaccacttctctcaccggcttctaccagggtccaggactaaggcgtttttctccatagcctcaacattt

SEQ ID NO: 294462 - DNA, 120 bp, Artificial Sequence
  ENSG00000131771_13 (sequence is synthesized)
tgggaatcttcccttaatcacccttgctcctcctgggtgcctggaagatggactggcagagacctctttgttgcgttttgtgctttgatgccaggaatgccgcctagtttatgtccccgg

SEQ ID NO: 294463 - DNA, 120 bp, Artificial Sequence
  ENSG00000131771_14 (sequence is synthesized)
tggggcacacagcggggggcgccaggttttccttgtcccccagctgctctgcccctttccccttcttccctgactccaggcctgaacccctcccgtgctgtaataaatctttgtaaataa

SEQ ID NO: 294464 - DNA, 120 bp, Artificial Sequence
  ENSG00000131771_15 (sequence is synthesized)
ttcaagttctggggagaccgcagggggccccccagctggctccccaggccttggctctaactcccaccctcctcccagccccaggagaacacgattctccatgctcattggccagtttcc

SEQ ID NO: 294465 - DNA, 120 bp, Artificial Sequence
  ENSG00000131771_16 (sequence is synthesized)
ttttcatttctcacaaggactgggtgaagagttctgcagccttacagagactggaaaagaagcccaaaccaaggcccccagagaggtcccccaggcccctttgggtccctgagcctcagc

SEQ ID NO: 294466 - DNA, 120 bp, Artificial Sequence
  ENSG00000131771_17 (sequence is synthesized)
tggaggtggggggtgcctgcagtgcgctggctcagtctccttctgaaaagctggatccagcttgtttgaagcccttgagctgatcttagatccggcgcaggagaccaacgcctgccatgc

SEQ ID NO: 294467 - DNA, 120 bp, Artificial Sequence
  ENSG00000131771_18 (sequence is synthesized)
gaactgggcagacgctaggggagcttttgtcagtggggagggattgtttcgccacacatagcccgctgtcagcgtggcgcaacaacccaacgtaaagaccaattttttctcagtctggcc

SEQ ID NO: 294468 - DNA, 120 bp, Artificial Sequence
  ENSG00000131771_19 (sequence is synthesized)
ttgcaaaacacaggagtcccgaggctgcaatgggcagctatgggccttaacatcgggttgtgggcttgaaagaaaagagatggctggcctaagacaaccagcaggcatccgcgtggaagg

SEQ ID NO: 294469 - DNA, 120 bp, Artificial Sequence
  ENSG00000131771_20 (sequence is synthesized)
gactccacctgcagctcctcttcaccagcctgtggtggaccacctcccacccctgctcatccagggcgccttctcctgtgggcttcacccctggcctcccctcccatttgcatcccattt

SEQ ID NO: 294470 - DNA, 120 bp, Artificial Sequence
  ENSG00000131771_21 (sequence is synthesized)
agtctggggcaaggctggggaccttccaactgaagaaggaagacttgtggtggggggagtttggggccccacagagtggggcagagaaggagacagcctggaaggagtgatggggagacc

SEQ ID NO: 294471 - DNA, 120 bp, Artificial Sequence
  ENSG00000131771_22 (sequence is synthesized)
ccagagagcccaggaggcatgagggaggtgggggaagcgagggaggctcacggggcaccagcgcaagcaccgcacacaccttctgttgtcactgtggctcacgaagtgaactctcctccc

SEQ ID NO: 294472 - DNA, 120 bp, Artificial Sequence
  ENSG00000131771_23 (sequence is synthesized)
ccgctgggggagaaggaagctgcctgggctgccacctgctctcctgccttacctccccccacagccctcatggatccttctctaccaggagggcactgttttgtaggcttcagtcctttt

SEQ ID NO: 294473 - DNA, 120 bp, Artificial Sequence
  ENSG00000131771_24 (sequence is synthesized)
gtgggcaagggaaggtgcccggcagggttggggcttgtcagggaagaatcgagggccctagagagaggggcacagcactaagtcttagcttgaggggttgtgctccaaggctggagctct

SEQ ID NO: 294474 - DNA, 120 bp, Artificial Sequence
  ENSG00000131771_25 (sequence is synthesized)
cacacttggctcaagatgaagctctgccgcgtccccaaggtcagggtagggtgatttattgtgcttttattgcctggatagcttgcccagagccagcaggaggtactgggctgggagctg

SEQ ID NO: 294475 - DNA, 120 bp, Artificial Sequence
  ENSG00000131771_26 (sequence is synthesized)
ggggctgggtggggcagcgggcacatacaaagcaccctctgtgcctgtccccgagttggcaggagcatagcaccctgctcactgtgccggaggtttccagcctggccctacccctctggg

SEQ ID NO: 294476 - DNA, 120 bp, Artificial Sequence
  ENSG00000131771_27 (sequence is synthesized)
ccttctgaggggaggggccactggcagaccaagaaggaactgcagcaactccccattccccacccccagcccctcctcagcatcttgtctgtggcctgtgaactttgtgtcgcatatgtt

SEQ ID NO: 294477 - DNA, 120 bp, Artificial Sequence
  ENSG00000131771_28 (sequence is synthesized)
ctaagatcctgccagctcctgcagcctctcctcagtggcccctcaacctctgccatcccccagaacccctggccttggcccctttctctaaccccttgctcctttccatcttttggaaac

SEQ ID NO: 294478 - DNA, 120 bp, Artificial Sequence
  ENSG00000131771_29 (sequence is synthesized)
ttgtctccagctgcccacactgttcccttcccagccctatctgagcaggtctttggaggctgggggggttgctttctaggtcaccgcagagggagctgggaacctggggatgtgggtcaa

SEQ ID NO: 294479 - DNA, 120 bp, Artificial Sequence
  ENSG00000131771_30 (sequence is synthesized)
gattgtgggggccgcatctgagcatgccgcatcccccggcacagactgcactggctgcagactattatgtcctcagcctcggaattgttctgtcccttggagcccggggcaggagtatgt

SEQ ID NO: 294480 - DNA, 120 bp, Artificial Sequence
  ENSG00000131771_31 (sequence is synthesized)
ggattggcatctatgactgggcagtgccagggagtggggactatgcatcgcatgggaggtaggatcagggtaagcagtgagccctcagcaggctgggcacccccaagaaatggaaagtgg

SEQ ID NO: 294481 - DNA, 120 bp, Artificial Sequence
  ENSG00000131771_32 (sequence is synthesized)
ctgctgctgtgcccgcctggtcttgcccagcctagtgccctatggtgtgggggagctgcctgggggctagcatcttaggacagcttaagagccaaacatgatcaaatctacccctggctg

SEQ ID NO: 294482 - DNA, 120 bp, Artificial Sequence
  ENSG00000131771_33 (sequence is synthesized)
cctctgccctggtctgacacccatcaggctgacctgtcaactttggcctttgaacttgggcccctgagggggtattctctgccccaggcctacgggaaggaggctgggggctaggccaca

SEQ ID NO: 294483 - DNA, 120 bp, Artificial Sequence
  ENSG00000131771_34 (sequence is synthesized)
agggagagggcacactttccctgtccccagagattgagaccctggggaaaataactcggattctttctctctctccctcttctcttttcctcctcgcttggttctggttcggttggcttt

SEQ ID NO: 294484 - DNA, 120 bp, Artificial Sequence
  ENSG00000131773_0 (sequence is synthesized)
cggcgtgcaggtcgcagctgtggctcgggtgctggcaggtgctggcgggactggcggggatcgccgtggactgcctcaggggcgccgcagcccgctcggcccgagggcccgcctaaccgc

SEQ ID NO: 294485 - DNA, 80 bp, Artificial Sequence
  ENSG00000131773_1 (sequence is synthesized)
gcgctgggtactcggcggccaccggggatcggggctgagcggtcggttcccgcccccgtgccgccgccgccgccttccgg

SEQ ID NO: 294486 - DNA, 80 bp, Artificial Sequence
  ENSG00000131773_2 (sequence is synthesized)
tactcggcggccaccggggatcggggctgagcggtcggttcccgcccccgtgccgccgccgccgccttccggccgaccgc

SEQ ID NO: 294487 - DNA, 120 bp, Artificial Sequence
  ENSG00000131773_3 (sequence is synthesized)
ccgccccccgtgcgcctggagtccacatcccgggcccggcggccggcgagcatggaggagaagtacctgcccgagctgatggcggagaaggactccctggacccctccttcacgcacgcc

SEQ ID NO: 294488 - DNA, 120 bp, Artificial Sequence
  ENSG00000131773_4 (sequence is synthesized)
ctgcgcctggtgaaccaagaaatagaaaagtttcaaaaaggagaaggcaaggatgaagaaaagtacatcgatgtggtgattaataagaacatgaagctgggacagaaagtgttaattccc

SEQ ID NO: 294489 - DNA, 120 bp, Artificial Sequence
  ENSG00000131773_5 (sequence is synthesized)
gtaaaacagttccctaagttcaactttgtggggaaacttttgggtccacgtggcaattctctgaagcgtttacaagaagaaaccttgacaaaaatgtccatccttgggaaaggttccatg

SEQ ID NO: 294490 - DNA, 120 bp, Artificial Sequence
  ENSG00000131773_6 (sequence is synthesized)
agagacaaggccaaggaagaagagttgaggaaaagtggagaagcgaagtacttccatctcaatgatgatctccatgttctcattgaagtgtttgccccacctgcagaagcttatgccagg

SEQ ID NO: 294491 - DNA, 120 bp, Artificial Sequence
  ENSG00000131773_7 (sequence is synthesized)
atgggacatgctttggaagaaatcaaaaagttcctcatccctgattataatgatgagatcaggcaagcacagctccaggagttaacatatttgaatggtggttcagaaaatgcagatgtt

SEQ ID NO: 294492 - DNA, 120 bp, Artificial Sequence
  ENSG00000131773_8 (sequence is synthesized)
ccaggggaaggggaggagttacagcccggccagttggagttgtagtaccacgagggacgccaactcccagaggagtcctgtccacccgagggccagtgagtcggggaagaggacttctca

SEQ ID NO: 294493 - DNA, 120 bp, Artificial Sequence
  ENSG00000131773_9 (sequence is synthesized)
ctcccagagcaagaggagtccccccaactgggtacagacctccaccgccacccccgacacaagagacttatggagaatatgactatgatgatggatatggcactgcttatgatgaacaga

SEQ ID NO: 294494 - DNA, 120 bp, Artificial Sequence
  ENSG00000131773_10 (sequence is synthesized)
gttatgattcctatgataacagctatagcaccccagcccaaagtggtgctgattactatgattacggacatggactcagtgaggagacttatgattcctacgggcaagaagagtggacta

SEQ ID NO: 294495 - DNA, 120 bp, Artificial Sequence
  ENSG00000131773_11 (sequence is synthesized)
actcaagacacaaggcaccttcagcgaggacagcaaagggcgtctacagagaccagccatatggcagatactgattgtactgtctgatgttgtgaaatagccaatctccaccagtcctgt

SEQ ID NO: 294496 - DNA, 120 bp, Artificial Sequence
  ENSG00000131773_12 (sequence is synthesized)
atactgttcaaagtaatttttttctatgaacaatccctttttaaataaatcagaatgcttaaaatctgaatggatggaacttaaaactactttgttgaaacatcaacctgggcagaaaaa

SEQ ID NO: 294497 - DNA, 120 bp, Artificial Sequence
  ENSG00000131773_13 (sequence is synthesized)
aaaaaaaaaagacatgtaaaattttgttatttccagtctgtatatgaaaaaataggtcatcaaaaggaaaaaaaataactttgattaactagtgttaaacaaaaaataggtttactaaat

SEQ ID NO: 294498 - DNA, 120 bp, Artificial Sequence
  ENSG00000131773_14 (sequence is synthesized)
atgttaatctattcttttaacataagcctcacctttcattttaaaggtttccatagaatttagttattttatctttcagccatatgctagtttttttttctcttgccaacatgcgtaaaa

SEQ ID NO: 294499 - DNA, 120 bp, Artificial Sequence
  ENSG00000131773_15 (sequence is synthesized)
agggaagccaattacaagtgcaaataatgtggtattcttttgtaactcaagtcttgaaatgttctgtagtgttaagcaaagtctcctcttgcttgatactaaataaacttttgaaagaaa

SEQ ID NO: 294500 - DNA, 120 bp, Artificial Sequence
  ENSG00000131773_16 (sequence is synthesized)
attggtggctggcttgaggttcggaatagtggtgaagggagtccttgccattttcacacgactccagccagctcagggtgtgaaagatcctaggaagtactgcgggtcagggatacagag

SEQ ID NO: 294501 - DNA, 120 bp, Artificial Sequence
  ENSG00000131773_17 (sequence is synthesized)
cctgtgtccaggctccaacagccctggcggggcagtcagccctcccaggggatgggcagcccatgccaagccttgcaggctggcccttggagaagtcagtaggggagaagaggccggcaa

SEQ ID NO: 294502 - DNA, 120 bp, Artificial Sequence
  ENSG00000131773_18 (sequence is synthesized)
tgtacaacttattttaaaaatggtataaaattaaatgtaccattatatactcaccatagatttaaatgctgtttaaagagtccaaatggtatcgagctgcttgagtggcacgttaaacta

SEQ ID NO: 294503 - DNA, 120 bp, Artificial Sequence
  ENSG00000131773_19 (sequence is synthesized)
cgcaaaaccaaatcttgtttaaaaactggttttaaaataactactggattttctgaaaaagatgtgatcagttttcatcttgttgagcgttttttcactagtgcaactttggatttttta

SEQ ID NO: 294504 - DNA, 120 bp, Artificial Sequence
  ENSG00000131773_20 (sequence is synthesized)
tgagaattttggtaccttaatgaacacctcgctccatgctggaagcactaagcacaaagcttttaaagactttctggcttgactaattgaggtcgcactcgccaaggctgaggatgtgta

SEQ ID NO: 294505 - DNA, 120 bp, Artificial Sequence
  ENSG00000131773_21 (sequence is synthesized)
ttcattttcaaaggaaatgtcagccatcttggaatgtcacaggaactggttgaacacctgaagcaaacaaaggaactttccttctatttatgcactgcttaagaaccgtcaactcaccaa

SEQ ID NO: 294506 - DNA, 120 bp, Artificial Sequence
  ENSG00000131773_22 (sequence is synthesized)
cgtgcctagtcagcaaatgaatccacttgggaacttgaaaaacatcttaattaatttttgtttgcataattttgtgttctgtgacatgtttttattatatggtatgcttttaatttggag

SEQ ID NO: 294507 - DNA, 120 bp, Artificial Sequence
  ENSG00000131773_23 (sequence is synthesized)
aacctacttttttaaaaaacggaaagaaaatctatcttattttgttgactcccaataacaaaaagagaatgatttgtatagtagttaataaaggctgcctattgaaatctcttctacttt

SEQ ID NO: 294508 - DNA, 120 bp, Artificial Sequence
  ENSG00000131773_24 (sequence is synthesized)
cagggctgctcaggtaaaattcaacattgtcaccgtgcttaacactttatctgatattttattcttcataatgaccctgaaatgtaatgacttttataagccacacctggtaaatgtgaa

SEQ ID NO: 294509 - DNA, 120 bp, Artificial Sequence
  ENSG00000131773_25 (sequence is synthesized)
actgaaaactagaaatgctgagaaacctctgtgttcacattgctgataagatgagggcactgtatgatgacaccccttcagaacccatagcaagtgggacatcaggaggtgttatgggac

SEQ ID NO: 294510 - DNA, 120 bp, Artificial Sequence
  ENSG00000131773_26 (sequence is synthesized)
taatggcaaagaagacaactatgccgctttcgttgtttattatttatatcatccagaaagtccaaaatacatactcagtccatctattagttaggccttttcttgttgcgaataccgact

SEQ ID NO: 294511 - DNA, 120 bp, Artificial Sequence
  ENSG00000131773_27 (sequence is synthesized)
atgactagcttgaaggattttttctttaaaaaaaggaaaacaacaaaaaacaacaacaaaaaaaacctaccttagggtgtcctatagaatgcatggaggaattgaacttgcaaactgaaa

SEQ ID NO: 294512 - DNA, 120 bp, Artificial Sequence
  ENSG00000131773_28 (sequence is synthesized)
agacagtaataagagctttaagcctaagaaattgtctctggcttttccctctagcagtattttttacctgggccacaattgacattttaaacaggacactttggtgaagggcaggaccat

SEQ ID NO: 294513 - DNA, 120 bp, Artificial Sequence
  ENSG00000131773_29 (sequence is synthesized)
ctgtttctgatgcctgacataggcctttgcccctgagtcccagtagtgaccctagtcattgtgacaaccaaataaacatgctaaatatttccaagtgtcccacagggaggtgatgcaaca

SEQ ID NO: 294514 - DNA, 120 bp, Artificial Sequence
  ENSG00000131773_30 (sequence is synthesized)
tctgcagtttgagaacctgccggagcagccaagcacattaccattattgtgactcagctctcaggacattcagtatccacataatcagttctaaatttcagaatctcttgatttccagtc

SEQ ID NO: 294515 - DNA, 120 bp, Artificial Sequence
  ENSG00000131773_31 (sequence is synthesized)
aaaggccaattcctcggccgatctgggtggcctgggccaggtcatgccattttcagtgtggtggctcccttggtagccttctcccacttgccataggttctgaaggggatgcagttccac

SEQ ID NO: 294516 - DNA, 120 bp, Artificial Sequence
  ENSG00000131773_32 (sequence is synthesized)
agtaggtgggtcttgttcagataaaattgtatatatccacaacagttaaattcatctatttattacttactaatttggcatcaagtatacgcaatctgctggctgctctcttaggtgatt

SEQ ID NO: 294517 - DNA, 120 bp, Artificial Sequence
  ENSG00000131773_33 (sequence is synthesized)
ttcgtatactttcttacttaattcatgcgacctgcacccacagtaggtaatatggtctgtgttttgtggatgaaaagtctgagactcaggagggttaatttgactcaggagatagaagta

SEQ ID NO: 294518 - DNA, 120 bp, Artificial Sequence
  ENSG00000131773_34 (sequence is synthesized)
acttgactagggagatacatggttgaacagagttgagaggaaaaagaagggaaaataaaagtgtttctggttgtcacagtattcatttatgtactttttgtgaacaaaacactaacagaa

SEQ ID NO: 294519 - DNA, 120 bp, Artificial Sequence
  ENSG00000131773_35 (sequence is synthesized)
gttaagtggaaaaaagaaacccctaaaggtatataaaagtcaataaaatgctttttctttttacctggaatgctgtcaagtgacctttaatcaatcatgtctttctatggacttcagatt

SEQ ID NO: 294520 - DNA, 120 bp, Artificial Sequence
  ENSG00000131773_36 (sequence is synthesized)
cttctgtataaaattagatgtttggattggatgatttctaaagcctcttaatttttatcacttgggaactatttgacctaacttaagatgcaagataaatatgactatttgactatcaaa

SEQ ID NO: 294521 - DNA, 120 bp, Artificial Sequence
  ENSG00000131773_37 (sequence is synthesized)
atttatttttgctccatttttgaaacctattaaaataaatataaatgaaataaaaaggcataaatttatgaagatcacaagaatgggagagtgggacaacaataggcaaatgatgtctgt

SEQ ID NO: 294522 - DNA, 120 bp, Artificial Sequence
  ENSG00000131773_38 (sequence is synthesized)
aaaattttggtgcttgcaaaataaatagataaatggtaacggagaccagagaaagcagaaccctgagctggcaggcagggaagaattcaaccagaaacatgttcattactgtgggaaaac

SEQ ID NO: 294523 - DNA, 120 bp, Artificial Sequence
  ENSG00000131773_39 (sequence is synthesized)
tcgagagcgctcaggaattgtaggtagcaattactgtaaaggtggatttatggattagaactgacaagagtagacttggttgaaaggtataaggagtagttagatcacaagatgttctca

SEQ ID NO: 294524 - DNA, 120 bp, Artificial Sequence
  ENSG00000131773_40 (sequence is synthesized)
tcttataaaaccaggcatctgcccctccacactctagcaaaagaccagaggtttcctgaagaggttgaattggacaactgtgaggctccaagatacagacagatacaactgaggatgagg

SEQ ID NO: 294525 - DNA, 120 bp, Artificial Sequence
  ENSG00000131773_41 (sequence is synthesized)
gtgagatatcacactgaaaatgagggaattgtttcctttaaataaaagtgtgcgtgcttagtgatgggattcccagtattctggcagctgggcttacacctcctcttaagagattgagga

SEQ ID NO: 294526 - DNA, 120 bp, Artificial Sequence
  ENSG00000131773_42 (sequence is synthesized)
gtttctcttcagggaagtgcctcgcccaagtgaaacgaaatacagatactgatatttcagtagctcttgataaaataactcagctgccatatttgcaatgaagactgctgttgccaagtc

SEQ ID NO: 294527 - DNA, 120 bp, Artificial Sequence
  ENSG00000131773_43 (sequence is synthesized)
ccatgtatgaaaacagaacttccagtcagcaatccggaatttttaagaacagatagtagaggattaccagacatctgaggaaatcccataaaagagaaagagaccagctcacaaaatggg

SEQ ID NO: 294528 - DNA, 120 bp, Artificial Sequence
  ENSG00000131773_44 (sequence is synthesized)
gaaggggagactcttggaagaagcagatactttaaactccaaggcggggacaggctgctgtcatcaatatcttcagaaaggatgagaaatttaattgtttccacaaagtgtaacaaaaca

SEQ ID NO: 294529 - DNA, 120 bp, Artificial Sequence
  ENSG00000131773_45 (sequence is synthesized)
ccataaagaagaaacagctgtaagacagtcgtattcgtaaatatttgatagcaaaaatgaaggaatcagtaggtatataggaaatgtatttaaattctccagaaagtaaaacagagagac

SEQ ID NO: 294530 - DNA, 120 bp, Artificial Sequence
  ENSG00000131773_46 (sequence is synthesized)
gattttcagaaagataataaaagtaaatggggagctagaatcaggtgggattgtatgggtcagtacccagtcccattcttgctccccatttactccactttttcactctgtagtagtatt

SEQ ID NO: 294531 - DNA, 120 bp, Artificial Sequence
  ENSG00000131773_47 (sequence is synthesized)
agactttgtaaactctgcaagtataacttttatgtttaaaaatattttactgaaaatggcattttaacaagcaaaaaataattacatgcaaagattaaaaatatatatttgagttttggt

SEQ ID NO: 294532 - DNA, 120 bp, Artificial Sequence
  ENSG00000131773_48 (sequence is synthesized)
tgaagaccaataaaattaaaagttggaaggaaaaaataccacttagattttttaaagtgctaagtacttatttcaggaaaattacttcaattgccatagttaggtaaattgaggaacaat

SEQ ID NO: 294533 - DNA, 120 bp, Artificial Sequence
  ENSG00000131773_49 (sequence is synthesized)
tttctctcagaaacagcagcacagcagtggcatggatcacggaagaagtggctgctatgtgagtttgtaatcaagcatcttgccaaggcgaacagcttcctccctgctgattttctattt

SEQ ID NO: 294534 - DNA, 120 bp, Artificial Sequence
  ENSG00000131773_50 (sequence is synthesized)
ggtagcaagaagtagtcatgatttaccttaattatagcaaggcttttaaaaattgtgtgaaattcctgatttttttttgtattcaagatgtatgtattgagtgtctgttatctggcaagc

SEQ ID NO: 294535 - DNA, 120 bp, Artificial Sequence
  ENSG00000131773_51 (sequence is synthesized)
attgttttaaacagtttatttatattgacttatttaatccttagaacagccctatgaaggtaggtcttgttgtcattcctattttacagatgaagaaactgaggtatagacaggttaggt

SEQ ID NO: 294536 - DNA, 120 bp, Artificial Sequence
  ENSG00000131773_52 (sequence is synthesized)
aacttgcccaggtttactcagctggcaaacagaaaaggctaggttttaaatcatggtagtctggttacagaaggcatacccttaattaattcattactattctgcttgttaaggaaccac

SEQ ID NO: 294537 - DNA, 120 bp, Artificial Sequence
  ENSG00000131773_53 (sequence is synthesized)
agacatctaagtttaaataaattgcccacattcccatagctagttattttagaagcaatgaattttattgtaaagcttccatcagccaccgaatgcttaagaactcatctaagccagtcc

SEQ ID NO: 294538 - DNA, 120 bp, Artificial Sequence
  ENSG00000131773_54 (sequence is synthesized)
tctcattgattgaataactagatccaagggctgaccgggtagaagaaccaggtattccacagtgaccagtctagtgcatgttagagacacctggtgtcattttttctcacctacattctc

SEQ ID NO: 294539 - DNA, 120 bp, Artificial Sequence
  ENSG00000131773_55 (sequence is synthesized)
atcctagaagtgttcattcatggtgatatttaacgtgtgctgaaactgttaggatagcaaccgaggaattctgggaaattagcttcattcacagttgtggaatatagccatcactgaaat

SEQ ID NO: 294540 - DNA, 120 bp, Artificial Sequence
  ENSG00000131773_56 (sequence is synthesized)
aaatataaagaaatatatcagggttttttattttacgtttagccccgttttatgtggtgtgtgggaaacatcatattttaatgcatgtagcaggagcttaaatatttgccattaatcaat

SEQ ID NO: 294541 - DNA, 120 bp, Artificial Sequence
  ENSG00000131773_57 (sequence is synthesized)
tagtaccatttttcttgatagttaacttgtactttaaagtctttgctttaatccttgatacttcttgtctgtaactgttatttgcatagctccttttctgctgtaaagctgtatggacat

SEQ ID NO: 294542 - DNA, 120 bp, Artificial Sequence
  ENSG00000131773_58 (sequence is synthesized)
cacctcaagtagaccttacattgtccttgtaaattactgggcattattccttatgtatatatgaggtgttagaatttcaggaagatttaataatatggccaaggttacatggctaaaaaa

SEQ ID NO: 294543 - DNA, 120 bp, Artificial Sequence
  ENSG00000131773_59 (sequence is synthesized)
cttgcatagcacaatcactagttcaggttttgaaacgcttttcctacgattttatgtgacactgtacaacttttttgttctccaacacaaaaccattagtgcctctgtgtgccatgcaca

SEQ ID NO: 294544 - DNA, 120 bp, Artificial Sequence
  ENSG00000131773_60 (sequence is synthesized)
gtgcttggtgttggcatgcagacttgaataaaagcagtccctgccctcatttagtataatataatacgtaatttagaggaaaagagaaacatcaacagatgatttcagtacaacatgata

SEQ ID NO: 294545 - DNA, 120 bp, Artificial Sequence
  ENSG00000131773_61 (sequence is synthesized)
aatataacagacataaccataatgagcccagaggggatgggctatttagctagcttctgccaagtattttggatgttttgttaaaaattgactgtctgttttaaccctttcagacacctt

SEQ ID NO: 294546 - DNA, 120 bp, Artificial Sequence
  ENSG00000131773_62 (sequence is synthesized)
cacattgctaaggatgtgacaatttaaagggaatacatctctacctctgttacgaaagttgatttaagtcttttgtgtgatttgtatgctcttgataaaaggacttattatgtcatttgc

SEQ ID NO: 294547 - DNA, 120 bp, Artificial Sequence
  ENSG00000131773_63 (sequence is synthesized)
atgctcttgataaaaagaatcgtaaagcatcaacactttggctctgcagacaatttattttagagaagctgacacatctgccaagtagttctctggataagactgtctttggttatccca

SEQ ID NO: 294548 - DNA, 120 bp, Artificial Sequence
  ENSG00000131773_64 (sequence is synthesized)
ggttagtttggtggattgacttacatactacagcacatgtactgtgattatattatctgtgaggaaaacaattattatatttatagggaaaggatatttaaatcacttttgcctttaaaa

SEQ ID NO: 294549 - DNA, 120 bp, Artificial Sequence
  ENSG00000131773_65 (sequence is synthesized)
agccaggacatagaattgcattaagtatgtaataacctgggaactgaaatggctagtattttctttagttcccatgagcaaatatgacaatctatttcttcttttagtttaaaaacaaaa

SEQ ID NO: 294550 - DNA, 120 bp, Artificial Sequence
  ENSG00000131773_66 (sequence is synthesized)
agtcaagattctacacatattccacatttgaaaatgatttatccatctcagttatggactaataaatatgaaagtattatgcaaaaagtattctgtcacataaaaggttaattataaagg

SEQ ID NO: 294551 - DNA, 120 bp, Artificial Sequence
  ENSG00000131778_0 (sequence is synthesized)
gcggggcctctaccggcccgatggagcgcgcgggcgctactagccgcgggggccaagcccctggcttcttactgcggcttcatactgagggccgagccgaggcggcgcgggtgcaggagc

SEQ ID NO: 294552 - DNA, 120 bp, Artificial Sequence
  ENSG00000131778_1 (sequence is synthesized)
aggacttacggcagtgggggctgacagggattcacctacgctcttaccagctggagggagtaaactggctcgcccagcgcttccattgtcagaatggctgtatcctgggagatgagatgg

SEQ ID NO: 294553 - DNA, 120 bp, Artificial Sequence
  ENSG00000131778_2 (sequence is synthesized)
gcctggggaagacctgccagactattgctctcttcatttatttggcaggaagattaaatgatgaagggccatttctgattctttgtcccttgtctgttttgagcaactggaaagaagaaa

SEQ ID NO: 294554 - DNA, 120 bp, Artificial Sequence
  ENSG00000131778_3 (sequence is synthesized)
tgcagagatttgctccaggtctttcctgtgtaacatatgcaggcgacaaggaggaaagagcctgccttcagcaagacctgaaacaggagtcacgttttcatgtgctactgactacctatg

SEQ ID NO: 294555 - DNA, 120 bp, Artificial Sequence
  ENSG00000131778_4 (sequence is synthesized)
agatttgcttgaaagatgcatcatttctaaaatcattcccttggagtgttcttgttgtggatgaagctcacaggttgaaaaaccaaagctccctgctgcataagaccttgtcagagttct

SEQ ID NO: 294556 - DNA, 120 bp, Artificial Sequence
  ENSG00000131778_5 (sequence is synthesized)
cagtagtcttcagtctcctgttgaccggaactcccatccagaacagcctccaagagctctactccctcctcagttttgtggagcctgatctcttttccaaggaagaggtgggagatttta

SEQ ID NO: 294557 - DNA, 120 bp, Artificial Sequence
  ENSG00000131778_6 (sequence is synthesized)
ttcaacgctaccaggatattgagaaagaatctgagtcagcaagtgaactgcacaaactcttgcagccatttctgctgaggcgagtgaaagctgaggtagctacagagcttcccaagaaga

SEQ ID NO: 294558 - DNA, 120 bp, Artificial Sequence
  ENSG00000131778_7 (sequence is synthesized)
cagaagtagtgatataccatggcatgtcagcattgcagaagaaatactacaaggccattttgatgaaagacctagatgcatttgaaaatgagacggcaaagaaagttaaactacagaaca

SEQ ID NO: 294559 - DNA, 120 bp, Artificial Sequence
  ENSG00000131778_8 (sequence is synthesized)
ttttgtcccagcttcgaaagtgtgtggatcacccatatttgtttgatggtgtggagccggagccttttgaagttggagaccacctgactgaggctagtgggaagcttcacctgctggata

SEQ ID NO: 294560 - DNA, 120 bp, Artificial Sequence
  ENSG00000131778_9 (sequence is synthesized)
agctactagcattcctgtattctgggggccatcgggttttacttttctcccaaatgacccagatgttggatattctccaagactatatggattacagaggctacagctatgagcgtgtgg

SEQ ID NO: 294561 - DNA, 120 bp, Artificial Sequence
  ENSG00000131778_10 (sequence is synthesized)
atggttctgtgagaggagaagagagacacttggccattaagaactttggacagcagcccattttcgtttttctcctgagtactagggcaggtggagttggcatgaacttaacagcagcag

SEQ ID NO: 294562 - DNA, 120 bp, Artificial Sequence
  ENSG00000131778_11 (sequence is synthesized)
atactgtgatttttgttgacagtgactttaatcctcagaatgacttgcaagcagctgccagggctcatcgcattggccaaaacaagtctgttaaagttattcggctgattggtcgagaca

SEQ ID NO: 294563 - DNA, 120 bp, Artificial Sequence
  ENSG00000131778_12 (sequence is synthesized)
cccagaaacccgctgccgatgctgacctccagttgagtgagatactcaaatttggtttggataaactgctggcctctgaggggagcaccatggatgaaatagacctggagtccatcctgg

SEQ ID NO: 294564 - DNA, 120 bp, Artificial Sequence
  ENSG00000131778_13 (sequence is synthesized)
gagaaacaaaagatggccagtgggtctctgatgccttgcctgcagcagaaggagggagcagagatcaagaggaaggaaaaaatcatatgtacttatttgaaggtaaagattattctaaag

SEQ ID NO: 294565 - DNA, 120 bp, Artificial Sequence
  ENSG00000131778_14 (sequence is synthesized)
agcccagtaaggaagacagaaaatcatttgaacaactggtaaaccttcagaaaacccttttggagaaagctagtcaagagggccgatcactccgaaataaaggcagtgttctcatcccag

SEQ ID NO: 294566 - DNA, 120 bp, Artificial Sequence
  ENSG00000131778_15 (sequence is synthesized)
gccttgtggagggatctaccaaaaggaagcgggttctgagtccagaagagctggaggacagacagaagaaaagacaagaagcagctgccaagagaaggagactcatagaggagaagaaga

SEQ ID NO: 294567 - DNA, 120 bp, Artificial Sequence
  ENSG00000131778_16 (sequence is synthesized)
ggcaaaaggaagaggctgaacataagaaaaagatggcctggtgggaatccaacaattaccagtccttctgcctgccctctgaggagagcgagccagaggaccttgagaatggggaagaga

SEQ ID NO: 294568 - DNA, 120 bp, Artificial Sequence
  ENSG00000131778_17 (sequence is synthesized)
gctctgctgagctggattaccaagacccagatgctacttccctcaagtacgttagtggtgatgtcacccaccctcaggctggggccgaggatgctctcattgtgcactgcgtagatgact

SEQ ID NO: 294569 - DNA, 120 bp, Artificial Sequence
  ENSG00000131778_18 (sequence is synthesized)
ctggccactggggcagaggtggtttatttacagctctggaaaagcgatccgctgagccaagaaaaatatatgagctggctgggaaaatgaaagacctgagtttgggaggtgtccttttat

SEQ ID NO: 294570 - DNA, 120 bp, Artificial Sequence
  ENSG00000131778_19 (sequence is synthesized)
ttcctgttgatgataaagaatcaagaaacaaagggcaagatttgttggccttgattgtggctcagcatcgtgatcgttccaatgtcctgtctggcattaagatggcagccctagaagagg

SEQ ID NO: 294571 - DNA, 120 bp, Artificial Sequence
  ENSG00000131778_20 (sequence is synthesized)
gcctgaagaagatatttttagcagcaaaaaagaagaaagcaagtgttcatcttccacgtattggacatgccacgaaaggttttaactggtatggtactgagcgacttattcggaaacatc

SEQ ID NO: 294572 - DNA, 120 bp, Artificial Sequence
  ENSG00000131778_21 (sequence is synthesized)
tggctgcaagaggcatcccaacttacatatattattttcctagaagcaagtctgctgtccttcattcacagtcttcatcttcctcctcaagacagctggtgccttaagaattggcccagc

SEQ ID NO: 294573 - DNA, 120 bp, Artificial Sequence
  ENSG00000131778_22 (sequence is synthesized)
ctcagatcctgtctttagcaaccagctaatatttacccagaggtactgcaatagagtatttcaaaatggaatcaggatctggtgggcctcagaaattgtctcttttctgagtttcagttt

SEQ ID NO: 294574 - DNA, 120 bp, Artificial Sequence
  ENSG00000131778_23 (sequence is synthesized)
ggttctcctggatgttttgctctgttttggtacctgtaatatagggaaacacaactttttttgggaaagccctttgaccccagcttgctagttgcataataataaattttctgttcctaa

SEQ ID NO: 294575 - DNA, 120 bp, Artificial Sequence
  ENSG00000131778_24 (sequence is synthesized)
acagtgtagccttagtttttatataaccccttctttttaaatatacattatattttagagtaattttagattcacaacaaaattgaacagaaactacagatgtttcccatgcatatgtcc

SEQ ID NO: 294576 - DNA, 120 bp, Artificial Sequence
  ENSG00000131778_25 (sequence is synthesized)
gggcagcctgtccaaactgtcatctcagcaaagaagtaaggctgaaacctggggttattggaaagtaattctaatctgctttgaccattgacctgggaatgtcctgaaagatttatgtga

SEQ ID NO: 294577 - DNA, 120 bp, Artificial Sequence
  ENSG00000131778_26 (sequence is synthesized)
aggtaggctgcaaaggcattgatggaaacagacaaatgagggataatagagtactattacatcccaacggttagtacacttttttccttaattctctgaaaggtgaggttactattgaat

SEQ ID NO: 294578 - DNA, 120 bp, Artificial Sequence
  ENSG00000131778_27 (sequence is synthesized)
gactatatggattacagaggtgacaccttttggccactacattacctaaggctctgttagacttaacagtccagataggtccatgaagaataatatgggatatgagaatattacaaagga

SEQ ID NO: 294579 - DNA, 120 bp, Artificial Sequence
  ENSG00000131778_28 (sequence is synthesized)
tctgtcatcagtccaatagtcatggtatcacagtgcttttgttcaactgatctttattttacttaaaaatggccccaaagcacaagagtagtgatgcctgcattttggatattctaaaga

SEQ ID NO: 294580 - DNA, 120 bp, Artificial Sequence
  ENSG00000131778_29 (sequence is synthesized)
agccataaagtgcttcctttaagcaaaaaaggttaaagttctcaataaaaaaatgaaaaacaattatatgctgagattgatgcatttgaaaatgagacggcaaagaaagttaaactacag

SEQ ID NO: 294581 - DNA, 120 bp, Artificial Sequence
  ENSG00000131778_30 (sequence is synthesized)
agtttacccgctcgcgccagggccttccttcgctcctgccgtgggcggagagaaactgcgcccgggcttggtggccacggcccccgcctgcgcggcgcgcggggccggcggacgccagat

SEQ ID NO: 294582 - DNA, 120 bp, Artificial Sequence
  ENSG00000131778_31 (sequence is synthesized)
ccggcggacgccagatgaatgaggtcgcgggcccggtagccaggcctggcccctggcctgtggaggggaaacgtggtgagatcagcgccacctgcaggcctccgctgaagagttggacgg

SEQ ID NO: 294583 - DNA, 120 bp, Artificial Sequence
  ENSG00000131779_0 (sequence is synthesized)
agggccgcggagcctgggctgcggctgtcatggacgcctgggtccgcttcagtgctcagagccaagcccgggagcggctgtgtagggccgcccagtatgcttgctctcttcttggccatg

SEQ ID NO: 294584 - DNA, 120 bp, Artificial Sequence
  ENSG00000131779_1 (sequence is synthesized)
cgctgcagaggcatggagccagtcctgagttacagaaacagattcgacaactggagagccacctgagccttggaagaaagcttctacgcctgggtaactcagcagatgcccttgagtcag

SEQ ID NO: 294585 - DNA, 120 bp, Artificial Sequence
  ENSG00000131779_2 (sequence is synthesized)
ccaaaagagctgttcacctatcagatgttgtcctgagattctgcatcactgttagtcacctcaatcgagccttgtacttcgcctgtgacaatgtcctgtgggctggaaagtctggactgg

SEQ ID NO: 294586 - DNA, 120 bp, Artificial Sequence
  ENSG00000131779_3 (sequence is synthesized)
ctccccgtgtggatcaggagaagtgggcccagcgttcattcaggtactatttgttttccctcatcatgaatttgagccgtgatgcttatgagattcgcctactgatggagcaagagtctt

SEQ ID NO: 294587 - DNA, 120 bp, Artificial Sequence
  ENSG00000131779_4 (sequence is synthesized)
ctgcttgtagccggcgactgaaaggttctggaggaggagtcccaggaggaagtgaaactgggggacttgggggaccagggactccaggaggaggtctgccccaactggctctgaaacttc

SEQ ID NO: 294588 - DNA, 120 bp, Artificial Sequence
  ENSG00000131779_5 (sequence is synthesized)
ggctgcaagtcctgctcctggctcgagtccttagaggtcatcccccacttctgctagacgtggtcagaaatgcctgtgatctcttcattcctctggacaaactaggcctctggcgctgtg

SEQ ID NO: 294589 - DNA, 120 bp, Artificial Sequence
  ENSG00000131779_6 (sequence is synthesized)
tctatccctggctacgactcaagccctgaccttccggtacaggataaggaggggacctgaattggtgagatggaatcttagatcgtcccccatgtgccagcctcattcgaattctactct

SEQ ID NO: 294590 - DNA, 120 bp, Artificial Sequence
  ENSG00000131779_7 (sequence is synthesized)
ttggttaaagttagaaattcagagatttaggggtggaggaagagctttggggaagatgaggtaaggaaagatgactcgtgaagttaataggatgtctctaatttctagatgtgcctgagc

SEQ ID NO: 294591 - DNA, 120 bp, Artificial Sequence
  ENSG00000131779_8 (sequence is synthesized)
ttctgttcttttcctctttctttgtgtctctcttgaatatatttactttgtgtctcttaactctgtttaaggttctgtgtctatgcatctctctctttcttttttcaaccttctcattct

SEQ ID NO: 294592 - DNA, 120 bp, Artificial Sequence
  ENSG00000131779_9 (sequence is synthesized)
cctatccagggatttaatcagcagaattactttttgataggggaggtataaggtttggcctgtaaggttctaactgccttcttttttctcacagaggtggcttatggcagatttttcctc

SEQ ID NO: 294593 - DNA, 120 bp, Artificial Sequence
  ENSG00000131779_10 (sequence is synthesized)
cttcaaactccaaacataatttttaagactatgtgccagtggactcttcccttatatctctgcaccacaagttgttggatgtttcctcttcctcccttatgtctacctcaccaacctcgc

SEQ ID NO: 294594 - DNA, 120 bp, Artificial Sequence
  ENSG00000131779_11 (sequence is synthesized)
tcatcatttggcccttatccttccttgtacacctaccttcagatttctgcttacactttgatttcagagctttattccccagtctgttcttactcctttgtcgcttatccagaatgatgc

SEQ ID NO: 294595 - DNA, 120 bp, Artificial Sequence
  ENSG00000131779_12 (sequence is synthesized)
tatgtgtagcatcttgctgtaaatcctgtacaatgattctgtgtaaatagctgtggcctatgccaataatgaagagcaagcctttcaggtaagcaaattaaagttcagtttgctcatcga

SEQ ID NO: 294596 - DNA, 120 bp, Artificial Sequence
  ENSG00000131779_13 (sequence is synthesized)
aactccggctacgggggcccgaacggaccgtgaggcgcagatttgagccgctgttgagatgattcctttccgttcgcggaagagatggggaaactgagggccgcccagtatgcttgctct

SEQ ID NO: 294597 - DNA, 120 bp, Artificial Sequence
  ENSG00000131781_0 (sequence is synthesized)
gagtctcctccagatcgcagctgaaggatctgttgagcgcttcaggaaaggcggacaggcgacactaacaggtgaagatctcgggagaccatgactaagaaaagaattgctgtgattggg

SEQ ID NO: 294598 - DNA, 120 bp, Artificial Sequence
  ENSG00000131781_1 (sequence is synthesized)
ggaggagtgagcgggctctcttccatcaagtgctgcgtagaagaaggcttggaacctgtctgctttgaaaggactgatgacatcggagggctctggaggttccaggaaaatcctgaagaa

SEQ ID NO: 294599 - DNA, 120 bp, Artificial Sequence
  ENSG00000131781_2 (sequence is synthesized)
ggaagggccagtatttacaaatcagtgatcatcaatacttctaaagagatgatgtgcttcagtgactatccaatcccagatcattatcccaacttcatgcataatgcccaggtcctggag

SEQ ID NO: 294600 - DNA, 120 bp, Artificial Sequence
  ENSG00000131781_3 (sequence is synthesized)
tatttcaggatgtatgccaaagaatttgaccttctaaagtatattcgatttaagaccactgtgtgcagtgtgaagaagcagcctgattttgccacttcaggccaatgggaagtggtcact

SEQ ID NO: 294601 - DNA, 120 bp, Artificial Sequence
  ENSG00000131781_4 (sequence is synthesized)
gaatctgaagggaaaaaggagatgaatgtctttgatggagtcatggtttgcactggccatcacaccaatgctcatctacctctggaaagcttccctggaattgagaagttcaaagggcag

SEQ ID NO: 294602 - DNA, 120 bp, Artificial Sequence
  ENSG00000131781_5 (sequence is synthesized)
tacttccacagtcgagactataagaacccagagggattcactggaaagagagtcattataattggcattgggaattctggaggggatctggctgtagagattagccaaacagccaagcag

SEQ ID NO: 294603 - DNA, 120 bp, Artificial Sequence
  ENSG00000131781_6 (sequence is synthesized)
gttttcctcagcaccaggagaggggcttggatcctgaatcgtgtaggggactacggatatcctgctgatgtgttgttctcttctcgacttacacattttatatggaagatctgtggccaa

SEQ ID NO: 294604 - DNA, 120 bp, Artificial Sequence
  ENSG00000131781_7 (sequence is synthesized)
tcattagcaaacaaatatttggaaaaaaagataaaccaaaggtttgaccatgaaatgtttggcctgaagcctaaacacagagctctgagtcagcatccaaccttaaatgatgacctgcca

SEQ ID NO: 294605 - DNA, 120 bp, Artificial Sequence
  ENSG00000131781_8 (sequence is synthesized)
aatcgtatcatttctggcttggtgaaagtgaaaggaaatgtgaaggaattcacggagacagctgccatatttgaggatggctccagggaggatgacattgatgctgttatctttgccaca

SEQ ID NO: 294606 - DNA, 120 bp, Artificial Sequence
  ENSG00000131781_9 (sequence is synthesized)
aacaagatatccctgtataaaaaggtcttccctcctaacctggaaaggccaactcttgcaatcataggcttgattcagcccttaggagccattatgcccatttcagagctccaaggacgc

SEQ ID NO: 294607 - DNA, 120 bp, Artificial Sequence
  ENSG00000131781_10 (sequence is synthesized)
tgggccactcaggtatttaaaggtctaaagacattgccctcacagagtgaaatgatggcagaaatatctaaagctcaagaggaaattgacaaaaggtatgtggagagccaacgccatacc

SEQ ID NO: 294608 - DNA, 120 bp, Artificial Sequence
  ENSG00000131781_11 (sequence is synthesized)
attcagggagactacatagataccatggaagagcttgctgatttggtgggggtcaggcccaatctgctgtctctggccttcactgaccccaagctggcattacacttattactgggaccc

SEQ ID NO: 294609 - DNA, 120 bp, Artificial Sequence
  ENSG00000131781_12 (sequence is synthesized)
tgcactccaatccactatcgtgtacagggccctggaaagtgggatggggctcgaaaagctatcctcaccacagatgatcgcatcaggaagcctctgatgacaagagtagttgaaaggagt

SEQ ID NO: 294610 - DNA, 120 bp, Artificial Sequence
  ENSG00000131781_13 (sequence is synthesized)
agttctatgacttcaacaatgacaataggcaagtttatgctagctcttgccttctttgctataattatagcttacttctagttgtcctattgtcactgccctgtttttcattgggaagct

SEQ ID NO: 294611 - DNA, 120 bp, Artificial Sequence
  ENSG00000131781_14 (sequence is synthesized)
tatctacagatgccttcagaatctgacgagattgactctcagtttcatattgcccagaaatctactttaatgtctctttcgaaagcattaattcactttcctttttcctacaatgaaacc

SEQ ID NO: 294612 - DNA, 120 bp, Artificial Sequence
  ENSG00000131781_15 (sequence is synthesized)
tgttttccatttgtattaactcatctcccttccactcatgatccgtcactcttccttgtggtaatccctagactgggagctcaggtactcttttagtcatctttgtatgtctttagcaga

SEQ ID NO: 294613 - DNA, 120 bp, Artificial Sequence
  ENSG00000131781_16 (sequence is synthesized)
gttcttgacatgtggtaggtgcttaataaatgtttgttgtttatcaaattttatggtagggagagtaagtcagcatcggtataaaatcgcttactccacgtaactcttcttctgataggg

SEQ ID NO: 294614 - DNA, 120 bp, Artificial Sequence
  ENSG00000131781_17 (sequence is synthesized)
tttgattttctattagaagctcaattttagttttttttcatattataactaaatatgtttcctgagagataagagaaataatgttcctacaatagttgtatgtatctaagataagacata

SEQ ID NO: 294615 - DNA, 120 bp, Artificial Sequence
  ENSG00000131781_18 (sequence is synthesized)
tagatgcttaagacattttgtttcacttgctattcactagtgtacttgaaacatggtcatttttagcccttttccttaggaaccatgtctttattttctcaataaagaaattactttcaa

SEQ ID NO: 294616 - DNA, 80 bp, Artificial Sequence
  ENSG00000131781_19 (sequence is synthesized)
ctttttcggggagctcggctcttaagacgcgagtctgccgacgctcccggccgaataaaaacctcttccttctttaatta

SEQ ID NO: 294617 - DNA, 120 bp, Artificial Sequence
  ENSG00000131781_20 (sequence is synthesized)
attcatctggcgtccgccggccccgcgcgccgcgcaggcgggggccgtggccaccaagcccgggcgcagtttctctccgcccacggcaggagcgaaggaaggccctggcgcgagcgggta

SEQ ID NO: 294618 - DNA, 120 bp, Artificial Sequence
  ENSG00000131781_21 (sequence is synthesized)
aactgcccaccgggcggcccacccgctgcgcccccggcccgcaagaggcagtcccaataggttggcccgcctggccgaagtccgcccggagcccgctcacctgtcagcccccactgccga

SEQ ID NO: 294619 - DNA, 120 bp, Artificial Sequence
  ENSG00000131781_22 (sequence is synthesized)
gaaaattctgtacctttgaattgggtctatcttcctttaggtgagcagaatcactattatttctctgcctgtataaaaactataaaaagattaaaatcaatggtatttgtttaaaaataa

SEQ ID NO: 294620 - DNA, 120 bp, Artificial Sequence
  ENSG00000131781_23 (sequence is synthesized)
ttagtttacccaatggttgagtagtctcttgtgtataaactcatatattttgctaatgctgattttattaatagtttttaatttaggcataattttcatacaataaaaatttacttttta

SEQ ID NO: 294621 - DNA, 120 bp, Artificial Sequence
  ENSG00000131781_24 (sequence is synthesized)
ttgtacagtttggtaagtatcaataactccactgcagtcaagatacagacctgttccatacctccccttcaaaatttcttcatgcccttttgtagtcaatcactccccaccccccacccc

SEQ ID NO: 294622 - DNA, 120 bp, Artificial Sequence
  ENSG00000131781_25 (sequence is synthesized)
caagtcctggcaaacactgatctgttttctgaccgtatagtcttcctttttccagaatgtcacataagtggagcctggcttcttttacttcccataatgcatttgagattcatcaatatt

SEQ ID NO: 294623 - DNA, 120 bp, Artificial Sequence
  ENSG00000131781_26 (sequence is synthesized)
attgtatgtatcgagttattcttttattactgagtagtattccatttatagctatgctacattttaattattgattcaccagatgtattagcctattttcacactgctataaagacatac

SEQ ID NO: 294624 - DNA, 120 bp, Artificial Sequence
  ENSG00000131781_27 (sequence is synthesized)
aatttataaagaaaagaggtttaatttacttatagttctgcatggctggggaggacttcagaaacttacagttatggtagaagggaagcaagctcatcttatgtggcacaggggagagac

SEQ ID NO: 294625 - DNA, 120 bp, Artificial Sequence
  ENSG00000131781_28 (sequence is synthesized)
caggggagagacagtgagtgtgtgtgaatgaaggaagaactgccaaacacttttaaaaccatcatctctggtgagaattcatgcaccatcacaagaacagcatgggggaaaccgccccca

SEQ ID NO: 294626 - DNA, 120 bp, Artificial Sequence
  ENSG00000131781_29 (sequence is synthesized)
tcacaagaacagcatgggggaaaccgcccccatcatccaatcacttccctcccttgacacgtgaaggttataggtccttccttcaacacgtgggtattacaatttgagatgagatttggg

SEQ ID NO: 294627 - DNA, 120 bp, Artificial Sequence
  ENSG00000131781_30 (sequence is synthesized)
aacagccgcctgttgagtctcctccagatcgcagctgaaggatctgttgagcgcttcaggaaaggcggtgagatccggacaggcgacactaacaggtgaagatctcgggagaccatgact

SEQ ID NO: 294628 - DNA, 120 bp, Artificial Sequence
  ENSG00000131781_31 (sequence is synthesized)
acaaagaaagtctgagaaattgtcccggaataaaggggcctaaggagacataacatctaaatgtaatgtagtatcctggatggactcctgcaacagaaaaagaactttaagtaaaaatta

SEQ ID NO: 294629 - DNA, 120 bp, Artificial Sequence
  ENSG00000131781_32 (sequence is synthesized)
agggaatattaataaagtatgcattttggttaataatgtatcaatattggtttattagttgtgacaaatgtaccagaggaatgtaaaatgtcaacaataaaggaaattggatgtggggta

SEQ ID NO: 294630 - DNA, 120 bp, Artificial Sequence
  ENSG00000131781_33 (sequence is synthesized)
gagtctcctccagatcgcagctgaaggatctgttgagcgcttcaggaaaggcggtgagatccggtaccgcagcagagcactctcagctctgggtcttgcaggcgcagggctcccccatgc

SEQ ID NO: 294631 - DNA, 120 bp, Artificial Sequence
  ENSG00000131781_34 (sequence is synthesized)
cagcagaaagatttcctctggtgaagaggaccgtcgaatctgtcctcctcaagacacctcttgtacagaatttattcgaatgccacggccaaggtcttccttgaaaaatgttaaccgatg

SEQ ID NO: 294632 - DNA, 120 bp, Artificial Sequence
  ENSG00000131781_35 (sequence is synthesized)
agaatttgaccttctaaagtatattcgatttaaggtagaaaattgtgtgggtatctttgtgtttgaagttgtttgccaagtaaatgaataacgtggtttcagttaccaatgtttacttct

SEQ ID NO: 294633 - DNA, 120 bp, Artificial Sequence
  ENSG00000131781_36 (sequence is synthesized)
actccattctttgtcctcctttgctcctcaaaaatattcaagggacagtctctctttcatatattttggctgcagatacaggaagccagctggcagagtgttttcattaccttcatttca

SEQ ID NO: 294634 - DNA, 120 bp, Artificial Sequence
  ENSG00000131781_37 (sequence is synthesized)
cattatttgattgcaataaacagatgaagggaaatgttttccccattacagaagggaactgataggtatgggaactttaaaactctctggttccacaacttgtccattactgcttagccc

SEQ ID NO: 294635 - DNA, 120 bp, Artificial Sequence
  ENSG00000131781_38 (sequence is synthesized)
ttttgtactttctgaagtactttccaatatatttgtttacatgaacatcataaaaacccagtaaagtatagctcttgggtagttaactctggtgtagaggggagaacatggaattgcaga

SEQ ID NO: 294636 - DNA, 120 bp, Artificial Sequence
  ENSG00000131781_39 (sequence is synthesized)
ataaaaacctgaattctggtgcttgccctaccactaactaacttagatgttagacaagcaatttcctcaatttcaatttttaaaaattttcttgtttgtaaaacaagatgattgtaccag

SEQ ID NO: 294637 - DNA, 120 bp, Artificial Sequence
  ENSG00000131781_40 (sequence is synthesized)
aattttcttgtttgtaaaacaagatgattgtaccagatcacttctgtggttccttcctgctctaaagtattctaggacttttctataatttctgatcatgaccataaaagaattttatgg

SEQ ID NO: 294638 - DNA, 120 bp, Artificial Sequence
  ENSG00000131781_41 (sequence is synthesized)
ttctgccttctgatcatcctgctaagtcatgcctttttctgcttaatgacaataagaaaatgaaaacatctagtgaacttctaaagtaagtcatttacattccagtggtgcttctcttca

SEQ ID NO: 294639 - DNA, 120 bp, Artificial Sequence
  ENSG00000131781_42 (sequence is synthesized)
tttatttaaacaatacttattgaacaagtttgctaccatactaagcattgaatatgcaaagacaaaaaagaaaaatcagtaactttatagtctagttaaggggataaaaatgaagaaaaa

SEQ ID NO: 294640 - DNA, 120 bp, Artificial Sequence
  ENSG00000131781_43 (sequence is synthesized)
aagttaaaagtggatgcagaagcgagcacagacggggctaggggtttcagagaaagtaattgagagtgctggcaacagcagctgaaatatagagaagttgtaggattaactttttcgccc

SEQ ID NO: 294641 - DNA, 120 bp, Artificial Sequence
  ENSG00000131781_44 (sequence is synthesized)
aaagcagcttcagcccacgttttattcccatcgagggagggagaatgggtgccgctgagtgggcgggggagtggtccctgaaaggaggtggagtgctacagcccctccccgttggctctc

SEQ ID NO: 294642 - DNA, 120 bp, Artificial Sequence
  ENSG00000131781_45 (sequence is synthesized)
gagtgcagggatagtggccaaagcacaagaataaggactcttcacactggctaatagtaaagccacctctacccatacattaagaaaacccacagtggctgggcatggtggctcacgcct

SEQ ID NO: 294643 - DNA, 120 bp, Artificial Sequence
  ENSG00000131788_0 (sequence is synthesized)
ggcatttgcggccggcgccagggtggagagttgtgcgccggtccctgggcctgagctccggctccggctggggcgcctgcgatgtctcaagatggcggagctgggcgaattaaagcacat

SEQ ID NO: 294644 - DNA, 120 bp, Artificial Sequence
  ENSG00000131788_1 (sequence is synthesized)
ggtgatgagtttccgggtgtctgagctccaggtgcttcttggctttgctggccggaacaagagtggacggaagcacgagctcctggccaaggctctgcacctcctgaagtccagctgtgc

SEQ ID NO: 294645 - DNA, 120 bp, Artificial Sequence
  ENSG00000131788_2 (sequence is synthesized)
ccctagtgtccagatgaagatcaaagagctttaccgacgacgctttccccggaagaccctggggccctctgatctctcccttctctctttgccccctggcacctctcctgtaggctcccc

SEQ ID NO: 294646 - DNA, 120 bp, Artificial Sequence
  ENSG00000131788_3 (sequence is synthesized)
tggtcctctagctcccattcccccaacgctgttggcccctggcaccctgctgggccccaagcgtgaggtggacatgcacccccctctgccccagcctgtgcaccctgatgtcaccatgaa

SEQ ID NO: 294647 - DNA, 120 bp, Artificial Sequence
  ENSG00000131788_4 (sequence is synthesized)
accattgcccttctatgaagtctatggggagctcatccggcccaccacccttgcatccacttctagccagcggtttgaggaagcgcactttacctttgccctcacaccccagcaagtgca

SEQ ID NO: 294648 - DNA, 120 bp, Artificial Sequence
  ENSG00000131788_5 (sequence is synthesized)
gcagattcttacatccagagaggttctgccaggagccaaatgtgattataccatacaggtgcagctaaggttctgtctctgtgagaccagctgcccccaggaagattattttccccccaa

SEQ ID NO: 294649 - DNA, 120 bp, Artificial Sequence
  ENSG00000131788_6 (sequence is synthesized)
cctctttgtcaaggtcaatgggaaactgtgccccctgccgggttaccttcccccaaccaagaatggggccgagcccaagaggcccagccgccccatcaacatcacacccctggctcgact

SEQ ID NO: 294650 - DNA, 120 bp, Artificial Sequence
  ENSG00000131788_7 (sequence is synthesized)
ctcagccactgttcccaacaccattgtggtcaattggtcatctgagttcggacggaattactccttgtctgtgtacctggtgaggcagttgactgcaggaacccttctacaaaaactcag

SEQ ID NO: 294651 - DNA, 120 bp, Artificial Sequence
  ENSG00000131788_8 (sequence is synthesized)
agcaaagggtatccggaacccagaccactcgcgggcactgatcaaggagaaattgactgctgaccctgacagtgaggtggccactacaagtctccgggtgtcactcatgtgcccgctagg

SEQ ID NO: 294652 - DNA, 120 bp, Artificial Sequence
  ENSG00000131788_9 (sequence is synthesized)
gaagatgcgcctgactgtcccttgtcgtgccctcacctgcgcccacctgcagagcttcgatgctgccctttatctacagatgaatgagaagaagcctacatggacatgtcctgtgtgtga

SEQ ID NO: 294653 - DNA, 120 bp, Artificial Sequence
  ENSG00000131788_10 (sequence is synthesized)
caagaaggctccctatgaatctcttatcattgatggtttatttatggagattcttagttcctgttcagattgtgatgagatccaattcatggaagatggatcctggtgcccaatgaaacc

SEQ ID NO: 294654 - DNA, 120 bp, Artificial Sequence
  ENSG00000131788_11 (sequence is synthesized)
caagaaggaggcatctgaggtttgccccccgccagggtatgggctggatggcctccagtacagcccagtccaggggggagatccatcagagaataagaagaaggtcgaagttattgactt

SEQ ID NO: 294655 - DNA, 120 bp, Artificial Sequence
  ENSG00000131788_12 (sequence is synthesized)
gaggaggatctgccccctaccaagaagcactgttctgtcacctcagctgccatcccggccctacctggaagcaaaggagtcctgacatctggccaccagccatcctcggtgctaaggagc

SEQ ID NO: 294656 - DNA, 120 bp, Artificial Sequence
  ENSG00000131788_13 (sequence is synthesized)
cctgctatgggcacgttgggtggggatttcctgtccagtctcccactacatgagtacccacctgccttcccactgggagccgacatccaaggtttagatttattttcatttcttcagaca

SEQ ID NO: 294657 - DNA, 120 bp, Artificial Sequence
  ENSG00000131788_14 (sequence is synthesized)
gagagtcagcactatggcccctctgtcatcacctcactagatgaacaggatgcccttggccacttcttccagtaccgagggaccccttctcactttctgggcccactggcccccacgctg

SEQ ID NO: 294658 - DNA, 120 bp, Artificial Sequence
  ENSG00000131788_15 (sequence is synthesized)
gggagctcccactgcagcgccactccggcgccccctcctggccgtgtcagcagcattgtggcccctgggggggccttgagggaggggcatggaggacccctgccctcaggtccctctttg

SEQ ID NO: 294659 - DNA, 120 bp, Artificial Sequence
  ENSG00000131788_16 (sequence is synthesized)
actggctgtcggtcagacatcatttccctggactgagttccctggattatggaaacttcgctgtcccccaacactgagcaagtatgctgtggagtcccaaccccagctactctgatccct

SEQ ID NO: 294660 - DNA, 120 bp, Artificial Sequence
  ENSG00000131788_17 (sequence is synthesized)
ctgggggctctggccaagggccagacagaccttcacagatgcctacttttggcctcatctctgcctgacaaggccagcacccaaagggttaatatttaacctctttttaaggacactggg

SEQ ID NO: 294661 - DNA, 120 bp, Artificial Sequence
  ENSG00000131788_18 (sequence is synthesized)
gtctgtttctggaaatgttctttagatggtggcacattcctttgggtatgttaacctaggcagtgggaggcaaatgggatggtatgtgagctaggagaagggctgaaccctcagccttga

SEQ ID NO: 294662 - DNA, 120 bp, Artificial Sequence
  ENSG00000131788_19 (sequence is synthesized)
ctatgtctagagcctcttggggaaggggcacctctcttgaaccccaaatgctctctcttcttattacccaaacccatggctctatttcttcttcacatccattgtctcttcatgtctatt

SEQ ID NO: 294663 - DNA, 120 bp, Artificial Sequence
  ENSG00000131788_20 (sequence is synthesized)
ccattcccttcggccaaacagacaggtggaaaaactgagacaggcagtttcagagatggacagagaactttattttggattgtggatgtggacttttttgtacataaataagaaaaacca

SEQ ID NO: 294664 - DNA, 120 bp, Artificial Sequence
  ENSG00000131788_21 (sequence is synthesized)
aaatactccaaagatgacttcccctgcctcctactccagtatgacagaggaggatgtaaggccttagccatgatctgcaggggtctgggagtcaggcccggcctattgcttgggtctctc

SEQ ID NO: 294665 - DNA, 120 bp, Artificial Sequence
  ENSG00000131788_22 (sequence is synthesized)
tctatttatatatctaagttcacagtgtttcttattcccccctaagcttctagaggctcatggccctgtagttaggcctggctcattctgcacctttccagggaggtggaaggaccctgt

SEQ ID NO: 294666 - DNA, 120 bp, Artificial Sequence
  ENSG00000131788_23 (sequence is synthesized)
gccctccttcccaatcttctttttcaggctcgccaaggcctaggacctatgttgtaattttactttttatttctaaagttgtagtgaagctctcacccataataaaggttgtgaatgttc

SEQ ID NO: 294667 - DNA, 120 bp, Artificial Sequence
  ENSG00000131788_24 (sequence is synthesized)
tttcttaggctttagtcctatgggatcagtgacctgggatgggggcgatttctgtggctgcctgtgcatgggcttggaataactgcccctttgtatcctcagcatccacttctagccagc

SEQ ID NO: 294668 - DNA, 120 bp, Artificial Sequence
  ENSG00000131788_25 (sequence is synthesized)
caggtgcctggaaaagcctgctgagggtgaaggggaaccatccagtgtcctgggttggggaagcattttcctctttatgagtctgtctctggtcctcatggaacaaaagtgggcagtggt

SEQ ID NO: 294669 - DNA, 120 bp, Artificial Sequence
  ENSG00000131788_26 (sequence is synthesized)
ggaccgaacttctgccgtgcggacagcaggagcagcgccgagccccattcccccacctctccagctcgccctctgagcctcccgagccctctctccatttcccacaattgtgctgcacat

SEQ ID NO: 294670 - DNA, 120 bp, Artificial Sequence
  ENSG00000131788_27 (sequence is synthesized)
tgcaggaacccttctacaaaaactcagagcaaagggtatccggaacccagaccactcgcgggcactgagtgagtaacatctttcctctcttccccacctgatctggattcaagtcttcct

SEQ ID NO: 294671 - DNA, 120 bp, Artificial Sequence
  ENSG00000131788_28 (sequence is synthesized)
ccagtctttatagttgaagttggaccactcccaggcacccttgaatttccaatcatgtatctgctttgcacctcacagtccctaactccagccctgctagaatatgggctctccggactg

SEQ ID NO: 294672 - DNA, 120 bp, Artificial Sequence
  ENSG00000131788_29 (sequence is synthesized)
gaaagaatcttaggggtcctctaatctaaccctcacatgatgcttcaactcctccagatcatctctaacatagccagagtgtcacgctatgtttaagcatcttcagggatgggaaaatcc

SEQ ID NO: 294673 - DNA, 120 bp, Artificial Sequence
  ENSG00000131788_30 (sequence is synthesized)
cccacacccagccttcatcatccatatcccagaccacttccatgtgacgtcccactggcccccaaagacgctccacccagcagcctctcagccagagccatctgttcctggccttaccaa

SEQ ID NO: 294674 - DNA, 120 bp, Artificial Sequence
  ENSG00000131788_31 (sequence is synthesized)
gcgccgagccccattcccccacctctccagctcgccctctgagcctcccgagccctctctccatttcccacaattgtgctggaggctgggatgggtttgagagtctgagaaagggcaaga

SEQ ID NO: 294675 - DNA, 120 bp, Artificial Sequence
  ENSG00000131788_32 (sequence is synthesized)
aaacctattacttactttgcaaagctcttttacataccttgtgttatttgattccaacaactcagagcggtccagtaggatggataatgttcttattttacagatgaggaaactgagata

SEQ ID NO: 294676 - DNA, 120 bp, Artificial Sequence
  ENSG00000131788_33 (sequence is synthesized)
ctttctagacactgatggggcccctccctctcttatgatctctggggatgtaaatctgctttcccgtgagggcagtggggtgtaggtatcttattatctcctcagccccactggtagttc

SEQ ID NO: 294677 - DNA, 120 bp, Artificial Sequence
  ENSG00000131788_34 (sequence is synthesized)
ctgagattcctacttaggcctccttcctagatcccctgttacttttctgccctggcctactcacccctacccccgtgtgcacttagagcaccatgcctgctctaaccggacattccacac

SEQ ID NO: 294678 - DNA, 120 bp, Artificial Sequence
  ENSG00000131788_35 (sequence is synthesized)
atttcagacgcccacaaagccaagaacctaacaagttggaggagctctctcaaggcagggaaaggggaagggtgtagggaagtaggggaaagagggagaggctctcctgcttctcaagag

SEQ ID NO: 294679 - DNA, 120 bp, Artificial Sequence
  ENSG00000131791_0 (sequence is synthesized)
atcacatcagtggcccttggaggagggagcgcatcgcccgaggtggtccccgacgagctgcagccatgggaaacaccaccagcgaccgggtgtccggggagcgccacggcgccaaggctg

SEQ ID NO: 294680 - DNA, 120 bp, Artificial Sequence
  ENSG00000131791_1 (sequence is synthesized)
cacgctccgagggcgcaggcggccatgccccggggaaggagcacaagatcatggtggggagtacggacgaccccagcgtgttcagcctccctgactccaagctccctggggacaaagagt

SEQ ID NO: 294681 - DNA, 120 bp, Artificial Sequence
  ENSG00000131791_2 (sequence is synthesized)
ttgtatcatggcagcaggatttggaggactccgtaaagcccacacagcaggcccggcccactgttatccgctggtctgaaggaggcaaggaggtcttcatctctgggtccttcaacaatt

SEQ ID NO: 294682 - DNA, 120 bp, Artificial Sequence
  ENSG00000131791_3 (sequence is synthesized)
ggagcaccaagattccactgattaagagccataatgactttgttgccatcctggacctccctgagggagagcaccaatacaagttctttgtggatggacagtgggttcatgatccatcag

SEQ ID NO: 294683 - DNA, 120 bp, Artificial Sequence
  ENSG00000131791_4 (sequence is synthesized)
agcctgtggttaccagtcagcttggcacaattaacaatttgatccatgtcaagaaatctgattttgaggtgttcgatgctttaaagttagattctatggaaagttctgagacatcttgta

SEQ ID NO: 294684 - DNA, 120 bp, Artificial Sequence
  ENSG00000131791_5 (sequence is synthesized)
gagacctttccagctcacccccagggccttatggtcaagaaatgtatgcgtttcgatctgaggaaagattcaaatccccacccatccttcctcctcatctacttcaagttattcttaaca

SEQ ID NO: 294685 - DNA, 120 bp, Artificial Sequence
  ENSG00000131791_6 (sequence is synthesized)
aagacactaatatttcttgtgacccagccttactccctgagcccaaccatgttatgctgaaccatctctatgcattgtccattaaggacagtgtgatggtccttagcgcaacccatcgct

SEQ ID NO: 294686 - DNA, 120 bp, Artificial Sequence
  ENSG00000131791_7 (sequence is synthesized)
acaagaagaagtatgttactactctgctatacaagcccatttgaagggatcccttcttgcctctaaggattcaggagaagcatctcccttgcatttctggactgaaccagtcttacctga

SEQ ID NO: 294687 - DNA, 120 bp, Artificial Sequence
  ENSG00000131791_8 (sequence is synthesized)
gactggaaggctgatttgctttgaggctgatatgtgtgtttcagagcctctgagtaggatgctctgcttttgcatttgattgcagatgagagctttatgagttcacggaatttattttaa

SEQ ID NO: 294688 - DNA, 120 bp, Artificial Sequence
  ENSG00000131791_9 (sequence is synthesized)
gaaaaaaaaatatacatatgagaagaaggtaaatggaagcctcctagccccagctagaagtattgtttctgcctgtgggttttcaccaagacctgtttgggggcgctgcaggaataacta

SEQ ID NO: 294689 - DNA, 120 bp, Artificial Sequence
  ENSG00000131791_10 (sequence is synthesized)
tataggaagatttttcctaaaatgaaagaacagcaaactcttaggatccttgttgggtggagattctatcactgctaccttggctctccaaggaatgggcttgtgctagaccgctgccct

SEQ ID NO: 294690 - DNA, 120 bp, Artificial Sequence
  ENSG00000131791_11 (sequence is synthesized)
acttaacagctgcctcattgcaagggcagtttttcttgcatgggttctctatattcccagagtatgtggcacaatctgtgttgtttatatgataccagatgccccacaagaacccttatt

SEQ ID NO: 294691 - DNA, 120 bp, Artificial Sequence
  ENSG00000131791_12 (sequence is synthesized)
cctctcatttcacattcttcctttaatagcctccttcagatcccatacctgacccctctctaacacaaaacttattgggtaagtgactttgaaaagttttgtggcacctgacccacccca

SEQ ID NO: 294692 - DNA, 120 bp, Artificial Sequence
  ENSG00000131791_13 (sequence is synthesized)
gacactagggctatcagaaggtctcctttttagcccagcacaggcccaggccactttgtcgtgtttgttttaacttctaaagaaaatatgtttcagcattataagaaaggcagaatgcag

SEQ ID NO: 294693 - DNA, 120 bp, Artificial Sequence
  ENSG00000131791_14 (sequence is synthesized)
aacacctacatttttgttttagtttggtgccaaggctcaggctgtattggcaaattcccgaaagttttcccactttgcctggccctgcttctgtcttttctttctcagtaaacagttctg

SEQ ID NO: 294694 - DNA, 120 bp, Artificial Sequence
  ENSG00000131791_15 (sequence is synthesized)
aaggcaggagtggaacccgggagtattttcatgtctttcatccttgaaagatttttatgtgcctgcattttttttttaattaaaaaatgccttttcattggtcttaagagaccgcattgg

SEQ ID NO: 294695 - DNA, 120 bp, Artificial Sequence
  ENSG00000131791_16 (sequence is synthesized)
agaatttcaggcttttgataaatgcttcttcaaagagattttcttctctagtctagccttccacattcttagattaatatggccaaccctgtacacatcactacactaaacactgctcta

SEQ ID NO: 294696 - DNA, 120 bp, Artificial Sequence
  ENSG00000131791_17 (sequence is synthesized)
gataaactgctcaagttcatttaactcatttgatgcacctaaaggggttcctcattttaaagatttgttaggccaagaagcaagagagtattcctagtattcccaaccatgaaaagtatc

SEQ ID NO: 294697 - DNA, 120 bp, Artificial Sequence
  ENSG00000131791_18 (sequence is synthesized)
attctttgcaccaaatgttaacaaaatcattttgttctcctgcctcttctttttaaaggtgtttgatgattaagtggggtcactgaattccatttgtggactgaaaagtattcaatccac

SEQ ID NO: 294698 - DNA, 120 bp, Artificial Sequence
  ENSG00000131791_19 (sequence is synthesized)
ttttggggttcagagataaaacattttttcccaagtagctggggctcttccattttgcagataagtcaaataatcaacactaaaggaggctaaactgttgatgaatgagagactccctga

SEQ ID NO: 294699 - DNA, 120 bp, Artificial Sequence
  ENSG00000131791_20 (sequence is synthesized)
ctgctcagatgaccctagccacactgaaagggcacctacaggtcagtttagctacctcctgtctttcccatgcaaagctgataacacagttgtctttggacttgtagacctcttggattc

SEQ ID NO: 294700 - DNA, 120 bp, Artificial Sequence
  ENSG00000131791_21 (sequence is synthesized)
caggtgtgatggagtaaagtgtgggattgttgttttgctgggatgcaaataactaaatgctttggtggttaattgctaagagtaaatactactttagccatccaaggccaccttctgcag

SEQ ID NO: 294701 - DNA, 120 bp, Artificial Sequence
  ENSG00000131791_22 (sequence is synthesized)
aaatccaggccagatcctattataaccaactctcaggatttacagccttcagttgtactagaattttgtttttatccaatactcattaaataagtgggccacttaggaagattcaaaatc

SEQ ID NO: 294702 - DNA, 120 bp, Artificial Sequence
  ENSG00000131791_23 (sequence is synthesized)
ttggttattacatgaagtttgttatatttcttgtcaacagtattgaaatgtaatatgtatgtgttcatgtatgaaaatttttactccacacaggtgtttcagtagagtggggcaggaaaa

SEQ ID NO: 294703 - DNA, 120 bp, Artificial Sequence
  ENSG00000131791_24 (sequence is synthesized)
gagatctcttcgatttctttcaggcctgaggcttttgtgaaatgcgtcagccccctgtgacagtaggttttgatgctagtgatcttcagatctttctctctggaaatgtgcagagagtgt

SEQ ID NO: 294704 - DNA, 120 bp, Artificial Sequence
  ENSG00000131791_25 (sequence is synthesized)
cagtttcccaagttctgaggtaactctcagcccagatgtgaaatgggagcctaccagctggtatagaagggaatgggtaggaggcactgggtgctgactcattcagcactgtcccttttc

SEQ ID NO: 294705 - DNA, 120 bp, Artificial Sequence
  ENSG00000131791_26 (sequence is synthesized)
tatactgctgatacatcccatggttctgagaagccttatctcagtctatttggaagagagggaggaagagaaggaagtaacccaaagtactactcatttatcattgtatattgattagtt

SEQ ID NO: 294706 - DNA, 120 bp, Artificial Sequence
  ENSG00000131791_27 (sequence is synthesized)
aaagggataattaatttaatgctgaggagagtttgacagattttgaaaatgagtaaaggcaaaaaaaatttttttagcctttattttgcttttgggaattttacagagtcaaagtaggca

SEQ ID NO: 294707 - DNA, 120 bp, Artificial Sequence
  ENSG00000131791_28 (sequence is synthesized)
gaataagaaaatagttcttcaggagggccgacctttaaagaacttcaacatagtttcggaattgtggggaagagaagagtgactgagctgagaagtaataatagaataaagggttgagta

SEQ ID NO: 294708 - DNA, 120 bp, Artificial Sequence
  ENSG00000131791_29 (sequence is synthesized)
acttacaactgaaaatgatctcttttaaaaagaaattaaatcagacaccacatggtggtgtccttggatctcactgtacagaattagcagtgtataaccatcttctcttttcatcttgtt

SEQ ID NO: 294709 - DNA, 120 bp, Artificial Sequence
  ENSG00000131791_30 (sequence is synthesized)
ccaattctctcctctttcctttccattctgctttaagctcatgtgtcaggcagactttaccagagtgtcagacattacctaaaacacatacgttagccatgctgctggtatggagaaatt

SEQ ID NO: 294710 - DNA, 120 bp, Artificial Sequence
  ENSG00000131791_31 (sequence is synthesized)
ccacaccatgattattagcctcctttaagctgaatgggatttaaccattctaggcaacacccctgaagggcatacctaacctcaatagtgttggcttttaaaacgtatgtttgtatggta

SEQ ID NO: 294711 - DNA, 120 bp, Artificial Sequence
  ENSG00000131791_32 (sequence is synthesized)
gagaaactttgtaaaagaagaatccaagagaagtttgtgaggatcctacaaacccaggcccactcactttgctctaattctttctagtatcttgtagatctaatgggtctgggataaaaa

SEQ ID NO: 294712 - DNA, 120 bp, Artificial Sequence
  ENSG00000131791_33 (sequence is synthesized)
ctttgaaaagtgtcaatattccatgtatgctgctgaaatgaagttaagtttggaaagaagtgatacctctagactgggtttatattaatctgggatataaatgaagaagacatactaata

SEQ ID NO: 294713 - DNA, 120 bp, Artificial Sequence
  ENSG00000131791_34 (sequence is synthesized)
gaactccttgcttttaattggggaaatagggctttaataattttgacctcaactaaaaatgatatgcaatagtctctgtgtgtgtttgaaatacattgtgttctcagagatttctacatt

SEQ ID NO: 294714 - DNA, 120 bp, Artificial Sequence
  ENSG00000131791_35 (sequence is synthesized)
ctcacgttctagtgatttggggcatgggcttaatagcagatgtacagtgtattcctgcattattgtgattccccttaaagcccagttcttgctgtcttctaccaggggctgctgactcca

SEQ ID NO: 294715 - DNA, 120 bp, Artificial Sequence
  ENSG00000131791_36 (sequence is synthesized)
gttacccatggaatgcaggacctgggaggggtagccattagggtctttcaaaactctttggatctaagcatttgtctctccttaagtgccaatcacaattggatatggaaggactgtgat

SEQ ID NO: 294716 - DNA, 120 bp, Artificial Sequence
  ENSG00000131791_37 (sequence is synthesized)
ttctgcaatgaacccaaacttttagagtaaaaagccaaatttaaattataagaaagaagggaaaaaagagaaaaactcaagtctattacttgtagagtccaattcttagcaatggaatcg

SEQ ID NO: 294717 - DNA, 120 bp, Artificial Sequence
  ENSG00000131791_38 (sequence is synthesized)
ctctaggattctagtttgggctttgtctggatttgcttttctcagttgtgctttgaagtgaataagctttgttacaaattaattttttattagttccaatattagttggagttaacttga

SEQ ID NO: 294718 - DNA, 120 bp, Artificial Sequence
  ENSG00000131791_39 (sequence is synthesized)
attgattgtatgtagcacagcacttttgcagtaagattggtgtgaaatactaaacactatggattttgtaggtgtcaggttaaatggtcaagggatacctacattaagtcatatattagg

SEQ ID NO: 294719 - DNA, 120 bp, Artificial Sequence
  ENSG00000131791_40 (sequence is synthesized)
tattgatgatcttacttcttttctgttcccctgtacaaaacacttacctaacccagcttgtggttttaggacagccaaagctcactgttgttggttagtcctaatcactacacgggtctc

SEQ ID NO: 294720 - DNA, 120 bp, Artificial Sequence
  ENSG00000131791_41 (sequence is synthesized)
ataaatgagacttgtttgaattttggtacattggagcatgttggttggtattacacggcagcatttcgaatgagtgcagctctgtgtctgtcagaaaggagagataagactactttgaag

SEQ ID NO: 294721 - DNA, 120 bp, Artificial Sequence
  ENSG00000131791_42 (sequence is synthesized)
ggaattaaatatgtgagtcctctttttaatggtgctttttgtaacctttaatgctgaggtacagagctgcttttcaatatttcataaaggagtggcagacaagagtggattttaaagctg

SEQ ID NO: 294722 - DNA, 120 bp, Artificial Sequence
  ENSG00000131791_43 (sequence is synthesized)
ttcttcaaacgtaatttgtcactggactctgacacacctggaaattatatgatatgatacatacagaaatgttgtgggttttttccataaaactttaataaaagtattatacagcaataa

SEQ ID NO: 294723 - DNA, 120 bp, Artificial Sequence
  ENSG00000131808_0 (sequence is synthesized)
acagctcttgccaggcaaggcagccgaccacaggtgagtcttggcatctaccgttttcaagtgaccaggatgaagacactccagtttttcttccttttctgttgctggaaagcaatctgc

SEQ ID NO: 294724 - DNA, 120 bp, Artificial Sequence
  ENSG00000131808_1 (sequence is synthesized)
tgcaatagctgtgagctgaccaacatcaccattgcaatagagaaagaagaatgtcgtttctgcataagcatcaacaccacttggtgtgctggctactgctacaccagggatctggtgtat

SEQ ID NO: 294725 - DNA, 120 bp, Artificial Sequence
  ENSG00000131808_2 (sequence is synthesized)
aaggacccagccaggcccaaaatccagaaaacatgtaccttcaaggaactggtatacgaaacagtgagagtgcccggctgtgctcaccatgcagattccttgtatacatacccagtggcc

SEQ ID NO: 294726 - DNA, 120 bp, Artificial Sequence
  ENSG00000131808_3 (sequence is synthesized)
acccagtgtcactgtggcaagtgtgacagcgacagcactgattgtactgtgcgaggcctggggcccagctactgctcctttggtgaaatgaaagaataaagatcagtggacatttcaggc

SEQ ID NO: 294727 - DNA, 120 bp, Artificial Sequence
  ENSG00000131808_4 (sequence is synthesized)
cacatacccttgtcctgaaggaccaagatattcaaaaagtctgtgtgtgtgcaatgtgcccaggggacaaaccactggatcaggggattcagactctactgatccctggtctactggcag

SEQ ID NO: 294728 - DNA, 120 bp, Artificial Sequence
  ENSG00000131808_5 (sequence is synthesized)
agggaactctgggaattgagagtgctgggggccaggactccatcatgattcagctctatattcctaggtctgatttcataaggtttattcagtcttaactcacagacttgtgcctggttt

SEQ ID NO: 294729 - DNA, 120 bp, Artificial Sequence
  ENSG00000131808_6 (sequence is synthesized)
cttctttaaaaatcttagaaatcttctcaggcaatgcctctctcttagggggaaacataagcctagaaggaggaagcagtaatgggagtgagtgaaagaactaactgcagcagtcttctg

SEQ ID NO: 294730 - DNA, 120 bp, Artificial Sequence
  ENSG00000131808_7 (sequence is synthesized)
tagagcaaggtcagcatcttcagcattgtagcgtcaatgcctagcactctgcctggaacttagaaacacaacaatgacttctttagatcagaaaggtcaagggtagaaaatactggaaga

SEQ ID NO: 294731 - DNA, 120 bp, Artificial Sequence
  ENSG00000131808_8 (sequence is synthesized)
cgatgtttgaggtaagctgatgaggctgcccgcagccacaccagtcccatgaaagttagtggcatcagttccacctcgccttttctccagcacatggagtattgagacatgatgtatctt

SEQ ID NO: 294732 - DNA, 120 bp, Artificial Sequence
  ENSG00000131808_9 (sequence is synthesized)
tctgaattgtttggtacagatggggagtaacagagctcaagatttccaagctattactaccaagcctgttagttaagggcaaaggcaagaaattgtaatttggggctgtggaaattagcc

SEQ ID NO: 294733 - DNA, 120 bp, Artificial Sequence
  ENSG00000131808_10 (sequence is synthesized)
tgcctctattcattacttaaacaaattgatcacatgctactaggctcctgcaaaactcctttttgagataaagggaaaaaaccaaactatctcaccctaccctccctaggatccacttct

SEQ ID NO: 294734 - DNA, 120 bp, Artificial Sequence
  ENSG00000131808_11 (sequence is synthesized)
ttggaatgacaaaggatttgaaagtaggtttgaaagcagtttcagcaatttaataaatataattaatttgtctacaaatatatttgtataaataaatagctcctttagaaagaattagcc

SEQ ID NO: 294735 - DNA, 120 bp, Artificial Sequence
  ENSG00000131808_12 (sequence is synthesized)
atgggggacgaggggaaactgctgttttctaggatcctgtctacatcaatcttctattttatccatccatgttctcccaaatctgtgctttctttcaacaggttatatattaaaactatt

SEQ ID NO: 294736 - DNA, 120 bp, Artificial Sequence
  ENSG00000131808_13 (sequence is synthesized)
tcatgagttgatttcttttaaacgtgttaactgtcttagttatgcactcagtttcacactcatattgtttaactaatttatttaaatcttatttttttaataaagatgctagccaccaga

SEQ ID NO: 294737 - DNA, 120 bp, Artificial Sequence
  ENSG00000131808_14 (sequence is synthesized)
tataaatattacctttccttatctttggagatattaaaaataattttgttggatttctgaagtgttttgtcacttaaatttcctgtcattttttgaagacattttctgatgtaatttggg

SEQ ID NO: 294738 - DNA, 120 bp, Artificial Sequence
  ENSG00000131828_0 (sequence is synthesized)
ggtgcgactgaggcgtggcgtctgctggggcacctgaaggagacttgggggcacccgcgtcgtgcctcctgggttgtgaggagtcgccgctgccgccactgcctgtgcttcatgaggaag

SEQ ID NO: 294739 - DNA, 120 bp, Artificial Sequence
  ENSG00000131828_1 (sequence is synthesized)
atgctcgccgccgtctcccgcgtgctgtctggcgcttctcagaagccggcaagcagagtgctggtagcatcccgtaattttgcaaatgatgctacatttgaaattaagaaatgtgacctt

SEQ ID NO: 294740 - DNA, 120 bp, Artificial Sequence
  ENSG00000131828_2 (sequence is synthesized)
caccggctggaagaaggccctcctgtcacaacagtgctcaccagggaggatgggctcaaatactacaggatgatgcagactgtacgccgaatggagttgaaagcagatcagctgtataaa

SEQ ID NO: 294741 - DNA, 120 bp, Artificial Sequence
  ENSG00000131828_3 (sequence is synthesized)
cagaaaattattcgtggtttctgtcacttgtgtgatggtcaggaagcttgctgtgtgggcctggaggccggcatcaaccccacagaccatctcatcacagcctaccgggctcacggcttt

SEQ ID NO: 294742 - DNA, 120 bp, Artificial Sequence
  ENSG00000131828_4 (sequence is synthesized)
actttcacccggggcctttccgtccgagaaattctcgcagagcttacaggacgaaaaggaggttgtgctaaagggaaaggaggatcgatgcacatgtatgccaagaacttctacgggggc

SEQ ID NO: 294743 - DNA, 120 bp, Artificial Sequence
  ENSG00000131828_5 (sequence is synthesized)
aatggcatcgtgggagcgcaggtgcccctgggcgctgggattgctctagcctgtaagtataatggaaaagatgaggtctgcctgactttatatggcgatggtgctgctaaccagggccag

SEQ ID NO: 294744 - DNA, 120 bp, Artificial Sequence
  ENSG00000131828_6 (sequence is synthesized)
atattcgaagcttacaacatggcagctttgtggaaattaccttgtattttcatctgtgagaataatcgctatggaatgggaacgtctgttgagagagcggcagccagcactgattactac

SEQ ID NO: 294745 - DNA, 120 bp, Artificial Sequence
  ENSG00000131828_7 (sequence is synthesized)
aagagaggcgatttcattcctgggctgagagtggatggaatggatatcctgtgcgtccgagaggcaacaaggtttgctgctgcctattgtagatctgggaaggggcccatcctgatggag

SEQ ID NO: 294746 - DNA, 120 bp, Artificial Sequence
  ENSG00000131828_8 (sequence is synthesized)
ctgcagacttaccgttaccacggacacagtatgagtgaccctggagtcagttaccgtacacgagaagaaattcaggaagtaagaagtaagagtgaccctattatgcttctcaaggacagg

SEQ ID NO: 294747 - DNA, 120 bp, Artificial Sequence
  ENSG00000131828_9 (sequence is synthesized)
atggtgaacagcaatcttgccagtgtggaagaactaaaggaaattgatgtggaagtgaggaaggagattgaggatgctgcccagtttgccacggccgatcctgagccacctttggaagag

SEQ ID NO: 294748 - DNA, 120 bp, Artificial Sequence
  ENSG00000131828_10 (sequence is synthesized)
ctgggctaccacatctactccagcgacccaccttttgaagttcgtggtgccaatcagtggatcaagtttaagtcagtcagttaaggggaggagaaggagaggttataccttcagggggct

SEQ ID NO: 294749 - DNA, 120 bp, Artificial Sequence
  ENSG00000131828_11 (sequence is synthesized)
accagacagtgttctcaacttggttaaggaggaagaaaacccagtcaatgaaattcaatgaaattcttggaaacttccattaagtgtgtagattgagcaggtagtaattgcatgcagttt

SEQ ID NO: 294750 - DNA, 120 bp, Artificial Sequence
  ENSG00000131828_12 (sequence is synthesized)
gtacattagtgcattaaaagatgaattattgagtgcttaaagattatttttgacttaaaatagtatactttgaacaaatactctaattatgaaaaggaagaacaattccttgtatgcctg

SEQ ID NO: 294751 - DNA, 120 bp, Artificial Sequence
  ENSG00000131828_13 (sequence is synthesized)
gttcgcgctgaccatttctctacaagatacaatatttattatcaggcaagaggacagttccattttaaaataagacttttgtaatcattccaattttgtaatcatttcaaaggccacata

SEQ ID NO: 294752 - DNA, 120 bp, Artificial Sequence
  ENSG00000131828_14 (sequence is synthesized)
acttagttttctctacttacacattcagtataaatatgaagctattttctgttcatatcaaacattaactacaaggcacattcgtatcagttttgtgtttctcaaattgaagtaccatac

SEQ ID NO: 294753 - DNA, 120 bp, Artificial Sequence
  ENSG00000131828_15 (sequence is synthesized)
cagttctgaggcagtgtcccagcttccatgtttgttaaataccccttgtttgtttcaccattccagcaagtgctgaagggtgtactttttttgagacagggtcgggctctgttgcccagg

SEQ ID NO: 294754 - DNA, 77 bp, Artificial Sequence
  ENSG00000131828_16 (sequence is synthesized)
atagctgggactacaagtgaatttcctaatattccgggaggtcaaaaccaaggctcactgttttcacaatacacaca

SEQ ID NO: 294755 - DNA, 120 bp, Artificial Sequence
  ENSG00000131828_17 (sequence is synthesized)
gaggtcaaaaccaaggctcactgttttcacaatacacacagttctatgtttataaataacaggtttcaaaagaaactcaggacagtatttaaaacaagttcttaaactattaattgaaca

SEQ ID NO: 294756 - DNA, 120 bp, Artificial Sequence
  ENSG00000131828_18 (sequence is synthesized)
atggcatttttaaatatgtaaacacagcggaattcgtgtatacactaacagaagctttaacaaaacatgtagcgtggtgggacactctgccacagcttagctgattggtatcaagccttg

SEQ ID NO: 294757 - DNA, 120 bp, Artificial Sequence
  ENSG00000131828_19 (sequence is synthesized)
tctttggtttctgaggcctcctgagcccttctgtactgggagaccgcactccagagtctgcagaggagaccacccctgggaaacaaacacagctgtcttcagagtcagtgcttcaagcca

SEQ ID NO: 294758 - DNA, 120 bp, Artificial Sequence
  ENSG00000131828_20 (sequence is synthesized)
acagagcttaaaactgcagtccctaatttaaaaacctaatgaaaataaaaacattctcctcacatatggaggtgacgctcgtgtcccagcagtagtaggacatggccttagaggtacgta

SEQ ID NO: 294759 - DNA, 120 bp, Artificial Sequence
  ENSG00000131828_21 (sequence is synthesized)
cctgcagagagctggctatttcaaatgactcgggaacaagaaggcaggctgcagtttaaagaagggggtgggtccagcgtgcaggcacgcttgccatgtgcctccacccactcccagcca

SEQ ID NO: 294760 - DNA, 120 bp, Artificial Sequence
  ENSG00000131828_22 (sequence is synthesized)
ggcattaatggcaggagattggccagctcttctctgtcacattcctatttctgacttctgcctggctttcagtttctgccccaccttggctttttcccagcttgaacctaatagaactcc

SEQ ID NO: 294761 - DNA, 120 bp, Artificial Sequence
  ENSG00000131828_23 (sequence is synthesized)
agagtttggggggaggcccagccctttgttttctgctcttgaagcatattcacacataaaaagttgtattctcttatacaaactgttttgaggctcttaccgtagtcgaaggtatcttag

SEQ ID NO: 294762 - DNA, 120 bp, Artificial Sequence
  ENSG00000131828_24 (sequence is synthesized)
atcttccttagtgatctcattaagaatatccgaaagtgtataaccctcttcaacaatctgaaacaaagatcagatccttaagagctgagcagctgtgtaacaacagcataagaatttctt

SEQ ID NO: 294763 - DNA, 120 bp, Artificial Sequence
  ENSG00000131828_25 (sequence is synthesized)
tgttgtaaatttaccttttcaattgtctttgcatcagctccttgcagccgcaaccagtctataagctctttatctgttctctgcccgtaggggcctgctgggttctctgtaatacctgta

SEQ ID NO: 294764 - DNA, 120 bp, Artificial Sequence
  ENSG00000131828_26 (sequence is synthesized)
acgattggcaatttgttatatattagtctaaccataaaactcttcaaaagtaaccagttggattaataaatgattccagaatgtaaatgtgatgtgaaaaagagatgaattaaccctgta

SEQ ID NO: 294765 - DNA, 120 bp, Artificial Sequence
  ENSG00000131828_27 (sequence is synthesized)
cgtccgagaaattctcgcagagcttacaggtttgctgttgatttacagaaaggggaaatgagtggattaagtttttaaatatctgtcattaagatgctattatgagttaatatttgttaa

SEQ ID NO: 294766 - DNA, 120 bp, Artificial Sequence
  ENSG00000131828_28 (sequence is synthesized)
caccatgcctggccttcaaagcctttttgattcaaaacaagctgttggcagattgccttattaaaaatgagaaagatgaaatatgcaatcaatacttgctagaaatgagaacagatcagt

SEQ ID NO: 294767 - DNA, 120 bp, Artificial Sequence
  ENSG00000131828_29 (sequence is synthesized)
caaccaataagaaattcgtgacaactcagaagatctgataagactacactggacgcttaataaagggcctgcgtttgaggccgtggattgccggcctgttcttccagtcatcgttcctaa

SEQ ID NO: 294768 - DNA, 120 bp, Artificial Sequence
  ENSG00000131828_30 (sequence is synthesized)
cctcggcctcccaaagtgctgggattactctcactctcttaaaaccaggcaggcaagcagagtgctggtagcatcccgtaattttgcaaatgatgctacatttgaaattaagaaatgtga

SEQ ID NO: 294769 - DNA, 120 bp, Artificial Sequence
  ENSG00000131828_31 (sequence is synthesized)
gaaacattggagagtttcattctcatacaggagcaggtcatgtgaaagtaaaatggtttggggcagttggattcatgcttcgcccctcccctgtttattaccaggtggatggaatggata

SEQ ID NO: 294770 - DNA, 120 bp, Artificial Sequence
  ENSG00000131828_32 (sequence is synthesized)
tttggccctggactttgtcttcaaaaactttcacagccccagacaacttttcctgaagtagtacagccatgtgctgcacagtgacgctttggtcaatgtcgcatatatgatgttggaccc

SEQ ID NO: 294771 - DNA, 120 bp, Artificial Sequence
  ENSG00000131828_33 (sequence is synthesized)
ggtatcatctggatggaacatctgaaggaaactaagtgactagagagtaggaaaagctggaaaggttgaagcacatggaactagtgaaaggacaaggagaaacatgtgtttgcctggagg

SEQ ID NO: 294772 - DNA, 120 bp, Artificial Sequence
  ENSG00000131828_34 (sequence is synthesized)
gacaggtacttagacgactgaactggcctctgtgttctaatggttgagcctcagagtacatatttggggtgcggtttggtttgctttgtagagttggtttgttctgcacatgtgtatgtt

SEQ ID NO: 294773 - DNA, 120 bp, Artificial Sequence
  ENSG00000131831_0 (sequence is synthesized)
agcgactcggtgacagcggcgacggcggctcccaccgcggcgcacccccttcaggcggccggcggcgaggccagaccggagagttccagcacactcgaccaccccgcggcttcctggagg

SEQ ID NO: 294774 - DNA, 120 bp, Artificial Sequence
  ENSG00000131831_1 (sequence is synthesized)
cggcggccgcgattgcgaggcttcccaggaagaatgaagcagtcaacttgcataaggcctgtcttgacttctctcctttgggggaagaggatcacattaagaagggtggcaggcttgcct

SEQ ID NO: 294775 - DNA, 120 bp, Artificial Sequence
  ENSG00000131831_2 (sequence is synthesized)
ggacacagaattccactaccaaacagacatcatttctgagaacttcagagtttatgatccaggtttcccagtgattaaattactccttggaaggccaagtggcatcagagctgagtgatg

SEQ ID NO: 294776 - DNA, 120 bp, Artificial Sequence
  ENSG00000131831_3 (sequence is synthesized)
gacgacctgcagtcccagaacctctccatggacatgactgactcccctcctgccttggctaataacagactggagaatggcatggctcagctgatcaccaccgaggcctggaacatcaac

SEQ ID NO: 294777 - DNA, 120 bp, Artificial Sequence
  ENSG00000131831_4 (sequence is synthesized)
tccactgacctggtaaagaaggccctggtgaccgtgccagccccatccattctgaacccccctgccgagtctcagagtggcatggctctgaaggtggcggccactgtgttgcagcccctg

SEQ ID NO: 294778 - DNA, 120 bp, Artificial Sequence
  ENSG00000131831_5 (sequence is synthesized)
tgcctcggggagagcccagtggtgatgcccattcacatgcaggtggagggaagctccgcaccagagctcaatccgaatggcaatgccacctacgtcatgaccacccagggccccgtgcaa

SEQ ID NO: 294779 - DNA, 120 bp, Artificial Sequence
  ENSG00000131831_6 (sequence is synthesized)
ctgcccgtggtgctggagcagcacgtctttcagcacctcaactcccctctggtcctgccgcaggaggccccatgctcctccagtaccatccacaacaacctcttccagggagcggaggac

SEQ ID NO: 294780 - DNA, 120 bp, Artificial Sequence
  ENSG00000131831_7 (sequence is synthesized)
cccgaggcccagccccagctcctggacctgaggatccccagccagccgcaggagcccactttgccatttgaagctgtgctccagaatttgtttccctcccagggcactctcgggccccca

SEQ ID NO: 294781 - DNA, 120 bp, Artificial Sequence
  ENSG00000131831_8 (sequence is synthesized)
ccctgtcagcctcctcctggctatgcccctgtgcccccacagccttttagctcccccttgtcccccctggtcccaccagccaccctcttggtgccgtatcctgtaatcgtccccttgcct

SEQ ID NO: 294782 - DNA, 120 bp, Artificial Sequence
  ENSG00000131831_9 (sequence is synthesized)
agagttctgaatccaagttcagctccagtttccccaagccaccatcttccttcggcctgcacccctttaaaggcacccagacccctctggaaaaagatgaactgaagccctttgacatcc

SEQ ID NO: 294783 - DNA, 120 bp, Artificial Sequence
  ENSG00000131831_10 (sequence is synthesized)
tccagcctaaggagtacttccagctcagccgccacacggtcattaagatgggaagtgagaacgaggccctggatctctccatgaagtcagtgccctggctcaaggctggtgaagtcagtc

SEQ ID NO: 294784 - DNA, 120 bp, Artificial Sequence
  ENSG00000131831_11 (sequence is synthesized)
ccccaatcttccaggaagatgcagccctagacctgtcagtggcagcccaccggaaatccgagcctccccctgagacactgtatgacagtggtgcatcagtggacagctcaggtcacacag

SEQ ID NO: 294785 - DNA, 120 bp, Artificial Sequence
  ENSG00000131831_12 (sequence is synthesized)
tgatggagaaacttcccagtggcatggaaatttcttttgcccctgccacgtcccatgaggccccagccatgatggatagtcacatcagcagcagtgatgctgctaccgagatgctcagcc

SEQ ID NO: 294786 - DNA, 120 bp, Artificial Sequence
  ENSG00000131831_13 (sequence is synthesized)
agcccaaccaccccagcggcgaagtcaaggctgaaaataacattgagatggtgggcgagtcccaggcggccaaggtcattgtctctgtcgaagatgctgtgcctaccatattctgtggca

SEQ ID NO: 294787 - DNA, 120 bp, Artificial Sequence
  ENSG00000131831_14 (sequence is synthesized)
agatcaaaggcctctcaggggtgtccaccaaaaacttctccttcaaaagagaagactccgtgcttcagggctatgacatcaacagccaaggggaagagtccatgggaaatgcagagcccc

SEQ ID NO: 294788 - DNA, 120 bp, Artificial Sequence
  ENSG00000131831_15 (sequence is synthesized)
ttaggaaacccatcaaaaaccggagcataaagttaaagaaagtgaactcccaggaaatacacatgctcccaatcaaaaaacaacggctggccaccttttttccaagaaagtaaataacgg

SEQ ID NO: 294789 - DNA, 120 bp, Artificial Sequence
  ENSG00000131831_16 (sequence is synthesized)
ctttttaaaatttgtatgattataatatggggaaaggtgcattggttttataaaaaggcatttaaaacaaattatctttgttaattattttggggagtagttgggaaatggaaaggtgaa

SEQ ID NO: 294790 - DNA, 120 bp, Artificial Sequence
  ENSG00000131831_17 (sequence is synthesized)
ttggctctagaggccctgtatgctagtatcattttcttttttaatttttgacttttcacaaatgagtaaataagagcaacctatttttcaagcagattgcacattttttgcagctttaat

SEQ ID NO: 294791 - DNA, 120 bp, Artificial Sequence
  ENSG00000131831_18 (sequence is synthesized)
ggaatattgggtgaattagaggggtaaaaaaagctattttcattgccacaaagtgctttgatgatgtaatacctaataaagggtaggatgaatatttcacaataaatgtttgtttgcact

SEQ ID NO: 294792 - DNA, 120 bp, Artificial Sequence
  ENSG00000131831_19 (sequence is synthesized)
ggcaccgcaccgggcagtctccggatctgccgttctgccccggcccggaaaacccggcgccttccaggcccttcgaaagatggattctgttgacgtatctggcggccctggcgagcctgg

SEQ ID NO: 294793 - DNA, 120 bp, Artificial Sequence
  ENSG00000131831_20 (sequence is synthesized)
cactgacctgcccctgtgcctcggggagagcccagtggtgatgcccattcacatgcaggtggagggaagctccgcaccagagctcaatccgaatggcaatgccacctacgtcatgaccac

SEQ ID NO: 294794 - DNA, 120 bp, Artificial Sequence
  ENSG00000131844_0 (sequence is synthesized)
agcttccgccccagccagggaagcggcaggggaaagcaccggctccaggccagcgtgggccgctctctcgctcggtgcccgccgccatgtgggccgtcctgaggttagccctgcggccgt

SEQ ID NO: 294795 - DNA, 120 bp, Artificial Sequence
  ENSG00000131844_1 (sequence is synthesized)
gtgcccgcgcctctcccgccgggccgcgcgcctatcacggggactcggtggcctcgctgggcacccagccggacttgggctctgccctctaccaggagaactacaagcagatgaaagcac

SEQ ID NO: 294796 - DNA, 120 bp, Artificial Sequence
  ENSG00000131844_2 (sequence is synthesized)
tagtaaatcagctccatgaacgagtggagcatataaaactaggaggtggtgagaaagcccgagcacttcacatatcaagaggaaaactattgcccagagaaagaattgacaatctcatag

SEQ ID NO: 294797 - DNA, 120 bp, Artificial Sequence
  ENSG00000131844_3 (sequence is synthesized)
acccagggtctccatttctggaattatcccagtttgcaggttaccagttatatgacaatgaggaggtgccaggaggtggcattattacaggcattggaagagtatcaggagtagaatgca

SEQ ID NO: 294798 - DNA, 120 bp, Artificial Sequence
  ENSG00000131844_4 (sequence is synthesized)
tgattattgccaatgatgccaccgtcaaaggaggtgcctactacccagtgactgtgaaaaaacaattacgggcccaagaaattgccatgcaaaacaggctcccctgcatctacttagttg

SEQ ID NO: 294799 - DNA, 120 bp, Artificial Sequence
  ENSG00000131844_5 (sequence is synthesized)
attcgggaggagcatacttacctcgacaagcagatgtgtttccagatcgagaccactttggccgtacattctataatcaggcaattatgtcttctaaaaatattgcacagatcgcagtgg

SEQ ID NO: 294800 - DNA, 120 bp, Artificial Sequence
  ENSG00000131844_6 (sequence is synthesized)
tcatgggctcctgcaccgcaggaggagcctatgtgcctgccatggctgatgaaaacatcattgtacgcaagcagggtaccattttcttggcaggaccccccttggttaaagcggcaactg

SEQ ID NO: 294801 - DNA, 120 bp, Artificial Sequence
  ENSG00000131844_7 (sequence is synthesized)
gggaagaagtatctgctgaggatcttggaggtgctgatcttcattgcagaaagtctggagtaagtgaccactgggctttggatgatcatcatgcccttcacttaactaggaaggttgtga

SEQ ID NO: 294802 - DNA, 120 bp, Artificial Sequence
  ENSG00000131844_8 (sequence is synthesized)
ggaatctaaattatcagaagaaattggatgtcaccattgaaccttctgaagagcctttatttcctgctgatgaattgtatggaatagttggtgctaaccttaagaggagctttgatgtcc

SEQ ID NO: 294803 - DNA, 120 bp, Artificial Sequence
  ENSG00000131844_9 (sequence is synthesized)
gagaggtcattgctagaatcgtggatggaagcagattcactgagttcaaagccttttatggagacacattagttacaggatttgctcgaatatttgggtacccagtaggtatcgttggaa

SEQ ID NO: 294804 - DNA, 120 bp, Artificial Sequence
  ENSG00000131844_10 (sequence is synthesized)
acaacggagttctcttttctgaatctgcaaaaaagggtactcactttgtccagttatgctgccaaagaaatattcctctgctgttccttcaaaacattactggatttatggttggtagag

SEQ ID NO: 294805 - DNA, 120 bp, Artificial Sequence
  ENSG00000131844_11 (sequence is synthesized)
agtatgaagctgaaggaattgccaaggatggtgccaagatggtggccgctgtggcctgtgcccaagtgcctaagataaccctcatcattgggggctcctatggagccggaaactatggga

SEQ ID NO: 294806 - DNA, 120 bp, Artificial Sequence
  ENSG00000131844_12 (sequence is synthesized)
tgtgtggcagagcatatagcccaagatttctctacatttggccaaatgctcgtatctcagtgatgggaggagagcaggcagccaatgtgttggccacgataacaaaggaccaaagagccc

SEQ ID NO: 294807 - DNA, 120 bp, Artificial Sequence
  ENSG00000131844_13 (sequence is synthesized)
gggaaggaaagcagttctccagtgctgatgaagcggctttaaaagagcccatcattaagaagtttgaagaggaaggaaacccttactattccagcgcaagggtatgggatgatgggatca

SEQ ID NO: 294808 - DNA, 120 bp, Artificial Sequence
  ENSG00000131844_14 (sequence is synthesized)
ttgatccagcagacaccagactggtcttgggtctcagttttagtgcagccctcaacgcaccaatagagaagactgacttcggtatcttcaggatgtaactggaataaaggatgttttctg

SEQ ID NO: 294809 - DNA, 120 bp, Artificial Sequence
  ENSG00000131844_15 (sequence is synthesized)
catgtagtagccttaaaattttagacttctcgaacatgaggctgttacagtaatttttttaacactgtgcattgtacttttctaccttaaaaaaatcagtgaggatatttatttaatgaa

SEQ ID NO: 294810 - DNA, 120 bp, Artificial Sequence
  ENSG00000131844_16 (sequence is synthesized)
catcaattccttttaaattttcttagagaaatttctctgtggctcagttttaccacccataaagcggagacagtaatttacggttatcctttctgacccacaaagtatgaaaagttctgt

SEQ ID NO: 294811 - DNA, 120 bp, Artificial Sequence
  ENSG00000131844_17 (sequence is synthesized)
aatctgtaaactcagttctgtaatctgtattattgagatgattaatataaagttgtattttcactgaaatgattgttttgctggttatgcttggtgatattttagcgggcttatttttga

SEQ ID NO: 294812 - DNA, 120 bp, Artificial Sequence
  ENSG00000131844_18 (sequence is synthesized)
aaggcatctgttacttcagtggcataaagtgccctcacactgctgtgcagccatcaccaccattcatctccagaatttgttctcagtcccaaactgaaactataccattcaaacaacagc

SEQ ID NO: 294813 - DNA, 120 bp, Artificial Sequence
  ENSG00000131844_19 (sequence is synthesized)
tataccattcaaacaacagcgctccccatttccccctcccccgagcccatgacatctccttattattattttttttttgagacagggtgtttctctgttgcccaggctggagtgcggtgg

SEQ ID NO: 294814 - DNA, 90 bp, Artificial Sequence
  ENSG00000131844_20 (sequence is synthesized)
gcctcagcctcccaagcagctgggagttctgtatttttagcagagacgggatttcactaggttgcccaggctggtctcaaactactgacc

SEQ ID NO: 294815 - DNA, 60 bp, Artificial Sequence
  ENSG00000131844_21 (sequence is synthesized)
acatctccttattcttaaatgtatgtgtttctcatggtttgatttattcttgctgggcca

SEQ ID NO: 294816 - DNA, 120 bp, Artificial Sequence
  ENSG00000131844_22 (sequence is synthesized)
gtatgtgtttctcatggtttgatttattcttgctgggccatttcagcccctgtcatggcttcactcgccatctaaatgcagatgattactgccttgacggttcttaacccagctctcccc

SEQ ID NO: 294817 - DNA, 120 bp, Artificial Sequence
  ENSG00000131844_23 (sequence is synthesized)
tgagctgcaggcctgcatatccagtaggtctactggacatctgtactggttgttgtggaggaacctctggcttgctcattaagtcctactgattttcactatcccctgaatttccccact

SEQ ID NO: 294818 - DNA, 120 bp, Artificial Sequence
  ENSG00000131844_24 (sequence is synthesized)
tatttttgtctttcactatcgcaggccttagaagaggtctacctgcctccagtcttacctagtccagtctaccccctggagttagaatggccatcctgaagtgaaaagtaatgtcagatt

SEQ ID NO: 294819 - DNA, 120 bp, Artificial Sequence
  ENSG00000131844_25 (sequence is synthesized)
actcccttcagtgatttcttgtagaagtgccaatccctgaatgccaccaagatcttaatcttcacatctttaatcttatctctttgactcctctttacaccggagaacggctccagctgt

SEQ ID NO: 294820 - DNA, 120 bp, Artificial Sequence
  ENSG00000131844_26 (sequence is synthesized)
tctagctctctttcagttctttgaaccttcccaccttagggtctataaggttccctctgcccaaattgttctactctcccttcttcttcaacacatccttcagtttaagcacttgcttct

SEQ ID NO: 294821 - DNA, 120 bp, Artificial Sequence
  ENSG00000131844_27 (sequence is synthesized)
ctcagtttaaactccacttccttagggatgtctctgtgacctccctgtgctggattagcttccctactctatgctcttgtaaaacactatctacttcctttgtcataaactcatcatttt

SEQ ID NO: 294822 - DNA, 120 bp, Artificial Sequence
  ENSG00000131844_28 (sequence is synthesized)
cctataaacattaatattgtcctcctgctagaatgtaagctccgtgagagcaaggatcctcctgtttaccctgtacctccaatgtctggcacttgtaggtgctcaaatattcgttgaatg

SEQ ID NO: 294823 - DNA, 120 bp, Artificial Sequence
  ENSG00000131844_29 (sequence is synthesized)
aatgaaaaatccatattgtaattgatgtcctctggccacatagttttaaaattaggtgattgattatatgaccgaatagaactatcaaatgttttcctaataaagtcaatatttcaaaca

SEQ ID NO: 294824 - DNA, 120 bp, Artificial Sequence
  ENSG00000131844_30 (sequence is synthesized)
attacatttgggatgggtattttataaacctgttgatttctcctgtaattataaaggaaacacaggttctttgctgaaaactctgggggaaagtaaacaagaactgttcatagtactagt

SEQ ID NO: 294825 - DNA, 120 bp, Artificial Sequence
  ENSG00000131844_31 (sequence is synthesized)
gcataatactcatacattttgacgcatgccagtttttttctctatgtgttgtgtggttttttttttttgttctctagatcctgtttttcttttaactttatggatcatactatgaaaaaa

SEQ ID NO: 294826 - DNA, 120 bp, Artificial Sequence
  ENSG00000131844_32 (sequence is synthesized)
atagtagcaagtatttatagatctcttgagtgccaggtactgagttaaatgtgcaagtattatataatttgagcagatgtaatttaaagtaaatttaatttccagtgaaagtaaacttat

SEQ ID NO: 294827 - DNA, 120 bp, Artificial Sequence
  ENSG00000131844_33 (sequence is synthesized)
gatgtggatctcagtaaggagtgacatatgtggcaatgatacctttccatactgtggatatcattggcacagagtaaatactgaaagaggggagtgggggacctcaatgattggaaagtt

SEQ ID NO: 294828 - DNA, 120 bp, Artificial Sequence
  ENSG00000131844_34 (sequence is synthesized)
ttcattgcgcaaaaagtgtgatttggtcataagtaagactccatgtcctgtgcacattatgaatgatgtaaggcaacttaacaattgtcagctatttcttttcattgttcttattttggg

SEQ ID NO: 294829 - DNA, 120 bp, Artificial Sequence
  ENSG00000131844_35 (sequence is synthesized)
catacccttttagatcaatatgacatttgcaatgattagacctgattacagttgaaaatgttgctatggttacacattgtcgacatagtgttctgtaatttagatggacaacttttaggg

SEQ ID NO: 294830 - DNA, 120 bp, Artificial Sequence
  ENSG00000131844_36 (sequence is synthesized)
tttagagcatatagtcttttattttgttcagtatccatagttggcagagtagtttttaaattaggaaattatcttaatatcaaattctgtactggaagttttaatatttcaaattatatt

SEQ ID NO: 294831 - DNA, 120 bp, Artificial Sequence
  ENSG00000131844_37 (sequence is synthesized)
ttccccttgactataaaatattatatattagttgtgaaaaatatagaaaatacagaaaagaaaaaaattaaattgcatataattccaccctctagagaaggtggctaatatttggatgtt

SEQ ID NO: 294832 - DNA, 120 bp, Artificial Sequence
  ENSG00000131844_38 (sequence is synthesized)
ttaggttaatgtgtatatacgcacatttttatgtagttgagatagtctatacgtatatttttttgttttactttttctagtttaaattataaacattttcccatgtctttagaaattctt

SEQ ID NO: 294833 - DNA, 120 bp, Artificial Sequence
  ENSG00000131844_39 (sequence is synthesized)
catgaaatattttctacggctagatcttaattcctataatagtacttggcaacatggtaagtagtcagtaactattttctgaatgcattgatggatataatgttctgttgtatggattta

SEQ ID NO: 294834 - DNA, 120 bp, Artificial Sequence
  ENSG00000131844_40 (sequence is synthesized)
tttaggcaataccccagcattgctagtgggtcttaaatcctggattttattgagcttcaagtgatacttcactttagcaaacgtgacttagttaattgtaaatttttaaatgaggttttt

SEQ ID NO: 294835 - DNA, 120 bp, Artificial Sequence
  ENSG00000131844_41 (sequence is synthesized)
aatttttaaatgaggtttttagtttaacttttaattaattataagcacaggaaaaaatggtacttaaactctgacatacttgaaaaatgtgttgggccaggcgcagtggttcatgcctgt

SEQ ID NO: 294836 - DNA, 63 bp, Artificial Sequence
  ENSG00000131844_42 (sequence is synthesized)
atgcctgtaatcccagcactttgggaagtggaggcaggcagatcccttgagtctaggagatca

SEQ ID NO: 294837 - DNA, 70 bp, Artificial Sequence
  ENSG00000131844_43 (sequence is synthesized)
ctgtaatcccagctactcgggaggccgaaacaagagaatcgcttgaacctgggagcagaggttgcagtga

SEQ ID NO: 294838 - DNA, 120 bp, Artificial Sequence
  ENSG00000131844_44 (sequence is synthesized)
ggaatctcttgtttcaagactttgatacacttgacatgggctttgttgttgagagcactacaaatgtgtgagccacttttaaaaggaactgctttataaacataatttgtagcttaatgg

SEQ ID NO: 294839 - DNA, 120 bp, Artificial Sequence
  ENSG00000131844_45 (sequence is synthesized)
cttcatggatccaaatagtttaaaatgttaatagctagatgctgtggtgtgggtccctatctgtgactttgtgacattagttgtataaaaaggttcttatagtaaaattagtagaaaata

SEQ ID NO: 294840 - DNA, 120 bp, Artificial Sequence
  ENSG00000131845_0 (sequence is synthesized)
acacgtcctcttgtccttgtctcccccagaagcagccgccttagtcttgtgagcgtttttacaccgggtagattgagacttggagtgctacactcagcccgagggcgtccagcgcggtgg

SEQ ID NO: 294841 - DNA, 120 bp, Artificial Sequence
  ENSG00000131845_1 (sequence is synthesized)
aggcgtggggtttcggctgagcccacagggcacagactgttcatccgcttctcatggcagcggcggtgctgatggaccgggttcagagttgtgtgaccttcgaggatgtgttcgtgtact

SEQ ID NO: 294842 - DNA, 120 bp, Artificial Sequence
  ENSG00000131845_2 (sequence is synthesized)
tctctcgggaggagtgggaactccttgaggaggcacagagattcctgtaccgtgatgtgatgctggagaactttgcacttgtggctacactaggtttttggtgtgaagcagaacatgagg

SEQ ID NO: 294843 - DNA, 120 bp, Artificial Sequence
  ENSG00000131845_3 (sequence is synthesized)
caccttctgagcagagcgtttctgtagaaggagtgtcacaggtcaggactgctgagtcaggtcttttccagaaagcacacccatgtgagatgtgtgacccactcttgaaagacattttgc

SEQ ID NO: 294844 - DNA, 120 bp, Artificial Sequence
  ENSG00000131845_4 (sequence is synthesized)
acctggctgaacaccagggatcacaccttacacagaaactgtgcacacgtgggctgtgtaggagaagattctcgttcagtgcaaacttttaccagcaccagaagcaacataatggagaga

SEQ ID NO: 294845 - DNA, 120 bp, Artificial Sequence
  ENSG00000131845_5 (sequence is synthesized)
attgcttcagaggggatgatggaggggcctcatttgtgaagagctgtacagtccacatgttagggagatcctttacgtgcagggaggaagggatggacttaccagatagctctggccttt

SEQ ID NO: 294846 - DNA, 120 bp, Artificial Sequence
  ENSG00000131845_6 (sequence is synthesized)
tccagcaccagaccacttacaatagggtgagtccatgcagaaggactgaatgcatggagtctttcccacacagctccagtctcaggcaacaccaaggagactatgatggacagatgcttt

SEQ ID NO: 294847 - DNA, 120 bp, Artificial Sequence
  ENSG00000131845_7 (sequence is synthesized)
tcagttgcggtgatgaagggaaagccttcctggacacctttactcttcttgacagccagatgactcatgctgaggtgagacccttcagatgcctaccatgtggaaatgtgttcaaggaga

SEQ ID NO: 294848 - DNA, 120 bp, Artificial Sequence
  ENSG00000131845_8 (sequence is synthesized)
aatcagctcttattaatcacagaaaaatccacagtggagaaatatctcatgtgtgtaaggagtgtggaaaagccttcattcacttgcaccacctaaaaatgcaccagaaatttcacactg

SEQ ID NO: 294849 - DNA, 120 bp, Artificial Sequence
  ENSG00000131845_9 (sequence is synthesized)
gaaaaagacactatacatgcagtgaatgtgggaaggccttcagccgcaaggacacacttgttcagcatcagagagttcacactggagaaagatcttatgactgcagtgaatgtggaaaag

SEQ ID NO: 294850 - DNA, 120 bp, Artificial Sequence
  ENSG00000131845_10 (sequence is synthesized)
cctacagcagaagctcccaccttgttcagcaccagagaattcacacaggagaaaggccttataagtgcaacaaatgtgggaaagcctttagccgtaaagacacacttgttcagcaccaga

SEQ ID NO: 294851 - DNA, 120 bp, Artificial Sequence
  ENSG00000131845_11 (sequence is synthesized)
gatttcatactggagaaaggccttatgagtgcagtgaatgtggaaaattctttagccaaagctcccaccttattgagcactggagaattcataccggggcaaggccctatgaatgcatag

SEQ ID NO: 294852 - DNA, 120 bp, Artificial Sequence
  ENSG00000131845_12 (sequence is synthesized)
aatgtggaaaattctttagccataactctagcctcattaaacatcggagagtccacacaggagcaagatcctacgtgtgcagcaaatgtgggaaggcctttggctgcaaagacacacttg

SEQ ID NO: 294853 - DNA, 120 bp, Artificial Sequence
  ENSG00000131845_13 (sequence is synthesized)
ttcagcaccagataattcacactggagcaaggccttatgagtgcagtgaatgtgggaaggccttcagccgtaaagacacacttgtgcaacaccaaaaaatccacactggagaaaggcctt

SEQ ID NO: 294854 - DNA, 120 bp, Artificial Sequence
  ENSG00000131845_14 (sequence is synthesized)
atgagtgtggtgaatgtggtaaattcttcagccatagctccaaccttattgtacaccagagaattcacactggagcaaagccttatgagtgcaatgaatgtgggaaatgctttagccaca

SEQ ID NO: 294855 - DNA, 120 bp, Artificial Sequence
  ENSG00000131845_15 (sequence is synthesized)
actccagcctcattttgcaccagagagttcacacaggagcaaggccttatgtgtgcagtgaatgtgggaaggcttacattagtagctcccaccttgttcaacacaagaaagttcacactg

SEQ ID NO: 294856 - DNA, 120 bp, Artificial Sequence
  ENSG00000131845_16 (sequence is synthesized)
gagcaagaccttatgagtgcagtgaatgtgggaaattctttagccgcaactctggcctcattctgcaccagagggttcacactggagaaaagccttacgtatgcagcgaatgtgggaaag

SEQ ID NO: 294857 - DNA, 120 bp, Artificial Sequence
  ENSG00000131845_17 (sequence is synthesized)
tatagcagaagctcccatcttgttcgtcaccagaaagctcacactggagaaagagctcacgagtgcaacagttttggtggccctttagctgcatctcttaaacttgtttaacaccagaaa

SEQ ID NO: 294858 - DNA, 120 bp, Artificial Sequence
  ENSG00000131845_18 (sequence is synthesized)
attcacacaagagaaaggccttatgaatgcagaaaatatgtcatcttgttcatcctcataggactcacaccagagcaatgctctgtgagtaccctttgtgagggaaccatcagctagcag

SEQ ID NO: 294859 - DNA, 120 bp, Artificial Sequence
  ENSG00000131845_19 (sequence is synthesized)
atgagcaccgtatattcattccaccctggggagattcctgataagcaccacatatgtgggaggctttcatgaggtgtgttgcactttgtaactgtctagagctcttgatggaattatatc

SEQ ID NO: 294860 - DNA, 120 bp, Artificial Sequence
  ENSG00000131845_20 (sequence is synthesized)
actgccagtgcctgtggcggaagccatcttattgctaccagctgtgtgtgtcaatcactccattttgctcagggaaggcagacttctgtgctttctttcctgttccctacaggtaatcat

SEQ ID NO: 294861 - DNA, 120 bp, Artificial Sequence
  ENSG00000131845_21 (sequence is synthesized)
gaatattttcaaggacttccccccccccccacttcaccccctaccattgagggtcctcatcttttccctcatgattaggttctgagcaaacatgatctagctctcaccaaaaggacctga

SEQ ID NO: 294862 - DNA, 120 bp, Artificial Sequence
  ENSG00000131845_22 (sequence is synthesized)
gctagggtctgctgggatttcctgacacgattttccatcttcatggacaatgttaactgtaaacgtgatagctgtgacttacttgtcttactgccaaatcgcccaaatttggaactgctt

SEQ ID NO: 294863 - DNA, 120 bp, Artificial Sequence
  ENSG00000131845_23 (sequence is synthesized)
gtcccatgctgctctgatttatacagtgataagggcctattgtggcagtctttactcttggggattttgttactgtgtagagtggattgagaaaagaattgggttctgtcatgaagggag

SEQ ID NO: 294864 - DNA, 120 bp, Artificial Sequence
  ENSG00000131845_24 (sequence is synthesized)
tagcaccttttgtgggcaccacctttatgtgcctcagaggggaccaaaggatggcagaaaactgttctcagtctagtttgacctaatttacactattgccctaggcttgctaggaaagac

SEQ ID NO: 294865 - DNA, 120 bp, Artificial Sequence
  ENSG00000131845_25 (sequence is synthesized)
tgaaaaaatttttgtgcctaactttgtggcctggctgccaggatttcctgtgagcccagtgaggagggcatagttggtgcgaaaatctcctgtgcttgtggaagcaacataagttgggtc

SEQ ID NO: 294866 - DNA, 120 bp, Artificial Sequence
  ENSG00000131845_26 (sequence is synthesized)
ccttaactgtcacgtactccccagcactgttgagggattgctgtcttctgtacctgtacaggatcaagtccctgatatccagaaccccataggcaagtaacattgactgtaagacctctg

SEQ ID NO: 294867 - DNA, 120 bp, Artificial Sequence
  ENSG00000131845_27 (sequence is synthesized)
tagggcaatgtgaaaatcatgattgctacagaagcactgagataatggagtggggatgactgtggcaaacaaaaggagattcgaacattctagaggggcatccacaagtctcggtgcagt

SEQ ID NO: 294868 - DNA, 120 bp, Artificial Sequence
  ENSG00000131845_28 (sequence is synthesized)
tatgatggtgtgggatgggagtgcatagaaattctcaggaccttcagacatctgtatctcctgtggccaaggccactgtcagaggaaataatctaaatgtttgtggattcctgtgtctcc

SEQ ID NO: 294869 - DNA, 120 bp, Artificial Sequence
  ENSG00000131845_29 (sequence is synthesized)
ctgggcagttgacctgcacagacaggaacctcagcagtgacagaagagagatccagggatgggtcttctctgacccagccagcattccgagtgactgaggtggatgtggacatcattgct

SEQ ID NO: 294870 - DNA, 120 bp, Artificial Sequence
  ENSG00000131845_30 (sequence is synthesized)
taccaatttttaccaacattgaggcagggctcactctcctaaattgtagggagaggaatatggtaaagccaaaatagttgacagatctaactttcctagtggaacagtatatatagattt

SEQ ID NO: 294871 - DNA, 120 bp, Artificial Sequence
  ENSG00000131845_31 (sequence is synthesized)
taatgaggaacatttatttaatagctttatggaggtatgattaacatgcaataaactgcaaatatgtaaagtgtaaaatgtgctgtttcagcatgtgtgtacacctatgaaaccaccaca

SEQ ID NO: 294872 - DNA, 120 bp, Artificial Sequence
  ENSG00000131845_32 (sequence is synthesized)
gtcaagatatccaacacaacaaaagattgtccctttataatcctcaatttttccttatcttgttttccacaattcacaagcaacagcaagcattttctataattttataaatgaaaccat

SEQ ID NO: 294873 - DNA, 120 bp, Artificial Sequence
  ENSG00000131845_33 (sequence is synthesized)
atggtgtgtactttttagggggtggggctctggctttttcagtaaacataactattttaaggttaatccattatcttgttgcatgaatcaattgtttgctcatttgtattgctgcgtagt

SEQ ID NO: 294874 - DNA, 120 bp, Artificial Sequence
  ENSG00000131845_34 (sequence is synthesized)
atttcagtatttcattgtataccacaatttttcttctttgtcaacttaattgttatggatgtttgggtaactttcagtttttggctattacaaataaacctctgaagatttgtgtgcaaa

SEQ ID NO: 294875 - DNA, 120 bp, Artificial Sequence
  ENSG00000131845_35 (sequence is synthesized)
atcgggtcggctttctacgcggctctcgtggaacctagcaaagaaagacagtgaagactgcaggaccttccttcgcgcttttgttacaatccatgacccctgtcgtgggacgggcggcct

SEQ ID NO: 294876 - DNA, 120 bp, Artificial Sequence
  ENSG00000131845_36 (sequence is synthesized)
gcacttgtggctacactagctttcattttcccagtcccatgcagttgcgcagttggagggggcagaaaaccttgggtgcctgacagggcagacatcactgcagccacagtaaaggagacc

SEQ ID NO: 294877 - DNA, 120 bp, Artificial Sequence
  ENSG00000131845_37 (sequence is synthesized)
gaccgggttcaggttgagaacagactgtgagcatgagggagcagctactgcagtagtgttgatggtgtctggtctagaggtgtggctgtggagagttgtgtgaccttcgaggatgtgttc

SEQ ID NO: 294878 - DNA, 120 bp, Artificial Sequence
  ENSG00000131848_0 (sequence is synthesized)
cccagaccgagaaggtcggaggcagaagccgggaaggagacttctgaatgaacagtgaatctattactgaggaaaaccagaggaagcctgtgtagataggtatcaattagataccagcta

SEQ ID NO: 294879 - DNA, 120 bp, Artificial Sequence
  ENSG00000131848_1 (sequence is synthesized)
ctggaagagctttctcagagactgattaaaaaattctccactagatatggctgcaaattgcacatcctcatggagtctaggagaatcctgcaacagacctgggttggagctgccacggtc

SEQ ID NO: 294880 - DNA, 120 bp, Artificial Sequence
  ENSG00000131848_2 (sequence is synthesized)
tatggcatcctcagaaactcaacttggaaatcacgacgtggaccctgagatttctcacgtgaacttcaggatgttcagctgcccgaaggagtcggaccccatccaggctctgaggaaact

SEQ ID NO: 294881 - DNA, 120 bp, Artificial Sequence
  ENSG00000131848_3 (sequence is synthesized)
cactgagctgtgccatctgtggctgaggcccgacctccacaccaaagagcagatcctggacatgctggtgatggagcagttcatgatctccatgccccaggagctccaggtcttagtcat

SEQ ID NO: 294882 - DNA, 120 bp, Artificial Sequence
  ENSG00000131848_4 (sequence is synthesized)
gatgaacggtgtgcagagctgcaaagacctggaggacctgctacgaaataacagaagacccaagaaatggtctgtggtcaccttccacggaaaggaatatattgtgcaggactcagatat

SEQ ID NO: 294883 - DNA, 120 bp, Artificial Sequence
  ENSG00000131848_5 (sequence is synthesized)
cgagatggctgaagccccctccagtgtcagagatgatctgaaagacgtgtccagccaacgggcctcctcggtgaaccagatgcgtccaggggaaggccaggcccaccgagagctgcagat

SEQ ID NO: 294884 - DNA, 120 bp, Artificial Sequence
  ENSG00000131848_6 (sequence is synthesized)
cctgcccagggtccctgcattgtccaggaggcagggagaggactttctgctacacaagagtattgacgtaacaggtgacccaaagtctctgagacccaagcagaccttggagaaggatct

SEQ ID NO: 294885 - DNA, 120 bp, Artificial Sequence
  ENSG00000131848_7 (sequence is synthesized)
gaaggaaaacagggaagagaacccaggactgacatccccagagcctcagcttccaaagagtcccacagatctggtgagagcaaaggaggggaaggaccccccaaaaatagcctctgtgga

SEQ ID NO: 294886 - DNA, 120 bp, Artificial Sequence
  ENSG00000131848_8 (sequence is synthesized)
aaatgtggatgctgacacaccttctgcctgcgttgtggagagagaagcttcgactcacagcgggaacagaggagacgctctgaatctgagcagtcccaaaagaagcaaaccagatgcctc

SEQ ID NO: 294887 - DNA, 120 bp, Artificial Sequence
  ENSG00000131848_9 (sequence is synthesized)
ctccatttcccaagaagagcctcaaggagaagccacacctgtgggcaacagagaatccccgggacaagctgggatgaattcaattcattccccaggccctgcgagcccagtcagtcaccc

SEQ ID NO: 294888 - DNA, 120 bp, Artificial Sequence
  ENSG00000131848_10 (sequence is synthesized)
ggatggccaagaagccaaggcactgccgccctttgcatgtgacgtgtgcgagaagaggtttacgtgtaattccaagctagtcatccacaagagatcacacacaggcgagagactctttca

SEQ ID NO: 294889 - DNA, 120 bp, Artificial Sequence
  ENSG00000131848_11 (sequence is synthesized)
atgtaatctctgtgggaagcgcttcatgcagcttattagcctccaatttcaccagcgaacccacactggcgagaggccctacacgtgtgacgtctgccagaagcagttcacccagaagtc

SEQ ID NO: 294890 - DNA, 120 bp, Artificial Sequence
  ENSG00000131848_12 (sequence is synthesized)
ctacttgaagtgtcacaagagaagccacacaggggagaagcccttcgaatgtaaagactgcaagaaagttttcacctacagggggagcctgaaggagcaccagcgcatccactccggaga

SEQ ID NO: 294891 - DNA, 120 bp, Artificial Sequence
  ENSG00000131848_13 (sequence is synthesized)
gaaaccctacaaatgttccaagtgtccaagagccttcagtcggctgaaattgttaagacgccaccagaaaacacatccagaagctacttctcagtgattgcataatccggtctatgcctt

SEQ ID NO: 294892 - DNA, 120 bp, Artificial Sequence
  ENSG00000131848_14 (sequence is synthesized)
agggagtgccctagatatgaattgccaggatgtttgagtaaatatgtgtcctccccactgagctttgttttctgtttcattatgtccattgttttcttataggtttattttggtttgtgt

SEQ ID NO: 294893 - DNA, 120 bp, Artificial Sequence
  ENSG00000131848_15 (sequence is synthesized)
tgctgttcttccaataaacgatcatcttattagttttcaatattgtataacggaaaactgagtttcctgattgacatggggttacccactgttttgctgtaaagtacagttgtccaagga

SEQ ID NO: 294894 - DNA, 120 bp, Artificial Sequence
  ENSG00000131848_16 (sequence is synthesized)
gggtggccatataaaatacataatgcctgatgaaatttgagtttcagataaacaattttctttagtatcagcatgttctaaattatttatttatctgaaactcagcttttattgggtatc

SEQ ID NO: 294895 - DNA, 120 bp, Artificial Sequence
  ENSG00000131848_17 (sequence is synthesized)
tctttctttttttttttttttgagatggcgtctccctctgtcacgcaggctgaggttcagtggcataatcaccgctcactgcagccgcgaccttccaggctcaagcaatcctcccatcta

SEQ ID NO: 294896 - DNA, 120 bp, Artificial Sequence
  ENSG00000131848_18 (sequence is synthesized)
ttccaggctcaagcaatcctcccatctaagcctcccgagcagccgagactacaggagcacgccaccaacttggctaatttttgtggtttttgtagagatggaattttgatatgttgccca

SEQ ID NO: 294897 - DNA, 120 bp, Artificial Sequence
  ENSG00000131848_19 (sequence is synthesized)
ggctggtcttgaactccgaagtacaagtgatccaactgcctcggcctccttaagtgctggcattacaggcatgagccgctgtgccctgtattgtttttattagactttattataattatg

SEQ ID NO: 294898 - DNA, 120 bp, Artificial Sequence
  ENSG00000131848_20 (sequence is synthesized)
atattcaaatttttgaaataattttttgtagtgatgggatttcttgttgcccaggctggtgtggggtgagccaccacgcctggctctagactttctttttcagagctgtttaggttcaca

SEQ ID NO: 294899 - DNA, 120 bp, Artificial Sequence
  ENSG00000131848_21 (sequence is synthesized)
gggaaattcagtggacagcacagagttcccctagactccctcctcacacaacacagcctctccctgcccagcatccccagcagagtggtgcacctgttccatcagtgaggctgcctggac

SEQ ID NO: 294900 - DNA, 120 bp, Artificial Sequence
  ENSG00000131848_22 (sequence is synthesized)
atatcaccaccacccagagtccatagtgttcattagggctcgctctgggtgttgtacgtgctgtgggtttggacaaaggcctcatgagtacacaccactggagtatcctggggggtattt

SEQ ID NO: 294901 - DNA, 120 bp, Artificial Sequence
  ENSG00000131848_23 (sequence is synthesized)
tcactgcccccggaatcctctctgctctgcatatttatctccctgccccagatggtgtattttgtggcctaaatttggcaacctctaaattcccgatttgactcttgaactacagaggca

SEQ ID NO: 294902 - DNA, 120 bp, Artificial Sequence
  ENSG00000131848_24 (sequence is synthesized)
ttgggagtctctggtgactagttggtcttagtgatactaccatcccctgaaggcgtggttaatcctcaggtgggtgggccccagactcagcttctgattgagcagaccgggcatggggcc

SEQ ID NO: 294903 - DNA, 120 bp, Artificial Sequence
  ENSG00000131848_25 (sequence is synthesized)
tgagagtgtgcattaaaatatataattcattttagaatagctttctaaagtccatggagctccctaatgccccacatggcttcccccattgccaacatggttcattaggatggcaccttt

SEQ ID NO: 294904 - DNA, 120 bp, Artificial Sequence
  ENSG00000131848_26 (sequence is synthesized)
gaactgactggagcgatgaactgactggatatattgccgtgatctaaggcccataccttattgaggcctccttagtgtttacacaatgccctcctcttccttcctccccatccaagacac

SEQ ID NO: 294905 - DNA, 120 bp, Artificial Sequence
  ENSG00000131848_27 (sequence is synthesized)
cacattgccttgagttgtcacgtctccctaggatcctcttggtgacaatttctcagattttacttgtttgggattacctgagaatgtacattttaggtggtgctcatgctgctggtcttg

SEQ ID NO: 294906 - DNA, 120 bp, Artificial Sequence
  ENSG00000131848_28 (sequence is synthesized)
ggaggacattttatggatggctgattgagctgacgggcagagtcctgcaatctgcagaggtctggaaaggtcccttcccaaataggctggattcatttattaaagactacttttgtaaga

SEQ ID NO: 294907 - DNA, 120 bp, Artificial Sequence
  ENSG00000131848_29 (sequence is synthesized)
aggtctccctggagcccgccgacctgaagcagcggccgcaccgcgtatgcgcccgggtggtttctgggagtaggcgaggactcgcagtgcgcatgtgcagcccccacggccccgctccca

SEQ ID NO: 294908 - DNA, 120 bp, Artificial Sequence
  ENSG00000131848_30 (sequence is synthesized)
gtgaccggaatgcagaggcgtacatggctaagagacgagctacctgggacacaaagatgagaaccacaagcatgagaacatgaggataaatacactttggggaaaaagaaaacagacaga

SEQ ID NO: 294909 - DNA, 120 bp, Artificial Sequence
  ENSG00000131848_31 (sequence is synthesized)
ggcagcagagaaggaagacgagaagaagagaaaaagagaagtaggaagaggatgaattcatttcgcttatctggcaaatgtgtaatctgagtaatagagatggtgcaatgctgggccaca

SEQ ID NO: 294910 - DNA, 120 bp, Artificial Sequence
  ENSG00000131848_32 (sequence is synthesized)
gagcttgccccaggtccccaagcaaagtcagtggcactgcctggactggaagttcatccccatccattttcacgtgcggagtctcagggctcagtaaagaaccatgattgacggaggtca

SEQ ID NO: 294911 - DNA, 120 bp, Artificial Sequence
  ENSG00000131848_33 (sequence is synthesized)
cacagcaactggtatgacagggacaggtttccggaattccagtgtcttaacaccaaagcctgtagtatttctcagagagaacaacaccactgctcgtgtgtgctcagaagaaagtttagt

SEQ ID NO: 294912 - DNA, 120 bp, Artificial Sequence
  ENSG00000131848_34 (sequence is synthesized)
ggtcgtaacatccaatacatccaacctgcagatcaatacacaaagaccctggaggaaggtggggcggtaacttgtccaaatctccaaagaaaagatatggctgcaaattgcacatcctca

SEQ ID NO: 294913 - DNA, 120 bp, Artificial Sequence
  ENSG00000131848_35 (sequence is synthesized)
ttatagtcaagaacaatgttgttccaattgacaggaaaactgattcagcctctgcacagtgatttcctagagatcagaatccaggggtcattaagattttaaaccagagtatgtagtcag

SEQ ID NO: 294914 - DNA, 120 bp, Artificial Sequence
  ENSG00000131848_36 (sequence is synthesized)
gtatagacactggaagatttccactgtgctgaattcgatgctgctgaagaagtggcatccaggatgagggatttcgaagggagggatggatggagtagtaacttaaactaatgaggctca

SEQ ID NO: 294915 - DNA, 120 bp, Artificial Sequence
  ENSG00000131848_37 (sequence is synthesized)
cagaagacccaagaaatgggtgagtgggaccctcgtgattggtgcagggaaggggagctgggatgggggctgcacggtgcagctggactcgagaggacccgaggggctgctctaggtcag

SEQ ID NO: 294916 - DNA, 120 bp, Artificial Sequence
  ENSG00000131848_38 (sequence is synthesized)
ggcttccaagtagaggagagtttgcccgtcggggacacatggcagtgtctggggacagtttttgttgtcagggaggacaggagacgctgctaagcgttctctaacgctcaggacaaccca

SEQ ID NO: 294917 - DNA, 120 bp, Artificial Sequence
  ENSG00000131848_39 (sequence is synthesized)
tcatgacaaataatcatccagattccaatatcagctgtgctgagacggcaagttcctggtgtaggagatggacaggcagagggggtacagggacccacacactgtgtgaggccaacatga

SEQ ID NO: 294918 - DNA, 120 bp, Artificial Sequence
  ENSG00000131848_40 (sequence is synthesized)
gacaagttcccgatccaggcgtcccgctctccccggccccactcgccaggtcctaccacgatgcctgactcgtttgcggctttgggaccggttgtaggtggcttgaccgtcactagtaga

SEQ ID NO: 294919 - DNA, 120 bp, Artificial Sequence
  ENSG00000131848_41 (sequence is synthesized)
cgtttctgagtgtgtcgcggtcaccatggtaacgactttagcttcccttccgcccttgcggtgacgtcactggcggaggccggactggggtgggttggggagagggagggcgcatgcgcc

SEQ ID NO: 294920 - DNA, 120 bp, Artificial Sequence
  ENSG00000131848_42 (sequence is synthesized)
tggggcggggacgtgggaggagggggagattcgtgggaggaccgagcccggggatgggactggaggagtttccgtgaccttgcgggctgtttgtgctgagggacagctttatttaaataa

SEQ ID NO: 294921 - DNA, 120 bp, Artificial Sequence
  ENSG00000131848_43 (sequence is synthesized)
actcttttttccttccctcccgatttttgattggaaacccagacttcctttcacgcctgtcgccaggttaactaggtcactgtttgctctcaggagcaaccctgcctcccgcagttcgct

SEQ ID NO: 294922 - DNA, 77 bp, Artificial Sequence
  ENSG00000131848_44 (sequence is synthesized)
tgtttgctctcaggagcaaccctgcctcccgcagttcgcttggtccttgattacaggggaggttccctgctgacctt

SEQ ID NO: 294923 - DNA, 77 bp, Artificial Sequence
  ENSG00000131848_45 (sequence is synthesized)
tgagacgtgcctttggaacagaagaaaagatgatcctttattgcctctagaaagaggagccaagctctgtccttcta

SEQ ID NO: 294924 - DNA, 120 bp, Artificial Sequence
  ENSG00000131848_46 (sequence is synthesized)
ttattgcctctagaaagaggagccaagctctgtccttctatttaccccacaccagccctttgagatcagatattgtccctatgttgctggtgaggacgggtgaacctccaaggaattacg

SEQ ID NO: 294925 - DNA, 120 bp, Artificial Sequence
  ENSG00000131848_47 (sequence is synthesized)
gaactcaaactcagatctctctgacttcttctagaagtctccatttcctcatctgcaaaacgggaacgttaactggggcgaggcttgctacgtattgaagaatcccactgggtttgctag

SEQ ID NO: 294926 - DNA, 120 bp, Artificial Sequence
  ENSG00000131848_48 (sequence is synthesized)
tggaaagtgctgtatttatggagctcgcaacacctttctcggtatcactgaaaatcgtctggtagttaatgcctaacgttgttgggaatattgatgtgggcattgaatggctgatatcca

SEQ ID NO: 294927 - DNA, 120 bp, Artificial Sequence
  ENSG00000131848_49 (sequence is synthesized)
ggctatacattttactaagtgggtggccttgggatgatgaatgaactctctgtgctctttaaaatggagatattgtttcctgtttggatctgtgtcaataaagaaggaagataatgcaga

SEQ ID NO: 294928 - DNA, 120 bp, Artificial Sequence
  ENSG00000131848_50 (sequence is synthesized)
cctactcacttctttggggagagaggaagaaagtcttggacagtaattgagcatcctctttgggcacctgccccaacaacttcacacacattatcatctcatttaactgaggttggatct

SEQ ID NO: 294929 - DNA, 120 bp, Artificial Sequence
  ENSG00000131848_51 (sequence is synthesized)
gcaaaggcagcttggcttggcagaaagagcgggagctttggaatgagggcctagatctcaccgtgggctctatcacttggtgctatttttagcaagcatgcagtaataatcataatactc

SEQ ID NO: 294930 - DNA, 120 bp, Artificial Sequence
  ENSG00000131848_52 (sequence is synthesized)
ggttcaatcacacatcctaaggacaaatcacaagaccaaaggagatgggataacaaaatgcaacatggttgagcaagagctggattttctgaaacaaaacaaaacaaaacaaaacaaaaa

SEQ ID NO: 294931 - DNA, 120 bp, Artificial Sequence
  ENSG00000131848_53 (sequence is synthesized)
tgggatcctggattggatcctcaaatagaatagtttttctattagtagaaacattagtaaaatttgaatgaggtctgtaatttctttaatagttttgttctggtgttgggtcttgctttt

SEQ ID NO: 294932 - DNA, 120 bp, Artificial Sequence
  ENSG00000131848_54 (sequence is synthesized)
agtcattgtgctatggttaggtaagatgttaacagctgagataactgggtgaagaatattcagaaacttaatttttgtgacttttcctcaagtctaaaataatttcaaaataaatttttt

SEQ ID NO: 294933 - DNA, 120 bp, Artificial Sequence
  ENSG00000131848_55 (sequence is synthesized)
gtcagaagggacagcatgataaacacttccagaccagcaggtccagcaggctcgccccaagccactcctcctccgagaagccctgctggattgcccgcatcgtcctcttgcacactgtcc

SEQ ID NO: 294934 - DNA, 120 bp, Artificial Sequence
  ENSG00000131848_56 (sequence is synthesized)
ccactgccacctcccccctgtgccacacagattcctgttgtagtttaactgcctgttacttttccatctccccacctccactagactgtgagttgacgtgagggtgtgagcttgtcagat

SEQ ID NO: 294935 - DNA, 120 bp, Artificial Sequence
  ENSG00000131848_57 (sequence is synthesized)
cctccccagccacgtgaaactgatgacacaacaggaaggctctcacaagatgccaacccctcaatcttggacttctcagcctccagaaacatgagccaataaatttctattcattataaa

SEQ ID NO: 294936 - DNA, 77 bp, Artificial Sequence
  ENSG00000131848_58 (sequence is synthesized)
tgccatgtgagacgtgcctttgatgttttaggtagaagtagaaagaggaaagtgttagagtttcttccaaagaatat

SEQ ID NO: 294937 - DNA, 120 bp, Artificial Sequence
  ENSG00000131848_59 (sequence is synthesized)
gtagaaagaggaaagtgttagagtttcttccaaagaatatgggaagatgttctgattgcgtcgtttagaacatccagggtctagagttgcagtttttctgggttaaggcactcagaacat

SEQ ID NO: 294938 - DNA, 120 bp, Artificial Sequence
  ENSG00000131848_60 (sequence is synthesized)
tcaacgagcctccttctggcttggagatgaaaggaagatgaataagatgattcttactagatctgggatcccaaagctctggctttcggaaaagtgaaatattatttgttccagagggca

SEQ ID NO: 294939 - DNA, 120 bp, Artificial Sequence
  ENSG00000131848_61 (sequence is synthesized)
cataacatgttcctggcacattggagggctattcctcataagctggagctcagcgcttgcccttaaaatgcacttcacccagctcaccgtctcatgtaggccaaagctggaagaacctta

SEQ ID NO: 294940 - DNA, 120 bp, Artificial Sequence
  ENSG00000131849_0 (sequence is synthesized)
attgcggtcctcattttgctgctggtgggttgggctacagcaggcctctggagccacaccagggcacgggagtgggtgcagggaccgtcaccgcgccttcacacgcaccatagtgcccgg

SEQ ID NO: 294941 - DNA, 120 bp, Artificial Sequence
  ENSG00000131849_1 (sequence is synthesized)
ctaattactctgcttttatgagccaaggtgttcccgaaagtggagccagcgccacgcgtctccagggtctccatacccagccttcgtccctgcggtgcccagaggccttgcgcgcatttt

SEQ ID NO: 294942 - DNA, 120 bp, Artificial Sequence
  ENSG00000131849_2 (sequence is synthesized)
gcatttgggaagacaggtcctgagtgcgaccgtcacccagcggaagtgtgagggttcggcccagcggcagggctagccctgggcctcctgttatggccctgcccagcccacaggttctaa

SEQ ID NO: 294943 - DNA, 120 bp, Artificial Sequence
  ENSG00000131849_3 (sequence is synthesized)
tggggttgccagcgttgctgatgggcccggcgcagcatacttcttggccctgtggctcagctgtccccacattgaagagcatggtaacctttgaagatgtggctgtatacttctcccaag

SEQ ID NO: 294944 - DNA, 120 bp, Artificial Sequence
  ENSG00000131849_4 (sequence is synthesized)
aggagtgggagctccttgatgcagcccagaggcacctgtaccacagtgtgatgctggaaaaccttgagcttgtgacctcacttggttcttggcatggagtagagggtgagggggcccatc

SEQ ID NO: 294945 - DNA, 120 bp, Artificial Sequence
  ENSG00000131849_5 (sequence is synthesized)
ccaagcagaatgtttctgtagaagtgttacaggtcaggatccctaatgcagatccttccaccaagaaagctaactcctgtgacatgtgtgggccattcttgaaagacattttgcacctgg

SEQ ID NO: 294946 - DNA, 120 bp, Artificial Sequence
  ENSG00000131849_6 (sequence is synthesized)
ctgagcatcagggaacacagtctgaggagaaaccctacacatgtggagcatgtgggagagacttttggttgaatgcaaaccttcaccagcaccagaaggagcacagtggagggaagccct

SEQ ID NO: 294947 - DNA, 120 bp, Artificial Sequence
  ENSG00000131849_7 (sequence is synthesized)
ttagatggtacaaggacagggacgcacttatgaagagctctaaagtccacctgtcagagaaccccttcacttgcagggaaggtgggaaggtcatcctgggcagctgtgacctcctccagc

SEQ ID NO: 294948 - DNA, 120 bp, Artificial Sequence
  ENSG00000131849_8 (sequence is synthesized)
ttcaagctgttgacagtgggcagaagccatattccaatcttgggcagcttccagaagtctgtaccacacagaaactcttcgagtgcagcaactgtggaaaagccttcctgaagagctcca

SEQ ID NO: 294949 - DNA, 120 bp, Artificial Sequence
  ENSG00000131849_9 (sequence is synthesized)
ctctccccaaccatctgagaactcactctgaagagataccatttacatgcccaacaggtggaaatttcttagaggagaaatcaatccttggtaataaaaagtttcacactggggaaatac

SEQ ID NO: 294950 - DNA, 120 bp, Artificial Sequence
  ENSG00000131849_10 (sequence is synthesized)
cccatgtgtgtaaggagtgtgggaaggcctttagtcactcatctaagctgaggaagcaccagaaatttcacactgaagtaaaatattatgagtgcattgcatgtgggaaaaccttcaacc

SEQ ID NO: 294951 - DNA, 120 bp, Artificial Sequence
  ENSG00000131849_11 (sequence is synthesized)
acaaactcacatttgttcatcatcagagaattcactcaggagaaagaccttatgagtgtgatgaatgtgggaaagccttcagtaacagatcacacctcattcggcatgagaaagttcaca

SEQ ID NO: 294952 - DNA, 120 bp, Artificial Sequence
  ENSG00000131849_12 (sequence is synthesized)
cacacaggtaagaccttatgagtgcagtcaatgtggtaaatccttcagccgaagctctgctctcattcagcactggagagttcacactggagaaagaccgtatgaatgcagtgaatgtgg

SEQ ID NO: 294953 - DNA, 120 bp, Artificial Sequence
  ENSG00000131849_13 (sequence is synthesized)
aagagcttttaacaataactccaaccttgctcagcaccagaaagttcacaccggagaacggccttttgagtgcagtgaatgtggaagagacttcagccaaagctcccatctccttcgaca

SEQ ID NO: 294954 - DNA, 120 bp, Artificial Sequence
  ENSG00000131849_14 (sequence is synthesized)
tcagaaagttcacactggagaacggccttttgaatgctgtgattgtggtaaagccttcagtaatagctccaccctcatccagcaccagaaagtacatactgggcaaaggccttatgagtg

SEQ ID NO: 294955 - DNA, 120 bp, Artificial Sequence
  ENSG00000131849_15 (sequence is synthesized)
cagcgaatgtaggaaatccttcagccgcagctccagcctgattcagcactggagaattcacactggagaaaagccttacgagtgtagtgagtgtgggaaagcctttgctcacagctccac

SEQ ID NO: 294956 - DNA, 120 bp, Artificial Sequence
  ENSG00000131849_16 (sequence is synthesized)
tctcattgaacactggagagttcacacaaaagaaaggccttatgagtgcaatgaatgtgggaaattctttagccaaaactccattctcattaagcatcagaaagttcatactggagaaaa

SEQ ID NO: 294957 - DNA, 120 bp, Artificial Sequence
  ENSG00000131849_17 (sequence is synthesized)
gccttataaatgcagtgaatgtgggaaattctttagccgaaaatccagccttatttgtcactggagagttcacactggagaaaggccttacgaatgcagtgaatgtgggagagcctttag

SEQ ID NO: 294958 - DNA, 120 bp, Artificial Sequence
  ENSG00000131849_18 (sequence is synthesized)
cagtaactcccacctggttcgtcatcagagagttcacacacaagaaaggccctatgagtgcatccagtgtggaaaagcctttagtgaaagatctacacttgttcggcaccagaaagttca

SEQ ID NO: 294959 - DNA, 120 bp, Artificial Sequence
  ENSG00000131849_19 (sequence is synthesized)
caccagagaaaggacttatgagtgtagccagtgtgggaaactcttcagccatctttgtaaccttgcacagcataaaaagattcatacctgagtggagccttatggaagtggtctttgtga

SEQ ID NO: 294960 - DNA, 120 bp, Artificial Sequence
  ENSG00000131849_20 (sequence is synthesized)
gaaaatcttcagccaagtcaaacttcatgcagcagaatccccataccagaaaaattacctacatgtactgctaatgtggaaaagccttcagaagctactctgtttctgaccagcccagga

SEQ ID NO: 294961 - DNA, 120 bp, Artificial Sequence
  ENSG00000131849_21 (sequence is synthesized)
acctttgcagggccatctcacccatgcagcataaggcagaagccatagtcactttccatcttgcctggatccaaaaatttgcagcagtcctgtcctcatgcatggggaaaacagtaccct

SEQ ID NO: 294962 - DNA, 120 bp, Artificial Sequence
  ENSG00000131849_22 (sequence is synthesized)
gagccttccttcctgtgttctctagggattcaggactgtgctcagctgaaccgatgctggttgaggggccttgagggaaatctaatttgagctcaggaagatgcacattccttgtggatg

SEQ ID NO: 294963 - DNA, 120 bp, Artificial Sequence
  ENSG00000131849_23 (sequence is synthesized)
tggtcaagtctgtgtttaacccctaagatgtgtccattgaggccacaaatcaccctccactggaatcacctaccttgcctgcactaactggtgataataaagaccttattgatcaggtca

SEQ ID NO: 294964 - DNA, 120 bp, Artificial Sequence
  ENSG00000131849_24 (sequence is synthesized)
gagcttgtgacctcacttggtaatgccctgtctcagcatgatgttttcacatgctctgtagaagcagacttgccaaactgttttccaaattggctgcaccattttacatccctgtctgca

SEQ ID NO: 294965 - DNA, 120 bp, Artificial Sequence
  ENSG00000131849_25 (sequence is synthesized)
gtgtataagtgctccagtttttgcttattggccatttgtggagtagagggtgagggggcccatcccaagcagaatgtttctgtagaagtgttacagcaccagaaggagcacagtggaggg

SEQ ID NO: 294966 - DNA, 120 bp, Artificial Sequence
  ENSG00000131849_26 (sequence is synthesized)
gctagtggatgtgaagtggtatctcattatggttttggttttcatactcctcatgtttaaggatgctgaacttcttttcatatgcttattggccatttgtgtatatatcttcttttagag

SEQ ID NO: 294967 - DNA, 120 bp, Artificial Sequence
  ENSG00000131849_27 (sequence is synthesized)
aaatgtctatttaagtcctttgacccatttctgtgtccttacccctggtgaggtctcccttattctgttgcttggctggtccctatcctgccaatagtaatgggcccttcttcaccctga

SEQ ID NO: 294968 - DNA, 120 bp, Artificial Sequence
  ENSG00000131849_28 (sequence is synthesized)
tgatggccctgttggcctgtcagcaatccctgggacctcttcttgggtgtgaattcctgggtaacatttctaatgaagtcaaccattcccaccaagtggaattcttagttaactggcatt

SEQ ID NO: 294969 - DNA, 120 bp, Artificial Sequence
  ENSG00000131864_0 (sequence is synthesized)
gagatttccagagccatgggagccggaagtccaaggaactgtacctccatcatgacgactccggttacgtaaaaacattcaaacagaaaatgctggccaggctcatgcctgtaatcccag

SEQ ID NO: 294970 - DNA, 120 bp, Artificial Sequence
  ENSG00000131864_1 (sequence is synthesized)
gagttggagaccagcctgggcaacatagcgctatggagtctaatccaggcactttggaaggctgaggctggaggatcgattgaggccaggagtttgggaccaccctgggcaacatagcaa

SEQ ID NO: 294971 - DNA, 120 bp, Artificial Sequence
  ENSG00000131864_2 (sequence is synthesized)
tgaggccaggagtttgggaccaccctgggcaacatagcaagatctcatttctgaaaaaagaattatcatccactcacccagaacagctctccaaacttaacagccgtggcagtcagagct

SEQ ID NO: 294972 - DNA, 120 bp, Artificial Sequence
  ENSG00000131864_3 (sequence is synthesized)
ctgcctgcagtgtgaccatggacagctctccaaagcttaaacttcagtaaattgactcaagtttcttcggaaagaactgttacataaagaaaggatgatatctctaaaggtatgtggatt

SEQ ID NO: 294973 - DNA, 120 bp, Artificial Sequence
  ENSG00000131864_4 (sequence is synthesized)
catccaaatttggagccagaagactgggatgactaagctgaaagaagctctcattgaaacagtgcaaagacaaaaggaaattaaactggtggtcactttcaaatctggaaaatttataag

SEQ ID NO: 294974 - DNA, 120 bp, Artificial Sequence
  ENSG00000131864_5 (sequence is synthesized)
aatttttcagctgagcaacaacattagaagtgtggtccttagacattgtaaaaaaagacaaagtcacctgcgtttaactttgaaaaacaacgtgttcttgtttattgacaaattatccta

SEQ ID NO: 294975 - DNA, 120 bp, Artificial Sequence
  ENSG00000131864_6 (sequence is synthesized)
cagagatgctaaacagttgaatatgttcctggacataatccaccaaaacaaatctcagcaacccatgaaatctgatgatgattggagtgtgtttgaaagcaggaatatgctgaaggaaat

SEQ ID NO: 294976 - DNA, 120 bp, Artificial Sequence
  ENSG00000131864_7 (sequence is synthesized)
tgacaaaacttcattttacagcatttgtaacaagccaagttatcagaagatgcctttgtttatgtcaaaatcaccaacacatgtgaaaaaggggatattagaaaatcaaggtgggaaggg

SEQ ID NO: 294977 - DNA, 120 bp, Artificial Sequence
  ENSG00000131864_8 (sequence is synthesized)
gcaaaacacactatcatctgatgtacagacaaatgaggacattctgaaggaagataaccctgtaccaaacaagaaatataagacagattccttgaaatatatacaaagcaataggaagaa

SEQ ID NO: 294978 - DNA, 120 bp, Artificial Sequence
  ENSG00000131864_9 (sequence is synthesized)
cccatcaagtttagaggatttagaaaaagatagagatttgaaactcgggccttcattcaataccaactgtaatggaaatcctaacctagatgagactgttcttgcaacccagactctcaa

SEQ ID NO: 294979 - DNA, 120 bp, Artificial Sequence
  ENSG00000131864_10 (sequence is synthesized)
tgccaaaaatggtttgacatctccattggaaccagagcacagccagggtgacccaagatgcaacaaagcccaggtgcctcttgactctcattcacagcaactgcagcaggggttccccaa

SEQ ID NO: 294980 - DNA, 120 bp, Artificial Sequence
  ENSG00000131864_11 (sequence is synthesized)
tttgggaaacacctgttacatgaatgcagttttacaatcgctatttgcaattccatcttttgctgatgacttactcactcaaggtgtcccatgggaatatattccctttgaggctcttat

SEQ ID NO: 294981 - DNA, 120 bp, Artificial Sequence
  ENSG00000131864_12 (sequence is synthesized)
tatgaccttgacccagctgcttgctttgaaagatttctgtagtacaaagatcaagagagaattacttgggaatgttaaaaaagtcatttcagcagttgcagaaatattttctggcaacat

SEQ ID NO: 294982 - DNA, 120 bp, Artificial Sequence
  ENSG00000131864_13 (sequence is synthesized)
gcagaatgatgctcatgagtttttaggtcagtgtttagaccagctgaaagaagacatggaaaaattaaatgccactttgaatactgggaaagaatgtggggatgaaaattcatctccaca

SEQ ID NO: 294983 - DNA, 120 bp, Artificial Sequence
  ENSG00000131864_14 (sequence is synthesized)
aatgcatgttggtagtgctgccaccaaagtgtttgtttgccctgttgttgctaattttgagtttgaattgcagctctcccttatttgtaaagcttgtggtcatgctgttctcaaggtaga

SEQ ID NO: 294984 - DNA, 120 bp, Artificial Sequence
  ENSG00000131864_15 (sequence is synthesized)
taactgtcagatgtgtaagcagaagagttgtgttgcaaggcatacatttagtaggctctccagggtccttatcattcatctgaaacgctatagcttcaacaatgcttggttgctggtgaa

SEQ ID NO: 294985 - DNA, 120 bp, Artificial Sequence
  ENSG00000131864_16 (sequence is synthesized)
gaataacgagcaagtttatattcccaaatctttaagtttatcttcttattgcaatgaaagcaccaaaccacctcttcccttgagcagtagtgcacctgttgggaaatgtgaagtcctgga

SEQ ID NO: 294986 - DNA, 120 bp, Artificial Sequence
  ENSG00000131864_17 (sequence is synthesized)
agtctctcaggagatgatttctgagatcaacagcccattgacaccatcaatgaagctgacctcagaatccagtgattccctggttctacccgttgaaccagacaagaatgccgacctaca

SEQ ID NO: 294987 - DNA, 120 bp, Artificial Sequence
  ENSG00000131864_18 (sequence is synthesized)
aagattccagagagactgtggagatgcaagccaagagcagcatcagagagacctggaaaatggctctgcactagagtcagaattggtccactttagagatagggcaatcggtgaaaagga

SEQ ID NO: 294988 - DNA, 120 bp, Artificial Sequence
  ENSG00000131864_19 (sequence is synthesized)
gcttccagtggctgactcactgatggaccagggagacatttctcttcctgtgatgtatgaagatggagggaagctgatcagcagcccagacacaaggcttgtcgaggttcatcttcaaga

SEQ ID NO: 294989 - DNA, 120 bp, Artificial Sequence
  ENSG00000131864_20 (sequence is synthesized)
ggtgcctcaacatccagaacttcagaagtatgagaaaaccaatacattcgtagagttcaattttgacagtgtcactgagtccaccaatggcttttatgactgtaaagaaaacaggattcc

SEQ ID NO: 294990 - DNA, 120 bp, Artificial Sequence
  ENSG00000131864_21 (sequence is synthesized)
agaaggatctcaaggaatggctgaacagctccagcagtgtattgaggagagcatcatagatgaatttcttcagcaggcaccacctccaggtgttaggaagctggatgcccaggaacatac

SEQ ID NO: 294991 - DNA, 120 bp, Artificial Sequence
  ENSG00000131864_22 (sequence is synthesized)
agaagagaccctcaatcagtctacagaattaagacttcaaaaggctgacctgaatcaccttggggcactgggttctgacaacccaggaaacaaaaacattttagatgcagagaacacaag

SEQ ID NO: 294992 - DNA, 120 bp, Artificial Sequence
  ENSG00000131864_23 (sequence is synthesized)
aggtgaagccaaggaactaacaagaaacgtgaagatgggggatcctctccaggcctacagactcatcagtgttgtcagccatatcgggagctccccaaattcaggccattacatcagcga

SEQ ID NO: 294993 - DNA, 120 bp, Artificial Sequence
  ENSG00000131864_24 (sequence is synthesized)
tgtgtatgactttcagaagcaggcctggttcacatacaacgatctatgtgtatcagaaatctcagagaccaaaatgcaggaggcgaggcttcactctgggtatatcttcttttacatgca

SEQ ID NO: 294994 - DNA, 120 bp, Artificial Sequence
  ENSG00000131864_25 (sequence is synthesized)
caatgggatttttgaggagctgttaagaaaagcagagaactctcggctacctagcacacaggcaggggtgatccctcagggggaatacgaaggtgactctttgtacagacctgcttgaca

SEQ ID NO: 294995 - DNA, 120 bp, Artificial Sequence
  ENSG00000131864_26 (sequence is synthesized)
gactcactcggcctcacttcatccttgcaaagagaatcctgtacttcatccttgcaaagagaatcctgtacttcactcagaatgaaggaacaagtatctcaggatgaaatctcaatgaaa

SEQ ID NO: 294996 - DNA, 120 bp, Artificial Sequence
  ENSG00000131864_27 (sequence is synthesized)
aacacttattttgggggaatatctattttaactgcttcagacacctagatcccagaactcaggcgcatatgcatattttccctgcaagattagaatggtgctcttcacgttttgacggtg

SEQ ID NO: 294997 - DNA, 120 bp, Artificial Sequence
  ENSG00000131864_28 (sequence is synthesized)
gttttcaaaatgttgttcttcaaccagcaacagcaacagctagggactgattagaaatgcaaattcttgggtcactctctagaccaactgatgcagaaacaggaggtgtgagccagcaat

SEQ ID NO: 294998 - DNA, 120 bp, Artificial Sequence
  ENSG00000131864_29 (sequence is synthesized)
cagatggagattctagtgctcatgaaagtttgaagaacactggtaatgtgtggagtatcttggtgtattttgctactgttgatatggattgcttatgttatataaacgattttcattaaa

SEQ ID NO: 294999 - DNA, 81 bp, Artificial Sequence
  ENSG00000131864_30 (sequence is synthesized)
agcctgggcaacatagtgagaccctccccccacccatctctacaaaaaattttaaaattagctagcgctatggagtctaat

SEQ ID NO: 295000 - DNA, 120 bp, Artificial Sequence
  ENSG00000131864_31 (sequence is synthesized)
gctggcccaggcaccacgcgactctaagcgcgcccaaagcgaccctctgcgcaaactacccccggggacgacgtcacccgtgaggcgctatggagtctaatccaggcactttggaaggct

SEQ ID NO: 295001 - DNA, 120 bp, Artificial Sequence
  ENSG00000131871_0 (sequence is synthesized)
cggcagggctgggcggcggcggcggcggcggtcatggaacgccaagaggagtctctgtccgcgcggccggccctggagaccgaggggctgcgcttcctgcacaccacggtgggctccctg

SEQ ID NO: 295002 - DNA, 120 bp, Artificial Sequence
  ENSG00000131871_1 (sequence is synthesized)
ctggccacctatggctggtacatcgtcttcagctgcatccttctctacgtggtctttcagaagctttccgcccggctaagagccttgaggcagaggcagctggaccgagctgcggctgct

SEQ ID NO: 295003 - DNA, 120 bp, Artificial Sequence
  ENSG00000131871_2 (sequence is synthesized)
gtggaacctgatgttgttgttaaacgacaagaagctttagcagctgctcgactgaaaatgcaagaagaactaaatgcgcaagttgaaaagcataaggaaaaactgaaacaacttgaagaa

SEQ ID NO: 295004 - DNA, 120 bp, Artificial Sequence
  ENSG00000131871_3 (sequence is synthesized)
gaaaaaaggagacagaagattgaaatgtgggacagcatgcaagaaggaaaaagttacaaaggaaatgcaaagaagccccaggaggaagacagtcctgggccttccacttcatctgtcctg

SEQ ID NO: 295005 - DNA, 120 bp, Artificial Sequence
  ENSG00000131871_4 (sequence is synthesized)
aaacggaaatcggacagaaagcctttgcggggaggaggttataacccgttgtctggtgaaggaggcggagcttgctcctggagacctggacgcagaggcccgtcatctggcggatgaggc

SEQ ID NO: 295006 - DNA, 120 bp, Artificial Sequence
  ENSG00000131871_5 (sequence is synthesized)
gagccttgagcagtgtaattacaaacaaataggttggcatagtcttaagtctttgagtctagagagatttgagttttgttttgcctgtggaggcaattgggggtttcaggtcaaagagag

SEQ ID NO: 295007 - DNA, 120 bp, Artificial Sequence
  ENSG00000131871_6 (sequence is synthesized)
ggtcagtggaaacaagggtgggccttgtgaggtgtggggaagccctgggaccctcactccccttccagtgtgtaactggattggctcccaccagcccagaagatttacgacgtgggaaat

SEQ ID NO: 295008 - DNA, 120 bp, Artificial Sequence
  ENSG00000131871_7 (sequence is synthesized)
ggtatacttggattaaaatatttcatccagatttgtttacatctagagagaaccccttgtaggttataaggaaactttttaacattcttccttgaatatattttctgtagctgaaaatgt

SEQ ID NO: 295009 - DNA, 120 bp, Artificial Sequence
  ENSG00000131871_8 (sequence is synthesized)
ttgtgaagtggctgtcaactacacatcgcatgagtagaggggctctgggtcggggtttcatatgcagcagagcagctcccttgctgccgtccatcaagagccctcaacacaagagtttgt

SEQ ID NO: 295010 - DNA, 120 bp, Artificial Sequence
  ENSG00000131871_9 (sequence is synthesized)
tataaatagaaataaacgacaaaaagtagaggggtatgtttaagtacactattagatgtgactgactaccttgaaacctgatttttttccatggggagaaacagtgcttgaattctgcat

SEQ ID NO: 295011 - DNA, 120 bp, Artificial Sequence
  ENSG00000131871_10 (sequence is synthesized)
gccccccttgcatctagcaccttttggtaggggtggaaggagggtgtcagggagaatgattaggagataatggaggggaggggaaacttgcgttgtgtaatagcatttgaagagcactta

SEQ ID NO: 295012 - DNA, 120 bp, Artificial Sequence
  ENSG00000131871_11 (sequence is synthesized)
tggggttgatttctgttcctaactacacctgcatatgtcagggctccagtcagcaaaaggtatagatgttgcctctaggcatgaggtcattggtcacattctacttggagacagtgattg

SEQ ID NO: 295013 - DNA, 120 bp, Artificial Sequence
  ENSG00000131871_12 (sequence is synthesized)
cattcattgatttcatggttaattgctagttggtaggtaaaggcctctagatgattagcaatcttgataaaagaggcctagtaatgttcttttgaggttagaaatccttgctgctaggac

SEQ ID NO: 295014 - DNA, 120 bp, Artificial Sequence
  ENSG00000131871_13 (sequence is synthesized)
agtctctgtgacaggttgcgttgaatgatgtcttccttatcaatggtgagcccaccagtgaggattactgatgtggacagttgatggggtttgtttctgtatatttatttttatgtacag

SEQ ID NO: 295015 - DNA, 120 bp, Artificial Sequence
  ENSG00000131871_14 (sequence is synthesized)
aactttgtaaaaacgaaactatttaaaaaacaagaataacatttttagcatctttattcaaggagatttatggacttcaatttgtctatcaaacattaaatagctttttattacaacctc

SEQ ID NO: 295016 - DNA, 120 bp, Artificial Sequence
  ENSG00000131871_15 (sequence is synthesized)
cacaccacgggtgagtcgttgcggggcagccgggcgcgcgccgccacttttgcgacgcgcagccatgatgggtgggtcgtccgccgctgcaccgggcgccggagcctgggaggcctggga

SEQ ID NO: 295017 - DNA, 120 bp, Artificial Sequence
  ENSG00000131871_16 (sequence is synthesized)
acggtcgggcgttggcgcttacgcggaccttgggcagcaggcccggaccttgcgcggaggcttctcgggagccgcacttccctgggcggctcggctgtcccttgtttgcgcaagtctttt

SEQ ID NO: 295018 - DNA, 120 bp, Artificial Sequence
  ENSG00000131871_17 (sequence is synthesized)
ttgcgaaccaagcccttcctgtggtagttactggggtcactcggccgttggcgtttgcctctgggacccgtcccacacagccccatacacactcctgactccccgcgctgtcaccccttt

SEQ ID NO: 295019 - DNA, 120 bp, Artificial Sequence
  ENSG00000131871_18 (sequence is synthesized)
ctatgtggctctgaaaggcctttgccttcctgattcagattagttgctcttcattcttcaaaacccagttgctgtgccctccacactctaactgcccccgactccccagatggttgggaa

SEQ ID NO: 295020 - DNA, 120 bp, Artificial Sequence
  ENSG00000131871_19 (sequence is synthesized)
gtctcacttctcagtgatccctgaattgtcgcacttcttgagttcgtgttttaacgatctacttaggaggctttttcctcagcctagaccatgaaggctttgagggcaggagttacactt

SEQ ID NO: 295021 - DNA, 120 bp, Artificial Sequence
  ENSG00000131871_20 (sequence is synthesized)
tgaggtttagtggctaacgatgcctgtgtctgtgttgtctataagcttctaggaccaggtcctatcccattagattcaataagcatttcagttcctaccatgtaagtattggtgatatca

SEQ ID NO: 295022 - DNA, 120 bp, Artificial Sequence
  ENSG00000131871_21 (sequence is synthesized)
ttaccatgaaaggtccagagcacaaaaggagggacaggctggagcagggagcatgtgagtgtgtgtgtgcatgtgcctgtgtcttccccattaccaaaaatgtcctgacaggagtgagtt

SEQ ID NO: 295023 - DNA, 120 bp, Artificial Sequence
  ENSG00000131871_22 (sequence is synthesized)
tcagaagaatggagtcagtaatctttttcatgaaacattttgctttctttaatagtgtacaaaaaccaaagctgctctatgtgagttaaactcacactaccagatcacaacagttttatt

SEQ ID NO: 295024 - DNA, 120 bp, Artificial Sequence
  ENSG00000131871_23 (sequence is synthesized)
aactaaagaaaacgagggtgaagtttgttctgaaagacatttaaattaagaattatcagagttagctttgtctttgagagaaatggcagcttctgaattctttctgtaaaatgtgattgt

SEQ ID NO: 295025 - DNA, 120 bp, Artificial Sequence
  ENSG00000131871_24 (sequence is synthesized)
tgcttcttacactactgtgtgtgttcaaacaggaggaagacagtcctgggccttccacttcatctgtcctgaaacggaaatcggacagaaagcctttgcggggaggaggtaagcaccact

SEQ ID NO: 295026 - DNA, 120 bp, Artificial Sequence
  ENSG00000131871_25 (sequence is synthesized)
gatgtcaaatgttaacagattttcaacacttacaggatatagttaccttttaggaacaagattgtttgtttctttgtccataaattaagactaattccttaggattgtgaagattcaata

SEQ ID NO: 295027 - DNA, 120 bp, Artificial Sequence
  ENSG00000131871_26 (sequence is synthesized)
aaggaaacagatgcaaatcacctcctaggtcctcactaagtacttagaaggattgtacttatagtattctaacttgatccttctgcagccccgtagagggagagctaagtagggtgagga

SEQ ID NO: 295028 - DNA, 120 bp, Artificial Sequence
  ENSG00000131873_0 (sequence is synthesized)
attcacttttgcgccaatcgcgcggcgcggacggatcccgagaggggccacggctcgccgccggcggggccacttcataacgcgccgtgcgtgacgtgaggggctcctgttgcaatggcg

SEQ ID NO: 295029 - DNA, 120 bp, Artificial Sequence
  ENSG00000131873_1 (sequence is synthesized)
agctaagccggaggatgtgcagctgcggcggcggcgccggctacgaagaggacggggacaggcgccgtgcgaaccgagcccagccagccggaggacgcgggcagggcgggacgggagccc

SEQ ID NO: 295030 - DNA, 80 bp, Artificial Sequence
  ENSG00000131873_2 (sequence is synthesized)
ccgcgcgcgagcgggaggagccgccgccacctcgcgcccgagccgccgctagcgcgcgccgggcatggtcccctcttaaa

SEQ ID NO: 295031 - DNA, 80 bp, Artificial Sequence
  ENSG00000131873_3 (sequence is synthesized)
atggtcccctcttaaaggcgcaggccgcggcggcgggggcgggcgtgcggaacaaagcgccggcgcggggcctgcgggcg

SEQ ID NO: 295032 - DNA, 120 bp, Artificial Sequence
  ENSG00000131873_4 (sequence is synthesized)
atggccgcgcgcggccggcgcgcctggctcagcgtgctgctcgggctcgtcctgggcttcgtgctggcctcgcggctcgtcctgccccgggcttccgagctgaagcgagcgggcccacgg

SEQ ID NO: 295033 - DNA, 120 bp, Artificial Sequence
  ENSG00000131873_5 (sequence is synthesized)
gcggcggcttcccaggccggcggggcgcgcggcgatgcgcgcggggcgcagctctggccgcccggctcggacccagatggcggcccgcgcgacaggaactttctcttcgtgggagtcatg

SEQ ID NO: 295034 - DNA, 120 bp, Artificial Sequence
  ENSG00000131873_6 (sequence is synthesized)
caggaactttctcttcgtgggagtcatgaccgcccagaaatacctgcagactcgggccgtggccgcctacagaacatggtccaagacaattcctgggaaagttcagttcttctcaagtga

SEQ ID NO: 295035 - DNA, 120 bp, Artificial Sequence
  ENSG00000131873_7 (sequence is synthesized)
gggttctgacacatctgtaccaattccagtagtgccactacggggtgtggacgactcctacccgccccagaagaagtccttcatgatgctcaagtacatgcacgaccactacttggacaa

SEQ ID NO: 295036 - DNA, 120 bp, Artificial Sequence
  ENSG00000131873_8 (sequence is synthesized)
gtatgaatggtttatgagagcagatgatgacgtgtacatcaaaggagaccgtctggagaacttcctgaggagtttgaacagcagcgagcccctctttcttgggcagacaggcctgggcac

SEQ ID NO: 295037 - DNA, 120 bp, Artificial Sequence
  ENSG00000131873_9 (sequence is synthesized)
cacggaagaaatgggaaaactggccctggagcctggtgagaacttctgcatgggggggcctggcgtgatcatgagccgggaggtgcttcggagaatggtgccgcacattggcaagtgtct

SEQ ID NO: 295038 - DNA, 120 bp, Artificial Sequence
  ENSG00000131873_10 (sequence is synthesized)
ccgggagatgtacaccacccatgaggacgtggaggtgggaaggtgtgtccggaggtttgcaggggtgcagtgtgtctggtcttatgagatgcagcagcttttttatgagaattacgagca

SEQ ID NO: 295039 - DNA, 120 bp, Artificial Sequence
  ENSG00000131873_11 (sequence is synthesized)
gaacaaaaaggggtacattagagatctccataacagtaaaattcaccaagctatcacattacaccccaacaaaaacccaccctaccagtacaggctccacagctacatgctgagccgcaa

SEQ ID NO: 295040 - DNA, 120 bp, Artificial Sequence
  ENSG00000131873_12 (sequence is synthesized)
gatatccgagctccgccatcgcacaatacagctgcaccgcgaaattgtcctgatgagcaaatacagcaacacagaaattcataaagaggacctccagctgggaatccctccctccttcat

SEQ ID NO: 295041 - DNA, 120 bp, Artificial Sequence
  ENSG00000131873_13 (sequence is synthesized)
gaggtttcagccccgccagcgagaggagattctggaatgggagtttctgactggaaaatacttgtattcggcagttgacggccagccccctcgaagaggaatggactccgcccagaggga

SEQ ID NO: 295042 - DNA, 120 bp, Artificial Sequence
  ENSG00000131873_14 (sequence is synthesized)
agccttggacgacattgtcatgcaggtcatggagatgatcaatgccaacgccaagaccagagggcgcatcattgacttcaaagagatccagtacggctaccgccgggtgaaccccatgta

SEQ ID NO: 295043 - DNA, 120 bp, Artificial Sequence
  ENSG00000131873_15 (sequence is synthesized)
tggggctgagtacatcctggacctgctgcttctgtacaaaaagcacaaagggaagaaaatgacggtccctgtgaggaggcacgcgtatttacagcagactttcagcaaaatccagtttgt

SEQ ID NO: 295044 - DNA, 120 bp, Artificial Sequence
  ENSG00000131873_16 (sequence is synthesized)
ggagcatgaggagctggatgcacaagagttggccaagagaatcaatcaggaatctggatccttgtcctttctctcaaactccctgaagaagctcgtcccctttcagctccctgggtcgaa

SEQ ID NO: 295045 - DNA, 120 bp, Artificial Sequence
  ENSG00000131873_17 (sequence is synthesized)
gagtgagcacaaagaacccaaagataaaaagataaacatactgattcctttgtctgggcgtttcgacatgtttgtgagatttatgggaaactttgagaagacgtgtcttatccccaatca

SEQ ID NO: 295046 - DNA, 120 bp, Artificial Sequence
  ENSG00000131873_18 (sequence is synthesized)
cgacatgcagattttgcctgtgtctggagagttttcaagagccctggccctggaagtaggatcctcccagtttaacaatgaatctttgctcttcttctgcgacgtcgacctcgtgtttac

SEQ ID NO: 295047 - DNA, 120 bp, Artificial Sequence
  ENSG00000131873_19 (sequence is synthesized)
tacagaattccttcagcgatgtcgagcaaatacagttctgggccaacaaatatattttccaatcatcttcagccagtatgacccaaagattgtttatagtgggaaagttcccagtgacaa

SEQ ID NO: 295048 - DNA, 120 bp, Artificial Sequence
  ENSG00000131873_20 (sequence is synthesized)
ccattttgcctttactcagaaaactggcttctggagaaactatgggtttggcatcacgtgtatttataagggagatcttgtccgagtgggtggctttgatgtttccatccaaggctgggg

SEQ ID NO: 295049 - DNA, 120 bp, Artificial Sequence
  ENSG00000131873_21 (sequence is synthesized)
gctggaggatgtggaccttttcaacaaggttgtccaggcaggtttgaagacgtttaggagccaggaagtaggagtagtccacgtccaccatcctgtcttttgtgatcccaatcttgaccc

SEQ ID NO: 295050 - DNA, 120 bp, Artificial Sequence
  ENSG00000131873_22 (sequence is synthesized)
caaacagtacaaaatgtgcttggggtccaaagcatcgacctatgggtccacccagcagctggctgagatgtggctggaaaaaaatgatccaagttacagtaaaagcagcaataataatgg

SEQ ID NO: 295051 - DNA, 120 bp, Artificial Sequence
  ENSG00000131873_23 (sequence is synthesized)
ctcagtgaggacagcctaatgtccagctttgctggaaaagacgtttttaattatctaatttatttttcaaaaattttttgtatgatcagtttttgaagtccgtatacaaggatatatttt

SEQ ID NO: 295052 - DNA, 120 bp, Artificial Sequence
  ENSG00000131873_24 (sequence is synthesized)
acaagtggttttcttacataggactcctttaagattgagctttctgaacaagaaggtgatcagtgtttgcctttgaacacatcttcttgctgaacattatgtagcagacctgcttaactt

SEQ ID NO: 295053 - DNA, 120 bp, Artificial Sequence
  ENSG00000131873_25 (sequence is synthesized)
tgacttgaaatgtacctgatgaacaaaacttttttaaaaaaatgttttcttttgagaccctttgctccagtcctatggcagaaaacgtgaacattcctgcaaagtattattgtaacaaaa

SEQ ID NO: 295054 - DNA, 120 bp, Artificial Sequence
  ENSG00000131873_26 (sequence is synthesized)
cactgtaactctggtaaatgttctgttgtgattgttaacattccacagattctaccttttgtgttttgttttttttttttacaattgttttaaagccatttcatgttccagttgtaagat

SEQ ID NO: 295055 - DNA, 120 bp, Artificial Sequence
  ENSG00000131873_27 (sequence is synthesized)
aaggaaatgtgataatagctgtttcatcattgtcttcaggagagctttccagagttgatcatttcctctcatggtactctgctcagcatggccacgtaggttttttgtttgttttgtttt

SEQ ID NO: 295056 - DNA, 71 bp, Artificial Sequence
  ENSG00000131873_28 (sequence is synthesized)
tggaatgcagtggcgcaatcttggctcactttaacctccacttccctggttcaagcaattcccctgccttg

SEQ ID NO: 295057 - DNA, 81 bp, Artificial Sequence
  ENSG00000131873_29 (sequence is synthesized)
aagcccagctggccacgtaggttttaaagcaaggggcgtgaagaaggcacagtgaggtatgtggctgttctcgtggtagtt

SEQ ID NO: 295058 - DNA, 120 bp, Artificial Sequence
  ENSG00000131873_30 (sequence is synthesized)
agaaggcacagtgaggtatgtggctgttctcgtggtagttcattcggcctaaatagacctggcattaaatttcaagaaggatttggcattttctcttcttgacccttctctttaaagggt

SEQ ID NO: 295059 - DNA, 120 bp, Artificial Sequence
  ENSG00000131873_31 (sequence is synthesized)
aaaatattaatgtttagaatgacaaagatgaattattacaataaatctgatgtacacagactgaaacatacacacatacaccctaatcaaaacgttggggaaaaatgtatttggttttgt

SEQ ID NO: 295060 - DNA, 120 bp, Artificial Sequence
  ENSG00000131873_32 (sequence is synthesized)
tcctttcatcctgtctgtgttatgtgggtggagatggttttcattctttcattactgttttgttttatcctttgtatctgaaatacctttaatttatttaatatctgttgttcagagctc

SEQ ID NO: 295061 - DNA, 120 bp, Artificial Sequence
  ENSG00000131873_33 (sequence is synthesized)
tgccatttcttgagtacctgttagttagtattatttatgtgtatcgggagtgtgtttagtctgttttatttgcagtaaaccgatctccaaagatttccttttggaaacgctttttcccct

SEQ ID NO: 295062 - DNA, 120 bp, Artificial Sequence
  ENSG00000131873_34 (sequence is synthesized)
ccttaatttttatattccttactgttttactaaatattaagtgttctttgacaattttggtgctcatgtgttttggggacaaaagtgaaatgaatctgtcattataccagaaagttaaat

SEQ ID NO: 295063 - DNA, 120 bp, Artificial Sequence
  ENSG00000131873_35 (sequence is synthesized)
tctcagatcaaatgtgccttaataaatttgttttcatttagatttcaaacagtgatagacttgccattttaatacacgtcattggagggctgcgtatttgtaaatagcctgatgctcatt

SEQ ID NO: 295064 - DNA, 120 bp, Artificial Sequence
  ENSG00000131873_36 (sequence is synthesized)
tggaaaaataaaccagtgaacaatatttttctattgtacttttcgaaccattttgtctcattattcctgttttagctgaagaattgtattacatttggagagtaaaaaacttaaacacga

SEQ ID NO: 295065 - DNA, 120 bp, Artificial Sequence
  ENSG00000131873_37 (sequence is synthesized)
actctcttggaggatgaacttggactgctgctccatcacactgtacttcctaacatggtccaagacaattcctgggaaagttcagttcttctcaagtgagggttctgacacatctgtacc

SEQ ID NO: 295066 - DNA, 120 bp, Artificial Sequence
  ENSG00000131873_38 (sequence is synthesized)
gaggacgtggaggtgggaaggtgtgtccggaggtttgcaggggtgcagtgtgtctggtcttatgaggacaaaagggtgagaaaaccacttctctgtaatgaactgaaacgctgcctaagt

SEQ ID NO: 295067 - DNA, 120 bp, Artificial Sequence
  ENSG00000131873_39 (sequence is synthesized)
ccgaatgggaagttgtcgctctgtagcagtgatggtctgtagctgaggctgaaccgtgtacgtgctgaaggacagtcatgtaaacagttaacaggaagaacgaggacttaatgagaatgt

SEQ ID NO: 295068 - DNA, 80 bp, Artificial Sequence
  ENSG00000131873_40 (sequence is synthesized)
aagaaggacatttgctaatgaagactgtggaagggtcttgcactgtcacctaggctggagtgcagtagtgatcctccccc

SEQ ID NO: 295069 - DNA, 120 bp, Artificial Sequence
  ENSG00000131873_41 (sequence is synthesized)
ggttgccagcacttcagttagacttgacacagaacagctggatttctagcttccctttaaacccggctgcactgggcctgtgtggcacgtcctggtccccccgagctccatcccttctgg

SEQ ID NO: 295070 - DNA, 120 bp, Artificial Sequence
  ENSG00000131873_42 (sequence is synthesized)
ccctctcagattcactggagaatgacgcagagccctgaaacatctcacaggaagggagatggctttgctggagttgaaggatatggaggcactttttataacaaagattaagggttgttt

SEQ ID NO: 295071 - DNA, 120 bp, Artificial Sequence
  ENSG00000131873_43 (sequence is synthesized)
catggacagtggaaattaaatgaagtcatcagtgccactataagcatcttaagaaggtttctttgctgagttttttttaagcaaggaatactcttgtgagtattaagttaacctgtctag

SEQ ID NO: 295072 - DNA, 120 bp, Artificial Sequence
  ENSG00000131873_44 (sequence is synthesized)
attgagttgtgttttcttctgcagtacttctaactttctgttttataatattcttctaggtgatgtgccaaattatagattattgaaataccttataataaaatcctcttaaactttgaa

SEQ ID NO: 295073 - DNA, 120 bp, Artificial Sequence
  ENSG00000131876_0 (sequence is synthesized)
gcacgctgggacgtctcgctggcgggaggccacgggctttccacagcgcgggggaacgggaggctgcaggatggtcaagctgacggcggagctgatcgagcaggcggcgcagtacaccaa

SEQ ID NO: 295074 - DNA, 120 bp, Artificial Sequence
  ENSG00000131876_1 (sequence is synthesized)
cgcggtgcgcgaccgggagctggacctccgggggtataaaattcccgtcattgaaaatctaggtgctacgttagaccagtttgatgctattgatttttctgacaatgagatcaggaaact

SEQ ID NO: 295075 - DNA, 120 bp, Artificial Sequence
  ENSG00000131876_2 (sequence is synthesized)
ggatggttttcctttgttgagaagactgaaaacattgttagtgaacaacaacagaatatgccgtataggtgagggacttgatcaggctctgccctgtctgacagaactcattctcaccaa

SEQ ID NO: 295076 - DNA, 120 bp, Artificial Sequence
  ENSG00000131876_3 (sequence is synthesized)
taatagtctcgtggaactgggtgatctggaccctctggcatctctcaaatcgctgacttacctaagtatcctaagaaatccggtaaccaataagaagcattacagattgtatgtgattta

SEQ ID NO: 295077 - DNA, 120 bp, Artificial Sequence
  ENSG00000131876_4 (sequence is synthesized)
cacagcttgcaaaggatattgccaggagaagcaaaacttttaatccaggtgctggtttgccaactgacaaaaagaaaggtgggccatctccaggggatgtagaagcaatcaagaatgcca

SEQ ID NO: 295078 - DNA, 120 bp, Artificial Sequence
  ENSG00000131876_5 (sequence is synthesized)
tagcaaatgcttcaactctggctgaagtggagaggctgaaggggttgctgcagtctggtcagatccctggcagagaacgcagatcagggcccactgatgatggtgaagaagagatggaag

SEQ ID NO: 295079 - DNA, 120 bp, Artificial Sequence
  ENSG00000131876_6 (sequence is synthesized)
aagacacagtcacaaacgggtcctgagcagtgaggcagatgtataataataggccctcttggaacaagtcttgcttttcgaacatggtataatagccttgtttgtgttagcaaagtggaa

SEQ ID NO: 295080 - DNA, 120 bp, Artificial Sequence
  ENSG00000131876_7 (sequence is synthesized)
tctatcagcattgttgaaatgcttaagactgctgctgataattttgtaatataagttttgaaatctaaatgtcaattttctacaaattataaaaataaactccactcactatgctaccaa

SEQ ID NO: 295081 - DNA, 120 bp, Artificial Sequence
  ENSG00000131876_8 (sequence is synthesized)
ttgtgtgtttttctttatatttttgttactgattattaaaattgtctaaatgagtaaattttaccattagtttgtaataaaagtgggagggaaaatgttacatcacatttttttctaata

SEQ ID NO: 295082 - DNA, 120 bp, Artificial Sequence
  ENSG00000131876_9 (sequence is synthesized)
gcagagtttatgatagaacttttaagttggagctctcttatgtaatgctggctattccgaagttcgcaaagtgctgaggccacggtgagcagtcttaacagtggattgtctgcctagata

SEQ ID NO: 295083 - DNA, 120 bp, Artificial Sequence
  ENSG00000131876_10 (sequence is synthesized)
cgttcccagcggagaacttaatgtaacctactttcgtgcagctccgtgtgttaggatgatttttccctttattaggaattcattattttattattcatttaattgccttcttagttccct

SEQ ID NO: 295084 - DNA, 120 bp, Artificial Sequence
  ENSG00000131876_11 (sequence is synthesized)
tgtgtcttctcttaatttgaaattgctttttggtattttcaccagcccggagtactgtaggagagttcgcttccatgtcttctgaggaatgcatctaaatgcatgtggtattcctatttc

SEQ ID NO: 295085 - DNA, 120 bp, Artificial Sequence
  ENSG00000131876_12 (sequence is synthesized)
cattaactctgtgtgtggtgtcgctgtaggagcgtcaggaagcagagaaaatgttcaagggcaaacggggtgcacagcttgcaaaggatattgccaggagaagcaaaacgtaagacacgg

SEQ ID NO: 295086 - DNA, 120 bp, Artificial Sequence
  ENSG00000131876_13 (sequence is synthesized)
atatccaacttaactctacttcaccttcagaaacatgatctgatctgtctggcagttcgtctcctacaaaattaaccaaaaactctgacatattaatgtggtattaaatttgagtgctta

SEQ ID NO: 295087 - DNA, 120 bp, Artificial Sequence
  ENSG00000131876_14 (sequence is synthesized)
tagtccatgtacatcaatggtccacacatcacaagaaatttctaccagcttagcagagcaaatatttcagtagtcagtcttcatgtgataccatgtacatcctattttctatataggaag

SEQ ID NO: 295088 - DNA, 120 bp, Artificial Sequence
  ENSG00000131876_15 (sequence is synthesized)
atgaactggatggtgtttctgaaggagagagttcttgtatcagtttgttaacaaagataagatactacactggttgaattactttcaaaagcttttgaaagtaaaagagaagcaacttct

SEQ ID NO: 295089 - DNA, 120 bp, Artificial Sequence
  ENSG00000131876_16 (sequence is synthesized)
ttttcctttgttgagaagactgaaaacattgttagtgaacaacaacagaatatggtacgtgtctgtaggggaaagtaattttttcccctagagtaaatgttgcagtgtttcctgaagaag

SEQ ID NO: 295090 - DNA, 84 bp, Artificial Sequence
  ENSG00000131876_17 (sequence is synthesized)
ttttcccctagagtaaatgttgcagtgtttcctgaagaagttgtagcacgtgctactggttaaacctacaattttgaaaaaata

SEQ ID NO: 295091 - DNA, 73 bp, Artificial Sequence
  ENSG00000131876_18 (sequence is synthesized)
ccctgccttctttccattaattcgatcatttttaagctatactattccttgtccctgcaaattttatttaaag

SEQ ID NO: 295092 - DNA, 120 bp, Artificial Sequence
  ENSG00000131876_19 (sequence is synthesized)
aagctatactattccttgtccctgcaaattttatttaaagagattttcaggggcagctaggataaatgtaccttctttcaaaagacagtatacctttgttgttcttagacgctgaagctg

SEQ ID NO: 295093 - DNA, 120 bp, Artificial Sequence
  ENSG00000131876_20 (sequence is synthesized)
gcgctagcaggaaagcccacttacaccaagattctggcttgcagttcccagtgtgaataggttgctccagagtcccatcagctttgccattgttttcttttccaaatcatggctcagcag

SEQ ID NO: 295094 - DNA, 120 bp, Artificial Sequence
  ENSG00000131876_21 (sequence is synthesized)
ccactttgagattcctgtaggaaagcaatttcttatctcctgctattgagacagaagctgttaatgccaagattttaagaagctcccatgtattcatcggtagaaattatttaaacattt

SEQ ID NO: 295095 - DNA, 120 bp, Artificial Sequence
  ENSG00000131876_22 (sequence is synthesized)
gtgatgtgctagtattgggcttgttgctagagagtaaaaattcagtaaataatgaaaagacaacttgcttcaaaagcactctccatttcagaatctcaaaatagcgtgtggtattcgcgt

SEQ ID NO: 295096 - DNA, 120 bp, Artificial Sequence
  ENSG00000131876_23 (sequence is synthesized)
ggagccttctgttagcgccgtgcctcttgacaggcacgggtgacttcattacttcctgattctaagcttcatggcactggggacttgagactcgttcagcgttttctctctagtatctta

SEQ ID NO: 295097 - DNA, 120 bp, Artificial Sequence
  ENSG00000131876_24 (sequence is synthesized)
aacgccgggcctgattcttgccgttgttgccagatgagcatccggttaagctcctgggagccttctgttagcgccgtgcctcttgacaggcacgggtgacttcattacttcctgggtata

SEQ ID NO: 295098 - DNA, 120 bp, Artificial Sequence
  ENSG00000131876_25 (sequence is synthesized)
gcagatcaggtgaacaaatggtgttctttgtatgttcaaattaatgttacactcagagtgtaactcacaaccatttagatgccatgactctggaatgccagagtagtgcctccttacatc

SEQ ID NO: 295099 - DNA, 120 bp, Artificial Sequence
  ENSG00000131876_26 (sequence is synthesized)
gccatgactctggaatgccagagtagtgcctccttacatcaaatctaatatatgaaatctctttaaatgctctttgaagataaagtatttgatgggttgggtgcagtggctcacgcctgt

SEQ ID NO: 295100 - DNA, 120 bp, Artificial Sequence
  ENSG00000131899_0 (sequence is synthesized)
atcctgcgggcggcggcggcgggcgaggcgcctgcagccgggcgcaagatgatgaagtttcggttccggcggcagggcgccgacccgcagcgcgagaagctcaagcaggagcttttcgcc

SEQ ID NO: 295101 - DNA, 120 bp, Artificial Sequence
  ENSG00000131899_1 (sequence is synthesized)
ttcaacaagactgtggagcatggcttccccaatcagcccagcgccctggccttcgacccggaacttcgcatcatggccatcggcaccaggtctggggctgtcaagatctatggtgcacct

SEQ ID NO: 295102 - DNA, 120 bp, Artificial Sequence
  ENSG00000131899_2 (sequence is synthesized)
ggcgtggagttcacaggcctgcaccgggatgcagccactgtcacacagatgcacttcttgaccggccagggccgcctcctgtccctgcttgatgacagcagtctgcatctctgggagatt

SEQ ID NO: 295103 - DNA, 120 bp, Artificial Sequence
  ENSG00000131899_3 (sequence is synthesized)
gtccaccataatggctgtgcccacctggaagaagcactcagtttccagctgcccagccggcccggctttgatggtgccagtgctccgctcagccttacccgagtcacagtggtcctgctg

SEQ ID NO: 295104 - DNA, 120 bp, Artificial Sequence
  ENSG00000131899_4 (sequence is synthesized)
gtggctgccagcgacatagcagccctgggcactgagggcagcagtgtcttcttcctggatgttaccaccctgaccctgctcgaggggcagacgcttgccccaggcgaggttctgcgcagc

SEQ ID NO: 295105 - DNA, 120 bp, Artificial Sequence
  ENSG00000131899_5 (sequence is synthesized)
gtgccagacgactaccgctgtgggaaggcactgggccccgtggagtcactccagggacacctgcgggaccccacaaagattctcattggctacagccggggcctgctggtcatctggaac

SEQ ID NO: 295106 - DNA, 120 bp, Artificial Sequence
  ENSG00000131899_6 (sequence is synthesized)
caggcctcgcagtgtgtggaccacatcttcctggggaaccagcagctggagagcctatgctgggggcgtgatagcagcactgtggtcagctcacacagcgatggcagctatgctgtctgg

SEQ ID NO: 295107 - DNA, 120 bp, Artificial Sequence
  ENSG00000131899_7 (sequence is synthesized)
tctgtggatgccggcagcttcccaacgctgcagcccacggtagccaccacaccttacggcccctttccctgcaaggccattaacaagattctgtggcggaactgtgaatctgggggccac

SEQ ID NO: 295108 - DNA, 120 bp, Artificial Sequence
  ENSG00000131899_8 (sequence is synthesized)
tttatcatcttcagcggtggcatgccccgtgccagctatggtgaccgccactgtgtaagtgtgcttcgagccgagacattggtgacgctggacttcacttcccgcatcatcgacttcttc

SEQ ID NO: 295109 - DNA, 120 bp, Artificial Sequence
  ENSG00000131899_9 (sequence is synthesized)
acagtgcacagcacacggcccgaggatgaatttgatgacccccaggccctggctgtgctgctggaagaggagctggtggtgctggacctgcagactcctggctggccagctgtgcctgcc

SEQ ID NO: 295110 - DNA, 120 bp, Artificial Sequence
  ENSG00000131899_10 (sequence is synthesized)
ccatacctggccccgctgcactcctctgcaatcacttgctcggcccacgtggccagtgtccccgccaagctgtgggcccgcattgtgagcgctggcgagcagcagagcccccagcctgtc

SEQ ID NO: 295111 - DNA, 120 bp, Artificial Sequence
  ENSG00000131899_11 (sequence is synthesized)
tccagtgccttgagctggcccatcactgggggccgaaacctggcccaggagccgtcacagcgagggctgctgctgacgggccatgaggacggcaccgtgaggttctgggatgcctcgggt

SEQ ID NO: 295112 - DNA, 120 bp, Artificial Sequence
  ENSG00000131899_12 (sequence is synthesized)
gtggcgctgcggccgctctataagctgagcacagctggcctcttccagacagactgtgagcacgctgacagcctggcccaggctgccgaggacgactggccacccttccgcaaggtgggc

SEQ ID NO: 295113 - DNA, 120 bp, Artificial Sequence
  ENSG00000131899_13 (sequence is synthesized)
tgcttcgatccctacagtgacgatccccggcttggcgtgcagaaggttgctctctgcaagtatacagcccagatggtggtggctggcactgcaggccaggtgctggtactggagcttagt

SEQ ID NO: 295114 - DNA, 120 bp, Artificial Sequence
  ENSG00000131899_14 (sequence is synthesized)
gatgtgccggtggagcaggcggtcagcgtggccatcatagacctcctccaggaccgcgagggcttcacatggaagggccacgagcggctgagcccacgcacggggccgctgccctggcct

SEQ ID NO: 295115 - DNA, 120 bp, Artificial Sequence
  ENSG00000131899_15 (sequence is synthesized)
gctggcttccagccccgtgtcctggtgcagtgcctgccgccagctgctgtaaccgctgtcacactccacaccgagtggagcctcgtggcttttggcaccagtcatggctttggcctcttc

SEQ ID NO: 295116 - DNA, 120 bp, Artificial Sequence
  ENSG00000131899_16 (sequence is synthesized)
gactaccagcgcaagagccctgtgctggccaggtgcactcttcaccccaatgactccctggccatggagggtccgctctcccgggtgaagtctctcaagaagtcactgcgccagtctttc

SEQ ID NO: 295117 - DNA, 120 bp, Artificial Sequence
  ENSG00000131899_17 (sequence is synthesized)
aagagtcgtgtctctggcaagaagcgggctgctaatgccagcagcaagttgcaggaagccaatgcacagctggctgagcaggcctgcccccacgacgtggagatgacgcccgtgcagcgc

SEQ ID NO: 295118 - DNA, 120 bp, Artificial Sequence
  ENSG00000131899_18 (sequence is synthesized)
cgcattgagccccgctctgccgatgactccttgtcgggtgtcgtgcgttgcctatactttgccgacacattccttcgagatggggcccaccacgggcccaccatgtgggctggcaccaac

SEQ ID NO: 295119 - DNA, 120 bp, Artificial Sequence
  ENSG00000131899_19 (sequence is synthesized)
tcaggctctgtgttcgcctatgcactggaggtgccggcagcagcagtgggtggtgagaagcggcctgagcaagcggtggaggccgtgctgggcaaggaggtgcagctgatgcaccgggcg

SEQ ID NO: 295120 - DNA, 120 bp, Artificial Sequence
  ENSG00000131899_20 (sequence is synthesized)
cctgtggtggccattgccgtgttggacgggcgtggccgcccactgcccgagccctacgaggcctcacgggacctggcgcaggcacctgacatgcagggtggtcacgctgtgctcatcgca

SEQ ID NO: 295121 - DNA, 120 bp, Artificial Sequence
  ENSG00000131899_21 (sequence is synthesized)
tctgaggagcagttcaaggtgttcacactgcccaaggtgagcgcgaagaccaagttcaagctgacggcccatgagggctgtcgtgtgcgcaaggtggcactggccacgtttgccagtgtg

SEQ ID NO: 295122 - DNA, 120 bp, Artificial Sequence
  ENSG00000131899_22 (sequence is synthesized)
gcctgcgaggactatgctgagacctgcctggcctgcctcaccaacctgggtgacgtccacgtcttctcggtgcctggcctgcggccccaggtgcactattcctgcatccggaaggaggac

SEQ ID NO: 295123 - DNA, 120 bp, Artificial Sequence
  ENSG00000131899_23 (sequence is synthesized)
atcagcggcatcgcttcgtgcgtctttacgcgccatggccagggcttttacctgatatccccatcagaatttgaacgcttctccctaagtgcccggaacatcacagagccgctctgctct

SEQ ID NO: 295124 - DNA, 120 bp, Artificial Sequence
  ENSG00000131899_24 (sequence is synthesized)
ctggacattaactggccccgcgatgccacccaggccagttacaggatccgagagtcacccaagctgagccaggctaacgggaccccaagcatcctgctggccccacagagccttgatgga

SEQ ID NO: 295125 - DNA, 120 bp, Artificial Sequence
  ENSG00000131899_25 (sequence is synthesized)
agccctgatccagcccacagcatgggacctgacaccccggagccacccgaggctgcactctcacccatgtccatcgactcagccaccagtgctgacaccacgctggacacgacaggggac

SEQ ID NO: 295126 - DNA, 120 bp, Artificial Sequence
  ENSG00000131899_26 (sequence is synthesized)
gtcacagtggaagatgtgaaggatttcctgggctcctctgaggagtcagagaagaacctgaggaacctggcagaagacgaggcccacgcctgtgccatcctgatcaaatgaggaaggcca

SEQ ID NO: 295127 - DNA, 120 bp, Artificial Sequence
  ENSG00000131899_27 (sequence is synthesized)
gaactatcccgacctccacctgccctgctcggagctggagtgctggatccctggcacctgcctggccccttaacatagaaccacgcctgctaacctgtaggctccactgggacctgctgt

SEQ ID NO: 295128 - DNA, 120 bp, Artificial Sequence
  ENSG00000131899_28 (sequence is synthesized)
cctgtcccgcctgaccctgggccctggagcagcaccagccccagggtgtgggcctgggacctgggccagaactgagccctcctgcaggcatttggctgccctgggggcccactgcctagg

SEQ ID NO: 295129 - DNA, 120 bp, Artificial Sequence
  ENSG00000131899_29 (sequence is synthesized)
gaagaggacaggtggggcccagcacctgtgccacctccccccctccacacaccatccttccccctcactttgcagagtatttttccttttttttttttttcttaaagacggagtcttgct

SEQ ID NO: 295130 - DNA, 68 bp, Artificial Sequence
  ENSG00000131899_30 (sequence is synthesized)
ttttttttctttgctcactgcaagccccgccttctgggttcccgccattcttctgcctcagcctccca

SEQ ID NO: 295131 - DNA, 120 bp, Artificial Sequence
  ENSG00000131899_31 (sequence is synthesized)
ggcgtgagccaccatgcccagccctgcaaagagtatttttctagcgcctgggctggacagttgtttctaaaactaaactattttggtacctgcttctgggccagtccccagcctgtcatg

SEQ ID NO: 295132 - DNA, 120 bp, Artificial Sequence
  ENSG00000131899_32 (sequence is synthesized)
catgagtgtgtgtgtgcgggcatggatgtgactgggagctctgctgggcacccacatctggggcctagtcaggtgtgtgtgtccggcggggggggggggcaggggggggggtcaagatga

SEQ ID NO: 295133 - DNA, 120 bp, Artificial Sequence
  ENSG00000131899_33 (sequence is synthesized)
gtttccctgtagattgtaccttggggtttttttctgtcgttttgttaaaattagcgccattttaatattaaaaatactgatttttaatattgaaaataaaagcatttaatatctcttaaa

SEQ ID NO: 295134 - DNA, 120 bp, Artificial Sequence
  ENSG00000131899_34 (sequence is synthesized)
gtgtgcgtgcttatgtgggtgagtgggccccttgctgttgggggagagcccatcctgggcctggtgggtgcagaggtgccaggagactcaggcctggcccctggtgggaccaggtagttc

SEQ ID NO: 295135 - DNA, 120 bp, Artificial Sequence
  ENSG00000131899_35 (sequence is synthesized)
ctccttgcccaaggtggtttggaatgaaacctccctggaccttggttcaaggtgctgccctgatctgccttttggcctggaactgagctctaccaaaccccagggctccacccgcccagc

SEQ ID NO: 295136 - DNA, 120 bp, Artificial Sequence
  ENSG00000131899_36 (sequence is synthesized)
ctgcctgccctgggactggaaaatctgggctggcccacgctgagctgcccagggaaggtgccagagagcccagcgtgggcctggcgggcgctgacgtgcccagtgactcaggtctcaact

SEQ ID NO: 295137 - DNA, 120 bp, Artificial Sequence
  ENSG00000131899_37 (sequence is synthesized)
tcctgccctgcccccactcccgcctgtgctgggaccctcaggcctctgactctggtgtgcccttccctgctgaagagcttgccgtggctttcagggctgctggaatgagtctcaaccacc

SEQ ID NO: 295138 - DNA, 120 bp, Artificial Sequence
  ENSG00000131899_38 (sequence is synthesized)
cccacagtcacacacctctcacgccctggctctgggctttcaccaccgcctggggccctgcttggactctgcagctgtgtcccaaggctgcgccctagatttgtctactccttcccctgc

SEQ ID NO: 295139 - DNA, 120 bp, Artificial Sequence
  ENSG00000131899_39 (sequence is synthesized)
cccctccctgctttctcccggcctctgtagtcttcctgctcctccacctacgtggctgccttgggccccatgcagctcctcccccgggatgccccatgctctgttctgtgactgccttac

SEQ ID NO: 295140 - DNA, 120 bp, Artificial Sequence
  ENSG00000131899_40 (sequence is synthesized)
tcttgatcacctctgatggctgctccagtgcaggcagaacccccaaagtcctctgttctctacatgtccccctttgccacctcctgttaatcagggtggtcatttccaccttgtttggtt

SEQ ID NO: 295141 - DNA, 120 bp, Artificial Sequence
  ENSG00000131899_41 (sequence is synthesized)
taaaggctccaggtgcatatggtgcatgtggcctggcctataacaggtgcacagtgtacctgtgctgtctacagtaggtgcctattgttttttgtaaaagtaggattccggtcagtgttt

SEQ ID NO: 295142 - DNA, 120 bp, Artificial Sequence
  ENSG00000131899_42 (sequence is synthesized)
ggcacgtgcagtaggtgcttagtgagtggttatcagatgagtgaatggaggggcgtgcaggcctcccaggaactcgggtagccctgacatctgccctccctgcagccatgaggacggcac

SEQ ID NO: 295143 - DNA, 120 bp, Artificial Sequence
  ENSG00000131899_43 (sequence is synthesized)
ccaggtagggctgggtgtcccctgggttggagatgtcagggagggctttctggaagagatgagctggagggtctggtggaaagggagatggactggcacaggcaaaagccaaggtgggaa

SEQ ID NO: 295144 - DNA, 120 bp, Artificial Sequence
  ENSG00000131899_44 (sequence is synthesized)
tagggctctgggtggggctggctggggtgaggacagatgggaagtgggcctgtcgctgggggaaccacagtgttgagaggagggaactcatgtcagtgctgtgctccggcactcacatga

SEQ ID NO: 295145 - DNA, 120 bp, Artificial Sequence
  ENSG00000131899_45 (sequence is synthesized)
catacaggaggtgctcaatgtgtccttattgctaaatgggagatagaggctcagggtaagggtggacactttgccctcagagggcagggactagtgtgtcttggtcaccactgtgttcct

SEQ ID NO: 295146 - DNA, 120 bp, Artificial Sequence
  ENSG00000131899_46 (sequence is synthesized)
tgtgctcagccagggccttggtatacagtaggcattcagtgagtgcttgtttagctgatgaactgaagacagtcctagaaccaccttggtggtggctggggctgcttcagaggctccagg

SEQ ID NO: 295147 - DNA, 120 bp, Artificial Sequence
  ENSG00000131899_47 (sequence is synthesized)
ctgtgggctgtgggggactctgggggactcccctccaggccccaacctcatggacaccattggaccctcaagaaacccttcctgcctgtatcccccactgttgggaccctaattcccttg

SEQ ID NO: 295148 - DNA, 120 bp, Artificial Sequence
  ENSG00000131899_48 (sequence is synthesized)
caccccagaaaacactcccagccagcagagaactcctacccaagaaccctgatgccccctcagcctgctgagttcccctgggagggcaggaatctagtcctatctcactgtgccacacaa

SEQ ID NO: 295149 - DNA, 120 bp, Artificial Sequence
  ENSG00000131899_49 (sequence is synthesized)
ggctcctgtactgggcccagacccctgagcccagtccccaggggctctgcctcgaaagaactcgaggtttgatggggataccagctgcataaccttggcataactctgtgattgattttg

SEQ ID NO: 295150 - DNA, 120 bp, Artificial Sequence
  ENSG00000131899_50 (sequence is synthesized)
tcacagatcgagagagggcctgggaggtttctggagtacagtgtgaagtctggagtttagtggggcagccaggtgtacaggcacgggaggccacgtagcatgcagctgggctttgtggtg

SEQ ID NO: 295151 - DNA, 120 bp, Artificial Sequence
  ENSG00000131899_51 (sequence is synthesized)
cggggcagaggccgaggaggccttcctcaggcgagcgaactgagtgggaccagtactgcttgggagcaggaagggcactccaggtgggcacaggcccaggccacggaggagctgtggttg

SEQ ID NO: 295152 - DNA, 120 bp, Artificial Sequence
  ENSG00000131910_0 (sequence is synthesized)
gccagagagctggaagtgagagcagatccctaaccatgagcaccagccaaccaggggcctgcccatgccagggagctgcaagccgccccgccattctctacgcacttctgagctccagcc

SEQ ID NO: 295153 - DNA, 120 bp, Artificial Sequence
  ENSG00000131910_1 (sequence is synthesized)
tcaaggctgtcccccgaccccgtagccgctgcctatgtaggcagcaccggcccgtccagctatgtgcacctcatcgcacctgccgggaggccttggatgttctggccaagacagtggcct

SEQ ID NO: 295154 - DNA, 120 bp, Artificial Sequence
  ENSG00000131910_2 (sequence is synthesized)
tcctcaggaacctgccatccttctggcagctgcctccccaggaccagcggcggctgctgcagggttgctggggccccctcttcctgcttgggttggcccaagatgctgtgacctttgagg

SEQ ID NO: 295155 - DNA, 120 bp, Artificial Sequence
  ENSG00000131910_3 (sequence is synthesized)
tggctgaggccccggtgcccagcatactcaagaagattctgctggaggagcccagcagcagtggaggcagtggccaactgccagacagaccccagccctccctggctgcggtgcagtggc

SEQ ID NO: 295156 - DNA, 120 bp, Artificial Sequence
  ENSG00000131910_4 (sequence is synthesized)
cgatgtgccaggcctccaagccgcctcccacattgggcacctgcagcaggaggctcactgggtgctgtgtgaagtcctggaaccctggtgcccagcagcccaaggccgcctgacccgtgt

SEQ ID NO: 295157 - DNA, 120 bp, Artificial Sequence
  ENSG00000131910_5 (sequence is synthesized)
cctcctcacggcctccaccctcaagtccattccgaccagcctgcttggggacctcttctttcgccctatcattggagatgttgacatcgctggccttcttggggacatgcttttgctcag

SEQ ID NO: 295158 - DNA, 120 bp, Artificial Sequence
  ENSG00000131910_6 (sequence is synthesized)
gtgacctgttccagcccaggcagagatcaggtgggcagaggctggcagtgctgattcagcctggccatccccagaggtgacccaatgctcctggagggggcaagcctgtatagacagcac

SEQ ID NO: 295159 - DNA, 120 bp, Artificial Sequence
  ENSG00000131910_7 (sequence is synthesized)
ttggctccttaggaacagctcttcactcagccacaccccacattggacttccttggtttggacacagtgttccagctgcctgggaggcttttggtggtccccacagcctctgggccaaga

SEQ ID NO: 295160 - DNA, 120 bp, Artificial Sequence
  ENSG00000131910_8 (sequence is synthesized)
ctcctgtcccttcttgggatgagaatgaaagcttaggctgcttattggaccagaagtcctatcgactttatacagaactgaattaagttattgatttttgtaataaaaggtatgaaacac

SEQ ID NO: 295161 - DNA, 120 bp, Artificial Sequence
  ENSG00000131914_0 (sequence is synthesized)
cctttgccttcggacttctccggggccagcagccgcccgaccaggggcccggggccacgggctcagccgacgaccatgggctccgtgtccaaccagcagtttgcaggtggctgcgccaag

SEQ ID NO: 295162 - DNA, 120 bp, Artificial Sequence
  ENSG00000131914_1 (sequence is synthesized)
gcggcagaagaggcgcccgaggaggcgccggaggacgcggcccgggcggcggacgagcctcagctgctgcacggtgcgggcatctgtaagtggttcaacgtgcgcatggggttcggcttc

SEQ ID NO: 295163 - DNA, 120 bp, Artificial Sequence
  ENSG00000131914_2 (sequence is synthesized)
ctgtccatgaccgcccgcgccggggtcgcgctcgaccccccagtggatgtctttgtgcaccagagtaagctgcacatggaagggttccggagcttgaaggagggtgaggcagtggagttc

SEQ ID NO: 295164 - DNA, 120 bp, Artificial Sequence
  ENSG00000131914_3 (sequence is synthesized)
acctttaagaagtcagccaagggtctggaatccatccgtgtcaccggacctggtggagtattctgtattgggagtgagaggcggccaaaaggaaagagcatgcagaagcgcagatcaaaa

SEQ ID NO: 295165 - DNA, 120 bp, Artificial Sequence
  ENSG00000131914_4 (sequence is synthesized)
ggagacaggtgctacaactgtggaggtctagatcatcatgccaaggaatgcaagctgccaccccagcccaagaagtgccacttctgccagagcatcagccatatggtagcctcatgtccg

SEQ ID NO: 295166 - DNA, 120 bp, Artificial Sequence
  ENSG00000131914_5 (sequence is synthesized)
ctgaaggcccagcagggccctagtgcacagggaaagccaacctactttcgagaggaagaagaagaaatccacagccctaccctgctcccggaggcacagaattgagccacaatgggtggg

SEQ ID NO: 295167 - DNA, 120 bp, Artificial Sequence
  ENSG00000131914_6 (sequence is synthesized)
ggctattcttttgctatcaggaagttttgaggagcaggcagagtggagaaagtgggaatagggtgcattggggctagttggcactgccatgtatctcaggcttgggttcacaccatcacc

SEQ ID NO: 295168 - DNA, 120 bp, Artificial Sequence
  ENSG00000131914_7 (sequence is synthesized)
ctttcttccctctaggtggggggaaagggtgagtcaaaggaactccaaccatgctctgtccaaatgcaagtgagggttctgggggcaaccaggaggggggaatcaccctacaacctgcat

SEQ ID NO: 295169 - DNA, 120 bp, Artificial Sequence
  ENSG00000131914_8 (sequence is synthesized)
actttgagtctccatccccagaatttccagcttttgaaagtggcctggatagggaagttgttttccttttaaagaaggatatataataattcccatgccagagtgaaatgattaagtata

SEQ ID NO: 295170 - DNA, 120 bp, Artificial Sequence
  ENSG00000131914_9 (sequence is synthesized)
agaccagattcatggagccaagccactacattctgtggaaggagatctctcaggagtaagcattgtttttttttcacatcttgtatcctcatacccacttttgggatagggtgctggcag

SEQ ID NO: 295171 - DNA, 120 bp, Artificial Sequence
  ENSG00000131914_10 (sequence is synthesized)
ctgtcccaagcaatgggtaatgatgatggcaaaaagggtgtttgggggaacagctgcagacctgctgctctatgctcacccccgccccattctgggccaatgtgattttatttatttgct

SEQ ID NO: 295172 - DNA, 120 bp, Artificial Sequence
  ENSG00000131914_11 (sequence is synthesized)
cccttggatactgcaccttgggtcccactttctccaggatgccaactgcactagctgtgtgcgaatgacgtatcttgtgcattttaactttttttccttaatataaatattctggttttg

SEQ ID NO: 295173 - DNA, 120 bp, Artificial Sequence
  ENSG00000131914_12 (sequence is synthesized)
tatttttgtatattttaatctaaggccctcatttcctgcactgtgttctcaggtacatgagcaatctcagggatagccagcagcagctccaggtctgcgcagcaggaattactttttgtt

SEQ ID NO: 295174 - DNA, 120 bp, Artificial Sequence
  ENSG00000131914_13 (sequence is synthesized)
gtttttgccaccgtggagagcaactatttggagtgcacagcctattgaactacctcatttttgccaataagagctggcttttctgccatagtgtcctcttgaaaccccctctgccttgaa

SEQ ID NO: 295175 - DNA, 120 bp, Artificial Sequence
  ENSG00000131914_14 (sequence is synthesized)
cacagaggctaggagaggctgggcccggtgaaaaggccagagagcaagccaagattaggtgagggttgtctaatcctatggcacaggacgtgctttacatctccagatctgttcttcacc

SEQ ID NO: 295176 - DNA, 120 bp, Artificial Sequence
  ENSG00000131914_15 (sequence is synthesized)
agattaggttaggcctaccatgtgccacagggtgtgtgtgtgtttgtaaaactagagttgctaaggataagtttaaagaccaatacccctgtacttaatcctgtgctgtcgagggatgga

SEQ ID NO: 295177 - DNA, 120 bp, Artificial Sequence
  ENSG00000131914_16 (sequence is synthesized)
tatatgaagtaaggtgagatccttaacctttcaaaattttcgggttccagggagacacacaagcgagggttttgtggtgcctggagcctgtgtcctgccctgctacagtagtgattaata

SEQ ID NO: 295178 - DNA, 120 bp, Artificial Sequence
  ENSG00000131914_17 (sequence is synthesized)
gtgtcatggtagctaaaggagaaaaagggggtttcgtttacacgctgtgagatcaccgcaaacctaccttactgtgttgaaacgggacaaatgcaatagaacgcattgggtggtgtgtgt

SEQ ID NO: 295179 - DNA, 120 bp, Artificial Sequence
  ENSG00000131914_18 (sequence is synthesized)
ctgatcctgggttcttgtctcccctaaatgctgccccccaagttactgtatttgtctgggctttgtaggacttcactacgttgattgctaggtggcctagtttgtgtaaatataatgtat

SEQ ID NO: 295180 - DNA, 120 bp, Artificial Sequence
  ENSG00000131914_19 (sequence is synthesized)
tggtctttctccgtgttctttgggggttttgtttacaaacttctttttgtattgagagaaaaatagccaaagcatctttgacagaaggttctgcaccaggcaaaaagatctgaaacatta

SEQ ID NO: 295181 - DNA, 120 bp, Artificial Sequence
  ENSG00000131914_20 (sequence is synthesized)
gtttggggggccctcttcttaaagtggggatcttgaaccatcctttcttttgtattccccttcccctattacctattagaccagatcttctgtcctaaaaacttgtcttctaccctgccc

SEQ ID NO: 295182 - DNA, 120 bp, Artificial Sequence
  ENSG00000131914_21 (sequence is synthesized)
tcttttctgttcacccccaaaagaaaacttacacacccacacacatacacatttcatgcttggagtgtctccacaactcttaaatgatgtatgcaaaaatactgaagctaggaaaaccct

SEQ ID NO: 295183 - DNA, 88 bp, Artificial Sequence
  ENSG00000131914_22 (sequence is synthesized)
taaatgatgtatgcaaaaatactgaagctaggaaaaccctccatcccttgttcccaacctcctaagtcaagaccattacaatggagtc

SEQ ID NO: 295184 - DNA, 120 bp, Artificial Sequence
  ENSG00000131914_23 (sequence is synthesized)
gtctcaaacaaaacaaaacaaaacaaaaacacactactgtattttggatggatcaaacctccttaattttaatttctaatcctaaagtaaagagatgcaattgggggccttccatgtaga

SEQ ID NO: 295185 - DNA, 120 bp, Artificial Sequence
  ENSG00000131914_24 (sequence is synthesized)
cctaaagtaaagagatgcaattgggggccttccatgtagaaagtggggtcaggaggccaagaaagggaatatgaatgtatatccaagtcactcaggaacttttatgcaggtgctagaaac

SEQ ID NO: 295186 - DNA, 120 bp, Artificial Sequence
  ENSG00000131914_25 (sequence is synthesized)
tttatgtcaaagtggccacaagattgtttaataggagacgaacgaatgtaactccatgtttactgctaaaaaccaaagctttgtgtaaaatcttgaatttatggggcgggagggtaggaa

SEQ ID NO: 295187 - DNA, 120 bp, Artificial Sequence
  ENSG00000131914_26 (sequence is synthesized)
agcctgtacctgtctgtttttttcctgatccttttccctcattcctgaactgcaggagactgagcccctttgggctttggtgaccccatcactggggtgtgtttatttgatggttgattt

SEQ ID NO: 295188 - DNA, 120 bp, Artificial Sequence
  ENSG00000131914_27 (sequence is synthesized)
tgctgtactgggtacttcctttcccattttctaatcattttttaacacaagctgactcttcccttcccttctcctttccctgggaaaatacaatgaataaataaagacttattggtacgc

SEQ ID NO: 295189 - DNA, 77 bp, Artificial Sequence
  ENSG00000131914_28 (sequence is synthesized)
attacaggcatgagccaccatgctgggccaaccatttcttggtgtattcatgccaaacacttaagacactgctgtag

SEQ ID NO: 295190 - DNA, 120 bp, Artificial Sequence
  ENSG00000131931_0 (sequence is synthesized)
gaagctgcctccgccatcttggagatgggagacgggcgatggctgtggtccttctgctaatgcaaacaacaaaacgggcacactagtcacccccgagggaggccaccatcactgtaactg

SEQ ID NO: 295191 - DNA, 120 bp, Artificial Sequence
  ENSG00000131931_1 (sequence is synthesized)
ttggccaaagctacaaaagaagcgagggaatccaaccgagcgcagcgacactgagaacagcttcccctgccttctgcggcggcagaagtgaagtgcctgaggaccggaaggatggtgcag

SEQ ID NO: 295192 - DNA, 120 bp, Artificial Sequence
  ENSG00000131931_2 (sequence is synthesized)
tcctgctccgcctacggctgcaagaaccgctacgacaaggacaagcccgtttctttccacaagtttcctcttactcgacccagtctttgtaaagaatgggaggcagctgtcagaagaaaa

SEQ ID NO: 295193 - DNA, 120 bp, Artificial Sequence
  ENSG00000131931_3 (sequence is synthesized)
aactttaaacccaccaagtatagcagtatttgttcagagcactttactccagactgctttaagagagagtgcaacaacaagttactgaaagagaatgctgtgcccacaatatttctttgt

SEQ ID NO: 295194 - DNA, 120 bp, Artificial Sequence
  ENSG00000131931_4 (sequence is synthesized)
actgagccacatgacaagaaagaagatcttctggagccacaggaacagcttcccccacctcctttaccgcctcctgtttcccaggttgatgctgctattggattactaatgccgcctctt

SEQ ID NO: 295195 - DNA, 120 bp, Artificial Sequence
  ENSG00000131931_5 (sequence is synthesized)
cagacccctgttaatctctcagttttctgtgaccacaactatactgtggaggatacaatgcaccagcggaaaaggattcatcagctagaacagcaagttgaaaaactcagaaagaagctc

SEQ ID NO: 295196 - DNA, 120 bp, Artificial Sequence
  ENSG00000131931_6 (sequence is synthesized)
aagaccgcacagcagcgatgcagaaggcaagaacggcagcttgaaaaattaaaggaggttgttcacttccagaaagagaaagacgacgtatcagaaagaggttatgtgattctaccaaat

SEQ ID NO: 295197 - DNA, 120 bp, Artificial Sequence
  ENSG00000131931_7 (sequence is synthesized)
gactactttgaaatagttgaagtaccagcataaaaaaatgaaatgtgtattgatttctaatggggcaataccacatatcctcctctagcctgtaaaggagtttcatttaaaaaaataaca

SEQ ID NO: 295198 - DNA, 120 bp, Artificial Sequence
  ENSG00000131931_8 (sequence is synthesized)
aaaagttataaactaacctcagacctctaatgtaagttggtttcaagattggggattttggggtttttttttagtatttatagaaataatgtaaaaataaaaagtaaagagaatgagaac

SEQ ID NO: 295199 - DNA, 120 bp, Artificial Sequence
  ENSG00000131931_9 (sequence is synthesized)
agtgtggtaaaagggtgatttcagtttaaaacttaaaattagtactgttttattgagagaatttagttatattttaaatcagaagtatgggtcagatcatgggacataacttcttagaat

SEQ ID NO: 295200 - DNA, 120 bp, Artificial Sequence
  ENSG00000131931_10 (sequence is synthesized)
atatatatacatatgtacatattctcatatgtaaagtcacaaggttcatttatctttctgaatcagttatcaaagataaattggcaagtcagtacttaagaaaaaagatttgattatcat

SEQ ID NO: 295201 - DNA, 120 bp, Artificial Sequence
  ENSG00000131931_11 (sequence is synthesized)
cacagcagaaaaaagtcattgcatatctgatcaataacttcagattctaagagtggattttttttttttacatgggctcctattttttcccctactgtcttgcattataaaattagaagt

SEQ ID NO: 295202 - DNA, 120 bp, Artificial Sequence
  ENSG00000131931_12 (sequence is synthesized)
gtattttcagtggaagaaacatttttcaataaataaagtaaggcattgtcatcaatgaagtaattaaaactgggacctgatctatgatacgcttttttctttcattacaccctagctgaa

SEQ ID NO: 295203 - DNA, 120 bp, Artificial Sequence
  ENSG00000131931_13 (sequence is synthesized)
ggacatccagttccccagctgtagttatgtatctgccttcaagtctctgacaaatgtgctgtgttagtagagtttgatttgtatcatatgataatcttgcacttgactgagttgggacaa

SEQ ID NO: 295204 - DNA, 120 bp, Artificial Sequence
  ENSG00000131931_14 (sequence is synthesized)
ggcttcacataaaaaattatttcttcacttttaacacaagttagaaattatatcccatttagttaagtgcgtgatttatattcagaacaacctactatgtagcgtttattttactgaatg

SEQ ID NO: 295205 - DNA, 120 bp, Artificial Sequence
  ENSG00000131931_15 (sequence is synthesized)
tggagatttaaacactgaggtttctgttcaaactgtgagttctgttctttgtgagaaattttacatatattggaagtgaaaatatgttctgagtaaacaaatattgctatgggagttatc

SEQ ID NO: 295206 - DNA, 120 bp, Artificial Sequence
  ENSG00000131931_16 (sequence is synthesized)
tttttagatttagaataactgttccaatgataattattacttttatatttcaaagtacactaagatcgttgaagagcaatagaacctttaagacagtattaaaggtgtgaaacaatggca

SEQ ID NO: 295207 - DNA, 120 bp, Artificial Sequence
  ENSG00000131931_17 (sequence is synthesized)
ggcttcgctcacggcctgggttgacgcgttcggagcccacgggcgatgcctagggtggcgcgggttttgccaccaccagggtcacagagcagccaggtgttttaatatggtcttaggggt

SEQ ID NO: 295208 - DNA, 120 bp, Artificial Sequence
  ENSG00000131931_18 (sequence is synthesized)
agaatttttgcccccaatctctaggaactaagctttaaggaccctgtattttggagaaagcttcaggtttcctcttactcgacccagtctttgtaaagaatgggaggcagctgtcagaag

SEQ ID NO: 295209 - DNA, 120 bp, Artificial Sequence
  ENSG00000131941_0 (sequence is synthesized)
agtccgccgtccgccctccgcgcccgcgccgctagcatgaccgacgcgctgttgcccgcggccccccagccgctggagaaggagaacgacggctactttcggaagggctgtaatcccctt

SEQ ID NO: 295210 - DNA, 120 bp, Artificial Sequence
  ENSG00000131941_1 (sequence is synthesized)
gcacaaaccggccggagtaaattgcagaatcaaagagctgctttgaatcagcagatcctgaaagccgtgcggatgaggaccggagcggaaaaccttctgaaagtggccacaaactcaaag

SEQ ID NO: 295211 - DNA, 120 bp, Artificial Sequence
  ENSG00000131941_2 (sequence is synthesized)
gtgcgggagcaagtgcggctggagctgagcttcgtcaactcagacctgcagatgctcaaggaagagctggaggggctgaacatctcggtgggcgtctatcagaacacagaggaggcattt

SEQ ID NO: 295212 - DNA, 120 bp, Artificial Sequence
  ENSG00000131941_3 (sequence is synthesized)
acgattcccctgattcctcttggcctgaaggaaacgaaagacgtcgactttgcagtcgtcctcaaggattttatcctggaacattacagtgaagatggctatttatatgaagatgaaatt

SEQ ID NO: 295213 - DNA, 120 bp, Artificial Sequence
  ENSG00000131941_4 (sequence is synthesized)
gcagatcttatggatctgagacaagcttgtcggacgcctagccgggatgaggccggggtggaactgctgatgacatacttcatccagctgggctttgtcgagagtcgattcttcccgccc

SEQ ID NO: 295214 - DNA, 120 bp, Artificial Sequence
  ENSG00000131941_5 (sequence is synthesized)
acacggcagatgggactcctgttcacctggtatgactctctcaccggggttccggtcagccagcagaacctgctgctggagaaggccagtgtcctgttcaacactggggccctctacacc

SEQ ID NO: 295215 - DNA, 120 bp, Artificial Sequence
  ENSG00000131941_6 (sequence is synthesized)
cagattgggacccggtgtgatcggcagacgcaggctgggctggagagtgccatagatgcctttcagagagccgcaggggttttaaattacctgaaagacacatttacccatactccaagt

SEQ ID NO: 295216 - DNA, 120 bp, Artificial Sequence
  ENSG00000131941_7 (sequence is synthesized)
tacgacatgagccctgccatgctcagcgtgctcgtcaaaatgatgcttgcacaagcccaagaaagcgtgtttgagaaaatcagccttcctgggatccggaatgaattcttcatgctggtg

SEQ ID NO: 295217 - DNA, 120 bp, Artificial Sequence
  ENSG00000131941_8 (sequence is synthesized)
aaggtggctcaggaggctgctaaggtgggagaggtctaccaacagctacacgcagccatgagccaggcgccggtgaaagagaacatcccctactcctgggccagcttagcctgcgtgaag

SEQ ID NO: 295218 - DNA, 120 bp, Artificial Sequence
  ENSG00000131941_9 (sequence is synthesized)
gcccaccactacgcggccctggcccactacttcactgccatcctcctcatcgaccaccaggtgaagccaggcacggatctggaccaccaggagaagtgcctgtcccagctctacgaccac

SEQ ID NO: 295219 - DNA, 120 bp, Artificial Sequence
  ENSG00000131941_10 (sequence is synthesized)
atgccagaggggctgacacccttggccacactgaagaatgatcagcagcgccgacagctggggaagtcccacttgcgcagagccatggctcatcacgaggagtcggtgcgggaggccagc

SEQ ID NO: 295220 - DNA, 120 bp, Artificial Sequence
  ENSG00000131941_11 (sequence is synthesized)
ctctgcaagaagctgcggagcattgaggtgctacagaaggtgctgtgtgccgcacaggaacgctcccggctcacgtacgcccagcaccaggaggaggatgacctgctgaacctgatcgac

SEQ ID NO: 295221 - DNA, 120 bp, Artificial Sequence
  ENSG00000131941_12 (sequence is synthesized)
gcccccagtgttgttgctaaaactgagcaagaggttgacattatattgccccagttctccaagctgacagtcacggacttcttccagaagctgggccccttatctgtgttttcggctaac

SEQ ID NO: 295222 - DNA, 120 bp, Artificial Sequence
  ENSG00000131941_13 (sequence is synthesized)
aagcggtggacgcctcctcgaagcatccgcttcactgcagaagaaggggacttggggttcaccttgagagggaacgcccccgttcaggttcacttcctggatccttactgctctgcctcg

SEQ ID NO: 295223 - DNA, 120 bp, Artificial Sequence
  ENSG00000131941_14 (sequence is synthesized)
gattatattgtctccattcagcttgtggattgtaagtggctgacgctgagtgaggttatgaagctgctgaagagctttggcgaggacgagatcgagatgaaagtcgtgagcctcctggac

SEQ ID NO: 295224 - DNA, 120 bp, Artificial Sequence
  ENSG00000131941_15 (sequence is synthesized)
tccacatcatccatgcataataagagtgccacatactccgtgggaatgcagaaaacgtactccatgatctgcttagccattgatgatgacgacaaaactgataaaaccaagaaaatctcc

SEQ ID NO: 295225 - DNA, 120 bp, Artificial Sequence
  ENSG00000131941_16 (sequence is synthesized)
aagaagctttccttcctgagttggggcaccaacaagaacagacagaagtcagccagcaccttgtgcctcccatcggtcggggctgcacggcctcaggtcaagaagaagctgccctcccct

SEQ ID NO: 295226 - DNA, 120 bp, Artificial Sequence
  ENSG00000131941_17 (sequence is synthesized)
ttcagccttctcaactcagacagttcttggtactaatgtgaggaaacaaacatgttcaggccctgaacatttccggtgctgactcggccttaaacgtttgtgccataatggaaaatatct

SEQ ID NO: 295227 - DNA, 120 bp, Artificial Sequence
  ENSG00000131941_18 (sequence is synthesized)
atctatctgttctcaaatcctgtttttctcatagtgtaaactcacatttgatgtgtttttatgaaggaaagtaaccaagaaacctctaggaattagtgaaaaaagaacttttttgaggtg

SEQ ID NO: 295228 - DNA, 120 bp, Artificial Sequence
  ENSG00000131941_19 (sequence is synthesized)
ggtgtgttactatactgctgtaagttatttattatataaagtattgtaaatagaatagtgttgaagatatgaaatatggctatttttaatggtgacaattatgacttttagtcactatta

SEQ ID NO: 295229 - DNA, 120 bp, Artificial Sequence
  ENSG00000131941_20 (sequence is synthesized)
ggggttacctatatcagtacaatttgtagttgtttccaggtttggctaataatcattccttaacctagaattcagatgatcctggaattaaggcaggtcagaggactgtaatgatagaat

SEQ ID NO: 295230 - DNA, 120 bp, Artificial Sequence
  ENSG00000131941_21 (sequence is synthesized)
taaattagtgtcactaaaaactgtcccaaagtgctgcttcctaataggaattcattaacctaaaacaagatgttactattatatcgatagactatgaatgctatttctagaaaaagtcta

SEQ ID NO: 295231 - DNA, 120 bp, Artificial Sequence
  ENSG00000131941_22 (sequence is synthesized)
gtgccaaatttgtcttattaaataaaaacaatgtaggagcagcttttcttctagtttgatgtcatttaagaattactaacacagtggcagtgttagatgaagatgctgtctacaaggtag

SEQ ID NO: 295232 - DNA, 120 bp, Artificial Sequence
  ENSG00000131941_23 (sequence is synthesized)
ctgtttgatactcaaaacatttttcattttgtttaaagtagaagttacataattctatattttaagtcttgggtaaaaaagtagttttacattttataaagtaaagatgtaaatgattca

SEQ ID NO: 295233 - DNA, 86 bp, Artificial Sequence
  ENSG00000131941_24 (sequence is synthesized)
aaaagtagttttacattttataaagtaaagatgtaaatgattcaggtttaaagctctatttgacttcctttttttgtttgagatag

SEQ ID NO: 295234 - DNA, 120 bp, Artificial Sequence
  ENSG00000131941_25 (sequence is synthesized)
tcagcctcccaaatagctgggactacaaggtgccctccagcatgcctggctgatttttgtatttttagttgaggtgaggtttcaccatgttggccaggcgggtttcgaaatcctgacctc

SEQ ID NO: 295235 - DNA, 77 bp, Artificial Sequence
  ENSG00000131941_26 (sequence is synthesized)
tcccactattttactttttaaaatgacattcctactgattgatttttatcttgctataagttcgatgacaccgtgaa

SEQ ID NO: 295236 - DNA, 120 bp, Artificial Sequence
  ENSG00000131941_27 (sequence is synthesized)
attgatttttatcttgctataagttcgatgacaccgtgaatctaataaggttcactgttgacacagtacaagttacatagctaaaatacatagcattgaagactaattttaaggattgac

SEQ ID NO: 295237 - DNA, 120 bp, Artificial Sequence
  ENSG00000131941_28 (sequence is synthesized)
aagagtttattttctattgtgcaatatcttaaaggaagcaaccacctttgggaaagtgtatctgctgctcctagggccatgcttgtatacatatttaaataaacatattcatttacccga

SEQ ID NO: 295238 - DNA, 120 bp, Artificial Sequence
  ENSG00000131941_29 (sequence is synthesized)
aagatggctttccaggttctcgcatgactgctgtagcatgtatgcccccagatgtgtcatttgtccctgaacaaggccaagtgagatcttcaaggacagcaggcaaaattccctttagct

SEQ ID NO: 295239 - DNA, 120 bp, Artificial Sequence
  ENSG00000131941_30 (sequence is synthesized)
tttcttgatgcgaacttacgcaaatacctattttgttaatggggactgattcaaggatttgagtgaacaaaacgttgacttaatttcaacaatactttttcaggtggcaggagcccggga

SEQ ID NO: 295240 - DNA, 65 bp, Artificial Sequence
  ENSG00000131941_31 (sequence is synthesized)
ggagccctatctcccaggttcaagcctcagccttctgcatagctgggactacaggcatgcaccac

SEQ ID NO: 295241 - DNA, 120 bp, Artificial Sequence
  ENSG00000131941_32 (sequence is synthesized)
cggcctcccagagtgctgggattacagacgtaagccaccatgcccggctggaatcattcatttcttttcaagtgggtatcttatggtattttagggcatggctgggagcagttttgtttt

SEQ ID NO: 295242 - DNA, 120 bp, Artificial Sequence
  ENSG00000131941_33 (sequence is synthesized)
tttgttttctcttctcaagactgagtgtttgcaggatgtcatagagttcatgtctgcagctcacagtgtcattgcctgtgtccccagctccacgtactggcaggtgtgctgcaagctggg

SEQ ID NO: 295243 - DNA, 120 bp, Artificial Sequence
  ENSG00000131941_34 (sequence is synthesized)
taggtgccctgtgtccctgggataccttaaccgacactcctggccctcctctgcaagctgtgccctgatcctccctgcagggactggggattgggtctgctcacctagaagccaggatac

SEQ ID NO: 295244 - DNA, 81 bp, Artificial Sequence
  ENSG00000131941_35 (sequence is synthesized)
agttattctcttaagggggataagtgggggctgcaagtgaagaaactaaaatggagtctgtccgggtagggtatcacaggc

SEQ ID NO: 295245 - DNA, 120 bp, Artificial Sequence
  ENSG00000131943_0 (sequence is synthesized)
ggggctggggagctgggcggggagcccggggcctgccaggcccgggctgcagccgcgtctgatcgccgagcgcgccgcgtagacctccgctcccccaggcccgccacgatgactatcatg

SEQ ID NO: 295246 - DNA, 120 bp, Artificial Sequence
  ENSG00000131943_1 (sequence is synthesized)
gctcccccaggcccgccacgatgactatcatggtggaggacatcatgaagctgctgtgctccctttctggggagaggaagatgaaggcggctgtcaagcactctgggaagggtgccctgg

SEQ ID NO: 295247 - DNA, 120 bp, Artificial Sequence
  ENSG00000131943_2 (sequence is synthesized)
tcacaggggccatggccttcgtcgggggtttggtgggcggcccaccgggactcgccgttgggggggctgtcggggggctgttaggtgcctggatgacaagtggacagtttaagccggttc

SEQ ID NO: 295248 - DNA, 120 bp, Artificial Sequence
  ENSG00000131943_3 (sequence is synthesized)
ctcagatcctaatggagctgccccctgccgagcaacagaggctctttaacgaagccgcagccatcatcaggcacctggagtggacggacgccgtgcagctgaccgcgctggtcatgggca

SEQ ID NO: 295249 - DNA, 120 bp, Artificial Sequence
  ENSG00000131943_4 (sequence is synthesized)
gcgaggccctgcagcagcagctgctggccatgctggtgaactacgtcaccaaggagctgcgggccgagatccagtatgatgactaggccgcacctccggggaggtggggggcccctttaa

SEQ ID NO: 295250 - DNA, 120 bp, Artificial Sequence
  ENSG00000131943_5 (sequence is synthesized)
atgactctgtgattctgaagaggtggcttgggagttgggagaagcccagcggatgccccctggggaatctccacatcatcagtgtattactagtaatgtcccgctggagaggccaccgct

SEQ ID NO: 295251 - DNA, 120 bp, Artificial Sequence
  ENSG00000131943_6 (sequence is synthesized)
gtgcagtgtcatgttccagaaattactgatgaagcagcatgtgttggtggcatgtgcactggcctgccatgacagccctctgactggccccccagtgaagagtaaaggcctgcctgccgc

SEQ ID NO: 295252 - DNA, 120 bp, Artificial Sequence
  ENSG00000131943_7 (sequence is synthesized)
aggcttcggaggcgtctgctgagtcctctcacccgcatgggtctggggaagtgatcacgctcagccgacggtctgaccacacttcatcctccccccggggccttctcatcttgggagatg

SEQ ID NO: 295253 - DNA, 120 bp, Artificial Sequence
  ENSG00000131943_8 (sequence is synthesized)
actcctcttcagagcacctgctgcaggactggatcccacccccctgcaggtcctggggtctcagggccttggagcagcccatgctggaatcatgtttacctcctagtgcaaccgtcccct

SEQ ID NO: 295254 - DNA, 120 bp, Artificial Sequence
  ENSG00000131943_9 (sequence is synthesized)
acccagggactgtcgaatggccccacggaggggacgggcggcctgctgagtgaagccacaaataccgagtggacttgaccccggcccccactaggctgcacacctagactcgccctgcca

SEQ ID NO: 295255 - DNA, 120 bp, Artificial Sequence
  ENSG00000131943_10 (sequence is synthesized)
tttttagtaaaaagtacaggtatatctcggagatattgtgggttcagttccagaccacctcggtaaagccaacatcacaataaagcaaggaagcgcattgttttagtttcccagtgcatc

SEQ ID NO: 295256 - DNA, 120 bp, Artificial Sequence
  ENSG00000131943_11 (sequence is synthesized)
taagtcatgtttactgcatattgcagtccactaaatgtgcaatagcattatgtctaacaaatgtacaaaccttaatttaaaaatatttactgttcaaaatgctgacacagaaacgcaaag

SEQ ID NO: 295257 - DNA, 120 bp, Artificial Sequence
  ENSG00000131943_12 (sequence is synthesized)
tgagcacatgctgttggaaaatggtgccaaatagacttgcctgatgccaggctgctacaaaccttcaatttaaaaaaaaaacacagtattcacaaagcatagtagaatgaggtatgcctg

SEQ ID NO: 295258 - DNA, 120 bp, Artificial Sequence
  ENSG00000131943_13 (sequence is synthesized)
tattgctctttctgaagtggtgtgatataaaccatctctaagaaatgtttctaccctaaagatttccccagtacagtcagctctccgtaactgtggtctccacatttagatccaaccagc

SEQ ID NO: 295259 - DNA, 120 bp, Artificial Sequence
  ENSG00000131943_14 (sequence is synthesized)
cttggataggaaatatttgaaaaaagaaattgcattggtactgaacacgtacagacctttttttcttgccattattccctaaacaatatggtgtagcatatttacatagcatttatattg

SEQ ID NO: 295260 - DNA, 120 bp, Artificial Sequence
  ENSG00000131943_15 (sequence is synthesized)
tatttggtattataagaaatctagagatgatttaaattatacaggaaggtgtgcgtaggttacgtgcaaacgctatgccattgcccatcagggacttgagcatcctcagatgtcggtgtc

SEQ ID NO: 295261 - DNA, 120 bp, Artificial Sequence
  ENSG00000131943_16 (sequence is synthesized)
tgagggttgaggttgcagtcctggaacccatcccccatggatactgaggcatagctgtactgtgtgttttcactttgctttcagaactacgacttgaatgtgatcgattacaataaatgt

SEQ ID NO: 295262 - DNA, 120 bp, Artificial Sequence
  ENSG00000131943_17 (sequence is synthesized)
ttttctaaaaagccattttcccacatattatgtgtaaaatatctctaatattcaaagtcttacaaatggaacaagagggaaggtaccagatttgtggctttaaagaatgcaagagtaggt

SEQ ID NO: 295263 - DNA, 120 bp, Artificial Sequence
  ENSG00000131943_18 (sequence is synthesized)
caggtgaggtggctcatgcttgtaatgtcggcacttttggaggccaaagtgggaggatcgcttgaggccaagagtttgaaactagcctgggcaatatagtgagacctccatctctacaaa

SEQ ID NO: 295264 - DNA, 120 bp, Artificial Sequence
  ENSG00000131943_19 (sequence is synthesized)
aaatgttattccttggtccccaggtcctggggcagggcagggacttggggctctcctctcaggccctggaggctcggagggaggcacttctgctgaggccctgcttataggaaagctcag

SEQ ID NO: 295265 - DNA, 120 bp, Artificial Sequence
  ENSG00000131943_20 (sequence is synthesized)
acccaacctgcttctccttttgcaacccccagacccagaggctccagagcaggctctggaacagaggaaatctggctccggcccacacattcaccaaatactgacgcagcacccttgacc

SEQ ID NO: 295266 - DNA, 120 bp, Artificial Sequence
  ENSG00000131943_21 (sequence is synthesized)
cacctccatgtgtgtaaggacgtcagggtgaattataacccatggtgattaaggaagggccgagcctttctcttgcagagcgattgctcttctgctggcctcgtctagcacaaatcaggt

SEQ ID NO: 295267 - DNA, 120 bp, Artificial Sequence
  ENSG00000131943_22 (sequence is synthesized)
gccctagcacaggccacactcctggagttaatgaagccactttaatcatttatatgccacttaagttgatgggggacagggcaggggtgggaaggaggggttgtctgtctgtgaaaactg

SEQ ID NO: 295268 - DNA, 120 bp, Artificial Sequence
  ENSG00000131943_23 (sequence is synthesized)
agtgtggcttttcttgttgaactgatcattcctgctcttcctgcaaataagtcctgcatacggaccctggaactaaaaatggaaaatcagagcatgccccctcccaattttgtatagctt

SEQ ID NO: 295269 - DNA, 120 bp, Artificial Sequence
  ENSG00000131943_24 (sequence is synthesized)
tagtgggctctaaagttgcccgtttttagtgtgaaggaaaaaacgttgatttgcagatatcgtgagaatgaaacctcaacaaagatgtttggttcagtgcttcaaagttgggggacactt

SEQ ID NO: 295270 - DNA, 120 bp, Artificial Sequence
  ENSG00000131943_25 (sequence is synthesized)
tttccatgttgaacaaatgccaacttctccggttgcttacagcaaatccttctggaacaatcggggctgaaattgagttgcctttgttaggcgattgggccccattcattcttactcgtg

SEQ ID NO: 295271 - DNA, 120 bp, Artificial Sequence
  ENSG00000131943_26 (sequence is synthesized)
catcaggtcctggtctgtgtcaggcccaggggacacaggtggtcccagctcagaggcccagtgtccactgcagcccctcccacagcctgcccacccctactgcagggaaaaatgcccagg

SEQ ID NO: 295272 - DNA, 120 bp, Artificial Sequence
  ENSG00000131943_27 (sequence is synthesized)
gaggagatggtccaactcctgatcagttttgtgtccgatggagcaggccttgctgagtgaagacactggaactagctgggtcctggggtgacttggaggctttgggcctaaaagggcagc

SEQ ID NO: 295273 - DNA, 120 bp, Artificial Sequence
  ENSG00000131943_28 (sequence is synthesized)
ctgaacctggagtcttatctcccccaggagccgaaagcacttttcttgatttcccccaggaaatcaagcgctgcttctcagctcctgtggttttagtatttatatatctgtatcttcttt

SEQ ID NO: 295274 - DNA, 120 bp, Artificial Sequence
  ENSG00000131943_29 (sequence is synthesized)
gtagaaatttatttatttttgaataagtaatacctgcctggtacaaaatttaaaaggtacgggagggcgcaagctgcaagggaaggcctgctcctatgccgaccccagaggcagccactg

SEQ ID NO: 295275 - DNA, 120 bp, Artificial Sequence
  ENSG00000131943_30 (sequence is synthesized)
ttaccaatttcatgtgtattcctttaactctgttttaaagtaagtctctgaaaactgttcatttccttttgtcagtatttgttgctgaaaacctagaaaaacccagaaaatataatgaaa

SEQ ID NO: 295276 - DNA, 120 bp, Artificial Sequence
  ENSG00000131943_31 (sequence is synthesized)
gaaataaaaactacaaatttcacaacccagaaaactgctggtaacagatttggtgtctttcctgcaattgttttaatgctatgtaggtacacatatatttttttctttttttcttttttt

SEQ ID NO: 295277 - DNA, 60 bp, Artificial Sequence
  ENSG00000131943_32 (sequence is synthesized)
acacgggctggagtgcagtagcgcgatcttggttcactgcaagctctgcctcctgggttc

SEQ ID NO: 295278 - DNA, 120 bp, Artificial Sequence
  ENSG00000131943_33 (sequence is synthesized)
aggcgtgagccactgcgcccggcctatgtatgtatatttctaacgtacttgccttcttatcctatatgcccctttgaacacctgtatcaatgaatgttaaataatatttttgatgtaatt

SEQ ID NO: 295279 - DNA, 120 bp, Artificial Sequence
  ENSG00000131943_34 (sequence is synthesized)
tatcaatgaatgttaaataatatttttgatgtaatttaaaattccttgtaaatatttgtaatggctgcataatattccactgtgcctaaccatgtgcctggtgtgaattccatttgtgga

SEQ ID NO: 295280 - DNA, 120 bp, Artificial Sequence
  ENSG00000131943_35 (sequence is synthesized)
tttttactactgtaatgctgaagtattacagtaatactgtgttaatattctctttattgaattctggtatatagtctttgggattcattcctcaaagtgaaattgctggatttaaaagta

SEQ ID NO: 295281 - DNA, 120 bp, Artificial Sequence
  ENSG00000131943_36 (sequence is synthesized)
caagagcaggcctggagacccgggagtgccttggggagagggtccccgccctgccgggagcccggccctcccggtgccggggtggacactgttagtgtagtcattgtccctatggagaaa

SEQ ID NO: 295282 - DNA, 120 bp, Artificial Sequence
  ENSG00000131943_37 (sequence is synthesized)
cggggagcccggggcctgccaggcccgggctgcagccgcgtctgatcgccgagcgcgccgcgtagacctccgctcccccagggggggctgtcggggggctgttaggtgcctggatgacaa

SEQ ID NO: 295283 - DNA, 120 bp, Artificial Sequence
  ENSG00000131943_38 (sequence is synthesized)
gtctccttacgccacccgcaacccaagccagggccccggtgacagcggcggggtgggccaggaccggggagggggtgcccagcagcgacccccggctccccctaaggccgggcgcagctc

SEQ ID NO: 295284 - DNA, 120 bp, Artificial Sequence
  ENSG00000131943_39 (sequence is synthesized)
actcagctgctgctatttgcttattcactaactgctgcctgtcctgtctgtgggaactttccaccgtctggatgctgtctgtcatacaggcgcttggagctgctgagctttcctgaaaag

SEQ ID NO: 295285 - DNA, 120 bp, Artificial Sequence
  ENSG00000131943_40 (sequence is synthesized)
cgcattgcattgaatcgcctgctttcttagtctcctctggcctttaacactttctcagacttgccttgttcacagccttgatagttttgaggagtactgggcagggggggctgtcggggg

SEQ ID NO: 295286 - DNA, 120 bp, Artificial Sequence
  ENSG00000131944_0 (sequence is synthesized)
gtgaacccggaaggtggcgcggccaccagtaacatgatctctagactgggacggtggggttcctgccggctgtattcgggccttggactggactgagaagctacggtggagaccatccat

SEQ ID NO: 295287 - DNA, 120 bp, Artificial Sequence
  ENSG00000131944_1 (sequence is synthesized)
ggaaaagaacccccctgatgatacgggccccgtgcacgtgcctttggggcatattgtggccaatgagaaatggcgcgggtcacagctggcgcaggagatgcaagggaaaattaagctcat

SEQ ID NO: 295288 - DNA, 120 bp, Artificial Sequence
  ENSG00000131944_2 (sequence is synthesized)
tttcgaggatggcttgacaccagacttttatctgtcgaacagatgctgcattctttatgtcaccgaagctgatttggtggcaggaaatggctacagaaagaggcttgttcgggttagaaa

SEQ ID NO: 295289 - DNA, 120 bp, Artificial Sequence
  ENSG00000131944_3 (sequence is synthesized)
ttccaataatcttaaaggaattgtagtcgttgaaaaaacccggatgagtgaacaatacttcccagccctacagaagtttactgtgctggaccttggaatggtgctgcttccagtggccag

SEQ ID NO: 295290 - DNA, 120 bp, Artificial Sequence
  ENSG00000131944_4 (sequence is synthesized)
ccagatggaagcatcctgcctcgtcatccagttggttcaagagcaaaccaaagagcccagtaagaaccctcttctcgggaagaaacgggccctgctgctgtctgagccttcgctccttcg

SEQ ID NO: 295291 - DNA, 120 bp, Artificial Sequence
  ENSG00000131944_5 (sequence is synthesized)
aaccgtgcagcagatcccaggagttggaaaagttaaagctccccttctcctccagaagtttccaagcatccagcaactgagtaatgcttccattggggaactggagcaggtggtcggaca

SEQ ID NO: 295292 - DNA, 120 bp, Artificial Sequence
  ENSG00000131944_6 (sequence is synthesized)
agcagtggcacagcagatccatgccttcttcacgcagcccaggtgagggctggcctcagggccacggcatcttctcctgagaccacaaacaccaggatcttgttttcagctttaaaaacc

SEQ ID NO: 295293 - DNA, 120 bp, Artificial Sequence
  ENSG00000131944_7 (sequence is synthesized)
caggatcttgttttcagctttaaaaaccaagagaatgggccgggtgcactggctcacgcctctaatctcagcactttgggaggccgaagacagcggatcatctgaggtcaggagttcaag

SEQ ID NO: 295294 - DNA, 120 bp, Artificial Sequence
  ENSG00000131944_8 (sequence is synthesized)
aacaaaaaaaaaaaaaaaagaaaaaggattttctccagcagcaaccagtgaaagatgaggcgaggcttgaatggagcccgtgggtcgtcctgccttagcgtctgagttcagcttgtgaag

SEQ ID NO: 295295 - DNA, 120 bp, Artificial Sequence
  ENSG00000131944_9 (sequence is synthesized)
tctgagttcagcttgtgaagttagtgggccgcagagggcactgccttcattctgctaagacgaaaagggctggtgggatcttcgcaagagagtcagggactcacactcagcaaaaagcat

SEQ ID NO: 295296 - DNA, 120 bp, Artificial Sequence
  ENSG00000131944_10 (sequence is synthesized)
tagggccgattttaatgtgcgaccttgacctgcatctgtcatggaaagtgccttctaaaaagcttcagtggtggatgtgaccatctgaaggaaacaaatgtacaaggaagcactgtgtat

SEQ ID NO: 295297 - DNA, 120 bp, Artificial Sequence
  ENSG00000131944_11 (sequence is synthesized)
cctaagccctgggttcccagagtttcacctgctgttcatcaggtctggccttcatatacccgtactgcgagggctgtttccaatgtaaataaataactgcgcaacagttccttcctcctt

SEQ ID NO: 295298 - DNA, 120 bp, Artificial Sequence
  ENSG00000131944_12 (sequence is synthesized)
tcctttgttcctccctccccccggcctttttttttggcagatgtacagtttgtttataatcactgcatatgtcttctgcacacagaaagtatgaagtctgaagttcccacttaaagttga

SEQ ID NO: 295299 - DNA, 61 bp, Artificial Sequence
  ENSG00000131944_13 (sequence is synthesized)
cacagaaagtatgaagtctgaagttcccacttaaagttgaaaactcaaaatcacaaggtca

SEQ ID NO: 295300 - DNA, 90 bp, Artificial Sequence
  ENSG00000131944_14 (sequence is synthesized)
aaagttgaaaactcaacatgcatgaggcagaacaggctgtgtttgtatatgaaaggcccaacaatggaaggatacaagaaaatgatggca

SEQ ID NO: 295301 - DNA, 120 bp, Artificial Sequence
  ENSG00000131944_15 (sequence is synthesized)
gaaaggcccaacaatggaaggatacaagaaaatgatggcagcagctgcatctagtgagggaagcaggggctggggatcaaaaggtacaaattgcccattcaaaaaatagacacaggccag

SEQ ID NO: 295302 - DNA, 120 bp, Artificial Sequence
  ENSG00000131951_0 (sequence is synthesized)
atcacagggccatgccctcggggctcaaggccagagaggctccgcgcttccaggacccgagagctaaagataatgaatgggagagagcgagactggaggaggtaacgaataagtccccac

SEQ ID NO: 295303 - DNA, 120 bp, Artificial Sequence
  ENSG00000131951_1 (sequence is synthesized)
caccttgcccataacgcgttgctttcagtcacgttccgcgaactggcgaagttataatattatgatcactgtttttaatggaagatgattgaaagtgaaaacctaaaccaagaagaaata

SEQ ID NO: 295304 - DNA, 120 bp, Artificial Sequence
  ENSG00000131951_2 (sequence is synthesized)
attaaagaactgtgtttgtgcaatggcttatcttatgagatggttggacaagaaggatcagatacatcaaagttggagatgtttttcttagggtatcctcgtatagttggattatcatta

SEQ ID NO: 295305 - DNA, 120 bp, Artificial Sequence
  ENSG00000131951_3 (sequence is synthesized)
tttcctaatttaacgagtcttaccattgttgctcaagatataaaagaaatttcagggttagagccttgtttacaacttaaagaactttggattgctgagtgctgcatagagaaaattgaa

SEQ ID NO: 295306 - DNA, 120 bp, Artificial Sequence
  ENSG00000131951_4 (sequence is synthesized)
ggtcttcaagaatgtagaaatttggaaaaactatatttatattttaataaaatttccaaaatagaaaatttagagaaattaatcaaattgaaggttctttggctgaaccacaatacaatt

SEQ ID NO: 295307 - DNA, 120 bp, Artificial Sequence
  ENSG00000131951_5 (sequence is synthesized)
aaaaatattgagggtttgcaaactttgaagaatttaaaagatctcaaccttgctggaaatctaataaatagcattggtcgatgtcttgactccaatgaacaactggaaagattaaacctt

SEQ ID NO: 295308 - DNA, 120 bp, Artificial Sequence
  ENSG00000131951_6 (sequence is synthesized)
tctggtaaccaaatatgttctttcaaggaactcacgaacttaaccaggctgccttgcttaaaggatttatgtctgaatgaccctcaatatacaaccaatccagtttgtcttctgtgtaat

SEQ ID NO: 295309 - DNA, 120 bp, Artificial Sequence
  ENSG00000131951_7 (sequence is synthesized)
tattccacacatgtattatatcatttgccttgccttcaaagatttgacacattggatgtgtcagcaaagcaaatcaaggaactggcagataccacagcaatgaaaaaaataatgtattat

SEQ ID NO: 295310 - DNA, 120 bp, Artificial Sequence
  ENSG00000131951_8 (sequence is synthesized)
aatatgcgtataaaaactcttcagaggcatcttaaagaagaccttgaaaaactgaatgatcaaaaatgcaaattacaaaagttgccagaagaacgagtaaaattattcagctttgtgaag

SEQ ID NO: 295311 - DNA, 120 bp, Artificial Sequence
  ENSG00000131951_9 (sequence is synthesized)
aaaactttggaacgagaactggctgaactcaagggctcgggcaaagggcacagtgatggatccaataacagtaaagtaactgatcctgaaacactgaagagttgtgaaactgtcactgaa

SEQ ID NO: 295312 - DNA, 120 bp, Artificial Sequence
  ENSG00000131951_10 (sequence is synthesized)
gaaccaagtcttcaacagaagatattggccaaactaaatgccttgaatgaaagggtaacattctggaacaaaaaactagatgaaattgaagcaatttatcatattgaagtaaaacaaaag

SEQ ID NO: 295313 - DNA, 120 bp, Artificial Sequence
  ENSG00000131951_11 (sequence is synthesized)
aagaaaagtcatggcttattgatcccacttttgttaattgagttagagactgtgggaaatttccattttgaagaaggcactcgatctgatgactggtttaatttctgctatgaattaatt

SEQ ID NO: 295314 - DNA, 120 bp, Artificial Sequence
  ENSG00000131951_12 (sequence is synthesized)
ctgtcacgtttttgtgcctgggacttcagaacatacggtattacaggagtaaaagtaaaacgcatcattaaagttaacaaccgtattctgagactaaaattcgaagagaaatttcaaaag

SEQ ID NO: 295315 - DNA, 120 bp, Artificial Sequence
  ENSG00000131951_13 (sequence is synthesized)
tttttggagaatgaagatatgcatgattcagagagctaccgaaggatgctggaatgccttttttatgtttttgatcctgaagtttcagtgaagaaaaagcatcttctacaaatacttgaa

SEQ ID NO: 295316 - DNA, 120 bp, Artificial Sequence
  ENSG00000131951_14 (sequence is synthesized)
aaaggattcaaagacagtgaaacaagcaagctgcctctcaaaaaagaagccatcattgtttctaacagtctaagtataagtgagtgtcccagaattgaatttttacagcaaaagcacaaa

SEQ ID NO: 295317 - DNA, 120 bp, Artificial Sequence
  ENSG00000131951_15 (sequence is synthesized)
gatgagaagaaaatctctcttaagcatgagctcttcagacatggcatcctcctcattacaaaagttttccttggccagagtgttcaggcccatgaaaaagaatccatcagtcaatccaac

SEQ ID NO: 295318 - DNA, 120 bp, Artificial Sequence
  ENSG00000131951_16 (sequence is synthesized)
tatccaatggttaattcagtgttcattcctcggaaatatttactaaattctgtcatgggacaaagaaactgtgattgcagtgttcggcagtgcaagtggtttgtctttgatcatgacctt

SEQ ID NO: 295319 - DNA, 120 bp, Artificial Sequence
  ENSG00000131951_17 (sequence is synthesized)
gttttgccggaatatgttgttgaatttgagtatattacaatggtcaaggcaccctctttattttctgtattcaacaatgttattctagaagaaagcaaaaaaaacccagaagtatcagta

SEQ ID NO: 295320 - DNA, 120 bp, Artificial Sequence
  ENSG00000131951_18 (sequence is synthesized)
ttttccaaggatttgaaatttgatgatgaagttataaaaatggagcccagaatcaaggcccgaccaaaactgattagtttggatgataaaacaatactttcccttgcaaagactagcgtt

SEQ ID NO: 295321 - DNA, 120 bp, Artificial Sequence
  ENSG00000131951_19 (sequence is synthesized)
tacagtcatattgtgagtctgaatctacatggaaacagcttgagtaaattgagagatctctccaagttaacaggacttcgaaaactaaacattagctttaatgaatttacctgtttagat

SEQ ID NO: 295322 - DNA, 120 bp, Artificial Sequence
  ENSG00000131951_20 (sequence is synthesized)
actgaagcacttagacttgagctggaatcaactgaaaaaatctggcaatgaaataaatatgttatgcaaacacaccacaagccttctcactcttgatattcaacataatccatggcaaaa

SEQ ID NO: 295323 - DNA, 120 bp, Artificial Sequence
  ENSG00000131951_21 (sequence is synthesized)
gccagccacattgaggctgagtgttattggcagattaaagactcttacccatttaaatggagtcttcatttctgaagaagaagcaacagcagctatgaaatttattgcaggaacaaggat

SEQ ID NO: 295324 - DNA, 120 bp, Artificial Sequence
  ENSG00000131951_22 (sequence is synthesized)
tactcagttatctctcttacggcattctagtactaaagaggagagaccacggatacttagtatatggccttctgccaaaattctgacgcaggtttcaaagttaggacctcatttacatct

SEQ ID NO: 295325 - DNA, 120 bp, Artificial Sequence
  ENSG00000131951_23 (sequence is synthesized)
gagtggaaactgctacttgaagataactgccttaaatttagatggacaacatctttttgaaatcacaaatttagaaaaattggaaaatttgaaatgggcatcattcagcaataataatct

SEQ ID NO: 295326 - DNA, 120 bp, Artificial Sequence
  ENSG00000131951_24 (sequence is synthesized)
cactaaaatggagggtctggaatcctgtattaacttggaagagctcacattagatggaaactgcatctcaaagatagaaggtatttccaagatgactaaattaactcgcctcagcataaa

SEQ ID NO: 295327 - DNA, 120 bp, Artificial Sequence
  ENSG00000131951_25 (sequence is synthesized)
taataatcttctcactggttgggaagagcatacctttgataacatgcttcatcttcactcgctttctcttgagaacaacagaatcacttcattgagtggtttacaaaaatcttttactct

SEQ ID NO: 295328 - DNA, 120 bp, Artificial Sequence
  ENSG00000131951_26 (sequence is synthesized)
tgttgagttatacataagcaataactatattgctgtcaatcaggagatgcacaatttaaagggtttatgcaacttggtcattctagacatgtgtgggaacatcattatatggaatcaaga

SEQ ID NO: 295329 - DNA, 120 bp, Artificial Sequence
  ENSG00000131951_27 (sequence is synthesized)
aaactaccggttgtttgtaatatttcatcttccagaactgaaagctttggatgggataccaattgaaccatcagagactgacagtgcaaaagatttgtttggtggtagacttacttctga

SEQ ID NO: 295330 - DNA, 120 bp, Artificial Sequence
  ENSG00000131951_28 (sequence is synthesized)
catgattgcagaacgacaaggacattccaacttcaaacaaatgcaagaactaaattggacttcatcatctattagaacagtggatttgattccagtcgaccaatttagaaatgtgtgtaa

SEQ ID NO: 295331 - DNA, 120 bp, Artificial Sequence
  ENSG00000131951_29 (sequence is synthesized)
tgtgaatctacagaacaatcatcttacctcattcagtggattaatctatctacctaatgtgaaggtcttatgccttaactataatcatattgaatcaatcatgcccagactaaagcctca

SEQ ID NO: 295332 - DNA, 120 bp, Artificial Sequence
  ENSG00000131951_30 (sequence is synthesized)
gactcacttaaccagtagacaactactgtaccagaaagtgccttcaagtggctatggacagcaaggaatttcaaaaacaaacagagatataatgagcagtgaaaatttgcctccaataat

SEQ ID NO: 295333 - DNA, 120 bp, Artificial Sequence
  ENSG00000131951_31 (sequence is synthesized)
gcacagtttagaagttcttcatttgggctacaatggaatttgtaatttgatccagctacaacttaacagactaagaaatttaaaattcctctttctacagggtaatgaaatcagccaagt

SEQ ID NO: 295334 - DNA, 120 bp, Artificial Sequence
  ENSG00000131951_32 (sequence is synthesized)
tgaagggcttgacaacttagtagtccttcaagaattggtagtggaccataaccgcatccgatcatttaatgacagtgcttttgccaaaccaagttctttattggcacttcacttggagga

SEQ ID NO: 295335 - DNA, 120 bp, Artificial Sequence
  ENSG00000131951_33 (sequence is synthesized)
aaacagactacgagaactgggcaaattacaatctttggtaaaactagagaaactcttcctaggatataataaaatccaggatatcacagaactggaaaaacttgacgttatctctactct

SEQ ID NO: 295336 - DNA, 120 bp, Artificial Sequence
  ENSG00000131951_34 (sequence is synthesized)
cagggagcttacagtgtatggcaatccaatttgtagaaaaatgctacatcgccacatgcttatatttcgactgcctaacttacagatgttagatggaagtcctgtgaattcagatgatag

SEQ ID NO: 295337 - DNA, 120 bp, Artificial Sequence
  ENSG00000131951_35 (sequence is synthesized)
ggcaaaagctgaatttcacctcgctgaactacaagcaaagaaaaactcgcttattcctgttacccactctcctatggatggcagatcatttggccaagtgaaaactcctcccatagagat

SEQ ID NO: 295338 - DNA, 120 bp, Artificial Sequence
  ENSG00000131951_36 (sequence is synthesized)
aacaaatgtacttctgcctagtggattcagccattacttgggatctgacgtcactttaactcctgaagttgaagacaaaaaaaacaagaatgctgggattctgacaaataatcctcggag

SEQ ID NO: 295339 - DNA, 120 bp, Artificial Sequence
  ENSG00000131951_37 (sequence is synthesized)
catccatgcagaaatagcttttcggcaactcagagggataagtatctctccatctcttttatcacatcagaatattgcatctcctactgcacaaatataccagagcaaccaagataagag

SEQ ID NO: 295340 - DNA, 120 bp, Artificial Sequence
  ENSG00000131951_38 (sequence is synthesized)
aagaatttttgggagcaactttccaagatcaaatcgaatgtaactgcctaaagagaaatgagcatacaccaagaaactcacctgtttagtagttgtacaaaaactagcggacagtggtca

SEQ ID NO: 295341 - DNA, 120 bp, Artificial Sequence
  ENSG00000131951_39 (sequence is synthesized)
gttaaaaaaaaaaaaaaaagataatcatgttacttaagttactgaagcacttcagttccatatgaagataatctattacccttcatgaacttgatttaatatcacctctcttaaactttc

SEQ ID NO: 295342 - DNA, 120 bp, Artificial Sequence
  ENSG00000131951_40 (sequence is synthesized)
agcaaagaaaaactcgagaagtaacattattagaatgctgtggtttgagaaaaaaagaggctggagggagaagggaaaccagctcagaggcttttagaataatccaagagagatgttatg

SEQ ID NO: 295343 - DNA, 120 bp, Artificial Sequence
  ENSG00000131951_41 (sequence is synthesized)
gtacacaccaggcctggggcgggagagggtttcctaccttctgctgcaagacagggattgggaaatcggagtggactcggacttgaatcggattgccccggaatccaccctctctctgtg

SEQ ID NO: 295344 - DNA, 120 bp, Artificial Sequence
  ENSG00000131951_42 (sequence is synthesized)
tctgggtagtaatttttttgttttttaacatgtattgtttctttatattatgaaagtaatgcatgtttattgcacagaatttggaaaatataaagaaaataaaaataagaataacaagtt

SEQ ID NO: 295345 - DNA, 120 bp, Artificial Sequence
  ENSG00000131966_0 (sequence is synthesized)
gccccgcgagcgccgagacttgttggccgcggagactgcgaccctcttctctcagtctgccttactaccatgccgctctacgagggcctggggagcggcggggagaagacggcggtcgtg

SEQ ID NO: 295346 - DNA, 120 bp, Artificial Sequence
  ENSG00000131966_1 (sequence is synthesized)
atcgacctgggagaggcctttaccaagtgtggatttgctggagaaactggtccaagatgtataattcctagtgtgataaaaagagctgggatgcctaagcctgtcagagttgttcagtat

SEQ ID NO: 295347 - DNA, 120 bp, Artificial Sequence
  ENSG00000131966_2 (sequence is synthesized)
aatatcaatacagaagaattatattcctacctaaaggaattcatccacatactatatttcaggcatctattggtgaatcccagagaccgccgagttgtgattatcgaatcggtattatgt

SEQ ID NO: 295348 - DNA, 120 bp, Artificial Sequence
  ENSG00000131966_3 (sequence is synthesized)
ccttctcacttcagagagacactcactcgtgttcttttcaaatattttgaggttccatctgtcttgcttgctccaagtcatctaatggctcttctgacgcttggaattaattctgccatg

SEQ ID NO: 295349 - DNA, 120 bp, Artificial Sequence
  ENSG00000131966_4 (sequence is synthesized)
gtcctagattgtggatatagggaaagcctggtgttacccatatatgaaggaatcccagttctaaattgttggggagcactacccctaggaggaaaagctcttcacaaagagttggaaact

SEQ ID NO: 295350 - DNA, 120 bp, Artificial Sequence
  ENSG00000131966_5 (sequence is synthesized)
caactattggaacaatgtactgttgacacaagtgttgctaaagaacagagccttccctcagtgatgggttcagttccggaaggtgtcttagaggacattaaagcgcgtacttgctttgta

SEQ ID NO: 295351 - DNA, 120 bp, Artificial Sequence
  ENSG00000131966_6 (sequence is synthesized)
agtgatctgaagcgaggactaaaaatccaagcagcaaaatttaatattgatgggaataatgagcgtccctccccacccccaaatgttgactatccattagatggagagaagattttacat

SEQ ID NO: 295352 - DNA, 120 bp, Artificial Sequence
  ENSG00000131966_7 (sequence is synthesized)
atccttggatcaatcagagattcagttgtggaaattctttttgaacaagataatgaagagcaatcagttgccactttaatattggattcccttatacagtgtccgatagacaccaggaag

SEQ ID NO: 295353 - DNA, 120 bp, Artificial Sequence
  ENSG00000131966_8 (sequence is synthesized)
caactagcagagaatttggtagtcataggtggcacttctatgttgccaggatttctccacagattgcttgcagaaataaggtatttggtagaaaaaccaaaatataaaaaagcacttggc

SEQ ID NO: 295354 - DNA, 120 bp, Artificial Sequence
  ENSG00000131966_9 (sequence is synthesized)
actaagacatttcgaattcatactccacctgcaaaagctaattgtgtggcctggttgggaggggctatttttggagcattacaagatatacttgggagccgttctgtttcaaaggaatat

SEQ ID NO: 295355 - DNA, 120 bp, Artificial Sequence
  ENSG00000131966_10 (sequence is synthesized)
gacgggccgtatacctgattggtgttctctcaataacccacctttggaaatgatgtttgatgtcgggaaaactcaaccacctctgatgaagagagcattttccactgagaaatagaagtt

SEQ ID NO: 295356 - DNA, 120 bp, Artificial Sequence
  ENSG00000131966_11 (sequence is synthesized)
tgattaaaaatcaaccttgcttcatatcaaatatttaaccaattataagcaaattgtacaaagtatgtaggatgttttgttatagaggactatagtggaagtgaaagcattctgtgttta

SEQ ID NO: 295357 - DNA, 120 bp, Artificial Sequence
  ENSG00000131966_12 (sequence is synthesized)
ctctttgcattaatatataattcttttgactttgtttctcttgtgtagtggtaaaatggtagctggtgcttattgagatttgctgtatttatatcaataaagtatagtaaagcagtttga

SEQ ID NO: 295358 - DNA, 66 bp, Artificial Sequence
  ENSG00000131966_13 (sequence is synthesized)
gtttgtaggctggagtgcagtggcacaatctctactcattgcaagctccgcctcccgggtttacgc

SEQ ID NO: 295359 - DNA, 87 bp, Artificial Sequence
  ENSG00000131966_14 (sequence is synthesized)
accagcctatgttgcttgtctttcaaaaagaacagtatttctccacagttcacataacctgttctgggctcattaattgtgtttcca

SEQ ID NO: 295360 - DNA, 120 bp, Artificial Sequence
  ENSG00000131966_15 (sequence is synthesized)
gttcacataacctgttctgggctcattaattgtgtttccagcagttactccatttaaagcataaatagtgttaaccattaccagttatttcaaatactaacatgggtccatttaaaaaaa

SEQ ID NO: 295361 - DNA, 120 bp, Artificial Sequence
  ENSG00000131966_16 (sequence is synthesized)
atatttattttggtacttgggtgtccatattataataatgttgtttttccagaaatatatttgatctttggactgagaatgtttggtaacatagtcaagcatttgttaagccaagtgtgg

SEQ ID NO: 295362 - DNA, 120 bp, Artificial Sequence
  ENSG00000131966_17 (sequence is synthesized)
aaatgttcactttttaactttacagtttttttaatgagcaattctacatttctaagaaaaaagatacttcatttttatataaggttacaactgctttataaaaatgtattcacaatgtca

SEQ ID NO: 295363 - DNA, 120 bp, Artificial Sequence
  ENSG00000131966_18 (sequence is synthesized)
ttaatctttgcgtttgtgctttatatcttctcagggcagaggttcttgaaatatgtactcaatcatttaacttttattttattttttcatttgtttttaatgaactacctcttgttgaaa

SEQ ID NO: 295364 - DNA, 120 bp, Artificial Sequence
  ENSG00000131966_19 (sequence is synthesized)
ttaaaaggcatgagaaaagatgaaattaatagtatattttatttaacccaatgtattcaaaatattccaatattccatcaatacaaaaattataatgaggtattttagtgaggttttttg

SEQ ID NO: 295365 - DNA, 120 bp, Artificial Sequence
  ENSG00000131966_20 (sequence is synthesized)
gtattaaaaccttctaaatttggtgtgtagcttagtcttagagcacatctcaattcagactagccatatttcatgtattaagtagctgcacaggcctagtggctactttatcagatgccc

SEQ ID NO: 295366 - DNA, 120 bp, Artificial Sequence
  ENSG00000131966_21 (sequence is synthesized)
cagctgtatctaatgaattgtgtgtggtcatgtgcttatgtgtatttttattctgttttctttgatgaagaacatgaaaaaaaacttactctttgatttttctgtaactatgttaaaaat

SEQ ID NO: 295367 - DNA, 120 bp, Artificial Sequence
  ENSG00000131966_22 (sequence is synthesized)
aagaaataaaaatttgtcactaaagcatatttagaacagtactgcagaaggtgaggaaaatatcaaggaaaccacattttatctcctaaaatagtagtatccttgactactctatagata

SEQ ID NO: 295368 - DNA, 120 bp, Artificial Sequence
  ENSG00000131966_23 (sequence is synthesized)
gcttttgaaataaaaagagaagcaataaaattcttaccaatttttagggaatctttcttctctttttttttgttggtaggtactcaaaacttaaactaataaaagcccttattttgtctc

SEQ ID NO: 295369 - DNA, 120 bp, Artificial Sequence
  ENSG00000131966_24 (sequence is synthesized)
ttcttccctaaaacaaaattaaatttttctgttagactttttgagaaaattatagtagttgtatttttaaaattttttctaaattgaaaaatagaaatgtgaaggcaatttaatagactg

SEQ ID NO: 295370 - DNA, 120 bp, Artificial Sequence
  ENSG00000131966_25 (sequence is synthesized)
aataatgaggtaagtttaaaaaaaaaaaaggcatctttttgcaaaggttacaacatgtgtggacttatgtttatgatatttatatttcagcgtccctccccacccccaaatgttgactat

SEQ ID NO: 295371 - DNA, 120 bp, Artificial Sequence
  ENSG00000131966_26 (sequence is synthesized)
ccattagatggagagaagattttacatatccttggatcaatcagattcagttgtggaaattctttttgaacaagataatgaagagcaatcagttgccactttaatattggattcccttat

SEQ ID NO: 295372 - DNA, 120 bp, Artificial Sequence
  ENSG00000131966_27 (sequence is synthesized)
gtttataaaatccaaaggaatagatgatgagcatgttcacttgaatagaattgttttaactggggtgtaggtacactctgttcaattataataactagccataataaggtctccttttct

SEQ ID NO: 295373 - DNA, 120 bp, Artificial Sequence
  ENSG00000131966_28 (sequence is synthesized)
attacagtgtattttggttattgagtgaatttatataaatcaacaaactagttcttaattactctcataaaatggttgagtaggtatcaccatataaattaatataatgttcctgtgaat

SEQ ID NO: 295374 - DNA, 120 bp, Artificial Sequence
  ENSG00000131966_29 (sequence is synthesized)
tttttcaaatatatttggatataaggcaaataccttcaaataatgacactcattccggttttgttgtattgattttgttattttctaggttccatctgtcttgcttgctccaagtcatct

SEQ ID NO: 295375 - DNA, 120 bp, Artificial Sequence
  ENSG00000131969_0 (sequence is synthesized)
gggacacggcgcgggatggacgcgcaggactgccaggcggccgcatcgcccgagccgcccgggcccccagcccgtagctgcgtggccgcctggtgggacatggtcgaccgcaacctgcgg

SEQ ID NO: 295376 - DNA, 120 bp, Artificial Sequence
  ENSG00000131969_1 (sequence is synthesized)
cacacagtccccagctgccggggggaagatgccaaggggaaggactgttgctggtatgaagcagcccttcgtgatgggaacccaattattgtttatcttcatggcagtgcagaacacagg

SEQ ID NO: 295377 - DNA, 120 bp, Artificial Sequence
  ENSG00000131969_2 (sequence is synthesized)
gcagcttcgcacagactgaagctggtaaaggtgctgagtgatggtggctttcatgtcttgtctgttgactacagaggatttggggactctacaggtaagcccacagaggagggactgact

SEQ ID NO: 295378 - DNA, 120 bp, Artificial Sequence
  ENSG00000131969_3 (sequence is synthesized)
acggatgccatttgtgtctatgagtggaccaaggcaagaagtggcatcactcccgtgtgtctctggggccactctctgggtacaggagttgcaacaaatgctgcaaaagtgctagaagaa

SEQ ID NO: 295379 - DNA, 120 bp, Artificial Sequence
  ENSG00000131969_4 (sequence is synthesized)
aaaggatgcccagttgatgctattgtcttggaagctccatttaccaacatgtgggttgcaagtatcaattatcccttgttaaagatttaccggaacattccaggatttttacgtacactt

SEQ ID NO: 295380 - DNA, 120 bp, Artificial Sequence
  ENSG00000131969_5 (sequence is synthesized)
atggatgccctgagaaaagacaaaataatctttcctaatgatgaaaatgttaaattcctttcttctcctcttctcatcttacatggagaggatgacaggacagtgcctttggagtatggg

SEQ ID NO: 295381 - DNA, 120 bp, Artificial Sequence
  ENSG00000131969_6 (sequence is synthesized)
acaaagagagggtcaagatggttatctttcctcctggcttccaacacaacctgctttgtaaaagccccacactgttaataaccgtgagagatttcctgagcaagcagtggtcatgagtct

SEQ ID NO: 295382 - DNA, 120 bp, Artificial Sequence
  ENSG00000131969_7 (sequence is synthesized)
gggaggagtggaaatcttcaatgaagacttggcccaaacaccacctgtgatgtatattgttctaatgtaaaattgtactgggctggtcggatgagctgaggccattgacttctctacaaa

SEQ ID NO: 295383 - DNA, 120 bp, Artificial Sequence
  ENSG00000131969_8 (sequence is synthesized)
tcacttgccattttaacaacagaaagtacgaatgttaggcagtatggaatgttcttatttagcttatcataatctactttgtaaaacatgctgaaacctcactgtggagaaccagaattt

SEQ ID NO: 295384 - DNA, 120 bp, Artificial Sequence
  ENSG00000131969_9 (sequence is synthesized)
ggtaaaatctagatcctatctaaaaatatgtagttattaaacattctgtggatatttgtgaataaggtagttgctatggtccgaatatctgggcctgcccccccaaattatgctgaaacc

SEQ ID NO: 295385 - DNA, 120 bp, Artificial Sequence
  ENSG00000131969_10 (sequence is synthesized)
taatcaccagtgtgatggtaataggaggtgggactgagctctgatgaatgagattagtgcccttataaattatgaccaaaagagctcttcactcctcctaccatttgaggatacagtgag

SEQ ID NO: 295386 - DNA, 120 bp, Artificial Sequence
  ENSG00000131969_11 (sequence is synthesized)
ggatacagtgagaagccttcatctatgaaccacaaagtagccctcatcagacactgaatcagccagtgccttgctcttggacttcccagcccccagaactgtgagaaataaatttctgtt

SEQ ID NO: 295387 - DNA, 80 bp, Artificial Sequence
  ENSG00000131969_12 (sequence is synthesized)
ccgccggggcgggaaggtcgcgggcggctgctccggactgcagctcccgcggcggtggcggcgtatcgggacacggcgcg

SEQ ID NO: 295388 - DNA, 120 bp, Artificial Sequence
  ENSG00000131969_13 (sequence is synthesized)
ggatggacgcgcaggactgccaggcggccgcatcgcccgagccgcccgggcccccagcccgtagctgcgtggccgcctggtgggacatggtcgaccgcaacctgcgatattttccacact

SEQ ID NO: 295389 - DNA, 120 bp, Artificial Sequence
  ENSG00000131969_14 (sequence is synthesized)
cctgttcaatgctcggaagaaaaattgctgctctgtatgacagctttactagtaaatccttaaaagaacacgttttccttcctctgatagacatgctaatttattttaattttttcaaag

SEQ ID NO: 295390 - DNA, 67 bp, Artificial Sequence
  ENSG00000131969_15 (sequence is synthesized)
ccatcctcctgctctttgctccatgagaaaaatccacctatgacctactcccagagcccctggaact

SEQ ID NO: 295391 - DNA, 120 bp, Artificial Sequence
  ENSG00000131969_16 (sequence is synthesized)
cctcggaagccccctagaccatcacagacgccgagcttccggtaactctcacagtgcaagatttaccggaacattccaggatttttacgtacacttatggatgccctgagaaaagacaaa

SEQ ID NO: 295392 - DNA, 120 bp, Artificial Sequence
  ENSG00000131969_17 (sequence is synthesized)
gggacacggcgcgggatggacgcgcaggactgccaggcggccgcatcgcccgagccgcccgggcccccagcccgtagctgcgtggccgcctggtgggacatggtcgaccgcaacctgcgt

SEQ ID NO: 295393 - DNA, 120 bp, Artificial Sequence
  ENSG00000131969_18 (sequence is synthesized)
aaatctacagctttgaatggccatcctttgagtctctttctgtcgcttgcagctctatgaaattgcacgcaatgcatacaggaacaaagagagggtcaagatggttatctttcctcctgg

SEQ ID NO: 295394 - DNA, 120 bp, Artificial Sequence
  ENSG00000131969_19 (sequence is synthesized)
aagagagatttctaaatttaatgtggaccaatttaccaatatttttctttatggtaacttttatgtcatttataataaaactctgcttacccaaagattatcaagatactcttctatgtt

SEQ ID NO: 295395 - DNA, 120 bp, Artificial Sequence
  ENSG00000131969_20 (sequence is synthesized)
gtcttctggaaactctattttaccttttacatgtaaagttataatccacaggtttagatttttgtatggaggcaggggtccacatgagtgtctaattggtctagagtcatttattaaatg

SEQ ID NO: 295396 - DNA, 120 bp, Artificial Sequence
  ENSG00000131969_21 (sequence is synthesized)
gaccttccccaccactatgcagtgctaatgtttgcatatatcagtgtctatacatatagagagaggtctggtggtaggttctcatttctctccattgtctatctgtcaatcttaatatac

SEQ ID NO: 295397 - DNA, 120 bp, Artificial Sequence
  ENSG00000131969_22 (sequence is synthesized)
tatggtcttttaattactatagctttataatatgtcttgatatctggttgtataagttcctcagctttgtcttcttattcaggattgtcttggctattcttaacgctttgcatttcggta

SEQ ID NO: 295398 - DNA, 120 bp, Artificial Sequence
  ENSG00000131969_23 (sequence is synthesized)
ttggtatctttctaacattgagtcttcaaattcatgagtattgtgttttatttattatttatttatttaattttacatttatttctcatttaggttttgtttagtttcagttttaggtca

SEQ ID NO: 295399 - DNA, 120 bp, Artificial Sequence
  ENSG00000131969_24 (sequence is synthesized)
ctcctagaagcaaagcctgagacagagatttggtgtgtttgatttattgaggaaatgttcttcaggaaaaaatccaaaagggaatgagggtagtagcactggaaagggggaagagcagaa

SEQ ID NO: 295400 - DNA, 120 bp, Artificial Sequence
  ENSG00000131969_25 (sequence is synthesized)
caaggacgtgacctcaggcaaagtctagctttggcctgattcaggcggggtgctaagctttgaagcaaagggcctgttgtttctgccctccgctaaggtaggcagtggaggaggggcggg

SEQ ID NO: 295401 - DNA, 120 bp, Artificial Sequence
  ENSG00000131969_26 (sequence is synthesized)
aggatggcgtaacctcttaggagtgatggcttctgtcatctaagaataaggagaagcagccaacactcacagcagaagttaattaattttgtcagtcttttcaaagaaccagctttgact

SEQ ID NO: 295402 - DNA, 120 bp, Artificial Sequence
  ENSG00000131969_27 (sequence is synthesized)
ttatcttctgtgttatatggtttctatatttttaatttctggttttacctgtattattccctttctcatatgttctttggatttaagttgttatttaaaaatttctttagatagtactta

SEQ ID NO: 295403 - DNA, 120 bp, Artificial Sequence
  ENSG00000131969_28 (sequence is synthesized)
ataccatctaataatttatttttactatttttttctaatttatgtactaaggcatacttcacctaaaccacacttcagccgcaaccaaattttgaagtgtgttctaattatcatttagtt

SEQ ID NO: 295404 - DNA, 120 bp, Artificial Sequence
  ENSG00000131969_29 (sequence is synthesized)
caaaatattttataatattattgtgatttcctccttgactatatggattatttagaagtatgattcataacttctatgcatttgggcatttgattatgatttttattgatttttacctta

SEQ ID NO: 295405 - DNA, 120 bp, Artificial Sequence
  ENSG00000131969_30 (sequence is synthesized)
aatctctcaagatccaagaatatactgtgtatgattttagtcttttgaaatttgttgagactcactttgtgtaccaatgtatggtcaattttggcaaattttccatatgcttgaaaagaa

SEQ ID NO: 295406 - DNA, 120 bp, Artificial Sequence
  ENSG00000131969_31 (sequence is synthesized)
aattttccatatgcttgaaaagaatgtgttctgctgtttttcatgcagtgttctatgtacgtcgattgaatcgggattattaaccatgcttaaatttgtcaggcctctgagcccaagcca

SEQ ID NO: 295407 - DNA, 60 bp, Artificial Sequence
  ENSG00000131969_32 (sequence is synthesized)
ataaatggccggtccttgccttaagtgatgacactaccttgtgaaagtccttttcctggc

SEQ ID NO: 295408 - DNA, 120 bp, Artificial Sequence
  ENSG00000131979_0 (sequence is synthesized)
cctgtggccgctcccggctcggagtgtgatctaagcaggttgcgtaccttcctcaggtgactccggccacagcccattgtccgcggccaccggcggagtttagccgcagacctcgaagcg

SEQ ID NO: 295409 - DNA, 120 bp, Artificial Sequence
  ENSG00000131979_1 (sequence is synthesized)
ccccggggtccttcccgaacggcagcggctgcggcgggtccatggagaagggccctgtgcgggcaccggcggagaagccgcggggcgccaggtgcagcaatgggttccccgagcgggatc

SEQ ID NO: 295410 - DNA, 120 bp, Artificial Sequence
  ENSG00000131979_2 (sequence is synthesized)
cccgggcccagcaggccggcggagaagcccccgcggcccgaggccaagagcgcgcagcccgcggacggctggaagggcgagcggccccgcagcgaggaggataacgagctgaacctccct

SEQ ID NO: 295411 - DNA, 120 bp, Artificial Sequence
  ENSG00000131979_3 (sequence is synthesized)
acctccctaacctggcagccgcctactcgtccatcctgagctcgctgggcgagaacccccagcggcaagggctgctcaagacgccctggagggcggcctcggccatgcagttcttcacca

SEQ ID NO: 295412 - DNA, 120 bp, Artificial Sequence
  ENSG00000131979_4 (sequence is synthesized)
agggctaccaggagaccatctcagatgtcctaaacgatgctatatttgatgaagatcatgatgagatggtgattgtgaaggacatagacatgttttccatgtgtgagcatcacttggttc

SEQ ID NO: 295413 - DNA, 120 bp, Artificial Sequence
  ENSG00000131979_5 (sequence is synthesized)
catttgttggaaaggtccatattggttatcttcctaacaagcaagtccttggcctcagcaaacttgcgaggattgtagaaatctatagtagaagactacaagttcaggagcgccttacaa

SEQ ID NO: 295414 - DNA, 120 bp, Artificial Sequence
  ENSG00000131979_6 (sequence is synthesized)
aacaaattgctgtagcaatcacggaagccttgcggcctgctggagtcggggtagtggttgaagcaacacacatgtgtatggtaatgcgaggtgtacagaaaatgaacagcaaaactgtga

SEQ ID NO: 295415 - DNA, 120 bp, Artificial Sequence
  ENSG00000131979_7 (sequence is synthesized)
ccagcacaatgttgggtgtgttccgggaggatccaaagactcgggaagagttcctgactctcattaggagctgagcttcattcagtgtgtgtctgcagaaccatagcttccacgcacctg

SEQ ID NO: 295416 - DNA, 120 bp, Artificial Sequence
  ENSG00000131979_8 (sequence is synthesized)
accaaagcgtatcgtaccaacgatctgtgaaaatgcactggaagcttctggtcccggtttcctttgtggtctatgtgggtcttgtcctcattgtaactccgtatagatggtataggtatt

SEQ ID NO: 295417 - DNA, 120 bp, Artificial Sequence
  ENSG00000131979_9 (sequence is synthesized)
ttaatcctggaagctgttgccttattaatgattatcttaaaatttcctccattggggcagcgtgggccaaattaaaacaaacaaaaccgcaactcctccacagaaacacaaacacagtta

SEQ ID NO: 295418 - DNA, 120 bp, Artificial Sequence
  ENSG00000131979_10 (sequence is synthesized)
ttccatgaagtttagtatttggttgacatagtgctcttcaaattcatcccattaccctaaaagtaataactttgatgcttgctttaactttagtcccatctctgccactttgatgctatt

SEQ ID NO: 295419 - DNA, 120 bp, Artificial Sequence
  ENSG00000131979_11 (sequence is synthesized)
tgggttatgatggggcaagatggcagaggtattgggtttttttgtttttttccattcctctctacttctgtttcctagctttttctttctggagtttaagtacagtgatggttggcttga

SEQ ID NO: 295420 - DNA, 120 bp, Artificial Sequence
  ENSG00000131979_12 (sequence is synthesized)
gtacctttttaaatctagcccagtataaacattagcctgcttaatatttagacatttataggtagaattctgagcactcaactcatgtttggcattttaaagtaaaaacaagtgtgactt

SEQ ID NO: 295421 - DNA, 120 bp, Artificial Sequence
  ENSG00000131979_13 (sequence is synthesized)
cgaggaccaaagaaattgtcagctatacatttatctttatgaactcatttatattcctttttaatgactcgttgttctaacatttcctagaagtgttcttataaaggtctaatgtatcca

SEQ ID NO: 295422 - DNA, 120 bp, Artificial Sequence
  ENSG00000131979_14 (sequence is synthesized)
caggctgttgtcttattagtaaatgcaaagtaatgactttgtctgttttactctagtctttagtacttcaaaattaccttttcatatccatgatcttgagtccatttgggggatttttaa

SEQ ID NO: 295423 - DNA, 120 bp, Artificial Sequence
  ENSG00000131979_15 (sequence is synthesized)
gaatttgatgtatttcaatacactgttcaaaattaaattgtttaattttatgtatgagtatgtatgttcctgaaggtggtcctatttaaattattaaactattgtaactttgttcttgtg

SEQ ID NO: 295424 - DNA, 120 bp, Artificial Sequence
  ENSG00000131979_16 (sequence is synthesized)
tagcattgtctgtctgtccggtcttgtttgtacattccattttcaattgttacagatgtgaactttattccttgtcactaattatatttaaaattatttctaggaagtcaaataaatata

SEQ ID NO: 295425 - DNA, 120 bp, Artificial Sequence
  ENSG00000131979_17 (sequence is synthesized)
ataaagggttgagccctctactttcttcttgccacctttttgtggcaatattaaagtgaactgctaatagtgtaagtacgtgcacaaaaccactgccagataaccagaggggcctgggaa

SEQ ID NO: 295426 - DNA, 120 bp, Artificial Sequence
  ENSG00000131979_18 (sequence is synthesized)
gggagaagaattagtgtatttttttcaaatagtacagtaatttgcctcataagcataggagcattgggaatgagagggaactgtgcccagtatactgttttttttcttcctccaataaaa

SEQ ID NO: 295427 - DNA, 120 bp, Artificial Sequence
  ENSG00000131979_19 (sequence is synthesized)
gtggtgtagtgccgaaagtgctaaaatatttagtgcggtattgctctgtgaattcaagttcaacagacttcactttggtcatgtttattaaaccaccagtgacatttaaaaatatatttt

SEQ ID NO: 295428 - DNA, 120 bp, Artificial Sequence
  ENSG00000131979_20 (sequence is synthesized)
ggaatgtctatgtttttgattttactgtgagttaaaaaggcacatttctaccttctattgtttttaaattcaagaatagggaattagttcctggtgttgtttacgagtgtattctcgtgt

SEQ ID NO: 295429 - DNA, 120 bp, Artificial Sequence
  ENSG00000131979_21 (sequence is synthesized)
caacatacagggatttagacatttaactctctgtgccttgataagaatatcatttagagtgtagatacttttgcctttttaaaaaagccattattttatgagacttagtactcacactgc

SEQ ID NO: 295430 - DNA, 120 bp, Artificial Sequence
  ENSG00000131979_22 (sequence is synthesized)
aaataactagtcagctcagttttaactttataggtttattgagtttcctttgtgtgatccatgtagatgcctcaaaatgtttcttcttcttcttttttttaatcttataagatatttttc

SEQ ID NO: 295431 - DNA, 120 bp, Artificial Sequence
  ENSG00000131979_23 (sequence is synthesized)
taagtatttccagaaacatttgagagtgcccatcattttcaggtctgcagaaccatagcttccacgcacctgaacgagcacagaatgaactgacggtggaagacattatgagctgtgtcc

SEQ ID NO: 295432 - DNA, 120 bp, Artificial Sequence
  ENSG00000131979_24 (sequence is synthesized)
atcacggaagccttgcggcctgctggagtcggggtagtggttgaagcaacgaagtcaaataaatataataaagggttgagccctctactttcttcttgccacctttttgtggcaatatta

SEQ ID NO: 295433 - DNA, 120 bp, Artificial Sequence
  ENSG00000131981_0 (sequence is synthesized)
gcccgcagcacctcctcgccagcagccgtccggagccagccaacgagcggaaaatggcagacaatttttcgctccatgatgcgttatctgggtctggaaacccaaaccctcaaggatggc

SEQ ID NO: 295434 - DNA, 120 bp, Artificial Sequence
  ENSG00000131981_1 (sequence is synthesized)
ctggcgcatgggggaaccagcctgctggggcagggggctacccaggggcttcctatcctggggcctaccccgggcaggcacccccaggggcttatcctggacaggcacctccaggcgcct

SEQ ID NO: 295435 - DNA, 120 bp, Artificial Sequence
  ENSG00000131981_2 (sequence is synthesized)
accctggagcacctggagcttatcccggagcacctgcacctggagtctacccagggccacccagcggccctggggcctacccatcttctggacagccaagtgccaccggagcctaccctg

SEQ ID NO: 295436 - DNA, 120 bp, Artificial Sequence
  ENSG00000131981_3 (sequence is synthesized)
aaacagaattgctttagatttccaaagagggaatgatgttgccttccactttaacccacgcttcaatgagaacaacaggagagtcattgtttgcaatacaaagctggataataactgggg

SEQ ID NO: 295437 - DNA, 120 bp, Artificial Sequence
  ENSG00000131981_4 (sequence is synthesized)
aagggaagaaagacagtcggttttcccatttgaaagtgggaaaccattcaaaatacaagtactggttgaacctgaccacttcaaggttgcagtgaatgatgctcacttgttgcagtacaa

SEQ ID NO: 295438 - DNA, 120 bp, Artificial Sequence
  ENSG00000131981_5 (sequence is synthesized)
tcatcgggttaaaaaactcaatgaaatcagcaaactgggaatttctggtgacatagacctcaccagtgcttcatataccatgatataatctgaaaggggcagattaaaaaaaaaaaaaga

SEQ ID NO: 295439 - DNA, 120 bp, Artificial Sequence
  ENSG00000131981_6 (sequence is synthesized)
atctaaaccttacatgtgtaaaggtttcatgttcactgtgagtgaaaatttttacattcatcaatatccctcttgtaagtcatctacttaataaatattacagtgaattacctgtctcaa

SEQ ID NO: 295440 - DNA, 120 bp, Artificial Sequence
  ENSG00000131981_7 (sequence is synthesized)
ggaaaatggcagacaatttttcggcccagggcggaagggagtggactctgccggcaggagctgagaaatcctctgagtagcgggaagtgcgctccatgatgcgttatctgggtctggaaa

SEQ ID NO: 295441 - DNA, 120 bp, Artificial Sequence
  ENSG00000131981_8 (sequence is synthesized)
tgctgataacaattctgggcacggtgaagcccaatgcaaacaggtaaggagagcaaaattaacaagtctactctatttgtagattggtttttgaataaagaatggcctactttttttctt

SEQ ID NO: 295442 - DNA, 61 bp, Artificial Sequence
  ENSG00000131981_9 (sequence is synthesized)
ctcctaccatgcccagctaacttttgtattttctgtagagacggggtttcaccatgttggc

SEQ ID NO: 295443 - DNA, 120 bp, Artificial Sequence
  ENSG00000131981_10 (sequence is synthesized)
tggcaatctagctggatagcatccctgccccttgaagagatgtttttgtggcgccacactactgacttaggcataatgcctagagatggattagaactgcacaatgaactagtggtgagg

SEQ ID NO: 295444 - DNA, 120 bp, Artificial Sequence
  ENSG00000131981_11 (sequence is synthesized)
ttcagtttaatggaaattggtgaaagcttttaggataaaatgataatctttgtttctttcaggaaaatggcagacaatttttcggtaagtgttttatgcctgtttcttccccttgatcag

SEQ ID NO: 295445 - DNA, 120 bp, Artificial Sequence
  ENSG00000131981_12 (sequence is synthesized)
ctccacatggttgagggttgggggttttgtttttaccatgactttcccttttcactctcccactgcgtggcttcccctggactcatttgtccaatgagggcttgcaagctggagccttgt

SEQ ID NO: 295446 - DNA, 120 bp, Artificial Sequence
  ENSG00000131981_13 (sequence is synthesized)
ttttccagcagcagatttgggaagaaagccaggcagagcgaggcctgggactcactcacagtaaccctttcaccaaaaggcccagggcggaagggagtggactctgccggcaggagctga

SEQ ID NO: 295447 - DNA, 120 bp, Artificial Sequence
  ENSG00000131981_14 (sequence is synthesized)
gaaatcctctgagtagcgggaagtgcggtacagtctgggcattctgatgtttgtgattgtttttctcacggtgatgaaaaagtatgtgctataagtagaggagcgctaactcctgacttg

SEQ ID NO: 295448 - DNA, 120 bp, Artificial Sequence
  ENSG00000131981_15 (sequence is synthesized)
agctaattatgaaaatgcagccctccctgatctgagacgttgggaggcaagaataaagtgaaaaagtatatgtaatcccaacatctaattttagtcttagaaactcaaactattaataag

SEQ ID NO: 295449 - DNA, 120 bp, Artificial Sequence
  ENSG00000131981_16 (sequence is synthesized)
tggaaaaagtttaatgatatgcatgtaatgcctttgccatattcctctccttcttagatcacatattcctattttcctgaaaattctgcttttgagaatgctttctgtcccgtaattgtg

SEQ ID NO: 295450 - DNA, 120 bp, Artificial Sequence
  ENSG00000132000_0 (sequence is synthesized)
gagatggggggcggtggtggccacagcagaggctccaggaggtgaccgcctggtttccattaggaagtcctggtcagcagcttgggcgagatggcagagtcagggctggccatgtggccg

SEQ ID NO: 295451 - DNA, 120 bp, Artificial Sequence
  ENSG00000132000_1 (sequence is synthesized)
agcctgctgctgctcctgctgttgccggggcccccgcccgtcgccggcttggaagacgctgccttcccccacctgggggagagcttgcagcccctgccccgggcctgtcccctgcgctgc

SEQ ID NO: 295452 - DNA, 120 bp, Artificial Sequence
  ENSG00000132000_2 (sequence is synthesized)
tcctgcccccgagtcgacactgtggactgtgatggcttggaccttcgagtgttcccggacaacatcaccagagccgctcagcacctctccctgcagaacaaccagctccaggaactcccc

SEQ ID NO: 295453 - DNA, 120 bp, Artificial Sequence
  ENSG00000132000_3 (sequence is synthesized)
tacaatgagctgtcccgcctcagtggcctgcgaaccctcaacctccacaacaacctcatctcctccgaaggcctgcctgacgaggccttcgagtccctcacccagctgcagcacctctgc

SEQ ID NO: 295454 - DNA, 120 bp, Artificial Sequence
  ENSG00000132000_4 (sequence is synthesized)
gtggctcacaacaagctctcagtggcccctcagtttctgccccggtccctccgtgtcgcggatctggctgccaaccaagtgatggagatcttccccctcacctttggggagaagccggca

SEQ ID NO: 295455 - DNA, 120 bp, Artificial Sequence
  ENSG00000132000_5 (sequence is synthesized)
ctcaggtccgtgtacctccacaacaaccagctgagcaacgctggcctgccccccgacgccttccgcggctccgaggccatcgccaccctcagcctctccaacaaccagctcagctacctg

SEQ ID NO: 295456 - DNA, 120 bp, Artificial Sequence
  ENSG00000132000_6 (sequence is synthesized)
ccgcccagcctgccgccctcactcgagcggctccacctgcagaacaatctcatctccaaggtgccccgaggagccctgagccgccagactcaactccgtgagctctacctccagcacaac

SEQ ID NO: 295457 - DNA, 120 bp, Artificial Sequence
  ENSG00000132000_7 (sequence is synthesized)
cagctgacagacagtggcctggatgccaccaccttcagcaagctgcatagccttgaatacctggatctctcccacaaccagctgaccacagtgcccgccggcctgccccggaccctggct

SEQ ID NO: 295458 - DNA, 120 bp, Artificial Sequence
  ENSG00000132000_8 (sequence is synthesized)
tatttgttgctgcagcacaaccagctggggagctcagggctgcccgccggggctctgcggccgctgcggggcctgcacacgctgcacctctatggcaatgggctggaccgcgtgcctcca

SEQ ID NO: 295459 - DNA, 120 bp, Artificial Sequence
  ENSG00000132000_9 (sequence is synthesized)
gccctgccccgccgcctgcgtgccctggtgctgccccacaaccacgtggccgcgctgggtgcccgtgacctggtcgccacaccgggcctgacggagcttaacctggcctataaccgcctg

SEQ ID NO: 295460 - DNA, 120 bp, Artificial Sequence
  ENSG00000132000_10 (sequence is synthesized)
gccagcgcccgtgtgcaccaccgggccttccgccggttgcgtgccctgcgcagcctcgacctggcagggaatcagctaacccggctgcccatgggcctgcccactggcctgcgcaccctg

SEQ ID NO: 295461 - DNA, 120 bp, Artificial Sequence
  ENSG00000132000_11 (sequence is synthesized)
cagctgcaacgcaaccagctgcggatgctcgagcccgagcctctggccggcctggaccaactgcgggagctcagcctggcgcacaaccggctccgggtcggcgacatcgggccaggcacc

SEQ ID NO: 295462 - DNA, 120 bp, Artificial Sequence
  ENSG00000132000_12 (sequence is synthesized)
tggcatgagctccaagccctccagatgctggacctcagccacaatgagctgtcctttgtgcccccggacctgcctgaggccctagaggagctgcacctcgagggcaaccgcatcggccac

SEQ ID NO: 295463 - DNA, 120 bp, Artificial Sequence
  ENSG00000132000_13 (sequence is synthesized)
gtgggccccgaggccttcctcagcacaccccgcctgcgtgccctcttcctcagggccaacaggcttcacatgacgagcatcgcggctgaggccttcctggggctcccaaacctgcgtgtg

SEQ ID NO: 295464 - DNA, 120 bp, Artificial Sequence
  ENSG00000132000_14 (sequence is synthesized)
gtggacacggcagggaatccggagcaggtcctgatccggctgcctcccaccaccccacgtgggccacgggcagggggcccctgatcctagagaggcccagcagagcagctcagactcctg

SEQ ID NO: 295465 - DNA, 120 bp, Artificial Sequence
  ENSG00000132000_15 (sequence is synthesized)
ggactccgctgggccgtggactgaggagacaacgcccaccaggggcccttggtctggctctcctgggcctccagggctgggcctgctctgcctgccactggccgagacacagaggcacac

SEQ ID NO: 295466 - DNA, 120 bp, Artificial Sequence
  ENSG00000132000_16 (sequence is synthesized)
agctggcatactccaggctcacagaccacgccggcctggcgggacacaccctaccccaaactcccaacacagatggaggcagcaacaataaagccaaacccttccagcactcagcacgga

SEQ ID NO: 295467 - DNA, 120 bp, Artificial Sequence
  ENSG00000132000_17 (sequence is synthesized)
aggctggctgaggttacgaaagcagagatggggtggttgttgggggggaccaaggggacgggctggcctgtcctcaccaccccatccggccgcctgcccgtcctccccagggcggggaag

SEQ ID NO: 295468 - DNA, 120 bp, Artificial Sequence
  ENSG00000132000_18 (sequence is synthesized)
cctgcctgccctgccacgtcccaaacattctagttagctggtaaagcaatcagaacaagaaaatgataagagtgggttagaaggtgatgaggaggctgggtgaggtggctcatgcctgta

SEQ ID NO: 295469 - DNA, 120 bp, Artificial Sequence
  ENSG00000132000_19 (sequence is synthesized)
gagccaaggcaggagaatcgctttaggctatgggtttgagaccagcctggcaacacagcaagaccctatctctaccaaaaaaacatagccaagcgtggtggcacatgcctgtagtcccag

SEQ ID NO: 295470 - DNA, 120 bp, Artificial Sequence
  ENSG00000132000_20 (sequence is synthesized)
ggaggatcgcttgagcccagaagtttgaggctgcaatgagccgtgatcgggccactgccctctagactgggcaacagagcaagaccctgtctcttgaaaaaaaaagtgatgaaagaggta

SEQ ID NO: 295471 - DNA, 120 bp, Artificial Sequence
  ENSG00000132000_21 (sequence is synthesized)
acaaagctaccagcctcacggagaaggcgcagtccctgtccacagagacacagccttgccccagttactgcccacctgcaagagatccacatttctgccctccagagctcccaaactgat

SEQ ID NO: 295472 - DNA, 120 bp, Artificial Sequence
  ENSG00000132000_22 (sequence is synthesized)
gggggagagagacatcatcccccagctctgggagtttccagtctgatggaggagacagagcctgcttcgagtggcgtgcagtggcacatagctcattgtaacctcaaacttgagcccaga

SEQ ID NO: 295473 - DNA, 120 bp, Artificial Sequence
  ENSG00000132000_23 (sequence is synthesized)
taactctcactctgcgggggaagactcagccctatccagggagctcccacactttcaatggggaggcccacccagatctgaaaatgtctaatttcaggctgggcacagtggctcacacct

SEQ ID NO: 295474 - DNA, 120 bp, Artificial Sequence
  ENSG00000132000_24 (sequence is synthesized)
gcctcggcaactgttaagacctcgtctctacaatgaaaaaacatttttttttcattagtctggtgtgtggtagcacgtctgtagtcctatgtacgtgggaggctgagtcgggaggatccc

SEQ ID NO: 295475 - DNA, 87 bp, Artificial Sequence
  ENSG00000132000_25 (sequence is synthesized)
gtagtcctatgtacgtgggaggctgagtcgggaggatcccttgtgcccaggagtttgaaattacagtgagctgtgatggcgtcacta

SEQ ID NO: 295476 - DNA, 120 bp, Artificial Sequence
  ENSG00000132000_26 (sequence is synthesized)
cgacgccttccgcggctccgaggccatcgccaccctcagcctctccaacaaccagctcagctacctgccgcccagcctgccgccctcactcgagcggctccacctgcaggtagccctgct

SEQ ID NO: 295477 - DNA, 120 bp, Artificial Sequence
  ENSG00000132000_27 (sequence is synthesized)
ctccccacaaccagtccagctggggaaactgaggctctgggatgctaagtgggtcaggactgaattttgaggtcttgaggcacacactggggtcaccaaacagcaccctgtgcgacctag

SEQ ID NO: 295478 - DNA, 120 bp, Artificial Sequence
  ENSG00000132000_28 (sequence is synthesized)
ccacgtgtgattgcagggacgcccaaggccacccactgaaaaaacactgggtgacagatatagggaccctcacatgtatccccccccacagcaagcatgggaatgaaatgcatccttcaa

SEQ ID NO: 295479 - DNA, 120 bp, Artificial Sequence
  ENSG00000132000_29 (sequence is synthesized)
ctgtctgtctgtgccttcctgggaagggccttagtttacctctgcagaagggaggaatttggcaatcatggggggtggggggcagaagggccaggctggtatgaagggggcaggggactc

SEQ ID NO: 295480 - DNA, 120 bp, Artificial Sequence
  ENSG00000132000_30 (sequence is synthesized)
ctcagaacaatctcatctccaaggtgccccgaggagccctgagccgccagactcaactccgtgagctctacctccagcacaaccagctgacagacagtggcctggatgccaccaccttca

SEQ ID NO: 295481 - DNA, 120 bp, Artificial Sequence
  ENSG00000132002_0 (sequence is synthesized)
ggagccgggggacggcgacagcgggtcggcgggccgcaggagggggtcatgggtaaagactactaccagacgttgggcctggcccgcggcgcgtcggacgaggagatcaagcgggcctac

SEQ ID NO: 295482 - DNA, 120 bp, Artificial Sequence
  ENSG00000132002_1 (sequence is synthesized)
cgccgccaggcgctgcgctaccacccggacaagaacaaggagcccggcgccgaggagaagttcaaggagatcgctgaggcctacgacgtgctcagcgacccgcgcaagcgcgagatcttc

SEQ ID NO: 295483 - DNA, 120 bp, Artificial Sequence
  ENSG00000132002_2 (sequence is synthesized)
gaccgctacggggaggaaggcctaaaggggagtggccccagtggcggtagcggcggtggtgccaatggtacctctttcagctacacattccatggagaccctcatgccatgtttgctgag

SEQ ID NO: 295484 - DNA, 120 bp, Artificial Sequence
  ENSG00000132002_3 (sequence is synthesized)
ttcttcggtggcagaaatccctttgacaccttttttgggcagcggaacggggaggaaggcatggacattgatgacccattctctggcttccctatgggcatgggtggcttcaccaacgtg

SEQ ID NO: 295485 - DNA, 120 bp, Artificial Sequence
  ENSG00000132002_4 (sequence is synthesized)
aactttggccgctcccgctctgcccaagagcccgcccgaaagaagcaagatcccccagtcacccacgaccttcgagtctcccttgaagagatctacagcggctgtaccaagaagatgaaa

SEQ ID NO: 295486 - DNA, 120 bp, Artificial Sequence
  ENSG00000132002_5 (sequence is synthesized)
atctcccacaagcggctaaaccccgacggaaagagcattcgaaacgaagacaaaatattgaccatcgaagtgaagaaggggtggaaagaaggaaccaaaatcactttccccaaggaagga

SEQ ID NO: 295487 - DNA, 120 bp, Artificial Sequence
  ENSG00000132002_6 (sequence is synthesized)
gaccagacctccaacaacattccagctgatatcgtctttgttttaaaggacaagccccacaatatctttaagagagatggctctgatgtcatttatcctgccaggatcagcctccgggag

SEQ ID NO: 295488 - DNA, 120 bp, Artificial Sequence
  ENSG00000132002_7 (sequence is synthesized)
gctctgtgtggctgcacagtgaacgtccccactctggacggcaggacgatacccgtcgtattcaaagatgttatcaggcctggcatgcggcgaaaagttcctggagaaggcctccccctc

SEQ ID NO: 295489 - DNA, 120 bp, Artificial Sequence
  ENSG00000132002_8 (sequence is synthesized)
cccaaaacacccgagaaacgtggggacctcattattgagtttgaagtgatcttccccgaaaggattccccagacatcaagaaccgtacttgagcaggttcttccaatatagctatctgag

SEQ ID NO: 295490 - DNA, 120 bp, Artificial Sequence
  ENSG00000132002_9 (sequence is synthesized)
gagggcccagggagggctttcgtactgctgaatgttttccagagcatatattacaatctttcaaagtcgcacactagacttcagtggtttttcgagctatagggcatcaggtggtgggaa

SEQ ID NO: 295491 - DNA, 120 bp, Artificial Sequence
  ENSG00000132002_10 (sequence is synthesized)
cagcaggaaaaggcattccagtctgccccactgggtctggcagccctcccgggatgggcccacatccacctccagtccctggccaggggtgagaggcagaccagcagatggacttgatcc

SEQ ID NO: 295492 - DNA, 120 bp, Artificial Sequence
  ENSG00000132002_11 (sequence is synthesized)
ctctgtgtctttttgcttctggctggtagataatgtcaacctgcagtcttgattcccagaccctgtacactcctccttttctgttgtgtgatcagtttgtgctttattctgtatttgtct

SEQ ID NO: 295493 - DNA, 120 bp, Artificial Sequence
  ENSG00000132002_12 (sequence is synthesized)
cccatgtcttgctcttctcctggagaattctgtcttctctttggccatctcaaattgagaacctaaactattcctgcagaactgcctggttggcgtccacaagcaatacctctcgttcca

SEQ ID NO: 295494 - DNA, 120 bp, Artificial Sequence
  ENSG00000132002_13 (sequence is synthesized)
gcaggaccaagggagccagcctccagtgagtgactccagcaagtgcagccacctctcccttgatggtctgggagcctggcctcagcaaggggccttcctgacctctggctccagtgaagc

SEQ ID NO: 295495 - DNA, 120 bp, Artificial Sequence
  ENSG00000132002_14 (sequence is synthesized)
tgaatgtcctcactttgtgggtcacactctttacatttctgtaaggcaatcttggcacacgtggggcttaccagtggcccaggtaattttttgtttcatggactatggactctttcaaag

SEQ ID NO: 295496 - DNA, 120 bp, Artificial Sequence
  ENSG00000132002_15 (sequence is synthesized)
ggatctgatccttttgaattttgcacagccctagatacaatcccttttgataaaagggtctttgcttctgattacaggagcactgtggaacgtctgtaaatatgtttttataattccatg

SEQ ID NO: 295497 - DNA, 120 bp, Artificial Sequence
  ENSG00000132002_16 (sequence is synthesized)
tatagttggtgtacactcaaaacctgtccccggcagccagtgctctctgtatagggccataatggaattctgaagaaatcttggggagggaaggggagttggaacaaatgtctgttccct

SEQ ID NO: 295498 - DNA, 120 bp, Artificial Sequence
  ENSG00000132002_17 (sequence is synthesized)
ggaggccagtccagtgctcagacctttagactcattgtaagttgccactgccaacatgagaccaaagtgtgtgactagtcaatgaagtgcgacagcattaaagactgatgctaaacctca

SEQ ID NO: 295499 - DNA, 120 bp, Artificial Sequence
  ENSG00000132002_18 (sequence is synthesized)
agcatccacatgacaggcggcgccgaagggatcctgcccctgagctttcatgagctgttgaaccatctggaattcacaggcctgtcatgagagacacgatgagaagtccttaaaggcgct

SEQ ID NO: 295500 - DNA, 120 bp, Artificial Sequence
  ENSG00000132002_19 (sequence is synthesized)
aagcgacggttaggccagacgcgggggcggggtaagaagttgagtgacaggcaaggcagcatccacatgacaggcggcgccgaaggggtaaattctgagatcctgcccctgagctttcat

SEQ ID NO: 295501 - DNA, 120 bp, Artificial Sequence
  ENSG00000132002_20 (sequence is synthesized)
gtacaccgggaacagcaggagagggctaggggctggggtcgcgggctgcggagtctggttggcgaggagatcctgcccctgagctttcatgagctgttgaaccatctggaattcacaggc

SEQ ID NO: 295502 - DNA, 120 bp, Artificial Sequence
  ENSG00000132002_21 (sequence is synthesized)
tccttaaaggtagatcactgattcacaggggagcaggcggaggcaagggtgagtcagtgcttggaactcagtcatccagatttggctctggaaacttctgaagctgtagcctttggggat

SEQ ID NO: 295503 - DNA, 120 bp, Artificial Sequence
  ENSG00000132002_22 (sequence is synthesized)
gcgagtacaggaagccaacgctatgtggtcttctggaaactcattatctttttcactggtgctatctgggaaaaacagatgaaaacctgaaggtgttctgtatgtgtgctttcaaaagca

SEQ ID NO: 295504 - DNA, 120 bp, Artificial Sequence
  ENSG00000132002_23 (sequence is synthesized)
gggctcacctgggctcggccgccggggtccgcggggcggcgcctccggctcagctgcggggcgaggggttgtgaatgcaggagccgaccccgttcgtgggcttgggggctgggttgggat

SEQ ID NO: 295505 - DNA, 120 bp, Artificial Sequence
  ENSG00000132002_24 (sequence is synthesized)
cgaccccgttcgtgggcttgggggctgggttgggataattcccgggaagtgatgacctggccccggcagggcacgcaggaggcagcggccgcccaggtccggagagcggggccgcctcgg

SEQ ID NO: 295506 - DNA, 120 bp, Artificial Sequence
  ENSG00000132002_25 (sequence is synthesized)
aagcgacggttaggccagacgcgggggcggggtaagaagttgagtgacaggcaaggcagcatccacatgacaggcggcgccgaagggatcctgcccctgagctttcatgagctgttgaac

SEQ ID NO: 295507 - DNA, 120 bp, Artificial Sequence
  ENSG00000132002_26 (sequence is synthesized)
aaagaaggaaaaagaatgggtcagcagtggccacacggcccctgtttctcgcttcttacctcgtaatgcttcatggctccctcccacggcggctactgctccgcggctgctgctgcctaa

SEQ ID NO: 295508 - DNA, 120 bp, Artificial Sequence
  ENSG00000132002_27 (sequence is synthesized)
ctgcgcggcacagcacaggctccctacagcgctcgcaaccgcagcgatagactaaacgcggctctgcgtccgccccgcccctccaggccgcgcgcgccccgtcggccaatcagggcacga

SEQ ID NO: 295509 - DNA, 120 bp, Artificial Sequence
  ENSG00000132002_28 (sequence is synthesized)
ggcgcccacgttcgcccctgctccttggggccggtccgaaccaagactaggactagcaccaggggattgaccaatcaacttgcgagaccaatcgaagggggcggaacgcctgtaggaggg

SEQ ID NO: 295510 - DNA, 120 bp, Artificial Sequence
  ENSG00000132002_29 (sequence is synthesized)
gctaaagagaaggggcttgaccatccaccaatccaaaggaggtctctgccccgcgcgtccctttgccacgccccctgatggcgtcgctgtggaaaccaagatcctgcccctgagctttca

SEQ ID NO: 295511 - DNA, 120 bp, Artificial Sequence
  ENSG00000132003_0 (sequence is synthesized)
tcgggggtgggtgcggtaggggtcccggggcggccgagcgcagaggacggacgggaaggagggcagggggcgcgggagccggcgaagcggagcgggcatcggaccgagccccccaaagag

SEQ ID NO: 295512 - DNA, 80 bp, Artificial Sequence
  ENSG00000132003_1 (sequence is synthesized)
ggcgaagcggagcgggcatcggaccgagccccccaaagaggccccgccccggccctggccccggccgggccggatggaac

SEQ ID NO: 295513 - DNA, 120 bp, Artificial Sequence
  ENSG00000132003_2 (sequence is synthesized)
gagcgcgatgccggggccggggccgcgcgtggccggggccggcccgaggcgctgctggacctcagcgccaagcgggtagccgagagctgggccttcgagcaggtggaggagcggttctcc

SEQ ID NO: 295514 - DNA, 120 bp, Artificial Sequence
  ENSG00000132003_3 (sequence is synthesized)
cgggtgcctgagcccgtccagaagcgcatcgtgttttggtcgtttccacgcagtgaacgggaaatatgtatgtactcgtcgctgggttacccgcccccagagggcgagcacgatgcccgg

SEQ ID NO: 295515 - DNA, 120 bp, Artificial Sequence
  ENSG00000132003_4 (sequence is synthesized)
gtgccctttacccgcgggctgcacctgctccagagcggggccgtggaccgcgtgttgcaagtgggattccacctgagcggaaacatccgcgagccagggagtcctggagagcccgagcgc

SEQ ID NO: 295516 - DNA, 120 bp, Artificial Sequence
  ENSG00000132003_5 (sequence is synthesized)
ctctaccatgtctccatcagctttgatcgctgcaagatcacgtccgtgagctgcggctgtgacaaccgcgacctcttctactgtgcccacgtggtggccctgtccctgtaccgcattcgg

SEQ ID NO: 295517 - DNA, 120 bp, Artificial Sequence
  ENSG00000132003_6 (sequence is synthesized)
cacgcccaccaggtggagctgcggctgcccatctccgagacgctctcccagatgaaccgggaccagctgcagaagttcgtgcagtacctcatcagcgcccatcacactgaggtgctgccc

SEQ ID NO: 295518 - DNA, 120 bp, Artificial Sequence
  ENSG00000132003_7 (sequence is synthesized)
actgctcagcgcttggctgatgagatcctcctgctgggctccgagatcaacttggtgaatggtgccccagaccccaccgccggcgcaggaatcgaggacgccaactgctggcacctggac

SEQ ID NO: 295519 - DNA, 120 bp, Artificial Sequence
  ENSG00000132003_8 (sequence is synthesized)
gaggagcagatccaggagcaggtgaagcagctactgtccaatggcggctactacggggccagccagcagctgcgctccatgttcagcaaggtgcgggagatgctgcgaatgcgggactcc

SEQ ID NO: 295520 - DNA, 120 bp, Artificial Sequence
  ENSG00000132003_9 (sequence is synthesized)
aacggggcgcgcatgctgattctcatgaccgagcagttcctgcaggacacgcgcctggccctgtggcggcagcagggcgcgggcatgacggacaagtgccggcagctctgggatgagctg

SEQ ID NO: 295521 - DNA, 120 bp, Artificial Sequence
  ENSG00000132003_10 (sequence is synthesized)
ggggccctgtgggtttgcgtcgtcctgagcccccactgcaaaccagaggaaagggcaggctggctccagctactcagcaggtgggacaagctcgacgtctgcccactggaagagggcaac

SEQ ID NO: 295522 - DNA, 120 bp, Artificial Sequence
  ENSG00000132003_11 (sequence is synthesized)
tactccttcgacggccccagcctgcagcccaccatggcccccgccccagagctgctccagaagggctccacctgcatcaccaacaccgaaggatgggtggggcaccccctggaccccatt

SEQ ID NO: 295523 - DNA, 120 bp, Artificial Sequence
  ENSG00000132003_12 (sequence is synthesized)
ggctgcctctgcagggcgctcctggaggcctgtcgtctggaggaggagacacttaccctttacccagactcaggccccgagaagcggaaggtggcctaccagcacgtgcctgtgcccggg

SEQ ID NO: 295524 - DNA, 120 bp, Artificial Sequence
  ENSG00000132003_13 (sequence is synthesized)
agccctggggagtcctacttggtgctggcgctggaggtggcactgctggggctggggcagcagcgggccctgccggaggggctgtacgcccaggacaaggtggtgcgcaacgaggagcag

SEQ ID NO: 295525 - DNA, 120 bp, Artificial Sequence
  ENSG00000132003_14 (sequence is synthesized)
ctgctggccctgctggaggaggtggagttggatgagcggttggtgcaggtgctgcgcaagcaggcggggctgctgctggaagggggtcccttcagtggctttggggaggtgctgttccgg

SEQ ID NO: 295526 - DNA, 120 bp, Artificial Sequence
  ENSG00000132003_15 (sequence is synthesized)
gagagcgtgcccatgcacacctgtgcccgctacctgttcaccgcactgctgcctcatgacccggacctggcctatcgcctcgcgctgcgagctatgaggctgcccatactggagacagca

SEQ ID NO: 295527 - DNA, 120 bp, Artificial Sequence
  ENSG00000132003_16 (sequence is synthesized)
tttcctgctggagaacctcatcccagcccgctggactccatcatgagcaaccgcttcccccgctggttcatccttggccacctggagacccgccagtgtgaactggcttccaccatgttg

SEQ ID NO: 295528 - DNA, 120 bp, Artificial Sequence
  ENSG00000132003_17 (sequence is synthesized)
acggccgccaagggagaccccaagtggctgcacacggtactgggctccatccagcagaacatccactctccggccctgctctttaagctggcgcaggacgcctgcaagacagccaccccg

SEQ ID NO: 295529 - DNA, 120 bp, Artificial Sequence
  ENSG00000132003_18 (sequence is synthesized)
ccacgctgctgggcatcgcactggagctggggctgcaggtgatgcggatgactctgaacgtaatgacctggcggcggagggagatggtgcgctggctggtcagctgtgccacagagattg

SEQ ID NO: 295530 - DNA, 120 bp, Artificial Sequence
  ENSG00000132003_19 (sequence is synthesized)
gcccgcaagccctgatgaatatcatgcagaactggtattccttattcacaccagtggaggcggctaccatcgtggcagtgacgggcaccacacacgccactctgctgcgactgcagctgg

SEQ ID NO: 295531 - DNA, 120 bp, Artificial Sequence
  ENSG00000132003_20 (sequence is synthesized)
acacatcgcggagggaggagctctgggcctgcgcccgcaccctggccttgcagtgcgcgatgaaggaccctcagaactgcgccttgcctgccctgaccctgtgcgagaagaaccactcgg

SEQ ID NO: 295532 - DNA, 120 bp, Artificial Sequence
  ENSG00000132003_21 (sequence is synthesized)
ccttcgaggcggcctaccagatcgtgctggacgcggcggccggcggcctgggccacgcccacctcttcactgtggcccgctatatggagcaccgcgggctgccgctccgggcctacaagc

SEQ ID NO: 295533 - DNA, 120 bp, Artificial Sequence
  ENSG00000132003_22 (sequence is synthesized)
tggcgacgctggccctggcgcagctcagcatcgccttcaaccaggacagccaccctgccgtcaacgacgtgctttgggcctgctctctcagccactccctgggccggcacgagctctctg

SEQ ID NO: 295534 - DNA, 120 bp, Artificial Sequence
  ENSG00000132003_23 (sequence is synthesized)
ccatcgtccccctcatcattcgcagcatccactgtgccccaatgctgtccgatattctgcgccgctggactctctcggcgcccggtctgggccccttaggggcacgccgggccgccaagc

SEQ ID NO: 295535 - DNA, 120 bp, Artificial Sequence
  ENSG00000132003_24 (sequence is synthesized)
cactgggtgccgaccgggcgccgctctgccagctcctggacgcggcagtcaccgcctacatcaccaccagccactcgcgcctcacgcacatcagcccgcggcactatggggatttcatcg

SEQ ID NO: 295536 - DNA, 120 bp, Artificial Sequence
  ENSG00000132003_25 (sequence is synthesized)
aattcctgggcaaggcccgggagaccttcctgctggcgcccgacgggcacctccagttctcacagttcttggagaacctcaaacagacctacaagggcaagaagaaactcatgcttttgg

SEQ ID NO: 295537 - DNA, 120 bp, Artificial Sequence
  ENSG00000132003_26 (sequence is synthesized)
tgcgggagcgttttggttgagggacagtggggtgcgtgggagtggggatccccctcgcccctgcgtcccccacccttgctctccaattaggcccacgtggcatttcagtattattaagtc

SEQ ID NO: 295538 - DNA, 120 bp, Artificial Sequence
  ENSG00000132003_27 (sequence is synthesized)
agggaaggagcccggctggagatgggggcagggggagcagcatcctgccacgtgtgtgcctgggagtctgtgagcaagtgtgcaagactccagaagcagaagccatactgccacccagaa

SEQ ID NO: 295539 - DNA, 120 bp, Artificial Sequence
  ENSG00000132003_28 (sequence is synthesized)
gcctggaaggggtgtgtgcttgggctgctggtatgaccccactttgggcaccccaaaagcaataggcaaactccccttacccagactggcttgggctccaggagggaggctgggaggcag

SEQ ID NO: 295540 - DNA, 120 bp, Artificial Sequence
  ENSG00000132003_29 (sequence is synthesized)
gactttccagaaatcgaccctctaagtcaatgtagcacattttcccccaaccccaccctgggtggccaagggtcctcccccaccccctactgctcagggccccccattatgccacctcca

SEQ ID NO: 295541 - DNA, 120 bp, Artificial Sequence
  ENSG00000132003_30 (sequence is synthesized)
aagtggctgcccagccaggaccattggctcacccccactgaaggaattgaagaggcctcaggcctcagcctcatacctcacccccttatcctatccggccaggacccccatttccttggg

SEQ ID NO: 295542 - DNA, 120 bp, Artificial Sequence
  ENSG00000132003_31 (sequence is synthesized)
cactagggtcccagggtgggctcagggttggggaagtcctcgctgccctctcttctcacctgctagtcactggacgtacaactcaggaactgagcgaggctcacactgccccttccaacc

SEQ ID NO: 295543 - DNA, 120 bp, Artificial Sequence
  ENSG00000132003_32 (sequence is synthesized)
tggggttgggggacacagacgcgagagagccggagacccccacccccgatctggaaaggaaagagacctgtatcttggtgtttttctggctttttcaccctttcgcctcctgtctttctg

SEQ ID NO: 295544 - DNA, 120 bp, Artificial Sequence
  ENSG00000132003_33 (sequence is synthesized)
cttcgccccttcatcttactctgtttccatttttcccggcacttacctgcctttctctctgcacctaagtccctgccgccctctctctttggccatccttcctttcccccaccttgaccc

SEQ ID NO: 295545 - DNA, 120 bp, Artificial Sequence
  ENSG00000132003_34 (sequence is synthesized)
agggaggagaagggagaacatcacccccccaagtcacccccacatcttttcccttcttgtatattaaggacaaaataccacatcattttgtaactttttttctatttattgaacggtgta

SEQ ID NO: 295546 - DNA, 120 bp, Artificial Sequence
  ENSG00000132003_35 (sequence is synthesized)
ttacatgtccttttcctttttttttttcaaagattgaacagaaatttttctttttaattttattttgagactggggtgcatctccagagccactcacaccctcaacctcgtttcctccgc

SEQ ID NO: 295547 - DNA, 120 bp, Artificial Sequence
  ENSG00000132003_36 (sequence is synthesized)
acggtatttggccgcgccttgctggctggagagctacactggaatgacgcctacctgcagaggatcctggccagtgactcctacgggcccagcctcacaggcagcgtgggtggggacaaa

SEQ ID NO: 295548 - DNA, 120 bp, Artificial Sequence
  ENSG00000132003_37 (sequence is synthesized)
ccgactttcgacccccagggccgcccactgtggctgggagaacctttccccactgcctgtgcccgtgtggacaccctgcgtgcccacggatacccccgccaggccctgcggctggcaagt

SEQ ID NO: 295549 - DNA, 120 bp, Artificial Sequence
  ENSG00000132004_0 (sequence is synthesized)
gtgctgcctaggagacaagacgcgaggccggcagcgcccacccggtcgcaatggagcttcccctagggcggtgcgatgattcccgcacctgggacgatgactcggacccagagtcagaga

SEQ ID NO: 295550 - DNA, 120 bp, Artificial Sequence
  ENSG00000132004_1 (sequence is synthesized)
cagacccagacgcgcaggccaaggcctacgtggcccgcgttctcagtccgccaaaatccgggctggcgttctcgcgcccctcgcagctatccacacccgccgcgtccccgagcgcttcgg

SEQ ID NO: 295551 - DNA, 120 bp, Artificial Sequence
  ENSG00000132004_2 (sequence is synthesized)
agcctcgggccgcgtccagggtttcggccgtaagtgagccgggccttctgagccttcccccggagctgctgctcgagatctgctcctacctggacgcccgcctcgtgctccacgtcctgt

SEQ ID NO: 295552 - DNA, 120 bp, Artificial Sequence
  ENSG00000132004_3 (sequence is synthesized)
cgcgggtgtgccacgcgctccgcgacctcgtgtctgaccatgtcacctggaggctacgcgcgctacgccgcgtacgcgcgccctacccagtggtggaagagaagaactttgactggccgg

SEQ ID NO: 295553 - DNA, 120 bp, Artificial Sequence
  ENSG00000132004_4 (sequence is synthesized)
cagcctgcattgcgctggagcagcacctgtcccgctgggcagaggatgggcgctgggtcgaatacttctgcctggccgaaggccacgtggcttccgttgactcagtgctgctgctccagg

SEQ ID NO: 295554 - DNA, 120 bp, Artificial Sequence
  ENSG00000132004_5 (sequence is synthesized)
gtgggtcactctgtctgtcgggctcccgagatcgcaacgtcaacttgtgggacctgcggcagctggggacggagtccaaccaggttctgatcaagaccttaggcactaagcgaaatagta

SEQ ID NO: 295555 - DNA, 120 bp, Artificial Sequence
  ENSG00000132004_6 (sequence is synthesized)
cccatgagggctgggtgtggtcactggcagcgcaggaccaccgcgtgtgctccggctcctgggacagcacagtgaagctctgggacatggcagcggatgggcagcagttcggcgagataa

SEQ ID NO: 295556 - DNA, 120 bp, Artificial Sequence
  ENSG00000132004_7 (sequence is synthesized)
gtgactggcacctatgacaagaaggtgaccatctacgaccccagagccggcccagccctgttgaagcaccagcaactacactccagacccgtgctgaccctgctggcggatgaccggcac

SEQ ID NO: 295557 - DNA, 120 bp, Artificial Sequence
  ENSG00000132004_8 (sequence is synthesized)
atcatctcaggcagcgaggaccacaccctggtggtggtggaccgccgagccaacagcgtcctgcagcgtctgcagctggactcctacctgctctgcatgtcctaccaggaaccccagctc

SEQ ID NO: 295558 - DNA, 120 bp, Artificial Sequence
  ENSG00000132004_9 (sequence is synthesized)
tgggctggtgacaaccagggcctgctgcacgtcttcgccaaccgcaacggctgcttccagcttatccggtcctttgatgtgggccacagctttcccatcactgggatccagtactccgtg

SEQ ID NO: 295559 - DNA, 120 bp, Artificial Sequence
  ENSG00000132004_10 (sequence is synthesized)
ggagccttgtacaccacatccactgacaagaccatccgggtgcacgtgcccacagacccaccaaggaccatttgcacccgaaggcatgacaatgggctcaatagggtctgtgctgagggc

SEQ ID NO: 295560 - DNA, 120 bp, Artificial Sequence
  ENSG00000132004_11 (sequence is synthesized)
aacctggtggtggccggctctggagacctgtcgctagaggtctggaggctgcaggcctgagcaggtgggcgtggatgtggatactgcctgccggaggctgggcttcctcctctgttcttg

SEQ ID NO: 295561 - DNA, 120 bp, Artificial Sequence
  ENSG00000132004_12 (sequence is synthesized)
ggggaccatccccaatgttggtgctgcctccgccccgtgggcctagggcacaaggagtcccagccacattcgggtgagcgtcctggcctgggccctatgcccgggggaagggtgaaattg

SEQ ID NO: 295562 - DNA, 120 bp, Artificial Sequence
  ENSG00000132004_13 (sequence is synthesized)
gggttcaggcccacccagggggccgcttcccactcttgggccctggttttgttatgatttggatgccccgctctcagttgagagcgaaggagaaataaacctgacatgttggtgcttggg

SEQ ID NO: 295563 - DNA, 120 bp, Artificial Sequence
  ENSG00000132004_14 (sequence is synthesized)
cctgctccgtgcagaacttcagcagatcggcggccatctttggacacctgcagaccaactggttcagccagaccagacccaggcatgcacctgtcccctggcccatgtgttcccacctct

SEQ ID NO: 295564 - DNA, 120 bp, Artificial Sequence
  ENSG00000132004_15 (sequence is synthesized)
tcccgcctcctgcactggccccgaccctcaccttcacttggtcgatgcctgcctccatctggagctgctccactgcccagagggcctgcccaatgtcactgttgatggccaccttgctgg

SEQ ID NO: 295565 - DNA, 120 bp, Artificial Sequence
  ENSG00000132004_16 (sequence is synthesized)
atctacgaccccagagacaggatggagacccgggatgctctcatgggctggggggggccttcgaggggctctgatatccctcctcaccggcccatcacccatgaagccggcccagccctg

SEQ ID NO: 295566 - DNA, 120 bp, Artificial Sequence
  ENSG00000132005_0 (sequence is synthesized)
agttgccccggtgagggaaacggaggcgccatagccacggtagtcgtggcgaccaagcaacccggcaacgcgagtcaacaacaacaaccgcccggccgacccccacccccaccccccagg

SEQ ID NO: 295567 - DNA, 120 bp, Artificial Sequence
  ENSG00000132005_1 (sequence is synthesized)
cccggcccggggaccccagcacgtcccgtccccttcccaacatcgactccgagacctccgaaaagcgtttccgcagacagaagtggggagaagcggaggaattaaaaaaaaaaaaaagcc

SEQ ID NO: 295568 - DNA, 120 bp, Artificial Sequence
  ENSG00000132005_2 (sequence is synthesized)
ttatttattatcattttccccaccgttggcatggcaacacaggcgtatactgagctacaggcagccccgccaccatcccagccgccacaggccccgccacaagcccagccccagccgcca

SEQ ID NO: 295569 - DNA, 120 bp, Artificial Sequence
  ENSG00000132005_3 (sequence is synthesized)
ccgccaccacccccagcggcaccccagcccccgcagccacccaccgctgctgccacccctcagccccaatatgtcaccgagctgcagagcccccagccccaggcacagccaccgggtggc

SEQ ID NO: 295570 - DNA, 120 bp, Artificial Sequence
  ENSG00000132005_4 (sequence is synthesized)
cagaagcagtacgtgacggagctcccggctgtacccgcaccctcgcagccaaccggtgcacccaccccttcgcctgcaccccagcagtacatcgtggtcactgtctctgaaggtgccatg

SEQ ID NO: 295571 - DNA, 120 bp, Artificial Sequence
  ENSG00000132005_5 (sequence is synthesized)
cgggccagcgagacagtgtcggaggccagccccggctccaccgccagccagaccggcgttcctactcaggtggttcagcaggtgcagggcacccagcagcggctgctggtccagacgagc

SEQ ID NO: 295572 - DNA, 120 bp, Artificial Sequence
  ENSG00000132005_6 (sequence is synthesized)
gtgcaggccaagccaggccacgtgtcgcccctccagctgaccaacatccaagtgccccagcaggctcttcccacgcagcgtctggtggtgcagagcgcagccccaggcagcaaaggtggc

SEQ ID NO: 295573 - DNA, 120 bp, Artificial Sequence
  ENSG00000132005_7 (sequence is synthesized)
caggtctccctgacggtccatggtacccagcaggtgcactcgcccccagagcagtcgccggtgcaggccaacagctcttccagcaagacagccggggcccccacgggcacagtgccacag

SEQ ID NO: 295574 - DNA, 120 bp, Artificial Sequence
  ENSG00000132005_8 (sequence is synthesized)
cagctgcaggtccacggcgtccagcagagtgtccccgtcacccaagagagatctgtggtccaggccactccacaagcgcccaaacccggcccggtgcagccgctgaccgtgcagggcctc

SEQ ID NO: 295575 - DNA, 120 bp, Artificial Sequence
  ENSG00000132005_9 (sequence is synthesized)
cagccagtccacgtggctcaagaggtgcagcagctccagcaggtgcccgtcccacacgtgtactccagccaggtgcagtatgtggagggcggcgatgccagctacacggccagtgccatc

SEQ ID NO: 295576 - DNA, 120 bp, Artificial Sequence
  ENSG00000132005_10 (sequence is synthesized)
cgttccagcacctactcctatcccgagacgccgctgtacacgcagacggcaagcaccagctactacgaggccgcaggcacggccacccaggtcagcacccccgccacctcccaggcggtg

SEQ ID NO: 295577 - DNA, 120 bp, Artificial Sequence
  ENSG00000132005_11 (sequence is synthesized)
gccagcagtggctccatgcccatgtacgtgtccggcagccaggtcgtcgccagctccaccagcactggggctggggccagcaacagcagcggaggtggtggcagtggtggtggcggcggc

SEQ ID NO: 295578 - DNA, 120 bp, Artificial Sequence
  ENSG00000132005_12 (sequence is synthesized)
ggcgggggaggcggtggcgggggtggcagtggcagcaccggaggcggcggcagcggagcaggcacctacgtgatccaaggcggctacatgctgggcagtgccagccagtcttactctcac

SEQ ID NO: 295579 - DNA, 120 bp, Artificial Sequence
  ENSG00000132005_13 (sequence is synthesized)
accacccgtgcctcgccagccacggtccagtggctcctggacaactatgagacggctgagggcgtgagtctgccacggagcaccctctactgccactacttactgcactgccaggagcag

SEQ ID NO: 295580 - DNA, 120 bp, Artificial Sequence
  ENSG00000132005_14 (sequence is synthesized)
aagctggagcccgtcaacgccgcctccttcggcaagctcatccgctccgtcttcatgggcctgcgaacccgccgtctgggcaccaggggcaactccaagtaccactactatggcctgcgc

SEQ ID NO: 295581 - DNA, 120 bp, Artificial Sequence
  ENSG00000132005_15 (sequence is synthesized)
atcaaggccagctcacccctgctgcggctgatggaggaccagcagcacatggccatgcggggccagcccttctcgcagaagcagaggctcaagcccatccagaagatggaaggcatgacc

SEQ ID NO: 295582 - DNA, 120 bp, Artificial Sequence
  ENSG00000132005_16 (sequence is synthesized)
aacggcgtggcggtggggcagcagccgagcacggggctgtcggacatcagcgcccaggtgcagcagtaccagcaatttttggatgcctctcggagcctccctgacttcacagagctcgac

SEQ ID NO: 295583 - DNA, 120 bp, Artificial Sequence
  ENSG00000132005_17 (sequence is synthesized)
ctccagggcaaggtgctgcctgagggcgtcgggcccggggacatcaaagccttccaggtcctgtaccgggaacactgtgaggccattgtcgacgtcatggtgaacctgcagttcaccctg

SEQ ID NO: 295584 - DNA, 120 bp, Artificial Sequence
  ENSG00000132005_18 (sequence is synthesized)
cgccaccgctggctgtacatgacgaggccgagaagcgactgcccaaagccatcctggtgctcctctccaagttcgagcccgtgctccaatggaccaagcactgtgacaacgtgctgtacc

SEQ ID NO: 295585 - DNA, 120 bp, Artificial Sequence
  ENSG00000132005_19 (sequence is synthesized)
agggcctggtggaaatcctcattcccgacgtgctgcggcccatccccagtgccttgacccaagcgatccggaactttgccaagagcctggagagctggctcacccacgccatggtcaaca

SEQ ID NO: 295586 - DNA, 120 bp, Artificial Sequence
  ENSG00000132005_20 (sequence is synthesized)
tccccgaggagatgctgcgggtgaaggtggccgcggctggcgccttcgcgcagacactgcggcgctacacgtcgctcaaccacctggcgcaggcggcgcgcgctgtgctgcagaacaccg

SEQ ID NO: 295587 - DNA, 120 bp, Artificial Sequence
  ENSG00000132005_21 (sequence is synthesized)
cacagatcaaccagatgctgagcgacctcaaccgcgtggacttcgccaacgtgcaggagcaggcctcgtgggtgtgccgctgcgaggaccgcgtggtgcagcggctggagcaggacttca

SEQ ID NO: 295588 - DNA, 120 bp, Artificial Sequence
  ENSG00000132005_22 (sequence is synthesized)
aggtgacgctgcagcagcagaactcgctggagcagtgggcggcctggctggacggcgtggtgagccaggtgctcaagccctaccagggcagcgccggcttccccaaggccgccaagctct

SEQ ID NO: 295589 - DNA, 120 bp, Artificial Sequence
  ENSG00000132005_23 (sequence is synthesized)
tcctcctcaagtggtccttctacagctccatggtgatccgggacctgaccctgcgcagcgccgccagcttcggttccttccacctcatccggctgctctacgacgagtacatgtactacc

SEQ ID NO: 295590 - DNA, 120 bp, Artificial Sequence
  ENSG00000132005_24 (sequence is synthesized)
tgatcgagcaccgcgtagcccaggccaagggcgagacccccatcgccgtcatgggcgagttcgccaatctggccacctccctgaaccccctggaccccgacaaagacgaggaggaagaag

SEQ ID NO: 295591 - DNA, 120 bp, Artificial Sequence
  ENSG00000132005_25 (sequence is synthesized)
aggaggaggagagcgaggacgagctgccgcaggacatctcactggcggctggcggcgagtcacccgcgctgggcccggagaccctggagccgccggccaagctggcgcggactgacgcgc

SEQ ID NO: 295592 - DNA, 120 bp, Artificial Sequence
  ENSG00000132005_26 (sequence is synthesized)
gcggcctcttcgtgcaggcgctgccctccagctaagcccttggcctccccgccccacccgcccccgccacccctccacgccagggtccctcaaagcttctgtggcttcgtggtcactgct

SEQ ID NO: 295593 - DNA, 120 bp, Artificial Sequence
  ENSG00000132005_27 (sequence is synthesized)
ccagcctcagccagggcagggagggggactccgagacagggaagaccggggccctcctcccttatggggccggcacaatcagtgggctgggcggagccgcagctgcaaactctgacacaa

SEQ ID NO: 295594 - DNA, 120 bp, Artificial Sequence
  ENSG00000132005_28 (sequence is synthesized)
aagacgtgccttaaggaacccgccgcgtgcccaggtgccccgcggggcatccagctcggccccttggccgcccccctcccaggccccagcgtcttctccccagccccgtcctcccaccac

SEQ ID NO: 295595 - DNA, 120 bp, Artificial Sequence
  ENSG00000132005_29 (sequence is synthesized)
cccagggggcaggcaggcaggccccctcccgtgcgaaactgttaacttattcagctcgctggctttgcacagcctgtcctgggcccagccctgagccccgggccggcgcaggtgggcgtc

SEQ ID NO: 295596 - DNA, 120 bp, Artificial Sequence
  ENSG00000132005_30 (sequence is synthesized)
acctggggactccccactgtcagcagcagccccgggacaccctacccccagcaaccccactgcttccccttcttggtattaagtgcaattaaagccgtgggtgtcgcatcttctccagcg

SEQ ID NO: 295597 - DNA, 120 bp, Artificial Sequence
  ENSG00000132005_31 (sequence is synthesized)
ctgggccctcccttgcccccaagctcaagaagggggcactgcccggcccggctgtgaggagggcggcagggggcacggcctccagcttccaaagagcagcgagccgcggagccggggagt

SEQ ID NO: 295598 - DNA, 120 bp, Artificial Sequence
  ENSG00000132005_32 (sequence is synthesized)
gcccacagaccccagcccccgcgcccccgccctccgccgctggtttgtaatggaaccttttctgtgcccctatcttcccggagaccacgcttctcctccgtgccgtgcgacccccacccc

SEQ ID NO: 295599 - DNA, 120 bp, Artificial Sequence
  ENSG00000132005_33 (sequence is synthesized)
atgactattgtgcgattcgtgagcgccgcccgagcggagttggtaacttgttgggtttttttccaaccatcatggccttatctgttccagttttctcagtgttttcagcctgtgagatag

SEQ ID NO: 295600 - DNA, 120 bp, Artificial Sequence
  ENSG00000132005_34 (sequence is synthesized)
atgtttatggcaagaaaaaggaaaaaaaaatggaaatctgacctattgtataaaaatcactattttgtgtgctccgcgtgctatagcttttggggcggccctgcccagtccccgtgccca

SEQ ID NO: 295601 - DNA, 120 bp, Artificial Sequence
  ENSG00000132005_35 (sequence is synthesized)
cggggctccctctcccggtggtgaaagtgtccacacgtgtggtagtctagtgtgccgagctgttttctacctttttgtagtctttcttaaaacaataaattccgctgtgatatttgccta

SEQ ID NO: 295602 - DNA, 120 bp, Artificial Sequence
  ENSG00000132005_36 (sequence is synthesized)
cggcttgggcggaggaggatgtcaccccagcgggtgggagctgggatcgaaccccgccgcggcctcccgcttccacccaaccccgacggggccatgggcagtggggaagggggacgcgcg

SEQ ID NO: 295603 - DNA, 120 bp, Artificial Sequence
  ENSG00000132005_37 (sequence is synthesized)
cctcccctgacgtcagcgcaagaagccagaaactggcccaccgagcgagagagaagtctggagcggagtcttcctttctcgcctttttaatttgagacggggtttcgccatgttggccag

SEQ ID NO: 295604 - DNA, 120 bp, Artificial Sequence
  ENSG00000132005_38 (sequence is synthesized)
ctcagggtggaggaccaaccccctgtggcaagcctggatctgtcctcaccaggatggagggaagagtccccatccaggggctgccctacctcctggctctgggcagtcacctccccaggg

SEQ ID NO: 295605 - DNA, 120 bp, Artificial Sequence
  ENSG00000132005_39 (sequence is synthesized)
tataggtgtgagccaccgtgcccggcctgatctcattggatctttgcagcaatttgatgaattgggtgttctcgttatccccaggtgacaggcaactgaggcccagaagaaggaattaaa

SEQ ID NO: 295606 - DNA, 120 bp, Artificial Sequence
  ENSG00000132005_40 (sequence is synthesized)
caccaggtagggccatccgtctactcccagcagtccctggggaattggtgggcatgccaaggcccacccccactccgagtcatctcaggcagtccagtccagcccagtcccgccggcctc

SEQ ID NO: 295607 - DNA, 120 bp, Artificial Sequence
  ENSG00000132005_41 (sequence is synthesized)
tgcgaggctcctcgacagccccgctcactcccactctaggcctttgcactggcggtgccttccacctcatgtgcttctcacccctccttacttgcacgtcccctgactgcctcaactaaa

SEQ ID NO: 295608 - DNA, 120 bp, Artificial Sequence
  ENSG00000132005_42 (sequence is synthesized)
actgcagcctccccctctcccctgcccgacaccccccaaccctgctttatttttctctttagcattcagcacgctcacacgtgacttttttttttttttggagacaagagtctcactctg

SEQ ID NO: 295609 - DNA, 120 bp, Artificial Sequence
  ENSG00000132010_0 (sequence is synthesized)
agcttctacttttgttgctatgcaggttgttgtcgggataccagatttcctactccgagaggccccgggtccctctgccacaacttctgtcgctctgccgcctgcaccgtgacccgcact

SEQ ID NO: 295610 - DNA, 120 bp, Artificial Sequence
  ENSG00000132010_1 (sequence is synthesized)
attcacgggagccctagagaggacaccgggacacccagaagccgggaaatgatgtttcaggattcagtggcctttgaggatgtggctgtcagcttcacccaggaggagtgggctttgctg

SEQ ID NO: 295611 - DNA, 120 bp, Artificial Sequence
  ENSG00000132010_2 (sequence is synthesized)
gatccttcccagaagaatctctacagggatgtgatgcaggaaaccttcaagaacctgacctctgtaggaaaaacatggaaagttcagaacattgaagatgagtacaaaaatcccaggaga

SEQ ID NO: 295612 - DNA, 120 bp, Artificial Sequence
  ENSG00000132010_3 (sequence is synthesized)
aatctaagtcttatgagagagaaactctgtgaaagtaaagaaagtcatcactgtggagaaagcttcaaccagattgcagatgacatgctgaacaggaaaactcttcctggaataacacca

SEQ ID NO: 295613 - DNA, 120 bp, Artificial Sequence
  ENSG00000132010_4 (sequence is synthesized)
tgtgaaagcagtgtgtgtggagaagttggcacgggtcattcatctcttaatacgcatatcagagctgacactggacacaagtcatctgagtatcaggaatatggagagaatccatataga

SEQ ID NO: 295614 - DNA, 120 bp, Artificial Sequence
  ENSG00000132010_5 (sequence is synthesized)
aataaggaatgtaagaaagccttcagttatcttgactcctttcaatcacatgataaagcttgcactaaagagaaaccctatgatggtaaagaatgtacagaaaccttcatttcccattca

SEQ ID NO: 295615 - DNA, 120 bp, Artificial Sequence
  ENSG00000132010_6 (sequence is synthesized)
tgcattcaaagacacagggtaatgcacagtggagatggaccttataaatgtaagttttgtgggaaagccttctattttctcaatttatgtcttatccatgaacgaattcacactggtgtg

SEQ ID NO: 295616 - DNA, 120 bp, Artificial Sequence
  ENSG00000132010_7 (sequence is synthesized)
aaaccatataagtgtaaacaatgtggtaaggcctttactcgttccactacccttccagtacatgaaagaactcacacaggagtgaatgccgatgaatgtaaagaatgtgggaatgcattc

SEQ ID NO: 295617 - DNA, 89 bp, Artificial Sequence
  ENSG00000132010_8 (sequence is synthesized)
agtgaatgccgatgaatgtaaagaatgtgggaatgcattcagttttcctagtgaaattcgtagacataaaaggtctcacactggagaat

SEQ ID NO: 295618 - DNA, 88 bp, Artificial Sequence
  ENSG00000132010_9 (sequence is synthesized)
gtatcataagatggcagtgtgggaaagcctttagatgtggctcacaccttcaaaagcatggaaggactcacactggagagaaacccta

SEQ ID NO: 295619 - DNA, 120 bp, Artificial Sequence
  ENSG00000132010_10 (sequence is synthesized)
ggtaaagccttcagatgtacctcggaccttcaaaggcatgaaaagacacacactgaggataaaccctatggatgtaagcagtgtgggaaaggctttagatgtgcttcacaacttcaaatt

SEQ ID NO: 295620 - DNA, 120 bp, Artificial Sequence
  ENSG00000132010_11 (sequence is synthesized)
catgaaaggacgcacagtggagagaaaccccatgaatgtaaggaatgtggaaaagtattcaagtatttttcttccttgcgtatacatgaaaggacgcacactggagagaagccccatgaa

SEQ ID NO: 295621 - DNA, 120 bp, Artificial Sequence
  ENSG00000132010_12 (sequence is synthesized)
agcaatgtggaaaagcattcaggtatttctcttccttgcatatacatgaaaggacacacactggagataagccatatgagtgtaaggtatgtggcaaagccttcacttgttccagttcca

SEQ ID NO: 295622 - DNA, 86 bp, Artificial Sequence
  ENSG00000132010_13 (sequence is synthesized)
cacactggagagaaaccctatgaatgtaagcactgtggtaaggcctttatttccaattacattcgatacaatgcaagcaatgtggc

SEQ ID NO: 295623 - DNA, 120 bp, Artificial Sequence
  ENSG00000132010_14 (sequence is synthesized)
atcaatgcaagcaatgtggcaaagcctttattcgtgccagttcatgtcgagaacatgaaagaactcataccattaatagatgagaaatccttttagtggaagcaacgggagaagctttct

SEQ ID NO: 295624 - DNA, 120 bp, Artificial Sequence
  ENSG00000132010_15 (sequence is synthesized)
gttgtcccacttcctttgaaacacaagaaaagagagtggtgaaagaacctctggataactgctttttgaattgagaagagagacttgcgataggacaataaaatctagaagaacttggat

SEQ ID NO: 295625 - DNA, 120 bp, Artificial Sequence
  ENSG00000132010_16 (sequence is synthesized)
ggtttcgtaatacaattcacctatagccaatcttgcatgagatttcaaaggcacagaaaaggaaggcatcagtcacatattagaggccccacacagggagagaggtgtgtggctacccgc

SEQ ID NO: 295626 - DNA, 120 bp, Artificial Sequence
  ENSG00000132010_17 (sequence is synthesized)
ttccagcccattttcctgattctttggcttgttaatcgagaatatcccccaaatcacttgtctctgttcctcagagttgtaggtctccagatatgtccccagtgctccacattaaagata

SEQ ID NO: 295627 - DNA, 120 bp, Artificial Sequence
  ENSG00000132010_18 (sequence is synthesized)
catgcccactttgctgtttcttcagaaatgttaaaatgtttaccagagaactaataaatgttgttatggctggaaatactcactgatgcccaactcttctatagattgagttggtttaag

SEQ ID NO: 295628 - DNA, 120 bp, Artificial Sequence
  ENSG00000132010_19 (sequence is synthesized)
aggtctactttgtattgcaagcattgttgtttctacggattagcgagcctgttcttgattaaaccaactagatgggagcttgttcctctgctgcattgtgcagtgattggtctcaccaag

SEQ ID NO: 295629 - DNA, 120 bp, Artificial Sequence
  ENSG00000132010_20 (sequence is synthesized)
ggcttttatgtgagaagagccaccttgctcttatcaggaaatttcaagcatttgctgttattcacaactgaatgtaatgtctcacttcgtttttaactttgtatgagtatacctgactaa

SEQ ID NO: 295630 - DNA, 120 bp, Artificial Sequence
  ENSG00000132010_21 (sequence is synthesized)
aaacactaatgcggtttcttggcaacaaatacttctgttcatgtattttagaaataagcttattaactgtttataacaactgcatactaacaattattattttttaatgaagaagctaca

SEQ ID NO: 295631 - DNA, 120 bp, Artificial Sequence
  ENSG00000132010_22 (sequence is synthesized)
ttacaacctcccattaacatcatgtattagatcaagttgataatgttaccatgttatccggtggtcactgtgagtcagtgttgccatgtggatgtcaggcatatttttcctcatgtagat

SEQ ID NO: 295632 - DNA, 120 bp, Artificial Sequence
  ENSG00000132010_23 (sequence is synthesized)
tttacttttcatgcttatattcttagtttttatctggatcatgaattttcatctattctaaataccaaaggtgatctcatgttcttatgagtgacttctgaccaaagaccaccagtggca

SEQ ID NO: 295633 - DNA, 120 bp, Artificial Sequence
  ENSG00000132010_24 (sequence is synthesized)
taagtgtcgtcaaagagggtgtaataatatactgtggtaatgaatatgaccaaaagccatagatgactgtgagatgtgtgagatattaaaagatagtcacatttcgtgagaagagaaaaa

SEQ ID NO: 295634 - DNA, 120 bp, Artificial Sequence
  ENSG00000132010_25 (sequence is synthesized)
agccaccacaattggctactacttttttaaaaaaatcaccttgagtcctatggggccaatatgtttttgaaaactgaatttcctgcccagtaaagaacaaagtcagcatcactattccaa

SEQ ID NO: 295635 - DNA, 120 bp, Artificial Sequence
  ENSG00000132010_26 (sequence is synthesized)
gcttctagctcatcaatgctgttcattgatttggaacatggacaaaaaatactttgatgaataaatcaggcatggctaccatgtaccatgaatacagaatctaatgatttttaaataaat

SEQ ID NO: 295636 - DNA, 120 bp, Artificial Sequence
  ENSG00000132010_27 (sequence is synthesized)
tcatactaattctggatctgtgttttctccgggtctgtgttttaggaaaaacatggaaagttcagaacattgaagatgagtacaaaaatcccaggagaaatctaaggtaattttctctcg

SEQ ID NO: 295637 - DNA, 120 bp, Artificial Sequence
  ENSG00000132010_28 (sequence is synthesized)
aacacagagtggggggaacatccaggatgcacattcaaccagcaggtaaccatctgtccctgttccttctggattcagtggcctttgaggatgtggctgtcagcttcacccaggaggagt

SEQ ID NO: 295638 - DNA, 80 bp, Artificial Sequence
  ENSG00000132010_29 (sequence is synthesized)
ggattacaggcacgcacacacccggctaatttttgtgttttttagtagagacacctgaagtgattggcctgccttggcct

SEQ ID NO: 295639 - DNA, 120 bp, Artificial Sequence
  ENSG00000132010_30 (sequence is synthesized)
gcttgagtacgggtttcttctgttataagaaagtgaaacccataatgaaaatgcatggtaaggtaacataagaagtcacggtaacaggcaactctagaattaattcatatggagatgatg

SEQ ID NO: 295640 - DNA, 120 bp, Artificial Sequence
  ENSG00000132016_0 (sequence is synthesized)
ctggctggggcggtgctgactgtcgcgggctgcgagggcggtgtttgcgtcgctcatgcgcggggcgggacctcgcggggcgcgggaaagaggcagagcgcgcgcagatttctcaagggg

SEQ ID NO: 295641 - DNA, 120 bp, Artificial Sequence
  ENSG00000132016_1 (sequence is synthesized)
aagataaaatgactaagaggaagaagctgcggacctcaggagagggactctgtcctccaaaacccctaaagaacccaaggctaggagacttctatggggacccccagagttccatgttgg

SEQ ID NO: 295642 - DNA, 120 bp, Artificial Sequence
  ENSG00000132016_2 (sequence is synthesized)
gctgtttacatcaccctgaggagccagagggcaaattgggacctgttccctctacacagcagcacggggaggaaccaggaaaggccgtctccagctcccctgatgaggaaacaggatctc

SEQ ID NO: 295643 - DNA, 120 bp, Artificial Sequence
  ENSG00000132016_3 (sequence is synthesized)
cctgccggctcctccgtcaaccagaaaaggagccagctccccttcctccttcccagaactcattcgggaggtttgttccccagtttgcaaaatccaggaagacagtgacaagaaaagaag

SEQ ID NO: 295644 - DNA, 120 bp, Artificial Sequence
  ENSG00000132016_4 (sequence is synthesized)
agatgaaggatgaggaccgtgggagtggggcctttagcctggaaacaatcgcagagtccagcgcccagagtccaggatgccagctgctagtggagaccctgggggtccccctccaggagg

SEQ ID NO: 295645 - DNA, 120 bp, Artificial Sequence
  ENSG00000132016_5 (sequence is synthesized)
ccacggagctgggggacccaacgcaggcagacagtgcccgccctgagcagagcagccagagccctgtgcaggcggtgcccggcagtggggattctcagcctgatgaccctccagacaggg

SEQ ID NO: 295646 - DNA, 120 bp, Artificial Sequence
  ENSG00000132016_6 (sequence is synthesized)
ggacggggttgtccgcctcacagagggccagccaagaccacctgtcagaacaaggggccgatgacagcaagcctgagacagacagggttccaggtgacggtggccaaaaggaacacctac

SEQ ID NO: 295647 - DNA, 120 bp, Artificial Sequence
  ENSG00000132016_7 (sequence is synthesized)
caagcattgattctgaaggggagaagccagacagaggagccccccaggagggaggggcccaaaggacagcaggggctggcctgcctggagggccccaggaggagggagacggtgtcccct

SEQ ID NO: 295648 - DNA, 120 bp, Artificial Sequence
  ENSG00000132016_8 (sequence is synthesized)
gtaccccagcatcagctcctacctcaggccctgctccaggactgggccctgcctcttggtgcctggaacccgggtctgtggcccagggctcccctgacccccagcagacccccagcagga

SEQ ID NO: 295649 - DNA, 120 bp, Artificial Sequence
  ENSG00000132016_9 (sequence is synthesized)
tgggtagggaaggggaagggactcatagcagcctgggatgctcctccctcgggatggttgtcatcgcagacctgagcacagaccccactgagctggaagagagggctctggaggtggctg

SEQ ID NO: 295650 - DNA, 120 bp, Artificial Sequence
  ENSG00000132016_10 (sequence is synthesized)
acctcgctcactggggaaaccacaggagaaagtggggaggcagggcaggatggcaagccccccggcgatgtcctagtgggccctacagcctccctggctctggcacctgggagcggagag

SEQ ID NO: 295651 - DNA, 120 bp, Artificial Sequence
  ENSG00000132016_11 (sequence is synthesized)
tccatgatgggtgctggagattccggtcatgcatccccggacacaggtccatgtgtcaatcagaagcaggagccaggtcctgctcaagaggaagccgagttaggtggccagaacctcgaa

SEQ ID NO: 295652 - DNA, 120 bp, Artificial Sequence
  ENSG00000132016_12 (sequence is synthesized)
cgagacctcgaggggttccgtgtgtccccgcaagcctctgttgtgctggaacacagagaaatagcagacgaccctctccaggagcccggggctcagcagggcattccagacaccacctca

SEQ ID NO: 295653 - DNA, 120 bp, Artificial Sequence
  ENSG00000132016_13 (sequence is synthesized)
gagctggcagggcagcgagaccacctgcctcattctgcagaccagggcacctgggcagactctttagctgtggaactcgacttcctgctggacagccagatacaggatgccctggacgcc

SEQ ID NO: 295654 - DNA, 120 bp, Artificial Sequence
  ENSG00000132016_14 (sequence is synthesized)
tctgacttcgaagccccacctgagcagctctttccttcggggaacaagccgggcccttgctggccgggccccagctcacatgccaatggagaccctgttgcagtggccaaggcccagccg

SEQ ID NO: 295655 - DNA, 120 bp, Artificial Sequence
  ENSG00000132016_15 (sequence is synthesized)
agccggctgatcatgggcacccaccgggacctggaagctttcaagcgccttaactaccggaagacaaagctgggaggcaaagcccccctgccttacccttccaaggggcctgggaatatc

SEQ ID NO: 295656 - DNA, 120 bp, Artificial Sequence
  ENSG00000132016_16 (sequence is synthesized)
cctcgaggggacccaccctggagggagttgtaggccactttgaggtctgtgtttcctttgccacccagcccccatgtccgcagacctcctccaagatgctccagggggtcctagtggacc

SEQ ID NO: 295657 - DNA, 120 bp, Artificial Sequence
  ENSG00000132016_17 (sequence is synthesized)
ctacaaacctcccttcagttgcccggaagttggtcttccatggacaacacaaaggaggccgtgaggtcctggcctcacctggccagggtcaaggtcatttgccacccttggcttcaggga

SEQ ID NO: 295658 - DNA, 120 bp, Artificial Sequence
  ENSG00000132016_18 (sequence is synthesized)
gggaaactgtgtctcccacagccccagtgacttcaagcgggcctgggctccaggaagctggccacctctgagcagggcccatcctgtccggatttgcaaattttagggtcctgagccaag

SEQ ID NO: 295659 - DNA, 120 bp, Artificial Sequence
  ENSG00000132016_19 (sequence is synthesized)
tatggatggttcagaatttgtttctttcctggaggagaagagagctccctttgttttctttctccccatttccattttatttcttctgggaagacccataataaatgattctgtagaggc

SEQ ID NO: 295660 - DNA, 120 bp, Artificial Sequence
  ENSG00000132016_20 (sequence is synthesized)
ggcagttcatcagagcggcccgctgtggtttgagtgaagagccgggagggttcacatctgaatctccgacagcgtcccagggccaatgcagctcccctccccaccgtcctggatgtctgg

SEQ ID NO: 295661 - DNA, 120 bp, Artificial Sequence
  ENSG00000132016_21 (sequence is synthesized)
aggggagaagcggttgggttctgggcctgctgggcagtggagccagctgggttggccatcagggttctgtcgtgaacagaggaggacaggctggacacctggaaaagatggcgcgaggcc

SEQ ID NO: 295662 - DNA, 120 bp, Artificial Sequence
  ENSG00000132016_22 (sequence is synthesized)
ctgcggaagcccctcccactggagagctctggtagtccagtgaggtcgggccactctcaatttccttccctgctggccaggaccttcgtggggatccaggcctctgaggcctccaggatg

SEQ ID NO: 295663 - DNA, 120 bp, Artificial Sequence
  ENSG00000132016_23 (sequence is synthesized)
cctgtcccctcctcccgtgccctcccacagccctcctcgaagccagcgctgggtggctgccctctctgttacctggcacttgaacctgcctctctgcagaggcggcagcttatcaattat

SEQ ID NO: 295664 - DNA, 120 bp, Artificial Sequence
  ENSG00000132016_24 (sequence is synthesized)
ctcttgtgcatcttcaaggctggatgcccggaccacctgcccccaagcccggccttgccctgcctccttccccgggctctgtcgccgcgcactcgcccttcctgagtcctgcactcctcg

SEQ ID NO: 295665 - DNA, 120 bp, Artificial Sequence
  ENSG00000132016_25 (sequence is synthesized)
ccgcggccgtcgatcccgagccctcgcttccctgcttggccgtcccacttccgcctcgggcctcgggcgccgccgcaccggagcgcggccactgggctcgccgggtctgccgagccgaaa

SEQ ID NO: 295666 - DNA, 120 bp, Artificial Sequence
  ENSG00000132016_26 (sequence is synthesized)
agccgaaactacaactcccggcagatttctcaaggggaagataaaatgactaagaggaagaagctgcggacctcagctcccctgatgaggaaacaggatctccctgccggctcctccgtc

SEQ ID NO: 295667 - DNA, 120 bp, Artificial Sequence
  ENSG00000132016_27 (sequence is synthesized)
cgcggggcgggacctcgcggggcgcgggaaagaggcagagcgcgcgcaggtgtgaggggcggcgacatctgtggggttcagagcgtctgtcagtcaccgacgggctccggcttcacgtgg

SEQ ID NO: 295668 - DNA, 120 bp, Artificial Sequence
  ENSG00000132016_28 (sequence is synthesized)
gctctcggcctgtggagtcctcacttctcggtggtcggcgtagtgtcagtgtggggcttgtcaccgggagcggggtctacagcgcccaccctcaggcctttccatctttcacctccggac

SEQ ID NO: 295669 - DNA, 120 bp, Artificial Sequence
  ENSG00000132016_29 (sequence is synthesized)
tcgaggcctccagcgttctgtgagggccaatttggccatttattttttccaaaaagagtaacgcggataattcaagcgacttattcccaactgatccaggcagagctcgtttctgataag

SEQ ID NO: 295670 - DNA, 120 bp, Artificial Sequence
  ENSG00000132017_0 (sequence is synthesized)
aagtggagggagggggtgaaaatggcgcccagctcgaaatcggagcggaacagcggggctgggagcggcggcggcggccccgggggagccggagggaagcgggcagcagggcggcggcgg

SEQ ID NO: 295671 - DNA, 120 bp, Artificial Sequence
  ENSG00000132017_1 (sequence is synthesized)
gagcacgtcctcaagcagctggagcgggtcaagatcagcggacagctctcccctcgcctcttccggaagctgcctccccgggtgtgcgtgtccctcaagaacattgtggatgaggacttc

SEQ ID NO: 295672 - DNA, 120 bp, Artificial Sequence
  ENSG00000132017_2 (sequence is synthesized)
ctctatgcaggacatatcttcctgggcttttccaaatgcggccgctacgtcctctcctacaccagcagcagtggggatgacgacttctccttctacatctaccatctgtactggtgggag

SEQ ID NO: 295673 - DNA, 120 bp, Artificial Sequence
  ENSG00000132017_3 (sequence is synthesized)
ttcaacgttcacagcaagctcaagctggtccggcaggttcggctattccaggacgaggagatctacagcgacctgtacctgaccgtatgcgagtggcccagcgacgcctccaaggtcatc

SEQ ID NO: 295674 - DNA, 120 bp, Artificial Sequence
  ENSG00000132017_4 (sequence is synthesized)
gtcttcggcttcaacacccgctcggccaacgggatgctcatgaacatgatgatgatgagtgacgagaaccaccgtgacatctacgtcagcaccgtggccgtgccaccgccaggccgctgt

SEQ ID NO: 295675 - DNA, 120 bp, Artificial Sequence
  ENSG00000132017_5 (sequence is synthesized)
gctgcttgccaggatgccagccgagcccacccaggagacccgaatgcacagtgcctacggcatggcttcatgctgcacaccaagtaccaggtggtctaccccttccccaccttccagccc

SEQ ID NO: 295676 - DNA, 120 bp, Artificial Sequence
  ENSG00000132017_6 (sequence is synthesized)
gccttccagctcaagaaggaccaggtggtgctgctcaacaccagctactccctggtggcctgcgccgtctccgtccactcggcaggtgacaggagtttctgccaaatcctgtatgaccac

SEQ ID NO: 295677 - DNA, 120 bp, Artificial Sequence
  ENSG00000132017_7 (sequence is synthesized)
agcacctgccccctggcgcctgccagcccccctgagccccagagcccagagctgccccctgccctccccagcttctgccctgaggcggccccagcccgttcttctgggtctcctgagccc

SEQ ID NO: 295678 - DNA, 120 bp, Artificial Sequence
  ENSG00000132017_8 (sequence is synthesized)
tcgcccgccattgccaaagccaaggagtttgtggctgacatcttccgccgggccaaagaggccaagggcggggtccctgaggaagcccggcctgccctgtgcccaggaccctctggcagc

SEQ ID NO: 295679 - DNA, 120 bp, Artificial Sequence
  ENSG00000132017_9 (sequence is synthesized)
actatgtgctggagtccggagaggggacggagccggaggatgagttggaggacgacaagatctccctgcccttcgtggtgactgatcttcgtggccgcaacctgcggcccatgcgggagc

SEQ ID NO: 295680 - DNA, 120 bp, Artificial Sequence
  ENSG00000132017_10 (sequence is synthesized)
ggactgctgtccagggccagtacctgacagtggagcagctcacactagacttcgaatatgttatcaatgaggtcatccgccacgacgctacctggggccatcagttctgttctttcagcg

SEQ ID NO: 295681 - DNA, 120 bp, Artificial Sequence
  ENSG00000132017_11 (sequence is synthesized)
actatgacatcgtcattctggaggtctgcccagaaaccaaccaggtcctcatcaacattggcctgctgctcctggccttcccgtcccccactgaggagggccagctccgaccaaagacct

SEQ ID NO: 295682 - DNA, 120 bp, Artificial Sequence
  ENSG00000132017_12 (sequence is synthesized)
atcacaccagcctcaaggtggcatgggacctcaacacagggatcttcgagacagtcagtgtaggcgacctgactgaggtcaaagggcagaccagcggcagtgtctggagctcctaccgca

SEQ ID NO: 295683 - DNA, 120 bp, Artificial Sequence
  ENSG00000132017_13 (sequence is synthesized)
agagctgcgtggacatggtcatgaagtggctggtgccggagagcagcggccgctacgtcaacaggatgaccaatgaggcgctgcacaaagggtgctccctgaaggttctggcggacagcg

SEQ ID NO: 295684 - DNA, 120 bp, Artificial Sequence
  ENSG00000132017_14 (sequence is synthesized)
agcgatatacgtggatcgtgctgtgagggccaggccgccccggacactgactccaactacctccgtggcctgggaccggcccccttcctggggtggcctcttcctggccggctggcccac

SEQ ID NO: 295685 - DNA, 120 bp, Artificial Sequence
  ENSG00000132017_15 (sequence is synthesized)
cgactgatgaccggcactagtgttagcctgcggaacggggctgggcagggcagcctctgttggcctgagggtctggacgctttttatttatgcctatttaagttgggaaggggcagagag

SEQ ID NO: 295686 - DNA, 120 bp, Artificial Sequence
  ENSG00000132017_16 (sequence is synthesized)
agggcgccccctgccccaccagcctgagtgccccgccttcaccccgagctgggcatgggcctggcccctcgtgcatttgcccttttctcggctacagctgtggacgttgccctcggggag

SEQ ID NO: 295687 - DNA, 120 bp, Artificial Sequence
  ENSG00000132017_17 (sequence is synthesized)
gtcgaatggaccccattccccctgccctgcccgcccccagcctccccacccaggccggcaacctggccatccccattccgttcttcttcatgtaataaatgttttaatttctgaacctca

SEQ ID NO: 295688 - DNA, 120 bp, Artificial Sequence
  ENSG00000132017_18 (sequence is synthesized)
cgggtcaagagcccctgccgctggctttgggcttcctccgcctgatgttcctctccctgcccaagccccgaccacacatgagctgggagttccagtacctgggtgggcctccccattgaa

SEQ ID NO: 295689 - DNA, 120 bp, Artificial Sequence
  ENSG00000132017_19 (sequence is synthesized)
gagtcttcccccgcagagtgagagttaccgaagcaggctctgtctcctccatcagactggaaactcccagagctgggggatgatgtctctctcccccatcagtttgggagctctggaggg

SEQ ID NO: 295690 - DNA, 120 bp, Artificial Sequence
  ENSG00000132017_20 (sequence is synthesized)
cagaaatgtggatctcttgcagatcagcggacagctctcccctcgcctcttccggaagctgcctccccgggtgtgcgtgtccctcaagaacattgtggatgaggacttcctctatgcagg

SEQ ID NO: 295691 - DNA, 120 bp, Artificial Sequence
  ENSG00000132017_21 (sequence is synthesized)
ctgcccagaaaccaaccaggtcctcatcaacattggcctgctgctcctggccttcccgtcccccactgaggagggccagctccggtgagcgcggggatcctgccctctctgtccactagg

SEQ ID NO: 295692 - DNA, 120 bp, Artificial Sequence
  ENSG00000132017_22 (sequence is synthesized)
ctgggcccctccatagctgttccaaagacaaaaggccctcagggtagcctggggcctggttcaggagcccggctgtcccagcgtttgtcctatgtccctctccactgtagaccaaagacc

SEQ ID NO: 295693 - DNA, 120 bp, Artificial Sequence
  ENSG00000132017_23 (sequence is synthesized)
agttggcaccgtcccctgcgcctacccactcacccgcagggccagtacctgacagtggagcagctcacactagacttcgaatatgttatcaatgaggtcatccgccacgacgctacctgg

SEQ ID NO: 295694 - DNA, 120 bp, Artificial Sequence
  ENSG00000132024_0 (sequence is synthesized)
gtagtttcggctcggcagacccggcgagcccagtggccgcgctccggtgcggcggcgcccgaggcccgaggcggaagtgggacggccaagcagggaagcgagggctcgggatcgacggcc

SEQ ID NO: 295695 - DNA, 120 bp, Artificial Sequence
  ENSG00000132024_1 (sequence is synthesized)
gcggggcgccgacgaggagtgcaggactcaggaagggcgagtgcgcggcgacagagcccggggaaggaggcagggcaaggccgggcttgggggcaggtggtccgggcatccagccttgaa

SEQ ID NO: 295696 - DNA, 120 bp, Artificial Sequence
  ENSG00000132024_2 (sequence is synthesized)
gatgcacaagaggaaaggacccccgggacccccgggcagaggcgccgcggccgcccgccagctgggcctgctggttgacctctccccagatggcctgatgatccctgaggacggggctaa

SEQ ID NO: 295697 - DNA, 120 bp, Artificial Sequence
  ENSG00000132024_3 (sequence is synthesized)
cgatgaagaactggaggctgagttcttggctttggtcgggggccagcccccagccctggagaagctcaaaggcaaaggtcccttgccgatggaggccattgagaagatggccagcctgtg

SEQ ID NO: 295698 - DNA, 120 bp, Artificial Sequence
  ENSG00000132024_4 (sequence is synthesized)
catgagagacccggatgaggatgaggaggaggggacggatgaggacgacttggaggctgatgatgacctgctggcggagctaaatgaggtccttggagaggagcagaaggcttcagagac

SEQ ID NO: 295699 - DNA, 120 bp, Artificial Sequence
  ENSG00000132024_5 (sequence is synthesized)
cccacctcctgtggcccagccgaagcctgaggcccctcatccggggctggagaccaccttgcaggagaggctggcgctctatcagacagcaattgaaagcgccagacaagctggagacag

SEQ ID NO: 295700 - DNA, 120 bp, Artificial Sequence
  ENSG00000132024_6 (sequence is synthesized)
cgccaagatgcggcgctacgatcgggggcttaaaacactggaaaacctgctcgcctccatccgtaagggcaatgccattgacgaagcggacatcccgccgccagtggccataggaaaagg

SEQ ID NO: 295701 - DNA, 120 bp, Artificial Sequence
  ENSG00000132024_7 (sequence is synthesized)
cccggcgtccacgcctacctacagccctgcacccacccagccggcccctagaatcgcgtcagccccagagcccagggtcaccctggagggaccttctgccaccgccccagcctcatctcc

SEQ ID NO: 295702 - DNA, 120 bp, Artificial Sequence
  ENSG00000132024_8 (sequence is synthesized)
aggcttggctaagccccagatgcccccaggtccctgcagccctggccctctggcccagttgcagagccgccagcgcgactacaagctggctgccctccacgccaagcagcagggagatac

SEQ ID NO: 295703 - DNA, 120 bp, Artificial Sequence
  ENSG00000132024_9 (sequence is synthesized)
cactgctgccgctagacacttccgcgtggctaagagctttgatgctgtcttggaggccctgagccggggtgagcccgtggacctctcctgcctgccccctccacccgaccagctgccccc

SEQ ID NO: 295704 - DNA, 120 bp, Artificial Sequence
  ENSG00000132024_10 (sequence is synthesized)
agacccaccgtcaccaccgtcgcagcctccgacccccgctacggcgccctccacaacagaggtgcccccacccccgaggaccctgctggaggcgctggagcagcggatggagcggtacca

SEQ ID NO: 295705 - DNA, 120 bp, Artificial Sequence
  ENSG00000132024_11 (sequence is synthesized)
ggtggccgcagcccaggccaagagcaagggggaccagcggaaagctcgaatgcacgagcgcatcgtcaagcaataccaagatgccatccgagcccacaaggctggccgagccgtggatgt

SEQ ID NO: 295706 - DNA, 120 bp, Artificial Sequence
  ENSG00000132024_12 (sequence is synthesized)
cgctgaattgcccgtgcccccaggcttccccccaatccagggcctggaggccaccaagcccacccagcagagtctggtgggtgtcctggagactgccatgaagctggccaaccaggatga

SEQ ID NO: 295707 - DNA, 120 bp, Artificial Sequence
  ENSG00000132024_13 (sequence is synthesized)
aggcccagaggatgaagaggatgaggtgcctaagaagcagaacagccctgtggcccccacagcccagcccaaagccccaccctcaagaactccccagtcgggatcagccccaacagccaa

SEQ ID NO: 295708 - DNA, 120 bp, Artificial Sequence
  ENSG00000132024_14 (sequence is synthesized)
aaaacgacgtggagggtgccaagatgcacctgcgccaagccaagggactggagcctatgctggaggcctcgcgcaatgggctgcctgtggacatcaccaaggtgccgcctgcccctgtca

SEQ ID NO: 295709 - DNA, 120 bp, Artificial Sequence
  ENSG00000132024_15 (sequence is synthesized)
acaaggacgactttgccctggtccagcggcctggcccgggtctgtctcaggaggccgcccggcgctatggtgaactcaccaagctcatacggcagcagcacgagatgtgcctgaaccact

SEQ ID NO: 295710 - DNA, 120 bp, Artificial Sequence
  ENSG00000132024_16 (sequence is synthesized)
caaaccaattcacccagctgggcaacatcactgaaaccaccaagtttgaaaagttggcggaggactgtaagcggagcatggacattctgaagcaagccttcgtccggggtctccccacgc

SEQ ID NO: 295711 - DNA, 120 bp, Artificial Sequence
  ENSG00000132024_17 (sequence is synthesized)
ccaccgcccgctttgagcaaaggaccttcagcgtcatcaagatcttccctgacctcagcagcaacgacatgctcctcttcatcgtgaagggcatcaacttgcccacacccccaggactgt

SEQ ID NO: 295712 - DNA, 120 bp, Artificial Sequence
  ENSG00000132024_18 (sequence is synthesized)
cccctggcgatctggatgtctttgttcggtttgacttcccctatcccaacgtggaagaagctcagaaagacaagaccagtgtgatcaagaacacagactcccctgagttcaaggagcagt

SEQ ID NO: 295713 - DNA, 120 bp, Artificial Sequence
  ENSG00000132024_19 (sequence is synthesized)
tcaaactctgcatcaaccgcagccaccgtggcttccgaagggccatccagaccaagggcatcaagttcgaagtggttcacaagggggggctgttcaagactgaccgggtgctggggacag

SEQ ID NO: 295714 - DNA, 120 bp, Artificial Sequence
  ENSG00000132024_20 (sequence is synthesized)
cccagctgaagctggatgcactggagatagcatgtgaggtccgggagatccttgaggtcctggatggtcgccggcccacaggggggcgactggaggtaatggtccggattcgggagccac

SEQ ID NO: 295715 - DNA, 120 bp, Artificial Sequence
  ENSG00000132024_21 (sequence is synthesized)
tgacagcccagcagttggagacgacgacagagaggtggctggtcattgaccctgtgccggcagctgtgcccacacaggttgctgggcccaaagggaaggcccctcctgtgcctgcccctg

SEQ ID NO: 295716 - DNA, 120 bp, Artificial Sequence
  ENSG00000132024_22 (sequence is synthesized)
caagggagtcagggaacagatcagcccggcccctgcatagcctcagtgtgctggcgtttgaccaagagcgtctggagcggaagatcctggccctcaggcaggcgcggcggccggtgcccc

SEQ ID NO: 295717 - DNA, 120 bp, Artificial Sequence
  ENSG00000132024_23 (sequence is synthesized)
cagaagtggcccagcagtaccaggacatcatgcaacgcagccagtggcagagggcacagctggagcaggggggtgtgggcatccgacgggaatacgcagcccagctggagcggcagctgc

SEQ ID NO: 295718 - DNA, 120 bp, Artificial Sequence
  ENSG00000132024_24 (sequence is synthesized)
agttctacacggaggctgcccggcgcctgggcaacgatggcagcagggatgctgcaaaggaggcgctctataggcggaatctggtagagagtgagctgcagcggctccgcaggtgaggag

SEQ ID NO: 295719 - DNA, 120 bp, Artificial Sequence
  ENSG00000132024_25 (sequence is synthesized)
cccatggggcgggcagcccccagaaagcgggcagcaggccccgataccgggaagagccgacacagccacgaaccagacaagcagacaatcagcggacaatcggttctggactcacccctc

SEQ ID NO: 295720 - DNA, 120 bp, Artificial Sequence
  ENSG00000132024_26 (sequence is synthesized)
atccgggcccccagccccgccagagcctccgtggctgcgggtgttgggaaccatgcctgccagccagtatgtgcccctcacccaggcctggctgggccctggagagtcctgtttgcacag

SEQ ID NO: 295721 - DNA, 120 bp, Artificial Sequence
  ENSG00000132024_27 (sequence is synthesized)
cccaggggtgtccggcctctggcccgccccggagcagggagggtggctggggccaagccccgagggcccctgcaagcactttacttcctgttcctccccagccttaaccccaaagccctc

SEQ ID NO: 295722 - DNA, 120 bp, Artificial Sequence
  ENSG00000132024_28 (sequence is synthesized)
ctgcaccccaaagaagccactgaggctggccgagccacactgtctccccaggggcgtcgacctggcccagctgggtccccagggccagcacatggaataaaatagccagggccacactca

SEQ ID NO: 295723 - DNA, 120 bp, Artificial Sequence
  ENSG00000132024_29 (sequence is synthesized)
attaattaaaaaaagtaaaggcccaagactctataggtgggagaggaatctgcatctccaccataatggtgtgagttggtctccatcctgacacacaataaccaggcctcgactggccac

SEQ ID NO: 295724 - DNA, 85 bp, Artificial Sequence
  ENSG00000132024_30 (sequence is synthesized)
acgatacagtgatactctgtctcaaaaaagaaaaaaaaaaaaaaaaaggtgtttggggccaggggctttgagtgaggcaggggag

SEQ ID NO: 295725 - DNA, 120 bp, Artificial Sequence
  ENSG00000132024_31 (sequence is synthesized)
aaggtgtttggggccaggggctttgagtgaggcaggggagtagcaaagtcctgggagcccactaaatgaccactgttgtcaccatcagaccctgatccttggggactggactcatcacag

SEQ ID NO: 295726 - DNA, 120 bp, Artificial Sequence
  ENSG00000132024_32 (sequence is synthesized)
tagagagagccatggccgctgggtgggctccaggggaggggagctcctctgaaccaaccatcctgtccccactatacacacatgcacacagggggctgttcaagactgaccgggtgctgg

SEQ ID NO: 295727 - DNA, 120 bp, Artificial Sequence
  ENSG00000132024_33 (sequence is synthesized)
ttaaaacacttcctgccttgagccctctatgagcctgtctgttgacccagcccctcccctcagagcctcagacctccctactgcccagccctaaatacttgcagtaccccactccattat

SEQ ID NO: 295728 - DNA, 88 bp, Artificial Sequence
  ENSG00000132024_34 (sequence is synthesized)
ctgcccagccctaaatacttgcagtaccccactccattatgatcaactggtatctcagccataccatgggctcatattttagaaacca

SEQ ID NO: 295729 - DNA, 120 bp, Artificial Sequence
  ENSG00000132024_35 (sequence is synthesized)
aaaaaccagtcttgttctcccttgtcctggccctgggcctctagtcacttcctgcttcccaccaacagtttctccttacccccacccaggtcctggatggtcgccggcccacaggggggc

SEQ ID NO: 295730 - DNA, 120 bp, Artificial Sequence
  ENSG00000132024_36 (sequence is synthesized)
tgaggccaggagtttgagaccatcctgggccacacagtgagacccccgtctctacaaaaaaattttttaaaattagccaggcatggtgggactcacctgtagtccctgctacttgggaga

SEQ ID NO: 295731 - DNA, 120 bp, Artificial Sequence
  ENSG00000132024_37 (sequence is synthesized)
ttgggagactgaggtgggaggatcacctgaactaaggagttcaaggctgcagtgagccatggtcatgccactgtacgccagtctgggtgacagagcaagacctcatctccaagacaatta

SEQ ID NO: 295732 - DNA, 61 bp, Artificial Sequence
  ENSG00000132024_38 (sequence is synthesized)
gtctgggtgacagagcaagacctcatctccaagacaattaaaaaaaaaaaaaagtgtttgg

SEQ ID NO: 295733 - DNA, 120 bp, Artificial Sequence
  ENSG00000132026_0 (sequence is synthesized)
gcgcggacccaacctggctgctgcagtacttgctctaactttgccgcagctgcctcccttctctcggaacccactctcctaacccacccccgagaggcggagagaatgtgggagcacttc

SEQ ID NO: 295734 - DNA, 120 bp, Artificial Sequence
  ENSG00000132026_1 (sequence is synthesized)
agagaggcctaggctccggagatcgggccatctgggctctgaaagcaaattagttttccaactcatgtctggctccggcgttacccagacgcctggaaggtccttcctgcagtctgatca

SEQ ID NO: 295735 - DNA, 120 bp, Artificial Sequence
  ENSG00000132026_2 (sequence is synthesized)
ccatttttcctgctgcactgaccaatcagctccccttggccttcaacctcgggaatgatggattaggggagtctagaaatggacgaagccctagaaacgcagctgaagacgagcagagga

SEQ ID NO: 295736 - DNA, 120 bp, Artificial Sequence
  ENSG00000132026_3 (sequence is synthesized)
cgcttctcggctacagaatccctccccaccttggagctcttatctcaggtggacatggactgcagggtccacatgcgacccatcggcctgacgtgggtgctgcaactgaccttggcatgg

SEQ ID NO: 295737 - DNA, 120 bp, Artificial Sequence
  ENSG00000132026_4 (sequence is synthesized)
atcctgctagaagcctgtggagggagccgcccactccaagccaggtcccagcaacaccatgggctggcagctgatctgggcaaaggcaagctgcacctggcaggaccttgttgtccctca

SEQ ID NO: 295738 - DNA, 120 bp, Artificial Sequence
  ENSG00000132026_5 (sequence is synthesized)
cacaacagagacatcgggccctggaaaccatccagaacgctgtggagtgccgagccctgaatgcgaatccttcctggaacacctccaacgtgcccttcgcagtcgcttccgcctgcggct

SEQ ID NO: 295739 - DNA, 120 bp, Artificial Sequence
  ENSG00000132026_6 (sequence is synthesized)
attgggggtacgccaggcacagccgctctgcgaggagctctgccaggcctggttcgccaactgcgaagatgatatcacctgcggcccgacttggctcccactctcagaaaaaaggggctg

SEQ ID NO: 295740 - DNA, 120 bp, Artificial Sequence
  ENSG00000132026_7 (sequence is synthesized)
tgagcccagctgccttacctatggacagaccttcgcagacgggacggacctttgtcgctcggctctgggccacgccctaccggtggctgctcctggagcccgtcactgcttcaacatctc

SEQ ID NO: 295741 - DNA, 120 bp, Artificial Sequence
  ENSG00000132026_8 (sequence is synthesized)
catctccgcggtacctcgtcccagaccaggacgacggggccgggaagctccctcccggcgttcccgcagccctcgcacctccatcctggacgctgcgggcagcgggagtggcagtggaag

SEQ ID NO: 295742 - DNA, 120 bp, Artificial Sequence
  ENSG00000132026_9 (sequence is synthesized)
cggcagcggcccctagcggacgcgtggccctgagttgggggagcgacccttcccccagccccgcccctcaggacacccagaaccccacccctcgtcctctcggccttctgtaatagtttt

SEQ ID NO: 295743 - DNA, 120 bp, Artificial Sequence
  ENSG00000132026_10 (sequence is synthesized)
gagatgtctgtccctcctccctggagctccagagacccacccctctccaggttatcccagaaatgacccaactctctcacttttccctctcccctttgaataaagtcgccagctagagca

SEQ ID NO: 295744 - DNA, 120 bp, Artificial Sequence
  ENSG00000132026_11 (sequence is synthesized)
gcagggagcgagagagggaggagggaggccgcatagaagagagggaggaattactgaacaggagagggggattggaagacctagggaggtccccttcattctgagaaaagaaggggtctc

SEQ ID NO: 295745 - DNA, 120 bp, Artificial Sequence
  ENSG00000132026_12 (sequence is synthesized)
gtagtggaggaggtggaatgaagagtgagaaagctgtctaggtgcctgtccaattagggcagtaggaagaatcctgatggccaggcagctcttatctcaggtggacatggactgcagggt

SEQ ID NO: 295746 - DNA, 120 bp, Artificial Sequence
  ENSG00000132026_13 (sequence is synthesized)
ctgagtctgggcccattctcggctttatctaaactccagattaccaagcctggggctgagccccaaggaggctcagaagggccagaccccaggcagggccttggggcacagatatcatca

SEQ ID NO: 295747 - DNA, 120 bp, Artificial Sequence
  ENSG00000132026_14 (sequence is synthesized)
tacaggtgtgagccaccgcccccggcccccaccaagttctttcttaccgtgtctagaccccagagaccggattggtactccccaggtccctgctcccacccttccctagcccaacctcct

SEQ ID NO: 295748 - DNA, 120 bp, Artificial Sequence
  ENSG00000132026_15 (sequence is synthesized)
actgggttgtgccctttgaccccaaaagctctcgaagtccagatttgcccttcccaagaaaccattcctgctctgggtccatccacattttaccctggaggacccagaagcccagtcact

SEQ ID NO: 295749 - DNA, 120 bp, Artificial Sequence
  ENSG00000132026_16 (sequence is synthesized)
ctctacaaaaccccagccttgatacagacctctctgcgcgccccccaactgccccaaccctgattcatcccgctagggcccagtaagaacattcaccctccccaaggacctgcccccact

SEQ ID NO: 295750 - DNA, 120 bp, Artificial Sequence
  ENSG00000132026_17 (sequence is synthesized)
cacgttccgcacatagactcccaggccgcacgctccggctctgaccccaatccctaaggaatttacacatttttcccttcccgaggccacgccccccacgtctctggactccgcccacta

SEQ ID NO: 295751 - DNA, 80 bp, Artificial Sequence
  ENSG00000132031_0 (sequence is synthesized)
ccgacggacaccaccaggcccacggagcccaccatgccgcgcccggcccccgcgcgccgcctcccgggactcctcctgct

SEQ ID NO: 295752 - DNA, 120 bp, Artificial Sequence
  ENSG00000132031_1 (sequence is synthesized)
gacccgaggtcccgggggcagccctggacgccgcccctctcctgcggctcccgacggcgcgcccgcttccgggaccagcgagcctggccgcgcccgcggtgcaggtgtttgcaagagcag

SEQ ID NO: 295753 - DNA, 120 bp, Artificial Sequence
  ENSG00000132031_2 (sequence is synthesized)
tggccgcgcccgcggtgcaggtgtttgcaagagcagacccttggacctggtgtttatcattgatagttctcgtagcgtacggcccctggaattcaccaaagtgaaaacttttgtctcccg

SEQ ID NO: 295754 - DNA, 120 bp, Artificial Sequence
  ENSG00000132031_3 (sequence is synthesized)
gataatcgacactctggacattgggccagccgacacgcgggtggcagtggtgaactatgctagcactgtgaagatcgagttccaactccaggcctacacagataagcagtccctgaagca

SEQ ID NO: 295755 - DNA, 120 bp, Artificial Sequence
  ENSG00000132031_4 (sequence is synthesized)
ggccgtgggtcgaatcacacccttgtcaacaggcaccatgtcaggcctagccatccagacagcaatggacgaagccttcacagtggaggcaggggctcgagagccctcttctaacatccc

SEQ ID NO: 295756 - DNA, 120 bp, Artificial Sequence
  ENSG00000132031_5 (sequence is synthesized)
taaggtggccatcattgttacagatgggaggccccaggaccaggtgaatgaggtggcggctcgggcccaagcatctggtattgagctctatgctgtgggcgtggaccgggcagacatggc

SEQ ID NO: 295757 - DNA, 120 bp, Artificial Sequence
  ENSG00000132031_6 (sequence is synthesized)
gtccctcaagatgatggccagtgagcccctagaggagcatgttttctacgtggagacctatggggtcattgagaaactttcctctagattccaggaaaccttctgtgcgctggacccctg

SEQ ID NO: 295758 - DNA, 120 bp, Artificial Sequence
  ENSG00000132031_7 (sequence is synthesized)
tgtgcttggaacacaccagtgccagcacgtctgcatcagtgatggggaaggcaagcaccactgtgagtgtagccaaggatacaccttgaatgccgacaagaaaacgtgttcagctcttga

SEQ ID NO: 295759 - DNA, 120 bp, Artificial Sequence
  ENSG00000132031_8 (sequence is synthesized)
taggtgtgctcttaacacccacggatgtgagcacatctgtgtgaatgacagaagtggctcttatcattgtgagtgctatgaaggttataccttgaatgaagacaggaaaacttgttcagc

SEQ ID NO: 295760 - DNA, 120 bp, Artificial Sequence
  ENSG00000132031_9 (sequence is synthesized)
tcaagataaatgtgctttgggtacccatgggtgtcagcacatttgtgtgaatgacagaacagggtcccatcattgtgaatgctatgagggctacactctgaatgcagataaaaaaacatg

SEQ ID NO: 295761 - DNA, 120 bp, Artificial Sequence
  ENSG00000132031_10 (sequence is synthesized)
tgccagcacatttgtgtgagtgatggggccgcatcctaccactgtgattgctatcctggctacaccttaaatgaggacaagaaaacatgttcagccactgaggaagcacgaagacttgtt

SEQ ID NO: 295762 - DNA, 120 bp, Artificial Sequence
  ENSG00000132031_11 (sequence is synthesized)
tccactgaagatgcttgtggatgtgaagctacactggcattccaggacaaggtcagctcgtatcttcaaagactgaacactaaacttgatgacattttggagaagttgaaaataaatgaa

SEQ ID NO: 295763 - DNA, 120 bp, Artificial Sequence
  ENSG00000132031_12 (sequence is synthesized)
tatggacaaatacatcgttaaattgctccaatttctcacctgaaaatgtggacagcttggtgtacttaatactcatgcattcttttgcacacctgttattgccaatgttcctgctaataa

SEQ ID NO: 295764 - DNA, 120 bp, Artificial Sequence
  ENSG00000132031_13 (sequence is synthesized)
tttgccattatctgtattaatgcttgaatattactggataaattgtatgaagatcttctgcagaatcagcatgattcttccaaggaaatacatatgcagatacttattaagagcaaactt

SEQ ID NO: 295765 - DNA, 120 bp, Artificial Sequence
  ENSG00000132031_14 (sequence is synthesized)
tagtgtctctaagttatgactgtgaaatgattggtaggaaatagaatgaaaagtttagtgtttctttatctactaattgagccatttaatttttaaatgtttatattagataaccatatt

SEQ ID NO: 295766 - DNA, 120 bp, Artificial Sequence
  ENSG00000132031_15 (sequence is synthesized)
cacaatggaaactttaggtctagtttcttttgatagtatttataatataaatcaatcttattactgagagtgcaaattgtacaaggtatttacacatacaacttcatataactgagatga

SEQ ID NO: 295767 - DNA, 120 bp, Artificial Sequence
  ENSG00000132031_16 (sequence is synthesized)
atgtaattttgaactgtttaacactttttgttttttgcttattttgttggagtattattgaagatgtgatcaatagattgtaatacacatatctaaaaatagttaacacagatcaagtga

SEQ ID NO: 295768 - DNA, 120 bp, Artificial Sequence
  ENSG00000132031_17 (sequence is synthesized)
acattacattgccatttttaattcattctggtctttgaaagaaatgtactactaaagagcactagttgtgaatttagggtgttaaactttttaccaagtacaaaaatcccaaattcactt

SEQ ID NO: 295769 - DNA, 120 bp, Artificial Sequence
  ENSG00000132031_18 (sequence is synthesized)
actttattattttgcttcaggatccaagtgacaaagttatatatttataaaattgctataaatcgacaaaatctaatgttgtctttttaatgttagtgatccacctgcctcagcctccca

SEQ ID NO: 295770 - DNA, 120 bp, Artificial Sequence
  ENSG00000132031_19 (sequence is synthesized)
gctgggattacaggcttgaaagtctaacttttttttacttatatatttgatacatataattcttttggctttgaaacttgcaactttgagaacaaaacagtcctttaaattttgcactgc

SEQ ID NO: 295771 - DNA, 120 bp, Artificial Sequence
  ENSG00000132031_20 (sequence is synthesized)
ctgctcaattctgtttttcgtttgcattgtctttaatataataaaagttattacctttacatattatcatgtctatttttgatgactcatcaattttgtctattaaagatatttctttaa

SEQ ID NO: 295772 - DNA, 120 bp, Artificial Sequence
  ENSG00000132031_21 (sequence is synthesized)
cttcactctctaatcatacacatcatcattactaaccctgtatcatttccccatctgtgcttgtgtgtgtgtgtgtgtgtgtgcatgtgtctcctggtcagtcttttctgttacactttg

SEQ ID NO: 295773 - DNA, 120 bp, Artificial Sequence
  ENSG00000132031_22 (sequence is synthesized)
taagctatgaaggcaggcacttggtcaatatagtgctttttgtgcagcatcaaacttagctccatgtatgattaggtccctaaaacattacttttggtgatgatgatgatgatccatgag

SEQ ID NO: 295774 - DNA, 120 bp, Artificial Sequence
  ENSG00000132031_23 (sequence is synthesized)
tagctggggatgctagaagcattgatagtcatcgggaaaggctggaggtaagttctggaatatagtcaagactcagtgctgcccagtgctgtgggtagaaaaaaaggaaaggtaccctta

SEQ ID NO: 295775 - DNA, 120 bp, Artificial Sequence
  ENSG00000132031_24 (sequence is synthesized)
aaaacaggcttgctcctgcagcatggggcctgttgctgactactgactactacattctcagcacttgtggggaccaaatggaagcttctcctctcaaacatttgtgtttacttttctatt

SEQ ID NO: 295776 - DNA, 120 bp, Artificial Sequence
  ENSG00000132109_0 (sequence is synthesized)
agacttgcttctgagcggaaactgaaagtgaaatagggagctggctaccagcgttgagtcccctgtaaagccaaaccccctaaaggtctccacactgctgtttaacggcacacttgacaa

SEQ ID NO: 295777 - DNA, 120 bp, Artificial Sequence
  ENSG00000132109_1 (sequence is synthesized)
tggcttcagcagcacgcttgacaatgatgtgggaggaggtcacatgccctatctgcctggaccccttcgtggagcctgtgagcatcgagtgtggccacagcttctgccaggaatgcatct

SEQ ID NO: 295778 - DNA, 120 bp, Artificial Sequence
  ENSG00000132109_2 (sequence is synthesized)
ctcaggttgggaaaggtgggggcagcgtctgtcctgtgtgccggcagcgctttctgctcaagaatctccggcccaatcgacagctagccaacatggtgaacaaccttaaagaaatcagcc

SEQ ID NO: 295779 - DNA, 120 bp, Artificial Sequence
  ENSG00000132109_3 (sequence is synthesized)
aggaggccagagagggcacacagggggaacggtgtgcagtgcatggagagagacttcacctgttctgtgagaaagatgggaaggccctttgctgggtatgtgcccagtctcggaaacacc

SEQ ID NO: 295780 - DNA, 120 bp, Artificial Sequence
  ENSG00000132109_4 (sequence is synthesized)
gtgaccacgccatggtccctcttgaggaggctgcacaggagtaccaggagaagctccaggtggcattaggggaactgagaagaaagcaggagttggctgagaagttggaagtggaaattg

SEQ ID NO: 295781 - DNA, 120 bp, Artificial Sequence
  ENSG00000132109_5 (sequence is synthesized)
caataaagagagcagactggaagaaaacagtggaaacacagaaatctaggattcacgcagagtttgtgcagcaaaaaaacttcctggttgaagaagaacagaggcagctgcaggagctgg

SEQ ID NO: 295782 - DNA, 120 bp, Artificial Sequence
  ENSG00000132109_6 (sequence is synthesized)
agaaggatgagagggagcagctgagaatcctgggggagaaagaggccaagctggcccagcagagccaggccctacaggagctcatctcagagctagatcgaaggtgccacagctcagcac

SEQ ID NO: 295783 - DNA, 120 bp, Artificial Sequence
  ENSG00000132109_7 (sequence is synthesized)
tggaactgctgcaggaggtgataattgtcctggaaaggagtgagtcctggaacctgaaggacctggatattacctctccagaactcaggagtgtgtgccatgtgccagggctgaagaaga

SEQ ID NO: 295784 - DNA, 120 bp, Artificial Sequence
  ENSG00000132109_8 (sequence is synthesized)
cagtccacatcactctggatccagacacagccaatccgtggctgatactttcagaagatcggagacaagtgaggcttggagacacccagcagagcatacctggaaatgaagagagatttg

SEQ ID NO: 295785 - DNA, 120 bp, Artificial Sequence
  ENSG00000132109_9 (sequence is synthesized)
atagttatcctatggtcctgggtgcccagcactttcactctggaaaacattactgggaggtagatgtgacaggaaaggaggcctgggacctgggtgtctgcagagactctgtgcgcagga

SEQ ID NO: 295786 - DNA, 120 bp, Artificial Sequence
  ENSG00000132109_10 (sequence is synthesized)
aggggcactttttgcttagttccaagagtggcttctggacaatttggttgtggaacaaacaaaaatatgaggctggcacctacccccagactcccctccaccttcaggtgcctccatgcc

SEQ ID NO: 295787 - DNA, 120 bp, Artificial Sequence
  ENSG00000132109_11 (sequence is synthesized)
aagttgggattttcctggactatgaggctggcatggtctccttctacaacatcactgaccatggctccctcatctactccttctctgaatgtgcctttacaggacctctgcggcccttct

SEQ ID NO: 295788 - DNA, 120 bp, Artificial Sequence
  ENSG00000132109_12 (sequence is synthesized)
tcagtcctggtttcaatgatggaggaaaaaacacagcccctctaaccctctgtccactgaatattggatcacaaggatccactgactattgatggctttctctggacactgccactctcc

SEQ ID NO: 295789 - DNA, 120 bp, Artificial Sequence
  ENSG00000132109_13 (sequence is synthesized)
ccattggcaccgcttctcagccacaaaccctgcctcttttccccatgaactctgaaccacctttgtctctgcagaggcatccggatcccagcaagcgagctttagcagggaagtcacttc

SEQ ID NO: 295790 - DNA, 120 bp, Artificial Sequence
  ENSG00000132109_14 (sequence is synthesized)
accatcaacattcctgccccagatggctttgtgattccctccagtgaagcagcctccttatatttggcccaaactcatcttgatcaaccaaaaacatgtttctgccttctttatgggact

SEQ ID NO: 295791 - DNA, 120 bp, Artificial Sequence
  ENSG00000132109_15 (sequence is synthesized)
taagttttttttttctcctctccatctctaggatgtcgtctttggtgagatctctattatatcttgtatggtttgcaaaagggcttcctaaaaataaaaaataaaatttaaaaaactgtg

SEQ ID NO: 295792 - DNA, 120 bp, Artificial Sequence
  ENSG00000132122_0 (sequence is synthesized)
atgacaacgagtctgcgccccgcgctcagctgcttctccggcggaacccaggctggaccgcgggccccggcctgggggccactgctgccaccgccgccgccacctcgtctcctccccgtc

SEQ ID NO: 295793 - DNA, 120 bp, Artificial Sequence
  ENSG00000132122_1 (sequence is synthesized)
cccgcccagccccaggtctccccgcctcactcgggcccgtggccggggtcactccccgccgcccctccccgcacggatgccgaaggtgaaggcgctgcagtgcgccctggcgctggagat

SEQ ID NO: 295794 - DNA, 120 bp, Artificial Sequence
  ENSG00000132122_2 (sequence is synthesized)
cagctcagtaacttgcccaggagtcgtgcttaaagacaaagaggacatctatcttagcatctgtgtgtttggccaatacaaaaagacacaatgtgtcccagccacttttcccctggtctt

SEQ ID NO: 295795 - DNA, 120 bp, Artificial Sequence
  ENSG00000132122_3 (sequence is synthesized)
caatgccagaatggtgtttgaaaaggtgttcccggacgcagtagatcctggagatgtggttacacagcttgaatatgatacagcagtgttcgagttgatacagctagttccaccagtggg

SEQ ID NO: 295796 - DNA, 120 bp, Artificial Sequence
  ENSG00000132122_4 (sequence is synthesized)
tgaaacactgtctacgtatgacgaaaatacacgagatttcatgtttccgggtccaaaccaaatgtctggacaccatgattcaaaccgccaggttaccatgaggaggatttctggccttcg

SEQ ID NO: 295797 - DNA, 120 bp, Artificial Sequence
  ENSG00000132122_5 (sequence is synthesized)
aggaaatgctccaaggctggaattttctacgacttcagtgattactgaatgtctgataagttcaaggaaatgccacactcaggataaatttatttaccatttggctccagttgaaaaatc

SEQ ID NO: 295798 - DNA, 120 bp, Artificial Sequence
  ENSG00000132122_6 (sequence is synthesized)
acatggcagactgcaaaacagaacatcaagatcacaaaagaaaaaatccaagtcacctgagagaagtaaatactgtataaatgcaaaaaactacgaacagcctacaatttcttcaaaatc

SEQ ID NO: 295799 - DNA, 120 bp, Artificial Sequence
  ENSG00000132122_7 (sequence is synthesized)
acactctccatctccctacacaaaaagacgcatgtgtgagctatctgaagacaccaggcggcggctggcccatttaaatctgggaccctatgagttcaaaaaagaaacagataaacctcc

SEQ ID NO: 295800 - DNA, 120 bp, Artificial Sequence
  ENSG00000132122_8 (sequence is synthesized)
atttgtgattagacatgttgatcccccaagtcccagggctgatactttattgggatcttctggaagagactgtgaaagagatggatggtcaagggtgcacaatgatcattctcatcttgg

SEQ ID NO: 295801 - DNA, 120 bp, Artificial Sequence
  ENSG00000132122_9 (sequence is synthesized)
ctgctgccgacccaaggattataaggttatcaggacaccccatgggagagacttcgatgactctttagaaaaatgtgaagagtatttgagcccaaggtcgtgtagtaagccccggcattc

SEQ ID NO: 295802 - DNA, 120 bp, Artificial Sequence
  ENSG00000132122_10 (sequence is synthesized)
agcgaggaccttgctagtccattcagcaccctcaacaatgccaaagcattctccaagccctgtgttaaatagagcttctctcagggaaagatttcattctgattggtgttcaccttcaaa

SEQ ID NO: 295803 - DNA, 120 bp, Artificial Sequence
  ENSG00000132122_11 (sequence is synthesized)
ctgcgatgagatccatgaccgggtaaaaaatgtcttgaaatcacatcaggctcatcaaagacatttatatgatgagagagacctagagaaagatgatgaactggaactgaaaagaagtct

SEQ ID NO: 295804 - DNA, 120 bp, Artificial Sequence
  ENSG00000132122_12 (sequence is synthesized)
tttatgtagagactctgcctatgacagtgaccccgagtatagctcatgtcagcagccacgtggcactttccatttggatgacggtgaatactggtccaacagggcagcctcttataaggg

SEQ ID NO: 295805 - DNA, 120 bp, Artificial Sequence
  ENSG00000132122_13 (sequence is synthesized)
aaaatcccaccgacccatctttgagaacagcatggacaagatgtacaggaacttatacaaaaaggcctgtagttctgcttcacatacacaggaaagcttctgagaccatccatgataaac

SEQ ID NO: 295806 - DNA, 120 bp, Artificial Sequence
  ENSG00000132122_14 (sequence is synthesized)
ctcattagtgtccgtgtcaatttctcaatgaaaatgtttgatgtgatcaatatctgtattcctttttttaaaaaaaatgggattataactaagtacaatagttatacttgaataagttca

SEQ ID NO: 295807 - DNA, 120 bp, Artificial Sequence
  ENSG00000132122_15 (sequence is synthesized)
ttacttcaaatggtaaattatcataggcaagccttttaaaataattattacagaagagtctgctgtgttacaaacattagagctctgtcacacaatcacaacttccaatatgtgacaagg

SEQ ID NO: 295808 - DNA, 120 bp, Artificial Sequence
  ENSG00000132122_16 (sequence is synthesized)
atattctgttacatgtacacctcatattccatctgcaaatccaagaatagttcctttctagaaatgttttttttgccttactcaccttgcaattttcttctcatctacttaactggttat

SEQ ID NO: 295809 - DNA, 120 bp, Artificial Sequence
  ENSG00000132122_17 (sequence is synthesized)
cttgcctgtgtaagatttaattaatattgactaccttttcttggtgatgaacaaaatgatatcctatacagaaatgaatttcctaagggtttaaaccctgttttcactaacattttctac

SEQ ID NO: 295810 - DNA, 120 bp, Artificial Sequence
  ENSG00000132122_18 (sequence is synthesized)
tttttcctttttcagaacaggctattctatttcttagctcataggctttctttttaaagactatatgatcattcactcctttttctctggaagaactgtgtaagttgcttaaaatgcata

SEQ ID NO: 295811 - DNA, 120 bp, Artificial Sequence
  ENSG00000132122_19 (sequence is synthesized)
gcagttagctagaaatatcagtgccatggatgatcaaaaatttgaataactaatttttaaagataaaattctttgcatgattttttttctagggccataccttttggtgcaaccagaatc

SEQ ID NO: 295812 - DNA, 120 bp, Artificial Sequence
  ENSG00000132122_20 (sequence is synthesized)
gtaagtaccatatggcccaaggcactattatagtatcctcactttaaaaaaaaaaacacttggaaccacaatgtgagtaaaatattatagcagaacgctttgtggtagacactgaaaatg

SEQ ID NO: 295813 - DNA, 120 bp, Artificial Sequence
  ENSG00000132122_21 (sequence is synthesized)
ttgttgattgatggatagaattaacttctcctcccccaccccagcacacacctgtgaagccaatgatactataaagacataaagaaatcagctactttatatttaatagagagtgagggg

SEQ ID NO: 295814 - DNA, 120 bp, Artificial Sequence
  ENSG00000132122_22 (sequence is synthesized)
agggaaaggagagtgtaggaataagtgaactgggcttatagtcttgaagagttgcctaaaagataatattttctcattgactctgtttttgattaattttacagttatgattgaaaaaga

SEQ ID NO: 295815 - DNA, 120 bp, Artificial Sequence
  ENSG00000132122_23 (sequence is synthesized)
acaaaatgaacttcctttaaaatgaaattaaaatgtgaaacttgctgacttatttttgtagtagaacttgttaacatcatgttaagggtgctttagtatcacagtctgtgatatatcaga

SEQ ID NO: 295816 - DNA, 120 bp, Artificial Sequence
  ENSG00000132122_24 (sequence is synthesized)
aagggcattagagctatctctatgagccaggagtcctaggctttagtatcccatgtctgccgttttctagctgagtctatttaattctcagatcctttgtttcctcagctatcaaatgat

SEQ ID NO: 295817 - DNA, 120 bp, Artificial Sequence
  ENSG00000132122_25 (sequence is synthesized)
aagaatgtagtagaccccaaactatgttctgtggaccaagatcactgttttaggagataatcgtaggaatgtaggtataagtatgtaattggccatctaagtttaggaaaatctgtttgc

SEQ ID NO: 295818 - DNA, 120 bp, Artificial Sequence
  ENSG00000132122_26 (sequence is synthesized)
cacacacacacacacacacacacctcttagagagtcatatgtaggattatagaggtaaaaagagatgatattaatgctggaatagcgcctgtaaactggggctgtctacagcaaattagg

SEQ ID NO: 295819 - DNA, 120 bp, Artificial Sequence
  ENSG00000132122_27 (sequence is synthesized)
tggggctgtctacagcaaattaggatatatggtcactgtgctcattgtgaacagtagcttgttcgaggctttaagaaaattctggtataaatctgtcttactctgcatctagtagacagc

SEQ ID NO: 295820 - DNA, 120 bp, Artificial Sequence
  ENSG00000132122_28 (sequence is synthesized)
ctggcatgtaattgatgttccttaaatatttatcgaattaacccagaattttctaaactaaatttagcatgtaccactatttgttattcttgccaccaccccccattcccctagctcctc

SEQ ID NO: 295821 - DNA, 120 bp, Artificial Sequence
  ENSG00000132122_29 (sequence is synthesized)
acactacctgccaatgtcatcctaaggtacatgtggatacctaggttgtagaaatgctggactacacaattgctgagttactctctggctgtagattatatgatgaggtattttacaatc

SEQ ID NO: 295822 - DNA, 120 bp, Artificial Sequence
  ENSG00000132122_30 (sequence is synthesized)
agcttttgaaggtcaacattgaataatgctcttttaaaaaaattatatcctcagtgtttttccatggaaaaataagtgaaaattcttttaagagttgctgtttggtgaaaagaacaaaca

SEQ ID NO: 295823 - DNA, 120 bp, Artificial Sequence
  ENSG00000132122_31 (sequence is synthesized)
tgactttcaaagaaaatgttttactatcaccaaaatctcccaagtgaataagtaccacagaaattacttattgcacctgtatctgccattggctgtgaaaaaggctgcaaaaagtagggc

SEQ ID NO: 295824 - DNA, 120 bp, Artificial Sequence
  ENSG00000132122_32 (sequence is synthesized)
tgaaagggaaactttagaaactaatactctgaaagatgttttcctatggattaaatttagtgtctttctgaaagttgggggcaaattcccagatactaatagcatctttgctaagtgtct

SEQ ID NO: 295825 - DNA, 120 bp, Artificial Sequence
  ENSG00000132122_33 (sequence is synthesized)
gattatcttctatcccctaggaggaaagagtggtccatgttgctgtaactactactatgagtgcttatgctgtattgtttttaaagagtaaaacctttaagtactaatagttgtcttttc

SEQ ID NO: 295826 - DNA, 120 bp, Artificial Sequence
  ENSG00000132122_34 (sequence is synthesized)
tcattcacaggagcagaaaggtgcagttgtttattctcttagccttttttttttcctgtatttcccacaaatctagaaataattattggagttaatatgaaagataaataggcttttctt

SEQ ID NO: 295827 - DNA, 120 bp, Artificial Sequence
  ENSG00000132122_35 (sequence is synthesized)
tttactttttaatttttttctttaaatcataaaaaaccttgggatttagaaaaatgtcaaaatcgacaaataaagatgaatcattggaatgagactcttccttggttctactagctagtt

SEQ ID NO: 295828 - DNA, 120 bp, Artificial Sequence
  ENSG00000132122_36 (sequence is synthesized)
atataaccttatttaagtcatttatgcttcttggagctcagttttctcaccaacaaggtgataaaagggttaatttagaatgatcctttgacatttcataattgtacaattaatatgtac

SEQ ID NO: 295829 - DNA, 120 bp, Artificial Sequence
  ENSG00000132122_37 (sequence is synthesized)
gatcaggaagtcctaggcaggcagagttgttttctgatttccaaagattaagcccctgatgaaaaatctggaacaaatagagaattttcattattgtgttcatttgctaataatagcttt

SEQ ID NO: 295830 - DNA, 120 bp, Artificial Sequence
  ENSG00000132122_38 (sequence is synthesized)
attgagatataattcactctgaaaaagtatacaattaagtggtttttactatattcacagagttgtgcaacaataaccactcactaattacagaatattttataactcccaaaagaaatc

SEQ ID NO: 295831 - DNA, 120 bp, Artificial Sequence
  ENSG00000132122_39 (sequence is synthesized)
ctgtaaccattagtgatcacttcccactacctcctccccacaactcctggaaaccactatatgctttttgtctccatgcctattctggacatttcatataaatggaaccatacaacatgt

SEQ ID NO: 295832 - DNA, 120 bp, Artificial Sequence
  ENSG00000132122_40 (sequence is synthesized)
gacctattgtatgtggcttctttcacttagcaaaatattttgagagttcatgcatgttgtaacacgtatgaatacttcattcctttttattactaaataataatccatcatatgaatata

SEQ ID NO: 295833 - DNA, 120 bp, Artificial Sequence
  ENSG00000132122_41 (sequence is synthesized)
gatgtcacagagatgggtgaaatggatatggtagaaaaattctgaattactttttgaaatcattgaacaaggtggagaaggtccagaagcataccatgaactacagaagaaggaaagatg

SEQ ID NO: 295834 - DNA, 120 bp, Artificial Sequence
  ENSG00000132122_42 (sequence is synthesized)
agggtatctttcttgtagtgggtgaaacactgtctacgtatgacgaaaatacacgagatttcatgtttccgggtccaaaccaaatgtctggacaccatgattcaaaccgccaggttacca

SEQ ID NO: 295835 - DNA, 120 bp, Artificial Sequence
  ENSG00000132122_43 (sequence is synthesized)
caaagacatttatatgttagtttctaaaatttttttttgaagactatttataataggtcaagaaaaccaccaaagatgcctaaagcttacaaaatttagtcaccgggaagaaaaaaagaa

SEQ ID NO: 295836 - DNA, 120 bp, Artificial Sequence
  ENSG00000132122_44 (sequence is synthesized)
agcaagcaagctccatttgatggaagtcagtggttttgcccaaggcaacatatctaaatgcctgcttgacctaagtcattatgcaaaatgtttgaaatagaccatcttaactataaacaa

SEQ ID NO: 295837 - DNA, 120 bp, Artificial Sequence
  ENSG00000132122_45 (sequence is synthesized)
gttattctgaaatatctttcaacttctagcttatattaataatacttttctcttctgactgctaccctagcagtctaagatgggaaattaatttagaatgaaagaacttgctttttttca

SEQ ID NO: 295838 - DNA, 120 bp, Artificial Sequence
  ENSG00000132122_46 (sequence is synthesized)
gtcttcagacctgacagagatcaagctgtgttatgaatgccatgttaaatcctctcagtaccggtttcctttcttatacaatagatagcataataacgctaccaattgaacttggttgta

SEQ ID NO: 295839 - DNA, 120 bp, Artificial Sequence
  ENSG00000132122_47 (sequence is synthesized)
gggctcaaagggcaggactgggcttatcgtggaaggagtggattgttcatttactgcattatcagtattcaagtaaatttgctgaagatgataactgtgacttaagccaagaaaggataa

SEQ ID NO: 295840 - DNA, 120 bp, Artificial Sequence
  ENSG00000132122_48 (sequence is synthesized)
agtagatcctggagatgtggttacacagcttgaatgaaaacaggtcctcaagagttgacttgctgaaccataggccataaatggagaaataacccaaagccagctgccaacagtgaaaac

SEQ ID NO: 295841 - DNA, 120 bp, Artificial Sequence
  ENSG00000132128_0 (sequence is synthesized)
ggcggtccgcgggcgacactctcgggctcgcgcacctccccaagatggcggcgcccgaggcctggcgcgcccggagttgctggttctgtgaggtagcggcggcaacgaccatggaggcca

SEQ ID NO: 295842 - DNA, 120 bp, Artificial Sequence
  ENSG00000132128_1 (sequence is synthesized)
cgtcccgggaggcggcgccagcgaagagctcggcctcgggccccaacgctccccccgccctgttcgagctgtgcgggcgggcggtgagcgcccatatgggggttctggagagcggggtgt

SEQ ID NO: 295843 - DNA, 120 bp, Artificial Sequence
  ENSG00000132128_2 (sequence is synthesized)
gggccctcccaggcccaatacttcaaagcatcctacctctgctcaatatatattacttggagaggattgaggaaactgccctcaagaaaggcctctcaactcaggccatctggcgccgac

SEQ ID NO: 295844 - DNA, 120 bp, Artificial Sequence
  ENSG00000132128_3 (sequence is synthesized)
tctgggatgaactgatgaagacaaggccttccagtttggaaagtgtgacatgttggcgagccaagtttatggaggcctttttttcccatgttctacgtgggaccattgatgtgtcttctg

SEQ ID NO: 295845 - DNA, 120 bp, Artificial Sequence
  ENSG00000132128_4 (sequence is synthesized)
acaggcgtctttgtgatcagcggttctcacctcttctgcacagctcccgccatgtccgacagctcaccatctgtaacatgctgcagggtgcaaccgagctggtggctgagcccaaccgca

SEQ ID NO: 295846 - DNA, 120 bp, Artificial Sequence
  ENSG00000132128_5 (sequence is synthesized)
gggttctggagaccctggccagctccctgcacactctcaagttccgccacctgctgttctctgatgtggctgctcagcagtcacttcggcagctgttgcatcagctcattcaccatgggg

SEQ ID NO: 295847 - DNA, 120 bp, Artificial Sequence
  ENSG00000132128_6 (sequence is synthesized)
ctgtcagtcaagtgtcgctatactcctggcctgtgcctgagtcagcccttttcatccttattctcaccatgagtgctggcttctggcaaccagggcctggtggcccaccctgccgcctct

SEQ ID NO: 295848 - DNA, 120 bp, Artificial Sequence
  ENSG00000132128_7 (sequence is synthesized)
gtggagaggcctcccgaggccgggccccatcccgagatgaagggtccctcttattgggctcacgtcggccccgccgggatgctgctgagcgatgtgctgcagccctgatggccagccggc

SEQ ID NO: 295849 - DNA, 120 bp, Artificial Sequence
  ENSG00000132128_8 (sequence is synthesized)
gtaagagtgaagccaagcagatgcccagagctgcacctgccactcgggtaacacgccggagcacacaggagagcctgacagcaggcggaacagaccttaagagggagctgcaccccccag

SEQ ID NO: 295850 - DNA, 120 bp, Artificial Sequence
  ENSG00000132128_9 (sequence is synthesized)
ccacctcccatgaggctcctggcaccaagcggtcaccttctgctccagcagccacctcctctgcctcttcttctacatcctcatacaaacgggcaccagctagctcagccccacagccta

SEQ ID NO: 295851 - DNA, 120 bp, Artificial Sequence
  ENSG00000132128_10 (sequence is synthesized)
agcccctaaagcgtttcaagcgagctgcagggaagaagggtgctcgcacccgtcaggggcctggtgcagagtctgaagacctgtatgacttcgtttttattgtggctggcgagaaggagg

SEQ ID NO: 295852 - DNA, 120 bp, Artificial Sequence
  ENSG00000132128_11 (sequence is synthesized)
atggcgaagagatggagattggggaagtggcttgtggagctttggatggatcagatcccagctgcctggggcttccagcactggaagcttcacaaagattccgcagcatctccaccttgg

SEQ ID NO: 295853 - DNA, 120 bp, Artificial Sequence
  ENSG00000132128_12 (sequence is synthesized)
gtcactggagagcctcacactctcctacaatggcctgggctctaacatcttccgcctgctagacagcctgcgggccctgtcaggccaggctggatgtcgcctccgtgccctgcatctcag

SEQ ID NO: 295854 - DNA, 120 bp, Artificial Sequence
  ENSG00000132128_13 (sequence is synthesized)
tgacctgttctcaccactgcccatcctggagctgacacgtgctatcgtgcgagcactgcccctgctacgggtcctctctattcgtgttgaccacccaagccagcgggacaaccctggtgt

SEQ ID NO: 295855 - DNA, 120 bp, Artificial Sequence
  ENSG00000132128_14 (sequence is synthesized)
gccagggaatgcagggccccctagccacataataggcgatgaggagataccagaaaactgcctggagcagttggagatgggatttccacggggagcccagccagccccactgctgtgctc

SEQ ID NO: 295856 - DNA, 120 bp, Artificial Sequence
  ENSG00000132128_15 (sequence is synthesized)
cgttctgaaggcctcgggttctctgcagcagctgtccctggatagtgccacctttgcctctccccaggattttgggcttgttttgcaaacactcaaagagtacaacctagccctgaaaag

SEQ ID NO: 295857 - DNA, 120 bp, Artificial Sequence
  ENSG00000132128_16 (sequence is synthesized)
actgagcttccatgacatgaatctcgctgactgtcagagcgaggtgctctttttgctacagaatctgactctgcaagagattaccttctccttctgccgtctgtttgagaagcgcccagc

SEQ ID NO: 295858 - DNA, 120 bp, Artificial Sequence
  ENSG00000132128_17 (sequence is synthesized)
ccaatttctgcctgagatggttgctgctatgaagggcaactccacactgaagggcctccggctgccagggaaccgcctggggaatgctggcctgctggccttggcagatgttttctcaga

SEQ ID NO: 295859 - DNA, 120 bp, Artificial Sequence
  ENSG00000132128_18 (sequence is synthesized)
ggattcatcctcctctctctgtcagctggacatcagttccaactgcatcaagccagatgggcttctggagttcgccaagcggctggagcgctggggccgtggagcctttggtcacctgcg

SEQ ID NO: 295860 - DNA, 120 bp, Artificial Sequence
  ENSG00000132128_19 (sequence is synthesized)
cctcttccaaaactggctggaccaggatgcagtcacagccagggaagccatccggcggctccgggctacctgccatgtggttagcgactcatgggactcatcccaggccttcgcagatta

SEQ ID NO: 295861 - DNA, 120 bp, Artificial Sequence
  ENSG00000132128_20 (sequence is synthesized)
tgttagcaccatgtgatggggcccgtacctcacagtctcatgctcggtaccatcagcttgcaggggctgaagcatgggctgcccagaaccccaaccaccagttctatctttctctttctg

SEQ ID NO: 295862 - DNA, 120 bp, Artificial Sequence
  ENSG00000132128_21 (sequence is synthesized)
tcaccttttttctcttttttccttcttcccttgcactgaggtcctggaggccttgatgaggcccagcaaacaggcattctcacagctgggtttatagtctttgggccccttactcagtat

SEQ ID NO: 295863 - DNA, 120 bp, Artificial Sequence
  ENSG00000132128_22 (sequence is synthesized)
cctgggaaccctgggccaggaggttacagtggtcatcataattgctgaagagatcccctcccctgcccctgggttcctgccttccctcctcaagcaggcacccaggctttagagaagtat

SEQ ID NO: 295864 - DNA, 120 bp, Artificial Sequence
  ENSG00000132128_23 (sequence is synthesized)
agggggcttcttccctgctgggcttaccacactgctctcaggcctcaaaccctttcatacctttattcttttttttaaccaaaaaagtttttcttataaaataaattttgggcaaacatc

SEQ ID NO: 295865 - DNA, 120 bp, Artificial Sequence
  ENSG00000132128_24 (sequence is synthesized)
atgtactaccagccgcaggcagaggttaggggtagctgatgtttgcacccgaggaggctttgctaagaaacatccccttagtcataccacacccaagtataattgatctaggagtttatc

SEQ ID NO: 295866 - DNA, 120 bp, Artificial Sequence
  ENSG00000132128_25 (sequence is synthesized)
taaaatagtagctcctaagagacttggaaagtgtgctaatttcttcgaaatttctttagaataattcacattcttccccatatcgcttatggagccgtcctaactgctgaccttttcaag

SEQ ID NO: 295867 - DNA, 120 bp, Artificial Sequence
  ENSG00000132128_26 (sequence is synthesized)
cacccagaccagctggttatcagcggaggccccgctgctcctcatgagaacgctggtggaagacgaaggtgatggcagtggaggcagcatcccaggcagcctggagtacctcatcccgga

SEQ ID NO: 295868 - DNA, 120 bp, Artificial Sequence
  ENSG00000132128_27 (sequence is synthesized)
gcccccacttatcagtgcagtggttccaccctgccaggtctgaagtgcagtcagaaccatcagggggtggccggatctgacggctgttgacacaacgtcggcagtgcaacctagggacag

SEQ ID NO: 295869 - DNA, 120 bp, Artificial Sequence
  ENSG00000132128_28 (sequence is synthesized)
aaggcacagctgaagtcactacagatcccatctccctactgtgtgggtagcttagagataatggttagggcacttccccacctgtcatgtgtgtcactgaggctagcttcatccaggata

SEQ ID NO: 295870 - DNA, 120 bp, Artificial Sequence
  ENSG00000132128_29 (sequence is synthesized)
aacagctccttcaactcgcccagagagaagtggcgctctacatcctgctcctcatccaccacacagctgctcagtgccttcttgtggctctgacgctggaagatcttctcctcaatggtc

SEQ ID NO: 295871 - DNA, 120 bp, Artificial Sequence
  ENSG00000132128_30 (sequence is synthesized)
cctgcctggggaagaggaggtggggaatgtcaaaagatacagcgcttagccatcctcataaaaagggagcaggaaaaccaaagggttgaaactacagctacccgagaagaggagatgaat

SEQ ID NO: 295872 - DNA, 120 bp, Artificial Sequence
  ENSG00000132128_31 (sequence is synthesized)
aaaaagtatgagtcccagaacattatctctactcagctgaggtccattttcccagtctgtctcctgagaacatgacatgaatagtctgcccacccaggctactttctatactaatgaagg

SEQ ID NO: 295873 - DNA, 120 bp, Artificial Sequence
  ENSG00000132128_32 (sequence is synthesized)
gtcccagggcctggctaaatcccgtcagggtgaactgaggtttgtctgctgcagcttcagatttctgcaccaagcccaactctaactcattcaataaatatcatttaggtatctattcta

SEQ ID NO: 295874 - DNA, 120 bp, Artificial Sequence
  ENSG00000132128_33 (sequence is synthesized)
tgtgtaaggagttggggcagcgggtgtatagaggcagcaggaaagggtacaatgaggaaactttaaaataaggtatattataccttgaataccaggatatggagtttggactttatcatg

SEQ ID NO: 295875 - DNA, 120 bp, Artificial Sequence
  ENSG00000132128_34 (sequence is synthesized)
aatgcagcagagagacctccaagggttttgaagagggtagtgtcatcaccaagagcaggatgaagagggactggatggagactgaagtgaaggagagcagttaggctgttgtaatagacc

SEQ ID NO: 295876 - DNA, 120 bp, Artificial Sequence
  ENSG00000132128_35 (sequence is synthesized)
agatgaaaggtgatgtggactacattcgtgtaaaagcatagggaattaacactttcattcagcccgtacatcgaggacctactatgtacaaataattatactagattcttggatgtcaag

SEQ ID NO: 295877 - DNA, 120 bp, Artificial Sequence
  ENSG00000132128_36 (sequence is synthesized)
atgtcaagattcagttattctgtaagtaaagataaaaagagaccctggagcggaagttttggtatactccaagatcttagacttgttctttttctttgagatggggtctcactctgtcac

SEQ ID NO: 295878 - DNA, 90 bp, Artificial Sequence
  ENSG00000132128_37 (sequence is synthesized)
tcacccaggctgcagtgcagtggcatgatatcagctcactgccacctctgtcttctgggctcaagcaattctcccatcgtgccccacaac

SEQ ID NO: 295879 - DNA, 120 bp, Artificial Sequence
  ENSG00000132128_38 (sequence is synthesized)
tgttgcccaggctagtctcaaactcctggacttaagcaatgccccctacctctgacctccaaagattacaggaattacaggtgtgagtttgacttgttcttgattggacagagatgccat

SEQ ID NO: 295880 - DNA, 120 bp, Artificial Sequence
  ENSG00000132128_39 (sequence is synthesized)
gagtttgacttgttcttgattggacagagatgccattgacaggataaaaataaccaccaacatttagcgagcttattatggctgggcattgttttaaacagattataagcatgatcttca

SEQ ID NO: 295881 - DNA, 88 bp, Artificial Sequence
  ENSG00000132128_40 (sequence is synthesized)
gctgggcattgttttaaacagattataagcatgatcttcacaacaatgtcatgagttaattactgttatcttgagacagagtcttgct

SEQ ID NO: 295882 - DNA, 60 bp, Artificial Sequence
  ENSG00000132128_41 (sequence is synthesized)
cagtggcgccatctcggctcactgcagtctctacctcctttacacctggctaatttttgt

SEQ ID NO: 295883 - DNA, 62 bp, Artificial Sequence
  ENSG00000132128_42 (sequence is synthesized)
accattgcatcccacctattttttattttttgaggcagggtcttgctctgtcatccaggctg

SEQ ID NO: 295884 - DNA, 86 bp, Artificial Sequence
  ENSG00000132128_43 (sequence is synthesized)
tctgtcatccaggctggagtgcagtggtctaagcacagctcacttcagcctcaacctcctgggctcctgaccacaggtgcacacca

SEQ ID NO: 295885 - DNA, 120 bp, Artificial Sequence
  ENSG00000132128_44 (sequence is synthesized)
aagtagctgtgaccacaggtgcacaccatcacactctgctaatttttgttttgttttgagatagggttctcactgtgtcacctgggctcaagtacagtggtgtgatcatagctcactgta

SEQ ID NO: 295886 - DNA, 120 bp, Artificial Sequence
  ENSG00000132128_45 (sequence is synthesized)
ttacaggtgtgaaccactgtgcccagcctccatttttttccagttgaagaaactaaggcttaaagaggcttaaataatttgtccaaggattcacatttaactaagtagttaggattgcac

SEQ ID NO: 295887 - DNA, 120 bp, Artificial Sequence
  ENSG00000132128_46 (sequence is synthesized)
gtccaaggattcacatttaactaagtagttaggattgcactcagatttgtcctactctagaggccaaaccctttagacactatactataacagctcttagaactagagaagttggcaaga

SEQ ID NO: 295888 - DNA, 120 bp, Artificial Sequence
  ENSG00000132128_47 (sequence is synthesized)
ttagagacacgaattgtttctattcttcataggaaagtactagttcagaatatagcagtagcccaaaggatggtagtggttaatctggaaaaatggaaaaggaattcaggaaagacttaa

SEQ ID NO: 295889 - DNA, 120 bp, Artificial Sequence
  ENSG00000132128_48 (sequence is synthesized)
taaagggcatgtgatacttgaaagatgagtagttgatatactgaaagtggcaacgacattcctattagaacagcatgacaaaggacattcctattggaaagaacagcatgacaaaggtac

SEQ ID NO: 295890 - DNA, 120 bp, Artificial Sequence
  ENSG00000132128_49 (sequence is synthesized)
aggggcagaaagcggcataatatgttaggtaaatgaaaaagtagttaagtgtggctgaaatgtaggaggcaaagcagggagctgatactagcagggcagattatgaaagaccttttatca

SEQ ID NO: 295891 - DNA, 120 bp, Artificial Sequence
  ENSG00000132128_50 (sequence is synthesized)
cacatattcagtaggtccttttcaatgccaaatggttcattttgcttgggcagaagtgaactgaccagctcctaaataagcatgtcaagctcatttagcatgtcagcttgttttgtggga

SEQ ID NO: 295892 - DNA, 120 bp, Artificial Sequence
  ENSG00000132128_51 (sequence is synthesized)
tgatctcacccttgcccctgaaattccagcttccaactgagtggctgaagataagtggactagagtttggaacagatctagattagcttctagaggttccatttgtcaaatgagaagtct

SEQ ID NO: 295893 - DNA, 120 bp, Artificial Sequence
  ENSG00000132128_52 (sequence is synthesized)
aaggccttccagtttggaagtaagttaaggtatcaggtagaatgctagcctgattttgcatggtaaaagcaggaatagcacacaaacacaagctgggtactgataaagtgcagaggcaat

SEQ ID NO: 295894 - DNA, 120 bp, Artificial Sequence
  ENSG00000132128_53 (sequence is synthesized)
gatggaatggatttgggaggagggctctgatggcttgtcacaaggttttggtccatttggcatttgtcactgaattgcttgctcactgtatttgcaggggacacaaaacagggaaagtta

SEQ ID NO: 295895 - DNA, 120 bp, Artificial Sequence
  ENSG00000132128_54 (sequence is synthesized)
gtgatcacaatggatggcagagccaggattcctagagttcttgatggtgttggtgcagtggtcaaatctaacaaaatgaaatttaatagaatacaccaatacttcaatgagttttaaaag

SEQ ID NO: 295896 - DNA, 120 bp, Artificial Sequence
  ENSG00000132128_55 (sequence is synthesized)
ttccaattgcatggtatcgggatgagggataaaggagtatgattagtaacagcttgtataaaaaagattaagggagtttagtcaacaatgtgttgaagccacttataacgactatacctt

SEQ ID NO: 295897 - DNA, 120 bp, Artificial Sequence
  ENSG00000132128_56 (sequence is synthesized)
gagctgtgtgaactaatgtaaatatagtataggctgaaggacaaggtggacaacagtcctgcctagctctgcaatggtcaggctacccgtggagattggagaaagtcaaagccacattat

SEQ ID NO: 295898 - DNA, 120 bp, Artificial Sequence
  ENSG00000132128_57 (sequence is synthesized)
gtgagtcacattgggacaactggagatgtttttcctgaaaaagagaagacttgggaaacatgacccatcttgaaatatatgaatggctgtcacatgaaggagggattaatagacttgttc

SEQ ID NO: 295899 - DNA, 120 bp, Artificial Sequence
  ENSG00000132128_58 (sequence is synthesized)
tggatggaagctaatggaagatacatttttgctaacctgaagtttacgtaaagcttaaaccctgagcttatgaaacaagctaattctagaggtaataaacttcccatcactaagttcaaa

SEQ ID NO: 295900 - DNA, 120 bp, Artificial Sequence
  ENSG00000132128_59 (sequence is synthesized)
aaaggagctaggcctttgacctaaaaactcactggataaaggcaaagacctctccactgggaacgtgggagttggaatacagatatttctgtgctggggcttcaggaaccagcagggctg

SEQ ID NO: 295901 - DNA, 120 bp, Artificial Sequence
  ENSG00000132128_60 (sequence is synthesized)
gttctgccagccatagttgggttgggatacccttgtcccctgttcttgggtggaggtgataggcgttctccccttctctccagggaatgctggcctgctggccttggcagatgttttctc

SEQ ID NO: 295902 - DNA, 120 bp, Artificial Sequence
  ENSG00000132128_61 (sequence is synthesized)
tcctctctgatgtggcaaacaaggctagattcttacctaggatgccggaattaacaaaatgtaccaagctgaaatactcaagcagatcattctggatgggagttccggagatgagcaccc

SEQ ID NO: 295903 - DNA, 120 bp, Artificial Sequence
  ENSG00000132128_62 (sequence is synthesized)
gccggctggtgttcaagctgtccagggcttgactgctgagagtcaagtacctcgtcacatatgaccagaccaacacttcctttctggaggactccaacatgaaggcggaaggtctcatag

SEQ ID NO: 295904 - DNA, 120 bp, Artificial Sequence
  ENSG00000132128_63 (sequence is synthesized)
gaaatgatgaggatgggagaagacaccctggctccacgctggttcatgaatccttctacaacagaaaaggtgtaaagggaacaattcagaatcttttgaaaaaaaaaaaaacaaaaaaaa

SEQ ID NO: 295905 - DNA, 120 bp, Artificial Sequence
  ENSG00000132128_64 (sequence is synthesized)
ggattgggcttagattgcctagcagcaccagctgtgtgcctaattctagggaggtgggaggggcaaattgggggtatgatcaggaggttagagaggaaggcttgtatgcctcatagcagg

SEQ ID NO: 295906 - DNA, 120 bp, Artificial Sequence
  ENSG00000132128_65 (sequence is synthesized)
ggagactgtcattgctagaagagaggaacataaagtctatacacttgattagttgttgaaagcaggggttcctgaggggcagtgagacaagccagctggaatctgaagaatgaatacatt

SEQ ID NO: 295907 - DNA, 120 bp, Artificial Sequence
  ENSG00000132128_66 (sequence is synthesized)
ttagatatggaaggcagtccaagggcaggtgggagcagtatagtatatgcatgctcaggcagggctagagtttgacctcaccacctcaccagtcatattttaagtattcttgataatttg

SEQ ID NO: 295908 - DNA, 120 bp, Artificial Sequence
  ENSG00000132128_67 (sequence is synthesized)
atctaacaatcctcacaaccctatgagggcaagtgacttcctcaggataacctagcaattatagagctaggattcaaaacccaggcaaccagactgcagattcatgctttcaaacaacta

SEQ ID NO: 295909 - DNA, 120 bp, Artificial Sequence
  ENSG00000132128_68 (sequence is synthesized)
tgctactctcctttccaccgtctctctcctatcagcattttaacaggtctccatcaaaaactgccaccaccacctccctctatgccatattaataaactgttatctcctgttcttcacaa

SEQ ID NO: 295910 - DNA, 120 bp, Artificial Sequence
  ENSG00000132141_0 (sequence is synthesized)
gcattgccgtttttgctcagaatcgcgactaaggctttttttttttctccctctgaacggttaggctatggctgcgataaaggccgtcaactccaaggctgaggtggcgcgggcccgggc

SEQ ID NO: 295911 - DNA, 120 bp, Artificial Sequence
  ENSG00000132141_1 (sequence is synthesized)
agctttggctgtcaatatatgcgccgcccgagggctgcaggatgtgctgcggaccaacttgggtcctaaaggcaccatgaaaatgcttgtttctggtgcaggtgacatcaaactcaccaa

SEQ ID NO: 295912 - DNA, 120 bp, Artificial Sequence
  ENSG00000132141_2 (sequence is synthesized)
agatggcaatgtgctgctcgatgagatgcaaattcaacatccaacagcttccttgatagcaaaagtagcaacagctcaggatgacgtcacaggagatggtactacttcaaatgttctaat

SEQ ID NO: 295913 - DNA, 120 bp, Artificial Sequence
  ENSG00000132141_3 (sequence is synthesized)
tattggagagttattaaaacaagctgacctgtacatttctgagggcctgcaccctagaataatagctgaaggatttgaagctgcaaagataaaagcacttgaagttttggaggaagttaa

SEQ ID NO: 295914 - DNA, 120 bp, Artificial Sequence
  ENSG00000132141_4 (sequence is synthesized)
agtgacaaaggagatgaaaagaaaaatcctcttagatgtagctagaacatcattacaaactaaagttcatgctgaactggctgatgtcttaacagaggttgtggtggattctgttttggc

SEQ ID NO: 295915 - DNA, 120 bp, Artificial Sequence
  ENSG00000132141_5 (sequence is synthesized)
tgttagaagaccaggttaccctattgatctcttcatggtagaaataatggagatgaagcataaattaggaacagatacaaagttgatccaaggattagttttggatcatggtgcccgtca

SEQ ID NO: 295916 - DNA, 120 bp, Artificial Sequence
  ENSG00000132141_6 (sequence is synthesized)
tccagatatgaagaagcgagtagaagatgcatttatccttatttgcaacgtttcactggaatatgaaaaaacagaggtgaactctggtttcttttataagactgcagaagagaaagagaa

SEQ ID NO: 295917 - DNA, 120 bp, Artificial Sequence
  ENSG00000132141_7 (sequence is synthesized)
taatagacctgaaggacaaagtctgtgctcagtcaaataaaggatttgtcgtcattaatcaaaagggaattgatccattttccttagattctcttgcaaaacatggaatagtagctcttc

SEQ ID NO: 295918 - DNA, 120 bp, Artificial Sequence
  ENSG00000132141_8 (sequence is synthesized)
gcagagcaaaaagaagaaatatggaaagactctctcttgcttgtggtggaatggccgtgaattcttttgaagatctcactgtagattgcttgggacatgctggtcttgtgtatgagtata

SEQ ID NO: 295919 - DNA, 120 bp, Artificial Sequence
  ENSG00000132141_9 (sequence is synthesized)
cattaggtgaagaaaagttcacttttattgaggagtgtgttaacccttgctctgttaccttgttggttaaaggaccaaataagcatactctcacacaagtcaaggatgccataagagatg

SEQ ID NO: 295920 - DNA, 120 bp, Artificial Sequence
  ENSG00000132141_10 (sequence is synthesized)
gacttcgtgctatcaaaaatgccattgaagatggttgtatggttcctggagctggtgcaattgaagtggcaatggctgaagctcttgttacatataagaacagtataaaaggaagagctc

SEQ ID NO: 295921 - DNA, 120 bp, Artificial Sequence
  ENSG00000132141_11 (sequence is synthesized)
gtcttggagtccaagcttttgctgatgccttactcattattcccaaggttcttgctcagaatgctggttatgacccacaggaaacattagtaaaagttcaggctgagcatgtcgagtcaa

SEQ ID NO: 295922 - DNA, 120 bp, Artificial Sequence
  ENSG00000132141_12 (sequence is synthesized)
aacaacttgtgggcgtagatttgaatacaggtgagccaatggtagcagcagatgcaggagtttgggataattattgtgtaaaaaaacaacttcttcactcttgcacagtgattgccacca

SEQ ID NO: 295923 - DNA, 120 bp, Artificial Sequence
  ENSG00000132141_13 (sequence is synthesized)
acattctcctggttgatgaaattatgcgagctgggatgtcttctctcaaatgatgattgaattcaaaatcaacccttctagaagatgaaatttagtacactttacatctgactactattg

SEQ ID NO: 295924 - DNA, 120 bp, Artificial Sequence
  ENSG00000132141_14 (sequence is synthesized)
tgtagcctgagccattctgaatttctacacaataaatgcagtttatgtcttttgggtcttaatagtctcaaaaatatttcatcaaggtataaagaacacaataaatacttttacagtaaa

SEQ ID NO: 295925 - DNA, 120 bp, Artificial Sequence
  ENSG00000132141_15 (sequence is synthesized)
ttaaactgttacatattttctggtgcattgaacttttgtactgatatgaagtgacttttttctagtaatgtctttaaaagtataatttatctgatattgataattatatttaaaaaatct

SEQ ID NO: 295926 - DNA, 120 bp, Artificial Sequence
  ENSG00000132141_16 (sequence is synthesized)
atctttacatgttaaaagctgttgtaccagctagctagcttccttccttcctgccttccttccttcctttccctccctccctccctccttccttcttccctccctccctttcctttcctt

SEQ ID NO: 295927 - DNA, 120 bp, Artificial Sequence
  ENSG00000132141_17 (sequence is synthesized)
tctttttttttttttgagatggattttttgtattaatgataggaattgttactgcaagtttgtatgctggtaaggatggttctttaggtgagaattgatataggggactaggggacagtg

SEQ ID NO: 295928 - DNA, 120 bp, Artificial Sequence
  ENSG00000132141_18 (sequence is synthesized)
caagaacagagagggaaatggaatccagtacacaagtagagaggctacccatagagaggaacatggacagctcattcatagtagtaggaggttcagggtcaagtgcaagtggattggtag

SEQ ID NO: 295929 - DNA, 120 bp, Artificial Sequence
  ENSG00000132141_19 (sequence is synthesized)
aggtagtaatgggacaatgtttctattttctcaaagaaacaatgtcatttgctgacagtagggagggaggaaagtgaaggaggcttgaagagtgaggaatgttgaacatagtgttattgt

SEQ ID NO: 295930 - DNA, 120 bp, Artificial Sequence
  ENSG00000132141_20 (sequence is synthesized)
aacatagtgttattgtttctagatatgtttacattctgttaagaggtggagtaatctagttaaagtaaaattttgaaaacttccttataattatgttgaactaaaatagtttaaaaatat

SEQ ID NO: 295931 - DNA, 120 bp, Artificial Sequence
  ENSG00000132141_21 (sequence is synthesized)
ataaaggattcataagtagaaattccatcccctgaatgttttgtaaatgaattttataaagttataaaaatattgactcttgaaagattatttggaaaacaggaagaaacacctcctttc

SEQ ID NO: 295932 - DNA, 120 bp, Artificial Sequence
  ENSG00000132141_22 (sequence is synthesized)
caaatcatctatattcctactacccaggcataacccctactcttaggtccctcccattttttttctttttaatgccaagttgtttttttttttaaatttatttatttatttatatttttt

SEQ ID NO: 295933 - DNA, 120 bp, Artificial Sequence
  ENSG00000132141_23 (sequence is synthesized)
ggccccggtgtgtgatgttccccttccttgtctgttgttaaaaagaacagttataggcatgcttcatatgcaatttgtcattctatgcttatcagctagccctataaatatttttccatg

SEQ ID NO: 295934 - DNA, 120 bp, Artificial Sequence
  ENSG00000132141_24 (sequence is synthesized)
atgcttatcagctagccctataaatatttttccatgttattacatactttttataaccatcaaatagttgggtcattatttgctgaataataccctattgttggacatttaggttaacaa

SEQ ID NO: 295935 - DNA, 120 bp, Artificial Sequence
  ENSG00000132141_25 (sequence is synthesized)
tttttagttgttccatataatcattttgaataaatgttcctaagaaactcattgtatacgtacctttcattacttgataagctgtgtcatatttttgaatcacataacttagaaaataat

SEQ ID NO: 295936 - DNA, 120 bp, Artificial Sequence
  ENSG00000132141_26 (sequence is synthesized)
tctggcttgactttttattgtgacttcatagtcacactgtgttaaagtagattctctttcctaattttactaattatatgttaggtttaaagtcaatgcaaggaggtgggtgaggtggtg

SEQ ID NO: 295937 - DNA, 120 bp, Artificial Sequence
  ENSG00000132141_27 (sequence is synthesized)
caaaaacaccaaaaactgttaaaattggtacaaggaaacaatgtgtgtcctggaagtattgatgtaactttaatagtacaatgataattttataccaaattttagagtatatattcaaag

SEQ ID NO: 295938 - DNA, 120 bp, Artificial Sequence
  ENSG00000132141_28 (sequence is synthesized)
taagaaacattaatatttttaataggttgatccaaggattagttttggatcatggtgcccgtcatccagatatgaagaagcgagtagaagatgcatttatccttatttgcaacgtttcac

SEQ ID NO: 295939 - DNA, 120 bp, Artificial Sequence
  ENSG00000132141_29 (sequence is synthesized)
tggaatatgaaaaaacgtgcgtgttactttctctttataacttttgaatttttttttctaaaggtgttttaaaatctctttttccttccagatgtttggtgtagactacttctatctttt

SEQ ID NO: 295940 - DNA, 120 bp, Artificial Sequence
  ENSG00000132141_30 (sequence is synthesized)
ttcctttttcctcctgcctttactagctggtttttattaatcttttagagaggtgaactctggtttcttttataagactgcagaagagaaagagaaattggtaaaagctgaaagaaaatt

SEQ ID NO: 295941 - DNA, 120 bp, Artificial Sequence
  ENSG00000132141_31 (sequence is synthesized)
gttttgagatctaattcacagaacagattttacagtttatttacctaaatgtttgttaagagttcagatataacttaactcccttagttatgcttgataagaaaaattcaaatgaagatt

SEQ ID NO: 295942 - DNA, 120 bp, Artificial Sequence
  ENSG00000132141_32 (sequence is synthesized)
cgcgccgctgtcggagagtggcggggacagtggggtcggcggcgtaggccgcgacccccggcgaggcagaaaggagcgctcctccaccgggtccgggacgcaggcgggaagtgatcaagg

SEQ ID NO: 295943 - DNA, 120 bp, Artificial Sequence
  ENSG00000132153_0 (sequence is synthesized)
gtagtccggccgtggttgggggagccgcggctcatgcgcggtgcacagaggcttgtttcacatctgtaacaacaggaggaggcccagcctcgtgatgaggaatagcaaggagagaattca

SEQ ID NO: 295944 - DNA, 120 bp, Artificial Sequence
  ENSG00000132153_1 (sequence is synthesized)
gctccagttcaaaagcctacaaaatctgagactgtcattgcttttataaggattccagctttccctcctggccagaaatgttcagcctggactcattcagaaaagatcgggcccagcaca

SEQ ID NO: 295945 - DNA, 120 bp, Artificial Sequence
  ENSG00000132153_2 (sequence is synthesized)
ggcagcgtcagtgcaaacttcccccaccccgccttccacccatgtgtgtcaaccctaccccaggagggaccatctctcgagcttctagggacctattaaaagagttcccacagcccaaaa

SEQ ID NO: 295946 - DNA, 120 bp, Artificial Sequence
  ENSG00000132153_3 (sequence is synthesized)
atcttctcaacagtgtgattggaagagccctcggcatctcacatgcaaaagacaaactagtctacgtgcacacaaatggaccgaagaaaaagaaagtcacactgcacataaaatggccca

SEQ ID NO: 295947 - DNA, 120 bp, Artificial Sequence
  ENSG00000132153_4 (sequence is synthesized)
agagcgtggaggtagaaggctatggcagcaagaagatcgatgctgagcggcaggctgcagctgcagcctgccagctgttcaagggttggggtctgctaggtccccggaatgagttgtttg

SEQ ID NO: 295948 - DNA, 120 bp, Artificial Sequence
  ENSG00000132153_5 (sequence is synthesized)
acgcagccaaataccgagtgctagctgatcgctttggctcccctgccgacagctggtggcgtccggaacccaccatgccccctacttcctggcggcagctgaatccagagagtattcgac

SEQ ID NO: 295949 - DNA, 120 bp, Artificial Sequence
  ENSG00000132153_6 (sequence is synthesized)
cagggggacctgggggcctatcccgctctttaggccgggaagaagaggaggacgaggaggaagagctagaagaagggaccatagatgttaccgacttcttgtccatgacccagcaggatt

SEQ ID NO: 295950 - DNA, 120 bp, Artificial Sequence
  ENSG00000132153_7 (sequence is synthesized)
cccacgctccactcagggactcaagggggagttcctttgagatgacagatgacgacagtgccattagggctctgacccagtttccacttcccaagaaccttctggccaaggtgattcaga

SEQ ID NO: 295951 - DNA, 120 bp, Artificial Sequence
  ENSG00000132153_8 (sequence is synthesized)
ttgcaacgtcatcctccacagctaagaacctcatgcagttccatactgtgggcaccaagaccaagctgtctacactcaccctgctctggccctgccccatgacctttgttgccaaagggc

SEQ ID NO: 295952 - DNA, 120 bp, Artificial Sequence
  ENSG00000132153_9 (sequence is synthesized)
gccgcaaagcagaggctgagaataaggcggcagccttggcctgcaagaaactgaagagcctgggcctggtggacaggaacaacgaaccgcttacacacgccatgtataacctggcctctt

SEQ ID NO: 295953 - DNA, 120 bp, Artificial Sequence
  ENSG00000132153_10 (sequence is synthesized)
tgcgtgagctgggtgagacccagcgccgaccatgcaccatccaggtgcccgagcccatcctccgcaagatagagaccttcctgaaccattaccctgtggagagttcatggatcgccccag

SEQ ID NO: 295954 - DNA, 120 bp, Artificial Sequence
  ENSG00000132153_11 (sequence is synthesized)
aactccggctgcagagtgatgacatcttgcccttgggcaaggactcagggcctctgagtgaccctatcacaggcaagccctatgtgcccctgttggaagcagaggaggtacgtctcagcc

SEQ ID NO: 295955 - DNA, 120 bp, Artificial Sequence
  ENSG00000132153_12 (sequence is synthesized)
agagtctgctagaactgtggcggcggcgagggccggtctggcaggaggccccccagctacctgtggacccacatcgggacaccatcctcaacgccattgagcagcacccggtggtggtca

SEQ ID NO: 295956 - DNA, 120 bp, Artificial Sequence
  ENSG00000132153_13 (sequence is synthesized)
tctctggggacacgggctgtgggaagaccacgcgcatcccccagctgttgctggagcgctatgtgaccgagggccgaggtgcccgctgcaatgttatcatcacccaacctcgccgcatct

SEQ ID NO: 295957 - DNA, 120 bp, Artificial Sequence
  ENSG00000132153_14 (sequence is synthesized)
ctgctgtgtctgtggcacagcgggtcagccacgaactgggcccctccctgcgccggaatgtgggcttccaggtgcggttggaaagtaagcccccatcccgaggcggggccctgctcttct

SEQ ID NO: 295958 - DNA, 120 bp, Artificial Sequence
  ENSG00000132153_15 (sequence is synthesized)
gcactgtgggtatcctgctgcgtaagctgcagagcaaccccagcctggagggcgtgagccacgtcatcgtggatgaggtgcatgagcgggacgtgaacacagactttctgctgatcctgc

SEQ ID NO: 295959 - DNA, 120 bp, Artificial Sequence
  ENSG00000132153_16 (sequence is synthesized)
ggctcaacccggccctgcggctggtgctcatgagtgccacaggggacaatgagcgcttctcccgatactttggtggctgccccgtcatcaaggtgcctggcttcatgtacccagtcaagg

SEQ ID NO: 295960 - DNA, 120 bp, Artificial Sequence
  ENSG00000132153_17 (sequence is synthesized)
agcactacctagaggacatcctggccaagttgggcaagcaccagtacctgcaccggcaccggcaccatgagtctgaggatgaatgcgcactcgatttggaccttgtgactgatctggttc

SEQ ID NO: 295961 - DNA, 120 bp, Artificial Sequence
  ENSG00000132153_18 (sequence is synthesized)
tgcacatcgatgctcgcggggaaccaggtgggatcctgtgcttcctgcctgggtggcaggagatcaaaggagtgcagcagcgcctccaggaggccctgggcatgcacgagagcaagtacc

SEQ ID NO: 295962 - DNA, 120 bp, Artificial Sequence
  ENSG00000132153_19 (sequence is synthesized)
tcatcctgccagtgcactccaacatccccatgatggatcagaaggccatattccagcagcctccagttggggtgcgcaagattgtcttggccaccaacattgctgagacttccatcacaa

SEQ ID NO: 295963 - DNA, 120 bp, Artificial Sequence
  ENSG00000132153_20 (sequence is synthesized)
tcaatgacatcgtgcatgtggtggacagtgggctgcacaaggaagaacgctatgacctgaagaccaaggtgtcctgcctggagacagtgtgggtatcaagagccaatgtgatccagcgcc

SEQ ID NO: 295964 - DNA, 120 bp, Artificial Sequence
  ENSG00000132153_21 (sequence is synthesized)
ggggccgggcgggccgctgccagtccggctttgcctaccacttgttccctcgaagccggctggagaaaatggtccctttccaagtgccagagatcctgcgcacacctcttgagaacctgg

SEQ ID NO: 295965 - DNA, 120 bp, Artificial Sequence
  ENSG00000132153_22 (sequence is synthesized)
tgctgcaagcgaaaatccacatgcctgagaagacggcggtggagttcctgtccaaggctgtggacagtccaaacatcaaggcagtggacgaggctgtgatcttgctccaggagatcgggg

SEQ ID NO: 295966 - DNA, 120 bp, Artificial Sequence
  ENSG00000132153_23 (sequence is synthesized)
tgctggaccagcgggagtacctgactaccctggggcagcgcctggctcacatctccaccgacccccggttggccaaggccattgtgttggctgccatcttccgttgcctgcacccactac

SEQ ID NO: 295967 - DNA, 120 bp, Artificial Sequence
  ENSG00000132153_24 (sequence is synthesized)
tggtggtcgtttcctgcctcacccgggaccccttcagcagcagcctacagaaccgggcagaggtggacaaggtgaaagcactgttgagccatgacagcggcagtgaccacctggcctttg

SEQ ID NO: 295968 - DNA, 120 bp, Artificial Sequence
  ENSG00000132153_25 (sequence is synthesized)
tgcgggctgtcgccggctgggaggaggtgctgcgttggcaggaccgcagctcccgggagaattacctggaggaaaacctgctgtacgcacccagcctgcgcttcatccacggactcatca

SEQ ID NO: 295969 - DNA, 120 bp, Artificial Sequence
  ENSG00000132153_26 (sequence is synthesized)
agcagttctcagagaacatttatgaggccttcctggtggggaagccctcggactgcaccctggcctccgcccagtgcaacgagtacagtgaggaggaggagctggtgaagggcgtgctga

SEQ ID NO: 295970 - DNA, 120 bp, Artificial Sequence
  ENSG00000132153_27 (sequence is synthesized)
tggccggcctctaccccaacctcatccaggtgaggcagggcaaggtcacccggcaggggaagttcaagcccaacagcgtcacatataggaccaaatcaggcaacatcctgctgcacaagt

SEQ ID NO: 295971 - DNA, 120 bp, Artificial Sequence
  ENSG00000132153_28 (sequence is synthesized)
cgaccattaacagggaggccacacggttacggagccgatggctgacgtatttcatggcagtcaagtccaatggcagcgtcttcgtccgggactcctctcaggtgcacccgctagctgtgc

SEQ ID NO: 295972 - DNA, 120 bp, Artificial Sequence
  ENSG00000132153_29 (sequence is synthesized)
tgctgctgaccgacggggacgtgcacatccgtgatgacgggcgccgggccaccatctcactgagcgacagtgacctgctgcggctggagggtgactcgcgtaccgtgcggctgctgaagg

SEQ ID NO: 295973 - DNA, 120 bp, Artificial Sequence
  ENSG00000132153_30 (sequence is synthesized)
agctgcggcgggccctgggccgcatggtggagcggagcctgcgcagcgagctggctgcacttccccccagcgtacaggaggagcacgggcagctgcttgcgctactggcagagctgctgc

SEQ ID NO: 295974 - DNA, 120 bp, Artificial Sequence
  ENSG00000132153_31 (sequence is synthesized)
gaggaccctgtggcagctttgatgtgcgcaagacagctgacgactgagccctgcttctgctggggctgtgtacagagtgcaaatgtttatttaaaataaagttctatttatcccttgtga

SEQ ID NO: 295975 - DNA, 80 bp, Artificial Sequence
  ENSG00000132153_32 (sequence is synthesized)
ggcatcccgggcgctgggtgccccgagcggctacgacgagtcccaggtggggccgggctccaggcccgcgggggagcgga

SEQ ID NO: 295976 - DNA, 120 bp, Artificial Sequence
  ENSG00000132153_33 (sequence is synthesized)
gaacgttaacatttccaacatggcaggcaggggtctggatttggtctgcaggctgtagttttccaactcctgctctagaccagtgaggagaagaacacagaagcagaagagttccaagag

SEQ ID NO: 295977 - DNA, 120 bp, Artificial Sequence
  ENSG00000132153_34 (sequence is synthesized)
ctgctgtaaagagttgcccttatcttacaagagtcattgaggtttgtggaggtgaaatacttgctcagggtgactcttgctgttagaacccagttgaaataaatgaataggaaaagggga

SEQ ID NO: 295978 - DNA, 120 bp, Artificial Sequence
  ENSG00000132153_35 (sequence is synthesized)
ccttaaacaggaatggagaggttgagctggtcatttccaaccttagcttcaaggcagaactggaattagtttcaaaataaaccttgatcctaggcatttagttctagaagatcctacaag

SEQ ID NO: 295979 - DNA, 120 bp, Artificial Sequence
  ENSG00000132153_36 (sequence is synthesized)
cacgtctgctgtaactctatgtatgttttctgtaaaatcacatacctataaaataaaaagaaaaaaatcacacatctataatattataagagagcttatgggaaaaatagaattgggcca

SEQ ID NO: 295980 - DNA, 120 bp, Artificial Sequence
  ENSG00000132153_37 (sequence is synthesized)
aatatgacaaaaaacaattattggtgcttgggaagatgctttggactacctagacaggcagctcagggtgatgtgatgctgcaaatgtacaaagagccgtcttctttttttttttttttt

SEQ ID NO: 295981 - DNA, 120 bp, Artificial Sequence
  ENSG00000132153_38 (sequence is synthesized)
ggattataggcgtgagccaccgcgccgggctacaaagagccttctaatgtgagcagagctggcagttaccgaggaagcccaggtggaggtggagttctgaaacagccactgtggtgaagg

SEQ ID NO: 295982 - DNA, 120 bp, Artificial Sequence
  ENSG00000132153_39 (sequence is synthesized)
ctgtggtgaaggagtgtgtgcagctgggactgtgggggaggagggttggagtgcaggacttgcttctcccctaacattttgttgtgaaaaatttcaaaaatactgaaacattgaagaaat

SEQ ID NO: 295983 - DNA, 120 bp, Artificial Sequence
  ENSG00000132153_40 (sequence is synthesized)
tgtatagtgaacacctttgtatctaccaccttgattctctataggtataggcactcaattttaataaaaaaaaaaatagctgaaagggctttttctttcctgctgaagattataattcta

SEQ ID NO: 295984 - DNA, 120 bp, Artificial Sequence
  ENSG00000132153_41 (sequence is synthesized)
ccggccaggttgctaagtcttcatctctgctctgacaagaaaaagccacaggatgcgtattccctcagcttctcttctactcatggtctccaggattttactgttcctttctctttcctg

SEQ ID NO: 295985 - DNA, 120 bp, Artificial Sequence
  ENSG00000132153_42 (sequence is synthesized)
cacttgaagaggccctgttgctattctgggcccccatagtacccatctcttttctctgttcctgtaatagtccattgctataaaggaatacatgagactgggtaatgtattaaaaaaaaa

SEQ ID NO: 295986 - DNA, 120 bp, Artificial Sequence
  ENSG00000132153_43 (sequence is synthesized)
ccccagcccagatctaccttagacctgctttgtgtgtcttcagaaggccgcgcttgtggggtctcagtgttcctgatgtagggggctggtgagggttactcagggagtggggaagcactg

SEQ ID NO: 295987 - DNA, 120 bp, Artificial Sequence
  ENSG00000132153_44 (sequence is synthesized)
tttacaagttaccgcttagagggagacaggatcaggtgtcctccatcctggccacttgacacaggagtctgtcccaaggaaacagtctcaaaccaggcagcagagttacatcagaacgct

SEQ ID NO: 295988 - DNA, 120 bp, Artificial Sequence
  ENSG00000132153_45 (sequence is synthesized)
ggcgggagcacgatggcggccgctaggagactcatggcgctggccgccggcatctctccgcgcctgcagccgctgggtccccgcgctgctgggcgacagggtcgctcgcgcggcttctct

SEQ ID NO: 295989 - DNA, 120 bp, Artificial Sequence
  ENSG00000132153_46 (sequence is synthesized)
tcaagctgcgcccaccccgaccacaccaaggaagccgccgaggccgagtcagggatggcccccggcgggcctggggaaggcgacggaagcttggtgaacgcttctagggacctattaaaa

SEQ ID NO: 295990 - DNA, 120 bp, Artificial Sequence
  ENSG00000132153_47 (sequence is synthesized)
tcatcctccacagctaaggtgagttgggtctcctagaagtttgtgtgggggccgtttacttggtcatgtctggtgttccctaaaggcaggtttagagagggctgagggggtgtgttcctc

SEQ ID NO: 295991 - DNA, 120 bp, Artificial Sequence
  ENSG00000132153_48 (sequence is synthesized)
cagcccaaacctaggccaggtggaggaactcctgcttgggaggaaaagcagcaggtgtgatggaatggaggtcaagcctcagcagcacagggagtgggcttgggggccgcaagagcagaa

SEQ ID NO: 295992 - DNA, 120 bp, Artificial Sequence
  ENSG00000132153_49 (sequence is synthesized)
gacccatacctcttctgggcggtggattgtcagtggggaagggttagaggtgtgggtcttggtgaggtatgaatttctctcttgctgccaggcgaaggggctttggtcatgaaatgccta

SEQ ID NO: 295993 - DNA, 78 bp, Artificial Sequence
  ENSG00000132153_50 (sequence is synthesized)
taagactctctctagctaagaaagccgtacaaaccccaattgaccccttaatttacaagacactaagggctcctcacc

SEQ ID NO: 295994 - DNA, 120 bp, Artificial Sequence
  ENSG00000132153_51 (sequence is synthesized)
aataagactctctctagctaagaaagccgtacaaaccccaattgaccccttaatttacaagacactaagggctcctcacccaaccccctttcgtaaggagttggcctgggtaaacagatc

SEQ ID NO: 295995 - DNA, 120 bp, Artificial Sequence
  ENSG00000132153_52 (sequence is synthesized)
aacaccaacaatatatgaagttcccaggaattttctccaagagataacaacataaaaccttgagttcgtgtctggcgtagaccctatatctaattataatgaaagatttagaatcttgca

SEQ ID NO: 295996 - DNA, 120 bp, Artificial Sequence
  ENSG00000132153_53 (sequence is synthesized)
taatgaaagatttagaatcttgcacctggtactgttgctcttcttgtaaccatttgtcttttaagttgtttatcactctgtaaccattttgattcttttgattcttgcatgtttttactt

SEQ ID NO: 295997 - DNA, 120 bp, Artificial Sequence
  ENSG00000132153_54 (sequence is synthesized)
cccctccccttcctaaacctaagtataaaagttaatcgagccccttcctcgtggccgaaagaattttgagcattagctgtctctttggccgccggcttaataaaggactcttaattcgtc

SEQ ID NO: 295998 - DNA, 120 bp, Artificial Sequence
  ENSG00000132153_55 (sequence is synthesized)
cttatcttacaagagtcattgagcctcattccatcttcctgccttccatccacacgactgctggtttagatttgctggagagtgagctctgcagggtcctagccctgggcagcgccgagc

SEQ ID NO: 295999 - DNA, 120 bp, Artificial Sequence
  ENSG00000132153_56 (sequence is synthesized)
agcctcattccatcttcctgccttccatccacacgactgctggtttagatttgctggagagtgagctctgcagggtcctagccctgggcagcgccgagcccgcctactgaaggcccaggg

SEQ ID NO: 296000 - DNA, 120 bp, Artificial Sequence
  ENSG00000132153_57 (sequence is synthesized)
ctgtggtgagcgaggacgggctgctgatgccctcgcctaggcttgggcttcgggtccgcccggcccgcagggggcgcgcggcgctcgggccggccgctcccgttctcttcgcccggtccc

SEQ ID NO: 296001 - DNA, 120 bp, Artificial Sequence
  ENSG00000132153_58 (sequence is synthesized)
tcattttttaaaacgtttattttggtaagttaacattttcctagttcataatttctccctccatcaccatgtcagccaaaatccaaaatctcttagagattacttggcacaacttatgcg

SEQ ID NO: 296002 - DNA, 120 bp, Artificial Sequence
  ENSG00000132153_59 (sequence is synthesized)
ttggagctcctgagcttgtctgggctggtttttggggagccccagagcatagactgagtcttgcatgtccccctgcagagcctgggcctggtggacaggaacaacgaaccgcttacacac

SEQ ID NO: 296003 - DNA, 120 bp, Artificial Sequence
  ENSG00000132155_0 (sequence is synthesized)
agtcgactgccagtagggctcgcgcagaatcggagagccggtggcgtcgcaggtcgggaggacgagcaccgagtcgagggctcgctcgtctgggccgcccgagagtcttaatcgcgggcg

SEQ ID NO: 296004 - DNA, 120 bp, Artificial Sequence
  ENSG00000132155_1 (sequence is synthesized)
cttgggccgccatcttagatggcgggagtaagaggaaaacgattgtgaggcgggaacggctttctgctgccttttttgggccccgaaaagggtcagctggccgggctttggggcgcgtgc

SEQ ID NO: 296005 - DNA, 120 bp, Artificial Sequence
  ENSG00000132155_2 (sequence is synthesized)
cctgaggcgcggagcgcgtttgctacgatgcgggggctgctcggggctccgtcccctgggctggggacgcgccgaatgtgaccgcctcccgctccctcacccgccgcggggaggaggagc

SEQ ID NO: 296006 - DNA, 120 bp, Artificial Sequence
  ENSG00000132155_3 (sequence is synthesized)
gggcgagaagctgccgccgaacgacaggacgttggggcggcctggctccctcaggtttaagaattgtttaagctgcatcaatggagcacatacagggagcttggaagacgatcagcaatg

SEQ ID NO: 296007 - DNA, 120 bp, Artificial Sequence
  ENSG00000132155_4 (sequence is synthesized)
gttttggattcaaagatgccgtgtttgatggctccagctgcatctctcctacaatagttcagcagtttggctatcagcgccgggcatcagatgatggcaaactcacagatccttctaaga

SEQ ID NO: 296008 - DNA, 120 bp, Artificial Sequence
  ENSG00000132155_5 (sequence is synthesized)
caagcaacactatccgtgttttcttgccgaacaagcaaagaacagtggtcaatgtgcgaaatggaatgagcttgcatgactgccttatgaaagcactcaaggtgaggggcctgcaaccag

SEQ ID NO: 296009 - DNA, 120 bp, Artificial Sequence
  ENSG00000132155_6 (sequence is synthesized)
agtgctgtgcagtgttcagacttctccacgaacacaaaggtaaaaaagcacgcttagattggaatactgatgctgcgtctttgattggagaagaacttcaagtagatttcctggatcatg

SEQ ID NO: 296010 - DNA, 120 bp, Artificial Sequence
  ENSG00000132155_7 (sequence is synthesized)
ttcccctcacaacacacaactttgctcggaagacgttcctgaagcttgccttctgtgacatctgtcagaaattcctgctcaatggatttcgatgtcagacttgtggctacaaatttcatg

SEQ ID NO: 296011 - DNA, 120 bp, Artificial Sequence
  ENSG00000132155_8 (sequence is synthesized)
agcactgtagcaccaaagtacctactatgtgtgtggactggagtaacatcagacaactcttattgtttccaaattccactattggtgatagtggagtcccagcactaccttctttgacta

SEQ ID NO: 296012 - DNA, 120 bp, Artificial Sequence
  ENSG00000132155_9 (sequence is synthesized)
tgcgtcgtatgcgagagtctgtttccaggatgcctgttagttctcagcacagatattctacacctcacgccttcacctttaacacctccagtccctcatctgaaggttccctctcccaga

SEQ ID NO: 296013 - DNA, 120 bp, Artificial Sequence
  ENSG00000132155_10 (sequence is synthesized)
ggcagaggtcgacatccacacctaatgtccacatggtcagcaccaccctgcctgtggacagcaggatgattgaggatgcaattcgaagtcacagcgaatcagcctcaccttcagccctgt

SEQ ID NO: 296014 - DNA, 120 bp, Artificial Sequence
  ENSG00000132155_11 (sequence is synthesized)
ccagtagccccaacaatctgagcccaacaggctggtcacagccgaaaacccccgtgccagcacaaagagagcgggcaccagtatctgggacccaggagaaaaacaaaattaggcctcgtg

SEQ ID NO: 296015 - DNA, 120 bp, Artificial Sequence
  ENSG00000132155_12 (sequence is synthesized)
gacagagagattcaagctattattgggaaatagaagccagtgaagtgatgctgtccactcggattgggtcaggctcttttggaactgtttataagggtaaatggcacggagatgttgcag

SEQ ID NO: 296016 - DNA, 120 bp, Artificial Sequence
  ENSG00000132155_13 (sequence is synthesized)
tggctgttctgcgcaaaacacggcatgtgaacattctgcttttcatggggtacatgacaaaggacaacctggcaattgtgacccagtggtgcgagggcagcagcctctacaaacacctgc

SEQ ID NO: 296017 - DNA, 120 bp, Artificial Sequence
  ENSG00000132155_14 (sequence is synthesized)
atgtccaggagaccaagtttcagatgttccagctaattgacattgcccggcagacggctcagggaatggactatttgcatgcaaagaacatcatccatagagacatgaaatccaacaata

SEQ ID NO: 296018 - DNA, 120 bp, Artificial Sequence
  ENSG00000132155_15 (sequence is synthesized)
tatttctccatgaaggcttaacagtgaaaattggagattttggtttggcaacagtaaagtcacgctggagtggttctcagcaggttgaacaacctactggctctgtcctctggatggccc

SEQ ID NO: 296019 - DNA, 120 bp, Artificial Sequence
  ENSG00000132155_16 (sequence is synthesized)
cagaggtgatccgaatgcaggataacaacccattcagtttccagtcggatgtctactcctatggcatcgtattgtatgaactgatgacgggggagcttccttattctcacatcaacaacc

SEQ ID NO: 296020 - DNA, 120 bp, Artificial Sequence
  ENSG00000132155_17 (sequence is synthesized)
gagatcagatcatcttcatggtgggccgaggatatgcctccccagatcttagtaagctatataagaactgccccaaagcaatgaagaggctggtagctgactgtgtgaagaaagtaaagg

SEQ ID NO: 296021 - DNA, 120 bp, Artificial Sequence
  ENSG00000132155_18 (sequence is synthesized)
aagagaggcctctttttccccagatcctgtcttccattgagctgctccaacactctctaccgaagatcaaccggagcgcttccgagccatccttgcatcgggcagcccacactgaggata

SEQ ID NO: 296022 - DNA, 120 bp, Artificial Sequence
  ENSG00000132155_19 (sequence is synthesized)
tcaatgcttgcacgctgaccacgtccccgaggctgcctgtcttctagttgactttgcacctgtcttcaggctgccaggggaggaggagaagccagcaggcaccacttttctgctcccttt

SEQ ID NO: 296023 - DNA, 120 bp, Artificial Sequence
  ENSG00000132155_20 (sequence is synthesized)
ctccagaggcagaacacatgttttcagagaagctgctgctaaggaccttctagactgctcacagggccttaacttcatgttgccttcttttctatccctttgggccctgggagaaggaag

SEQ ID NO: 296024 - DNA, 120 bp, Artificial Sequence
  ENSG00000132155_21 (sequence is synthesized)
ccatttgcagtgctggtgtgtcctgctccctccccacattccccatgctcaaggcccagccttctgtagatgcgcaagtggatgttgatggtagtacaaaaagcaggggcccagccccag

SEQ ID NO: 296025 - DNA, 120 bp, Artificial Sequence
  ENSG00000132155_22 (sequence is synthesized)
ctgttggctacatgagtatttagaggaagtaaggtagcaggcagtccagccctgatgtggagacacatgggattttggaaatcagcttctggaggaatgcatgtcacaggcgggactttc

SEQ ID NO: 296026 - DNA, 120 bp, Artificial Sequence
  ENSG00000132155_23 (sequence is synthesized)
ttcagagagtggtgcagcgccagacattttgcacataaggcaccaaacagcccaggactgccgagactctggccgcccgaaggagcctgctttggtactatggaacttttcttaggggac

SEQ ID NO: 296027 - DNA, 120 bp, Artificial Sequence
  ENSG00000132155_24 (sequence is synthesized)
acgtcctcctttcacagcttctaaggtgtccagtgcattgggatggttttccaggcaaggcactcggccaatccgcatctcagccctctcagggagcagtcttccatcatgctgaatttt

SEQ ID NO: 296028 - DNA, 120 bp, Artificial Sequence
  ENSG00000132155_25 (sequence is synthesized)
gtcttccaggagctgcccctatggggcggggccgcagggccagccttgtttctctaacaaacaaacaaacaaacagccttgtttctctagtcacatcatgtgtatacaaggaagccagga

SEQ ID NO: 296029 - DNA, 120 bp, Artificial Sequence
  ENSG00000132155_26 (sequence is synthesized)
atacaggttttcttgatgatttgggttttaattttgtttttattgcacctgacaaaatacagttatctgatggtccctcaattatgttattttaataaaataaattaaatttaggtgtaa

SEQ ID NO: 296030 - DNA, 78 bp, Artificial Sequence
  ENSG00000132155_27 (sequence is synthesized)
ggaggccaaggtgggaggattgcttaagccctggaggtcaaggctgcaatgtgccactgcactctagccttggaaatt

SEQ ID NO: 296031 - DNA, 120 bp, Artificial Sequence
  ENSG00000132155_28 (sequence is synthesized)
ctgtctcaaaaaaaaaaaaaaaattggaaatttgccgtatctgtgtaggtatgtgattctttggataaatgattcactgtatcttcctcaaaactaggttatttgaaagactgagatcat

SEQ ID NO: 296032 - DNA, 120 bp, Artificial Sequence
  ENSG00000132155_29 (sequence is synthesized)
atcaaatttgtccctaaattggaaccaggatcaggaaaagccttctagtccattaagcgattctgtgatatctttgcacaagcctctggcctgggctggaggggccaattatcaggaatg

SEQ ID NO: 296033 - DNA, 120 bp, Artificial Sequence
  ENSG00000132155_30 (sequence is synthesized)
ctactatgtgtgtggactggagtaacatcagacaactcttgtaaggcattgttcttttatccaaggaagatagggatgaggagtatacatactttaaagggtatttgttgtagattttga

SEQ ID NO: 296034 - DNA, 120 bp, Artificial Sequence
  ENSG00000132155_31 (sequence is synthesized)
ctgacaggtctggattctagactcatttaatgaattgtgatccagaaactactttagaaacagtgataattctgaaactagctaggtttggtggcattcatactccagaatgagcaggta

SEQ ID NO: 296035 - DNA, 120 bp, Artificial Sequence
  ENSG00000132155_32 (sequence is synthesized)
ggagtaggacttgttatctgtcaaattgagattgacatactgtgactgtgattcagtaaggaaaggagcaaaaggatatgaaaacaagaagattttttgcttttcgctcttaatagtatt

SEQ ID NO: 296036 - DNA, 120 bp, Artificial Sequence
  ENSG00000132155_33 (sequence is synthesized)
gtgggtgtccctatcaaacagggaaggcattgacttaattcttgaatctatgtggaatattaatgttctgattttaatggaaacactttgtcacttggaagaaaggagatgttgcagtaa

SEQ ID NO: 296037 - DNA, 120 bp, Artificial Sequence
  ENSG00000132155_34 (sequence is synthesized)
ttgactgctcggttctaaatttagggaaacagaagggaggctttctatcacaagtggctctcggtgccaggggatatctttttaaggaaagaggcagaggacaggaaaacagaaaagtca

SEQ ID NO: 296038 - DNA, 120 bp, Artificial Sequence
  ENSG00000132155_35 (sequence is synthesized)
gaaaattagtaggcttggcctgtccctcagcagcttatgcctcacctggactgatgagagcgatgtttaggttaggttcctttctgagtttatctcagcaaaagtgatttggagagattt

SEQ ID NO: 296039 - DNA, 120 bp, Artificial Sequence
  ENSG00000132155_36 (sequence is synthesized)
ccgtaagcttgaaataggcataattttatcacactattagtaaatgtaacctgacggggattgggcttttgtcttaagtttatttctagtttgtggccagcgtgtgtatgtctatctgct

SEQ ID NO: 296040 - DNA, 120 bp, Artificial Sequence
  ENSG00000132155_37 (sequence is synthesized)
tgtctatctgcttgttatgtggatagcaagtagctacaagccaaatgttgaaaggtttccaaaatcactaattaaaatagtctttcttgactgggcgtgatggctcacacctataatccc

SEQ ID NO: 296041 - DNA, 89 bp, Artificial Sequence
  ENSG00000132155_38 (sequence is synthesized)
tggatcacttgaggctaggagtttgagacttaatttaaaaattagctgagtgtggtggcacgtacctataatcccagctactcaggagg

SEQ ID NO: 296042 - DNA, 120 bp, Artificial Sequence
  ENSG00000132155_39 (sequence is synthesized)
cttatccttgtgtggcttctgtttgtcttgtctattaagcctcaccttcagccctgtccagtagccccaacaatctgagcccaacaggctggtcacagccgaaaacccccgtgccagcac

SEQ ID NO: 296043 - DNA, 120 bp, Artificial Sequence
  ENSG00000132155_40 (sequence is synthesized)
gaggccaaggccagtggatcacttgaggccagtagttttgagaccagccttgccaatatggcaaaaccctgtttctactgaaaatacaagaatgaaccaagtctggtggcacatgcctat

SEQ ID NO: 296044 - DNA, 120 bp, Artificial Sequence
  ENSG00000132155_41 (sequence is synthesized)
aatcccagctactcaagaactgggacagggagaatcgcttgaacattggaaagcagaggttgcggggagcttagatcacgttactgcactccaaccttggctgcagaagcgagactctgt

SEQ ID NO: 296045 - DNA, 120 bp, Artificial Sequence
  ENSG00000132155_42 (sequence is synthesized)
ctcaaaaaaaaaaaaagagaagttcaggttcctccttgggactgaacttcccccttggggctcagctttgggctctgcctgctaccctggctttatcagaaacctgagaatatagtgggg

SEQ ID NO: 296046 - DNA, 120 bp, Artificial Sequence
  ENSG00000132155_43 (sequence is synthesized)
tgcatgtaccttctgcttggacagctgtggcaatgccttctgctcagctgtctgaggcatggctgtcccacatgagggtttaagcagatgttgtttttgggataattttttttttttaat

SEQ ID NO: 296047 - DNA, 120 bp, Artificial Sequence
  ENSG00000132155_44 (sequence is synthesized)
ttgcactctagcctgggtgacagagccagactccatctgaaaaaaaaaaaaaaacccaaaaaaaccacacttttttccttagagacacaggttctcactctgtcacctatgctagagtgc

SEQ ID NO: 296048 - DNA, 120 bp, Artificial Sequence
  ENSG00000132155_45 (sequence is synthesized)
acctatgctagagtgcagcggcgcaatcatagctcactgcatccttgaactcctgggctccagctatcctcttggctcagtctcataggttgctgggactgcaggcacatgctaccgtgc

SEQ ID NO: 296049 - DNA, 120 bp, Artificial Sequence
  ENSG00000132155_46 (sequence is synthesized)
cacctttcctggctagcctagggtagtgcttctcaaacttctcctctgaagtagaggagctcctcgtacccctagacatctgggagttactaagctatagctgtgcttgcaagtcctaca

SEQ ID NO: 296050 - DNA, 120 bp, Artificial Sequence
  ENSG00000132155_47 (sequence is synthesized)
taaattctcacactgtctttaaaattcatatggaagttgccttctgtgtattttaagaaatggaatgacttttcagaaaaattgagatataattcatacatcataaaattccccctttta

SEQ ID NO: 296051 - DNA, 120 bp, Artificial Sequence
  ENSG00000132155_48 (sequence is synthesized)
aaatgtacacctacctcagtgtttttctggtattgagttgtgcagccaccaccactatctaattttagaacattttcattatcccggaaagaaacacatgcccattgtattagtctgttt

SEQ ID NO: 296052 - DNA, 120 bp, Artificial Sequence
  ENSG00000132155_49 (sequence is synthesized)
aatttataaagaaaagaggtttatttgactcggggttctgcagactgtacaaaaagcatgacaccagcatctgtgtctggtgaggccctcaggaagctttcactcatggcagaaggcaag

SEQ ID NO: 296053 - DNA, 120 bp, Artificial Sequence
  ENSG00000132155_50 (sequence is synthesized)
tcaggaagctttcactcatggcagaaggcaaggggagccacgtgtgatgtggtgagagaaaggagcaagagagagagcatggagggaggtcccagactctttaataaccaggtttcatgt

SEQ ID NO: 296054 - DNA, 120 bp, Artificial Sequence
  ENSG00000132155_51 (sequence is synthesized)
gagctaatagtgtgtgaactcactcgttactgcagggaggccaccgagccgtttgtgaggaatccatccccatgacccaaacacctgccacttaggtcccacctccaacactggggatca

SEQ ID NO: 296055 - DNA, 120 bp, Artificial Sequence
  ENSG00000132155_52 (sequence is synthesized)
catttcaacttgagatttggagtggacagatatccaaacaatatacccattagaggttacccaatacctcccacccacttgcagtctactttctgtttctatggattttgcctactttat

SEQ ID NO: 296056 - DNA, 120 bp, Artificial Sequence
  ENSG00000132155_53 (sequence is synthesized)
agttcaatataaatggaatcatgtaagatataatatagtcaggtaacatataatgatgtttcggtcaatgaccacatataggaaggtggtcccacaagattataatactgtatttttact

SEQ ID NO: 296057 - DNA, 120 bp, Artificial Sequence
  ENSG00000132155_54 (sequence is synthesized)
gtgccttttctatgtttggctatgtttagagacacaaatactcaccatgttacaaccagctacagtattcagtacactgagggccatacagttttgtagcctaagtgcaacacgttatac

SEQ ID NO: 296058 - DNA, 120 bp, Artificial Sequence
  ENSG00000132155_55 (sequence is synthesized)
catttagccagggtgtgtagaaggctgtaccttcttggtttgtgtgaatacactttatgatgtgtgcatgatgacaagttggctaacaacacatttctcagaaggtatccctgccgttaa

SEQ ID NO: 296059 - DNA, 120 bp, Artificial Sequence
  ENSG00000132155_56 (sequence is synthesized)
gtgatgcttggctgtatataatacataagatatggtattgtgtgcctgggctcttagacctagcatagtattttcaaggttaatgtgtagcatgagtcactacttcattcctttctgtgt

SEQ ID NO: 296060 - DNA, 120 bp, Artificial Sequence
  ENSG00000132155_57 (sequence is synthesized)
ctgagtaacattccattgtatggatatgccacattattcattcatcatttatggacattgggttatcagaattactttagagtaaaactgatgcttgaagaagtgtcagcaatggtcagg

SEQ ID NO: 296061 - DNA, 120 bp, Artificial Sequence
  ENSG00000132155_58 (sequence is synthesized)
cgccaggggcccatgcctgtaatccaagcattttggaggccaacatgggaggatcacttgagcccaggagtcaagaccagcttgggcaacagtgcaagaccctgtatctacccaaaaaaa

SEQ ID NO: 296062 - DNA, 120 bp, Artificial Sequence
  ENSG00000132164_0 (sequence is synthesized)
gcagagccgggccggcgcacgaggcagccagcgcggccatgacggcggagaaggcgctgcccctgggcaatgggaaggctgctgaggaggcgcgggagtccgaggcgccgggtggcggct

SEQ ID NO: 296063 - DNA, 120 bp, Artificial Sequence
  ENSG00000132164_1 (sequence is synthesized)
gcagcagcgggggcgcggcgcccgcgcgccacccgcgcgtcaagcgcgacaaggcggtccacgagcgcggccactggaacaacaaggtggagttcgtgctgagcgtggccggggagatca

SEQ ID NO: 296064 - DNA, 120 bp, Artificial Sequence
  ENSG00000132164_2 (sequence is synthesized)
ttgggctgggcaacgtgtggcgcttcccctacctgtgctacaagaacggaggaggggcattcctgattccctacgtggtgttttttatttgctgtggaattcctgtttttttcctggaga

SEQ ID NO: 296065 - DNA, 120 bp, Artificial Sequence
  ENSG00000132164_3 (sequence is synthesized)
cagctctggggcagttcacaagtgaaggtggcattacgtgttggaggaaagtttgccctttatttgaaggcattggctatgcaacacaggtgattgaggcccatctgaatgtgtactaca

SEQ ID NO: 296066 - DNA, 120 bp, Artificial Sequence
  ENSG00000132164_4 (sequence is synthesized)
tcatcatcctggcatgggccattttttacctgagcaactgcttcactactgagctaccctgggctacctgtgggcatgagtggaacacagagaattgtgtggagttccagaaactgaatg

SEQ ID NO: 296067 - DNA, 120 bp, Artificial Sequence
  ENSG00000132164_5 (sequence is synthesized)
tgagcaactacagccatgtgtctctgcagaatgccacctcccctgtcatggagttttgggagcaccgggtcctggccatctctgacgggatcgagcacatcgggaaccttcgctgggagc

SEQ ID NO: 296068 - DNA, 120 bp, Artificial Sequence
  ENSG00000132164_6 (sequence is synthesized)
tggccttgtgtctcttggcagcctggaccatctgttacttctgtatctggaaggggaccaagtctacaggaaaggttgtatacgtgactgcgacattcccctacatcatgctgctgatcc

SEQ ID NO: 296069 - DNA, 120 bp, Artificial Sequence
  ENSG00000132164_7 (sequence is synthesized)
tcctgatacgaggggtcacgttgcccggggcctcagagggcatcaagttctacttgtaccctgacctctcccggctctccgacccccaggtctgggtagatgctggaacgcagatctttt

SEQ ID NO: 296070 - DNA, 120 bp, Artificial Sequence
  ENSG00000132164_8 (sequence is synthesized)
tctcctatgccatttgcctgggctgtctgaccgctctgggaagttataacaattataacaacaactgctacagggactgcatcatgctctgttgcctgaacagcggcaccagcttcgtgg

SEQ ID NO: 296071 - DNA, 120 bp, Artificial Sequence
  ENSG00000132164_9 (sequence is synthesized)
ctgggtttgccatcttctcagtcctgggttttatggcgtacgagcagggggtacccattgctgaggtggcagagtcaggccccggcctggcctttattgcgtaccccaaggcggtcacca

SEQ ID NO: 296072 - DNA, 120 bp, Artificial Sequence
  ENSG00000132164_10 (sequence is synthesized)
tgatgcctctctccccgctgtgggccaccttgttcttcatgatgctcatcttcctgggcctggacagccagtttgtgtgtgtggaaagcctggtgaccgccgtggtggacatgtacccca

SEQ ID NO: 296073 - DNA, 120 bp, Artificial Sequence
  ENSG00000132164_11 (sequence is synthesized)
aggttttccggaggggttaccggcgggagctgctcatcctagccttgtctgttatctcctattttctgggcctcgtgatgttaacagagggtggcatgtacatcttccagctctttgact

SEQ ID NO: 296074 - DNA, 120 bp, Artificial Sequence
  ENSG00000132164_12 (sequence is synthesized)
cctatgccgccagtgggatgtgccttctcttcgtggccatctttgagtgcatctgcatcggctgggtgtatggaagcaaccggttctatgataacattgaagacatgattggctaccggc

SEQ ID NO: 296075 - DNA, 120 bp, Artificial Sequence
  ENSG00000132164_13 (sequence is synthesized)
caccgtcgctcattaagtggtgctggatgatcatgacccctgggatctgcgcggggatcttcatcttcttcttgatcaagtacaagccactcaagtacaacaacatctacacctacccag

SEQ ID NO: 296076 - DNA, 120 bp, Artificial Sequence
  ENSG00000132164_14 (sequence is synthesized)
cctggggctatggcattggctggctcatggccctgtcctccatgctctgcatcccgctctggatctgcatcacagtgtggaagacggaggggacactgcccgagaaactccagaagttga

SEQ ID NO: 296077 - DNA, 120 bp, Artificial Sequence
  ENSG00000132164_15 (sequence is synthesized)
cgacccccagcacagatctgaaaatgcggggcaagcttggggtgagcccacggatggtgacagttaatgactgtgatgccaaactcaagagtgacgggaccatcgcagccatcacagaga

SEQ ID NO: 296078 - DNA, 120 bp, Artificial Sequence
  ENSG00000132164_16 (sequence is synthesized)
aggagacgcacttctgagcggccaccagccatctggggctcttcttcctttcttccccccgtgtatgtaaatgaattcctgaaccccatacttcacctaatggtaggggcttgcttgttt

SEQ ID NO: 296079 - DNA, 120 bp, Artificial Sequence
  ENSG00000132164_17 (sequence is synthesized)
ctctaaagtcatatcccctccccgcccccagtcatcatggaagtaaccactacaaagagataacactgtacggggactgccagatcttctgtcctagggcagttttaatcaatgttttct

SEQ ID NO: 296080 - DNA, 120 bp, Artificial Sequence
  ENSG00000132164_18 (sequence is synthesized)
agggattaggaagaagtgtataatattgtaaaactttttttactggggttgtgggccaggtggggtggggagtgatggctgtcctcctctgtcggccttttaatgaccgttctgtgtccc

SEQ ID NO: 296081 - DNA, 120 bp, Artificial Sequence
  ENSG00000132164_19 (sequence is synthesized)
atgtatgtctctgaccatccacagccgcccctcctccataccccagggataatttttccttcaaaccttccctttccaagggacactgggtttgcagacagcaaggctatgtggcagaga

SEQ ID NO: 296082 - DNA, 120 bp, Artificial Sequence
  ENSG00000132164_20 (sequence is synthesized)
agaaaaagtccagcagactcaggactcctgggctgcaggcccccctctgccctgatcccatgaagtgaccttgggcactccctttccctccctgggcctcagtttccccatctcccaaat

SEQ ID NO: 296083 - DNA, 120 bp, Artificial Sequence
  ENSG00000132164_21 (sequence is synthesized)
gggaggaggagccggattgggttatttcttagggattctctttgtgtgccttgctggcttccagacctgccgtggaccttggcttcctctgaagacttgcaggcaataatctccgccctc

SEQ ID NO: 296084 - DNA, 120 bp, Artificial Sequence
  ENSG00000132164_22 (sequence is synthesized)
ccagttgtacctcctccccacctgcttatttaaaatcaagtttattgtagaaatggtgtggtgttgatgtgtgttttccctaaaactctaatttcatctcatctgtgggcagccctgctc

SEQ ID NO: 296085 - DNA, 120 bp, Artificial Sequence
  ENSG00000132164_23 (sequence is synthesized)
tctggacaccagtgggtcctcagcccccatggcaggggctcctctgtctggcctgcctttttttcctggtcagctgctcttagcgccggctctgcctctccacccttggcagggctggct

SEQ ID NO: 296086 - DNA, 120 bp, Artificial Sequence
  ENSG00000132164_24 (sequence is synthesized)
ggagttgctgtggggactgattttctgggtggggaagcagccatctattcttgcagccatctcagccagggtctatgtcttaggaccttcctccggccttccatgagaagcagccacagg

SEQ ID NO: 296087 - DNA, 120 bp, Artificial Sequence
  ENSG00000132164_25 (sequence is synthesized)
gggcctggtttcctcctaaggcccttctctgtcccaggccacctcttctccctcctcctgtcccctaacctccacctaccaccatcctccctctcagttctctcccatccttgcccctgg

SEQ ID NO: 296088 - DNA, 120 bp, Artificial Sequence
  ENSG00000132164_26 (sequence is synthesized)
ttcaggagccattctacctgcctcagtggccaggcgcaaggctacaggtgcagtcacctgttcccggccaccttccctcccatctttggcagacagaagtctcagctctcactagaggga

SEQ ID NO: 296089 - DNA, 120 bp, Artificial Sequence
  ENSG00000132164_27 (sequence is synthesized)
agacctgggcatcctgctggctcctctctccgtggggcctggagtctggtgctgttccccagccagcctggctgcagacctctctggctgataccgctcttcttctttaattggacttca

SEQ ID NO: 296090 - DNA, 120 bp, Artificial Sequence
  ENSG00000132164_28 (sequence is synthesized)
tatcaagcctctgccttggtttctgagctatatgagggtggggaaggcacactcttttttcctttttccttaggttcccaatattatttggtggaaacgtgggctttctccaaaccaagg

SEQ ID NO: 296091 - DNA, 120 bp, Artificial Sequence
  ENSG00000132164_29 (sequence is synthesized)
cctgagtttcctgtaagggtcctctgtttttgattcacccaaaagtctgcaaacccccagcatctctgctctggccagccctgatctgaagcctgtgtctactaagagggatgcccagtg

SEQ ID NO: 296092 - DNA, 120 bp, Artificial Sequence
  ENSG00000132164_30 (sequence is synthesized)
ccccactgggcaggacgggaagcctagcctgggccccctctgtgcacacagttcaggcctgcccagcttcttatgggcaagccaccatcccactctcgtctccctgagctgtctggttct

SEQ ID NO: 296093 - DNA, 120 bp, Artificial Sequence
  ENSG00000132164_31 (sequence is synthesized)
gcggacccaggaagggccaggctggggccctgcttgtgtttatcctcggctgctgtcttcccagcaggccccaggcaaggaggcttcccattgctgctgctaccggttctccacagatcc

SEQ ID NO: 296094 - DNA, 120 bp, Artificial Sequence
  ENSG00000132164_32 (sequence is synthesized)
ctgtggtccgccatcgccgacacacacacacgtcgtaatgtggctaacgcttgactcacttaacactactcatggggcagggcggagggtggattgttgctttttgttttttgtaatttc

SEQ ID NO: 296095 - DNA, 120 bp, Artificial Sequence
  ENSG00000132164_33 (sequence is synthesized)
ctactagtatttgggtaactttgggggtggggagggcaatgtgggggcaggggaacatgtcattgtgatgacttttttgatattcattagaaacaatacatcctttctgagatatttaca

SEQ ID NO: 296096 - DNA, 120 bp, Artificial Sequence
  ENSG00000132164_34 (sequence is synthesized)
gtattattaaaaaatgaaaaaggttgtactgttttgcataatgaacatttttattgggcattcaaagggtgcaagattgtctgcttactcatttttaaaaattaaagaaatgaacaatca

SEQ ID NO: 296097 - DNA, 120 bp, Artificial Sequence
  ENSG00000132164_35 (sequence is synthesized)
gtctcaggctggagaaagcaaacactcctagccattcctctgactcatgtacaaaacttctctggggtgtgtatgttcccctctgatttattccggacaggaagcaaccggttctatgat

SEQ ID NO: 296098 - DNA, 120 bp, Artificial Sequence
  ENSG00000132164_36 (sequence is synthesized)
gcgatgacggcctgcgcccacctgcctcaaggggacgctgtggcaaactcctctctggccaatgttcagtatcatggttgtgcccaaggtgtctctgtgaagtcttttggctgagccagt

SEQ ID NO: 296099 - DNA, 120 bp, Artificial Sequence
  ENSG00000132164_37 (sequence is synthesized)
gtgggggctctgtcctggttctgctcagttggtcttgcccctattcctggaaaaagcctgatccttcttgcagcctggcacttcctggcttctgtgagcattcgacagcttcggaagcaa

SEQ ID NO: 296100 - DNA, 120 bp, Artificial Sequence
  ENSG00000132164_38 (sequence is synthesized)
gagtgcagatcttcagaggtttcccaaaggggcagctgagagaaatgttttcttgttctttgataacatgtcagcatgcatagtgggttattagggcaggaagtacttggtgaaaggata

SEQ ID NO: 296101 - DNA, 120 bp, Artificial Sequence
  ENSG00000132164_39 (sequence is synthesized)
gacagtttaaaaattcattttgagcaaaagaggagatgcagcctgtttgcaataagctaagtcaagagtgtatttagcctggaaagcataagtctctagaggggataggttagctttctt

SEQ ID NO: 296102 - DNA, 120 bp, Artificial Sequence
  ENSG00000132164_40 (sequence is synthesized)
tcagtagctgaagtgtcatatggaaaagaaggagatcaaatttaatggatagagattataaagaggcaggtttcaaatgtgcgtagggaagaacttggtctcatagcatagcattatctg

SEQ ID NO: 296103 - DNA, 120 bp, Artificial Sequence
  ENSG00000132164_41 (sequence is synthesized)
gaagcacttcagaaggttgtgagcacccatccctggaagttgaccagtatagggttgccaatcattgttgggggtgtgtctgaatccactgaaattataagtagtacttgtgtggttggg

SEQ ID NO: 296104 - DNA, 120 bp, Artificial Sequence
  ENSG00000132164_42 (sequence is synthesized)
ttccaaaggatctgtgacccttacagggctgctatgtgtggttgtgtacattgcacactgaacaacccaaggggccataatttacattatgaaatatacattccagaattgtgtggtgca

SEQ ID NO: 296105 - DNA, 120 bp, Artificial Sequence
  ENSG00000132164_43 (sequence is synthesized)
cgacctgtataaccatacacagtggccctgacttgcaagtttgttttaaaggtagaaggatcccttgccccaggtattggaaagaagtttcctgtatgggtcaaaggctggactaaatgc

SEQ ID NO: 296106 - DNA, 120 bp, Artificial Sequence
  ENSG00000132164_44 (sequence is synthesized)
tttctgaagcttttcaatctaaaaagtcctggcttcattgaagaagcctcccttactctgatggtgattaatagtagtatatgtgtgtgtggtggggcagtggtttatgagtgattttta

SEQ ID NO: 296107 - DNA, 120 bp, Artificial Sequence
  ENSG00000132164_45 (sequence is synthesized)
tttttttcccagataccattcgtctcctgccttctctagaggtcattatgctgaatttagatttaccactctcatataaatcttcatacttttcatatatatatgccccaaatagcacct

SEQ ID NO: 296108 - DNA, 120 bp, Artificial Sequence
  ENSG00000132164_46 (sequence is synthesized)
aggtctttcttgcatatttttcaaatttgtgatactggcatccattatttacattttttataacaactttatttctttgctcaatattggttcttagatgtatccatattggtacatgta

SEQ ID NO: 296109 - DNA, 120 bp, Artificial Sequence
  ENSG00000132164_47 (sequence is synthesized)
gctttggttctttcatttttctatcagagtatttcattgtatgaatggcctgtgttgtatttatccaggtcctcttggtcctcttgatgggcatttaggctgttgcccatttctcactat

SEQ ID NO: 296110 - DNA, 120 bp, Artificial Sequence
  ENSG00000132164_48 (sequence is synthesized)
tattaagcacactgagtgaatgtctagtctgtgcttccttgagtggaattgctgggttgtagcatacatgcgttgtcagttttatcatataacgtaaaattactttagaaagaaattaat

SEQ ID NO: 296111 - DNA, 120 bp, Artificial Sequence
  ENSG00000132164_49 (sequence is synthesized)
actaaaaatacaaaaattagctgggtagtggttcatgcctgcaatctcatctactcaggaggttgaagcaggagaatcacttgaacctggaaggcgaaagttgcagtgagccgagatcgg

SEQ ID NO: 296112 - DNA, 120 bp, Artificial Sequence
  ENSG00000132164_50 (sequence is synthesized)
agactgtctcaaaaaaaaaaaaaaaaattaatttacactccaaacaagagtttgtgagaatttctgcagcttcacattttggacagcacttggtctgttcagtttttgttttgccagtgt

SEQ ID NO: 296113 - DNA, 120 bp, Artificial Sequence
  ENSG00000132164_51 (sequence is synthesized)
cttggtctgttcagtttttgttttgccagtgtaatgggcattaaatgataacttactattttaaattcacatttctctaattacttgtgaggttaagcaccttttcatgttttgttttgt

SEQ ID NO: 296114 - DNA, 120 bp, Artificial Sequence
  ENSG00000132164_52 (sequence is synthesized)
ctgttttttgctatttgatttctgtacctgtgaacttcaggtttacattcgtttctatttggatagtttgtcttttcttacagatagaaattgttaatacattctagatattatcttttc

SEQ ID NO: 296115 - DNA, 120 bp, Artificial Sequence
  ENSG00000132170_0 (sequence is synthesized)
actcatgggtgtattcacaaattctgttacttcaagtctttttcttttaacggattgatcttttgctagatagagacaaaatatcagtgtgaattacagcaaacccctattccatgctgt

SEQ ID NO: 296116 - DNA, 120 bp, Artificial Sequence
  ENSG00000132170_1 (sequence is synthesized)
tatgggtgaaactctgggagattctcctattgacccagaaagcgattccttcactgatacactgtctgcaaacatatcacaagaaatgaccatggttgacacagagatgccattctggcc

SEQ ID NO: 296117 - DNA, 120 bp, Artificial Sequence
  ENSG00000132170_2 (sequence is synthesized)
caccaactttgggatcagctccgtggatctctccgtaatggaagaccactcccactcctttgatatcaagcccttcactactgttgacttctccagcatttctactccacattacgaaga

SEQ ID NO: 296118 - DNA, 120 bp, Artificial Sequence
  ENSG00000132170_3 (sequence is synthesized)
cattccattcacaagaacagatccagtggttgcagattacaagtatgacctgaaacttcaagagtaccaaagtgcaatcaaagtggagcctgcatctccaccttattattctgagaagac

SEQ ID NO: 296119 - DNA, 120 bp, Artificial Sequence
  ENSG00000132170_4 (sequence is synthesized)
tcagctctacaataagcctcatgaagagccttccaactccctcatggcaattgaatgtcgtgtctgtggagataaagcttctggatttcactatggagttcatgcttgtgaaggatgcaa

SEQ ID NO: 296120 - DNA, 120 bp, Artificial Sequence
  ENSG00000132170_5 (sequence is synthesized)
gggtttcttccggagaacaatcagattgaagcttatctatgacagatgtgatcttaactgtcggatccacaaaaaaagtagaaataaatgtcagtactgtcggtttcagaaatgccttgc

SEQ ID NO: 296121 - DNA, 120 bp, Artificial Sequence
  ENSG00000132170_6 (sequence is synthesized)
agtggggatgtctcataatgccatcaggtttgggcggatgccacaggccgagaaggagaagctgttggcggagatctccagtgatatcgaccagctgaatccagagtccgctgacctccg

SEQ ID NO: 296122 - DNA, 120 bp, Artificial Sequence
  ENSG00000132170_7 (sequence is synthesized)
ccaaagcaaaggcgagggcgatcttgacaggaaagacaacagacaaatcaccattcgttatctatgacatgaattccttaatgatgggagaagataaaatcaagttcaaacacatcaccc

SEQ ID NO: 296123 - DNA, 120 bp, Artificial Sequence
  ENSG00000132170_8 (sequence is synthesized)
ccctgcaggagcagagcaaagaggtggccatccgcatctttcagggctgccagtttcgctccgtggaggctgtgcaggagatcacagagtatgccaaaagcattcctggttttgtaaatc

SEQ ID NO: 296124 - DNA, 120 bp, Artificial Sequence
  ENSG00000132170_9 (sequence is synthesized)
ttgacttgaacgaccaagtaactctcctcaaatatggagtccacgagatcatttacacaatgctggcctccttgatgaataaagatggggttctcatatccgagggccaaggcttcatga

SEQ ID NO: 296125 - DNA, 120 bp, Artificial Sequence
  ENSG00000132170_10 (sequence is synthesized)
caagggagtttctaaagagcctgcgaaagccttttggtgactttatggagcccaagtttgagtttgctgtgaagttcaatgcactggaattagatgacagcgacttggcaatatttattg

SEQ ID NO: 296126 - DNA, 120 bp, Artificial Sequence
  ENSG00000132170_11 (sequence is synthesized)
ctgtcattattctcagtggagaccgcccaggtttgctgaatgtgaagcccattgaagacattcaagacaacctgctacaagccctggagctccagctgaagctgaaccaccctgagtcct

SEQ ID NO: 296127 - DNA, 120 bp, Artificial Sequence
  ENSG00000132170_12 (sequence is synthesized)
cacagctgtttgccaagctgctccagaaaatgacagacctcagacagattgtcacggaacacgtgcagctactgcaggtgatcaagaagacggagacagacatgagtcttcacccgctcc

SEQ ID NO: 296128 - DNA, 120 bp, Artificial Sequence
  ENSG00000132170_13 (sequence is synthesized)
tgcaggagatctacaaggacttgtactagcagagagtcctgagccactgccaacatttcccttcttccagttgcactattctgagggaaaatctgacacctaagaaatttactgtgaaaa

SEQ ID NO: 296129 - DNA, 120 bp, Artificial Sequence
  ENSG00000132170_14 (sequence is synthesized)
aaatctgacacctaagaaatttactgtgaaaaagcattttaaaaagaaaaggttttagaatatgatctattttatgcatattgtttataaagacacatttacaatttacttttaatatta

SEQ ID NO: 296130 - DNA, 80 bp, Artificial Sequence
  ENSG00000132170_15 (sequence is synthesized)
gcaggcggggcccagcgcactcggagcccgagcccgagccgcagccgccgcctggggcgcttgggtcggcctcgaggaca

SEQ ID NO: 296131 - DNA, 120 bp, Artificial Sequence
  ENSG00000132170_16 (sequence is synthesized)
cgaggacaccggagaggggcgccacgccgccgtggccgcagatttgaaagaagccaacactaaaccacaaatatacaacaaggccattttctcaaacgagagtcagcctttaacgaaatg

SEQ ID NO: 296132 - DNA, 120 bp, Artificial Sequence
  ENSG00000132170_17 (sequence is synthesized)
aacttacaaacgcaaggaactctgaaagtgtgcagcaccaccgatcagaagagaaaaccaagggacccgaaatatgctttaattaaattttcttttaaaatgtcactggaaagaacatct

SEQ ID NO: 296133 - DNA, 120 bp, Artificial Sequence
  ENSG00000132170_18 (sequence is synthesized)
tgggaagacggcctggccgatcgccgtgtgaagggcaagccactctggccgagagggagccccacacctcggtctccccagaccggccctggccgggggcatccccctaaacttcggatc

SEQ ID NO: 296134 - DNA, 120 bp, Artificial Sequence
  ENSG00000132170_19 (sequence is synthesized)
ctttgtgggctcctgcaagtgccaggcgctgaccactcctcctgggagcctaactgaggggggtagaggcagcagaggttaacagaaatctcaggtcccttggtggaaggtgggtgtgta

SEQ ID NO: 296135 - DNA, 120 bp, Artificial Sequence
  ENSG00000132170_20 (sequence is synthesized)
gtcgtggtactttacgcctcggtgtttagggaggagcctaaggtaaggagtcagaaacggggagtaaccgagctgcggcttttatataaggtcagtggtaggtaaggaaggggccttaac

SEQ ID NO: 296136 - DNA, 120 bp, Artificial Sequence
  ENSG00000132170_21 (sequence is synthesized)
gagagtcagcctttaacgtgtttcaggatgattcttgtctctggatgtcgctgtcatgatgggagaggaattagtaaattcccaggtcagtttacactgcagagtgatcttgatctgcat

SEQ ID NO: 296137 - DNA, 120 bp, Artificial Sequence
  ENSG00000132170_22 (sequence is synthesized)
gaatcagtaaggatgggctggataaacaagttggaaccacagttatgagtaccatgacattaactgaaacaaatgagaagggattgaaaaatcggcggttaagtgtcttttaaggtcatt

SEQ ID NO: 296138 - DNA, 120 bp, Artificial Sequence
  ENSG00000132170_23 (sequence is synthesized)
ggacaccggagaggggcgccacgccgccgtggccgcagggtagatatgtgttaataagcaacttcaaaataccaaagaaactgctttacatatacaagcaaagcaaatagatggaccttg

SEQ ID NO: 296139 - DNA, 120 bp, Artificial Sequence
  ENSG00000132170_24 (sequence is synthesized)
tgacatctctggacaaccagtcttcttggtaggccttcatctgtgggtgtagaacgaaggtaggagtctgctcactaaagatcaatgcaaggaacttccatgctctccactgctgggcaa

SEQ ID NO: 296140 - DNA, 120 bp, Artificial Sequence
  ENSG00000132170_25 (sequence is synthesized)
cctgccattctcctcctgccaccacacctgttcagctactagggcaaagaagtgccctgctagacacaagcagatgcttctcttaccaagagaagataatataaggaaggataaagaact

SEQ ID NO: 296141 - DNA, 120 bp, Artificial Sequence
  ENSG00000132170_26 (sequence is synthesized)
accggagaggggcgccacgccgccgtggccgcagagttacccagttttcctgctgctgacagaatgttgcacttataaatagcagctgatgcagatgcacagaaagggtagatatgtgtt

SEQ ID NO: 296142 - DNA, 120 bp, Artificial Sequence
  ENSG00000132170_27 (sequence is synthesized)
agcaaacccctattccatgctgttatgggtgaaactctgggagattctcctattgacccagaaagcgattccttcactgatacactgtctgcaaacatatcacaagtgtttcaggatgat

SEQ ID NO: 296143 - DNA, 120 bp, Artificial Sequence
  ENSG00000132170_28 (sequence is synthesized)
ttagtatacaatgaatttataaatgtaaccatacaatttcatgcttagagaacgttttctctccattctctctacctttagaccattctgcagtttaaatcttgaaccaaaatgtcattt

SEQ ID NO: 296144 - DNA, 120 bp, Artificial Sequence
  ENSG00000132170_29 (sequence is synthesized)
tttgggtttttgtttctttgagtaaatggtttactgcgctacaaatgcacacacagaatattgttcaactgttggctgttaacatattgcaggctgagtctgaaacgcaggaagtgtttt

SEQ ID NO: 296145 - DNA, 120 bp, Artificial Sequence
  ENSG00000132170_30 (sequence is synthesized)
cagatagcacaagtcaacattattttgaaaagggagaaaagtccataaagtttttgagaatagtgtaacaatgtattggtcatcctaactttaatgaatgaacttaagccccctgagcct

SEQ ID NO: 296146 - DNA, 120 bp, Artificial Sequence
  ENSG00000132170_31 (sequence is synthesized)
atcaccctcttttaggatccatctcctttctcggcatcaaaataactggccacagcaatattcattcaagcagccttgctttcctctgggaagaacccgacctaggtttagaaaaggtat

SEQ ID NO: 296147 - DNA, 80 bp, Artificial Sequence
  ENSG00000132170_32 (sequence is synthesized)
ttcctctgggaagaacccgacctaggtttagaaaaggtattgaatcccactatttcacctttcaggagaactaccagacg

SEQ ID NO: 296148 - DNA, 120 bp, Artificial Sequence
  ENSG00000132170_33 (sequence is synthesized)
acggggtttcaccttgttgatcaggctggtctagagttacctcttaagaagttcaacatgaggcataaaaatagattctagatattatgttacctttctttccttgtagcattcttgatt

SEQ ID NO: 296149 - DNA, 120 bp, Artificial Sequence
  ENSG00000132170_34 (sequence is synthesized)
ggggccttaacctctgctggtgaccagaagcctgcatttctgcattctgcttaattccctttccttagagttacccagttttcctgctgctgacagaatgttgcacttataaatagcagc

SEQ ID NO: 296150 - DNA, 80 bp, Artificial Sequence
  ENSG00000132182_0 (sequence is synthesized)
cgggcgcagggtcgcgggaggtgacgcgcggcgaggatggcggcgcggggccgggggctgctgctgctgacgctgtcggt

SEQ ID NO: 296151 - DNA, 120 bp, Artificial Sequence
  ENSG00000132182_1 (sequence is synthesized)
ctgctgctgacgctgtcggtgctgttggcggcgggcccctccgccgctgcggccaagctcaacatccccaaagtgctgctgcccttcacgcgggccacgcgcgttaacttcacgctggag

SEQ ID NO: 296152 - DNA, 120 bp, Artificial Sequence
  ENSG00000132182_2 (sequence is synthesized)
gcctcggagggctgctaccgctggttgtccacccggccggaggtggccagcatcgagccgctgggcctggacgagcagcagtgctcccagaaggcagtggtgcaggcccgcctgacccag

SEQ ID NO: 296153 - DNA, 120 bp, Artificial Sequence
  ENSG00000132182_3 (sequence is synthesized)
cctgcccgcctcaccagcatcatcttcgcagaggacatcaccacaggccaggtcctgcgctgtgatgccattgtggacctcatccatgacatccagatcgtctccaccacccgcgagctc

SEQ ID NO: 296154 - DNA, 120 bp, Artificial Sequence
  ENSG00000132182_4 (sequence is synthesized)
tacctggaggactcccccctggagctgaagatccaggccctggactccgaagggaacaccttcagcactctggctggactggtcttcgagtggacgattgtgaaggactccgaggcggac

SEQ ID NO: 296155 - DNA, 120 bp, Artificial Sequence
  ENSG00000132182_5 (sequence is synthesized)
aggttctcagactcccacaatgcgctgcgaatcctcactttcttggagtctacgtacatccctccttcttacatctcagagatggagaaggctgccaagcaaggggacaccatcctggtg

SEQ ID NO: 296156 - DNA, 120 bp, Artificial Sequence
  ENSG00000132182_6 (sequence is synthesized)
tctgggatgaagaccgggagctccaagctcaaggctcgcatccaggaggctgtctacaagaatgtacgccctgcagaagtcaggctgctgattttggaaaacatccttctgaacccggcc

SEQ ID NO: 296157 - DNA, 120 bp, Artificial Sequence
  ENSG00000132182_7 (sequence is synthesized)
tatgacgtctacctgatggtgggaacctccattcactacaaggtgcagaagatcaggcaagggaaaattacagaactctccatgccttccgatcagtacgagttgcagcttcagaacagc

SEQ ID NO: 296158 - DNA, 120 bp, Artificial Sequence
  ENSG00000132182_8 (sequence is synthesized)
atcccgggccccgaaggagacccagcccggccggtggctgtcttggcccaggacacgtcgatggtcactgcactgcagctgggacagagcagcctcgtccttggccacaggagtattcgc

SEQ ID NO: 296159 - DNA, 120 bp, Artificial Sequence
  ENSG00000132182_9 (sequence is synthesized)
atgcaaggtgcttctaggttacccaacagcactatctacgtggtcgaacctggatacctagggttcactgttcaccctggtgacaggtgggtgctggagaccggccgcctgtatgaaatc

SEQ ID NO: 296160 - DNA, 120 bp, Artificial Sequence
  ENSG00000132182_10 (sequence is synthesized)
accatcgaagtttttgacaagttcagcaacaaggtctatgtatctgacaacatccgaattgaaactgtgcttcctgctgagttcttcgaggtgctctcgtcctcccagaatgggtcatac

SEQ ID NO: 296161 - DNA, 120 bp, Artificial Sequence
  ENSG00000132182_11 (sequence is synthesized)
catcgcatcagggcactaaagaggggacagacggccattgacgcggccctcacctctgtggtggaccaggatggaggggtccacatactacaggtgcctgtgtggaaccagcaggaggtg

SEQ ID NO: 296162 - DNA, 120 bp, Artificial Sequence
  ENSG00000132182_12 (sequence is synthesized)
gaaattcacatcccgatcaccctgtatcccagcatcttgacatttccgtggcaaccaaagacgggcgcctatcagtacacaataagggcccacggtggcagtgggaacttcagctggtct

SEQ ID NO: 296163 - DNA, 120 bp, Artificial Sequence
  ENSG00000132182_13 (sequence is synthesized)
tcgtcaagccacctggttgccacagttactgtcaagggcgtgatgaccacaggcagtgacatcgggttcagtgtgatccaggcacatgatgtgcagaacccactccatttcggtgagatg

SEQ ID NO: 296164 - DNA, 120 bp, Artificial Sequence
  ENSG00000132182_14 (sequence is synthesized)
aaggtgtatgtgatcgagccccacagcatggagtttgccccgtgccaggtggaggcacgtgtgggccaggccctggagctgcccctgaggatcagtggcctcatgcccggcggggccagt

SEQ ID NO: 296165 - DNA, 120 bp, Artificial Sequence
  ENSG00000132182_15 (sequence is synthesized)
gaggtggtcaccttgagcgactgctcccactttgacttggctgtcgaggtggagaaccagggtgtgttccagccactcccagggaggctgccgccaggctctgagcactgcagcggcatc

SEQ ID NO: 296166 - DNA, 120 bp, Artificial Sequence
  ENSG00000132182_16 (sequence is synthesized)
cgggtaaaggccgaggcccagggctctaccacgcttcttgtgagctacagacacggccacgtccacctgagtgccaagatcaccattgctgcctacctgcccctcaaggctgtggatccc

SEQ ID NO: 296167 - DNA, 120 bp, Artificial Sequence
  ENSG00000132182_17 (sequence is synthesized)
tcctctgttgccttggtaaccctgggctcctcaaaggagatgctgtttgaaggaggtcccagaccttggatcctcgagccgtccaaattcttccagaacgtcaccgctgaggacactgac

SEQ ID NO: 296168 - DNA, 120 bp, Artificial Sequence
  ENSG00000132182_18 (sequence is synthesized)
agcatcggcctggctctctttgccccccattcctcccggaattatcagcaacactggatccttgtgacctgtcaggccttgggtgagcaggtcatcgccctgtcggtggggaacaagccc

SEQ ID NO: 296169 - DNA, 120 bp, Artificial Sequence
  ENSG00000132182_19 (sequence is synthesized)
agcctcaccaacccctttcctgcggtggagcctgccgtggtgaagttcgtctgcgccccaccgtccaggctcaccctcgcgcctgtctacaccagcccccagctggacatgtcctgtccg

SEQ ID NO: 296170 - DNA, 120 bp, Artificial Sequence
  ENSG00000132182_20 (sequence is synthesized)
ctgctgcagcagaacaagcaggtggtcccagtgtccagccaccgcaacccccggctggacctggctgcttacgaccaggagggccgccggttcgacaacttcagctctctgagcatccag

SEQ ID NO: 296171 - DNA, 120 bp, Artificial Sequence
  ENSG00000132182_21 (sequence is synthesized)
tgggagtccaccaggccagtgttggccagcatcgagcctgagctgcccatgcagctggtgtcccaggacgatgagagtggccaaaagaagctgcacggtttgcaggccattttggttcac

SEQ ID NO: 296172 - DNA, 120 bp, Artificial Sequence
  ENSG00000132182_22 (sequence is synthesized)
gaggcatcaggaaccacagccatcactgccactgccactggctaccaggagtcccacctcagctctgccagaacaaagcagccgcatgaccctctggtgcctctgtcggcctccatagag

SEQ ID NO: 296173 - DNA, 120 bp, Artificial Sequence
  ENSG00000132182_23 (sequence is synthesized)
ctcatcctggtggaggacgtgagggtgagcccagaagaggtgaccatctacaaccaccctggcatccaggcagagctccgcatcagggaaggctcaggttacttcttcctcaacaccagc

SEQ ID NO: 296174 - DNA, 120 bp, Artificial Sequence
  ENSG00000132182_24 (sequence is synthesized)
accgcagatgttgtcaaggtggcctaccaggaggccaggggtgtcgccatggtgcaccctttgctcccgggctcatccaccatcatgatccatgacttgtgcctcgtcttcccggcccca

SEQ ID NO: 296175 - DNA, 120 bp, Artificial Sequence
  ENSG00000132182_25 (sequence is synthesized)
gccaaggctgtcgtttacgtgtcggacattcaggagctgtacatccgtgtggttgacaaggtggagattgggaagacagtgaaggcatacgtccgcgtgctggacttgcacaagaagccc

SEQ ID NO: 296176 - DNA, 120 bp, Artificial Sequence
  ENSG00000132182_26 (sequence is synthesized)
ttccttgccaaatacttcccctttatggacctgaagctccgagcagcctccccgatcattacattggtggcccttgatgaagcccttgacaactacaccatcacattcctcatccgcggt

SEQ ID NO: 296177 - DNA, 120 bp, Artificial Sequence
  ENSG00000132182_27 (sequence is synthesized)
gtggccatcggccagaccagtctaactgcaagtgtgaccaataaagctggacagagaatcaactcagccccacaacagattgaagtctttcccccgttcaggctgatgcccaggaaggtg

SEQ ID NO: 296178 - DNA, 120 bp, Artificial Sequence
  ENSG00000132182_28 (sequence is synthesized)
acactgcttatcggggccacgatgcaggtcacctccgagggcggcccccagcctcagtccaacatccttttctccatcagcaatgagagcgttgcgctggtgagcgctgctgggctggta

SEQ ID NO: 296179 - DNA, 120 bp, Artificial Sequence
  ENSG00000132182_29 (sequence is synthesized)
cagggcctcgccatcgggaacggcactgtgtctgggctcgtgcaggcagtggatgcagagaccggcaaggtggtcatcatctctcaggacctcgtgcaggtggaggtgctgctgctaagg

SEQ ID NO: 296180 - DNA, 120 bp, Artificial Sequence
  ENSG00000132182_30 (sequence is synthesized)
aggatccgcgcccccatcatgcggatgaggacgggcacccagatgcccatctatgtcaccggcatcaccaaccaccagaaccctttctcctttggcaatgccgtgccaggcctgaccttc

SEQ ID NO: 296181 - DNA, 120 bp, Artificial Sequence
  ENSG00000132182_31 (sequence is synthesized)
cactggtctgtcaccaagcgggacgtcctggacctccgagggcggcaccacgaggcgtcgatccgactcccgtcacagtacaactttgccatgaacgtgctcggccgggtaaaaggccgg

SEQ ID NO: 296182 - DNA, 120 bp, Artificial Sequence
  ENSG00000132182_32 (sequence is synthesized)
accgggctgagggtggtggtcaaggctgtggaccccacatcggggcagctgtatggcctggccagagaactctcggatgagatccaagtccaggtgtttgagaagctgcagctgctcaac

SEQ ID NO: 296183 - DNA, 120 bp, Artificial Sequence
  ENSG00000132182_33 (sequence is synthesized)
cctgaaatagaagcagaacaaatattaatgtcgcccaactcatatataaagctgcagacaaacagggatggtgcagcctctctgagctaccgcgtcctggatggacccgaaaaggttcca

SEQ ID NO: 296184 - DNA, 120 bp, Artificial Sequence
  ENSG00000132182_34 (sequence is synthesized)
gttgtgcatgttgatgagaaaggctttctagcatcagggtctatgatcgggacatccaccatcgaagtgattgcacaagagccctttggggccaaccaaaccatcattgttgctgtaaag

SEQ ID NO: 296185 - DNA, 120 bp, Artificial Sequence
  ENSG00000132182_35 (sequence is synthesized)
gtatcccctgtttcctacctgagggtttccatgagccctgtcctgcacacccagaacaaggaggccctggtggccgtgcctttgggaatgaccgtgaccttcactgtccacttccacgac

SEQ ID NO: 296186 - DNA, 120 bp, Artificial Sequence
  ENSG00000132182_36 (sequence is synthesized)
aactctggagatgtcttccatgctcacagttcggtcctcaactttgccactaacagagacgactttgtgcagatcgggaagggccccaccaacaacacctgcgttgtccgcacagtcagc

SEQ ID NO: 296187 - DNA, 120 bp, Artificial Sequence
  ENSG00000132182_37 (sequence is synthesized)
gtgggcctgacactgctccgtgtgtgggacgcagagcacccgggcctctcggacttcatgcccctgcctgtcctacaggccatctccccagagctgtctggggccatggtggtgggggac

SEQ ID NO: 296188 - DNA, 120 bp, Artificial Sequence
  ENSG00000132182_38 (sequence is synthesized)
gtgctctgtctggccactgttctgaccagcctggaaggcctctcaggaacctggagctcctcggccaacagcatcctccacatcgaccccaagacgggtgtggctgtggcccgggccgtg

SEQ ID NO: 296189 - DNA, 120 bp, Artificial Sequence
  ENSG00000132182_39 (sequence is synthesized)
ggatccgtgacggtttactatgaggtcgctgggcacctgaggacctacaaggaggtggtggtcagcgtccctcagaggatcatggcccgtcacctccaccccatccagaccagcttccag

SEQ ID NO: 296190 - DNA, 120 bp, Artificial Sequence
  ENSG00000132182_40 (sequence is synthesized)
gaggctacagcctccaaagtgattgttgccgtgggagacagaagctctaacctgagaggcgagtgcacccccacccagagggaagtcatccaggccttgcacccagagaccctcatcagc

SEQ ID NO: 296191 - DNA, 120 bp, Artificial Sequence
  ENSG00000132182_41 (sequence is synthesized)
tgccagtcccagttcaagccggccgtctttgatttcccatctcaagatgtgttcaccgtggagccacagtttgacactgctctcggccagtacttctgctcaatcacaatgcacaggctg

SEQ ID NO: 296192 - DNA, 120 bp, Artificial Sequence
  ENSG00000132182_42 (sequence is synthesized)
acggacaagcagcggaagcacctgagcatgaagaagacagctctggtggtcagtgcctccctctccagcagccacttctccacagagcaggtgggggccgaggtgcccttcagcccaggt

SEQ ID NO: 296193 - DNA, 120 bp, Artificial Sequence
  ENSG00000132182_43 (sequence is synthesized)
ctcttcgccgaccaggctgaaatccttttgagcaaccactacaccagttccgagatcagggtctttggtgccccggaggttctggagaacttggaggtgaaatccgggtccccggccgtg

SEQ ID NO: 296194 - DNA, 120 bp, Artificial Sequence
  ENSG00000132182_44 (sequence is synthesized)
ctggcattcgcaaaggagaagtcttttgggtggcccagcttcatcacatacacggtcggcgtcttggaccccgcggctggcagccaagggcctctgtccactaccctgaccttctccagc

SEQ ID NO: 296195 - DNA, 120 bp, Artificial Sequence
  ENSG00000132182_45 (sequence is synthesized)
cccgtgaccaaccaagccattgccatcccagtgacagtggcttttgtggtggatcgccgtgggcccggtccttatggagccagcctcttccagcacttcctggattcctaccaggtcatg

SEQ ID NO: 296196 - DNA, 120 bp, Artificial Sequence
  ENSG00000132182_46 (sequence is synthesized)
ttcttcacgctcttcgccctgttggctgggacagcggtcatgatcatagcctaccacactgtctgcacgccccgggatcttgctgtgcctgcagccctcacgcctcgagccagccctgga

SEQ ID NO: 296197 - DNA, 120 bp, Artificial Sequence
  ENSG00000132182_47 (sequence is synthesized)
cacagcccccactatttcgctgcctcatcacccacatctcccaatgcattgcctcctgctcgcaaagccagccctccctcagggctgtggagcccagcctatgcctcccactaggccgcg

SEQ ID NO: 296198 - DNA, 120 bp, Artificial Sequence
  ENSG00000132182_48 (sequence is synthesized)
tgaaggttcccggaggatgggtctcagccgagcctcgtgcacccccaagatggaacatccctgctgcattcacactggaacaagcccctccagatgagtgccccggccccaggccagctt

SEQ ID NO: 296199 - DNA, 120 bp, Artificial Sequence
  ENSG00000132182_49 (sequence is synthesized)
cactgccgtctcttcacacagagctgtagtttcggctctgcccattagctcattttatgtaggagttttaaatgtgtgtttttttcctttcaagtcttacaaagctaagactttttggct

SEQ ID NO: 296200 - DNA, 120 bp, Artificial Sequence
  ENSG00000132182_50 (sequence is synthesized)
cattcctttttgcatggttgtctagggtttctggacaatgtgctgttgcatttttattttcctagccttgctaaaatctttcccttctcaagactttgagcagttagaagtgctctttag

SEQ ID NO: 296201 - DNA, 120 bp, Artificial Sequence
  ENSG00000132182_51 (sequence is synthesized)
aagttgtctgtgggtgatgttactgtagtggtctcagggaaaggattgtccagttactttagggggtttttggtggggtttttccccctgtgaaaacttactttgcccctagtctggctg

SEQ ID NO: 296202 - DNA, 120 bp, Artificial Sequence
  ENSG00000132182_52 (sequence is synthesized)
ctgctaggacttctgaggagcaatgggacatgagtgtccctgtatctgcgccactgccgcaagggaagcctcaggaaccagcacctggaggccaggatagccaagccctgggtgagcgag

SEQ ID NO: 296203 - DNA, 120 bp, Artificial Sequence
  ENSG00000132182_53 (sequence is synthesized)
aggctggagaacacaggagctcacccagggctgctgcccaaccatgggccactgtgaacagacttcagtcctctgtttttgtttcataagccgttgagacatctgatggacttggcttag

SEQ ID NO: 296204 - DNA, 120 bp, Artificial Sequence
  ENSG00000132182_54 (sequence is synthesized)
gccctgctgggacatcccacgtgtgatccctttcactccatcaggacaccaggactgtccttaggaaaatgtccttgagatggcagcaggagtcatattttctgtgtgtgtgtttcggaa

SEQ ID NO: 296205 - DNA, 120 bp, Artificial Sequence
  ENSG00000132182_55 (sequence is synthesized)
agccgctgtgtcctgcctcagcacaaagacccagtgtcatttgctcctcctgttcctgtgccactccagaacctcagcagatctgagccaccgcctgccagtgtgagaggcggccacttt

SEQ ID NO: 296206 - DNA, 120 bp, Artificial Sequence
  ENSG00000132182_56 (sequence is synthesized)
catggcagctcatcaggcgcagggccccagacagcttcccagcaggccctagagcccggcctgggccaatgatggagggcggccgccagcccagggcctgcccatccagaagggactccc

SEQ ID NO: 296207 - DNA, 120 bp, Artificial Sequence
  ENSG00000132182_57 (sequence is synthesized)
cagggcctgggggaggagacccttggaaaagtcctctcttcccagctcctgattctggatctgagattctcagatcacaggcccctgtgctccaggccgaggctgggctaccctcaggga

SEQ ID NO: 296208 - DNA, 120 bp, Artificial Sequence
  ENSG00000132182_58 (sequence is synthesized)
gatccagagactcatgcccatggccatccatgcgtggacgctgtgtggagagtccaggatgacgggatcccgcacaagctcccttcagtccttcagggctgggccatgtggttgattttt

SEQ ID NO: 296209 - DNA, 120 bp, Artificial Sequence
  ENSG00000132182_59 (sequence is synthesized)
ctaaagctggagaaaggaagaattgtgccttgcatattacttgagcttaaactgacaacctggatgtaaataggagcctttctactggtttatttaataaagttctatgtgattttttaa

SEQ ID NO: 296210 - DNA, 120 bp, Artificial Sequence
  ENSG00000132182_60 (sequence is synthesized)
aaacccagtagctctgggacatcttaggcgttgaaatctgcattcctgtgaaaccactagtggggccatcctagaggcaccgacatgtgcctgggtgggggatggcaatcatttgggaag

SEQ ID NO: 296211 - DNA, 120 bp, Artificial Sequence
  ENSG00000132182_61 (sequence is synthesized)
gtgagggcagaggggaaggagagcagcctgcccacagtagtaggtcaggatggtggttcccagcttcagcactgttgacgtttgggaccagatagttcctgtggggggctgtcctgtgta

SEQ ID NO: 296212 - DNA, 120 bp, Artificial Sequence
  ENSG00000132182_62 (sequence is synthesized)
tcgtagggtgtttagcagcatcatggacctctcccgagtagatgccagtggcaaccccctgactcatgcgtagggacagccagaaatgcctccagtgttgctgaaggccccctagtggtt

SEQ ID NO: 296213 - DNA, 120 bp, Artificial Sequence
  ENSG00000132182_63 (sequence is synthesized)
ctcattccactgagagctgtggtctggagccagaggccagcttggacagggccatggggggacctggtgggtggcaatagtgaggattgctttctggcatatcccattccctcaccagca

SEQ ID NO: 296214 - DNA, 120 bp, Artificial Sequence
  ENSG00000132182_64 (sequence is synthesized)
cccccaagagcccacagggcagctgctggcctcagagtgcactgcgtggtcagtgtccaggtccagtcctgggggtgaccacaacatctgacctgtgttccctgcaggtcccagtgtcca

SEQ ID NO: 296215 - DNA, 120 bp, Artificial Sequence
  ENSG00000132182_65 (sequence is synthesized)
ggaggccaggggtgtcgccatggtaagcttgggccatcggtccccactgttggttttcattccttatctgggctgttgtgtggttaattgattgatcattttgaaagctagcacttgact

SEQ ID NO: 296216 - DNA, 69 bp, Artificial Sequence
  ENSG00000132182_66 (sequence is synthesized)
tggttaattgattgatcattttgaaagctagcacttgactcacactcggaatcccagaactttgggagg

SEQ ID NO: 296217 - DNA, 120 bp, Artificial Sequence
  ENSG00000132182_67 (sequence is synthesized)
ggtggtcatcatctctcagttggggaggaattgggttcatctcccactgcttgaaggaggcagcaaagcttctgggggcattcccagtgctgggagctactgctcactgggcctgacttc

SEQ ID NO: 296218 - DNA, 120 bp, Artificial Sequence
  ENSG00000132182_68 (sequence is synthesized)
tcccctgcagatgcccatctatgtcaccggcatcaccaaccaccagaaccctttctcctttggcaatgccgtgccaggcctgaccttccactggtctgtcaccaagcgggacgtcctgga

SEQ ID NO: 296219 - DNA, 120 bp, Artificial Sequence
  ENSG00000132185_0 (sequence is synthesized)
ggccagctggctatcagacaatgacatgctttgacaggcccctgagctctgtgagtaaattcttgaacagctgagagtgctaccattttgtcatagccctaagggtgcagatgatgctga

SEQ ID NO: 296220 - DNA, 120 bp, Artificial Sequence
  ENSG00000132185_1 (sequence is synthesized)
aagcgtgttggccaaatctgaatgatgaaagccaattacaaactagaaaatgaaaacagaccccagatgcaaggagatgagacagttaaatttacttcctcttttctaatctgagaggtt

SEQ ID NO: 296221 - DNA, 120 bp, Artificial Sequence
  ENSG00000132185_2 (sequence is synthesized)
tcatgttgaagaaaatcagtgttggggttgcaggagacctaaacacagtcaccatgaagctgggctgtgtcctcatggcctgggccctctacctttcccttggtgtgctctgggtggccc

SEQ ID NO: 296222 - DNA, 120 bp, Artificial Sequence
  ENSG00000132185_3 (sequence is synthesized)
agatgctactggctgccagttttgagacgctgcagtgtgagggacctgtctgcactgaggagagcagctgccacacggaggatgacttgactgatgcaagggaagctggcttccaggtca

SEQ ID NO: 296223 - DNA, 120 bp, Artificial Sequence
  ENSG00000132185_4 (sequence is synthesized)
aggcctacactttcagtgaacccttccacctgattgtgtcctatgactggctgatcctccaaggtccagccaagccagtttttgaaggggacctgctggttctgcgctgccaggcctggc

SEQ ID NO: 296224 - DNA, 120 bp, Artificial Sequence
  ENSG00000132185_5 (sequence is synthesized)
aagactggccactgactcaggtgaccttctaccgagatggctcagctctgggtccccccgggcctaacagggaattctccatcaccgtggtacaaaaggcagacagcgggcactaccact

SEQ ID NO: 296225 - DNA, 120 bp, Artificial Sequence
  ENSG00000132185_6 (sequence is synthesized)
gcagtggcatcttccagagccctggtcctgggatcccagaaacagcatctgttgtggctatcacagtccaagaactgtttccagcgccaattctcagagctgtaccctcagctgaacccc

SEQ ID NO: 296226 - DNA, 120 bp, Artificial Sequence
  ENSG00000132185_7 (sequence is synthesized)
aagcaggaagccccatgaccctgagttgtcagacaaagttgcccctgcagaggtcagctgcccgcctcctcttctccttctacaaggatggaaggatagtgcaaagcagggggctctcct

SEQ ID NO: 296227 - DNA, 120 bp, Artificial Sequence
  ENSG00000132185_8 (sequence is synthesized)
cagaattccagatccccacagcttcagaagatcactccgggtcatactggtgtgaggcagccactgaggacaaccaagtttggaaacagagcccccagctagagatcagagtgcagggtg

SEQ ID NO: 296228 - DNA, 120 bp, Artificial Sequence
  ENSG00000132185_9 (sequence is synthesized)
aactgctcctgaggaggcccctgggcctctgcctccgccgccaaccccatcttctgaggatccaggcttttcttctcctctggggatgccagatcctcatctgtatcaccagatgggcct

SEQ ID NO: 296229 - DNA, 120 bp, Artificial Sequence
  ENSG00000132185_10 (sequence is synthesized)
tcttctcaaacacatgcaggatgtgagagtcctcctcggtcacctgctcatggagttgagggaattatctggccaccggaagcctgggaccacaaaggctactgctgaatagaagtaaac

SEQ ID NO: 296230 - DNA, 120 bp, Artificial Sequence
  ENSG00000132185_11 (sequence is synthesized)
agttcatccatgatctcacttaaccaccccaataaatctgattctttattttctcttcctgtcctgcacatatgcataagtacttttacaagttgtcccagtgttttgttagaataatgt

SEQ ID NO: 296231 - DNA, 120 bp, Artificial Sequence
  ENSG00000132185_12 (sequence is synthesized)
agttaggtgagtgtaaataaatttatataaagtgagaattagagtttagctataattgtgtattctctcttaacacaacagaattctgctgtctagatcaggaatttctatctgttatat

SEQ ID NO: 296232 - DNA, 120 bp, Artificial Sequence
  ENSG00000132185_13 (sequence is synthesized)
cgaccagaatgttgtgatttaaagagaactaatggaagtggattgaatacagcagtctcaactgggggcaattttgccccccagaggacattgggcaatgtttggagacattttggtcat

SEQ ID NO: 296233 - DNA, 120 bp, Artificial Sequence
  ENSG00000132185_14 (sequence is synthesized)
tatacttggggggttgggggatggtgggatgtgtgtgctactggcatccagtaaatagaagccaggggtgccgctaaacatcctataatgcacagggcagtaccccacaacgaaaaataa

SEQ ID NO: 296234 - DNA, 120 bp, Artificial Sequence
  ENSG00000132185_15 (sequence is synthesized)
tctggcccaaaatgtcagttgtactgagtttgagaaaccccagcctaatgaaaccctaggtgttgggctctggaatgggactttgtcccttctaattattatctctttccagcctcattc

SEQ ID NO: 296235 - DNA, 120 bp, Artificial Sequence
  ENSG00000132185_16 (sequence is synthesized)
agctattcttactgacataccagtctttagctggtgctatggtctgttctttagttctagtttgtatcccctcaaaagccattatgttgaaatcctaatccccaaggtgatggcattaag

SEQ ID NO: 296236 - DNA, 120 bp, Artificial Sequence
  ENSG00000132185_17 (sequence is synthesized)
aagtgggcctttgggaagtgattagatcaggagtgcagagccctcatgattaggattagtgcccttatttaaaaaggccccagagagctaactcacccttccaccatatgaggacgtggc

SEQ ID NO: 296237 - DNA, 120 bp, Artificial Sequence
  ENSG00000132185_18 (sequence is synthesized)
aagaagatgacatgtatgagaaccaaaaaacagctgtcgccaaacaccgactctgtcgttgccttgatcttgaacttccagcctccagaactatgagaaataaaattctgttgtttgtaa

SEQ ID NO: 296238 - DNA, 120 bp, Artificial Sequence
  ENSG00000132185_19 (sequence is synthesized)
ttgcaggagacctaaacacagtcaccatgaagctgggctgtgtcctcatggcctgggccctctacctttcccttggtgtgctctgggtggcccagatgctactggttaccattgtctttg

SEQ ID NO: 296239 - DNA, 120 bp, Artificial Sequence
  ENSG00000132185_20 (sequence is synthesized)
gattataaaatgaggataaagtcacctacctggaaagtttgtgaggatgaagttagatactgcacacaagtgctagcagggtctggcacccagtgaacattagaatctgatgtctccctt

SEQ ID NO: 296240 - DNA, 120 bp, Artificial Sequence
  ENSG00000132185_21 (sequence is synthesized)
tcattcctgtcctatgcctccctgcttcgagttaccattgtctttgctcctggtttcccgtaccagcagctggatgtcatgccggtgagtttcaccattctttcattctctcccctccct

SEQ ID NO: 296241 - DNA, 120 bp, Artificial Sequence
  ENSG00000132185_22 (sequence is synthesized)
cttctccaaaccacagtgcatttgctgagagcacctggacgccagtgaatcaaggtcaaaactatccccctgagacactctcaggggtctttccgaaaaaaaaaaaggttttgatgtctt

SEQ ID NO: 296242 - DNA, 120 bp, Artificial Sequence
  ENSG00000132185_23 (sequence is synthesized)
actagtctcattctaaaaaggatgattatcctgggagatggaggaaccctgtcctctttctccaagttgcatcatcattttctggttctccctgggccatgccctcttcagctgccagtt

SEQ ID NO: 296243 - DNA, 120 bp, Artificial Sequence
  ENSG00000132185_24 (sequence is synthesized)
ctttagcctggaggtagcaagatcatcaacagactatggagcaggttgctggcaaatgcccaagttgggcttcgaaagggacgagacctcagccttttgaagtcatccagccccactcag

SEQ ID NO: 296244 - DNA, 120 bp, Artificial Sequence
  ENSG00000132185_25 (sequence is synthesized)
agtccagcatagttcctaccacccagatctatgcttcctagtgctcactgattgggtgtctggacaactatcagatttgcccatctgtggatctttcctagtcctgtctacttacagaaa

SEQ ID NO: 296245 - DNA, 120 bp, Artificial Sequence
  ENSG00000132185_26 (sequence is synthesized)
gaacttgacagattcaaatggaatctaagagagcccattcctgctggaaacaggggaaaggaagtatgactccccaagtctcttcacctgcatgtgtctacctgtatataagatggctga

SEQ ID NO: 296246 - DNA, 120 bp, Artificial Sequence
  ENSG00000132196_0 (sequence is synthesized)
ttccgaaagcagcggcggtgtttgcttcactgcttggaagtgtgagtgcgcgaagatgcgaaaggtggttttgatcaccggggctagcagtggcattggcctggccctctgcaagcggct

SEQ ID NO: 296247 - DNA, 120 bp, Artificial Sequence
  ENSG00000132196_1 (sequence is synthesized)
gctggcggaagatgatgagcttcatctgtgtttggcgtgcaggaacatgagcaaggcagaagctgtctgtgctgctctgctggcctctcaccccactgctgaggtcaccattgtccaggt

SEQ ID NO: 296248 - DNA, 120 bp, Artificial Sequence
  ENSG00000132196_2 (sequence is synthesized)
ggatgtcagcaacctgcagtcggtcttccgggcctccaaggaacttaagcaaaggtttcagagattagactgtatatatctaaatgctgggatcatgcctaatccacaactaaatatcaa

SEQ ID NO: 296249 - DNA, 120 bp, Artificial Sequence
  ENSG00000132196_3 (sequence is synthesized)
agcacttttctttggcctcttttcaagaaaagtgattcatatgttctccacagctgaaggcctgctgacccagggtgataagatcactgctgatggacttcaggaggtgtttgagaccaa

SEQ ID NO: 296250 - DNA, 120 bp, Artificial Sequence
  ENSG00000132196_4 (sequence is synthesized)
tcagcctcgaggacttccagcacagcaaaggcaaggaaccctacagctcttccaaatatgccactgaccttttgagtgtggctttgaacaggaacttcaaccagcagggtctctattcca

SEQ ID NO: 296251 - DNA, 120 bp, Artificial Sequence
  ENSG00000132196_5 (sequence is synthesized)
atgtggcctgtccaggtacagcattgaccaatttgacatatggaattctgcctccgtttatatggacgctgttgatgccggcaatattgctacttcgcttttttgcaaatgcattcactt

SEQ ID NO: 296252 - DNA, 120 bp, Artificial Sequence
  ENSG00000132196_6 (sequence is synthesized)
tgacaccatataatggaacagaagctctggtatggcttttccaccaaaagcctgaatctctcaatcctctgatcaaatatctgagtgccaccactggctttggaagaaattacattatga

SEQ ID NO: 296253 - DNA, 120 bp, Artificial Sequence
  ENSG00000132196_7 (sequence is synthesized)
cccagaagatggacctagatgaagacactgctgaaaaattttatcaaaagttactggaactggaaaagcacattagggtcactattcaaaaaacagataatcaggccaggctcagtggct

SEQ ID NO: 296254 - DNA, 120 bp, Artificial Sequence
  ENSG00000132196_8 (sequence is synthesized)
cagcctcgaggacttccagcacagcaaaggcaaggaaccctacagctcttccaaatatgccactgaccttttgagtgtggctttgaacaggaacttcaaccagcaggtgctgtattcgtc

SEQ ID NO: 296255 - DNA, 120 bp, Artificial Sequence
  ENSG00000132196_9 (sequence is synthesized)
aatacacttattcataaataggcattcttactatgtgctgcttactataccaatgcttttgctttacttcttttccattaaaagacagacacacacacacactctcacactctctctgtc

SEQ ID NO: 296256 - DNA, 120 bp, Artificial Sequence
  ENSG00000132196_10 (sequence is synthesized)
tctctctccccgcattgattttgacctactaaattgacctcccagcagaacactatattaatacgtttgaagtattcccagttaaaaaaacaatctgtttaactcttttttttgacagtt

SEQ ID NO: 296257 - DNA, 120 bp, Artificial Sequence
  ENSG00000132196_11 (sequence is synthesized)
ctaatgccgggagcacccccctcaagctagaggtatgggtcttatgtacttgcagggaaacagacacatactttaggtttagctgtctatttattaggccagaaacttcttgaaggcaag

SEQ ID NO: 296258 - DNA, 120 bp, Artificial Sequence
  ENSG00000132196_12 (sequence is synthesized)
gactgtactccatacatcttttaatcttaaatgctcattatgattaaaaagctgatcttcagttaagccaataataggaaaaactcagataaccaggccctgcttttctcccccagcgtt

SEQ ID NO: 296259 - DNA, 120 bp, Artificial Sequence
  ENSG00000132196_13 (sequence is synthesized)
ggtgcctctcacagtgggttctcttaatacatgattcttcaacataaacgttctacccaacttcagagacaactcagaacataaattctttattacctgacttctggctcatgtacatac

SEQ ID NO: 296260 - DNA, 120 bp, Artificial Sequence
  ENSG00000132196_14 (sequence is synthesized)
gctctgggcacagggcattattatagttgagcagccagttaactgatttaatctcatgtttgagttttcttgattgcatttgccttgtttattgtgagcatggaatacttctggaagctt

SEQ ID NO: 296261 - DNA, 120 bp, Artificial Sequence
  ENSG00000132196_15 (sequence is synthesized)
tcctagtagatttttctttaataaatgtactaatagtttttgatttacagaattactgcaaagatagtacagagactttctgtatgccctacacccagtttccccattattaacatttcg

SEQ ID NO: 296262 - DNA, 120 bp, Artificial Sequence
  ENSG00000132196_16 (sequence is synthesized)
cattggtatgatgcatttgtcaaaatagatgaatcaattctgctacattattattaactaaagtacacactttattcaggttctgtttttgcctaatgtcttttttcagttctaggatcc

SEQ ID NO: 296263 - DNA, 120 bp, Artificial Sequence
  ENSG00000132196_17 (sequence is synthesized)
cattcaagatactacattacatttagcagtcatgtctccttaggctcttcttggttgtgacagcttctcagactttccttgtttttgatgaccttgacagttttgaggagtactgcttag

SEQ ID NO: 296264 - DNA, 120 bp, Artificial Sequence
  ENSG00000132196_18 (sequence is synthesized)
gtgttttgtagactctctcaatcgggatttgtctgatgtttttctcatggtgagactgaagaatgtggtttttgggaggaaggccacagaggtaaagtgacattctcatgacatcatatc

SEQ ID NO: 296265 - DNA, 120 bp, Artificial Sequence
  ENSG00000132196_19 (sequence is synthesized)
gacttctcagtgttgatattaaccttgatcacctggcttgaggtcatgtttgtcaggtttttccattgttaagttactttttctttctcccttttcatactctactttttgaaagaaagt

SEQ ID NO: 296266 - DNA, 67 bp, Artificial Sequence
  ENSG00000132196_20 (sequence is synthesized)
ttctttctcccttttcatactctactttttgaaagaaagttgggccgggcacggtggctccgggagt

SEQ ID NO: 296267 - DNA, 63 bp, Artificial Sequence
  ENSG00000132196_21 (sequence is synthesized)
agttgtgattcgggaactggagcctctcctctgtcacagtgacaatccatctcagctcatctg

SEQ ID NO: 296268 - DNA, 120 bp, Artificial Sequence
  ENSG00000132196_22 (sequence is synthesized)
ggagttcaagaccagcctgagaaacatagtgagcccttgtctctacaaaaagaaataaaaataatagctgggtgtggtggcatgcgcatgtagtcccagctactcagaaggatgaggtgg

SEQ ID NO: 296269 - DNA, 62 bp, Artificial Sequence
  ENSG00000132196_23 (sequence is synthesized)
tgtggtggcatgcgcatgtagtcccagctactcagaaggatgaggtgggaggatctcttgag

SEQ ID NO: 296270 - DNA, 120 bp, Artificial Sequence
  ENSG00000132196_24 (sequence is synthesized)
atatataaaaccagagctgacaatgacactctggaacattgcataccttctgtacattctggggtacatggatttctactgagttggataatatgcatttgtaataaactatgaactatg

SEQ ID NO: 296271 - DNA, 120 bp, Artificial Sequence
  ENSG00000132196_25 (sequence is synthesized)
gtcagcaacctgcagtcggtcttccgggcctccaaggaacttaagcaaaggtatatctcttgctgatggattttttttctcatgtgattgtgcagcataacacttaataaaataagagag

SEQ ID NO: 296272 - DNA, 120 bp, Artificial Sequence
  ENSG00000132196_26 (sequence is synthesized)
gaaagaaaaacctgaaaagaaacaggtgcggtgtaagcagttatgttgaggaagtctgtatagggtgacccattgtgtctcagtaccacgttttctttctttttttttttttttttaaag

SEQ ID NO: 296273 - DNA, 120 bp, Artificial Sequence
  ENSG00000132196_27 (sequence is synthesized)
tcagtgtcttctaaaccctctctgctgatagactaagagatatatatgtacatactaactcatgtatgtatacatatctataaatatttttctgtgtaactaattcatgtctcttttaga

SEQ ID NO: 296274 - DNA, 120 bp, Artificial Sequence
  ENSG00000132196_28 (sequence is synthesized)
taactagttaatactgatgtctctgaccctaatctcttaccatacagtacagtggtttcaaaatttttatctgtattctgtcagtatattttaatactttttttttttctttcacccaga

SEQ ID NO: 296275 - DNA, 120 bp, Artificial Sequence
  ENSG00000132196_29 (sequence is synthesized)
gtgaggcggcccgaaatcgtaggacttccgaaagcagcggcggtgtttgcttcactgcttggaagtgtgagtgcgcgaagatgcgaaaggtggttttgatcaccggggctagcaggtcaa

SEQ ID NO: 296276 - DNA, 120 bp, Artificial Sequence
  ENSG00000132196_30 (sequence is synthesized)
cggtcttccgggcctccaaggaacttaagcaaaggatgatcaagaaatggttgtatgtgatctgtgttgaagaccatgtttcagagattagactgtatatatctaaatgctgggatcatg

SEQ ID NO: 296277 - DNA, 120 bp, Artificial Sequence
  ENSG00000132196_31 (sequence is synthesized)
gagaaaaagaaagaaagttactatgtgcagccaatgcatactggctagtgctctacctccttaagagtgggttatctacagaaattatttggattttttccacaagggagattgtcagtt

SEQ ID NO: 296278 - DNA, 120 bp, Artificial Sequence
  ENSG00000132196_32 (sequence is synthesized)
ctcctttatttatgtctttaattcagtcgtttattatatccatatggactcatgtttatgtattttctgctttgaaattataaatactattttattttcctgctcaaattttttcagttt

SEQ ID NO: 296279 - DNA, 120 bp, Artificial Sequence
  ENSG00000132196_33 (sequence is synthesized)
tggccactgggaacgctttcagttggctcctgtatctctttggcacacccccattgttatggttttctctttttgttttagctttcgttttgagcagtttcttactatctggcactacaa

SEQ ID NO: 296280 - DNA, 120 bp, Artificial Sequence
  ENSG00000132196_34 (sequence is synthesized)
gatccttcagactcatcttgtgtatttccttgttcagtcctagaatcagctacttttctaaagccatatgttttcttttatcagagaatggttattagaaaccaagatctgggtgcttat

SEQ ID NO: 296281 - DNA, 120 bp, Artificial Sequence
  ENSG00000132199_0 (sequence is synthesized)
gggccgcggccacggggcgcaggggccatggtgcgcggcaggatctcccggctctcggtccgggacgtgcgcttccccacgtcgcttgggggccacggcgcggacgccatgcacacggac

SEQ ID NO: 296282 - DNA, 120 bp, Artificial Sequence
  ENSG00000132199_1 (sequence is synthesized)
cgccatgcacacggaccctgactactcggctgcctatgtcgtcatagaaactgatgcagaagatggaatcaaggggtgtggaattaccttcactctgggaaaaggcactgaagttgttgt

SEQ ID NO: 296283 - DNA, 120 bp, Artificial Sequence
  ENSG00000132199_2 (sequence is synthesized)
ctgtgctgtgaatgccctcgcccaccatgtgctcaacaaggacctcaaggacattgttggtgacttcagaggcttctataggcagctcacaagtgatgggcagctcagatggattggtcc

SEQ ID NO: 296284 - DNA, 120 bp, Artificial Sequence
  ENSG00000132199_3 (sequence is synthesized)
agaaaagggcgtggtgcacctggcgacagcggccgtcctaaacgcggtgtgggacttgtgggccaagcaggagggaaagcctgtctggaagttacttgtggacatggatcccaggatgct

SEQ ID NO: 296285 - DNA, 120 bp, Artificial Sequence
  ENSG00000132199_4 (sequence is synthesized)
ggtatcctgcatagatttcaggtacatcactgatgtcctgactgaggaggatgccctagaaatactgcagaaaggtcaaattggtaaaaaagaaagagagaagcaaatgctggcacaagg

SEQ ID NO: 296286 - DNA, 120 bp, Artificial Sequence
  ENSG00000132199_5 (sequence is synthesized)
ataccctgcttacacgacatcgtgcgcctggctggggtactcagatgacacgttgaagcagctctgtgcccaggcgctgaaggatggctggaccaggtttaaagtaaaggtgggtgctga

SEQ ID NO: 296287 - DNA, 120 bp, Artificial Sequence
  ENSG00000132199_6 (sequence is synthesized)
tctccaggatgacatgcgaagatgccaaatcatccgagacatgattggaccggaaaagactttgatgatggatgccaaccagcgctgggatgtgcctgaggcggtggagtggatgtccaa

SEQ ID NO: 296288 - DNA, 120 bp, Artificial Sequence
  ENSG00000132199_7 (sequence is synthesized)
gctggccaagttcaagccattgtggattgaggagccaacctcccctgatgacattctggggcacgccaccatttccaaggcactggtcccattaggaattggcattgccacaggagaaca

SEQ ID NO: 296289 - DNA, 120 bp, Artificial Sequence
  ENSG00000132199_8 (sequence is synthesized)
gtgccacaatagagtgatatttaagcaactcctacaggcgaaggccctgcagttcctccagattgacagttgcagactgggcagtgtcaatgagaacctctcagtattgctgatggccaa

SEQ ID NO: 296290 - DNA, 120 bp, Artificial Sequence
  ENSG00000132199_9 (sequence is synthesized)
aaagtttgaaattcctgtttgcccccatgctggtggagttggcctctgtgaactggtgcagcacctgattatatttgactacatatcagtttctgcaagccttgaaaatagggtgtgtga

SEQ ID NO: 296291 - DNA, 120 bp, Artificial Sequence
  ENSG00000132199_10 (sequence is synthesized)
gtatgttgaccacctgcatgagcatttcaagtatcccgtgatgatccagcgggcttcctacatgcctcccaaggatcccggctactcaacagaaatgaaggaggaatctgtaaagaaaca

SEQ ID NO: 296292 - DNA, 120 bp, Artificial Sequence
  ENSG00000132199_11 (sequence is synthesized)
ccagtatccagatggtgaagtttggaagaaactccttcctgctcaagaaaattaagtgctcagccccaacaacttttttctttctgaagtgaaagggcttaaaatttcttggaaatagtt

SEQ ID NO: 296293 - DNA, 120 bp, Artificial Sequence
  ENSG00000132199_12 (sequence is synthesized)
ttacaaaaatggatttaaaaaatcctaccgatcaagatgagttcagctagaagtcataccaccctcaggaatcagctaagtaattattacttgattcttttagcaaatcaatgcacgtta

SEQ ID NO: 296294 - DNA, 120 bp, Artificial Sequence
  ENSG00000132199_13 (sequence is synthesized)
tcctacttaatccttaaataagtttagatttaactaacccaaagtccaggaggatgttcttacaaaaatagctatatcaagggctggcacctagacattaaactgtaatttgaaaataag

SEQ ID NO: 296295 - DNA, 120 bp, Artificial Sequence
  ENSG00000132199_14 (sequence is synthesized)
caacatgttgcataacttgttggaataattccttgttctgtttaacacttgtcataaattagcagaataaaaatagtcgtgcaacaccgggggtatctggtatgcaacgaagggaaaaat

SEQ ID NO: 296296 - DNA, 120 bp, Artificial Sequence
  ENSG00000132199_15 (sequence is synthesized)
atttcactgattaaccccgaagtggttttgcatcttttccttgcttaatctaagcatattattagagaagtcacaccatgctgaagctaatgagggcaaaatggtagtccatagattatt

SEQ ID NO: 296297 - DNA, 120 bp, Artificial Sequence
  ENSG00000132199_16 (sequence is synthesized)
ttaaaataaccctttaaggttataaaagtttaaaaaaaaaaaaaaaaaactctatcctaaatggtcattatattttgaggataagatgcagttaaaatgagaaaaatagggcaaaatata

SEQ ID NO: 296298 - DNA, 120 bp, Artificial Sequence
  ENSG00000132199_17 (sequence is synthesized)
ttcactattatttctaaaatatactcttttaagtagcatccaaaccagaatacagcacatgtttacttaaggagagttctttaatctattttaggaaggaactgagcagataagtggcag

SEQ ID NO: 296299 - DNA, 120 bp, Artificial Sequence
  ENSG00000132199_18 (sequence is synthesized)
tacagaatgaacaaagcgtggacgaatgcagaacacttctttattatagcaacatataaaacaactataactttaaagttcataaccacactctacatcatgatcgatggtgttactcag

SEQ ID NO: 296300 - DNA, 120 bp, Artificial Sequence
  ENSG00000132199_19 (sequence is synthesized)
ctccctcagatttgagggaatagcttgtgaaattcttaaaatattctaaaaatattccaaaaatagcttgtgaaattcaccaaccttctttataagtacgtgggattgaaatgcacatac

SEQ ID NO: 296301 - DNA, 120 bp, Artificial Sequence
  ENSG00000132199_20 (sequence is synthesized)
atgtttttgctaagagcacatacatttcattctcctcactttgttcataacctcagcattgtcagataccctcagtgagttaactcaaagccttttattatggaaagaactggcacagtt

SEQ ID NO: 296302 - DNA, 120 bp, Artificial Sequence
  ENSG00000132199_21 (sequence is synthesized)
acatttgccagtggcaacatccttaaaaattaataactgataggtcacggacagatttttgacctagttcctttttcttttagagcaaaaagaacttttacctcggcatccagcccaacc

SEQ ID NO: 296303 - DNA, 120 bp, Artificial Sequence
  ENSG00000132199_22 (sequence is synthesized)
tacccttcaatctgaaagtcttcagctttgaagtcatcaattttctcaacttttcgaagaatcctgagctttgggaaaggtctgggttctcgctgaagctaaaaacaaaataaggccatt

SEQ ID NO: 296304 - DNA, 120 bp, Artificial Sequence
  ENSG00000132199_23 (sequence is synthesized)
attttgccataattgtacgacctgttgtaattgctcctcatgtccgtgaaacaagtacacaggatgtgatcaacaaagttctattttacaggagtatgatcctgtcgataccttgccgta

SEQ ID NO: 296305 - DNA, 120 bp, Artificial Sequence
  ENSG00000132199_24 (sequence is synthesized)
ggttatgtaacatgattggagcgcaaccagctgttctcttgcacagatcgagagtgaggggtattttgtgacattacacagcatcaggagcctggtgcctcatcaggtgtaagttcttat

SEQ ID NO: 296306 - DNA, 120 bp, Artificial Sequence
  ENSG00000132199_25 (sequence is synthesized)
aaccactcttggcaaatttattaaagacaggaacacagtcaatctgtaactcatagtagctctacgtttacttgaattccacaatccctaacccatctgtccctggcagaaagaaggaaa

SEQ ID NO: 296307 - DNA, 120 bp, Artificial Sequence
  ENSG00000132199_26 (sequence is synthesized)
gatgacatgcatggacagtgaacagaaagggatgaaagccaggattcctgggatgaacagacagtggcaattaggatgtgaagacaggtcacaacctattactatgtctaaaaacgacca

SEQ ID NO: 296308 - DNA, 120 bp, Artificial Sequence
  ENSG00000132199_27 (sequence is synthesized)
gagcagagagccagagagaataagcctgaagtcacctccactcaaaagcagccaaactccctcaaaggagtaacttttaaaacctggatctaacctggaaggggctaaaaagtgtctggt

SEQ ID NO: 296309 - DNA, 120 bp, Artificial Sequence
  ENSG00000132199_28 (sequence is synthesized)
tctgagtttttttccttaaggctcatgaagcagatgaacttacatttttattgccatttcatatcaattgttggctgctataacttagggatttcaacagacttttgaagtttggaccta

SEQ ID NO: 296310 - DNA, 120 bp, Artificial Sequence
  ENSG00000132199_29 (sequence is synthesized)
agtttggacctaaatattgtacttaatgtaaaattaacaaaaaatatttatggccagggtggtggcttatgcctgtaattccagaattttcggaggctgaggcaggtggatcacttgaag

SEQ ID NO: 296311 - DNA, 89 bp, Artificial Sequence
  ENSG00000132199_30 (sequence is synthesized)
acggcacactccagcctggccgaaaaggaaaaacatttgcacttcaattctccttcaagttaaaatgagttaaaatgcccccttttgga

SEQ ID NO: 296312 - DNA, 120 bp, Artificial Sequence
  ENSG00000132199_31 (sequence is synthesized)
ctccttcaagttaaaatgagttaaaatgcccccttttggacaatcccctggcttgaatgtggctcttccctctctggtactggtgcttagtacctcacagcacctgacatgttaagtgcc

SEQ ID NO: 296313 - DNA, 120 bp, Artificial Sequence
  ENSG00000132199_32 (sequence is synthesized)
catggttgctgaggcagatgcctgccttgtcctgcccacctgcccaccacttctccctaaactgaagccccacatttggagcagtcatctttatcttggacacagcattgagcagatgcc

SEQ ID NO: 296314 - DNA, 120 bp, Artificial Sequence
  ENSG00000132199_33 (sequence is synthesized)
tgttccacagtcaaccttttatcaagagaaggtaccaaacccaaaagtataacatctaattcttacctgaattttcagtggctcgatgtgattcaggtaaatatgtgcatctcccaaagt

SEQ ID NO: 296315 - DNA, 120 bp, Artificial Sequence
  ENSG00000132199_34 (sequence is synthesized)
gtgtataaagtcacctggctataaacccgggggagaaagcagaacagtatgttagtttcaattctttaaaacatcatttaaaaacattagaatatgcagacaccgcaaggctttttttaa

SEQ ID NO: 296316 - DNA, 120 bp, Artificial Sequence
  ENSG00000132199_35 (sequence is synthesized)
aaaaataatttagtgtagcttttccatttttttgtagcaacagcatcttgttatgttgcccaggctggtattgaactccagacctcaagcaattgctcctgtctcagtctcccaaagtgc

SEQ ID NO: 296317 - DNA, 120 bp, Artificial Sequence
  ENSG00000132199_36 (sequence is synthesized)
attacaggcatgagccaccatacccaacctcagcatagcttttgagaaaatccatagaagctgtatcacaaacaacctgtatagatctgttagtgcgtataccacagggccagaaaacct

SEQ ID NO: 296318 - DNA, 120 bp, Artificial Sequence
  ENSG00000132199_37 (sequence is synthesized)
accttccagaagaggaaggtttcaaagtaaaagctggttcatttcttacttacacatatcaaatttaaaagctaatcagagactaaactctgcaatttgttttcccatattaaagaactg

SEQ ID NO: 296319 - DNA, 120 bp, Artificial Sequence
  ENSG00000132199_38 (sequence is synthesized)
aagagctcagtgtggtaggctggcaagtcacccttcccgagacagcccaccttcaggcccgtgatgtgcgcaatcatgtacgtgagcagggcgtagctggcgatgttgaaaggcacaccg

SEQ ID NO: 296320 - DNA, 120 bp, Artificial Sequence
  ENSG00000132199_39 (sequence is synthesized)
aggcccatgtctcccgatctctggtacagctggcaggacagctcactgttcaccacatagaactggcagagggcatggcatggaggcagcgccatcagaggaagatctgaggaaccagca

SEQ ID NO: 296321 - DNA, 120 bp, Artificial Sequence
  ENSG00000132199_40 (sequence is synthesized)
gaggaagataaggagggatggtggtttgaaagaccacagctaaaggcaaagtaaaacaggagagaaacagaagccaactcatatggtggagaccaggagagagagccactgggctgcagt

SEQ ID NO: 296322 - DNA, 120 bp, Artificial Sequence
  ENSG00000132199_41 (sequence is synthesized)
gatgtccataacagcctctgcagcgatggcacggagctgagggagactatccatcggtgcaaggtttctgcaggtgtccatttacggctgaagcaatgctcttccatcagagctgaaggg

SEQ ID NO: 296323 - DNA, 120 bp, Artificial Sequence
  ENSG00000132199_42 (sequence is synthesized)
atctgggctacctcgtggcaccagattacaaatacagcaggaataattctgtttgccacaggaaactggtgcttctggtacaccctcctatattaaaagtctctattacatggccaggca

SEQ ID NO: 296324 - DNA, 120 bp, Artificial Sequence
  ENSG00000132199_43 (sequence is synthesized)
ccagccaggtgggtctttaatatcagcaaccctttgcttccatgtaatttccagccagaggtcccagttcccaagagccaggctgttcctcttccacttgagtgccctcctctccctcca

SEQ ID NO: 296325 - DNA, 120 bp, Artificial Sequence
  ENSG00000132199_44 (sequence is synthesized)
ggccacctcctttccacactgctcatctgcacttctcccttctgactctcgcctgtgcaggtaaagacctctggccatcctaagaccttctctggatgaacctcgatggttgatgaccct

SEQ ID NO: 296326 - DNA, 120 bp, Artificial Sequence
  ENSG00000132199_45 (sequence is synthesized)
gcatcctgaaacagggcaggatgcagagggaccatcatctcttttgacccagtcactgtgtgtccctcagcacagctcacggtggcactttttgcctgtgacatgtcaccaggcttccta

SEQ ID NO: 296327 - DNA, 120 bp, Artificial Sequence
  ENSG00000132199_46 (sequence is synthesized)
tctgacttgcagccactctggtctctgagcctcctgctactcagtgtgtcctgtggagcaggagctccagcatcacctgggagcttgtgagaaatgcagcctgggcctctccccagaccc

SEQ ID NO: 296328 - DNA, 120 bp, Artificial Sequence
  ENSG00000132199_47 (sequence is synthesized)
gctgcctgggaatctgcattggaacaagatcccctagtgattcctatgcgttcttaagttggagaggcactgaattcttgttaatgcctcagctaaataaaggcttgaggagtgagaact

SEQ ID NO: 296329 - DNA, 120 bp, Artificial Sequence
  ENSG00000132199_48 (sequence is synthesized)
tgaaggaggcagcatgaagccgcggaaagaggtgttggcatctgatagaactgaaatcacatcttgccttttcccctcatccgctgcaagtacttgctgtgtgatcaattactcaacctc

SEQ ID NO: 296330 - DNA, 120 bp, Artificial Sequence
  ENSG00000132199_49 (sequence is synthesized)
tctgaacttcattttctctcagtagaaataatatgagctttggtcctcctccaagttgccatatctcagaaggaccagcacagggcaggattcagagcagctgctgtaagtgctgtttgc

SEQ ID NO: 296331 - DNA, 120 bp, Artificial Sequence
  ENSG00000132199_50 (sequence is synthesized)
gggggaggctgcagcagtgtatctggtgagtcagagaaggctgtggggagatttaaagggtctcttcccagcacaggaagcctggcacccagagcctaaggccagccaccctctctggag

SEQ ID NO: 296332 - DNA, 120 bp, Artificial Sequence
  ENSG00000132199_51 (sequence is synthesized)
catcacggatcatgtagttgaagcctccagctggtacagaagagaacagcaggtgcctgagaatgtgcggcactctgcaagctggggctctttgcaaagcagcagggggacctcagccaa

SEQ ID NO: 296333 - DNA, 120 bp, Artificial Sequence
  ENSG00000132199_52 (sequence is synthesized)
cagaggtttagggacttgcctagaaacgcatggtaacacagctaagccttggccaacactgtcaattgagtggtactcgctccttctgctttaagttagcaccacgtgaataatctgact

SEQ ID NO: 296334 - DNA, 120 bp, Artificial Sequence
  ENSG00000132199_53 (sequence is synthesized)
gatgctgaggaggaaaaaactgggcaaattaaaggggaatgagcttcagaccccatgcagagctggctgtgagtccgggtttcactgctcaccagctgcatgaccttgagcatgtgactt

SEQ ID NO: 296335 - DNA, 120 bp, Artificial Sequence
  ENSG00000132199_54 (sequence is synthesized)
ccccactctgagctgcggtggcctcagtgcaacacctgggtggcggttaaaaacctcgtgatccacaaatgaaggcccttgttattagttggcaaaaaattaaggaaaaacaaagaacac

SEQ ID NO: 296336 - DNA, 120 bp, Artificial Sequence
  ENSG00000132199_55 (sequence is synthesized)
ttgttgaaacattttggatctttcaggaggacattccttttctccattcagagccctttgttttctttggggtatagcaacagttccttctatgggagctcttgtggcacggcccctgtg

SEQ ID NO: 296337 - DNA, 120 bp, Artificial Sequence
  ENSG00000132199_56 (sequence is synthesized)
cttccagaaatactgcagaaaggtcaaattggtaaaaaagaaagaggtgggttgtaagaaaattttcttcattgtttttgctaacattgtccacttttgagtgcccctgtccttttgggg

SEQ ID NO: 296338 - DNA, 120 bp, Artificial Sequence
  ENSG00000132199_57 (sequence is synthesized)
tacacattgtcttcccaaatgccctgtgctgagcagctaggccctcaaatcaacattcaagtctgcatggtgaagcctgctgggtatgacctctgactgcagagtttgcttcagccactg

SEQ ID NO: 296339 - DNA, 120 bp, Artificial Sequence
  ENSG00000132199_58 (sequence is synthesized)
ctgaaaggaagtttggctttaggattacactgtagggagagccctgggggagcagggcagtccgtgagagtatcctgatcacctgggtttgacatcctagtaatttgtggctgggtgtgt

SEQ ID NO: 296340 - DNA, 120 bp, Artificial Sequence
  ENSG00000132199_59 (sequence is synthesized)
gtgtgcagggccggatcaggagaacagctggactctccaggggaaacagcttagctacaggcacttccaattccgaagggccctggaaagtgcaaaatgttgacggcgctgtgttttcac

SEQ ID NO: 296341 - DNA, 120 bp, Artificial Sequence
  ENSG00000132199_60 (sequence is synthesized)
ttctgtttagttttccagagtgctggggacagatcctaaaatttcttcacttgttccctcttgcatttcctgttgaagtagctgaaataattgtaatgtgtgacaaatacaggggttaca

SEQ ID NO: 296342 - DNA, 120 bp, Artificial Sequence
  ENSG00000132199_61 (sequence is synthesized)
gacctgacattcctttttctacttcagcttatactttgcccttatttctgtttgttttagataaagtaagctgctaaaagttgaagggctaccagcaatttgaaggttaatagacatggt

SEQ ID NO: 296343 - DNA, 120 bp, Artificial Sequence
  ENSG00000132199_62 (sequence is synthesized)
acgtccccttggggtcagtacacgctgaccagtgaccgaggacacagttgtgtgttaggctccatcacctgctgtactttgagttgggaaattttcatcatcttagaaactgggtcattt

SEQ ID NO: 296344 - DNA, 120 bp, Artificial Sequence
  ENSG00000132199_63 (sequence is synthesized)
tatcagagtctagagtcagatatagaaaaagtttgtggctatttctccaatttatatgactaaggtcgggtatctttttcaaagtgtctaattgaaattgaaaaggcagcaatttaaagt

SEQ ID NO: 296345 - DNA, 120 bp, Artificial Sequence
  ENSG00000132199_64 (sequence is synthesized)
tgctattgcaagggcagaaaatggtcttaagaaagccagctttcaaattgaataaacatgactgcgttcactttttgagcttataaatgaagcccgagtgcctgccaaaacctgctgcag

SEQ ID NO: 296346 - DNA, 120 bp, Artificial Sequence
  ENSG00000132199_65 (sequence is synthesized)
gtgagtgtgatgatggacctgactttcccagttggcggcaggagagactcaggcagtaagtctctcctggcagggagccaaggagtaaaaggcacccacgggctaggatccccctggctc

SEQ ID NO: 296347 - DNA, 120 bp, Artificial Sequence
  ENSG00000132199_66 (sequence is synthesized)
agtcctcattagaattataggccatcagagttgaaagaggcttgggagattgtttatttcgggcactaacctagagtagaaatccagtctttactgtcagtaacagcgttgattcagttt

SEQ ID NO: 296348 - DNA, 120 bp, Artificial Sequence
  ENSG00000132199_67 (sequence is synthesized)
ctgcatgaacatctccagaggcagcgagcttaacttggtgaggcactttccattctttgagggctttgagtattaggtgggtcttttcttctcttttttttttttgagatgaagtttcac

SEQ ID NO: 296349 - DNA, 120 bp, Artificial Sequence
  ENSG00000132199_68 (sequence is synthesized)
ccttgaagagtgttgggcaggagactgctcctcctccggaggaaagtgaagacaggaggctgtcacatcgtctctgacatggagagtggcttccgggccatccgtaggggaaggacacag

SEQ ID NO: 296350 - DNA, 120 bp, Artificial Sequence
  ENSG00000132199_69 (sequence is synthesized)
agctcttgagcccccttctagattcaaggttggcgttttacggggatggaggaggtagccaccaaaagggaatgatttgcaggccaccagaaatgtgcctgaggtcccacctgtggaccc

SEQ ID NO: 296351 - DNA, 79 bp, Artificial Sequence
  ENSG00000132199_70 (sequence is synthesized)
aggccaccagaaatgtgcctgaggtcccacctgtggaccctccatttttggatcctgttccctttcaatgccagtactc

SEQ ID NO: 296352 - DNA, 72 bp, Artificial Sequence
  ENSG00000132199_71 (sequence is synthesized)
tgcccagctaattttttgtatttttagtgaaaacggggtttcaccatgttggtcagtctgagctcgaactcc

SEQ ID NO: 296353 - DNA, 120 bp, Artificial Sequence
  ENSG00000132199_72 (sequence is synthesized)
cttagaagtagaatctcagggttgaaagagtttttaggattttcgacagttatggtagagtattattggtcactataagatgttagtgggaatggaactactggctgttttccaactgac

SEQ ID NO: 296354 - DNA, 120 bp, Artificial Sequence
  ENSG00000132199_73 (sequence is synthesized)
tgttccgtcagggtggggagaggtctcagcacgaggccccgccgaaatgttggtaagtggtcagccaagtgggccgctcactcccggttcacccactgtgtttctgtcagtgaagcaaac

SEQ ID NO: 296355 - DNA, 120 bp, Artificial Sequence
  ENSG00000132199_74 (sequence is synthesized)
atccccatttggcaggagaagaagctgccggaggtcacactgctagtgattggtggcccaggggtagggcagccttctttcctctgcagttcactgctccagaaccatctccagcctcat

SEQ ID NO: 296356 - DNA, 120 bp, Artificial Sequence
  ENSG00000132199_75 (sequence is synthesized)
agctcaccgtggacagccctgcggtgtggcgctgatgtacagagtgatgccaggcgttcatctccccactgagctcctgctgagtgtttgcctggggccaggtcctccttccgggaagtc

SEQ ID NO: 296357 - DNA, 120 bp, Artificial Sequence
  ENSG00000132199_76 (sequence is synthesized)
attttagctggaaagaacagggtgggggcgggtggcaagggatcagagcatgagcgtttgagggcttcgtcaggggcagtgaggagcctctaaaggactctacatttaggaatgacagag

SEQ ID NO: 296358 - DNA, 120 bp, Artificial Sequence
  ENSG00000132199_77 (sequence is synthesized)
tcaaacaatttaacaaagccctaaaggtccctgccaggaaagaatgagccccatgtatcaccataagcaacttcttagaaacataacccacccctgtcatcccagcactttgggaggcca

SEQ ID NO: 296359 - DNA, 90 bp, Artificial Sequence
  ENSG00000132199_78 (sequence is synthesized)
tgaagccaggagctcaagatcaacctggttaaaaataaattagccgggcatagtggcacatacctggagtcccagctactcaggaggctg

SEQ ID NO: 296360 - DNA, 76 bp, Artificial Sequence
  ENSG00000132199_79 (sequence is synthesized)
tagtggcacatataagccagggagactgaggctgcagtgagctatgatggcatcactgcactccagcctgggcaac

SEQ ID NO: 296361 - DNA, 120 bp, Artificial Sequence
  ENSG00000132199_80 (sequence is synthesized)
aagaataataaattttaaaaaacaaaatataacccaccttataattgattcaggcctcttcccctcctgtcacgttgccaggatcccaggatgctggtatcctgcatagatttcaggtac

SEQ ID NO: 296362 - DNA, 120 bp, Artificial Sequence
  ENSG00000132199_81 (sequence is synthesized)
atcactgatgtcctgactgaggaggatgccctaggtgagtttggaagctttctgggatacacgacgtgcacacacagtagtggcatgctttgtttcctaaaagagtgagtgatgcttttt

SEQ ID NO: 296363 - DNA, 120 bp, Artificial Sequence
  ENSG00000132199_82 (sequence is synthesized)
gtgacttatctgaagatgaggaaagagcaagaggttactaaaaaacatatctgtgaattgttgacagagacggtcacttctgcagaaactccagatgcccttgccaagtccaggtacagg

SEQ ID NO: 296364 - DNA, 120 bp, Artificial Sequence
  ENSG00000132199_83 (sequence is synthesized)
ctctcactgagttaattcaagacaaagctctcctttgtaaaccagaccctttccattcagtctatcacagtgtggcttactcggcaccccttttcagccccgctctcctcttcagttctc

SEQ ID NO: 296365 - DNA, 120 bp, Artificial Sequence
  ENSG00000132199_84 (sequence is synthesized)
actgtggcttttttgttcttaattccttttcatggcccggcaaaaacggagttaattatattaaagacctgacttccctgtctagctccttaactccaggtcagcagataattgagagtc

SEQ ID NO: 296366 - DNA, 120 bp, Artificial Sequence
  ENSG00000132205_0 (sequence is synthesized)
agaaggagaagtaggaacgagaagccggagggggcggccgcggagcactggttggagcgccgcgaagcgcccgagcctcttgccttcgcgggcggcgccctggccgccggcagccttgtg

SEQ ID NO: 296367 - DNA, 80 bp, Artificial Sequence
  ENSG00000132205_1 (sequence is synthesized)
ctgcgcgcgggatgtggcagcccagacggccctggccccgcgtgccctggcgctgggcgctggcgctgctggccctggtt

SEQ ID NO: 296368 - DNA, 120 bp, Artificial Sequence
  ENSG00000132205_2 (sequence is synthesized)
ctggccctggttggcgcggggctgtgccacgccggcccgcagcccgggtatcccgcgcggcccagcgccaggaacaagaactggtgcgcctacatcgtgaacaagaatgtgagctgctcc

SEQ ID NO: 296369 - DNA, 120 bp, Artificial Sequence
  ENSG00000132205_3 (sequence is synthesized)
gtgctggagggaagtgagagttttattcaggctcagtacaactgtgcctggaaccagatgccctgtccgtcggcgctggtgtatcgagtgaacttcagacctagatatgtcactaggtat

SEQ ID NO: 296370 - DNA, 120 bp, Artificial Sequence
  ENSG00000132205_4 (sequence is synthesized)
aagacagtgacacagttggaatggaggtgctgtcctggctttagagggggagattgccaagaaggtcccaaagaccccgtgaagaccctccgccccacgccggctcggcctcgaaacagc

SEQ ID NO: 296371 - DNA, 120 bp, Artificial Sequence
  ENSG00000132205_5 (sequence is synthesized)
ttgaagaaagccacagataatgaacccagccaattctcagagcccaggaagactttgtccccaactggtacagcacaaccaagctggggggtagatccaaaagaggggcctcaggaactt

SEQ ID NO: 296372 - DNA, 120 bp, Artificial Sequence
  ENSG00000132205_6 (sequence is synthesized)
caggaaaagaagatacaggtgctagaggagaaggttcttcgactcacaaggacggttcttgacctccagtcttcccttgctggagtgagtgaaaatctcaaacatgccactcaggatgat

SEQ ID NO: 296373 - DNA, 120 bp, Artificial Sequence
  ENSG00000132205_7 (sequence is synthesized)
gccagtagaacacgggcaccagggctcagcagccagcaccccaagcctgacaccactgttagtggagacacagaaacgggccagagtcctggtgtcttcaacactaaggaatctggcatg

SEQ ID NO: 296374 - DNA, 120 bp, Artificial Sequence
  ENSG00000132205_8 (sequence is synthesized)
aaggacatcaagtctgaattggctgaagtcaaagatactctaaagaacaaaagtgacaagctggaagagctggatggaaaagtgaagggctacgaagggcagctcagacagctccaggaa

SEQ ID NO: 296375 - DNA, 120 bp, Artificial Sequence
  ENSG00000132205_9 (sequence is synthesized)
gcagctcagggcccgacggtgaccatgacaaccaacgaactctaccaagcctatgtggacagtaagatcgacgccctgagagaggagctcatggagggcatggacagaaagctggctgac

SEQ ID NO: 296376 - DNA, 120 bp, Artificial Sequence
  ENSG00000132205_10 (sequence is synthesized)
ctgaaaaactcatgtgagtacaagctcactggcctccagcagcagtgtgatgactatgggagcagctacctgggagtgatagagctcataggggagaaggaaacaagcctgagaaaagaa

SEQ ID NO: 296377 - DNA, 120 bp, Artificial Sequence
  ENSG00000132205_11 (sequence is synthesized)
ataaataacctccgagcccggctacaggagccttcagcccaggcaaattgctgcgacagtgaaaagaatggtgacattggtcaacagatcaagacattggaccagaaaatcgagagagtt

SEQ ID NO: 296378 - DNA, 120 bp, Artificial Sequence
  ENSG00000132205_12 (sequence is synthesized)
gctgaagccaccagaatgctgaatggaagactggacaatgagtttgaccgccttatagttccagagccagatgtggattttgatgcaaaatggaatgaactcgatgcaaggatcaatgtg

SEQ ID NO: 296379 - DNA, 120 bp, Artificial Sequence
  ENSG00000132205_13 (sequence is synthesized)
acggagaagaacgctgaagaacattgcttttacattgaggaaacccttcggggcgccattaatggagaggtgggtgacttgaagcagcttgttgatcagaaaatacagtctctggaagac

SEQ ID NO: 296380 - DNA, 120 bp, Artificial Sequence
  ENSG00000132205_14 (sequence is synthesized)
cgtctggggagcgttctcctacagatgaccaataacactggtgcagagctcagtcccccaggggcagcagccctgccaggagtgtcagggtcaggagatgaacgggtcatgatggaatta

SEQ ID NO: 296381 - DNA, 120 bp, Artificial Sequence
  ENSG00000132205_15 (sequence is synthesized)
aaccacctgaaggacaaagttcaagttgttgaagacatttgcctgctgaacatccagggaaagcctcatgggatggaaggtgccttgccaaacagggaagaccgcgcagtacgcgacagc

SEQ ID NO: 296382 - DNA, 120 bp, Artificial Sequence
  ENSG00000132205_16 (sequence is synthesized)
ctgcaccttttgaaatctctcaacgacacgatgcacaggaagtttcaagaaaccgaacaaaccatccagaaacttcaacaggattttagttttctttattctcaattaaaccacacagaa

SEQ ID NO: 296383 - DNA, 120 bp, Artificial Sequence
  ENSG00000132205_17 (sequence is synthesized)
aatgatgtgactcatcttcaaaaggaaatgagcaattgtagagcaggtgaaaacgctggcatgggtaggttcactaaggtgggtgagcaagaaaggacagtggacaccctgccgtccccc

SEQ ID NO: 296384 - DNA, 120 bp, Artificial Sequence
  ENSG00000132205_18 (sequence is synthesized)
cagcaccccgtggctcattgctgcagtcagctggaggagaggtggcagaggttgcagagccaggtcatctcggagctggatgcttgtaaggaatgcacgcagggggtccagagggaggtc

SEQ ID NO: 296385 - DNA, 120 bp, Artificial Sequence
  ENSG00000132205_19 (sequence is synthesized)
tccatggtggagggcagggtgtctcatatggagaaaacttgcagcaagctggactctatctcaggaaatcttcagaggatcaaggaggggctcaacaagcatgtcagcagcctgtggaac

SEQ ID NO: 296386 - DNA, 120 bp, Artificial Sequence
  ENSG00000132205_20 (sequence is synthesized)
tgtgtcaggcagatgaacggaacgctcaggtcgcattccagagacatttctggcctgaagaattcagtccagcagttctacagccacgtcttccagatttctactgatttgcaagatctg

SEQ ID NO: 296387 - DNA, 120 bp, Artificial Sequence
  ENSG00000132205_21 (sequence is synthesized)
gtcaaatttcagccatcagcaaaggcgccctcgcccccgccgcccgcagaggccccgaaggagccgctgcagcccgagcccgccccgccgaggcccagcggccccgcaaccgcagaggac

SEQ ID NO: 296388 - DNA, 80 bp, Artificial Sequence
  ENSG00000132205_22 (sequence is synthesized)
cctgggcgacggcccgtcctgccccagcggccccccgaggagaggccgccccagccgccaggctccaccggggtcatcgc

SEQ ID NO: 296389 - DNA, 120 bp, Artificial Sequence
  ENSG00000132205_23 (sequence is synthesized)
tctgggcggggtctgccgcggggcgtggacggccagaccgggagcggcaccgtccccggcgcagaaggcttcgcgggcgcaccaggatacccgaagtcacctcctgtagcttccccagga

SEQ ID NO: 296390 - DNA, 120 bp, Artificial Sequence
  ENSG00000132205_24 (sequence is synthesized)
ggggcgttgtcctctttaacaaagtgctggtgaacgacggggatgtttacaaccccagcaccggggtcttcacggctccttatgatgggcgctacctgatcacggccaccctcacccccg

SEQ ID NO: 296391 - DNA, 120 bp, Artificial Sequence
  ENSG00000132205_25 (sequence is synthesized)
agagagacgcctacgtggaagcagtgctgtcggtctccaacgccagcgtggcccagctgcataccgctgggtacaggagagagttcctggaataccaccgccctccaggagctttgcata

SEQ ID NO: 296392 - DNA, 120 bp, Artificial Sequence
  ENSG00000132205_26 (sequence is synthesized)
cctgcgggggcccgggggcattccacctcatcgtgcacctgaaggcgggagatgcagtcaacgtcgtggtgactgggggcaagctggctcacacagactttgatgaaatgtactccacat

SEQ ID NO: 296393 - DNA, 120 bp, Artificial Sequence
  ENSG00000132205_27 (sequence is synthesized)
ttagtggggttttcttatatcctttcctttcccacctctaaggtggctggggagatgtcaggggaaagatagatagttgtaaaaactctaaagctttaatatattcggtttgtatgtaat

SEQ ID NO: 296394 - DNA, 120 bp, Artificial Sequence
  ENSG00000132205_28 (sequence is synthesized)
ggaagcacggggctagagtttccacataggccccaacataaaggccttccctcgctgttgaggccaccatgccttactgcatccagccaggctgcagggagtgaggcacacggtgaacat

SEQ ID NO: 296395 - DNA, 120 bp, Artificial Sequence
  ENSG00000132205_29 (sequence is synthesized)
ggccactgacttttctgccactctaactggacaactggaagacttggaaaggcctccacctgtatctacactctgagggccctggactgggcctgagcttgccacagaggctccgtctga

SEQ ID NO: 296396 - DNA, 120 bp, Artificial Sequence
  ENSG00000132205_30 (sequence is synthesized)
ctgtgggctgggaggagggaggcaggggagagccggtcacggtggctggtctttactgcagggcagcactgtggccagctgtctgtctttacactgcatgcagaagtttaaacactgaag

SEQ ID NO: 296397 - DNA, 120 bp, Artificial Sequence
  ENSG00000132205_31 (sequence is synthesized)
tgccgaagtggcccgtgccgccgcacagagaccccgactttagtttgggctgttccacgcttggctcaccattgccgcctgggacttaacctgctcaggcgggccttcgcccagctgcaa

SEQ ID NO: 296398 - DNA, 120 bp, Artificial Sequence
  ENSG00000132205_32 (sequence is synthesized)
atagggatgcgttagagactgttcccaaagcttgttgggctccttaaatggcatgtacaatttaagtgcaaagacagggagtgtcaataaagatggaaagccatttccagttaacttttg

SEQ ID NO: 296399 - DNA, 120 bp, Artificial Sequence
  ENSG00000132205_33 (sequence is synthesized)
ttaatttaagtgtggtcccttacagatcgggagttgttgctaaaaagcaaactgaagaaatgttttgtttcaaaaagggctacagaaagtaaccttgagtaaaattaatctcagctacaa

SEQ ID NO: 296400 - DNA, 120 bp, Artificial Sequence
  ENSG00000132205_34 (sequence is synthesized)
aactgttacccctccgcatccaagctatacacttgggttttgtttctggcttgtgaagacggaccagatgtgcacggaggtcaaggccccatgtcatctgcagctggagcggctcctctg

SEQ ID NO: 296401 - DNA, 120 bp, Artificial Sequence
  ENSG00000132205_35 (sequence is synthesized)
gggatgctgcactcagatcccacagcagctgcccaggctaacttgatccctgctgcttcactgcaccaatctccagcagacacagctcgccgagctcttgggtttctaagcagcaggaag

SEQ ID NO: 296402 - DNA, 120 bp, Artificial Sequence
  ENSG00000132205_36 (sequence is synthesized)
ctcaacctaacgctggccacacgctgacagctgagcccatctgagaacacggcatcttcacacagcgagacgcctccactgaggggaggcccgggagtatcaatctgtcaccagtggcca

SEQ ID NO: 296403 - DNA, 120 bp, Artificial Sequence
  ENSG00000132205_37 (sequence is synthesized)
cggagacctctcagcacccttagttcaaggtagtctctgtggatcaggttggtaacacctactggttaatcaagtcccactggggaaaggtttggacggtagaatcaagagctgcagttt

SEQ ID NO: 296404 - DNA, 120 bp, Artificial Sequence
  ENSG00000132205_38 (sequence is synthesized)
ccttggcccacaagatgctcttatgctgtaaaaaaaatgctttaagaattgtttgcaaatgaatttacagggtggccactggacacttcagagttccttatttactccccccgccacagc

SEQ ID NO: 296405 - DNA, 120 bp, Artificial Sequence
  ENSG00000132205_39 (sequence is synthesized)
taggaagaccagcaagaactaaaggtttgccgttttactatttaaaatgtggacctctttgtccaggagcgggagggagaatggcatctcaccccattacaacagctggggaactggcta

SEQ ID NO: 296406 - DNA, 120 bp, Artificial Sequence
  ENSG00000132205_40 (sequence is synthesized)
aagagagctgtcagagagtatccttggctgtcctaggaatgactcatggaaagcgccccagtgcagcagtgttttcaggaaaacccagtgggcacgcgccatcgccctctcctctcctct

SEQ ID NO: 296407 - DNA, 120 bp, Artificial Sequence
  ENSG00000132205_41 (sequence is synthesized)
cacgctccttttgaaaagaccgcactcggcgcccaaggggacgtgctcaagagctgcaggggcagggcccaggcaaaaggtgggtgatgactacctgctgctttccctactccgtagatg

SEQ ID NO: 296408 - DNA, 120 bp, Artificial Sequence
  ENSG00000132205_42 (sequence is synthesized)
ggtctggaacatcgggtaaaacccagtcctcctctcagtgcatctctactcaccaacaatggtgaatctcagctctgtgtattcaagacaggcaaaacagaatatgcctcattatggctg

SEQ ID NO: 296409 - DNA, 120 bp, Artificial Sequence
  ENSG00000132205_43 (sequence is synthesized)
gagcgtgcctctactttgagataaagctggatgacaggtggatcctggcccacttaggagacatctttagaaagggaaaggctgtctttttgtacaggtagtagaacaacaaggtcagct

SEQ ID NO: 296410 - DNA, 120 bp, Artificial Sequence
  ENSG00000132205_44 (sequence is synthesized)
gagcttaaggctgtggggttcgaagcagcccttcaagaagtcatcacccctgaagtagtgcctgcgagtcagtcagaggcataccaaaccctgagacagaatcaggcacaagttcacaac

SEQ ID NO: 296411 - DNA, 70 bp, Artificial Sequence
  ENSG00000132205_45 (sequence is synthesized)
ataccaaaccctgagacagaatcaggcacaagttcacaacttttttttttttttggggggagacagtcct

SEQ ID NO: 296412 - DNA, 120 bp, Artificial Sequence
  ENSG00000132205_46 (sequence is synthesized)
tacaggtatgagccaccacgcccagccaagttcacaacttctgatatcaagttgttgctgagaaaaggtcaggacacttcttaagtagagaaggactgtgacatcccctccaaacctcca

SEQ ID NO: 296413 - DNA, 120 bp, Artificial Sequence
  ENSG00000132205_47 (sequence is synthesized)
agaaggactgtgacatcccctccaaacctccatgtaacactaacaaatggcctcatttacacgattaaaaacaaaatggtatcgtcaataaatgcaaaccttaaactgcatttgaaatta

SEQ ID NO: 296414 - DNA, 120 bp, Artificial Sequence
  ENSG00000132205_48 (sequence is synthesized)
ccgggagacgcacgccaggagcttcctccgttggaagtcccttccgctggcgacgtgggcgctgtggccgcggccctcgtggagcctgagccctcctcacggcctccgcgcagccctggg

SEQ ID NO: 296415 - DNA, 120 bp, Artificial Sequence
  ENSG00000132205_49 (sequence is synthesized)
gccccccggcagggtccctcggcagcccgcgggagaggccgtggggccccggcaggagtgtggttcagagacggtgcgggggtcggtggcctcaggtccctttcagtcacttgcgacgca

SEQ ID NO: 296416 - DNA, 120 bp, Artificial Sequence
  ENSG00000132205_50 (sequence is synthesized)
gggcaggggtccccggcggcgtccgggtggcccgcggcgtcctcggaagatgcgggcggacgcccgtgtgtcccgctggcctgacgtcgcaggggtggccgcagagtcctcacggggacc

SEQ ID NO: 296417 - DNA, 120 bp, Artificial Sequence
  ENSG00000132207_0 (sequence is synthesized)
aggagaggggcacgtaccggcgctacggcttcctgcaggctgcctccggatagtccccgagagcttgttccgaagcaagcaccctgcagccctagcgatccagccctcccctggacccta

SEQ ID NO: 296418 - DNA, 120 bp, Artificial Sequence
  ENSG00000132207_1 (sequence is synthesized)
ggtcacggcaatcaaccccctgctgtggttcccgaaccccaaggcccgatgggtcccgcgggggtcgcggcgaggccagggcgctttttcggcgtctacctgctctactgcctgaacccc

SEQ ID NO: 296419 - DNA, 120 bp, Artificial Sequence
  ENSG00000132207_2 (sequence is synthesized)
cggtaccggggccgcgtctacgtggggttcactgtcaacactgctcgtcgggtccagcagcacaatgggggccgcaaaaaaggcggggcctggcggaccagcgggcgagggccctgggag

SEQ ID NO: 296420 - DNA, 120 bp, Artificial Sequence
  ENSG00000132207_3 (sequence is synthesized)
atggtgctcgtcgtgcacggcttcccgtcctccgtggccgcccttcggtttgagtgggcttggcagcacccgcacgcctcgcgccgcctggcgcacgtggggcctcgcctgcgaggagag

SEQ ID NO: 296421 - DNA, 120 bp, Artificial Sequence
  ENSG00000132207_4 (sequence is synthesized)
tttccacctgcgcgtgctggcgcacatgctgcgcgcaccgccctgggctcgcctcccgctcacgctgcgctgggtgcgcccagacctccgccaggacctctgcctcccgccgccgccgca

SEQ ID NO: 296422 - DNA, 120 bp, Artificial Sequence
  ENSG00000132207_5 (sequence is synthesized)
cgtgcctctggccttcgggcctccaccgccccaggccccggccccaaggcgccgcgcaggtccctttgatgacgcggagcctgagccagaccagggggatccaggggcctgctgctccct

SEQ ID NO: 296423 - DNA, 120 bp, Artificial Sequence
  ENSG00000132207_6 (sequence is synthesized)
gtgcgcccagaccatccaggatgaagaggggcccttgtgttgcccccaccctggctgcctgctaagggcccatgtgatctgcctggcagaggagtttcttcaggaagaaccagggcagct

SEQ ID NO: 296424 - DNA, 120 bp, Artificial Sequence
  ENSG00000132207_7 (sequence is synthesized)
tctgcccctagagggccaatgcccttgctgtgagaagtcactgctttggggagacctgatctggctgtgccagatggacactgagaaagaagtagaagactcagaattagaagaggcaca

SEQ ID NO: 296425 - DNA, 120 bp, Artificial Sequence
  ENSG00000132207_8 (sequence is synthesized)
ctggacagacctgctggagacctgatcctcagtgtccttaccccctcctacctcttttctgtgccacctgctgtgggtccagcaggtttttacttgagtacaataaaaagtctgagtcaa

SEQ ID NO: 296426 - DNA, 120 bp, Artificial Sequence
  ENSG00000132207_9 (sequence is synthesized)
tgtgacagaggcggggcgtctgtggtggggacggggcctgtcgcaggggaggagcgtgacggggaggcggtgcccggggcatctccgcggcggaactcagggaaggagctagctggggcg

SEQ ID NO: 296427 - DNA, 120 bp, Artificial Sequence
  ENSG00000132207_10 (sequence is synthesized)
ggggtgatgatccaggctgggttccagcatagggctcttggtgggcacgctggggtcgggtggaatgcaggagagagaggaggtgggacaggtgggtacctgggctggaggcagggcctg

SEQ ID NO: 296428 - DNA, 120 bp, Artificial Sequence
  ENSG00000132207_11 (sequence is synthesized)
agaggacttgccctggggacattcagtgacctgctgggtgttgctgagctgtgaggaagttcaggtctggctgcagtggtgaggctgtgactcaatcaatcactgctgatgctcccagga

SEQ ID NO: 296429 - DNA, 120 bp, Artificial Sequence
  ENSG00000132207_12 (sequence is synthesized)
cctgcaccagcttagtcctaggggcaaggattttaactgtccacctcagtttcttcatttgtaagatgcaaataacagtcacccctgcctcatgggatggagctgtgtaatgcccgcaac

SEQ ID NO: 296430 - DNA, 120 bp, Artificial Sequence
  ENSG00000132207_13 (sequence is synthesized)
aatgcccttggtgagtgcagtcccctggccccagcctggtccacctctgggaagagggtgcccagttgtgcaatccaggcccaggcagctgagccctcatctcagcatgcagggcggata

SEQ ID NO: 296431 - DNA, 120 bp, Artificial Sequence
  ENSG00000132254_0 (sequence is synthesized)
aggatcgcgacgggaactggagcccgaggtccccgcgcggcccgggcctggcgccctgaggggaagagcggcccggcccgagccatgacggacgggatcctagggaaggcagccacaatg

SEQ ID NO: 296432 - DNA, 120 bp, Artificial Sequence
  ENSG00000132254_1 (sequence is synthesized)
gagatccctatccacgggaacggcgaagccaggcagcttcctgaagatgatgggctggagcaggacctccagcaggtgatggtgtcaggacccaacctcaatgaaaccagcattgtgtct

SEQ ID NO: 296433 - DNA, 120 bp, Artificial Sequence
  ENSG00000132254_2 (sequence is synthesized)
ggtggctatgggggctctggtgatggactcatccccacagggtctggccgccatccatctcacagcaccactccttctggccctggagatgaggtggctcggggcattgctggagaaaag

SEQ ID NO: 296434 - DNA, 120 bp, Artificial Sequence
  ENSG00000132254_3 (sequence is synthesized)
tttgacatcgtcaagaaatggggcatcaacacctataagtgcacaaagcaactgttatcagaacgatttggtcgaggctcacggactgtggacctggagctagagctgcagattgagttg

SEQ ID NO: 296435 - DNA, 120 bp, Artificial Sequence
  ENSG00000132254_4 (sequence is synthesized)
ctgcgtgagacgaagcgcaagtatgagagtgtcctgcagctgggccgggcactgacagcccacctctacagcctgctgcagacccagcatgcactgggtgatgcctttgctgacctcagc

SEQ ID NO: 296436 - DNA, 120 bp, Artificial Sequence
  ENSG00000132254_5 (sequence is synthesized)
cagaagtccccagagcttcaggaggaatttggctacaatgcagagacacagaaactactatgcaagaatggggaaacgctgctaggagccgtgaacttctttgtctctagcatcaacaca

SEQ ID NO: 296437 - DNA, 120 bp, Artificial Sequence
  ENSG00000132254_6 (sequence is synthesized)
ttggtcaccaagaccatggaagacacgctcatgactgtgaaacagtatgaggctgccaggctggaatatgatgcctaccgaacagacttagaggagctgagtctaggcccccgggatgca

SEQ ID NO: 296438 - DNA, 120 bp, Artificial Sequence
  ENSG00000132254_7 (sequence is synthesized)
gggacacgtggtcgacttgagagtgcccaggccactttccaggcccatcgggacaagtatgagaagctgcggggagatgtggccatcaagctcaagttcctggaagaaaacaagatcaag

SEQ ID NO: 296439 - DNA, 120 bp, Artificial Sequence
  ENSG00000132254_8 (sequence is synthesized)
gtgatgcacaagcagctgctgctcttccacaatgctgtgtccgcctactttgctgggaaccagaaacagctggagcagaccctgcagcagttcaacatcaagctgcggcctccaggagct

SEQ ID NO: 296440 - DNA, 120 bp, Artificial Sequence
  ENSG00000132254_9 (sequence is synthesized)
gagaaaccctcctggctagaggagcagtgagctgctcccagcccaacttggctatcaagaaagacattgggaagggcagccccagggtgtgggagattggacatggtacatcctttgtca

SEQ ID NO: 296441 - DNA, 120 bp, Artificial Sequence
  ENSG00000132254_10 (sequence is synthesized)
ttttctggctggggcctgacaccagttttgcccacattgctatggtgggaagagggcctggaggcccagaagttgctgccctgtctatcttcctggccacagggcttcattcccagatct

SEQ ID NO: 296442 - DNA, 120 bp, Artificial Sequence
  ENSG00000132254_11 (sequence is synthesized)
tttccttccacttcacagccaacggctatgacaaaaccactccctggccaatggcatcactcttcaggctggggtgtgctccctgaccaatgacagagcctgaaaatgccctgtcagcca

SEQ ID NO: 296443 - DNA, 120 bp, Artificial Sequence
  ENSG00000132254_12 (sequence is synthesized)
atggcagctcttctcggactcccctgggccaatgatgttgcgtctaataccctttgtctctcctctatgcgtgcccattgcagagaaggggactgggaccaaaggggtggggataatggg

SEQ ID NO: 296444 - DNA, 120 bp, Artificial Sequence
  ENSG00000132254_13 (sequence is synthesized)
gagccccattgctggccttgcatctgaataggcctaccctcacccacccacccagtttaattgtgcttagagcccaagaagattgggatctagcactaggaataaacctttcataaaagc

SEQ ID NO: 296445 - DNA, 120 bp, Artificial Sequence
  ENSG00000132254_14 (sequence is synthesized)
aggcccagcgaggtcaatttgtcggggactctaggagggtggcctgggtggagacaagctcagtctaatcaaacaccagaaccctatcaagtcaaaagagctggggccaggcagctgaag

SEQ ID NO: 296446 - DNA, 120 bp, Artificial Sequence
  ENSG00000132254_15 (sequence is synthesized)
tcacaggtttcagagatggtttgaaggcccagtcttctctcccagcctcagttggagccaaagctttgtcctttagccagcaccaagatagctatggatcttaagagcaccagatccaga

SEQ ID NO: 296447 - DNA, 120 bp, Artificial Sequence
  ENSG00000132254_16 (sequence is synthesized)
gggggttgggtttgctgaccttcatcatgcattcattcatacagcaaatatttactgagtgctttcatttgccagggactgcgttaggccctggggaaacatcagtgaataaaacacggt

SEQ ID NO: 296448 - DNA, 120 bp, Artificial Sequence
  ENSG00000132254_17 (sequence is synthesized)
ccctgcccacagtgcttagggcctactgagggaaagaagtaaccaggcaactacaaaacagtgataagtattaggatacagaagtacagagggcgctgtgggagcacaaaggaggggcat

SEQ ID NO: 296449 - DNA, 89 bp, Artificial Sequence
  ENSG00000132254_18 (sequence is synthesized)
gaagtacagagggcgctgtgggagcacaaaggaggggcatctggcatggactggggtggaaatggggatgtcagtttgaaagctgagac

SEQ ID NO: 296450 - DNA, 65 bp, Artificial Sequence
  ENSG00000132254_19 (sequence is synthesized)
gcaagaaaattagcccggcacggtggctggcgcctgtagtcctgtagtcccagctactcgggagg

SEQ ID NO: 296451 - DNA, 120 bp, Artificial Sequence
  ENSG00000132254_20 (sequence is synthesized)
agagctagctcgagtatcgccctgccctggctgcgacgtcagctccgcccttataatctgcgacgtggccggcttcttctgcccggagaggacgtcatttccgccgagtccctgacctgc

SEQ ID NO: 296452 - DNA, 120 bp, Artificial Sequence
  ENSG00000132254_21 (sequence is synthesized)
tgctaggatcgcgacgggaactggagcccgaggtccccgcgcggcccgggcctggcgccctgaggggaagagcggcccggcccgagggtgctggggtggagagttttactccaatacctt

SEQ ID NO: 296453 - DNA, 120 bp, Artificial Sequence
  ENSG00000132254_22 (sequence is synthesized)
taagggaggaatttggctacaatgcagagacacagaaactactatgcaagaatggggaaacgctgctaggagccgtgaacttctttgtctctagcatcaacacattggtcaccaagacca

SEQ ID NO: 296454 - DNA, 120 bp, Artificial Sequence
  ENSG00000132254_23 (sequence is synthesized)
gacctgctgctaggatcgcgacgggaactggagcccgaggtgagaggaacatgcttgggcgacgggaagttgaacgcacaaacctgtccagagggcaagatgccccgagccccggggaag

SEQ ID NO: 296455 - DNA, 120 bp, Artificial Sequence
  ENSG00000132254_24 (sequence is synthesized)
gatgaggacacacctgatgtccaggtgtatgggggtgggggcggggactcacacacctgggagacataactgactgtggaagggtcaccgatatcctgggagagagaggcttttaccaga

SEQ ID NO: 296456 - DNA, 120 bp, Artificial Sequence
  ENSG00000132254_25 (sequence is synthesized)
gagaccccctgaaggaagggggaagaaacgctaaaggaatgtgaaaggccaagcaatggagaacaaacctgaataggggggtgaagacctgagccctggaaagggttcatctcctcagca

SEQ ID NO: 296457 - DNA, 120 bp, Artificial Sequence
  ENSG00000132254_26 (sequence is synthesized)
taaacacgcctgcatggagataagttctaagagagcagactttccctcttcactgttgtattttcattgtcacaaatagtgcctgacacatagtaggcactcactaaatgtctgctgaat

SEQ ID NO: 296458 - DNA, 120 bp, Artificial Sequence
  ENSG00000132254_27 (sequence is synthesized)
cccacagggaagtcaatttcatgtgctcgaagagaagtatgggtggggccacagaggtgtctggtgtatctgagagaggctggtgtcagagaacttgatcctttagggtctggccgccat

SEQ ID NO: 296459 - DNA, 76 bp, Artificial Sequence
  ENSG00000132254_28 (sequence is synthesized)
ctgagacctgaagggtgagtagatgacaaacaggcagggtaaagggaagagcatcccaggcagagaggctagcata

SEQ ID NO: 296460 - DNA, 120 bp, Artificial Sequence
  ENSG00000132254_29 (sequence is synthesized)
gggtaaagggaagagcatcccaggcagagaggctagcatataatgaaggctctgagtaggaactgggaggaattgcttggaatgaaaaatgaagagggagtggctagatgaagactgcag

SEQ ID NO: 296461 - DNA, 120 bp, Artificial Sequence
  ENSG00000132254_30 (sequence is synthesized)
gctggttaaggacttttgccctctggagaaggagctgagaagtgttttaagcagaaatttgactgcatgggagaagtatagagttgagaaaagtagtcctctgaggcttaagatagtgtc

SEQ ID NO: 296462 - DNA, 120 bp, Artificial Sequence
  ENSG00000132254_31 (sequence is synthesized)
atctagactccagttccctcatcttgggtagcatagtagccccagcccaaaactgcaagcatgatccccgtctgggtttccttcacaagcactggagcatcttgtgctatgtgctgaact

SEQ ID NO: 296463 - DNA, 120 bp, Artificial Sequence
  ENSG00000132254_32 (sequence is synthesized)
caggtggataagaggttgaggcggttcccaaagctcctgctgcacccaggtgttgagcctaaatctgaaccttgtggagaggtcacaagaaagatccctaacagcactttggtttagtca

SEQ ID NO: 296464 - DNA, 120 bp, Artificial Sequence
  ENSG00000132254_33 (sequence is synthesized)
gggctaggtgtcatcacctgtatgccctttggccaaggaaaccagaatttttcaggattttccccacctctggaaggctggaggaaggggaagacccactcagcagattcccatagtgca

SEQ ID NO: 296465 - DNA, 120 bp, Artificial Sequence
  ENSG00000132254_34 (sequence is synthesized)
gggatcctcacaggcatgactttgccctttgtcatggatactgcagctcccagacagtcttctgggctttgatcagcctgcaatcatctgactagagcttgatttttggggcagggaagg

SEQ ID NO: 296466 - DNA, 120 bp, Artificial Sequence
  ENSG00000132254_35 (sequence is synthesized)
tggtccttatatgagctgccacttaatgggccactggggatttttcaacatgaaaggtaccgagtctccaaatgctggttgtagggcctaaaaacagggctcaactccaggttctgccac

SEQ ID NO: 296467 - DNA, 120 bp, Artificial Sequence
  ENSG00000132254_36 (sequence is synthesized)
tttctagctgagtgatgagggctaacgtctggggagcaagatccctattttttcccattgtaaaattgggctaataaaagatgctacctactgactattaaataatatatgtaaagtggc

SEQ ID NO: 296468 - DNA, 120 bp, Artificial Sequence
  ENSG00000132254_37 (sequence is synthesized)
atgggctggagcaggtgcttctgtttgattcttctaattgtttcaatttaggaatccaatttataaatcctaggttctcaccctccattccagtagccttcccctgacttatctgactcc

SEQ ID NO: 296469 - DNA, 120 bp, Artificial Sequence
  ENSG00000132254_38 (sequence is synthesized)
gttcccacctccaaaatgcttctgcagcccctatgttcctgaagcaacccctcttctctggcctataggacctccagcaggtgatggtgtcaggacccaacctcaatgaaaccagcattg

SEQ ID NO: 296470 - DNA, 120 bp, Artificial Sequence
  ENSG00000132254_39 (sequence is synthesized)
aggaaagcttgaattatgtctggagatcttgggaacttctgcttgtaggaacctcatggactctcctcagcccaaaagcaactcccagcgttgtccatccatttcccttttgccacttag

SEQ ID NO: 296471 - DNA, 120 bp, Artificial Sequence
  ENSG00000132254_40 (sequence is synthesized)
cccctgaaatggctcatttgtcctttccctgccaccacctgagtcaagttaagacctgcttcacaggaatgccccccctctacagcttgaggctgagttggaactttgtgaagcttctca

SEQ ID NO: 296472 - DNA, 120 bp, Artificial Sequence
  ENSG00000132254_41 (sequence is synthesized)
cctgctgcccccaaactcagtgtattttcttctgtttcctctgcccctgtacaccaacaactccctgcaaacccctcctctaacccccaaggaggccatatgtatatcaggatttggttc

SEQ ID NO: 296473 - DNA, 120 bp, Artificial Sequence
  ENSG00000132254_42 (sequence is synthesized)
tcaccgcgcaaagtccgagttcctcctagtaagcaggagcatccagttgtctctagcatctccttcagggaagtcaatttcatgtgctcgaagagaagtatgggtggggccacagaggtg

SEQ ID NO: 296474 - DNA, 120 bp, Artificial Sequence
  ENSG00000132256_0 (sequence is synthesized)
aagaatttcctgcggttcctctaggaaaattcctttgtgcagatcaggcccgtggattggtgagtgaatcctaaccacgtcttccctggcctgtcttcactcttctccccagaatcacca

SEQ ID NO: 296475 - DNA, 120 bp, Artificial Sequence
  ENSG00000132256_1 (sequence is synthesized)
cttctgcactggtgtctgaaggtgtattgagtgattttgtggagggcagaagtaggaagtctttgggacaaaactgtatttaccttgggatctgtgaacaagaggaacctcagcagccag

SEQ ID NO: 296476 - DNA, 120 bp, Artificial Sequence
  ENSG00000132256_2 (sequence is synthesized)
gacaggcaggagcagtggaatagctactatggcttctggaatcctggttaatgtaaaggaggaggtgacctgccccatctgcctggaactcctgacacaacccctgagcctggactgcgg

SEQ ID NO: 296477 - DNA, 120 bp, Artificial Sequence
  ENSG00000132256_3 (sequence is synthesized)
ccacagcttctgccaagcatgcctcactgcaaaccacaagaagtccatgctagacaaaggagagagtagctgccctgtgtgccggatcagttaccagcctgagaacatacggcctaatcg

SEQ ID NO: 296478 - DNA, 120 bp, Artificial Sequence
  ENSG00000132256_4 (sequence is synthesized)
gcatgtagccaacatagtggagaagctcagggaggtcaagttgagcccagaggggcagaaagttgatcattgtgcacgccatggagagaaacttctactcttctgtcaggaggacgggaa

SEQ ID NO: 296479 - DNA, 120 bp, Artificial Sequence
  ENSG00000132256_5 (sequence is synthesized)
ggtcatttgctggctttgtgagcggtctcaggagcaccgtggtcaccacacgttcctcacagaggaggttgcccgggagtaccaagtgaagctccaggcagctctggagatgctgaggca

SEQ ID NO: 296480 - DNA, 120 bp, Artificial Sequence
  ENSG00000132256_6 (sequence is synthesized)
gaagcagcaggaagctgaagagttagaagctgacatcagagaagagaaagcttcctggaagactcaaatacagtatgacaaaaccaacgtcttggcagattttgagcaactgagagacat

SEQ ID NO: 296481 - DNA, 120 bp, Artificial Sequence
  ENSG00000132256_7 (sequence is synthesized)
cctggactgggaggagagcaatgagctgcaaaacctggagaaggaggaggaagacattctgaaaagccttacgaactctgaaactgagatggtgcagcagacccagtccctgagagagct

SEQ ID NO: 296482 - DNA, 120 bp, Artificial Sequence
  ENSG00000132256_8 (sequence is synthesized)
catctcagatctggagcatcggctgcaggggtcagtgatggagctgcttcagggtgtggatggcgtcataaaaaggacggagaacgtgaccttgaagaagccagaaacttttccaaaaaa

SEQ ID NO: 296483 - DNA, 120 bp, Artificial Sequence
  ENSG00000132256_9 (sequence is synthesized)
tcaaaggagagtgtttcgagctcctgatctgaaaggaatgctagaagtgtttagagagctgacagatgtccgacgctactgggttgatgtgacagtggctccaaacaacatttcatgtgc

SEQ ID NO: 296484 - DNA, 120 bp, Artificial Sequence
  ENSG00000132256_10 (sequence is synthesized)
tgtcatttctgaagataagagacaagtgagctctccgaaaccacagataatatatggggcacgagggacaagataccagacatttgtgaatttcaattattgtactggcatcctgggctc

SEQ ID NO: 296485 - DNA, 120 bp, Artificial Sequence
  ENSG00000132256_11 (sequence is synthesized)
tcaaagtatcacatcagggaaacattactgggaggtagacgtgtccaagaaaactgcttggatcctgggggtatgtgctggcttccaacctgatgcaatgtgtaatattgaaaaaaatga

SEQ ID NO: 296486 - DNA, 120 bp, Artificial Sequence
  ENSG00000132256_12 (sequence is synthesized)
aaattatcaacctaaatacggctactgggttatagggttagaggaaggagttaaatgtagtgctttccaggatagttccttccatactccttctgttcctttcattgtgcccctctctgt

SEQ ID NO: 296487 - DNA, 120 bp, Artificial Sequence
  ENSG00000132256_13 (sequence is synthesized)
gattatttgtcctgatcgtgttggagttttcctagactatgaggcttgcactgtctcattcttcaatatcacaaaccatggatttctcatctataagttttctcactgttctttttctca

SEQ ID NO: 296488 - DNA, 120 bp, Artificial Sequence
  ENSG00000132256_14 (sequence is synthesized)
gtatttccatatttaaatcctagaaaatgtggagtccccatgactctgtgctcaccaagctcttgaaccttcttacacactcagccccttctgtacagcacctcttgtccaggtgcatct

SEQ ID NO: 296489 - DNA, 120 bp, Artificial Sequence
  ENSG00000132256_15 (sequence is synthesized)
catacacctgaactcatttgcatcattttaaccatcttttccttgctgtctcccttctttctatttgaacgtccttcactcatcagtaaaatgtaataattgccttgtgccatattgtcc

SEQ ID NO: 296490 - DNA, 120 bp, Artificial Sequence
  ENSG00000132256_16 (sequence is synthesized)
ccaatattttattgacatttgatagcaatttttttcatcattttccgtactcctaaggaaaactgacctatacctcataaaatgagaccgctatttaggtattacttctgccagatattt

SEQ ID NO: 296491 - DNA, 120 bp, Artificial Sequence
  ENSG00000132256_17 (sequence is synthesized)
atcacccaattgcctctgacactgactaagaagatgaagaaaagcttttcaacagcctttctatatcatcgtgtgataattgttcaccaatgaatgagtccttagccctgtgtcagttta

SEQ ID NO: 296492 - DNA, 120 bp, Artificial Sequence
  ENSG00000132256_18 (sequence is synthesized)
ccctcgatgcccttatttgtgagttaaagagaaaatatcataaatggtatactcttaagtatagaggttttgtatctagaggatctcagttcaactcctgtctctccatataccagcagt

SEQ ID NO: 296493 - DNA, 77 bp, Artificial Sequence
  ENSG00000132256_19 (sequence is synthesized)
ggatctcagttcaactcctgtctctccatataccagcagtgtaactgtgaataacatacttaaatggctgtgcttaa

SEQ ID NO: 296494 - DNA, 78 bp, Artificial Sequence
  ENSG00000132256_20 (sequence is synthesized)
tgcccaccaccacccctggctaaatttgtattttcagtagagacggggtttccccatgttggttaggctcgtctagaa

SEQ ID NO: 296495 - DNA, 120 bp, Artificial Sequence
  ENSG00000132256_21 (sequence is synthesized)
ttattttcttaaaataatttttgtattaaaaacttcacattaaataagtgctaatgttttattgcatagtagggtgactagagttaacaataacctattgcatatattttgaaatagcta

SEQ ID NO: 296496 - DNA, 90 bp, Artificial Sequence
  ENSG00000132256_22 (sequence is synthesized)
gagttaacaataacctattgcatatattttgaaatagctagaagagaggattttgaaagttctcaacacaaagaaatgacacatagttcg

SEQ ID NO: 296497 - DNA, 120 bp, Artificial Sequence
  ENSG00000132256_23 (sequence is synthesized)
taccacataaatatgtatatttattatttgtcaattaaaagcaaaataaaacaaaaaaccttcatctaatactttggatcattgtgaaaaaataaattcctgaagtataaagcatctatc

SEQ ID NO: 296498 - DNA, 120 bp, Artificial Sequence
  ENSG00000132256_24 (sequence is synthesized)
taagtgtcttgatctaataagtacttgttctacaaattattgaaaaacataaactctgttaatgtctcatggaacaggttgtgccttcagggaaactaggattggatttactaaattctc

SEQ ID NO: 296499 - DNA, 120 bp, Artificial Sequence
  ENSG00000132256_25 (sequence is synthesized)
attttttagatctcagatactactgtcaaaatgacttcaattctgccttctatatataatacacacatatatttaggattttattgtaattctagtgttgctacatattagtctttatca

SEQ ID NO: 296500 - DNA, 120 bp, Artificial Sequence
  ENSG00000132256_26 (sequence is synthesized)
aacaaactgaattatgtgggaatcagtttattaattgtaaaaaataattataataaaattagctgatgtagttttttaaaagttaaacgagttttttgaatagcttcactcatttctagc

SEQ ID NO: 296501 - DNA, 120 bp, Artificial Sequence
  ENSG00000132256_27 (sequence is synthesized)
tggggtaaggagaagtcacattatcataagccaccctgcggcttatcattattattatctttatcttttagaattttatgttctctattaggctcatgttttaagatttatgattctcct

SEQ ID NO: 296502 - DNA, 120 bp, Artificial Sequence
  ENSG00000132256_28 (sequence is synthesized)
tccaagacacacataacttacccctccttataacttctaaacaaggttcctcccagttttctctcaagtctttatcaagatttctctcatatcacaaataaagttacattatatccctta

SEQ ID NO: 296503 - DNA, 120 bp, Artificial Sequence
  ENSG00000132256_29 (sequence is synthesized)
atgctagaagtgtttagaggtgaggagagctagatcaacaacagggttatggaattcaagtggtgttagggtgctaaatagggaagagggtgcagtttccaaatatggatagaggggata

SEQ ID NO: 296504 - DNA, 120 bp, Artificial Sequence
  ENSG00000132256_30 (sequence is synthesized)
tccgttctgctggaacacaaacgcgcttctcagtttctctggaggaacttggttggcgaagagcttggcgcttcttgtaaaccttgtcccgctggacaaagacttgtgaaggaacacgga

SEQ ID NO: 296505 - DNA, 120 bp, Artificial Sequence
  ENSG00000132256_31 (sequence is synthesized)
gtgccaccaggactccgtggccctccccgcctctctctcctttttcccttcatggcggtgaagctgtggacgcttctcttcaggaggtgagctccagatgagacgccacatcccagcgga

SEQ ID NO: 296506 - DNA, 120 bp, Artificial Sequence
  ENSG00000132256_32 (sequence is synthesized)
gtcccggaagggtcaccccgcaggtctaaggcccgcctgttctgtgccgtgacctgtgctaccgaagtcatctgttgctgtagggaggccagggactcagccgatgcctcaatggccaac

SEQ ID NO: 296507 - DNA, 72 bp, Artificial Sequence
  ENSG00000132256_33 (sequence is synthesized)
actgggaggtagacgtgtccaagaaaactgcttggatcctggtcagattcaagcaattctcctgcctcagcc

SEQ ID NO: 296508 - DNA, 120 bp, Artificial Sequence
  ENSG00000132256_34 (sequence is synthesized)
cctgagcactgagattaaagaaaagtgaaggctatttccttctctgcgttgctgtgctttttctaatattaacaatgttctctgcaggaccgcttttctgaatcaattgctgaagttata

SEQ ID NO: 296509 - DNA, 120 bp, Artificial Sequence
  ENSG00000132256_35 (sequence is synthesized)
agaataattgaatgtagaagtagcaagagataatcccatttttattaatttatccagagcagtagaaaaatttgacgtagtggagatgatcaattagctctagtcatgtttgataggttc

SEQ ID NO: 296510 - DNA, 120 bp, Artificial Sequence
  ENSG00000132256_36 (sequence is synthesized)
atttccttctagaagccaggagcaaaggacagacctctctctggtataaggaggaagagattgagaagaggaattctccagagtctattaactatactacatcaacgcctccaagatact

SEQ ID NO: 296511 - DNA, 120 bp, Artificial Sequence
  ENSG00000132256_37 (sequence is synthesized)
atggtacccatcccaggggaagtggggctacaagaacagtataaatatctcctattggcataataaatggtgtaccccaagaatatgccaagggatgttttgtagagattttgagactaa

SEQ ID NO: 296512 - DNA, 120 bp, Artificial Sequence
  ENSG00000132256_38 (sequence is synthesized)
ggagatttggaaattgtgtggctattagcagtttcattcataatgaaatttataatcccttaaaaaacttggaggaagataattgcaggaagaacaccttgaataagcagaactcagctg

SEQ ID NO: 296513 - DNA, 120 bp, Artificial Sequence
  ENSG00000132256_39 (sequence is synthesized)
tgagatcaggagcaagaggagcacattggaagaatttcgaaaaagggcaccttttctaatttttaatacttggctgggttaatctgaaactatgtcagaagaagtggcatgataacaaga

SEQ ID NO: 296514 - DNA, 120 bp, Artificial Sequence
  ENSG00000132256_40 (sequence is synthesized)
tcctgagactcaagagaaaagggagattgagtgggaatgcctctagttcccacggctcctcctgtgaacagcacagctacacggcccggctgattcattcagagggcgggactcaccagg

SEQ ID NO: 296515 - DNA, 120 bp, Artificial Sequence
  ENSG00000132256_41 (sequence is synthesized)
ccctacgtggagaaatgccattggcccatagtttatctttcactttcctgccctgagtgtgagcaagaatttcctgcggttcctctaggaaaattcctttgtgcagatcaggcccgtgga

SEQ ID NO: 296516 - DNA, 120 bp, Artificial Sequence
  ENSG00000132259_0 (sequence is synthesized)
agcagaagcccaacagcagcctccttcaggcagtcaggcactagtgcccaactccagaagtcccctacaggcagagagggtgtggacatctcacaccccagcaccagaccacagaaccat

SEQ ID NO: 296517 - DNA, 120 bp, Artificial Sequence
  ENSG00000132259_1 (sequence is synthesized)
gagccaggacaccaaagtgaagacaacagagtccagtcccccagccccatccaaggccaggaagttgctgcctgtcctggacccatctggggattactactactggtggctgaacacaat

SEQ ID NO: 296518 - DNA, 120 bp, Artificial Sequence
  ENSG00000132259_2 (sequence is synthesized)
ggtcttcccagtcatgtataacctcatcatcctcgtgtgcagagcctgcttccccgacttgcagcacggttatctggtggcctggttggtgctggactacacgagtgacctgctatacct

SEQ ID NO: 296519 - DNA, 120 bp, Artificial Sequence
  ENSG00000132259_3 (sequence is synthesized)
actagacatggtggtgcgcttccacacaggattcttggaacagggcatcctggtggtggacaagggtaggatctcgagtcgctacgttcgcacctggagtttcttcttggacctggcttc

SEQ ID NO: 296520 - DNA, 120 bp, Artificial Sequence
  ENSG00000132259_4 (sequence is synthesized)
cctgatgcccacagatgtggtctacgtgcggctgggcccgcacacacccaccctgaggctgaaccgctttctccgcgcgccccgcctcttcgaggccttcgaccgcacagagacccgcac

SEQ ID NO: 296521 - DNA, 120 bp, Artificial Sequence
  ENSG00000132259_5 (sequence is synthesized)
agcttacccaaatgcctttcgcattgccaagctgatgctttacatttttgtcgtcatccattggaacagctgcctatactttgccctatcccggtacctgggcttcgggcgtgacgcatg

SEQ ID NO: 296522 - DNA, 120 bp, Artificial Sequence
  ENSG00000132259_6 (sequence is synthesized)
ggtgtacccggaccccgcgcagcctggctttgagcgcctgcggcgccagtacctctatagcttttacttctccacgctgatactgactacagtgggcgatacaccgccgccagccaggga

SEQ ID NO: 296523 - DNA, 120 bp, Artificial Sequence
  ENSG00000132259_7 (sequence is synthesized)
acccagatcatgcactggtgaagaagtacatgaagctgcagcacgtcaaccgcaagctggagcggcgagttattgactggtatcagcacctgcagatcaacaagaagatgaccaacgagg

SEQ ID NO: 296524 - DNA, 120 bp, Artificial Sequence
  ENSG00000132259_8 (sequence is synthesized)
tagccatcttacagcacttgcctgagcggctgcgggcagaagtggctgtgtctgtgcacctgtccactctgagccgggtgcagatctttcagaactgtgaggccagcctgctggaggagc

SEQ ID NO: 296525 - DNA, 120 bp, Artificial Sequence
  ENSG00000132259_9 (sequence is synthesized)
tggtgctgaagctgcagccccagacctactcaccaggtgaatatgtatgccgcaaaggagacattggccaagagatgtacatcatccgagagggtcaactggccgtggtggcagatgatg

SEQ ID NO: 296526 - DNA, 120 bp, Artificial Sequence
  ENSG00000132259_10 (sequence is synthesized)
gtatcacacagtatgctgtgctcggtgcagggctctactttggggagatcagcatcatcaacatcaaagggaacatgtctgggaaccgccgcacagccaacatcaagagcctaggttatt

SEQ ID NO: 296527 - DNA, 120 bp, Artificial Sequence
  ENSG00000132259_11 (sequence is synthesized)
cagacctattctgcctgagcaaggaggacctgcgggaggtgctgagcgagtatccacaagcacagaccatcatggaggagaaaggacgtgagatcctgctgaaaatgaacaagttggacg

SEQ ID NO: 296528 - DNA, 120 bp, Artificial Sequence
  ENSG00000132259_12 (sequence is synthesized)
tgaatgctgaggcagctgagatcgccctgcaggaggccacagagtcccggctacgaggcctagaccagcagctggatgatctacagaccaagtttgctcgcctcctggctgagctggagt

SEQ ID NO: 296529 - DNA, 120 bp, Artificial Sequence
  ENSG00000132259_13 (sequence is synthesized)
ccagcgcacttaagattgcttaccgcattgaacggctggagtggcagactcgagagtggccaatgcccgaggacctggctgaggctgatgacgagggtgagcctgaggagggaacttcca

SEQ ID NO: 296530 - DNA, 120 bp, Artificial Sequence
  ENSG00000132259_14 (sequence is synthesized)
aagatgaagagggcagggccagccaggagggacccccaggtccagagtgaccccatccccatccccaggattcccacctcctagtgaatccagagttgtagtaaagcctaactgctgcaa

SEQ ID NO: 296531 - DNA, 120 bp, Artificial Sequence
  ENSG00000132259_15 (sequence is synthesized)
gcttgtttcctggcaacggctaaacgcaagggcggggtcgccgacggctatccgagggaggagcaccgcctctcctcttggttccgtcccttcgaagttgctgcctgtcctggacccatc

SEQ ID NO: 296532 - DNA, 120 bp, Artificial Sequence
  ENSG00000132259_16 (sequence is synthesized)
tggggagatcagcatcatcaacatcaaaggtgggtatcccagtatttgttccagggacaaggatgggtggggtaggggggaacagcagagcccagtgctgggaccagatagtacttcagg

SEQ ID NO: 296533 - DNA, 120 bp, Artificial Sequence
  ENSG00000132259_17 (sequence is synthesized)
cctaaacttctgattgaggaaacctggcccttctctgagtcactagatggctcaggagaaaaacaacacatagaggatccattccctgagaagaagctgagccaaggccagtgaacaggg

SEQ ID NO: 296534 - DNA, 120 bp, Artificial Sequence
  ENSG00000132274_0 (sequence is synthesized)
atttgtggagaccagccctctggcttggtgagtgaatctggtttacaccggctcctgccctgccttcactcttctcccctgattcaagactcctctgctttggactgaagcactgcagga

SEQ ID NO: 296535 - DNA, 120 bp, Artificial Sequence
  ENSG00000132274_1 (sequence is synthesized)
gtttgtgaccaagaacttcaagagtcaagacagaaggaagccaagggagcagtgcaatggatttctcagtaaaggtagacatagagaaggaggtgacctgccccatctgcctggagctcc

SEQ ID NO: 296536 - DNA, 120 bp, Artificial Sequence
  ENSG00000132274_2 (sequence is synthesized)
tgacagaacctctgagcctagattgtggccacagcttctgccaagcctgcatcactgcaaagatcaaggagtcagtgatcatctcaagaggggaaagcagctgtcctgtgtgtcagacca

SEQ ID NO: 296537 - DNA, 120 bp, Artificial Sequence
  ENSG00000132274_3 (sequence is synthesized)
gattccagcctgggaacctccgacctaatcggcatctggccaacatagttgagagagtcaaagaggtcaagatgagcccacaggaggggcagaagagagatgtctgtgagcaccatggaa

SEQ ID NO: 296538 - DNA, 120 bp, Artificial Sequence
  ENSG00000132274_4 (sequence is synthesized)
aaaaactccagatcttctgtaaggaggatggaaaagtcatttgctgggtttgtgaactgtctcaggaacaccaaggtcaccaaacattccgcataaacgaggtggtcaaggaatgtcagg

SEQ ID NO: 296539 - DNA, 120 bp, Artificial Sequence
  ENSG00000132274_5 (sequence is synthesized)
aaaagctgcaggtagccctgcagaggctgataaaggaggatcaagaggctgagaagctggaagatgacatcagacaagagagaaccgcctggaagaattatatccagatcgagagacaga

SEQ ID NO: 296540 - DNA, 120 bp, Artificial Sequence
  ENSG00000132274_6 (sequence is synthesized)
agattctgaaagggttcaatgaaatgagagtcatcttggacaatgaggagcagagagagctgcaaaagctggaggaaggtgaggtgaatgtgctggataacctggcagcagctacagacc

SEQ ID NO: 296541 - DNA, 120 bp, Artificial Sequence
  ENSG00000132274_7 (sequence is synthesized)
agctggtccagcagaggcaggatgccagcacgctcatctcagatctccagcggaggttgaggggatcgtcagtagagatgctgcaggatgtgattgacgtcatgaaaaggagtgaaagct

SEQ ID NO: 296542 - DNA, 120 bp, Artificial Sequence
  ENSG00000132274_8 (sequence is synthesized)
ggacattgaagaagccaaaatctgtttccaagaaactaaagagtgtattccgagtaccagatctgagtgggatgctgcaagttcttaaagagctgacagatgtccagtactactgggtgg

SEQ ID NO: 296543 - DNA, 120 bp, Artificial Sequence
  ENSG00000132274_9 (sequence is synthesized)
acgtgatgctgaatccaggcagtgccacttcgaatgttgctatttctgtggatcagagacaagtgaaaactgtacgcacctgcacatttaagaattcaaatccatgtgatttttctgctt

SEQ ID NO: 296544 - DNA, 120 bp, Artificial Sequence
  ENSG00000132274_10 (sequence is synthesized)
ttggtgtcttcggctgccaatatttctcttcggggaaatattactgggaagtagatgtgtctggaaagattgcctggatcctgggcgtacacagtaaaataagtagtctgaataaaagga

SEQ ID NO: 296545 - DNA, 120 bp, Artificial Sequence
  ENSG00000132274_11 (sequence is synthesized)
agagctctgggtttgcttttgatccaagtgtaaattattcaaaagtttactccagatatagacctcaatatggctactgggttataggattacagaatacatgtgaatataatgcttttg

SEQ ID NO: 296546 - DNA, 120 bp, Artificial Sequence
  ENSG00000132274_12 (sequence is synthesized)
tcctcttctgatcccaaggttttgactctctttatggctgtgcctccctgtcgtattggggttttcctagactatgaggcaggcattgtctcatttttcaatgtcacaaaccacggagca

SEQ ID NO: 296547 - DNA, 120 bp, Artificial Sequence
  ENSG00000132274_13 (sequence is synthesized)
ctcatctacaagttctctggatgtcgcttttctcgacctgcttatccgtatttcaatccttggaactgcctagtccccatgactgtgtgcccaccgagctcctgagtgttctcattcctt

SEQ ID NO: 296548 - DNA, 120 bp, Artificial Sequence
  ENSG00000132274_14 (sequence is synthesized)
tacccacttctgcatagtagcccttgtgctgagactcagattctgcacctgagttcatctctactgagaccatctcttcctttctttccccttcttttacttagaatgtctttgtattca

SEQ ID NO: 296549 - DNA, 120 bp, Artificial Sequence
  ENSG00000132274_15 (sequence is synthesized)
tttgctagggcttccatagcaaagcatcatagattgctgatttaaactgtaattgtattgccgtactgtgggctggaaatcccaaatctagattccagcagagttggttctttctgaggt

SEQ ID NO: 296550 - DNA, 120 bp, Artificial Sequence
  ENSG00000132274_16 (sequence is synthesized)
ctgcaaggaagggctctgttccatgcctctctccttggcttgtagaaggcatcttgtccctatgactcttcacattgtctttatgtacatctctgtgcccaagttttccctttttattaa

SEQ ID NO: 296551 - DNA, 120 bp, Artificial Sequence
  ENSG00000132274_17 (sequence is synthesized)
gacaccagtcatactggctcagggcccaccgctaatgccttaatgaaatcattttaacattatattctctacaaagaccttatttccaaataagataatatttggaggtattgggaataa

SEQ ID NO: 296552 - DNA, 120 bp, Artificial Sequence
  ENSG00000132274_18 (sequence is synthesized)
aaactccaacatataaatttgaggaaggcacgatttcactcataacaatcttaccctttcttgcaagagatgcttgtacattattttcctaataccttggtttcactagtagtaaacatt

SEQ ID NO: 296553 - DNA, 120 bp, Artificial Sequence
  ENSG00000132274_19 (sequence is synthesized)
attattttttttatatttgcaaaggaaacatatctaatccttcctatagaaagaacagtattgctgtaattccttttcttttcttcctcatttcctctgccccttaaaagattgaagaaa

SEQ ID NO: 296554 - DNA, 120 bp, Artificial Sequence
  ENSG00000132274_20 (sequence is synthesized)
gagaaacttgtcaactcatatccacgttatctagcaaagtacataagaatctatcactaagtaatgtatccttcagaatgtgttggtttaccagtgacaccccatattcatcacaaaatt

SEQ ID NO: 296555 - DNA, 120 bp, Artificial Sequence
  ENSG00000132274_21 (sequence is synthesized)
aaagcaagaagtccatagtaatttatttgctaatagtggatttttaatgctcagagtttctgaggtcaaattttatcttttcacttacaagctctatgatcttaaataatttacttaatg

SEQ ID NO: 296556 - DNA, 120 bp, Artificial Sequence
  ENSG00000132274_22 (sequence is synthesized)
tattttggtgtattttcctcaaattaatattggtgttcaagactatatctaattcctctgatcactttgagaaacaaacttttattaaatgtaaggcacttttctatgaattttaaatat

SEQ ID NO: 296557 - DNA, 120 bp, Artificial Sequence
  ENSG00000132274_23 (sequence is synthesized)
aaaaataaatattgttctgattattactgaaaagatgtcagccatttcaatgtcttgggaaacaattttttgtttttgttctgttttctttttgcttcaataaaacaatagctggctcta

SEQ ID NO: 296558 - DNA, 120 bp, Artificial Sequence
  ENSG00000132274_24 (sequence is synthesized)
aagagagaaccgcctggaaggcaggaggagacacctcctaagggataattagacaggaatctgggcaggaccctgggctctatcacaaggagaccccttcctctttgctgtgctagaatt

SEQ ID NO: 296559 - DNA, 120 bp, Artificial Sequence
  ENSG00000132274_25 (sequence is synthesized)
aacaagcatagaagtcatttgattaggtctcaatttaactccttccctgttggagtttaggggctggagagtagacatatcataaatcaacactatatttggaagtgaaggcatggaggg

SEQ ID NO: 296560 - DNA, 120 bp, Artificial Sequence
  ENSG00000132274_26 (sequence is synthesized)
aaatatctgtgaaaacgcttcctgtgaatcctgtgttccatttgtgtcatcaggtttgaggctccaatccttccagtaaacaccctggagaaagacccaggattccctgtttagggggtt

SEQ ID NO: 296561 - DNA, 80 bp, Artificial Sequence
  ENSG00000132274_27 (sequence is synthesized)
caccctggagaaagacccaggattccctgtttagggggtttcagtagggggtctctgtcatacaggctggagtgtagtgg

SEQ ID NO: 296562 - DNA, 80 bp, Artificial Sequence
  ENSG00000132274_28 (sequence is synthesized)
ggtagagggatttaagatacagaaaggcaaagttgttcaggacaggtgtctacaatccaagcctcacccaggcatcacat

SEQ ID NO: 296563 - DNA, 120 bp, Artificial Sequence
  ENSG00000132274_29 (sequence is synthesized)
gggaggagctcaggttaaaaagtagaaaaacatggcttcaccagaaattgtgtattggcttttgcctcctattccttttgagaactccctgaggaaaactgttcttatcctgtctcccag

SEQ ID NO: 296564 - DNA, 120 bp, Artificial Sequence
  ENSG00000132274_30 (sequence is synthesized)
atctctttccatactctttgcttagtttctgatgcctgaaggacactgctgcacattgttttatttaaaaaagagtacaaatttttagcaaggaaaagttgaatgaatggagaattgctt

SEQ ID NO: 296565 - DNA, 120 bp, Artificial Sequence
  ENSG00000132274_31 (sequence is synthesized)
tgtaagataagctttcattgcccctccaagaagaacagtatttttgggaacacgtctggttagatgtgggaagagtggcaatgaaaggacgtctttccttactgcagggtctgctttttc

SEQ ID NO: 296566 - DNA, 120 bp, Artificial Sequence
  ENSG00000132274_32 (sequence is synthesized)
tttccaagaaactaaagagtgtattccgagtaccagatctgagtgggatgctgcaagttcttaaagagctgacagatgtccagtactactgggtagaaaacttctgccacgcctaggatc

SEQ ID NO: 296567 - DNA, 120 bp, Artificial Sequence
  ENSG00000132274_33 (sequence is synthesized)
ccagactgtgagtctgtgttcataagcaaggttctctaagattcaactataaaaaaacttactaaggtatgtcttcattatatgacttctcatatggagaaattcagccataatcactaa

SEQ ID NO: 296568 - DNA, 120 bp, Artificial Sequence
  ENSG00000132274_34 (sequence is synthesized)
cttccttttaagctactcttttgcaacctcctcagaagtgcatacaaaatagaacatgaaagaaaactatccccaaatcctcaatataatttatttctggaaacctttacaagtccatga

SEQ ID NO: 296569 - DNA, 120 bp, Artificial Sequence
  ENSG00000132274_35 (sequence is synthesized)
tatcaaaattttgaaaggctatgtaagacgttaatggacatctatatcaacttgaaatgatgtagctataaatttcatctcccataattcttcatttaaaaaatctagttattattagtt

SEQ ID NO: 296570 - DNA, 120 bp, Artificial Sequence
  ENSG00000132274_36 (sequence is synthesized)
aataaacctctgcatcaagtcaagtaacactgagataaatatgaagaaaacaagcacatccatttaatctatataatttctaaagagatgaagaaaggcttagaaaaatactacaatttt

SEQ ID NO: 296571 - DNA, 120 bp, Artificial Sequence
  ENSG00000132274_37 (sequence is synthesized)
atagagatttgaaattcatgttgaatcatgaatcatatgtctgcatctctcaaaatctccaatagctccaaattccaggtctctgagttcatcctgctgggattcccgggcattcacagc

SEQ ID NO: 296572 - DNA, 120 bp, Artificial Sequence
  ENSG00000132274_38 (sequence is synthesized)
tggcaacactggctatctctgcccctggcactactgtatctctcagcacttgctgcaaacaccctcatcctcatcatcatctggcagaacccttctttacagcagcccatgtatattttc

SEQ ID NO: 296573 - DNA, 120 bp, Artificial Sequence
  ENSG00000132274_39 (sequence is synthesized)
cttggcatcctctgtatggtagacatgggtctggccactactatcatccctaagatcctggccatcttctggtttgatgccaaggttattagcctccctgagtgctttgctcagatttat

SEQ ID NO: 296574 - DNA, 120 bp, Artificial Sequence
  ENSG00000132274_40 (sequence is synthesized)
gccattcacttctttgtgggcatggagtctggtatcctactctgcatggcttttgatagatatgtggctatttgtcaccctcttcgctatccatcaattgtcaccagttccttaatctta

SEQ ID NO: 296575 - DNA, 120 bp, Artificial Sequence
  ENSG00000132274_41 (sequence is synthesized)
aaagctaccctgttcatggtgctgagaaatggcttatttgtcactccagtgcctgtgcttgcagcacagcgtgattattgctccaagaatgaaattgaacactgcctgtgctctaacctt

SEQ ID NO: 296576 - DNA, 120 bp, Artificial Sequence
  ENSG00000132274_42 (sequence is synthesized)
gacgggcagactgctgctcatctctgcagctccactttggtctcttgtctctgaaggtccagtcacagggaacttgttcttctgagtacccacagcttactcttcctttgtagcaggacc

SEQ ID NO: 296577 - DNA, 120 bp, Artificial Sequence
  ENSG00000132275_0 (sequence is synthesized)
gtcacgctttggtttccgggtcggttctggcaggtctgagcgctccgacttccagaggagcgctgtgcacgtggagaagagcggggactcggcgaccctgccctcccgaccctcatgttc

SEQ ID NO: 296578 - DNA, 120 bp, Artificial Sequence
  ENSG00000132275_1 (sequence is synthesized)
gaagagcctgagtgggccgaggcggccccagtagccgcgggccttgggcccgtaatctcacgacctccgcctgcggcctcctcgcaaaacaagggctccaagcgccgccagctcttggcc

SEQ ID NO: 296579 - DNA, 120 bp, Artificial Sequence
  ENSG00000132275_2 (sequence is synthesized)
acattacgggccctagaggcagcatctctttcccagcatccccccagcctatgtataagtgactctgaggaggaggaggaggaaaggaagaagaaatgccccaaaaaggcatcatttgcc

SEQ ID NO: 296580 - DNA, 120 bp, Artificial Sequence
  ENSG00000132275_3 (sequence is synthesized)
agtgcctctgctgaagtagggaagaaagggaagaagaaatgtcaaaaacagggcccaccttgcagtgactctgaggaagaagtagaaaggaagaagaaatgccacaaacaggctcttgtt

SEQ ID NO: 296581 - DNA, 120 bp, Artificial Sequence
  ENSG00000132275_4 (sequence is synthesized)
ggcagtgactctgctgaagatgagaaaagaaagaggaaatgccagaaacatgcccctataaattcagcccagcacctggacaatgttgaccaaacaggtcccaaagcctggaagggtagt

SEQ ID NO: 296582 - DNA, 120 bp, Artificial Sequence
  ENSG00000132275_5 (sequence is synthesized)
actacaaatgatccaccaaagcaaagccctgggtccacttcccctaaaccccctcatacattaagccgcaagcagtggcggaaccggcaaaagaacaagagaagatgtaagaacaagttt

SEQ ID NO: 296583 - DNA, 120 bp, Artificial Sequence
  ENSG00000132275_6 (sequence is synthesized)
cagccacctcaggtgccagaccaggccccagctgaggcccccacagagaagacagaggtgtctcctgttcccaggacagacagccatgaggctcgggcaggggctttgcgagcccgcatg

SEQ ID NO: 296584 - DNA, 120 bp, Artificial Sequence
  ENSG00000132275_7 (sequence is synthesized)
gcacagcggctggatggggcccgatttcgctacctcaatgaacagttgtactcagggcccagcagtgctgcacagcgtctcttccaggaagaccctgaggcttttcttctctaccaccgc

SEQ ID NO: 296585 - DNA, 120 bp, Artificial Sequence
  ENSG00000132275_8 (sequence is synthesized)
ggcttccagagccaagtgaagaagtggccactgcagccagtggaccgcatcgccagggatcttcgccagcggcctgcatccctagtggtggctgacttcggctgtggggattgccgcttg

SEQ ID NO: 296586 - DNA, 120 bp, Artificial Sequence
  ENSG00000132275_9 (sequence is synthesized)
gcttcaagtatccggaaccctgtgcattgctttgacttggcttctctggaccctagggtcactgtgtgtgacatggcccaggttcctctggaggatgagtctgtggatgtggctgtgttt

SEQ ID NO: 296587 - DNA, 120 bp, Artificial Sequence
  ENSG00000132275_10 (sequence is synthesized)
tgcctttcactgatgggaaccaacatcagggacttcctagaggaggcaaatagagtactgaagccagggggtctcctgaaagtggctgaggtcagcagccgctttgaggatgttcgaacc

SEQ ID NO: 296588 - DNA, 120 bp, Artificial Sequence
  ENSG00000132275_11 (sequence is synthesized)
tttctgcgggctgtgaccaagctaggcttcaagattgtctccaaggacctgaccaacagccatttcttcttgtttgatttccaaaagactgggccccctctggtagggcccaaggctcag

SEQ ID NO: 296589 - DNA, 120 bp, Artificial Sequence
  ENSG00000132275_12 (sequence is synthesized)
ctttcaggcctgcagcttcagccatgtctctacaagcgcaggtgacctctggatcttccttgaaaggggaggcagatctcaaactccaggctcagaactgtgaagactgtttccagcctg

SEQ ID NO: 296590 - DNA, 120 bp, Artificial Sequence
  ENSG00000132275_13 (sequence is synthesized)
gctgtgagccaagacctggttcctggtggaccctgaggacaaagtgtgataaaacctctggctcagacttgctctactgaaggcttcttggttataagatgcataaagtcactggggcta

SEQ ID NO: 296591 - DNA, 120 bp, Artificial Sequence
  ENSG00000132275_14 (sequence is synthesized)
gctaaacaataaagagtttattgtgagaacatggggatatctgtctcatgacacttcaggtgttatgaaaactagatggtttggaattcaaggcatctttaggttttgctcttctttcca

SEQ ID NO: 296592 - DNA, 120 bp, Artificial Sequence
  ENSG00000132275_15 (sequence is synthesized)
actaagaagccacatggccttcctgtcctgccatctccactctgctgtcatctgatctgtctacagatcagcttcctctgctcacccatagcttctgctccttcagcttcagtttgccca

SEQ ID NO: 296593 - DNA, 120 bp, Artificial Sequence
  ENSG00000132275_16 (sequence is synthesized)
ggccttcaaggttgcagacaggcagctgttgctgtttgactctgaggcaactggttgtccaccaacatcttggctcaagacatcagtctgagccaccaacttgagactgtttggttgtcc

SEQ ID NO: 296594 - DNA, 120 bp, Artificial Sequence
  ENSG00000132275_17 (sequence is synthesized)
ccataccgagcatttctagtggtttatctttcccctctcccctcatctccatttttggaaccatatagcatcaagccactcccaacacctattgtcctgtgggactttgggatgtatata

SEQ ID NO: 296595 - DNA, 120 bp, Artificial Sequence
  ENSG00000132275_18 (sequence is synthesized)
gctgagagcacagattttggaatcaggtagacctggatttaattcttggcctgctacccagaggcacttaaagtcatttaatctctgtatatcacattcctcatttggaaaatggtagaa

SEQ ID NO: 296596 - DNA, 120 bp, Artificial Sequence
  ENSG00000132275_19 (sequence is synthesized)
tttttgtcttgcagggtggttgtgtgggttaactggagaaatctgtagccagggctgggaacataggaggtgctcagtaaactagctatgactattatgtgttgtaagccttattgtttt

SEQ ID NO: 296597 - DNA, 120 bp, Artificial Sequence
  ENSG00000132275_20 (sequence is synthesized)
ttgaagatcttccctaggctggttggaggctgaggggtaaagaatggatttgttgactaaggaagcctctgggagaggctagacctttcaacaggcctgcttcataggctatttaatgac

SEQ ID NO: 296598 - DNA, 120 bp, Artificial Sequence
  ENSG00000132275_21 (sequence is synthesized)
ttttaatagattctgagcttctgtccttggaggggtagtgagggagctgggtctctgttcataaacaacttgttgatgccatgtgggcttgggggcattgggctgttcattggcggaaga

SEQ ID NO: 296599 - DNA, 120 bp, Artificial Sequence
  ENSG00000132275_22 (sequence is synthesized)
gtctgtccactatctctgccttgcagtggactcagatcagcatgtcctgggaaagctataggcaaggtgctgagggaaggtgagtttgaatgatagattctaggcctcccccaaaaggta

SEQ ID NO: 296600 - DNA, 120 bp, Artificial Sequence
  ENSG00000132275_23 (sequence is synthesized)
tctgccatgtgcccaggtataaagatatggcctcttgtacttgtttccaggaatacctgacagtacccattgggagatcataggttctatgccctgagccagttggatgcctctaataag

SEQ ID NO: 296601 - DNA, 120 bp, Artificial Sequence
  ENSG00000132275_24 (sequence is synthesized)
gggatggaggttttgaaacaggctgtagtccagagggcatgtttggaggctgggctgtgaatcattaggcaggcactacacagtgcctctacacgtactgttctttctgctggatattca

SEQ ID NO: 296602 - DNA, 120 bp, Artificial Sequence
  ENSG00000132275_25 (sequence is synthesized)
tcggactggcagtttgctcatctttccgaacagcctagttgtttcctattctactcccaaagcaaaatcagttcttcatctgtactctcaaagtactatgtgaagagtgctacttcagct

SEQ ID NO: 296603 - DNA, 120 bp, Artificial Sequence
  ENSG00000132275_26 (sequence is synthesized)
tctaaatattgcattgtgattcctttgtgcatttggctgctgttttctcaagccatgtttatctttgtattcccggagcttgtcatttgagatatagccagtgtacttattcacctaggg

SEQ ID NO: 296604 - DNA, 120 bp, Artificial Sequence
  ENSG00000132275_27 (sequence is synthesized)
aagatgagggcactgttgactagtcatgatggaagaagtaggcagacaggagaacttcattaggtagaattggtgggatgttgaggttggtaagagaggaatctgaagtaagttccaggt

SEQ ID NO: 296605 - DNA, 120 bp, Artificial Sequence
  ENSG00000132275_28 (sequence is synthesized)
tgctcaactgtgggtaggctggtgatgccattcaaagtgttggattttaggaagtgggacatgcgtgaaatctgtgctgggggtctgggaatcagcagcctagaggtggtaattaaagtc

SEQ ID NO: 296606 - DNA, 120 bp, Artificial Sequence
  ENSG00000132275_29 (sequence is synthesized)
agaatagatgagatattcagggtaagataatgagaagagaaaatggctcagaatagaactgaggagcatgtcatggatgggtaaaggaaaatgaagcagtgaaggtgatggaagaggaga

SEQ ID NO: 296607 - DNA, 80 bp, Artificial Sequence
  ENSG00000132275_30 (sequence is synthesized)
gtaaaggaaaatgaagcagtgaaggtgatggaagaggagaaggttcacccagagatgtaggagtaaaaccaggagagtta

SEQ ID NO: 296608 - DNA, 69 bp, Artificial Sequence
  ENSG00000132275_31 (sequence is synthesized)
gtggcccaggctggaatgcggtggcgtgatctcaggtcactgaaacctctgcctgctggttcaagcacc

SEQ ID NO: 296609 - DNA, 120 bp, Artificial Sequence
  ENSG00000132275_32 (sequence is synthesized)
tttttttatgggaggatgggcaggttgttagctgtcgagtgctattgagatgagagagaactcagaatgcagtggggtaaggattgctgagtaatgtggagggcctgtttgaggtaaatg

SEQ ID NO: 296610 - DNA, 120 bp, Artificial Sequence
  ENSG00000132275_33 (sequence is synthesized)
gcagtggtaagaggttgctccattatgaaagccctcttccagagttcctgatagggccccagaagttcatttctgattgctttgattttttttcaggggagcaggaagccagtttatcat

SEQ ID NO: 296611 - DNA, 120 bp, Artificial Sequence
  ENSG00000132275_34 (sequence is synthesized)
ttgagagtgagaataggggagaggaaatatcttccaggcccacagtgcatagaaatacccagtcagggcaaaatgatttatctgtttacctctcctcatcacttgggcccagagcaatca

SEQ ID NO: 296612 - DNA, 120 bp, Artificial Sequence
  ENSG00000132275_35 (sequence is synthesized)
gcagtgattaggtagagaggagccgagcagagggaagagcataccaatcactcctccctttcccagtgcaggctcctagacttagctggggcagagctgggagaggaaaaagggatttaa

SEQ ID NO: 296613 - DNA, 120 bp, Artificial Sequence
  ENSG00000132275_36 (sequence is synthesized)
aactgcaacaggtgcagattattgttacacaggattagacattctaattaattgagattatgtttgttccttaaactgatcacaggactatctattaagaacatcacaacctcgctgcag

SEQ ID NO: 296614 - DNA, 120 bp, Artificial Sequence
  ENSG00000132275_37 (sequence is synthesized)
cttttctccatagcagggagagtacctcccagtgaataaaatttggagggtggtaagagacaagaataaaattgggtttggttatccgtgcctcatgcttgttcagcatccctttgagag

SEQ ID NO: 296615 - DNA, 120 bp, Artificial Sequence
  ENSG00000132275_38 (sequence is synthesized)
ttctccaaataaatagttactgcttctgcagttattggtgtgctccagcttctgttcccataatatagtccagtcctaagggaacacagttctaaaagaaacaacatgatcttggcagag

SEQ ID NO: 296616 - DNA, 120 bp, Artificial Sequence
  ENSG00000132275_39 (sequence is synthesized)
acaccgctcagctccaaacccaaccatttatgtaactgcacaaaactctctacagcttttcacagagaccagtaattagaacctttcatcccctggtcatcctccttcccaggtgaattc

SEQ ID NO: 296617 - DNA, 120 bp, Artificial Sequence
  ENSG00000132275_40 (sequence is synthesized)
tctgaccagccatctggttttaggatacccaactcctgcagtaactgccttactggtggtctaattgcttctactcgtgtccctaaagcaattaattttccacacagccatgtgatcttt

SEQ ID NO: 296618 - DNA, 120 bp, Artificial Sequence
  ENSG00000132275_41 (sequence is synthesized)
ttaaaatgtaaatcagcttatgtcacttctctgcttaaaatccttcaatggattctcactgcctcgagaacaaaagacaaacttttcaggccccgtgtgatcttgcccaggcctccgtca

SEQ ID NO: 296619 - DNA, 120 bp, Artificial Sequence
  ENSG00000132275_42 (sequence is synthesized)
ccatcaccatctgcatcttaacccactcctcccctttcacaaaactccagccacacagacttgctttttattcctcaagctttccaaactgtttctactgagagtctttgcacatgctcc

SEQ ID NO: 296620 - DNA, 120 bp, Artificial Sequence
  ENSG00000132275_43 (sequence is synthesized)
atcttccttgaatactctttccccagtgagctcattttcatcttcctgaattcataccactattacctttgcttctgtggaagaaactggccagatgctcacccaaatgtcctctttctg

SEQ ID NO: 296621 - DNA, 120 bp, Artificial Sequence
  ENSG00000132275_44 (sequence is synthesized)
gacacaggtaaactgcatttcccagctccatgcatctaggcctatgtgagtagttctcaacagtggaaaatgagtggaagtgatgtttcaatactagaccaaggcagttaaagggtggct

SEQ ID NO: 296622 - DNA, 120 bp, Artificial Sequence
  ENSG00000132275_45 (sequence is synthesized)
gagccatttccattattctcttcctccttcctcttcaaggtaaccttgaagcacatgttttgacggtgatggagtcatagcatagaagaagtctgaatacctgagttactatttagggca

SEQ ID NO: 296623 - DNA, 120 bp, Artificial Sequence
  ENSG00000132275_46 (sequence is synthesized)
taatagctacttgaccaaaaacatccatattggactttgaacaagaaaataaacttgattacattctgctagtgagttttgagggtgttttagcagttatcattatatacactggatata

SEQ ID NO: 296624 - DNA, 120 bp, Artificial Sequence
  ENSG00000132275_47 (sequence is synthesized)
tcttctatggtatcctgtccaccttactcttgaccacagtaccctctttgtttccttcagggtgtttcagatatttaattatcttgccagatgccagtcaacactttctttttgtcccat

SEQ ID NO: 296625 - DNA, 120 bp, Artificial Sequence
  ENSG00000132275_48 (sequence is synthesized)
gagtttaaaatcaggggaaaacatgtactcccaataggaagttgagatactcttttttttttaaatccgtcattgtgactgtgaccggaaaaacaaatcccactaaagaatgtcctaaac

SEQ ID NO: 296626 - DNA, 120 bp, Artificial Sequence
  ENSG00000132275_49 (sequence is synthesized)
agatgtttttttttgtcatataacctggagttaggtgatttggcattggttctggagctgaaggatgttagggatgaggtctctgtagttttcttgtctcatggtcacgaaatgaagtgt

SEQ ID NO: 296627 - DNA, 120 bp, Artificial Sequence
  ENSG00000132275_50 (sequence is synthesized)
tattgattaagcagggatgccctacttagtattagacttcttggaagtctccttaattgccacagcccctatctttttggcttcgtttcaagggtccttctacattgttaatactctggt

SEQ ID NO: 296628 - DNA, 120 bp, Artificial Sequence
  ENSG00000132275_51 (sequence is synthesized)
ataaatacgttccattattccctataacatgactgaaaccaatctaaagtattaacattttaaatatgtttttgggccaagtgcagtggctcttatctgtgatcccagctactaggaagg

SEQ ID NO: 296629 - DNA, 86 bp, Artificial Sequence
  ENSG00000132275_52 (sequence is synthesized)
caggctgtagtgagctatgattgtgccactgtactccggcctggataactgagatcctgtctcaataaataaataaaacaattata

SEQ ID NO: 296630 - DNA, 120 bp, Artificial Sequence
  ENSG00000132275_53 (sequence is synthesized)
gtcagggactgtgagaagccatgtggtgggtcagtcataggctcagatcagaccaatatgtgacccttgccttccactctcaggcctgcatccctagtggtggctgacttcggctgtggg

SEQ ID NO: 296631 - DNA, 120 bp, Artificial Sequence
  ENSG00000132275_54 (sequence is synthesized)
ttcaggaaggaggctttaggcacaggaacagacattttgctccccaacggaagtgggagccctgggaagctttgtgagcagaggcagtacatagagggaggtgttttaaggagttgggat

SEQ ID NO: 296632 - DNA, 120 bp, Artificial Sequence
  ENSG00000132286_0 (sequence is synthesized)
atgcgccggtggcgtgatggagcggcagcagcagcagcaacagcaactgcgaaacctgcgtgacttcctgttggtctacaatcggatgacagaactctgcttccagcgctgtgtgcccag

SEQ ID NO: 296633 - DNA, 120 bp, Artificial Sequence
  ENSG00000132286_1 (sequence is synthesized)
cttgcaccaccgagctctggacgctgaggaggaggcctgtctgcacagctgtgctgggaagctgatccattccaaccaccgcctcatggccgcttacgtgcagctcatgcctgccctggt

SEQ ID NO: 296634 - DNA, 120 bp, Artificial Sequence
  ENSG00000132286_2 (sequence is synthesized)
acagcgccgcatcgcagactacgaggctgcctcggctgtgccaggcgttgctgctgaacagcctggggtctctccatcaggcagctagccatacccaaccccaggaaggaaggccttgga

SEQ ID NO: 296635 - DNA, 120 bp, Artificial Sequence
  ENSG00000132286_3 (sequence is synthesized)
tggaccctcagattgaaggacccggtggaccttggggttggtgaatcctaaacagagagaattcgaggttgcctgaaagctgggtgtccttgctccttttcctggagccaatatacccag

SEQ ID NO: 296636 - DNA, 120 bp, Artificial Sequence
  ENSG00000132286_4 (sequence is synthesized)
tttttactcagtttgatttatattctgggcaaggaagctttgcctactttattggcacaatccgttgttctgtcgtttagtgcatatctgctggcttcagccctggcagctgagaaattg

SEQ ID NO: 296637 - DNA, 120 bp, Artificial Sequence
  ENSG00000132286_5 (sequence is synthesized)
ttttctatatgtagaaggaaaacctgagcatttgcaggcatctggttaaagcagggtctgtgtgtacaattttaaaacgggtaatatgtcatgctcttagttcatcttcacaacaaaact

SEQ ID NO: 296638 - DNA, 120 bp, Artificial Sequence
  ENSG00000132286_6 (sequence is synthesized)
atgagtaagcggtattagcctcacttaacagatgaggaagcaagattccagaaagtaccagaaggtcattttatacaacaggagattggttcctgcccagatgacagaaaatgggagctc

SEQ ID NO: 296639 - DNA, 120 bp, Artificial Sequence
  ENSG00000132286_7 (sequence is synthesized)
tgtctagttgtccttaagtctgactgacttcagtggctcataaccgtgagccaagtatttgttggttcataactgttgttttgtgaactatgtcttacatgtctagagttctgctggatc

SEQ ID NO: 296640 - DNA, 120 bp, Artificial Sequence
  ENSG00000132286_8 (sequence is synthesized)
tagggaaaggaggagctatcgaagtacaacggatcaaaaaaccacagggcttttgggcactgcctccttgggaagttagtggccacagaagagagatgaaacctgtaagaagtctggagt

SEQ ID NO: 296641 - DNA, 120 bp, Artificial Sequence
  ENSG00000132286_9 (sequence is synthesized)
cttttggaacttcagccatttccccaggttgttactttcttagtatgtacagtcttctcaggatgagcagtaaaacctttgaacaaaggtctgtgtggttgtcttcacgggcaatcagga

SEQ ID NO: 296642 - DNA, 120 bp, Artificial Sequence
  ENSG00000132286_10 (sequence is synthesized)
agggagagagctggggaccatattctgcaatgcagccaaatccgaggaagagaaactgaagggagaagtagatggcaatggttatgataaaaagggataaaactaaatcttcgggacttc

SEQ ID NO: 296643 - DNA, 120 bp, Artificial Sequence
  ENSG00000132286_11 (sequence is synthesized)
cgtctagaaactcctaaatccagctttctatcatctgccccacattggtcccattgagtacattctgtgatttctaattccagcctctccattcttttctcattattgcctcccccgccc

SEQ ID NO: 296644 - DNA, 120 bp, Artificial Sequence
  ENSG00000132286_12 (sequence is synthesized)
cccaactttgtgtaatttacttctgtattcagcagcctggatagcatatcattccatcaccccattttcttgccaccattggccatctttttgtatcattccacttattctgtcttttcc

SEQ ID NO: 296645 - DNA, 120 bp, Artificial Sequence
  ENSG00000132286_13 (sequence is synthesized)
attccttcattcaaactgctagagaaaaacagttgtgtaatgaatgccactaaatattcaaggcctccaacctcagccaagtcctcacaccaacacgcagtcacaccaacacacaccttt

SEQ ID NO: 296646 - DNA, 120 bp, Artificial Sequence
  ENSG00000132286_14 (sequence is synthesized)
atgggttcctggtccatttccttctctaattaccatggcagttattttacacctctactgctgtccttaatcccataccccaccctcatcaggtgaccctgtttccttttttagagaaat

SEQ ID NO: 296647 - DNA, 120 bp, Artificial Sequence
  ENSG00000132286_15 (sequence is synthesized)
tgaagctcttagacattggtttccacagtaataattttaaaacttcttacaactacctacaaagcagatgttctatcctatctacagagcagaaaattgaaattctcaagtagcagaccc

SEQ ID NO: 296648 - DNA, 120 bp, Artificial Sequence
  ENSG00000132286_16 (sequence is synthesized)
ggtattaaagtgcagatctgactttaaagtccatgttcattttacacagcaggctgcctcttaagatagtatttattgagcacacactttgtgtaggttctgattttggtagatgtcatg

SEQ ID NO: 296649 - DNA, 120 bp, Artificial Sequence
  ENSG00000132286_17 (sequence is synthesized)
ctttatattaatctttacaacaactataagtaagaggtattaacctcacttaacagatgaggaagcaagaatccagaatgtgccagaaggcacattctgcagatttcgtgcaaacattta

SEQ ID NO: 296650 - DNA, 120 bp, Artificial Sequence
  ENSG00000132286_18 (sequence is synthesized)
gattacaggtgtgagccaccacggccggcctatacaaagtttcttattgagaaaagtggttccaatcatgttttttgccccctttagctgctatctcttgaacagaaaagtttgttagga

SEQ ID NO: 296651 - DNA, 120 bp, Artificial Sequence
  ENSG00000132286_19 (sequence is synthesized)
cctttagctgctatctcttgaacagaaaagtttgttaggaaggtaaaagttgctgactaggaccttacccacagggtggcactctgtccttgggaaatataaatgcaagtaaaacaggtt

SEQ ID NO: 296652 - DNA, 120 bp, Artificial Sequence
  ENSG00000132286_20 (sequence is synthesized)
tgaacttcttaacttccagaagataggaggatgggacctgtgatactgtgctgctggtgggaggacccttccacatcaacatttgtgtgtatccttgcaataaacttccattgtgaatta

SEQ ID NO: 296653 - DNA, 120 bp, Artificial Sequence
  ENSG00000132286_21 (sequence is synthesized)
atgcgccggtggcgtgatggagcggcagcagcagcagcaacagcaactgcgaaacgtaagtgagaactaagtcgtttcgaggccagacgttcagctcgcattcctgcacacatcgcggga

SEQ ID NO: 296654 - DNA, 120 bp, Artificial Sequence
  ENSG00000132286_22 (sequence is synthesized)
accccacagggccagggatttgagggctggaaacttcgggctatggcgcgcgggcctgggaaactttgggcggcgcgaccttgactagaagtgtggggcccttatcgctgagtttgtggt

SEQ ID NO: 296655 - DNA, 120 bp, Artificial Sequence
  ENSG00000132294_0 (sequence is synthesized)
gtccgtcgcgccgcccggcgaggagtgggctggcggcggtagctgtcgcccgcttggttgcgtgaccgcggggtccgcgtccgctccctccacccttcgcccttcgcccttcgcctcgtt

SEQ ID NO: 296656 - DNA, 120 bp, Artificial Sequence
  ENSG00000132294_1 (sequence is synthesized)
ccggcctccgcggcccagcaacggccgtcatggtgccgtcggcgctccctgcgcggccccgctgagcctcggtgcggcggcgagcgcggtcgagatcgccatgcctacccgagtatgctg

SEQ ID NO: 296657 - DNA, 120 bp, Artificial Sequence
  ENSG00000132294_2 (sequence is synthesized)
ctgctgttccgctttgcgtcctcgctacaaacgcctggtggacaacatattccctgaagatccaaaagatggccttgtgaaaactgatatggagaaattgacattttatgcagtatctgc

SEQ ID NO: 296658 - DNA, 120 bp, Artificial Sequence
  ENSG00000132294_3 (sequence is synthesized)
tccagagaaactggatcgaattggttcttacctggcagaaaggttgagcagggatgttgtcagacatcgttctgggtatgttttgattgctatggaggcactggaccaacttctcatggc

SEQ ID NO: 296659 - DNA, 120 bp, Artificial Sequence
  ENSG00000132294_4 (sequence is synthesized)
ttgccattctcaaagcattaagccatttgtagaaagctttcttcatatggtggcaaagctgctggaatcgggggaaccaaagcttcaagttcttggaacaaattcttttgtcaaatttgc

SEQ ID NO: 296660 - DNA, 120 bp, Artificial Sequence
  ENSG00000132294_5 (sequence is synthesized)
aaatattgaagaagacacaccatcctatcacagacgttatgacttttttgtgtctcgattcagtgccatgtgccattcctgtcatagtgatccagaaatacgaacagagatacgaattgc

SEQ ID NO: 296661 - DNA, 120 bp, Artificial Sequence
  ENSG00000132294_6 (sequence is synthesized)
tggaattagaggtattcaaggtgtggttcgcaaaacagtcaacgatgaacttcgggccaccatttgggaacctcagcatatggataagattgttccatccctcctgtttaacatgcaaaa

SEQ ID NO: 296662 - DNA, 120 bp, Artificial Sequence
  ENSG00000132294_7 (sequence is synthesized)
gatagaagaagttgacagtcgcataggccctccttcttctccttctgcaactgacaaagaagagaatcctgctgtgctggctgaaaactgtttcagagaactgctgggtcgagcaacttt

SEQ ID NO: 296663 - DNA, 120 bp, Artificial Sequence
  ENSG00000132294_8 (sequence is synthesized)
tgggaatatgaataatgctgttagaccagtttttgcgcatttagatcatcacaaactgtgggatcccaatgaatttgcagttcactgctttaaaattataatgtattccattcaggctca

SEQ ID NO: 296664 - DNA, 120 bp, Artificial Sequence
  ENSG00000132294_9 (sequence is synthesized)
gtattctcaccatgtgatccaggagattctaggacaccttgatgctcgtaaaaaagatgctccccgggttcgagcaggtattattcaggttctgttagaggctgttgccattgctgctaa

SEQ ID NO: 296665 - DNA, 120 bp, Artificial Sequence
  ENSG00000132294_10 (sequence is synthesized)
aggttccataggtccgacagtgctggaagtcttcaatacccttttgaaacatctgcgtctcagcgttgaattcgaagcaaatgatttacaggggggatctgtaggcagtgtcaacttaaa

SEQ ID NO: 296666 - DNA, 120 bp, Artificial Sequence
  ENSG00000132294_11 (sequence is synthesized)
tacaagttccaaagacaatgatgagaagattgtgcagaatgctatcatccaaacaataggattttttggaagtaacctaccagattatcagaggtcagaaatcatgatgttcattatggg

SEQ ID NO: 296667 - DNA, 120 bp, Artificial Sequence
  ENSG00000132294_12 (sequence is synthesized)
gaaagtacctgtctttggaacatctacccatactttggatatcagtcaactaggggatttgggaaccaggagaattcagataatgttgctgagatctttgcttatggtgacctctggata

SEQ ID NO: 296668 - DNA, 120 bp, Artificial Sequence
  ENSG00000132294_13 (sequence is synthesized)
taaagcgaagacgattgttactgcactgccagggtctttcctggatcctttgttatcaccatctctcatggaggactacgaactgagacagttggtcttggaagtaatgcataatctcat

SEQ ID NO: 296669 - DNA, 120 bp, Artificial Sequence
  ENSG00000132294_14 (sequence is synthesized)
ggatcgtcatgacaatagggcaaagcttcgagggatcagaataataccggatgtagctgacctaaagataaaaagagaaaaaatttgcagacaagacacaagtttcatgaaaaagaatgg

SEQ ID NO: 296670 - DNA, 120 bp, Artificial Sequence
  ENSG00000132294_15 (sequence is synthesized)
gcaacagctgtatcggcacatatatttgggttgtaaagaggaagacaacgttcagaaaaactatgaactactttatacttctcttgctcttataactattgaactggctaatgaagaagt

SEQ ID NO: 296671 - DNA, 120 bp, Artificial Sequence
  ENSG00000132294_16 (sequence is synthesized)
agttattgatctcattcgactggccattgctttacaggacagtgcaattatcaatgaggataatttgccaatgttccatcgttgtggaatcatggcactggttgcagcatacctcaactt

SEQ ID NO: 296672 - DNA, 120 bp, Artificial Sequence
  ENSG00000132294_17 (sequence is synthesized)
tgtaagtcagatgatagctgtccctgcattttgccagcatgttagcaaggttattgaaattcgaactatggaagccccttattttctaccagagcatatcttcagagataagtgcatgct

SEQ ID NO: 296673 - DNA, 120 bp, Artificial Sequence
  ENSG00000132294_18 (sequence is synthesized)
tccaaaatctttagagaagcatgaaaaagatttgtactttctgaccaacaagattgcagagtcgctaggtggaagtggatatagtgttgagagattgtcagttccgtatgtaccacaagt

SEQ ID NO: 296674 - DNA, 120 bp, Artificial Sequence
  ENSG00000132294_19 (sequence is synthesized)
aacagatgaagatcgactttctagaagaaaaagcattgtggacaccgtatccattcaggtggatattttatccaacaatgttccttctgatgatgtggttagtaacactgaagaaatcac

SEQ ID NO: 296675 - DNA, 120 bp, Artificial Sequence
  ENSG00000132294_20 (sequence is synthesized)
ttttgaagcattgaagaaagcaattgataccagtggaatggaagaacaggaaaaggaaaagaggcgtcttgtgatagagaaatttcagaaagcaccttttgaagaaatagcagcacagtg

SEQ ID NO: 296676 - DNA, 120 bp, Artificial Sequence
  ENSG00000132294_21 (sequence is synthesized)
tgaatccaaagcaaatttgcttcatgatagacttgcccaaatattggaactcaccatacgtcctcctcccagtccatcaggaacactgaccattacttctgggcatgcccaataccaatc

SEQ ID NO: 296677 - DNA, 120 bp, Artificial Sequence
  ENSG00000132294_22 (sequence is synthesized)
gtgtgtgtactgatcggcgcatgaagacctcaggatatgatttgtaaagcctaaaaattaaggccaagctgagctttcagggtttacttaatgtgtattaacatacttcttgaaaataat

SEQ ID NO: 296678 - DNA, 120 bp, Artificial Sequence
  ENSG00000132294_23 (sequence is synthesized)
gatggaacatatctttaaccaaatgtttggcataccatattagaagttttggagctatatataatttcgagtactttcaaagatagatttatgccatgttaatttgctttgaggttcctg

SEQ ID NO: 296679 - DNA, 120 bp, Artificial Sequence
  ENSG00000132294_24 (sequence is synthesized)
ttgcctttttaagttgaacatgttttggtttcactttattccactgttaagtagtatgttttaaacttttcacaaatgtaatgttttttaaaaagtaagccttcagaggattgaaactgt

SEQ ID NO: 296680 - DNA, 120 bp, Artificial Sequence
  ENSG00000132294_25 (sequence is synthesized)
ataaattgtttatctcttaaacatctacacagccgcttagatgtagaatttttgttgttgttttctgcaaaggcagatacatttaaatatattcctagtcctgggactgcaaaactgttc

SEQ ID NO: 296681 - DNA, 120 bp, Artificial Sequence
  ENSG00000132294_26 (sequence is synthesized)
ggtggctttttgtccccatgctttagataagctgggataggcaccttgctattcagttactataataatatgtgataggcattcctcatcttcttcacaataataggacatctgttgaat

SEQ ID NO: 296682 - DNA, 120 bp, Artificial Sequence
  ENSG00000132294_27 (sequence is synthesized)
agcattcctcgaatataaccctaaaaacgccatactttaaattgtctggttcttgtaatattgtgtttcctgccaagagtttgaccattctgcttgagaagtgtagagcttactcttgga

SEQ ID NO: 296683 - DNA, 120 bp, Artificial Sequence
  ENSG00000132294_28 (sequence is synthesized)
gtaccaaactgtgcaatatttttacatcataagatgtattagtttacaggctgtgctttgaaattatagtagtattttgctgtggctccattaattaaatgagatatatatttagtgcag

SEQ ID NO: 296684 - DNA, 120 bp, Artificial Sequence
  ENSG00000132294_29 (sequence is synthesized)
aaaaaagacatttaaaacagctattagttcacctgtgaagagtctgtacattttgatttctattaagagcacatttatttacatttgtatattattttaaatcctcatagtcaaaaaatt

SEQ ID NO: 296685 - DNA, 120 bp, Artificial Sequence
  ENSG00000132294_30 (sequence is synthesized)
ctccagatggacttttaatttgtaagatttgaactgtgacttgtatacatctgtttagaatcaattatatttgaaaagctgcctgtgttttaacagtcaagtgtgctaaagtttgtcaat

SEQ ID NO: 296686 - DNA, 120 bp, Artificial Sequence
  ENSG00000132294_31 (sequence is synthesized)
ttaagctgcttttgatttcagctaccaagatcacaggtgcactctacacataacactgacagacccataacattacatacatcttagtgaattctatcacatggtaaaatgaacagcttt

SEQ ID NO: 296687 - DNA, 120 bp, Artificial Sequence
  ENSG00000132294_32 (sequence is synthesized)
ctttgtaactcataaaattctcttaggacatttttataaagtcacctgtttatagttctatcttttcagattccatttctttttacataaaacagcatacatatcaaaaactgtagccta

SEQ ID NO: 296688 - DNA, 120 bp, Artificial Sequence
  ENSG00000132294_33 (sequence is synthesized)
gaatacagtttaatttttggcttttgtttttgtttaaaaaattgcagtgaagaatgggatgtttgtgtttatggctatttgggcacctttagtagaaacagacaaaagtaaggaaacgat

SEQ ID NO: 296689 - DNA, 120 bp, Artificial Sequence
  ENSG00000132294_34 (sequence is synthesized)
aataggacaagcatacttgaaaatttctgaatacttaaacaaaagcgcaacatcttgaaaaccagtctagtcattgaaacctatgaaatgacactgaaagatcctgggctgcttcttaaa

SEQ ID NO: 296690 - DNA, 120 bp, Artificial Sequence
  ENSG00000132294_35 (sequence is synthesized)
taagtagatcagcaagacttgtttcagagtgacagtggagtcgttaccgctggaggactaaagggccctgtggcagctgtcactggaactttgcctcttgatcaggaaaaatgcttcacc

SEQ ID NO: 296691 - DNA, 120 bp, Artificial Sequence
  ENSG00000132294_36 (sequence is synthesized)
agtccgtaaagccaagttgtatttttttaattgcccttttttccttctgtatttttaaagaaggatgttaatttttgactatatattttaaaaaaatctaagcagggggacatgcaaaaa

SEQ ID NO: 296692 - DNA, 120 bp, Artificial Sequence
  ENSG00000132294_37 (sequence is synthesized)
caatcatcatccacttggatgtcattttatagattaacactgtgtgcttttgtatggaaaaaatatatataatttaatagtataaaaaataaaatatatattcatttgcacttacgtgaa

SEQ ID NO: 296693 - DNA, 120 bp, Artificial Sequence
  ENSG00000132294_38 (sequence is synthesized)
acacaaactttgctctacaaaatttcgtgtttcttagtgattttaaaatgcatgtattgcatgtaaaggaaaaccattacaattaatgtttatcacacctttatcttggtctttgttgat

SEQ ID NO: 296694 - DNA, 120 bp, Artificial Sequence
  ENSG00000132294_39 (sequence is synthesized)
ttgggttttgttggggtttttgttactgtttttaaattacagtaggcttctatatatcctggatttctgaactggtcttgttgacaaggattcccaagaaatggatcttttcactggctg

SEQ ID NO: 296695 - DNA, 120 bp, Artificial Sequence
  ENSG00000132294_40 (sequence is synthesized)
actctcccatatctgcaagagattctgcaggaactgggtgtgcacacggtgttgtagccagttcaggtactgaatatttaggatttggtgaagttcactgtattgctatatttttgtaga

SEQ ID NO: 296696 - DNA, 120 bp, Artificial Sequence
  ENSG00000132294_41 (sequence is synthesized)
taaataaaactcaataaattgttaatcattctctttttgctgtatagaattgcttatatcactctttctttcatgacattggttaacatttaaatgttcctcctgtacttgtgttgtctg

SEQ ID NO: 296697 - DNA, 120 bp, Artificial Sequence
  ENSG00000132294_42 (sequence is synthesized)
tgaccgcttatagagttttattgttattggtgtttacctgaatacctatgcgtacacacacacatatttccttaatacttctgaactcattatcttttagaataataatactactacact

SEQ ID NO: 296698 - DNA, 120 bp, Artificial Sequence
  ENSG00000132294_43 (sequence is synthesized)
ttaccagcaattaacttctccctacccaaaatgtttttcttcctgtctgaaaatggaactaatttgtcttattcgtgcttatatctgtattaaatgcaataaagttagtttttgaaatgt

SEQ ID NO: 296699 - DNA, 120 bp, Artificial Sequence
  ENSG00000132294_44 (sequence is synthesized)
aatgcaataaagttagtttttgaaatgtaaaaattcactgtgcaattcatatgtcagcaataaaacatagattatttgtatataagttcatttttatagctattgttacatttaattaaa

SEQ ID NO: 296700 - DNA, 120 bp, Artificial Sequence
  ENSG00000132294_45 (sequence is synthesized)
ctccgaatatctagaacaaaacaacagaagattcccaagtttaatctgacttcaactagaactatgaagctcagtagcaaaactgagggagtggaactcttgctgcttgatttccagcta

SEQ ID NO: 296701 - DNA, 120 bp, Artificial Sequence
  ENSG00000132294_46 (sequence is synthesized)
aagcctttgtattgcagagaagctaaggtgcagagaatgacgtcttttgctttcattagtcttgctgccttagacttagcaaaagaagctcatgagctaaaattagggatgaccagattc

SEQ ID NO: 296702 - DNA, 120 bp, Artificial Sequence
  ENSG00000132294_47 (sequence is synthesized)
cgtcctcgctacaaacgcctggtggacaacatattccctgaagatccaaaagtaatttgatctacatctactgatccttctctttgctgacccattctgccccccgctgacctccttaag

SEQ ID NO: 296703 - DNA, 120 bp, Artificial Sequence
  ENSG00000132294_48 (sequence is synthesized)
gtttgtcctggtgagggggcacagatgaggaccagtaaacacaatagaaagtttatttaatgtggtaggtgataagtgctatgggaaaaagaaggtagagcagggtaagggtggtcagag

SEQ ID NO: 296704 - DNA, 120 bp, Artificial Sequence
  ENSG00000132297_0 (sequence is synthesized)
gttaatctttctagctgtttaagttctttgaagtcaatttatcctgctcagaagataggtaagtagtgggccagagtatcacaagcatgctgggcttcctgtcacgtggtccttcaatga

SEQ ID NO: 296705 - DNA, 120 bp, Artificial Sequence
  ENSG00000132297_1 (sequence is synthesized)
agctgtgcatgggcctggcatgtgtcttgtccctttggaacacagtgtctggcatcaaaggagaagccaagaaagagaagggaatgacctttttacctacaacaggtaagtgggtgataa

SEQ ID NO: 296706 - DNA, 120 bp, Artificial Sequence
  ENSG00000132297_2 (sequence is synthesized)
gggctccttttcagctcacttgtctggaaataaagatgttaagaaggaaaaagatgggacattcccgggcagccctaaatcctgacttactcttgtctggccttagagaagaagagagga

SEQ ID NO: 296707 - DNA, 120 bp, Artificial Sequence
  ENSG00000132297_3 (sequence is synthesized)
aggagaagggggtggcatttcttgctacgacggagctgcccgcaaggtcaatcgatctgtccgcgcttaacctgacagagcttgtgaatgggatgctcagtagagcgttaaaagatagca

SEQ ID NO: 296708 - DNA, 120 bp, Artificial Sequence
  ENSG00000132297_4 (sequence is synthesized)
agaagttcttctccttgctgagtgtcacttcctacagttccttcgccttccacaagttttctgtagctgtttacaacatttctaacctgaagacagtagaccccgccaaattccccacaa

SEQ ID NO: 296709 - DNA, 120 bp, Artificial Sequence
  ENSG00000132297_5 (sequence is synthesized)
ggtattgctactgtttaaacaatcggaccaatgacttatcagattttacagctctactggtagatatcatcggcaattctaccagctacctcacagagatttttaagtcaacctccatcc

SEQ ID NO: 296710 - DNA, 120 bp, Artificial Sequence
  ENSG00000132297_6 (sequence is synthesized)
tctcagtgaatcaaagcaatgaatcagattgcatcttcatctgtgtgatgacaggaaagtcaggaaggaatctttctgacttctgggagatagaagaaaaatatcccattatcaattaca

SEQ ID NO: 296711 - DNA, 120 bp, Artificial Sequence
  ENSG00000132297_7 (sequence is synthesized)
catttaccagcggcttgtctggtgttctgggtgcagctaccaggggaactgccaggacttcaaagcccacaaccaaaagccagaaaacactaccaagtacaagccccggacactggaccc

SEQ ID NO: 296712 - DNA, 120 bp, Artificial Sequence
  ENSG00000132297_8 (sequence is synthesized)
agagcacaccctgggcatctgctctgagatcctctccctggacagagacagctgctccttcagaaacagaggagaccctgaacacaggcaggcctcctgagcttccagccagggccacag

SEQ ID NO: 296713 - DNA, 120 bp, Artificial Sequence
  ENSG00000132297_9 (sequence is synthesized)
tgggcttccatatcgtccgtgccctgggctcagaccatcagtgagaaaaaacctggagggtctctctgggaaactcgttcttccccaccgactactgcagggaccgaggaagccatgaac

SEQ ID NO: 296714 - DNA, 120 bp, Artificial Sequence
  ENSG00000132297_10 (sequence is synthesized)
actacaagccttttggcgcctgctgctgagataatggccacacctggcagcccatcccaggccagccctaccttgggagcattcacccatggcacacagactccgagtccaaccaaggca

SEQ ID NO: 296715 - DNA, 120 bp, Artificial Sequence
  ENSG00000132297_11 (sequence is synthesized)
acagcccccagatatccacaaacaggtgatctctctgcagagtggccattcactgctggtgaagagccagtcctggtcccaagaccccatcaagtttcaaggtgtcctcagccactcttc

SEQ ID NO: 296716 - DNA, 120 bp, Artificial Sequence
  ENSG00000132297_12 (sequence is synthesized)
aaggtgggagctatggcagctgctcctctcaccctggctattcagaggctcaacccatgcctgatggagctgtgccaattcttccagcaatgcctctgcatgagccagaggagtcccagg

SEQ ID NO: 296717 - DNA, 120 bp, Artificial Sequence
  ENSG00000132297_13 (sequence is synthesized)
acagaggacatgagttctttcataaatccctaccaatcatccaccagcaaaataagttggaaaacttaaattaaaaagcagaacctgttttatattaagaaggtctagacatggacattt

SEQ ID NO: 296718 - DNA, 120 bp, Artificial Sequence
  ENSG00000132297_14 (sequence is synthesized)
tctgtcctacaatgctgacatactgttatttcttctgggatttattcttggctgtaaacccagaactaaattacatagatgaatactcctgctccagtggcctggataccaatctctcct

SEQ ID NO: 296719 - DNA, 120 bp, Artificial Sequence
  ENSG00000132297_15 (sequence is synthesized)
gtctttaatgttattttcaaagactactctcaagatccattagcttttaaaatttctgcctctgagtctgaagcccaggtggacagccattttccatcacccctttccagctgtaatctt

SEQ ID NO: 296720 - DNA, 120 bp, Artificial Sequence
  ENSG00000132297_16 (sequence is synthesized)
tcatccccctcccccccccccccgtcagtacgaacatttcctccattcatagagggcaataagcaagacctgtagacccaaagcacaggtttattctaaagaaaacttttacgacaatac

SEQ ID NO: 296721 - DNA, 120 bp, Artificial Sequence
  ENSG00000132297_17 (sequence is synthesized)
tttctgtattgtctaggttaagcccactttaggagatcctttactcattaacttaaccaacaatgtgtattgagtctctgctgtatatctgtgatgctctgtcccaagccatggggatct

SEQ ID NO: 296722 - DNA, 120 bp, Artificial Sequence
  ENSG00000132297_18 (sequence is synthesized)
agaggtgaatcagaaatagcctcagaaactgagggtttcatagttggaaggaagaaatggtcataaacacaaatcaaaatatagtattatagatcatagaaccaagtcacgtaaccaggc

SEQ ID NO: 296723 - DNA, 120 bp, Artificial Sequence
  ENSG00000132297_19 (sequence is synthesized)
caaaagtgccttgagaatatctgcaagtctgtgtgaggccttgaaaataacactagggcataacaattacttcaggggatacgccatccaccctggctcttgtcccaagtgggctacatt

SEQ ID NO: 296724 - DNA, 120 bp, Artificial Sequence
  ENSG00000132297_20 (sequence is synthesized)
tgaagaattcacccaggctccagctagatcatcagttaatttaaagtggttattcttggaagtagcattttttttccctctcctgtgaatctgtgcaaaacattgaaggtagaagttttc

SEQ ID NO: 296725 - DNA, 120 bp, Artificial Sequence
  ENSG00000132297_21 (sequence is synthesized)
ttgttagaggcctcacaattaatacagtaatgccagactccttgcctgcttcaaaatcatggaaatctagtgttcatgctcaagaaactcctacaatgcttgaggcaatcctgacaattt

SEQ ID NO: 296726 - DNA, 120 bp, Artificial Sequence
  ENSG00000132297_22 (sequence is synthesized)
aaaaactggggatgcgtgggcactctagcctgcacaaaccagttcagccatggagactctgacacaatacctgaggtgacttaaacttgagacttttgaaagacaacaaaagcataaatt

SEQ ID NO: 296727 - DNA, 120 bp, Artificial Sequence
  ENSG00000132297_23 (sequence is synthesized)
attcacatatactgatagttaactaatacatgtacaaccaatcagacttgccatggtatgggatctatataatcttccaagcccccttaagtgggcgataatgaaaactttatcattagg

SEQ ID NO: 296728 - DNA, 120 bp, Artificial Sequence
  ENSG00000132297_24 (sequence is synthesized)
aggaggtttagagagttgtttttattgacatcttgtcttgattcctcttctgtgtgacccactggattcagaggtccccatgagcaccctcaggttcaatgattcatgagtagaactcag

SEQ ID NO: 296729 - DNA, 120 bp, Artificial Sequence
  ENSG00000132297_25 (sequence is synthesized)
aggtagggaaaactgttatatgcacatttagcatttattacaacaaaaggatgcagatgaaaagcagcaaatgtgaaaggcacctctagagagagtccaagagagcccaggcacaagctt

SEQ ID NO: 296730 - DNA, 120 bp, Artificial Sequence
  ENSG00000132297_26 (sequence is synthesized)
ccagtggggttgcacagtcagcatctaatcctcccagaaataatgtttaacaacacgtggagtattgtcagccaggaaagctcatccaagttttggtgtccaggggatgtttgggggtat

SEQ ID NO: 296731 - DNA, 120 bp, Artificial Sequence
  ENSG00000132297_27 (sequence is synthesized)
ggagtaggtatggagtgccttcatggcctgcatggctaaacttagttattcagtctccagtccctctagaggtcaagctgatactgcacgacctaaggccccaccataaatcacattgtt

SEQ ID NO: 296732 - DNA, 120 bp, Artificial Sequence
  ENSG00000132297_28 (sequence is synthesized)
aacataaactatctgtcatggcacgaagccccaggtacaagagacactcatcaggcaggatattccaaggatttacaggggattccccaggagctggtcaaggaccagatgttcctctga

SEQ ID NO: 296733 - DNA, 120 bp, Artificial Sequence
  ENSG00000132297_29 (sequence is synthesized)
aaggtgcaggatttgagctcatctgtggagtacgtctgtggagtcaactttcttctgcatccccacatactgatttgccaccttcattgtatcagattcctttttcactatattcaggtt

SEQ ID NO: 296734 - DNA, 120 bp, Artificial Sequence
  ENSG00000132297_30 (sequence is synthesized)
tgcggttgctccagtatccctatctatgctgagtctccacgtagagcatgtgtgccctctccagtggctctgcacggaccccttatttctcattaccagggacagtttttctcctgatgt

SEQ ID NO: 296735 - DNA, 120 bp, Artificial Sequence
  ENSG00000132297_31 (sequence is synthesized)
gcctggtgctccttctccactctcttgccttaggactctgctgggccatgagtattttttttacccttttgtgacctagggctgcccttgggtgaggaaagtcactttctgttcatcatc

SEQ ID NO: 296736 - DNA, 120 bp, Artificial Sequence
  ENSG00000132297_32 (sequence is synthesized)
taagtagaaaacagtttctgccattggaagacccctgagttccctggcactcctgtgaaccacaaggtgcctggggaggtagaacttggacattggagagaggagcagccagacatttct

SEQ ID NO: 296737 - DNA, 120 bp, Artificial Sequence
  ENSG00000132297_33 (sequence is synthesized)
ctttctaatcatatgcagaaagatttctttttattctccagaacacttgaaagactctccaagttatgcaaatgtcaagctcataaatgtatattatcatgacttttgcaaagatgaaga

SEQ ID NO: 296738 - DNA, 120 bp, Artificial Sequence
  ENSG00000132297_34 (sequence is synthesized)
ggatacagcaaattttctgggaggcaaagggacttctacctggataggaaccaagcaaactcattaagcatggattaatttgattcaacccttgcgtggatattaattaaggacctttga

SEQ ID NO: 296739 - DNA, 120 bp, Artificial Sequence
  ENSG00000132297_35 (sequence is synthesized)
caggagagggtcctcaaggttcctcaaagagtaacttatcatcaaggaaggtgaagaatggatggatggcttgggcccaagactggggctattcacttgtggggaaacccatgtgaaccc

SEQ ID NO: 296740 - DNA, 120 bp, Artificial Sequence
  ENSG00000132297_36 (sequence is synthesized)
agttaccccatactttgggaataatgactgagcatgactataatctttaagaagctcaaatgcggaatacctctgaggcttatgcaaggatctggcctagcatcaaggacaaaggctcag

SEQ ID NO: 296741 - DNA, 120 bp, Artificial Sequence
  ENSG00000132297_37 (sequence is synthesized)
aggactccttggggccagttttctacagtcataccatcagccacaacagcagcaaaggcagaaggaaaacagggcccaggagtggctgacgactgcctggagtccaactggtctcctgga

SEQ ID NO: 296742 - DNA, 120 bp, Artificial Sequence
  ENSG00000132297_38 (sequence is synthesized)
gttcataagaggtttgaccccttctgagctgaatgtgtcctgatttaggggatagctagggcaataagaaagcctcagggggtgctactgatctggaactcctactaattagtgtgtatg

SEQ ID NO: 296743 - DNA, 120 bp, Artificial Sequence
  ENSG00000132297_39 (sequence is synthesized)
tatgtggccaccagtggttagcagatgaggtgaaagagatgggacagtgactgtatctgttctgatgaaggagattgtgcagttacatgcgtaacgtcattaaacttcattcttccaggt

SEQ ID NO: 296744 - DNA, 120 bp, Artificial Sequence
  ENSG00000132297_40 (sequence is synthesized)
tctcttcacacggacgcacatgaaatttagttgtatccataaggcatatggaggagactaattcctcttccaaagacatgtaccagagtcctggagaggctgagggctggaggtggaaga

SEQ ID NO: 296745 - DNA, 120 bp, Artificial Sequence
  ENSG00000132297_41 (sequence is synthesized)
aagaaaggctctgacaggggtcagaatctgttcaggaaacatagcaaatgcctgatacttttaattagagaaaggtttgaatctccacattcatatatttgcagtccagtgacctttcag

SEQ ID NO: 296746 - DNA, 120 bp, Artificial Sequence
  ENSG00000132300_0 (sequence is synthesized)
agagaaatcaaagatggcggttgtatctgctgttcgctggctgggcctccgcagcaggcttggccagccgctgacgggtcggcgggcgggtttgtgtgaacaggcacgcagctgcagatt

SEQ ID NO: 296747 - DNA, 120 bp, Artificial Sequence
  ENSG00000132300_1 (sequence is synthesized)
ttattctggtagtgcaaccctctcaaaggttgaaggaactgatgtaacagggattgaagaagtagtaattccaaaaaagaaaacttgggataaagtagccgttcttcaggcacttgcatc

SEQ ID NO: 296748 - DNA, 120 bp, Artificial Sequence
  ENSG00000132300_2 (sequence is synthesized)
cacagtaaacagggataccacagctgtgccttatgtgtttcaagatgatccttaccttatgccagcatcatctttggaatctcgttcatttttactggcaaagaaatccggggagaatgt

SEQ ID NO: 296749 - DNA, 120 bp, Artificial Sequence
  ENSG00000132300_3 (sequence is synthesized)
ggccaagtttattattaattcataccccaaatattttcagaaggacatagctgaacctcatataccgtgtttaatgcctgagtactttgaacctcagatcaaagacataagtgaagccgc

SEQ ID NO: 296750 - DNA, 120 bp, Artificial Sequence
  ENSG00000132300_4 (sequence is synthesized)
cctgaaggaacgaattgagctcagaaaagtcaaagcctctgtggacatgtttgatcagcttttgcaagcaggaaccactgtgtctcttgaaacaacaaatagtctcttggatttattgtg

SEQ ID NO: 296751 - DNA, 120 bp, Artificial Sequence
  ENSG00000132300_5 (sequence is synthesized)
ttactatggtgaccaggagccctcaactgattaccattttcaacaaactggacagtcagaagcattggaagaggaaaatgatgagacatctaggaggaaagctggtcatcagtttggagt

SEQ ID NO: 296752 - DNA, 120 bp, Artificial Sequence
  ENSG00000132300_6 (sequence is synthesized)
tacatggcgagcaaaaaacaacgctgagagaatcttttctctaatgccagagaaaaatgaacattcctattgcacaatgatccgaggaatggtgaagcaccgagcttatgagcaggcatt

SEQ ID NO: 296753 - DNA, 120 bp, Artificial Sequence
  ENSG00000132300_7 (sequence is synthesized)
aaacttgtacactgagttactaaacaacagactccatgctgatgtatacacatttaatgcattgattgaagcaacagtatgtgcgataaatgagaaatttgaggaaaaatggagtaaaat

SEQ ID NO: 296754 - DNA, 120 bp, Artificial Sequence
  ENSG00000132300_8 (sequence is synthesized)
actggagctgctaagacacatggttgcacagaaggtgaaaccaaatcttcagacttttaataccattctgaaatgtctccgaagatttcatgtgtttgcaagatcgccagccttacaggt

SEQ ID NO: 296755 - DNA, 120 bp, Artificial Sequence
  ENSG00000132300_9 (sequence is synthesized)
tttacgtgaaatgaaagccattggaatagaaccctcgcttgcaacatatcaccatattattcgcctgtttgatcaacctggagaccctttaaagagatcatccttcatcatttatgatat

SEQ ID NO: 296756 - DNA, 120 bp, Artificial Sequence
  ENSG00000132300_10 (sequence is synthesized)
aatgaatgaattaatgggaaagagattttctccaaaggacccggatgatgataagttttttcagtcagccatgagcatatgctcatctctcagagatctagaacttgcctaccaagtaca

SEQ ID NO: 296757 - DNA, 120 bp, Artificial Sequence
  ENSG00000132300_11 (sequence is synthesized)
tggccttttaaaaaccggagacaactggaaattcattggacctgatcaacatcgtaatttctattattccaagttcttcgatttgatttgtctaatggaacaaattgatgttaccttgaa

SEQ ID NO: 296758 - DNA, 120 bp, Artificial Sequence
  ENSG00000132300_12 (sequence is synthesized)
gtggtatgaggacctgataccttcagcctactttccccactcccaaacaatgatacatcttctccaagcattggatgtggccaatcggctagaagtgattcctaaaatttggaaagatag

SEQ ID NO: 296759 - DNA, 120 bp, Artificial Sequence
  ENSG00000132300_13 (sequence is synthesized)
taaagaatatggtcatactttccgcagtgacctgagagaagagatcctgatgctcatggcaagggacaagcacccaccagagcttcaggtggcatttgctgactgtgctgctgatatcaa

SEQ ID NO: 296760 - DNA, 120 bp, Artificial Sequence
  ENSG00000132300_14 (sequence is synthesized)
atctgcgtatgaaagccaacccatcagacagactgctcaggattggccagccacctctctcaactgtatagctatcctctttttaagggctgggagaactcaggaagcctggaaaatgtt

SEQ ID NO: 296761 - DNA, 120 bp, Artificial Sequence
  ENSG00000132300_15 (sequence is synthesized)
ggggcttttcaggaagcataataagattcctagaagtgagttgctgaatgagcttatggacagtgcaaaagtgtctaacagcccttcccaggccattgaagtagtagagctggcaagtgc

SEQ ID NO: 296762 - DNA, 120 bp, Artificial Sequence
  ENSG00000132300_16 (sequence is synthesized)
cttcagcttacctatttgtgagggcctcacccagagagtaatgagtgattttgcaatcaaccaggaacaaaaggaagccctaagtaatctaactgcattgaccagtgacagtgatactga

SEQ ID NO: 296763 - DNA, 120 bp, Artificial Sequence
  ENSG00000132300_17 (sequence is synthesized)
cagcagcagtgacagcgacagtgacaccagtgaaggcaaatgaaagtggagattcaggagcagcaatgggtctcaccatagctgctggaatcacacctgagaactgagatataccaatat

SEQ ID NO: 296764 - DNA, 120 bp, Artificial Sequence
  ENSG00000132300_18 (sequence is synthesized)
ttaacattgttacaaagaagaaaagatacagatttggtgaatttgttactgtgaggtacagtcagtacacagctgacttatgtagatttaagctgctaatatgctacttaaccatctatt

SEQ ID NO: 296765 - DNA, 120 bp, Artificial Sequence
  ENSG00000132300_19 (sequence is synthesized)
aatgcaccattaaaggcttagcatttaagtagcaacattgcggttttcagacacatggtgaggtccatggctcttgtcatcaggataagcctgcacacctagagtgtcggtgagctgacc

SEQ ID NO: 296766 - DNA, 120 bp, Artificial Sequence
  ENSG00000132300_20 (sequence is synthesized)
tcacgatgctgtcctcgtgcgattgccctctcctgctgctggacttctgcctttgttggcctgatgtgctgctgtgatgctggtccttcatcttaggtgttcatgcagttctaacacagt

SEQ ID NO: 296767 - DNA, 120 bp, Artificial Sequence
  ENSG00000132300_21 (sequence is synthesized)
tggggttgggtcaatagtttcccaatttcaggatatttcgatgtcagaaataacgcatcttaggaatgactaaacaagataatggcagtttaggctgcacaactggtaaaatgactgtag

SEQ ID NO: 296768 - DNA, 120 bp, Artificial Sequence
  ENSG00000132300_22 (sequence is synthesized)
ataaatgttgtaattagtgtacacgtttgtatttttgttaatatagccgctgccatagttttctaacttgaacagccatgaatgtttcatgtctccctttttttttgtctatagctgtta

SEQ ID NO: 296769 - DNA, 120 bp, Artificial Sequence
  ENSG00000132300_23 (sequence is synthesized)
cctattttagtggttgaaatgagagctagtgatgacagaaggatgtggaatgtcttcttgacatcattgtgtattgctggtaatcaagttggtaacgactacttctagcagctcttacca

SEQ ID NO: 296770 - DNA, 120 bp, Artificial Sequence
  ENSG00000132300_24 (sequence is synthesized)
ctatgacttaagtggtcctggaaggcagtaagtggaggtttgcagcattcctgccttcatgagggcttctaccactgaccactttgcacgtacctggctcccagatttacttaggtaccc

SEQ ID NO: 296771 - DNA, 120 bp, Artificial Sequence
  ENSG00000132300_25 (sequence is synthesized)
cacgagttgtccacataagcagcttcatctttaccttgccagagttgacaattatgggatactctagtctacttatacttgtgttcccatctgtctgccatcctctgaaggccgggaccc

SEQ ID NO: 296772 - DNA, 120 bp, Artificial Sequence
  ENSG00000132300_26 (sequence is synthesized)
agtcatacatccttagaaaccaaagtatggtttttgttttctcttggaatgtcaggtcttaaggcatttaattgagggacaaaaaaaaaaaaagccgatatagtagctagctacttaagc

SEQ ID NO: 296773 - DNA, 120 bp, Artificial Sequence
  ENSG00000132300_27 (sequence is synthesized)
caaggagagccttggccacctgaaatgttaactcggtcccttcctgtctctagttcatcagcacctgcagatgcctgactcttgttagccttactattcaatacagtccttagattcacg

SEQ ID NO: 296774 - DNA, 120 bp, Artificial Sequence
  ENSG00000132300_28 (sequence is synthesized)
gtatgcctcttcctatccaggcacctattctgaatcaccatgttgctctgcagctagagttgataggagaaaatccatttgggtagatggcctatgaatttgtagtagactttcaaaatg

SEQ ID NO: 296775 - DNA, 120 bp, Artificial Sequence
  ENSG00000132300_29 (sequence is synthesized)
agtgatttgttagcttggtacttttaagtttgtggtacagatcctccaaacccatactctgagcaattaactgccttgaacatagagaaaaattaaggcctcacaggatgagtctccatt

SEQ ID NO: 296776 - DNA, 120 bp, Artificial Sequence
  ENSG00000132300_30 (sequence is synthesized)
ctctgtaaatgcttattttatcatagtctttagcctctactatgagtaaaatgttctcttcggccgggtgtggtgactcacacctgtaacctcagcactttgggaggcagaggtgggagg

SEQ ID NO: 296777 - DNA, 120 bp, Artificial Sequence
  ENSG00000132300_31 (sequence is synthesized)
cgagactagcctgggcaacatagtgagacaccggatctacaaaaaaataaaaagccagactggtggtatgtatctgtgtcccagctaattgggagggtgagttgggaggattgtttgagc

SEQ ID NO: 296778 - DNA, 69 bp, Artificial Sequence
  ENSG00000132300_32 (sequence is synthesized)
tggtggtatgtatctgtgtcccagctaattgggagggtgagttgggaggattgtttgagcctaggagag

SEQ ID NO: 296779 - DNA, 83 bp, Artificial Sequence
  ENSG00000132300_33 (sequence is synthesized)
agcacttagggtgccaatgtggattgtgagacccccctccctacaaaagattttaataattagttgggcgtagtggtgcatgc

SEQ ID NO: 296780 - DNA, 120 bp, Artificial Sequence
  ENSG00000132300_34 (sequence is synthesized)
atgcctgtaatcccagctactctggagacaggtggaggggattgcttgagcctgggaagctgaggctgcagtagccatgactgcaccactgcattccagcctggttgacagagtgaccct

SEQ ID NO: 296781 - DNA, 120 bp, Artificial Sequence
  ENSG00000132300_35 (sequence is synthesized)
accactgcattccagcctggttgacagagtgacccttgtctccaagaaaaaaaaaaagcaaatgggattaaggactcatggaatgggaaggggaaggggagtcttactatatgtggaata

SEQ ID NO: 296782 - DNA, 120 bp, Artificial Sequence
  ENSG00000132300_36 (sequence is synthesized)
aacttgctcagtgttgccacagagttacattaccaatgtgtagaagtcagaaactagacttctagtttggttcaacatttgagggttgttttatagccatcaaagtattcaagaggttgg

SEQ ID NO: 296783 - DNA, 120 bp, Artificial Sequence
  ENSG00000132300_37 (sequence is synthesized)
atggcactcaaaagattctacatgtctagaatcaaactcaaatctggcacgtaggtgcttcttagtaaatgcttaatgaatgccaccaactctgcaaagtattcattgattttgagacct

SEQ ID NO: 296784 - DNA, 120 bp, Artificial Sequence
  ENSG00000132300_38 (sequence is synthesized)
tagtcatgttgctactaaaagtagggcatatgaccgcctaagaaacagaacttcgagaagtcctaacgtaaccacagtaaagcagactcccctttcagcaacctcaaagcaaaaaaaaaa

SEQ ID NO: 296785 - DNA, 120 bp, Artificial Sequence
  ENSG00000132300_39 (sequence is synthesized)
aaaaaaaaaccagttagctgctatataaacactataccaagcactaggcttagaggaaaagatgtcagattgtactgtcactggctatgtacccatattctctaagacagggtagcattt

SEQ ID NO: 296786 - DNA, 120 bp, Artificial Sequence
  ENSG00000132300_40 (sequence is synthesized)
gtctttcaaactgcagggtttgaaatcagtttttgtgggtgattgcaattttttaatgaaatgcattagaacatctaagcacgtcacctacagttttgtgatggtgcatttttgcattgc

SEQ ID NO: 296787 - DNA, 120 bp, Artificial Sequence
  ENSG00000132300_41 (sequence is synthesized)
agtatagatctgtgcatagatatatgcattaagtgtagcaaatcgtgatgtaaattttttactgctggtcatggtcaaaaagtaagatacgctaggaaattgagtcactaggagcatgga

SEQ ID NO: 296788 - DNA, 120 bp, Artificial Sequence
  ENSG00000132300_42 (sequence is synthesized)
tgtataaggcaggttttatacaaccatttagattcaacattaatggtagagtggcattttaccaaaaaaatgggtgtatttgatttgggtgctgtaaggcaatttgctaggacatgggat

SEQ ID NO: 296789 - DNA, 120 bp, Artificial Sequence
  ENSG00000132300_43 (sequence is synthesized)
tgctaggacatgggataatcagattacacaaaatctaggcagtgaacaagtcttcatcctggcccaggaaatagcctattaaaaaatgctgtccaggccaggcacagtggctcacacctg

SEQ ID NO: 296790 - DNA, 87 bp, Artificial Sequence
  ENSG00000132300_44 (sequence is synthesized)
ctgagcaacacagtgaaaacccattccagctgtggactttcaggattcaggactgctggggatcaagcccaaggatgtttttcagag

SEQ ID NO: 296791 - DNA, 120 bp, Artificial Sequence
  ENSG00000132300_45 (sequence is synthesized)
caggactgctggggatcaagcccaaggatgtttttcagagctctgtgatttaagatgctcgaaaagagtgtccaagaggagtaaaggtcatgacagaatttactcccaggacaatctaag

SEQ ID NO: 296792 - DNA, 120 bp, Artificial Sequence
  ENSG00000132300_46 (sequence is synthesized)
ttctgccacaagtacccgtggtgtctgttcccacaacaatggccctttcacaagctcttgcctcacaacccctgcagaagtccttcaacaaaactaataatagactagtgaaacctactc

SEQ ID NO: 296793 - DNA, 120 bp, Artificial Sequence
  ENSG00000132300_47 (sequence is synthesized)
ctcacatgggtaagagttgcagtgggcaggtgaccctcctccctgcccccatcctttgcttcctcaagctccctgccaacctctggatacatcaatgggaaggaaaccagggaagcatag

SEQ ID NO: 296794 - DNA, 120 bp, Artificial Sequence
  ENSG00000132300_48 (sequence is synthesized)
acctatagtacaacaggggtgtagtgaccactggacctgatgaagcgaatctgcctgaaatttaatacgcctttttatttcccttctgtgttaaatcaaatgatctgttctgcactgagc

SEQ ID NO: 296795 - DNA, 120 bp, Artificial Sequence
  ENSG00000132300_49 (sequence is synthesized)
caagcaagttacttttaaaactggtggcaccactcatttgggacttggagactgcttttatccagaacctgttaagagaacaggggatttaaatacaaaggaatatgaaggtggtgtgcc

SEQ ID NO: 296796 - DNA, 120 bp, Artificial Sequence
  ENSG00000132300_50 (sequence is synthesized)
ttaaagacagtctaaaattaggttttagtttgttacattattttgaaatattaaacatgaaaatgttaaatcaggatgtgtgagttttaagatgttgaacactgtcctacatcagtgagg

SEQ ID NO: 296797 - DNA, 120 bp, Artificial Sequence
  ENSG00000132300_51 (sequence is synthesized)
agggaggcaataaagtaatttcagagtaaaacagattgaggatgaaaccaagacagaagtgatgatttggctttttatgatttttgctgtggaaatggcagtcgtgtgacttttcacttg

SEQ ID NO: 296798 - DNA, 120 bp, Artificial Sequence
  ENSG00000132300_52 (sequence is synthesized)
cagtttaaatgaaagggtgaagagaagcctacctgccctaatggctcagggctatatccacctcccggataaccctggcccttgggactccatcatctccttgaagtagcactgagaatc

SEQ ID NO: 296799 - DNA, 120 bp, Artificial Sequence
  ENSG00000132300_53 (sequence is synthesized)
caagaagaggctccgctgctttttgcacatgttactgagttacatctcaggaagatttttaagcacgaggaaggaaaatacaggcctggccaagcagggtccccttttcggtatcatctt

SEQ ID NO: 296800 - DNA, 120 bp, Artificial Sequence
  ENSG00000132300_54 (sequence is synthesized)
tgttcctaataagcaatcaaggggggtgggtgtgttggctggtaaaggaactactaagattcagaagcttgtagtcttcattattttgttttacaggttaaaataaaccacttgactggg

SEQ ID NO: 296801 - DNA, 120 bp, Artificial Sequence
  ENSG00000132300_55 (sequence is synthesized)
aggacaaaaaatggaaaggtggagaatagtgagtgaatgagcaatgagatttacttaaaagaacaattgaaagagattttgaattagtgtgggttactatttacgtggttaataatacat

SEQ ID NO: 296802 - DNA, 120 bp, Artificial Sequence
  ENSG00000132300_56 (sequence is synthesized)
ggttatacatgaacatcatcattagaataatttttttcaaggaagttctctcatatgattcaagagcagacagttactgtctttattatctctaatgaggtaaaaataaagtaaatggtg

SEQ ID NO: 296803 - DNA, 120 bp, Artificial Sequence
  ENSG00000132300_57 (sequence is synthesized)
aagcccctctaataacatgggctttgaagtgggcccaagttatatgattcatatattttgagtaagagttacaggtcctgctgtacttactctgctttgatggctgcgtgctttatattt

SEQ ID NO: 296804 - DNA, 120 bp, Artificial Sequence
  ENSG00000132300_58 (sequence is synthesized)
cacataacacgtatttgattcgggaacttgcaaataccaactaaaaagcaaacttttggaagaagacagtatgcatgatgtagttgagataaggcatagttctctcaaaccatacgctga

SEQ ID NO: 296805 - DNA, 120 bp, Artificial Sequence
  ENSG00000132300_59 (sequence is synthesized)
atgaatttaagaaggcagcatgttaacagatgtgtgagaattgttttctgtgtatccaaatccttgtttcacattgaatgtttttaaaatgaatttgaaattcagtatctattcaccatg

SEQ ID NO: 296806 - DNA, 120 bp, Artificial Sequence
  ENSG00000132300_60 (sequence is synthesized)
acctaagagtatacagaggaaacagttagaaatgaccagttgagggtagggtgtttaattgagaagtcagcacacactggcagctcttaaaccaaatattggctcgtttaacttgaaact

SEQ ID NO: 296807 - DNA, 120 bp, Artificial Sequence
  ENSG00000132300_61 (sequence is synthesized)
gtaagtattttgaaattctttgtaacatataatatgctataatttcaacccttatttcccctgttgttagacatagggactttagactaaacatactttttgccttcatcacagttccaa

SEQ ID NO: 296808 - DNA, 120 bp, Artificial Sequence
  ENSG00000132300_62 (sequence is synthesized)
gtaatatttgccatggtctttctgagaaagccaaaattgtggtacattcctgcctctcttaagtttttatgttcttagctttatcttgcatgttaccagttttgttggcaggatttttgt

SEQ ID NO: 296809 - DNA, 120 bp, Artificial Sequence
  ENSG00000132300_63 (sequence is synthesized)
ccttgagttctctgaggacagagactgtgccagccagaggtttcagggctacataagcaaagagctttaaattattcttgtgcttacataatatgttggaaattttctttccatgtttgg

SEQ ID NO: 296810 - DNA, 120 bp, Artificial Sequence
  ENSG00000132300_64 (sequence is synthesized)
ggcctccgaaccactgtgtctcttgaaacaacaaatagtctcttggatttattgtgttactatggtgaccaggagccctcaactgattaccattttcaacaaactggacagtcagaagca

SEQ ID NO: 296811 - DNA, 120 bp, Artificial Sequence
  ENSG00000132300_65 (sequence is synthesized)
taataagtatttggactttcaaaaagtgatacagtctttgtgatagttttttacctttacattaatgagttggaaaataactttgttcaaaggaatagaaatgcatattttgcttaaata

SEQ ID NO: 296812 - DNA, 120 bp, Artificial Sequence
  ENSG00000132300_66 (sequence is synthesized)
ttaacaatatgtttttaattcagtgtgtctcagtaaactatgttttggattgctgtgtttttacctcattgtttattttttctgtctacctggtaatttgagaaccctcgcttgcaacat

SEQ ID NO: 296813 - DNA, 120 bp, Artificial Sequence
  ENSG00000132300_67 (sequence is synthesized)
aagtgggaggctgttgatgtcccttcatacctcacctctggtttcaggcaacatgccaatgatctaataggacatgttaattgagcacttaggaattaaagcagtggtaaaactgccaga

SEQ ID NO: 296814 - DNA, 120 bp, Artificial Sequence
  ENSG00000132300_68 (sequence is synthesized)
tttgaaagactagtttgtgtcctttaagggtttttttttttttttttttgcaacactgtaaaatccacatatctttttcctctaccccctctcattttacattttcaaattgttatagca

SEQ ID NO: 296815 - DNA, 120 bp, Artificial Sequence
  ENSG00000132300_69 (sequence is synthesized)
gggtgagccctgaagatttcctttcacctcccttgcttttgtattcaaagatgaagatactggaacctagagatactccctaaatgggtttgcttttaggcagataagaacatgaattta

SEQ ID NO: 296816 - DNA, 120 bp, Artificial Sequence
  ENSG00000132300_70 (sequence is synthesized)
agtgattgctttgagttagctagttttaaattcatgacattttcccaacataattaggtatttgaacctaagtgtgtgctagtgtattgtatatttttcattaattactttattgaaagt

SEQ ID NO: 296817 - DNA, 120 bp, Artificial Sequence
  ENSG00000132300_71 (sequence is synthesized)
ccacatttgggcactcttctgttaggcaagcataccgtcaactccctactatccagggcatcctgaggcaagcagttttttatctgtgttgacggatcatcatacattggggctacattg

SEQ ID NO: 296818 - DNA, 120 bp, Artificial Sequence
  ENSG00000132300_72 (sequence is synthesized)
aatagatcatcatgaagtcatactgaatgaatgttgataatccatttggccctttagactttctaacctcactggaaacaagtaaaaataaatgttagacttcatctttgtctccagaaa

SEQ ID NO: 296819 - DNA, 120 bp, Artificial Sequence
  ENSG00000132305_0 (sequence is synthesized)
aattctctttaagagtcacagctgtccattttccacgtgcggctgaagaatggatttcagagcgctctccctccggcagtgttcacctagtaaccccttccggataaggacctgcagccc

SEQ ID NO: 296820 - DNA, 120 bp, Artificial Sequence
  ENSG00000132305_1 (sequence is synthesized)
gggcgcgacccggaaagggaatccgcccttttcgcctccttcgcgccaatcgcctggagttggcgtttccgcagccgggacacagcccaccctctaagagccgcggagtcggggacggta

SEQ ID NO: 296821 - DNA, 120 bp, Artificial Sequence
  ENSG00000132305_2 (sequence is synthesized)
gaaggggccgcgcgtgcgcagtggcgtccgctgtgcttccggtgcgccgggcgcggacgcgggcacgcacacacgcaagcacgcctccacttaactcgcgccgccgcggcagctcgagtc

SEQ ID NO: 296822 - DNA, 120 bp, Artificial Sequence
  ENSG00000132305_3 (sequence is synthesized)
caccagcagcgccgtccgcttgaccgagatgctgcgggcctgtcagttatcgggtgtgaccgccgccgcccagagttgtctctgtgggaagtttgtcctccgtccattgcgaccatgccg

SEQ ID NO: 296823 - DNA, 120 bp, Artificial Sequence
  ENSG00000132305_4 (sequence is synthesized)
cagatactctacttcaggcagctctgggttgactactggcaaaattgctggagctggccttttgtttgttggtggaggtattggtggcactatcctatatgccaaatgggattcccattt

SEQ ID NO: 296824 - DNA, 120 bp, Artificial Sequence
  ENSG00000132305_5 (sequence is synthesized)
ccgggaaagtgtagagaaaaccataccttactcagacaaactcttcgagatggttcttggtcctgcagcttataatgttccattgccaaagaaatcgattcagtcgggtccactaaaaat

SEQ ID NO: 296825 - DNA, 120 bp, Artificial Sequence
  ENSG00000132305_6 (sequence is synthesized)
ctctagtgtatcagaagtaatgaaagaatctaaacagcctgcctcacaactccaaaaacaaaagggagatactccagcttcagcaacagcacctacagaagcggctcaaattatttctgc

SEQ ID NO: 296826 - DNA, 120 bp, Artificial Sequence
  ENSG00000132305_7 (sequence is synthesized)
agcaggtgataccctgtcggtcccagcccctgcagttcagcctgaggaatctttaaaaactgatcaccctgaaattggtgaaggaaaacccacacctgcactttcagaagaagcatcctc

SEQ ID NO: 296827 - DNA, 120 bp, Artificial Sequence
  ENSG00000132305_8 (sequence is synthesized)
atcttctataagggagcgaccacctgaagaagttgcagctcgccttgcacaacaggaaaaacaagaacaagttaaaattgagtctctagccaagagcttagaagatgctctgaggcaaac

SEQ ID NO: 296828 - DNA, 120 bp, Artificial Sequence
  ENSG00000132305_9 (sequence is synthesized)
tgcaagtgtcactctgcaggctattgcagctcagaatgctgcggtccaggctgtcaatgcacactccaacatattgaaagccgccatggacaattctgagattgcaggcgagaagaaatc

SEQ ID NO: 296829 - DNA, 120 bp, Artificial Sequence
  ENSG00000132305_10 (sequence is synthesized)
tgctcagtggcgcacagtggagggtgcattgaaggaacgcagaaaggcagtagatgaagctgccgatgcccttctcaaagccaaagaagagttagagaagatgaaaagtgtgattgaaaa

SEQ ID NO: 296830 - DNA, 120 bp, Artificial Sequence
  ENSG00000132305_11 (sequence is synthesized)
tgcaaagaaaaaagaggttgctggggccaagcctcatataactgctgcagagggtaaacttcacaacatgatagttgatctggataatgtggtcaaaaaggtccaagcagctcagtctga

SEQ ID NO: 296831 - DNA, 120 bp, Artificial Sequence
  ENSG00000132305_12 (sequence is synthesized)
gctaaggttgtatctcagtatcatgagctggtggtccaagctcgggatgactttaaacgagagctggacagtattactccagaagtccttcctgggtggaaaggaatgagtgtttcagac

SEQ ID NO: 296832 - DNA, 120 bp, Artificial Sequence
  ENSG00000132305_13 (sequence is synthesized)
ttagctgacaagctctctactgatgatctgaactccctcattgctcatgcacatcgtcgtattgatcagctgaacagagagctggcagaacagaaggccaccgaaaagcagcacatcacg

SEQ ID NO: 296833 - DNA, 120 bp, Artificial Sequence
  ENSG00000132305_14 (sequence is synthesized)
ttagccttggagaaacaaaagctggaagaaaagcgggcatttgactctgcagtagcaaaagcattagaacatcacagaagtgaaatacaggctgaacaggacagaaagatagaagaagtc

SEQ ID NO: 296834 - DNA, 120 bp, Artificial Sequence
  ENSG00000132305_15 (sequence is synthesized)
agagatgccatggaaaatgaaatgagaacccagcttcgccgacaggcagctgcccacactgatcacttgcgagatgtccttagggtacaagaacaggaattgaagtctgaatttgagcag

SEQ ID NO: 296835 - DNA, 120 bp, Artificial Sequence
  ENSG00000132305_16 (sequence is synthesized)
aacctgtctgagaaactctctgaacaagaattacaatttcgtcgtctcagtcaagagcaagttgacaactttactctggatataaatactgcctatgccagactcagaggaatcgaacag

SEQ ID NO: 296836 - DNA, 120 bp, Artificial Sequence
  ENSG00000132305_17 (sequence is synthesized)
gctgttcagagccatgcagttgctgaagaggaagccagaaaagcccaccaactctggctttcagtggaggcattaaagtacagcatgaagacctcatctgcagaaacacctactatcccg

SEQ ID NO: 296837 - DNA, 120 bp, Artificial Sequence
  ENSG00000132305_18 (sequence is synthesized)
ctgggtagtgcagttgaggccatcaaagccaactgttctgataatgaattcacccaagctttaaccgcagctatccctccagagtccctgacccgtggggtgtacagtgaagagaccctt

SEQ ID NO: 296838 - DNA, 120 bp, Artificial Sequence
  ENSG00000132305_19 (sequence is synthesized)
agagcccgtttctatgctgttcaaaaactggcccgaagggtagcaatgattgatgaaaccagaaatagcttgtaccagtacttcctctcctacctacagtccctgctcctattcccacct

SEQ ID NO: 296839 - DNA, 120 bp, Artificial Sequence
  ENSG00000132305_20 (sequence is synthesized)
cagcaactgaagccgcccccagagctctgccctgaggatataaacacatttaaattactgtcatatgcttcctattgcattgagcatggtgatctggagctagcagcaaagtttgtcaat

SEQ ID NO: 296840 - DNA, 120 bp, Artificial Sequence
  ENSG00000132305_21 (sequence is synthesized)
cagctgaagggggaatccagacgagtggcacaggactggctgaaggaagcccgaatgaccctagaaacgaaacagatagtggaaatcctgacagcatatgccagcgccgtaggaatagga

SEQ ID NO: 296841 - DNA, 120 bp, Artificial Sequence
  ENSG00000132305_22 (sequence is synthesized)
accactcaggtgcagccagagtgaggtttaggaagattttcataaagtcatatttcatgtcaaaggaaatcagcagtgatagatgaagggttcgcagcgagagtcccggacttgtctaga

SEQ ID NO: 296842 - DNA, 120 bp, Artificial Sequence
  ENSG00000132305_23 (sequence is synthesized)
aatgagcaggtttacaagtactgttctaaatgttaacacctgttgcatttatattctttccatttgctatcatgtcagtgaacgccaggagtgctttctttgcaacttgtgtaacatttt

SEQ ID NO: 296843 - DNA, 120 bp, Artificial Sequence
  ENSG00000132305_24 (sequence is synthesized)
ctgttttttcaggttttactgatgaggcttgtgaggccaatcaaaataatgtttgtgatctctactactgttgattttgccctcggagcaaactgaataaagcaacaagatgaaaactga

SEQ ID NO: 296844 - DNA, 120 bp, Artificial Sequence
  ENSG00000132305_25 (sequence is synthesized)
cagacaagacttctttcttttgttcgttcccaaccattgtccattttgtgtgagtttatgtatgcagtggacagtgcccctgtttgtgtgttattcaaacatgtggcagtacaaatattt

SEQ ID NO: 296845 - DNA, 120 bp, Artificial Sequence
  ENSG00000132305_26 (sequence is synthesized)
ggcatgcatgcatatctctttttgttacagcgttttattttaaccacagtcattacagatgacacagctgcaacactactcttgtagttttagctgtggtgaacatgagttccagctagt

SEQ ID NO: 296846 - DNA, 120 bp, Artificial Sequence
  ENSG00000132305_27 (sequence is synthesized)
agtgctgaaggtcgacgggcgagaactacagttcccgtcaggacgagcggagcggcggcttgttgcatccttaataaggagagttgtctctgtgggaagtttgtcctccgtccattgcga

SEQ ID NO: 296847 - DNA, 70 bp, Artificial Sequence
  ENSG00000132305_28 (sequence is synthesized)
ctccagcttcagcaacaggtacttatattttgaaccatctttttaaaattataggtaaatctcttcacca

SEQ ID NO: 296848 - DNA, 120 bp, Artificial Sequence
  ENSG00000132305_29 (sequence is synthesized)
taaaggattttaaggatttaggaaaacagcaaattcctaccatctccccgtcttttctcctgcaaagtgtattcgttgttactgttttaaaaaatttgccttggctgggtgtggtggttc

SEQ ID NO: 296849 - DNA, 120 bp, Artificial Sequence
  ENSG00000132313_0 (sequence is synthesized)
aaacccaaagcggccgccgtaggcgaaggtgaagatggctgcctctgcctttgctggtgcagtgagagcagcttcaggaatcctacggcccctgaatattttggcatcttcaacctaccg

SEQ ID NO: 296850 - DNA, 120 bp, Artificial Sequence
  ENSG00000132313_1 (sequence is synthesized)
caactgtgtcaagaatgcctctcttatttctgcattgtccactggacgttttagtcatattcagacaccagttgtttcctccactcccagacttaccacatctgagagaaacctgacatg

SEQ ID NO: 296851 - DNA, 120 bp, Artificial Sequence
  ENSG00000132313_2 (sequence is synthesized)
tgggcatacctcagtgatccttaatagaatggcccccgtgcttccaagtgtcctgaagctgccagtcagatctctaacatacttcagtgcaagaaaaggcaagagaaagaccgtgaaagc

SEQ ID NO: 296852 - DNA, 120 bp, Artificial Sequence
  ENSG00000132313_3 (sequence is synthesized)
tgtcatcgataggtttcttcgacttcattgtggcctttgggtgaggagaaaggctggctataagaaaaaattatggaaaaagacacctgcaaggaagaagcgattgagggaatttgtatt

SEQ ID NO: 296853 - DNA, 120 bp, Artificial Sequence
  ENSG00000132313_4 (sequence is synthesized)
ctgcaataaaacccagagtaaactcttagataaaatgacgacgtccttctggaagaggcgaaactggtacgttgatgatccttatcagaagtatcatgatcgaacaaacctgaaagtata

SEQ ID NO: 296854 - DNA, 120 bp, Artificial Sequence
  ENSG00000132313_5 (sequence is synthesized)
gatcagaagtttcacttgtttctcagttattggatatgtatctttgtgtacatatctttgcaaaaatggataagtacaaaacttgatgtaaattgtaccaatgaatacgtaaacatacag

SEQ ID NO: 296855 - DNA, 120 bp, Artificial Sequence
  ENSG00000132313_6 (sequence is synthesized)
tgacaacattaaacttagaaaagttttaaaacttaatggatcagactttgccagatttggttagggaaacagaaatttagaatggtgcattatttttaacaaatggtattggcttaacta

SEQ ID NO: 296856 - DNA, 120 bp, Artificial Sequence
  ENSG00000132313_7 (sequence is synthesized)
gttgtttcagttatgctcttttagttgcaaggaatctcaagtgggacaaacataaaaagactcaaaagctacaagttagctcaagcaatgtgacattatttcaaggatatgtgccaggga

SEQ ID NO: 296857 - DNA, 120 bp, Artificial Sequence
  ENSG00000132313_8 (sequence is synthesized)
attcaggaaccacctcaccaaccccatctcccactcagaaatcacctcccagcctcaggaagagtagaaattgggtggtgctcctcagcaggggaaggtggatgtttaggcttgggctct

SEQ ID NO: 296858 - DNA, 120 bp, Artificial Sequence
  ENSG00000132313_9 (sequence is synthesized)
gcatgcatgtgacttgcttctttttgcattgttaactccattctctctattcaccaacttctctacacagcttttgcatacttacagtttctgttcctttgtaataactttaacttgcac

SEQ ID NO: 296859 - DNA, 120 bp, Artificial Sequence
  ENSG00000132313_10 (sequence is synthesized)
ctttgaggttcttttctacatgatgaccttcagctcctgctgctagtctccaattgccaagggaatttaactgggccagactacctttttatactaggtctggttgggtcattgtctaga

SEQ ID NO: 296860 - DNA, 120 bp, Artificial Sequence
  ENSG00000132313_11 (sequence is synthesized)
gtagggattggctgtccttaagtcaggagcccgctttgtattagcaggtttgcatgcagcaaaaaaacagttatgtgagcagtttcacttggaggttcacatggggtggcagcacactta

SEQ ID NO: 296861 - DNA, 120 bp, Artificial Sequence
  ENSG00000132313_12 (sequence is synthesized)
acatctaacacaccaggttcattgtgttcataacacttgtcatttactgtaacaacattttttcataggagagtaaatagcccttcagcatgctcattcatgaaacagaagaggctgtac

SEQ ID NO: 296862 - DNA, 120 bp, Artificial Sequence
  ENSG00000132313_13 (sequence is synthesized)
catgctcattcatgaaacagaagaggctgtacaagtgaagacaagggctttttatgcaagttttgaaagataggtatttattttttctagagacaggagttttgctctgttgcccaggct

SEQ ID NO: 296863 - DNA, 120 bp, Artificial Sequence
  ENSG00000132313_14 (sequence is synthesized)
tgggctcaagtggtcctcctgcctcagcttactgagtaaggatatgtatttcttaaaagttagtttatccacttcagatttcatgttttcatttgtaaggataaacttttcccacaaatt

SEQ ID NO: 296864 - DNA, 120 bp, Artificial Sequence
  ENSG00000132313_15 (sequence is synthesized)
ccacaaattttcaacaatcattgtagaaactaagggggagaaagtaatctcagttgttttagaaacgaaaaagttaagcattgtttacttgaagtgggcagggaagcagcactgagtaaa

SEQ ID NO: 296865 - DNA, 120 bp, Artificial Sequence
  ENSG00000132313_16 (sequence is synthesized)
gttcaattgagtggttacagtctagggcagtggttcccaactctccgatcagaatcatctgggaagcattttcaaacagcaaagtactttgaaaaccattattaaatagaattatgcatg

SEQ ID NO: 296866 - DNA, 120 bp, Artificial Sequence
  ENSG00000132313_17 (sequence is synthesized)
aattactgtttcagatcctttaatgtggtagttggtaataataagatgaaattcctctgttgttagtaaaattatgaaattgaagttctgcagcatgtcaggccaggattattagggaga

SEQ ID NO: 296867 - DNA, 120 bp, Artificial Sequence
  ENSG00000132313_18 (sequence is synthesized)
ttcctcgaaactagtgtgtgtttattaaaaggagaaaggataacaatagaatgttctaaaaccagaagtccaagtgcgtgtctacttatgggaccaataaataaagaacagacatttgat

SEQ ID NO: 296868 - DNA, 120 bp, Artificial Sequence
  ENSG00000132313_19 (sequence is synthesized)
ttgaggtgaggtaaaagcctgaaacatggaatggcattctgttttgatggattttcatttcttcgcacttctgagacggcaaagccaaccacttagaagccttccacatctttgtcacct

SEQ ID NO: 296869 - DNA, 120 bp, Artificial Sequence
  ENSG00000132313_20 (sequence is synthesized)
gcctggctcctgctctctgatgtacctctgggtagtgagatggaaatggtgcctgcagaagttggggagaaggatacttttgcacagcctccatgatgtctttattgcaaatatggatga

SEQ ID NO: 296870 - DNA, 120 bp, Artificial Sequence
  ENSG00000132313_21 (sequence is synthesized)
caagggtctctgttacaggggcctcagagcaccttcgtttctcctctagaccagggacaggtgtagagataaggactggcaaccagagcctcagcatccaaagatggactgaagtgggat

SEQ ID NO: 296871 - DNA, 120 bp, Artificial Sequence
  ENSG00000132313_22 (sequence is synthesized)
ggctgacaggcacataacttacgggaaagggaatttcatacatacgatttttgttttgtgggtaggagggcttatcatcaacactgattttataatctgacaataaatgtctttcattaa

SEQ ID NO: 296872 - DNA, 120 bp, Artificial Sequence
  ENSG00000132313_23 (sequence is synthesized)
agagtttacctaaatgatgttcgattatatgtataatttataaaatatttatgtatagtttgtttattcaggtatatgtataatttattgaacacctactatgtcccagcatatctacaa

SEQ ID NO: 296873 - DNA, 120 bp, Artificial Sequence
  ENSG00000132313_24 (sequence is synthesized)
aactgggtacatacatactgtctaactgctaatccacatttccagtcttacaaaggacataatgattagttaagccctaatttagatttgaggaaactgaagctgagagagggttaagta

SEQ ID NO: 296874 - DNA, 120 bp, Artificial Sequence
  ENSG00000132313_25 (sequence is synthesized)
aattacccaaagtacagctaataagacccagaatctcagtctcactccttgggatcctgtgtatttccctgagtcttctaacatatgaaaattcatatctaaatcaacaagtgactgtaa

SEQ ID NO: 296875 - DNA, 120 bp, Artificial Sequence
  ENSG00000132313_26 (sequence is synthesized)
tctggtactataaatactaaataaacacttcttcataacactgtaccaattcagcttttaaattttattactttgctttcctgtcctttgccaactcttaacctagttaatcctagttct

SEQ ID NO: 296876 - DNA, 120 bp, Artificial Sequence
  ENSG00000132313_27 (sequence is synthesized)
gttgacattggaccaggctcagtaaataaacgaatggatttccagcctttttttcccatctgttcctgcttttagtcctctgaatctgcttcttttcttactgctgctttattttacagt

SEQ ID NO: 296877 - DNA, 120 bp, Artificial Sequence
  ENSG00000132313_28 (sequence is synthesized)
gattttgtcaaacatagaatacaggactaaaaatgcaaagaaattgggtctgtgtttaattttgatgtttcaaattttgagcttccaagtctttgtggccacccaatgaagtttgagtct

SEQ ID NO: 296878 - DNA, 120 bp, Artificial Sequence
  ENSG00000132313_29 (sequence is synthesized)
gcctgttcagatgtgaaaggtaagggctgcagcaggtttaagggtggcccttcaccaccctgttgtcacctgcacaggcactcccccatttgcagatgaagaaatgttcagagaagaaaa

SEQ ID NO: 296879 - DNA, 120 bp, Artificial Sequence
  ENSG00000132313_30 (sequence is synthesized)
atgatggaccaaacgtctgtttgcacaattgaaactctaccagtggactattctattttcacagctacctagtttctgccgatgatttttttaaatgtgaaataaacagtgatactttca

SEQ ID NO: 296880 - DNA, 120 bp, Artificial Sequence
  ENSG00000132313_31 (sequence is synthesized)
gcgaaactggcactcccccatttgcagatgaagaaatgttcagagaagaaaaatgatggaccaaacgtctgtttgcacaattgaaactctaccagtggactattctattttcacagctac

SEQ ID NO: 296881 - DNA, 120 bp, Artificial Sequence
  ENSG00000132321_0 (sequence is synthesized)
gcgcgctccgtgcctgcgaagcaaacccggcctcaccttttcctgcccgaagcagaagattctcgcagtcctggtttctccctccagaagaccccccacccaaatcctctgtagctcctg

SEQ ID NO: 296882 - DNA, 120 bp, Artificial Sequence
  ENSG00000132321_1 (sequence is synthesized)
gtagtgccctgacccctgctgccaccgtccttcagagagcaacggaagagcttcccggagggcgaggaaaagagggaaagtagccagcaatgtcgaacgcaatgtataataagatgtggc

SEQ ID NO: 296883 - DNA, 120 bp, Artificial Sequence
  ENSG00000132321_2 (sequence is synthesized)
atcagacccaagaagccctcggtgctttactcgataaagagcctcagaagatgattgaaccacaaagaaatcaggttttcatctttcaaacattagccaccttctacgtaaagtatgtgc

SEQ ID NO: 296884 - DNA, 120 bp, Artificial Sequence
  ENSG00000132321_3 (sequence is synthesized)
agatctttagaaacctagagaatgtctacgaccagttcgtccacccccagaaacgaatactgatcaggaaagtcctggacggggtgatgggccgcatcctggagctgaagaacgagatgg

SEQ ID NO: 296885 - DNA, 120 bp, Artificial Sequence
  ENSG00000132321_4 (sequence is synthesized)
tggagctggaactcacggagttccattatttcgatgatatcctgcaggatctcaagctggccccccaacaattagatattcccatacccaagtattttttgaaggagaagttggaagtaa

SEQ ID NO: 296886 - DNA, 120 bp, Artificial Sequence
  ENSG00000132321_5 (sequence is synthesized)
taaaaggaagagagaaaattcttgctcaaatattagcggacagcggaatagatacatctgacatgaaataccctgtaaagagtatccctttcgatgaggctgttaaattaatccagattg

SEQ ID NO: 296887 - DNA, 120 bp, Artificial Sequence
  ENSG00000132321_6 (sequence is synthesized)
ctgagagggcacggcaaggtcgcctaagggctttattcatgaagcaaatctatctgcaagaatatagagcaaagcaatccaagatgcttggcaagaaagtgacagatacctgggctgctg

SEQ ID NO: 296888 - DNA, 120 bp, Artificial Sequence
  ENSG00000132321_7 (sequence is synthesized)
cactccgcattcagaaggtttggcgacgtttccatcaacgtaaggaaactgaaaaactgagagaagaggagatgatcttcctgggtatgaatccacctcctctctttaatgaagtcagtg

SEQ ID NO: 296889 - DNA, 120 bp, Artificial Sequence
  ENSG00000132321_8 (sequence is synthesized)
ctacagtaatccaggctgaaaaggtggaccgcctgcggaatgaggtgcagataaagcatgaagaggactacagggaagccctggttaccatcaagaatgacctaaagttgatagaaggcg

SEQ ID NO: 296890 - DNA, 120 bp, Artificial Sequence
  ENSG00000132321_9 (sequence is synthesized)
tggatatcaaggagaaccttcaagaccagatccggcattggttcatcgaatgcagaaatttaaccgggacatttcctgactaccctgacgttgaagaaggagggtcagctattatttttt

SEQ ID NO: 296891 - DNA, 120 bp, Artificial Sequence
  ENSG00000132321_10 (sequence is synthesized)
ctgacaagaccatacaacaggttattgaggatatcatagcaaaccaagaggaagaagaaaaaaacaaaaagaagaagaagaaaaaggaaaaacaacccaagaaagccaaaaaacaaaaga

SEQ ID NO: 296892 - DNA, 120 bp, Artificial Sequence
  ENSG00000132321_11 (sequence is synthesized)
aaggaacaaaggagaaaaataaggaagaagacgaaaaatggaaaatgtcaccaagtctttttcttcctgcaatgaaggaaggatgtaacgcatacaaagaaatctggatgaaaaaagatg

SEQ ID NO: 296893 - DNA, 120 bp, Artificial Sequence
  ENSG00000132321_12 (sequence is synthesized)
agtcttggaatttctctcaggactatgatccagaactgatcaaagaggagaaacgaaaagaattacagtcagagatcaggatacaggttgatgagttgatgagacaggaacttaaaaact

SEQ ID NO: 296894 - DNA, 120 bp, Artificial Sequence
  ENSG00000132321_13 (sequence is synthesized)
gcaaagaaggataaagatctgacagctgacaggaccatcgagtctctgtataaggaactggtggaagaaggattactgatccaggctctgaaagtcaacctctctgattacattggtgag

SEQ ID NO: 296895 - DNA, 120 bp, Artificial Sequence
  ENSG00000132321_14 (sequence is synthesized)
tacagctacctggggactactcttcgccaggtgtccatagaacccatgccctccctcctggatgtcagacagctcatcacattgtacggaatctggccattaggttctgcagcagtgcat

SEQ ID NO: 296896 - DNA, 120 bp, Artificial Sequence
  ENSG00000132321_15 (sequence is synthesized)
gagaaagctcctttggtgaaatcgctactgttagccgggccgtctggggtagggaagaaaatgctggtccatgccatctgcaccgaaacgggagccaacctcttcaacttgtcctcctct

SEQ ID NO: 296897 - DNA, 120 bp, Artificial Sequence
  ENSG00000132321_16 (sequence is synthesized)
aacattgctgggaaataccctggcaaaaatggcctccaaatgatgctgcatgcagtcttcaaggtggctcgacagctccagccctccgtggtgtggattgaagacacagaaaaaaccttc

SEQ ID NO: 296898 - DNA, 120 bp, Artificial Sequence
  ENSG00000132321_17 (sequence is synthesized)
tacaaaaaagttcccaacgcagaaaagatgaatgaacctaaacgcctgaaaaaacaccttccccaaatcctgaaactcctgaaaccagatgaccggattctgattgtggggaccacacgg

SEQ ID NO: 296899 - DNA, 120 bp, Artificial Sequence
  ENSG00000132321_18 (sequence is synthesized)
cgtcccttcgatgctgaactccaatctttctgcaaagtttaccagaaaattattttggtgcccagaccagactatgcttccagatacgttctgtggaagcaaatcattgaacgcaatgga

SEQ ID NO: 296900 - DNA, 120 bp, Artificial Sequence
  ENSG00000132321_19 (sequence is synthesized)
ggagtcctcaccagtgccttgaatgtcagctgcctggcgaaggtcactgacggcttcacccaaggacatatagtcgaagtggttaaaggcgtgctcacagatcagagaatccggcggcaa

SEQ ID NO: 296901 - DNA, 120 bp, Artificial Sequence
  ENSG00000132321_20 (sequence is synthesized)
attcataaacctctcactgcagttgagtttattacggcgataaccagcatgaatccagtgtacaaagaggaagaagagagctttaagaactggtatgccaaaactcctctgggtaaaaaa

SEQ ID NO: 296902 - DNA, 120 bp, Artificial Sequence
  ENSG00000132321_21 (sequence is synthesized)
cgtgccttggcgataacaggaggcagcacagaaaaggcaaaggacaaagggaaaaggaaataaaagaaagagaaaaaggcaaaaaagaaaaagtaatgcctttctgaagaaccatgcttg

SEQ ID NO: 296903 - DNA, 120 bp, Artificial Sequence
  ENSG00000132321_22 (sequence is synthesized)
agtctctctgggatggagaggaccccaactcgccaaagaaaagattcaccattgcccgcctgaagaagccctcaggggaaggaacttagcagtgtgcaggtgagctgatgccgcaaaccc

SEQ ID NO: 296904 - DNA, 120 bp, Artificial Sequence
  ENSG00000132321_23 (sequence is synthesized)
gctaaccactgcatgtgctgttatgcctttcccaggctggacacctagctgggtgttcatcataactttccacagctttaatccacgccaagtttgtatataactgaaattcactcttga

SEQ ID NO: 296905 - DNA, 120 bp, Artificial Sequence
  ENSG00000132321_24 (sequence is synthesized)
caccctccacagtctttccaagttggactcttcctctcatcagtactagttgtcaaatttaaaatgtgacagttaaagaatattctagtttgacaattagtaagcaatgagtatatcatc

SEQ ID NO: 296906 - DNA, 120 bp, Artificial Sequence
  ENSG00000132321_25 (sequence is synthesized)
agtacactagctttttattaatccatgtacactgtatagtatcttgcatctattttaataaattaattctttgctctagtaatagattttatataatgaaataaaggtgttgtccttgaa

SEQ ID NO: 296907 - DNA, 120 bp, Artificial Sequence
  ENSG00000132321_26 (sequence is synthesized)
tctacagcctattcccctacagcagctagagtgacccaaactctgatcggcatctctgacagctcttggaactcaagagctatgcagtaattatttttgaagacatgaataaatgctcag

SEQ ID NO: 296908 - DNA, 120 bp, Artificial Sequence
  ENSG00000132321_27 (sequence is synthesized)
atgaagatctgcccttgggtgaaagtactggatataaaaagatgaaatagacgcaagagacatctcgaaggatgcaagagataccacaaaggatgacttgcctggctgacagcgtgtgga

SEQ ID NO: 296909 - DNA, 120 bp, Artificial Sequence
  ENSG00000132321_28 (sequence is synthesized)
ctaactctgcaacagttatatttagacaaggataatcttcaccggctgccatccatcgctacacaaacaggctttgaaacactcttgtagcctattttgtgttgtcttttgtaattgatg

SEQ ID NO: 296910 - DNA, 120 bp, Artificial Sequence
  ENSG00000132321_29 (sequence is synthesized)
ttttaatgagggttaggaaacttcagtgcaatatagaatgaagaacaatcattgtcattgtaataacaacagtaacacagccacagaaagtcaagtccccaccaagtgccgggctgctgc

SEQ ID NO: 296911 - DNA, 120 bp, Artificial Sequence
  ENSG00000132321_30 (sequence is synthesized)
acttccaagcgctttacaaacatttttgggcttgtttttcacagcagcactgagaagtcaatccttctatgcctgttttacggataagactagtttggggctcaagctcaaagaaaccca

SEQ ID NO: 296912 - DNA, 120 bp, Artificial Sequence
  ENSG00000132321_31 (sequence is synthesized)
ccaaggcaggagcagagtagatcagggatttcatgatcctttaggccaatttggggtccctgtggccctccttggtttcactgcagatctccaaaccctggatgcctatgcatccacagc

SEQ ID NO: 296913 - DNA, 120 bp, Artificial Sequence
  ENSG00000132321_32 (sequence is synthesized)
tcagagaaattggcaggccccaaggtacagttcaccctttcccagcagctcagctcacccacagggccaaggaccccccaaaagaggacagtgggagtgaactgctgcaatagctcgtgg

SEQ ID NO: 296914 - DNA, 120 bp, Artificial Sequence
  ENSG00000132321_33 (sequence is synthesized)
cccaaaagccagattctccagcttggttcatagttacattataggccattttattcctttatagtaagtagatcttttcattttatcagccatttttggatcaacatacttgtgtgatgt

SEQ ID NO: 296915 - DNA, 120 bp, Artificial Sequence
  ENSG00000132321_34 (sequence is synthesized)
agtcatttaacagactcagaattaaccgcttaccaggcctgacaatgctcagatcaggtagtcatggtcattttttaaaaaatggtttcaagtgttcctcaagaaaagtcaaaatggttt

SEQ ID NO: 296916 - DNA, 120 bp, Artificial Sequence
  ENSG00000132321_35 (sequence is synthesized)
agaaatatttgaccagattatcccagtgctgagactgacagatgctcttgtaaacacccttcacccttctccaccgtctcgatataattaaataagttacagcaagtctcctttacttcc

SEQ ID NO: 296917 - DNA, 120 bp, Artificial Sequence
  ENSG00000132321_36 (sequence is synthesized)
ctctaaagttaagcatccagaattatttcataattcattttcacagcatccctgtgttcagattgaaatatctcatttactccaggtcccacgaaccagagaacacccaggactcatctg

SEQ ID NO: 296918 - DNA, 120 bp, Artificial Sequence
  ENSG00000132321_37 (sequence is synthesized)
aaggactctagtcaaccaatgcgtgtttacagttgctgagggggaaagaataagggtcaaattgctctatttaataaaatgtgtaatacagtgtcttccactgaaagggaactgaccctg

SEQ ID NO: 296919 - DNA, 120 bp, Artificial Sequence
  ENSG00000132321_38 (sequence is synthesized)
gcagtagctgatgaaaactggaatctgcattctgattccagatgtaaaaataatgtgagaaattaactttatatctaaaaaaaaagttaaactacttacccaaattacttgggaaataca

SEQ ID NO: 296920 - DNA, 120 bp, Artificial Sequence
  ENSG00000132321_39 (sequence is synthesized)
atattctgatgagaagagatgccattatacaccttatgaaaatttccagtgttgacagattgtcaacatctttacaggtaccacattaaaactatactgacggtggttttgtgtttctcc

SEQ ID NO: 296921 - DNA, 120 bp, Artificial Sequence
  ENSG00000132321_40 (sequence is synthesized)
ttgttaatttgcagggcacttgtggatctatagacctcagggtcattgatatgtatggcttatggttgaaaattctctagaggaaagcatttagttacttggcttcggttcatttgagtt

SEQ ID NO: 296922 - DNA, 120 bp, Artificial Sequence
  ENSG00000132321_41 (sequence is synthesized)
acaaataagctagagtagacttctgtgtattcctttcttgatgagatgcaactttcaaccgagagggaaactggcactgatttctctgtggtaacccttgttctctgtgtcttttctgga

SEQ ID NO: 296923 - DNA, 120 bp, Artificial Sequence
  ENSG00000132321_42 (sequence is synthesized)
atgattattatagaaatacagaaaacaaccacctgcccatcatgggatggtcacctgacattcttggtggctcgacagctccagccctccgtggtgtggattgaagacacagaaaaaacc

SEQ ID NO: 296924 - DNA, 120 bp, Artificial Sequence
  ENSG00000132321_43 (sequence is synthesized)
gtgccacctaggaacctgggtctttcctaactcctaattgcctctctcctacttcttagcatcttcatgcagagcatagtgatggttctgtgtagttaaaaggaaaagagaaaaagatgg

SEQ ID NO: 296925 - DNA, 120 bp, Artificial Sequence
  ENSG00000132321_44 (sequence is synthesized)
aggaggggagaaagagagaaggagaagaattgcgggatttgagaaagctggctgtggcttgccccaattattttacggatgacaaagcagactcagaaaagtcaggtaacttggctaaaa

SEQ ID NO: 296926 - DNA, 120 bp, Artificial Sequence
  ENSG00000132321_45 (sequence is synthesized)
acctgcctagttactggcagattgagaactacaatctgggtgagtaaagactttttgaaacacgagcattgtgtaaaactagaattgtttctcaagagaaagttcagaattgttctctct

SEQ ID NO: 296927 - DNA, 120 bp, Artificial Sequence
  ENSG00000132323_0 (sequence is synthesized)
ctgcccgtcgcccgcccgctgctgccgcccgcccggggtgtggagcccggccgctgctcgcgggctgagtgtctgtcgctgctgccgcctccacccagcctccgccatggacctcttcgg

SEQ ID NO: 296928 - DNA, 120 bp, Artificial Sequence
  ENSG00000132323_1 (sequence is synthesized)
ccgcctccacccagcctccgccatggacctcttcggggacctgccggagcccgagcgctcgccgcgcccggctgccgggaaagaagctcagaaaggacccctgctctttgatgacctccc

SEQ ID NO: 296929 - DNA, 120 bp, Artificial Sequence
  ENSG00000132323_2 (sequence is synthesized)
tccggccagcagtactgactcaggatcagggggacctttgctttttgatgatctcccacccgctagcagtggcgattcaggttctcttgccacatcaatatcccagatggtaaagactga

SEQ ID NO: 296930 - DNA, 120 bp, Artificial Sequence
  ENSG00000132323_3 (sequence is synthesized)
agggaaaggagcaaagagaaaaacctccgaggaagagaagaatggcagtgaagagcttgtggaaaagaaagtttgtaaagcctcttcggtgatctttggtctgaagggctatgtggctga

SEQ ID NO: 296931 - DNA, 120 bp, Artificial Sequence
  ENSG00000132323_4 (sequence is synthesized)
gcggaagggtgagagggaggagatgcaggatgcccacgtcatcctgaacgacatcaccgaggagtgtaggcccccatcgtccctcattactcgggtttcatattttgctgtttttgatgg

SEQ ID NO: 296932 - DNA, 120 bp, Artificial Sequence
  ENSG00000132323_5 (sequence is synthesized)
acatggaggaattcgagcctcaaaatttgctgcacagaatttgcatcaaaacttaatcagaaaatttcctaaaggagatgtaatcagtgtagagaaaaccgtgaagagatgccttttgga

SEQ ID NO: 296933 - DNA, 120 bp, Artificial Sequence
  ENSG00000132323_6 (sequence is synthesized)
tgatgaagagttccttaaacaagcttccagccagaagcctgcctggaaagatgggtccactgccacgtgtgttctggctgtagacaacattctttatattgccaacctcggagatagtcg

SEQ ID NO: 296934 - DNA, 120 bp, Artificial Sequence
  ENSG00000132323_7 (sequence is synthesized)
ggcaatcttgtgtcgttataatgaggagagtcaaaaacatgcagccttaagcctcagcaaagagcataatccaactcagtatgaagagcggatgaggatacagaaggctggaggaaacgt

SEQ ID NO: 296935 - DNA, 120 bp, Artificial Sequence
  ENSG00000132323_8 (sequence is synthesized)
cagggatgggcgtgttttgggcgtgctagaggtgtcacgctccattggggacgggcagtacaagcgctgcggtgtcacctctgtgcccgacatcagacgctgccagctgacccccaatga

SEQ ID NO: 296936 - DNA, 120 bp, Artificial Sequence
  ENSG00000132323_9 (sequence is synthesized)
caggttcattttgttggcctgtgatgggctcttcaaggtctttaccccagaagaagccgtgaacttcatcttgtcctgtctcgaggatgaaaagatccagacccgggaagggaagtccgc

SEQ ID NO: 296937 - DNA, 120 bp, Artificial Sequence
  ENSG00000132323_10 (sequence is synthesized)
agccgacgcccgctacgaagcagcctgcaacaggctggccaacaaggcggtgcagcggggctcggccgacaacgtcactgtgatggtggtgcggatagggcactgaggggtggcgcgcgg

SEQ ID NO: 296938 - DNA, 120 bp, Artificial Sequence
  ENSG00000132323_11 (sequence is synthesized)
ccaggagcacgcatggtattgacttaaaaggttcattttgtgtgtgtgcacattgtgtgttttgtgtactcctgtgggactcccatggttgtaaataaaggtttctctttttttttccta

SEQ ID NO: 296939 - DNA, 120 bp, Artificial Sequence
  ENSG00000132323_12 (sequence is synthesized)
cagaaaaatctgctagtcgctagccctgagaagtactgcgaggaaatgtggagcagttttctctggttcatttgagtatttattttactacctgaagtacaatttaactttttaaggcag

SEQ ID NO: 296940 - DNA, 120 bp, Artificial Sequence
  ENSG00000132323_13 (sequence is synthesized)
atttttatttcctttgaaataataggactttaaaataggttcaagatattattcattgcagtatgagttgccactggattgacgcaaagttttgagtttatttcagtaacctacataggt

SEQ ID NO: 296941 - DNA, 120 bp, Artificial Sequence
  ENSG00000132323_14 (sequence is synthesized)
ttaaaacaacccagagcaaaaccagtttcagctttctaataatactttctttttatgtctgtatttaagaaataagtagggttccctttttgcaaatgaatttccaagtttctctgtgct

SEQ ID NO: 296942 - DNA, 120 bp, Artificial Sequence
  ENSG00000132323_15 (sequence is synthesized)
cgtctctactcatcctgggattgtagttgtctcaatctttttccctttcccccattttcaacacacagatgttttaggtgttggactgtctttaagttttgaatccatggcatcaggtaa

SEQ ID NO: 296943 - DNA, 120 bp, Artificial Sequence
  ENSG00000132323_16 (sequence is synthesized)
ccttttgcctgatttgaatctcacttctctgggatggcagcacatcccttgccctgatgctttgacttacaccctagacagagttgttttgtgctcactgactcctcttttgtgtccctg

SEQ ID NO: 296944 - DNA, 120 bp, Artificial Sequence
  ENSG00000132323_17 (sequence is synthesized)
tgcaacctcttagagctcaccctgtccaacagtgctccgatttgagttatagacttgcagctgggggagatgccttaaggggtattgcttatttgtttgcgccattaggatattgctgag

SEQ ID NO: 296945 - DNA, 120 bp, Artificial Sequence
  ENSG00000132323_18 (sequence is synthesized)
cgaaggttaagctgggcagcactgcttggcagccactggaggtgctgttcccacccatgtgcagctgggcagggtccctaccccagggcagcagttaatggcctagacacccctgcatat

SEQ ID NO: 296946 - DNA, 120 bp, Artificial Sequence
  ENSG00000132323_19 (sequence is synthesized)
ttgagatcaagaaatgtcagtagtggttaataatgtgaattccacagtctgtatctttcacacttccattctctgcttttaaggtgagattctaagtactgtggacccataatctgtcag

SEQ ID NO: 296947 - DNA, 120 bp, Artificial Sequence
  ENSG00000132323_20 (sequence is synthesized)
gaagtagaagttctgagaccccatttcctcccattgtgggacagcccttgtgccctttttcagtgtgaactctgcctactgactcactggtcagtttgtcctgccagccctgatggagac

SEQ ID NO: 296948 - DNA, 120 bp, Artificial Sequence
  ENSG00000132323_21 (sequence is synthesized)
cagagcagctcttcttcctggcagtcatgtctcaggaaagtgacagggtgcggggtcactccattcactcattccctttctcatctggtaggatgaaaagatccagacccgggaagggaa

SEQ ID NO: 296949 - DNA, 120 bp, Artificial Sequence
  ENSG00000132323_22 (sequence is synthesized)
cttgtctcagagtcctgggctcaagccatcttcccaccttggtctcccaaagtgccaggattactcgcatgagccaccatacccagcctgggatttgcattaaaaccaggaaagggacct

SEQ ID NO: 296950 - DNA, 120 bp, Artificial Sequence
  ENSG00000132323_23 (sequence is synthesized)
ctggagcccaagaaggcagatccattgagtgtaaatttaattgggaacactacatcatgccttgcaaataacaggcagtaagaacagctctgagttataaaccagatgaggttttttttc

SEQ ID NO: 296951 - DNA, 120 bp, Artificial Sequence
  ENSG00000132323_24 (sequence is synthesized)
tcatggctcaggatgtcctaaattgaaaaggaattccaaaaaacttgaaagaaaagcagctctctagaataaatgtcatttctcgtgggcatttttgttttttttttttccttgaaatag

SEQ ID NO: 296952 - DNA, 120 bp, Artificial Sequence
  ENSG00000132323_25 (sequence is synthesized)
tttatttgatgtcttttattccatatatgtgggttttctggcaaaatttgaaaggggaatgggaataagagtagtaagataggttttaaaaatgagatatttaaaatttatttgagtaac

SEQ ID NO: 296953 - DNA, 120 bp, Artificial Sequence
  ENSG00000132323_26 (sequence is synthesized)
aattctgtaatatcctccctgctcttatgcagtcatgtgctgaataacaacatcaagtcagtgatggactgcatatatgacggtgctcccataagattacaaattttgtagagatggggg

SEQ ID NO: 296954 - DNA, 120 bp, Artificial Sequence
  ENSG00000132323_27 (sequence is synthesized)
gcctcaagtgatcctcctgccttggccacctcccgaagtgttgggattaacaggcgtgagctgtcgtgttcagccataataccatgtttactgtaccttttctatgtttaggtatgttta

SEQ ID NO: 296955 - DNA, 120 bp, Artificial Sequence
  ENSG00000132323_28 (sequence is synthesized)
tgtttactgtaccttttctatgtttaggtatgtttaaatacacaaatactaccagtgtgttacaactgcctatggtatttagtgcagtaacatgctgtgcagtttagcctaggagcaata

SEQ ID NO: 296956 - DNA, 120 bp, Artificial Sequence
  ENSG00000132323_29 (sequence is synthesized)
ggctctaccatgtatgtagcttaggtgtgtagtaagctgcgccgtgttagtttctgtaaatatgttctatgatgttcacacaacaaagtcacctaacaatgcatttctgttaagtgatgc

SEQ ID NO: 296957 - DNA, 120 bp, Artificial Sequence
  ENSG00000132323_30 (sequence is synthesized)
atgactgtattttttactgttttcgataaataacttgatctgtttgttaatgtttaaaaccaaatccgatttaaataggaacggagttctgaattttagttttgttgtcagtgaaaaatc

SEQ ID NO: 296958 - DNA, 120 bp, Artificial Sequence
  ENSG00000132323_31 (sequence is synthesized)
agaattaacagatcttgatctttgaagcaaatgtgagttttaaacatttaatgtaaaatactgggaaaagtgttacatctcttttagaatattagacctttagcaggtcttgcagtcttc

SEQ ID NO: 296959 - DNA, 120 bp, Artificial Sequence
  ENSG00000132323_32 (sequence is synthesized)
cagtcttcaccagaaacactcccacacctacacacacacagtgtttttgttttttttttttttagacagaatctcgctctgtcaccccggctgaagtgcagtggtgcgatctcagttcac

SEQ ID NO: 296960 - DNA, 120 bp, Artificial Sequence
  ENSG00000132323_33 (sequence is synthesized)
atgctgtgaaagttacttaaatatttgtctcagttaaagccttttttttcccatttgtaacagtgtgactggtgtcttaaccagtgtgacttcctctgacttattaatgttcactctttg

SEQ ID NO: 296961 - DNA, 120 bp, Artificial Sequence
  ENSG00000132326_0 (sequence is synthesized)
cgtaaccgccgccggcgcgcgggcctcgggcaggtcggggtcccagcgccggctcgggcagcggaggcgccgccggaagttccttgggctgctggactcctcggcttgaaacggcgccgg

SEQ ID NO: 296962 - DNA, 120 bp, Artificial Sequence
  ENSG00000132326_1 (sequence is synthesized)
cgtgggggcgtgtgcccttggccctgtcccaggtggagagtggtcgagccgcgcgcagggtgcgctcgtttgaactgcggtgacaccgagggttggggactcgaacccccgcttcgcagc

SEQ ID NO: 296963 - DNA, 120 bp, Artificial Sequence
  ENSG00000132326_2 (sequence is synthesized)
tcaggagcctgaggtccgaaagcttcgttccagagcccagcatgaatggatacgcggaatttccgcccagccccagtaaccccaccaaggagcccgtggagccccagcccagccaggtcc

SEQ ID NO: 296964 - DNA, 120 bp, Artificial Sequence
  ENSG00000132326_3 (sequence is synthesized)
cactgcaggaagatgtggacatgagcagtggctccagtggacatgagaccaacgaaaactgctccacggggcgggactcgcagggcagtgactgtgacgacagtgggaaggagctgggga

SEQ ID NO: 296965 - DNA, 120 bp, Artificial Sequence
  ENSG00000132326_4 (sequence is synthesized)
tgctggtggagccaccggatgcccgccagagtccagatacctttagcctgatgatggcaaaatctgaacacaacccatctacaagtggctgcagtagcgaccagtcttcgaaagtggaca

SEQ ID NO: 296966 - DNA, 120 bp, Artificial Sequence
  ENSG00000132326_5 (sequence is synthesized)
cacacaaagaactgataaaaacactaaaggagctgaaggtccacctccctgcagacaagaaggccaagggcaaggccagtacgctggccaccttgaagtacgccctcaggagcgtgaagc

SEQ ID NO: 296967 - DNA, 120 bp, Artificial Sequence
  ENSG00000132326_6 (sequence is synthesized)
aggtgaaagccaatgaagagtattaccagctgctgatgtccagcgagggtcacccctgtggagcagacgtgccctcctacaccgtggaggagatggagagcgttacctctgagcacattg

SEQ ID NO: 296968 - DNA, 120 bp, Artificial Sequence
  ENSG00000132326_7 (sequence is synthesized)
tgaagaatgccgatatgtttgcggtggccgtgtccctggtgtctgggaagatcctgtacatctctgaccaggttgcatccatatttcactgtaaaagagatgccttcagcgatgccaagt

SEQ ID NO: 296969 - DNA, 120 bp, Artificial Sequence
  ENSG00000132326_8 (sequence is synthesized)
ttgtggagttcctggcgcctcacgatgtgggcgtgttccacagtttcacctccccgtacaagcttcccttgtggagcatgtgcagtggagcagattcttttactcaagaatgcatggagg

SEQ ID NO: 296970 - DNA, 120 bp, Artificial Sequence
  ENSG00000132326_9 (sequence is synthesized)
agaaatctttcttttgccgtgtcagtgtccggaaaagccacgagaatgaaatccgctaccaccccttccgcatgacgccctacctggtcaaggtgcgggaccaacaaggtgctgagagtc

SEQ ID NO: 296971 - DNA, 120 bp, Artificial Sequence
  ENSG00000132326_10 (sequence is synthesized)
agctttgctgccttctgctggcagagagagtgcactctggttatgaagcccctagaattcctcctgaaaagagaatttttacaaccacccatacaccaaattgtttgttccaggatgtgg

SEQ ID NO: 296972 - DNA, 120 bp, Artificial Sequence
  ENSG00000132326_11 (sequence is synthesized)
atgaaagggcggtccctctcctgggctacctacctcaggacctgattgaaaccccagtgctcgtgcagctccaccctagtgacaggcccttgatgctggccatccacaaaaagatcctgc

SEQ ID NO: 296973 - DNA, 120 bp, Artificial Sequence
  ENSG00000132326_12 (sequence is synthesized)
agtcaggcgggcagcctttcgactattctcccattcggtttcgcgcccggaacggagagtacatcacgttggacaccagctggtccagcttcatcaacccatggagcaggaaaatctcct

SEQ ID NO: 296974 - DNA, 120 bp, Artificial Sequence
  ENSG00000132326_13 (sequence is synthesized)
tcatcattgggaggcacaaagtcagggtgggccctttgaatgaggacgtgtttgcagcccacccctgcacagaggagaaggccctgcaccccagcattcaggagctcacagagcagatcc

SEQ ID NO: 296975 - DNA, 120 bp, Artificial Sequence
  ENSG00000132326_14 (sequence is synthesized)
accggctcctgctgcagcccgtcccccacagcggctccagtggctacgggagtctgggcagcaacgggtcccacgagcaccttatgagccagacctcctccagcgacagcaacggccatg

SEQ ID NO: 296976 - DNA, 120 bp, Artificial Sequence
  ENSG00000132326_15 (sequence is synthesized)
aggactcacgccggaggagagccgaaatttgtaaaaatggtaacaagaccaaaaatagaagtcattattctcatgaatctggagaacaaaagaaaaaatccgttacagaaatgcaaacta

SEQ ID NO: 296977 - DNA, 120 bp, Artificial Sequence
  ENSG00000132326_16 (sequence is synthesized)
atcccccagctgagaagaaagctgtccctgccatggaaaaggacagcctgggggtcagcttccccgaggagttggcctgcaagaaccagcccacctgctcctaccagcagatcagctgct

SEQ ID NO: 296978 - DNA, 120 bp, Artificial Sequence
  ENSG00000132326_17 (sequence is synthesized)
tggacagcgtcatcaggtacttggagagctgcaatgaggctgccaccctgaagaggaaatgcgagttcccagcaaacgtcccagcgctaaggtccagtgataagcggaaggccacagtca

SEQ ID NO: 296979 - DNA, 120 bp, Artificial Sequence
  ENSG00000132326_18 (sequence is synthesized)
gcccagggccacacgctggagaggcagagccgccctccagggtgaacagccgcacgggagtaggtacgcacctgacctcgctggcactgccgggcaaggcagagagtgtggcgtcgctca

SEQ ID NO: 296980 - DNA, 120 bp, Artificial Sequence
  ENSG00000132326_19 (sequence is synthesized)
ccagccagtgcagctacagcagcaccatcgtccatgtgggagacaagaagccgcagccggagttagagatggtggaagatgctgcgagtgggccagaatccctggactgcctggcgggcc

SEQ ID NO: 296981 - DNA, 120 bp, Artificial Sequence
  ENSG00000132326_20 (sequence is synthesized)
ctgccctggcctgtggtctcagccaagagaaggagcccttcaagaagctgggcctcaccaaggaggtactcgctgcacacacacagaaggaggagcagagcttcctgcagaagttcaaag

SEQ ID NO: 296982 - DNA, 120 bp, Artificial Sequence
  ENSG00000132326_21 (sequence is synthesized)
aaataagaaaactcagcattttccagtcccactgccattactacttgcaagaaagatccaaggggcagccaagtgaacgaactgcccctggactaagaaatacttccggaatagattcac

SEQ ID NO: 296983 - DNA, 120 bp, Artificial Sequence
  ENSG00000132326_22 (sequence is synthesized)
cttggaaaaaaacaggaaagaacagaaaattgaagtccaagcgggtcaaacctcgagactcatctgagagcaccggatctggggggcccgtgtccgcccggcccccgctggtgggcttga

SEQ ID NO: 296984 - DNA, 120 bp, Artificial Sequence
  ENSG00000132326_23 (sequence is synthesized)
acgccacagcctggtcaccctcagacacgtcccagtccagctgcccagccgtgccctttcccgccccagtgccagcagcttattcactgcccgtgtttccagcgccagggactgtggcag

SEQ ID NO: 296985 - DNA, 120 bp, Artificial Sequence
  ENSG00000132326_24 (sequence is synthesized)
cacccccggcacctccccacgccagcttcacagtgcctgctgtgcccgtggacctccagcaccagtttgcagtccagcccccacctttccctgcccctttggcgcctgtcatggcattca

SEQ ID NO: 296986 - DNA, 120 bp, Artificial Sequence
  ENSG00000132326_25 (sequence is synthesized)
tgctacccagttattccttcccctcggggaccccaaacctgccccaggccttcttccccagccagcctcagtttccgagccaccccacactcacatccgagatggcctctgcctcacagc

SEQ ID NO: 296987 - DNA, 120 bp, Artificial Sequence
  ENSG00000132326_26 (sequence is synthesized)
tcgatccccagacagccatgtgcttgtccagccacccgggccaccccaccatcggccatgggtagggcctccccaccgctctttcagtcccgcagcagctcgcccctgcagctcaacctg

SEQ ID NO: 296988 - DNA, 120 bp, Artificial Sequence
  ENSG00000132326_27 (sequence is synthesized)
ctgcagctggaggaagcccctgagggtggcactggagccatggggaccacaggggccacagagacagcagctgtaggggcggactgcaaacctggcacttctcgggaccagcagccgaag

SEQ ID NO: 296989 - DNA, 120 bp, Artificial Sequence
  ENSG00000132326_28 (sequence is synthesized)
gcgcctctgacccgtgatgaaccctcagacacacagaacagtgacgccctttccacgtcaagcggcctcctaaacctcctgctgaatgaggacctctgctcagcctcgggctctgctgct

SEQ ID NO: 296990 - DNA, 120 bp, Artificial Sequence
  ENSG00000132326_29 (sequence is synthesized)
tcggagtctctgggctccggctcactgggctgcgacgcctccccgagtggggcaggcagtagtgacacaagtcataccagcaaatattttggaagcattgactcctcagagaataatcac

SEQ ID NO: 296991 - DNA, 120 bp, Artificial Sequence
  ENSG00000132326_30 (sequence is synthesized)
aaagcaaaaatgaacactggtatggaagaaagtgagcatttcattaagtgcgtcctgcaggatcccatctggctgctgatggcagatgcggacagcagcgtcatgatgacgtaccagctg

SEQ ID NO: 296992 - DNA, 120 bp, Artificial Sequence
  ENSG00000132326_31 (sequence is synthesized)
ccttcccgaaatttagaagcggttttgaaggaggacagagagaagctgaagctcctacagaaactccagcccaggttcacggagagtcagaagcaggagctgcgcgaggtccaccagtgg

SEQ ID NO: 296993 - DNA, 120 bp, Artificial Sequence
  ENSG00000132326_32 (sequence is synthesized)
atgcagacgggcggcctgcccgcagccatcgacgtggcagaatgtgtttactgtgaaaacaaggaaaaaggtaatatttgcataccatatgaggaagatattccttctctgggactcagc

SEQ ID NO: 296994 - DNA, 120 bp, Artificial Sequence
  ENSG00000132326_33 (sequence is synthesized)
gaagtgtcggacaccaaagaagacgaaaatggatcccccttgaatcacaggatcgaagagcagacgtaacccctgccccacctcagcccggcagccagcgaggtacaccaggtggtgctt

SEQ ID NO: 296995 - DNA, 120 bp, Artificial Sequence
  ENSG00000132326_34 (sequence is synthesized)
ggaagagatgaaagatcttcatggctgtttccactgaaatggacacatatgctcatgttgctttttttgttttagaaaaaaaaacaacatagttttctgaaggggcgacttaaaactgtg

SEQ ID NO: 296996 - DNA, 120 bp, Artificial Sequence
  ENSG00000132326_35 (sequence is synthesized)
gagagtggggagagttcggaaagaaatatgtttttatatataaaatatatatgtggagttttgtgggatggggaagagattttagttgttatttaacttgagaaagactaagcgcctctt

SEQ ID NO: 296997 - DNA, 120 bp, Artificial Sequence
  ENSG00000132326_36 (sequence is synthesized)
agtgtcagggaagttgcctcagtgctcccagaagtcctgtgactgtgacgagacctctgtctgctgcaccagctggggactctggcttccagagctttcccagggtgtttggatcagatc

SEQ ID NO: 296998 - DNA, 120 bp, Artificial Sequence
  ENSG00000132326_37 (sequence is synthesized)
aaattttgtcctctcttggggactgctttttatctgaattatcatttagtcaaggtagagtgtttttttatacataccaaatggagatagcagcctctcctagttttatttcaaaacgtt

SEQ ID NO: 296999 - DNA, 120 bp, Artificial Sequence
  ENSG00000132326_38 (sequence is synthesized)
tcacattaaatggtgtgaagcgttgtttggcaaaccaacagctttggcttctggtgtggtcaatatttcagtctgacataggttttgtttgtagtgaacaaagttgaaacatttgctctg

SEQ ID NO: 297000 - DNA, 120 bp, Artificial Sequence
  ENSG00000132326_39 (sequence is synthesized)
gactaaagaagcctagtggtttgtgtggccaactccatcggatgaatgcacacgcagacagaccctctgtatatttctgcattattcttgtctccttttcagaccatgatggccaatatg

SEQ ID NO: 297001 - DNA, 120 bp, Artificial Sequence
  ENSG00000132326_40 (sequence is synthesized)
gagattaaaatatgtcatcagtcatctctttatggtgacttccctttgcaaaccaggctgtgaccaacacatgtgagacccagtcctgtttggttttcttccgttggaaccacccagaca

SEQ ID NO: 297002 - DNA, 120 bp, Artificial Sequence
  ENSG00000132326_41 (sequence is synthesized)
tctgcttccacccagccaagcccacatcacatctcctggccgagagcagccactgccactcagtctgacagcttgcgactgcatctgtattttcaggggtgcagtgagctcacctctccc

SEQ ID NO: 297003 - DNA, 120 bp, Artificial Sequence
  ENSG00000132326_42 (sequence is synthesized)
actgcaccctgggttgggtgcacagccctcattcttttcatgagcccgacctctctcggagcagcttcaggcctctgccagtgtccccagcacttttaggtcatttggacacttggggaa

SEQ ID NO: 297004 - DNA, 120 bp, Artificial Sequence
  ENSG00000132326_43 (sequence is synthesized)
aagtgaggccagtctgcccggctttttacaaaacctcatgttgcattgtatattccaaagatggttcagaaaatttaatattggtccctggtggaaattcaaagttatcactgaagaaca

SEQ ID NO: 297005 - DNA, 84 bp, Artificial Sequence
  ENSG00000132326_44 (sequence is synthesized)
ttggtccctggtggaaattcaaagttatcactgaagaacagttgacttaaaattggaccaagactatgaggcttaaaagggacc

SEQ ID NO: 297006 - DNA, 120 bp, Artificial Sequence
  ENSG00000132326_45 (sequence is synthesized)
gggaccagggttttctgttttttgatggaggtgaaatctctttgtaatccactaggttttcatcgtaaaaccatcttatgcctgactattaaacctattcttcataaacacaagaacact

SEQ ID NO: 297007 - DNA, 120 bp, Artificial Sequence
  ENSG00000132326_46 (sequence is synthesized)
ttaatttttcgttaatttacaaagtaacatcagctgcctatgcctatgataaggtagcagtctgcattcttatggccattagatgttacaaactccttgcctctaaagtcagatcatgaa

SEQ ID NO: 297008 - DNA, 120 bp, Artificial Sequence
  ENSG00000132326_47 (sequence is synthesized)
gggataggtgttcatctaaggttacagttatgttaccgaaacacaaaactgccaaaatcttactctgctgttatgaatgtttaccatcagcattattttatcatttaatatgtgctcact

SEQ ID NO: 297009 - DNA, 120 bp, Artificial Sequence
  ENSG00000132326_48 (sequence is synthesized)
gattgttaactgtagcttcagcgcgtgccaagcagttgacttaataggatcatcttgtgaatttgtttacgtgatgccaagcatcaagtcatgttttctttagtgtgtgtgcttacacag

SEQ ID NO: 297010 - DNA, 120 bp, Artificial Sequence
  ENSG00000132326_49 (sequence is synthesized)
gtgttaaacagtttttctctattttaaactgagccttctttttaatatattcccgaagagatatgtaaataagctctcagagtttctgtgatgatttgttgagccttgctggacaagtgg

SEQ ID NO: 297011 - DNA, 120 bp, Artificial Sequence
  ENSG00000132326_50 (sequence is synthesized)
tttgtttgtgtgcaaaccaaactttctttacccagtgcaatagatttgtttgactgcttgtgtctttttatgacctgtttgccttttagaaaattggtaaataaagcaagtatattttta

SEQ ID NO: 297012 - DNA, 120 bp, Artificial Sequence
  ENSG00000132326_51 (sequence is synthesized)
atcacactcaggaattcctgatgtgggttcataacttttccttctgtcccatccctggtccccaggtgagtccaggtaaagaagaacaagaagagtaaagagagatgctgcgggctccag

SEQ ID NO: 297013 - DNA, 120 bp, Artificial Sequence
  ENSG00000132326_52 (sequence is synthesized)
cccctgcagaggacataggctctgaaccctggtcctggcacacccactcagacagcttcatctgtcattctctgaacatcccccaggggacagtttgggcatagactgtgctagtccgag

SEQ ID NO: 297014 - DNA, 120 bp, Artificial Sequence
  ENSG00000132326_53 (sequence is synthesized)
acagtccatagtacccttggctctctccagccttgcattcgaccttgtctgaactgcagccctgagtgagtagctgaaggacgtgtgcagaccccgtgctctgacacaggctgcatagtt

SEQ ID NO: 297015 - DNA, 120 bp, Artificial Sequence
  ENSG00000132329_0 (sequence is synthesized)
agtcctcagcggggcgcgtggcgagcggactcgactcggcaccgctgtgcaccatggcccgggccctgtgccgcctcccgcggcgcggcctctggctgctcctggcccatcacctcttca

SEQ ID NO: 297016 - DNA, 120 bp, Artificial Sequence
  ENSG00000132329_1 (sequence is synthesized)
tgaccactgcctgccaggaggctaactacggtgccctcctccgggagctctgcctcacccagttccaggtagacatggaggccgtcggggagacgctgtggtgtgactggggcaggacca

SEQ ID NO: 297017 - DNA, 120 bp, Artificial Sequence
  ENSG00000132329_2 (sequence is synthesized)
tcaggagctacagggagctggccgactgcacctggcacatggcggagaagctgggctgcttctggcccaatgcagaggtggacaggttcttcctggcagtgcatggccgctacttcagga

SEQ ID NO: 297018 - DNA, 120 bp, Artificial Sequence
  ENSG00000132329_3 (sequence is synthesized)
ggtctggcagagcaagcgcactgagggcattgtgtaggcggggcccaggctgcccgcgggtgcacccaggctgcagggtgaggccaggcaggcctgggtaggggcagcttctggagcctt

SEQ ID NO: 297019 - DNA, 120 bp, Artificial Sequence
  ENSG00000132329_4 (sequence is synthesized)
gggacagagcaggcccacaatgccccccttcttccagccaagaagagctcacaggagtccagagtagccgaggctctggtattaacctggaagcccccctggctggaggccaccgccacc

SEQ ID NO: 297020 - DNA, 120 bp, Artificial Sequence
  ENSG00000132329_5 (sequence is synthesized)
ctaggaagggggcagggacgtgaccttgacttacctctggaaagggtcccagcctagactgcttaccccatagccacatttgtggatgagtggtttgtgattaaaagggatgttcttgaa

SEQ ID NO: 297021 - DNA, 120 bp, Artificial Sequence
  ENSG00000132329_6 (sequence is synthesized)
gcagctgccagagtgccaccaaagcaaacctcatctcaagactctgtggccaggccctcacaacctcctgccaggctctcgctacctacccatcaacagcaagactcccaggccatctca

SEQ ID NO: 297022 - DNA, 120 bp, Artificial Sequence
  ENSG00000132329_7 (sequence is synthesized)
atccccccaaagagccctgttcctccagccccacggcttctgttcacctgccgtgctgtccccgcctctgcccacccactcatcctgcagatctggagcagcattccagggcctgcccat

SEQ ID NO: 297023 - DNA, 120 bp, Artificial Sequence
  ENSG00000132329_8 (sequence is synthesized)
agtcctcagcggggcgcgtggcgagcggactcgactcggcaccgctgtgcaccatggcccgggccctgtgccgcctcccgcggcgcggcctctggctgctcctgggcaggatagcctgag

SEQ ID NO: 297024 - DNA, 120 bp, Artificial Sequence
  ENSG00000132330_0 (sequence is synthesized)
gattggctggggtgcttcgctcagccaatccggacgcgcccgggcgtcgcggccccgcctcctccccggcgctctgggcccgtagcgctccgcgggaaggaggctggatgcccggcagca

SEQ ID NO: 297025 - DNA, 120 bp, Artificial Sequence
  ENSG00000132330_1 (sequence is synthesized)
gtggggcggggatggaggcggccgtggcgccggggagggatgcgccggcacccgcggcgagtcagcccagcggctgcgggaaacacaactcgccggagaggaaagtttatatggactata

SEQ ID NO: 297026 - DNA, 120 bp, Artificial Sequence
  ENSG00000132330_2 (sequence is synthesized)
atgcaacgactcccctggagccagaagttatccaggccatgaccaaggccatgtgggaagcctggggaaatcccagcagcccgtattcagcaggaagaaaggccaaggatattataaatg

SEQ ID NO: 297027 - DNA, 120 bp, Artificial Sequence
  ENSG00000132330_3 (sequence is synthesized)
cagctcgggaaagcctcgcgaagatgataggggggaaacctcaagatataatcttcacttccgggggcactgagtcaaataatttagtaatccattctgtggtgaaacatttccacgcaa

SEQ ID NO: 297028 - DNA, 120 bp, Artificial Sequence
  ENSG00000132330_4 (sequence is synthesized)
accagacctcaaagggacacacaggtgggcaccacagcccagtgaagggggccaagccccatttcattacttcctcggtggaacacgactccatccggctgcccctggagcacctggtgg

SEQ ID NO: 297029 - DNA, 120 bp, Artificial Sequence
  ENSG00000132330_5 (sequence is synthesized)
aagaacaagtggcagcggtcacctttgtcccggtgtccaaggtgagcgggcaggcagaggtggacgacatcctcgcggcagtccgcccgaccacacgcctcgtgaccatcatgctggcca

SEQ ID NO: 297030 - DNA, 120 bp, Artificial Sequence
  ENSG00000132330_6 (sequence is synthesized)
acaatgagactggcattgtcatgcctgtccctgaaatcagtcagcgcattaaagccctgaaccaggaacgggtggcagctgggctacctcccatcctcgtgcacacggatgctgcacagg

SEQ ID NO: 297031 - DNA, 120 bp, Artificial Sequence
  ENSG00000132330_7 (sequence is synthesized)
ccttggggaagcagcgcgtggatgtggaggacctgggcgtggacttccttacaatcgtggggcacaagttttatggtcccaggattggcgcactttatatacgaggacttggtgaattta

SEQ ID NO: 297032 - DNA, 120 bp, Artificial Sequence
  ENSG00000132330_8 (sequence is synthesized)
cccctctctaccctatgctatttggaggtggacaagaacggaatttcaggccagggacagagaacaccccaatgattgctggccttgggaaggccgcggagctggtgacccagaactgcg

SEQ ID NO: 297033 - DNA, 120 bp, Artificial Sequence
  ENSG00000132330_9 (sequence is synthesized)
aggcttatgaggcccacatgagggacgtccgcgactacctggaagagaggctggaagctgaattcggtcagaagagaatccatctgaatagccagtttccaggcacccagcggcttccca

SEQ ID NO: 297034 - DNA, 120 bp, Artificial Sequence
  ENSG00000132330_10 (sequence is synthesized)
gtaacttttccatccggggaccccggcttcaaggccacgtggtgcttgcgcagtgccgagtgctgatggccagtgtgggggccgcgtgccactcggaccacggggaccagccgtccccag

SEQ ID NO: 297035 - DNA, 120 bp, Artificial Sequence
  ENSG00000132330_11 (sequence is synthesized)
tgctgctgagctacggtgtccccttcgacgtggccaggaacgcgctccggctcagcgtgggccgcagcaccaccagggccgaggtggacctcgtcgtgcaggacctgaagcaggccgtgg

SEQ ID NO: 297036 - DNA, 120 bp, Artificial Sequence
  ENSG00000132330_12 (sequence is synthesized)
cgcagctggaggaccaggcctagcactggggccgccttccccaccccgcttctgggaagcccgtggcagggcacagggttgtccctccagttccctcctgagggctgtgccaggatgact

SEQ ID NO: 297037 - DNA, 120 bp, Artificial Sequence
  ENSG00000132330_13 (sequence is synthesized)
gtctcatgccccctctgcattttgtcctggagtgccagcgagtgtgcacccccagtttccttccctggacccctgcagagctcacagggcccaggacaccaacgccgcataggactgccc

SEQ ID NO: 297038 - DNA, 120 bp, Artificial Sequence
  ENSG00000132330_14 (sequence is synthesized)
acatgggaccgcccacataggaccgcccacataggaccgcccacatgggaccgcccacatgggaccgcccacatgggaccgcccacatagaaccgtcctccagtggtgaagcggaaacac

SEQ ID NO: 297039 - DNA, 120 bp, Artificial Sequence
  ENSG00000132330_15 (sequence is synthesized)
ttagctttatccaccctccccactgggaactgggcacgcctgttgtgagtgccctttcctggaaggtgtttttatctggaagatagaatccaagtatttataactcattgtcagccaaat

SEQ ID NO: 297040 - DNA, 120 bp, Artificial Sequence
  ENSG00000132330_16 (sequence is synthesized)
gctatcatgaacgtaggaaacttgatttttttgttttgatcatggcctctacatgcacctttccagagtggtctcttctcaggccctttttagtccctttccaaagctgcccccaccacc

SEQ ID NO: 297041 - DNA, 120 bp, Artificial Sequence
  ENSG00000132330_17 (sequence is synthesized)
ctgctcctctggcctcagtgcacagtggcccccagcctcggccaggcctgctctgctcagcgcccaccgcccaccacccctcctgcttccccgagcctgaccctgttccgcccactggca

SEQ ID NO: 297042 - DNA, 120 bp, Artificial Sequence
  ENSG00000132330_18 (sequence is synthesized)
atcagggctgcgcacttccctgtccacggtccccaggccttcctgtcttgtcccttttgatcattattaactcagggtttcagctccaacctcgctgagttggtgcagctccaggtcatt

SEQ ID NO: 297043 - DNA, 120 bp, Artificial Sequence
  ENSG00000132330_19 (sequence is synthesized)
cctggggtgggaatcggatcatccctgactcagcttttaccttaattttatttgcagaggattcttttctcaaaatgctctggcatttggacacacatcacatgtcgatatttgcatagg

SEQ ID NO: 297044 - DNA, 120 bp, Artificial Sequence
  ENSG00000132330_20 (sequence is synthesized)
agtcattttcagtggaataacatttttaatgtgtggttttacggttcaaggaactacttgatgattttgaggaaacacttgccagaaactaaattaacgaataaaagatttcagtgcccg

SEQ ID NO: 297045 - DNA, 120 bp, Artificial Sequence
  ENSG00000132330_21 (sequence is synthesized)
ggtgagtgagtgcagggtggccctgggaccagcctgctgagctccagctgcgaggcgggaagtggcctgcgagcagagcccgggatccgctgcagagatgtagattcagtgtgccactca

SEQ ID NO: 297046 - DNA, 120 bp, Artificial Sequence
  ENSG00000132330_22 (sequence is synthesized)
ctgtaactcactggttctgatgaggaggcaggccctggcaccttggtgaatagttgcccctcactgcactgggctccctggctgcccctctcggtgcagaggccagctgccacaaggggg

SEQ ID NO: 297047 - DNA, 120 bp, Artificial Sequence
  ENSG00000132330_23 (sequence is synthesized)
ttggcaagtgtggccaaactttcccttaggaagttcattgagaatgaatatgtagaactagccatttgtataactgagtgatatttgaaacttgcatgtaataaatatttaacctttaaa

SEQ ID NO: 297048 - DNA, 120 bp, Artificial Sequence
  ENSG00000132330_24 (sequence is synthesized)
gcacaagcttaccagggcccgagatatttttagtactcaattttgaagcacagtcctcagctggtttccaaaggagtgtctatgctggcctgacactggcactccagagttctgcattgt

SEQ ID NO: 297049 - DNA, 120 bp, Artificial Sequence
  ENSG00000132330_25 (sequence is synthesized)
gtcagttggaaacatggaatcatttgcaggaaaagccctggccaaccgctggttccaacccctctctatttatgcattctctttcttttttttttttttaaacctgtgattcatatgatt

SEQ ID NO: 297050 - DNA, 120 bp, Artificial Sequence
  ENSG00000132330_26 (sequence is synthesized)
tgagatccttttacaaattctatcacatgatgcgcaggggagagctgcctgccacagagctgagcacgagagtctagcacctgcgctgcctcctaggttggggttccaccctgccccgaa

SEQ ID NO: 297051 - DNA, 120 bp, Artificial Sequence
  ENSG00000132330_27 (sequence is synthesized)
ttaattccagtaagatgtagaaatgttactcctatacagttctgttccttcttcttttttgtgcttttattgttatgggtattacatctatatatgttacaaactcaacagtgcattgtt

SEQ ID NO: 297052 - DNA, 81 bp, Artificial Sequence
  ENSG00000132330_28 (sequence is synthesized)
gattccaccctgtcacccaggctggagtttggtgtcacaatcacaactcactacagcctcaacctcccaggctcaagtgat

SEQ ID NO: 297053 - DNA, 120 bp, Artificial Sequence
  ENSG00000132330_29 (sequence is synthesized)
ggctcaagtgatccttccacctcagctgccctagtagctgggactacaggcatatcccatcgcactggctaattttttattttttgtgcagataaggtgtccttatgttgcccaggctgg

SEQ ID NO: 297054 - DNA, 120 bp, Artificial Sequence
  ENSG00000132330_30 (sequence is synthesized)
tcctcctgccttggcctcccaaagtgcttacaggcatgagccagtgcacctggccaatttcatatcttttaaggaagctaagggaagaaagagcaagtatatgtttatagattttgcttg

SEQ ID NO: 297055 - DNA, 120 bp, Artificial Sequence
  ENSG00000132330_31 (sequence is synthesized)
gcaagtatatgtttatagattttgcttgagtaatcttcttagttgccttttcacattatcttcatttgttccatggatctgaattatcatctggtgtcctttccttaatagacaattctg

SEQ ID NO: 297056 - DNA, 120 bp, Artificial Sequence
  ENSG00000132330_32 (sequence is synthesized)
ctccctcccacctcctttgtgctattatgaaatattgtgtgttatagccctaacaaaataattatatacatgttattttatacagttgcttttaaatcagttaagagaagcaatatacag

SEQ ID NO: 297057 - DNA, 120 bp, Artificial Sequence
  ENSG00000132330_33 (sequence is synthesized)
ttacactgccctttttttcctttacttttttgagacggaatctcttttgctgattgcgagatagtttctctgtctttggctttcaacattttcattatcatgtgtctgggagtgaatgtc

SEQ ID NO: 297058 - DNA, 120 bp, Artificial Sequence
  ENSG00000132330_34 (sequence is synthesized)
tttgtgttttatcccacccagaattcactgagcctcttaggtatgtagattagtgttttccattacatttgagatgttttcagccattatttttcagagacatttttctgcccctttctc

SEQ ID NO: 297059 - DNA, 120 bp, Artificial Sequence
  ENSG00000132330_35 (sequence is synthesized)
ttgctcctgcccttctgctactcctgttttccctatttggtgccttatggtgtcccacatttctctgaggctctgtttatctttctcatgtttttcctgtcttatatttggatttcgtaa

SEQ ID NO: 297060 - DNA, 120 bp, Artificial Sequence
  ENSG00000132330_36 (sequence is synthesized)
tctctgtaaatctaccttcatgttgactaaatgtattttctgccagttccaatatactctggagcccctccagtgaattcttcatatcggttgtactttccaactccaggatttcctttt

SEQ ID NO: 297061 - DNA, 120 bp, Artificial Sequence
  ENSG00000132330_37 (sequence is synthesized)
ggttctttttcataatttctctcttgtttatcttgaggactctctatttgatgagccattgtcatcatacttttctttatctctttaagtacagtcataggcagtttttatcacttgcct

SEQ ID NO: 297062 - DNA, 120 bp, Artificial Sequence
  ENSG00000132330_38 (sequence is synthesized)
tttttcctgcttttccacacactgaagataccagttagaatttttttagttttcctgttcctgggattgcttctatgtgatctagaatcagtcatttacctgttcatcctggtttttcct

SEQ ID NO: 297063 - DNA, 120 bp, Artificial Sequence
  ENSG00000132330_39 (sequence is synthesized)
tccagttctcaatgcgtttccccaggaggtgtctcccaggaaaggaaggcccacggtgggctctgcataaggtggtggcagcagagcccggcaagccgggtggacccccccaacttttct

SEQ ID NO: 297064 - DNA, 120 bp, Artificial Sequence
  ENSG00000132330_40 (sequence is synthesized)
cgtgacttccctggacggagctgcctttgctttgctcctctgagttccctagcagatgcctcaagctcctcccccttttctagatccttcccccatcctgggagcccaccttgtgcccgc

SEQ ID NO: 297065 - DNA, 120 bp, Artificial Sequence
  ENSG00000132330_41 (sequence is synthesized)
cctctctgggcgtgtggtgctgtctcagtctgaggtcagcacctctgccgctgacttggtgtacgggagcagggcgtgttcggacattgggaagctgacctctgccggcctcggtagctg

SEQ ID NO: 297066 - DNA, 120 bp, Artificial Sequence
  ENSG00000132330_42 (sequence is synthesized)
gcccgtgccctgcgcttcccgctgtccaccctgaacttgggtggccactggatactttcagattggcctttaagtgttcttttccctgttaatctaatgccatcatcttgctacatttta

SEQ ID NO: 297067 - DNA, 120 bp, Artificial Sequence
  ENSG00000132330_43 (sequence is synthesized)
tctaatgccatcatcttgctacattttagggactcctcaaaattcctagtccacataccccctcccacccccttttatttgagacagtgtgttactgtgtcacccaggctggagtgcagt

SEQ ID NO: 297068 - DNA, 120 bp, Artificial Sequence
  ENSG00000132330_44 (sequence is synthesized)
ggtcttgaacccctgggctcaagcagtccacccacctcggccttccaaagtgagccactgcgcctggccagataccctttgttggtgttgttttgatttgattcttagtcggagaagtag

SEQ ID NO: 297069 - DNA, 120 bp, Artificial Sequence
  ENSG00000132330_45 (sequence is synthesized)
ctgttttctctttcatttcagtaggatcctgagtgggcagtggatacatttgtttttcaccattttaaactcaaagcactaaagctaaacaatgtagtcccctctgctcattttccatct

SEQ ID NO: 297070 - DNA, 120 bp, Artificial Sequence
  ENSG00000132330_46 (sequence is synthesized)
gcagtagtgagactctcagtgcccggggcagtcagcgcctggcgcgtaggagcggcttcatcagcactggctcggtgccaaatgcatggcagtgaagtgctgtgcactaggaccctcccc

SEQ ID NO: 297071 - DNA, 120 bp, Artificial Sequence
  ENSG00000132330_47 (sequence is synthesized)
aaaagcaagagcctgcatccctgttgcctcttcctcttccgtctccgtagaagcagaaaggcacacagcttccacgacacagattcactgactgcagccgcgttaaagacacgttcacac

SEQ ID NO: 297072 - DNA, 120 bp, Artificial Sequence
  ENSG00000132330_48 (sequence is synthesized)
tgaagcacctgacagtgactctgggccagtgatgatgggcggcttatattcttctttatagtcttctgaacttggacaacaatttacttttatagttgtagaaaactgttaagctctgtt

SEQ ID NO: 297073 - DNA, 120 bp, Artificial Sequence
  ENSG00000132330_49 (sequence is synthesized)
atgattgctggccttgggaaggtgagccctggtgagcttgaggagatgagttgattgctttgtcatcagtgtccccagcggctctagtaggaatctggggctttagggagatcatattcg

SEQ ID NO: 297074 - DNA, 120 bp, Artificial Sequence
  ENSG00000132330_50 (sequence is synthesized)
tgatctcataagcggactgacaagaaaaagcctggaatctgatttatcaacctggagagctgtactttttcagatctgtggattagtggcacttgtttagcatttaaaagggaaaaactc

SEQ ID NO: 297075 - DNA, 120 bp, Artificial Sequence
  ENSG00000132330_51 (sequence is synthesized)
ccacagagctgagcacgagagtctagcacctgcgctgcctcctaggttggggttccaccctgccccgaaggcttttgtgactctgcgtgtcaaaaggggtggcactcagaggcgccacaa

SEQ ID NO: 297076 - DNA, 120 bp, Artificial Sequence
  ENSG00000132330_52 (sequence is synthesized)
ggaagcagcaggactatgcattgcagagcatttctcctgtgtgcccctaagcacttagcatgtatacagagtaggtccttggaaagttcttgttgaataaatgaccaacttttccttcca

SEQ ID NO: 297077 - DNA, 120 bp, Artificial Sequence
  ENSG00000132330_53 (sequence is synthesized)
tgtttggcccatgaagaagaacccgtgggtaaccgtcatgatggctgcgttcatgagaacctgggctgaaatgcgttcttgtgggcagtgaagcctgggtctccttgaccatctcaaatt

SEQ ID NO: 297078 - DNA, 120 bp, Artificial Sequence
  ENSG00000132330_54 (sequence is synthesized)
gtgttactttaaatgagacagaggttctcattttatttatttattttttgattcagggtctcactctgtcgtcacccaggctggagtgctgtggcgcaatcacagcccactgtagccttg

SEQ ID NO: 297079 - DNA, 63 bp, Artificial Sequence
  ENSG00000132330_55 (sequence is synthesized)
ctgggattacaggtgcctgccaccacgctgggctaatttttgtattttaagtagacacggggt

SEQ ID NO: 297080 - DNA, 120 bp, Artificial Sequence
  ENSG00000132330_56 (sequence is synthesized)
tgggctacctcccatcctcgtgcacacggatgctgcacaggccttggggaagcagcgcgtggatgtggaggacctgggcgtggacttccttacaatcgtggggcacaaggacagagaaca

SEQ ID NO: 297081 - DNA, 120 bp, Artificial Sequence
  ENSG00000132330_57 (sequence is synthesized)
tcgacgttctgtccccgattggtctgtggggtggccaatccagcacctgccaccagccctccactggggcctgtcctgcttctgcgacagtaaccaggctcaggttttgccgtgcgaagg

SEQ ID NO: 297082 - DNA, 120 bp, Artificial Sequence
  ENSG00000132330_58 (sequence is synthesized)
cagaggtactggttacacctcggcgtctgcaggctgctccctcactgtgcggcctctggtcaaaggccaccaccttcaagcaaccctccatgaaccacagctacattggttcccccatgt

SEQ ID NO: 297083 - DNA, 120 bp, Artificial Sequence
  ENSG00000132330_59 (sequence is synthesized)
cccctgctgtcaccctctatccctgacactgctttatttcccctatctgatgtttctctgtagtgtgttcagatgtatgccccaccttctgcttccccgagagcaggggcttggccatgt

SEQ ID NO: 297084 - DNA, 120 bp, Artificial Sequence
  ENSG00000132330_60 (sequence is synthesized)
cggcctcagtatccccagtacagagaaagggcttagcgcccaggaggccgggccttgggaagagtatgaatggattccctgttacttagaatattcaaaattatattattaacagtgata

SEQ ID NO: 297085 - DNA, 76 bp, Artificial Sequence
  ENSG00000132330_61 (sequence is synthesized)
aagagtgtgttttaagtggagtccggtacctgctcgtattgacctgagtgatgaagtagtggtgccgtccacaggc

SEQ ID NO: 297086 - DNA, 120 bp, Artificial Sequence
  ENSG00000132330_62 (sequence is synthesized)
tattgacctgagtgatgaagtagtggtgccgtccacaggctttgaaatacccagggttcaaatcctggcttgaagcttcactcaccgtgtgccttgggtcaggtcgctggaactccctga

SEQ ID NO: 297087 - DNA, 120 bp, Artificial Sequence
  ENSG00000132330_63 (sequence is synthesized)
gtcctggctgccagatgggaatcacggtaacagcttcctaggtagagcttcagctcacagtgctggaagccccccagcccctgaccttctccgtgctcctgcagctgcatctgcacctgt

SEQ ID NO: 297088 - DNA, 120 bp, Artificial Sequence
  ENSG00000132330_64 (sequence is synthesized)
aatggcacaagtgccacagctgggtcccagccacagcaccacacccccactggttcttcagcttcgcccagcccagaccccaatgccaccagcgctctagacagcccccctccgccaccc

SEQ ID NO: 297089 - DNA, 120 bp, Artificial Sequence
  ENSG00000132330_65 (sequence is synthesized)
agcctagactccatcctgcacacgccctccccagcgtgctttccctcacccattcctttctgccttggttgcgtgctggcagccctgcacctgagcccttgtgggtccgtctgtcctgtc

SEQ ID NO: 297090 - DNA, 120 bp, Artificial Sequence
  ENSG00000132330_66 (sequence is synthesized)
ttaaacttgacatctcagctaggccctggcccatgtcctgagagatccattcctctgagttcaaaacctgtcccgactgctctcctccaaccctcttcccaccctgggcacctcttgcta

SEQ ID NO: 297091 - DNA, 120 bp, Artificial Sequence
  ENSG00000132330_67 (sequence is synthesized)
tccaggttctcacctctgaagtccgggggatgccctcagtccctccttgtcatcgtcccctgcctccaatgcagcaccttcctgtctgtctggattccagaatacacccactaccggcct

SEQ ID NO: 297092 - DNA, 120 bp, Artificial Sequence
  ENSG00000132330_68 (sequence is synthesized)
catgtccattttcatggccaccaaccctagaccaagggtctggatgcctgccatggcctcctgggggcctgctgctgccattttccacacggccacagaatgaccaacagacaggccagt

SEQ ID NO: 297093 - DNA, 120 bp, Artificial Sequence
  ENSG00000132330_69 (sequence is synthesized)
cagaccatcgcatccctccctcagcctcactgcgtctgccccgtggccgggcctgcagggcctgtcgatctgtccctgcgccttcaccccctccacactctccacccgccacgccaggcc

SEQ ID NO: 297094 - DNA, 120 bp, Artificial Sequence
  ENSG00000132330_70 (sequence is synthesized)
cctctgttctagagacagaatgtctgtctgtcccctgcaaagcccttgctgggacgccattccctgcccttgtacagccatctctgtcaccaccccaccttgggcctgcgaggtgccttc

SEQ ID NO: 297095 - DNA, 120 bp, Artificial Sequence
  ENSG00000132330_71 (sequence is synthesized)
acagcgccaactggtgggtaggagtctgttcccctcttcccctgcttttgtccgtctgcctctctgggatgctggctcctcgagggagccctttcagggctgctttgctgaggcatctcc

SEQ ID NO: 297096 - DNA, 120 bp, Artificial Sequence
  ENSG00000132330_72 (sequence is synthesized)
agtgcctggtgctgtcaggaggtacctggtgaagtcagtttctggggcacttccacaccctccaaatggcagcactcaaaaaatatggtctgtctgtgactgtcaggagaatgagcagtt

SEQ ID NO: 297097 - DNA, 120 bp, Artificial Sequence
  ENSG00000132330_73 (sequence is synthesized)
tcaggaaatgccacctgtaccgttgaaagctttttggccctcctttattttgcaagaattgtgcatccacttgttgtgtgtctgcccccaggccgcggagctggtgacccagaactgcga

SEQ ID NO: 297098 - DNA, 120 bp, Artificial Sequence
  ENSG00000132330_74 (sequence is synthesized)
ggcttatgaggcccacatgagggacgtccgcgactacctggaagagaggctggaagtgagcgcagcgtggggtgggcaccaggagggggagggtgcgtggggcaggtgcccagagaggag

SEQ ID NO: 297099 - DNA, 120 bp, Artificial Sequence
  ENSG00000132330_75 (sequence is synthesized)
gggtgtggtgctcccagaccccaggacctgtggggattgcagcgtagcctggaactcagcaggatgcagtgagggaagaaagaacagtggcagaaagtacattgggatctgaaaccccga

SEQ ID NO: 297100 - DNA, 120 bp, Artificial Sequence
  ENSG00000132330_76 (sequence is synthesized)
aagcaggaccctaggccaggggcatgatctttttcagagacacaggatcaaatatgcagaggtggtatacctcatggtttatgtggaaggttcatatgtttctgaatatttggtttttct

SEQ ID NO: 297101 - DNA, 120 bp, Artificial Sequence
  ENSG00000132330_77 (sequence is synthesized)
cctaattaactttgctttccatagtccgtccccgtaactattctgggtagatgctgattgaaaagtatgcacctgctgaagttgtgtttctggaaaagtctaaatttcaaacagttgctg

SEQ ID NO: 297102 - DNA, 120 bp, Artificial Sequence
  ENSG00000132330_78 (sequence is synthesized)
gtaacttttccatccggggaccccggcttcaaggtgatggcccctcaccctggtctttccgagtgtgagcacagctccctcggtgcgtggattctggtccgagccagtgactcccactcg

SEQ ID NO: 297103 - DNA, 120 bp, Artificial Sequence
  ENSG00000132330_79 (sequence is synthesized)
ccctgccctgagcatgacacagctcgggctgtcagagggccttgctggggttgccaagagcaggctcgggtggctgtgctgtggtccacagggctctcgccgctggcccctcctctccct

SEQ ID NO: 297104 - DNA, 120 bp, Artificial Sequence
  ENSG00000132330_80 (sequence is synthesized)
gacgtggctcattttgctgctgctgggatgtggactgtggcaaactctcgtgtctggcattagcgccaccccaaaagccgtcagggaaggaagcaacattaaattctagacatttgtcta

SEQ ID NO: 297105 - DNA, 120 bp, Artificial Sequence
  ENSG00000132330_81 (sequence is synthesized)
atcccagcagcccgtattcagcaggtaattctagaagatgcacgtgttcactgatgggagataatggggatggggcgctcttagagaaattgcacacccacacgtgacggctttgttttg

SEQ ID NO: 297106 - DNA, 120 bp, Artificial Sequence
  ENSG00000132330_82 (sequence is synthesized)
aataggtttctgttagctgcaattcttgagctgtaatttttgatagtttcttttctgggaaggccccatttgtaagctgagccttgtcgatactgtaatctttaacctttaatgtttaat

SEQ ID NO: 297107 - DNA, 120 bp, Artificial Sequence
  ENSG00000132330_83 (sequence is synthesized)
gagagttccttgaagtagcagtcagtacctgtggagcacttcacagatctagctcagtcaatccttacagaatttgcaaaatatgtcttttaggtcatcaggataacatataatcctggc

SEQ ID NO: 297108 - DNA, 120 bp, Artificial Sequence
  ENSG00000132330_84 (sequence is synthesized)
cctttttaaagatgaaaattactttttcattaattactttagttatgaatattcttatttgtttccaatttattcttattgtaatgtagaccattaaattggaggttttggagaagaatt

SEQ ID NO: 297109 - DNA, 120 bp, Artificial Sequence
  ENSG00000132330_85 (sequence is synthesized)
tgcttcaagtcagttatatgacagagttacattctgtttttcagacagatgagcaagctaaagtcttacctttcttatttcatgtttatgagagataattaagataaactgtgttaactg

SEQ ID NO: 297110 - DNA, 120 bp, Artificial Sequence
  ENSG00000132330_86 (sequence is synthesized)
gatgcgccggcacccgcggcgagtcagcccagcggctgcgggaaacacaactcgccggagaggtgcgcgcctttagggcagggctggggagcggccggcgcctgtcgccgattgtcccgc

SEQ ID NO: 297111 - DNA, 120 bp, Artificial Sequence
  ENSG00000132330_87 (sequence is synthesized)
gcgggaggacgaagggggctcccggcctgtggccgctctcgcgtggggcgtcccgcgcggggatgtccgcgaggtcggcctaagtcagggatgcgagcttcaaggaggagcgggtgcgag

SEQ ID NO: 297112 - DNA, 120 bp, Artificial Sequence
  ENSG00000132334_0 (sequence is synthesized)
agccggagctggagccgaggcggcggcgggacgcggccggccggacaaatttcctgctaggctgcggacagcgggcggcaggagccggcgcgagcggcttcaggaacccacggcctctgc

SEQ ID NO: 297113 - DNA, 120 bp, Artificial Sequence
  ENSG00000132334_1 (sequence is synthesized)
ctgcgcgtccccgcgacccttcttcgcgcccggcgaagacagccgggcgccccggagggcggcgggcaggcgcccgggagatgcggagcctccgctgcagcgcgatctgcgcgaccagac

SEQ ID NO: 297114 - DNA, 120 bp, Artificial Sequence
  ENSG00000132334_2 (sequence is synthesized)
ccccccgagactatagccttcactttccctcggtccaccatggagcccttgtgtccactcctgctggtgggttttagcttgccgctcgccagggctctcaggggcaacgagaccactgcc

SEQ ID NO: 297115 - DNA, 120 bp, Artificial Sequence
  ENSG00000132334_3 (sequence is synthesized)
gacagcaacgagacaaccacgacctcaggccctccggacccgggcgcctcccagccgctgctggcctggctgctactgccgctgctgctcctcctcctcgtgctccttctcgccgcctac

SEQ ID NO: 297116 - DNA, 120 bp, Artificial Sequence
  ENSG00000132334_4 (sequence is synthesized)
ttcttcaggttcaggaagcagaggaaagctgtggtcagcaccagcgacaagaagatgcccaacggaatcttggaggagcaagagcagcaaagggtgatgctgctcagcaggtcaccctca

SEQ ID NO: 297117 - DNA, 120 bp, Artificial Sequence
  ENSG00000132334_5 (sequence is synthesized)
gggcccaagaagtattttcccatccccgtggagcacctggaggaggagatccgtatcagatccgccgacgactgcaagcagtttcgggaggagttcaactcattgccatctggacacata

SEQ ID NO: 297118 - DNA, 120 bp, Artificial Sequence
  ENSG00000132334_6 (sequence is synthesized)
caaggaacttttgaactggcaaataaagaagaaaacagagaaaaaaacagatatcccaacatccttcccaatgaccattctagggtgattctgagccaactggatggaattccctgttca

SEQ ID NO: 297119 - DNA, 120 bp, Artificial Sequence
  ENSG00000132334_7 (sequence is synthesized)
gactacatcaatgcttcctacatagatggttacaaagagaagaataaattcatagcagctcaaggtcccaaacaggaaacggttaacgacttctggagaatggtctgggagcaaaagtct

SEQ ID NO: 297120 - DNA, 120 bp, Artificial Sequence
  ENSG00000132334_8 (sequence is synthesized)
gcgaccatcgtcatgttaacaaacttgaaagaaaggaaagaggaaaagtgccatcagtactggcccgaccaaggctgctggacctatggaaacatccgggtgtgcgtggaggactgcgtg

SEQ ID NO: 297121 - DNA, 120 bp, Artificial Sequence
  ENSG00000132334_9 (sequence is synthesized)
gttttggtcgactacaccatccggaagttctgcatacagccacagctccccgacggctgcaaagcccccaggctggtctcacagctgcacttcaccagctggcccgacttcggagtgcct

SEQ ID NO: 297122 - DNA, 120 bp, Artificial Sequence
  ENSG00000132334_10 (sequence is synthesized)
tttacccccattgggatgctgaagttcctcaagaaagtaaagacgctcaaccccgtgcacgctgggcccatcgtggtccactgtagcgcgggcgtgggccggacgggcaccttcattgtg

SEQ ID NO: 297123 - DNA, 120 bp, Artificial Sequence
  ENSG00000132334_11 (sequence is synthesized)
atcgatgccatgatggccatgatgcacgcggagcagaaggtggatgtgtttgaatttgtgtctcgaatccgtaatcagcgccctcagatggttcaaacggatatgcagtacacgttcatc

SEQ ID NO: 297124 - DNA, 120 bp, Artificial Sequence
  ENSG00000132334_12 (sequence is synthesized)
taccaagccttactcgagtactacctctacggggacacagagctggacgtgtcctccctggagaagcacctgcagaccatgcacggcaccaccacccacttcgacaagatcgggctggag

SEQ ID NO: 297125 - DNA, 120 bp, Artificial Sequence
  ENSG00000132334_13 (sequence is synthesized)
gaggagttcaggaaattgacaaatgtccggatcatgaaggagaacatgaggacgggcaacttgccggcaaacatgaagaaggccagggtcatccagatcatcccgtatgacttcaaccga

SEQ ID NO: 297126 - DNA, 120 bp, Artificial Sequence
  ENSG00000132334_14 (sequence is synthesized)
gtgatcctttccatgaaaaggggtcaagaatacacagactacatcaacgcatccttcatagacggctaccgacagaaggactatttcatcgccacccaggggccactggcacacacggtt

SEQ ID NO: 297127 - DNA, 120 bp, Artificial Sequence
  ENSG00000132334_15 (sequence is synthesized)
gaggacttctggaggatgatctgggaatggaaatcccacactatcgtgatgctgacggaggtgcaggagagagagcaggataaatgctaccagtattggccaaccgagggctcagttact

SEQ ID NO: 297128 - DNA, 120 bp, Artificial Sequence
  ENSG00000132334_16 (sequence is synthesized)
catggagaaataacgattgagataaagaatgataccctttcagaagccatcagtatacgagactttctggtcactctcaatcagccccaggcccgccaggaggagcaggtccgagtagtg

SEQ ID NO: 297129 - DNA, 120 bp, Artificial Sequence
  ENSG00000132334_17 (sequence is synthesized)
cgccagtttcacttccacggctggcctgagatcgggattcccgccgagggcaaaggcatgattgacctcatcgcagccgtgcagaagcagcagcagcagacaggcaaccaccccatcacc

SEQ ID NO: 297130 - DNA, 120 bp, Artificial Sequence
  ENSG00000132334_18 (sequence is synthesized)
gtgcactgcagtgccggagctgggcgaacaggtacattcatagccctcagcaacattttggagcgagtaaaagccgagggacttttagatgtatttcaagctgtgaagagtttacgactt

SEQ ID NO: 297131 - DNA, 120 bp, Artificial Sequence
  ENSG00000132334_19 (sequence is synthesized)
cagagaccacatatggtgcaaaccctggaacagtatgaattctgctacaaagtggtacaagattttattgatatattttctgattatgctaatttcaaatgaagattcctgccttaaaat

SEQ ID NO: 297132 - DNA, 120 bp, Artificial Sequence
  ENSG00000132334_20 (sequence is synthesized)
attttttaatttaatggtcagtatattttgtaaaaatcatgttaatttatttcatagttgacattaatatcttccctaatttctttgtatatattttgttatgccttaaaggccacctgc

SEQ ID NO: 297133 - DNA, 120 bp, Artificial Sequence
  ENSG00000132334_21 (sequence is synthesized)
aaggccacctgctatacagttgttaaatcttaaatatgctttttaaaaattggaataatgtattaaggtcaaataatatcccataaaatatatatttctgctaatattagtaaatatctt

SEQ ID NO: 297134 - DNA, 120 bp, Artificial Sequence
  ENSG00000132334_22 (sequence is synthesized)
taatatgcgaagtgtgcctctgcaagatactaacacaaagctcatgttaagaaaacagttgaggactcagaagtcagttcgaaaatgcactttcctaacagtgaattcacaaccctgaac

SEQ ID NO: 297135 - DNA, 120 bp, Artificial Sequence
  ENSG00000132334_23 (sequence is synthesized)
agcagcatttttggaaggcaaactgttcgtgatggtacaatgtaaatggggacttctgtaaagttctcagtttcggtccatgtggtttatctttacattttaaagatcaaagaagtcttt

SEQ ID NO: 297136 - DNA, 120 bp, Artificial Sequence
  ENSG00000132334_24 (sequence is synthesized)
acaacctgaatccaggtctaaaacacactagagtagctggtgactataaataatattttaaaatgctgtgtctacaccatcaagactgtgtctacactatcttggctgaacgagaagaga

SEQ ID NO: 297137 - DNA, 120 bp, Artificial Sequence
  ENSG00000132334_25 (sequence is synthesized)
tgtaaatgctgggtggtcccgttgacccacggcgttgggtacaacaaaaccagccatcggagttacaccccaaagcaccatttgctgtccagctgcctgtcgtttggcccagaccaccct

SEQ ID NO: 297138 - DNA, 120 bp, Artificial Sequence
  ENSG00000132334_26 (sequence is synthesized)
cagaaaaaaaccagctgcctctcccattctcccctcccgttctgccacagcggcctgggctggtccagtgctatgcctggaggctcaacacaaaacttcccatccaaacattcagatgaa

SEQ ID NO: 297139 - DNA, 120 bp, Artificial Sequence
  ENSG00000132334_27 (sequence is synthesized)
ctgagcgtcttacacacgcagtacagaggagcacacattaggatagaaacagtagaataaccacgggcaattaaactttaaattttctgagcagcattttggtatttaaacatttcttgt

SEQ ID NO: 297140 - DNA, 120 bp, Artificial Sequence
  ENSG00000132334_28 (sequence is synthesized)
aaaaagctgagacagtttgtaagaaaagaatccttaaaatctagatttataccattttttaaagtcccacctttcaatgtttaataaaacaaaaagagaaatccttaatctaaaagctaa

SEQ ID NO: 297141 - DNA, 120 bp, Artificial Sequence
  ENSG00000132334_29 (sequence is synthesized)
attatttttgaatggaaatactactgagaccattgacactggataacagtaatgatcccattaccagataagattgactgacggggaaaaaaaaaaaaaaagaatggggtgtgaatgtac

SEQ ID NO: 297142 - DNA, 120 bp, Artificial Sequence
  ENSG00000132334_30 (sequence is synthesized)
caacactgaatcttacagcagttatctttctatggccattaggtacctagcagatgtgcacaatataaacaaaaagatatctggcctaccttactactaaaagcatttaacacgtgcatt

SEQ ID NO: 297143 - DNA, 120 bp, Artificial Sequence
  ENSG00000132334_31 (sequence is synthesized)
tttggtacttttttttttgttttctaaaagctacataaaggccttatttgacattttcactgataactgatcgcaccctcatgttgcagtgttcgtcccctattcattaacagtgtgtgc

SEQ ID NO: 297144 - DNA, 120 bp, Artificial Sequence
  ENSG00000132334_32 (sequence is synthesized)
aaatgcaaccccaggacacattattgttctgatagatgctcacagggaatcaagcttctcgcccactccacggctctgagccccatccaagggcaagacttggtgcccagctggaaggac

SEQ ID NO: 297145 - DNA, 120 bp, Artificial Sequence
  ENSG00000132334_33 (sequence is synthesized)
gaaagcacactttgtgaccgccatcctcaccagctgcatgcctgggctgcacactgctgaacgtgctcctctctccttctctgtacaatgattcagcatctcggcggaagaggaaaatgg

SEQ ID NO: 297146 - DNA, 120 bp, Artificial Sequence
  ENSG00000132334_34 (sequence is synthesized)
agctttttgaggctcgccaggtcccttttgttttcaccattaaaattccaaacccaaagcctttgtttgactgaaggagaagagagggaagtaagcttctgttcagcacctgaaccctag

SEQ ID NO: 297147 - DNA, 120 bp, Artificial Sequence
  ENSG00000132334_35 (sequence is synthesized)
aaaaagagccagtttgctacgatgaaggtgacatttctctggtcatttatttgagagttcgaagtcaaagtcgaggggcaccggctttggttcatgtctaggagccctctgtcagaatcc

SEQ ID NO: 297148 - DNA, 120 bp, Artificial Sequence
  ENSG00000132334_36 (sequence is synthesized)
ttgaagccctttaatggtctaactggcatctcttgtatcaagaagtacctttaaggtagaccttttcagggtgccctcaggaaagggccctgctcatgtttttttcctgtccccttagac

SEQ ID NO: 297149 - DNA, 120 bp, Artificial Sequence
  ENSG00000132334_37 (sequence is synthesized)
caaccccaggtgtccactgcaggggttctgcctgttcccaaactttttccattccaggaacaaaggagaagccactttccccaggacgcaagactctcccctccactgtccgggacagcg

SEQ ID NO: 297150 - DNA, 120 bp, Artificial Sequence
  ENSG00000132334_38 (sequence is synthesized)
ttcgccctttagcggggaggtcattacagcctcatggcctctaccaaggccccagatcacaggatctcctgggccttggagcacctcacgctgggggaatcaatccctgagggactcaga

SEQ ID NO: 297151 - DNA, 120 bp, Artificial Sequence
  ENSG00000132334_39 (sequence is synthesized)
atcttctccgtgcaacctggaaagttcatctcttgtttccttcagtcaaagaaagtccattgtacataacaaaacagcccccaaacagcccagtgccgacaccattgttcctttcacact

SEQ ID NO: 297152 - DNA, 120 bp, Artificial Sequence
  ENSG00000132334_40 (sequence is synthesized)
ttcctttgttgcatgcagttgggttcaaatgccaaatagtgattagaagacgaccattctgatctgtgtgtgatctggtcactatgtgactgcctttacggtttctctccatgtgctata

SEQ ID NO: 297153 - DNA, 120 bp, Artificial Sequence
  ENSG00000132334_41 (sequence is synthesized)
tgaatgaagaatgcataccagtgttttaaaaggtatttttatgtgtttttaaacacttttttaaatgagcctgacacctgtgtttcagcatttggagacatccccatgttattcttttaa

SEQ ID NO: 297154 - DNA, 120 bp, Artificial Sequence
  ENSG00000132334_42 (sequence is synthesized)
gtgtataattactgatacttttttgtttgtttgtttaactaagttgtgtttaacttatgtgcagtctttataatgtatgtatgttattacagtttcaactatcatattttctttgattac

SEQ ID NO: 297155 - DNA, 120 bp, Artificial Sequence
  ENSG00000132334_43 (sequence is synthesized)
atttataatttgatcttgctctgattataatgccagtgaatgttgctgaactctttgtatatgcaaattgcaagatttaaaccattctgatgcaaggataaacctttactttgactacca

SEQ ID NO: 297156 - DNA, 120 bp, Artificial Sequence
  ENSG00000132334_44 (sequence is synthesized)
gtgcagcagagggcagctgagaggctgggtggctgggcctgggagacacacagaggccaggccttagcgcggctcagccatgagcaacaggagtagcttttcccggctcacctggttcag

SEQ ID NO: 297157 - DNA, 120 bp, Artificial Sequence
  ENSG00000132334_45 (sequence is synthesized)
gggcagaggtttgggcagggctgatgtgaacacaaatgtcagtgactgagccaggccccaagaaccctacaggagaatgttcagagagccccctcttcatcccagtcgataaaacccacc

SEQ ID NO: 297158 - DNA, 120 bp, Artificial Sequence
  ENSG00000132334_46 (sequence is synthesized)
aaagccaggaggctccggttgatggtgggaatggagttctgggcaggtctgcttggccgccctcacctctccccgggaatcccaagtcacctctgggaaccaagatggaaatgagagaaa

SEQ ID NO: 297159 - DNA, 120 bp, Artificial Sequence
  ENSG00000132334_47 (sequence is synthesized)
gccccctggtttctacaggaagccccccaacaacacacaagtcgttatggaagagcacaccatgctcagatgggcccccacagcagagtcttccagaacacgctgtcctggagaccaggg

SEQ ID NO: 297160 - DNA, 120 bp, Artificial Sequence
  ENSG00000132334_48 (sequence is synthesized)
tccgaggaccaggctgcccctcgccagctgccacttcagcctcggtttcctcacctgtgatgggaaggacagcctcggcggagcctgtgactggcatctgggtgggctttgcacaacatg

SEQ ID NO: 297161 - DNA, 120 bp, Artificial Sequence
  ENSG00000132334_49 (sequence is synthesized)
aagaattactcaaatgtacagccaaggccaccccacaaccccctgtccacagagagccccacttgttcctggcagtgattggcctcaccagggtatcactttgattagatactaagtttc

SEQ ID NO: 297162 - DNA, 120 bp, Artificial Sequence
  ENSG00000132334_50 (sequence is synthesized)
catctgttacagacaggttcattctgagtatcacagcactgccagggacaaaagccacctgcacgcagtgatgcaggcgctctgcacctgtcatgcaggtgttcacgagaagccgtccag

SEQ ID NO: 297163 - DNA, 120 bp, Artificial Sequence
  ENSG00000132334_51 (sequence is synthesized)
gaacccccgaagaacgggctttccccaagtctgagcaacactcgcttgctggggccaagcagaggctggaccccaccccacccaccctccagtgtagctcatactgggaagaatttgcag

SEQ ID NO: 297164 - DNA, 120 bp, Artificial Sequence
  ENSG00000132334_52 (sequence is synthesized)
ggtcagataacagtaatctgacagatgccacctcacttaatgccccgagtcagatgacttggtttgcccagtttgacagagagggaggctggataccagagctgttgcatagttgatctg

SEQ ID NO: 297165 - DNA, 120 bp, Artificial Sequence
  ENSG00000132334_53 (sequence is synthesized)
aggtccctctgctcccagggggacagatctaggatgccaatcacacatataagaagaagacactgtttggtaagtgagaaaaattctccacacagcctaatccgaggcttactgcaccag

SEQ ID NO: 297166 - DNA, 120 bp, Artificial Sequence
  ENSG00000132334_54 (sequence is synthesized)
ctgttaatgtgcctcttagtagagtgtcggtggctatcagaggaccggcctgagatcactttactgagaccacagctccctctggtggctgcactgtagctttgctcctaattaaccaaa

SEQ ID NO: 297167 - DNA, 120 bp, Artificial Sequence
  ENSG00000132334_55 (sequence is synthesized)
aaaacaaaaagttgcatccagtgacctgggtgcgcaggccccttcggggcctttcatttacttcgggaggagtgtgactcacgacgcagcatctttctctttccccaaagcgcgggcgtg

SEQ ID NO: 297168 - DNA, 120 bp, Artificial Sequence
  ENSG00000132334_56 (sequence is synthesized)
acggatgtgagtcatgccttcctcttgccctgatctagcttcccaaagcaaacccgatgccttcgccacacaggtgtgcagggccctggctctgatgggcacgtggcaaccagcctgggc

SEQ ID NO: 297169 - DNA, 120 bp, Artificial Sequence
  ENSG00000132334_57 (sequence is synthesized)
ctggcctggcttcgctccccatagccttccctgcccacgcgtgggacctcagggactccctcgtcctcatctttccctcgtatcctcatgtgagatggggcaatcctactcccccaaacg

SEQ ID NO: 297170 - DNA, 120 bp, Artificial Sequence
  ENSG00000132334_58 (sequence is synthesized)
gtgcatgtacacagtgcgtggcgtgctcaccaatgtgaggctctgctgctaccgttctccttactcaagggcataaatggtcgttatccgtggccggtactctgactcttgcctcacacc

SEQ ID NO: 297171 - DNA, 120 bp, Artificial Sequence
  ENSG00000132334_59 (sequence is synthesized)
tccttgtgttggcaaaaagagaaaaagaagaaagccgccctctttggtctgccaagctccacgtgggccaagactgcagggcagagttgagggtgtgggcacccctggcctctctgcaga

SEQ ID NO: 297172 - DNA, 120 bp, Artificial Sequence
  ENSG00000132334_60 (sequence is synthesized)
gtcaaaagcagggtgtcctctggcctcaggctaagggctcctgtgtgctgtaccaaatgtcaggtagaaaagacacctgtgaagcaccagctgacccagacagtcctgcatgggtctcag

SEQ ID NO: 297173 - DNA, 120 bp, Artificial Sequence
  ENSG00000132334_61 (sequence is synthesized)
gcaagctgcttcggatatgagcttgcagatgcgggagggcagccgaggctgatttcaggggagggcttcacagaagctggagatttgcggcaggcacgacttgggattccttgtctcatt

SEQ ID NO: 297174 - DNA, 120 bp, Artificial Sequence
  ENSG00000132334_62 (sequence is synthesized)
ccttgtctccccaagcctgggcagaggcccgcctcccccttacacagaggggcctgagccacccagccgaggccatgcaggtgaactcagctgagaccacctaggaaaaggctgtggcct

SEQ ID NO: 297175 - DNA, 120 bp, Artificial Sequence
  ENSG00000132334_63 (sequence is synthesized)
tgaggaggacaagaaatgggcctagggtagagtcaggacactggtctgccacccaggtcatgggagagggaaggaggacctggcaggtgtgggaggagtggaggcaaagctggcaagaag

SEQ ID NO: 297176 - DNA, 120 bp, Artificial Sequence
  ENSG00000132334_64 (sequence is synthesized)
acagggccacatgcagtgggcaggggagtgggaatcgggaggctcaccaagtgggaaaaagagaaacttgagaaacccggccccaaagcagactccacagggatccgaggaactagggag

SEQ ID NO: 297177 - DNA, 120 bp, Artificial Sequence
  ENSG00000132334_65 (sequence is synthesized)
ggaggtgggagatgccccgcttgggaggagggtgtgcctcgttatagacttgtcctcgacagagtcacagctcaacaaacaccatctggaaacagctgggagcaggcctgctgcagcagg

SEQ ID NO: 297178 - DNA, 120 bp, Artificial Sequence
  ENSG00000132334_66 (sequence is synthesized)
gtctccccgagcactgcaggcgagtagagctccccggggtgctgccatcttcagactctggcccttggttttctggggccccggtgtcctgctggccactctagattgcttgcctggcca

SEQ ID NO: 297179 - DNA, 120 bp, Artificial Sequence
  ENSG00000132334_67 (sequence is synthesized)
cattccatttactccttcagcgcaatatttttagtgcttgtattttggtatgtattatatcgattcctgaaaaatgaaaatgataattgggtggttttcagagttttccttcaaaaagaa

SEQ ID NO: 297180 - DNA, 120 bp, Artificial Sequence
  ENSG00000132334_68 (sequence is synthesized)
aaatacccctgagccactttaattatcgtctctcataacgtaaactttccaaagagttggctttacgtagtgattttattaataggatctatattttgcaagcttgtagcaatggattaa

SEQ ID NO: 297181 - DNA, 120 bp, Artificial Sequence
  ENSG00000132334_69 (sequence is synthesized)
agttagcaaggtgggaccctttttgtaataactaaaggaagataatgctttgcagatgacttcaaccgagtgatcctttccatgaaaaggggtcaagaatacacagactacatcaacgca

SEQ ID NO: 297182 - DNA, 120 bp, Artificial Sequence
  ENSG00000132334_70 (sequence is synthesized)
tccttcatagacgtacgtatgctggcctgggttgtgtttatgcagatgtgtttccttcacatgtgaccacagacttgattagcttgttttcacaatgagaaagaattgacatgtttccag

SEQ ID NO: 297183 - DNA, 120 bp, Artificial Sequence
  ENSG00000132334_71 (sequence is synthesized)
tgttttcacaatgagaaagaattgacatgtttccagaaactcagccatttttgttagcagaattacttgcttaaaaaaaaaagtggcaaggcacgatggctcacacctgtaatcccaaca

SEQ ID NO: 297184 - DNA, 65 bp, Artificial Sequence
  ENSG00000132334_72 (sequence is synthesized)
aacactttgggaagctaaggcgggcagatcacttggggtcaggagtttgaaactagcctggccaa

SEQ ID NO: 297185 - DNA, 89 bp, Artificial Sequence
  ENSG00000132334_73 (sequence is synthesized)
ggagaattgcttgaatccgggaggcttactccaacctgggcaacagagtgagagcgagaccccctctcaaaaaaaaaaaaaaaaaaaaa

SEQ ID NO: 297186 - DNA, 120 bp, Artificial Sequence
  ENSG00000132334_74 (sequence is synthesized)
cctaccggttccggaacgcttcagggcatgacgtgtgtgtccccaacaagcctgagaagggagtgaacagctgtccaggggccaacggccagggtgccggggctgggaccccaaagggac

SEQ ID NO: 297187 - DNA, 120 bp, Artificial Sequence
  ENSG00000132334_75 (sequence is synthesized)
acagaggccaggccttagcgcggctcagccatgagcaacaggagtagcttttcccggctcacctggtgggtatcactgtgccgagcgctgttggctctcggggaacctagaagtgtggaa

SEQ ID NO: 297188 - DNA, 120 bp, Artificial Sequence
  ENSG00000132334_76 (sequence is synthesized)
atctcaaatcctgttgcagtcagtagcgctggctgtctgcagtagagatggttttcaatgattgtttcagaaattccttatcaacagaaaatgaacgagacggggagttttcagaaaata

SEQ ID NO: 297189 - DNA, 120 bp, Artificial Sequence
  ENSG00000132334_77 (sequence is synthesized)
aatggatttgcagacaacttaacgtcatcatcgaagtcaccaaagaaagcaaagcagcgactggggaagctgaggctgaagtagcaagggcatgccacccaggctgctattccagtcgct

SEQ ID NO: 297190 - DNA, 120 bp, Artificial Sequence
  ENSG00000132334_78 (sequence is synthesized)
gtgaaagcctggtcactgtctttgccacgcagaacacatctctgggaatgctgtcgatctatgcctccatcttttaaaggctttccatttctgtctggattttttctttatgggaggcag

SEQ ID NO: 297191 - DNA, 120 bp, Artificial Sequence
  ENSG00000132334_79 (sequence is synthesized)
aaataatagtgaattgaatgaaatggagtatataagtgtctagcacagtccttggcacatagaaagtgctctgtaaacagtacttcgcatcaaattcttgggatgaatgaaagtgagtgc

SEQ ID NO: 297192 - DNA, 120 bp, Artificial Sequence
  ENSG00000132334_80 (sequence is synthesized)
ctggcgctgcacataagaaaagacgtggcagcaaaccatcctcccgacatgacgtgctgcgttggtgcgtttacgtccctgttccttctgaaagactcaaaattgtgttggagctactgg

SEQ ID NO: 297193 - DNA, 120 bp, Artificial Sequence
  ENSG00000132334_81 (sequence is synthesized)
tgcacctttgtaagacctgcactaacgaccgcgccactgggaagggcacttctttatgaagtcgccgtattcccagggagactggtcaacccatacaatgtgaaaaaaaaagaagctatg

SEQ ID NO: 297194 - DNA, 120 bp, Artificial Sequence
  ENSG00000132334_82 (sequence is synthesized)
tgaaaaaatattcccctttgtcatagagaaggagaacttggtgaggctgggcagctgcaggagcctcagtttttcagataacagaacagagtagaccttgagggtccatttccctttttg

SEQ ID NO: 297195 - DNA, 120 bp, Artificial Sequence
  ENSG00000132334_83 (sequence is synthesized)
ttttaggaagtgctgtagaagggggcaaagagatctttgatatgagaaggtatttcttcaaagcagcatcgtgcctgaaatagcattgttctttacgctgagagaggaggaaatgggaat

SEQ ID NO: 297196 - DNA, 120 bp, Artificial Sequence
  ENSG00000132334_84 (sequence is synthesized)
ttggtgttcaacgggtttaaagtttcagttacaagaaatggacaagtccgagagctctgctgtgccacatcatgcctaaagtcaccgagactgtgttgtacacttttttgttaaaaggta

SEQ ID NO: 297197 - DNA, 120 bp, Artificial Sequence
  ENSG00000132334_85 (sequence is synthesized)
acaattaaaaagaagccctaggctgtgtttgcagaaaggcactaaccatacatgtgctcaagagcccttttgtgttttcttcacttcatgttgtagttcaatttagttttgctttgcaag

SEQ ID NO: 297198 - DNA, 120 bp, Artificial Sequence
  ENSG00000132334_86 (sequence is synthesized)
gatcctcggaaagtgtatcatcagcaatgacttttattttagaactaaatgtgaaccacggggggaatcatgatcgacattgctcgttgtcctttcttcctccctgtgggctgtgaatcc

SEQ ID NO: 297199 - DNA, 120 bp, Artificial Sequence
  ENSG00000132334_87 (sequence is synthesized)
aactcgtcctgggagcagggcgctctcgccttctgttcctctccgagctcagtgcacagaagcattctgcttacccagctgggactgctgactgcaccatcgagcacgcaggttgcactg

SEQ ID NO: 297200 - DNA, 120 bp, Artificial Sequence
  ENSG00000132334_88 (sequence is synthesized)
ttctcagcagctacactggattatatgccgcctttcttactgactgattatgaacttaaaacaaattcactctgctgctgtgaattatacatttatttttaagcatttatttcaactcga

SEQ ID NO: 297201 - DNA, 120 bp, Artificial Sequence
  ENSG00000132334_89 (sequence is synthesized)
gatgagcggtctctcctgtaaatttctccctgctggatctttgctctggtttctggtgacatagtgtgagtgccggcagccgcgagcctcagaaggaaaattacaaagggaatactcagt

SEQ ID NO: 297202 - DNA, 120 bp, Artificial Sequence
  ENSG00000132334_90 (sequence is synthesized)
aaatgatgtattgcctttcgcatcagtagcctgcttggaaatgttcaaattatcagcccaggagactccagtgctgtggacatgggtctgaacgaattgatcacctaggggctactgaga

SEQ ID NO: 297203 - DNA, 120 bp, Artificial Sequence
  ENSG00000132341_0 (sequence is synthesized)
tgcgcttccgccatctttccagcctcagtcggacgggcgcggagacgcttctggaaggtatcgcgacccggcgggcccggcacggccgggcggggacaggggtggcggcggcgggatagg

SEQ ID NO: 297204 - DNA, 120 bp, Artificial Sequence
  ENSG00000132341_1 (sequence is synthesized)
acccaggggcagcgggcggctgagtaggtgggtggtgcgggcccggccgggccggggcaggagacgggcgtggggtcggcgctagcccccgcgaacccccgtttcatcctccgctctcat

SEQ ID NO: 297205 - DNA, 120 bp, Artificial Sequence
  ENSG00000132341_2 (sequence is synthesized)
gcccccgcgaacccccgtttcatcctccgctctcatccccgtcccggtcccagtcccgttcccatccctacacctccggccgccgttccccgggccccgccgccccggatgccggccccg

SEQ ID NO: 297206 - DNA, 120 bp, Artificial Sequence
  ENSG00000132341_3 (sequence is synthesized)
cgcgagcgctcgcctccgtcctctgcctccgcaggaacgccgcgatggctgcgcagggagagccccaggtccagttcaaacttgtattggttggtgatggtggtactggaaaaacgacct

SEQ ID NO: 297207 - DNA, 120 bp, Artificial Sequence
  ENSG00000132341_4 (sequence is synthesized)
tcgtgaaacgtcatttgactggtgaatttgagaagaagtatgtagccaccttgggtgttgaggttcatcccctagtgttccacaccaacagaggacctattaagttcaatgtatgggaca

SEQ ID NO: 297208 - DNA, 120 bp, Artificial Sequence
  ENSG00000132341_5 (sequence is synthesized)
ttacttacaagaatgtgcctaactggcatagagatctggtacgagtgtgtgaaaacatccccattgtgttgtgtggcaacaaagtggatattaaggacaggaaagtgaaggcgaaatcca

SEQ ID NO: 297209 - DNA, 120 bp, Artificial Sequence
  ENSG00000132341_6 (sequence is synthesized)
ttgtcttccaccgaaagaagaatcttcagtactacgacatttctgccaaaagtaactacaactttgaaaagcccttcctctggcttgctaggaagctcattggagaccctaacttggaat

SEQ ID NO: 297210 - DNA, 120 bp, Artificial Sequence
  ENSG00000132341_7 (sequence is synthesized)
ttgttgccatgcctgctctcgccccaccagaagttgtcatggacccagctttggcagcacagtatgagcacgacttagaggttgctcagacaactgctctcccggatgaggatgatgacc

SEQ ID NO: 297211 - DNA, 120 bp, Artificial Sequence
  ENSG00000132341_8 (sequence is synthesized)
tgtgagaatgaagctggagcccagcgtcagaagtctagttttataggcagctgtcctgtgatgtcagcggtgcagcgtgtgtgccacctcattattatctagctaagcggaacatgtgct

SEQ ID NO: 297212 - DNA, 120 bp, Artificial Sequence
  ENSG00000132341_9 (sequence is synthesized)
tcatctgtgggatgctgaaggagatgagtgggcttcggagtgaatgtggcagtttaaaaaataacttcattgtttggacctgcatatttagctgttttggaacgcagttgattccttgag

SEQ ID NO: 297213 - DNA, 120 bp, Artificial Sequence
  ENSG00000132341_10 (sequence is synthesized)
tttcatatataagactgctgcagtcacatcacaatattcagtggtgaaatcttgtttgttactgtcattcccattccttttcgtttagaatcagaataaagttgtatttcaaatatctaa

SEQ ID NO: 297214 - DNA, 120 bp, Artificial Sequence
  ENSG00000132341_11 (sequence is synthesized)
agtgaactcatcccttgtttataaatagcatttggaaaccactaaagtagggaagttttatgccatgttaatatttgaattgccttgcttttatcacttaatttgaaatctattgggtta

SEQ ID NO: 297215 - DNA, 120 bp, Artificial Sequence
  ENSG00000132341_12 (sequence is synthesized)
atttggttagaagggttacatggtgtaaatattagtgcagttaagctaaagcagtgtttgctccaccttcatattggctaggtagggtcacctagggaagcacttgctcaaaatctgtga

SEQ ID NO: 297216 - DNA, 120 bp, Artificial Sequence
  ENSG00000132341_13 (sequence is synthesized)
cctgtcagaataaaaatgtggtttgtacatatcaaatagatattttaagggtaatattttcttttatggcaaaagtaatcatgttttaatgtagaacctcaaacaggatggaacatcagt

SEQ ID NO: 297217 - DNA, 120 bp, Artificial Sequence
  ENSG00000132341_14 (sequence is synthesized)
ggatggcaggaggttgggaattcttgctgttaaaaataattacaaattttgcacttttttgtttgaatgttagatgcttagtgtgaagttgatacgcaaggaaaatggtccatgtttacc

SEQ ID NO: 297218 - DNA, 120 bp, Artificial Sequence
  ENSG00000132341_15 (sequence is synthesized)
cacagttttcaggtactcctagactttaaagatgtcttgaacatttaagttcttcagcagttcacactacaccgtttttttgtttttttttcccccccgggagggtttttttgtagggca

SEQ ID NO: 297219 - DNA, 120 bp, Artificial Sequence
  ENSG00000132341_16 (sequence is synthesized)
gcacagcagagcaggacatggatgaaatactaggaatatgcacagtggggcagtgtgggggcttctcagtaatggagaacagttggtgaaacttttttttttttttaactaagcatttaa

SEQ ID NO: 297220 - DNA, 120 bp, Artificial Sequence
  ENSG00000132341_17 (sequence is synthesized)
tttatcttgcatattttccacatttaaaaatgaattaggtctattaggataattaggagtttgatcccatcaacactattcttgtagcagttaggaatcttgagctatttttttctcata

SEQ ID NO: 297221 - DNA, 120 bp, Artificial Sequence
  ENSG00000132341_18 (sequence is synthesized)
cgattactatagtccagtttaccaaagttttctttagatgtctgataatcttgagatgattgcttaccttaaaaggtatagaaaggatcacttaaatatatggaaaaatgaaataagggt

SEQ ID NO: 297222 - DNA, 120 bp, Artificial Sequence
  ENSG00000132341_19 (sequence is synthesized)
gaagctgaataaagttctacttactgtattaactggcaacagttgagtttcttaagatctgaattgctgtgtatgttacgctgtattcagaaccagtttctaaccagcctgtgagatggg

SEQ ID NO: 297223 - DNA, 120 bp, Artificial Sequence
  ENSG00000132341_20 (sequence is synthesized)
aagttttttccccataattgggatgaaacctttcattcaggtattttgaattgaaggtgtatgtgttgtttgtaaccttgtggagattgcaagtggtgttgacattctggatcttctatg

SEQ ID NO: 297224 - DNA, 120 bp, Artificial Sequence
  ENSG00000132341_21 (sequence is synthesized)
taacagttgaaatttggaagtgacgtcacttacctgtctaacgtggtgtgggagagaatttacaagtcctttattgaaagaataattgttgcaaaatatattgcttctactttgcctgga

SEQ ID NO: 297225 - DNA, 120 bp, Artificial Sequence
  ENSG00000132341_22 (sequence is synthesized)
cgccggcgtcggctgcgtctccggcgtttgaattgcgcttccgccatctttccagcctcagtcggacgggcgcggagacgcttctggaagcttgtattggttggtgatggtggtactgga

SEQ ID NO: 297226 - DNA, 120 bp, Artificial Sequence
  ENSG00000132341_23 (sequence is synthesized)
actgagagatggctattatatccaaggtaggcatttgtaacttgctgaacggtttttgagaggttttgtgtacttcagtcttcaaggttatagaaaatcaggtctgttccaacaaatagt

SEQ ID NO: 297227 - DNA, 120 bp, Artificial Sequence
  ENSG00000132341_24 (sequence is synthesized)
gtcatttttgggttaaaaaaagacaagtggacttcggggagttgaccaccattttggtggcagagaaaattttattaaagttgtgtcatttgcatgctgtgtcatgctaggcatgcttta

SEQ ID NO: 297228 - DNA, 120 bp, Artificial Sequence
  ENSG00000132341_25 (sequence is synthesized)
gaaaaaactatgacttacactgggacttataagtcatatttaaaacaataataggctgttaacagcagtttcagtatttggaaacttaggttcatgtatgtattttggtgtggtgatcaa

SEQ ID NO: 297229 - DNA, 120 bp, Artificial Sequence
  ENSG00000132341_26 (sequence is synthesized)
tgaatgtttttactgtattagaaaacaataaacaccagatactagaccagaggagataggagatcttaacaagtgttatacaagactagctgatttcttgttaaattgtttgtactaagt

SEQ ID NO: 297230 - DNA, 120 bp, Artificial Sequence
  ENSG00000132341_27 (sequence is synthesized)
tgtgcagagtatttttctcaaatagtttgatttaaaaattgcaaggaaaatgttcattgtaccaaaaagaggaatcaagaaaatactcatctctcttggaacctcacgttgccgataaca

SEQ ID NO: 297231 - DNA, 120 bp, Artificial Sequence
  ENSG00000132341_28 (sequence is synthesized)
cattatctggaatcattccatgccttttgctttccttgagcatgtacaaataaacacaagaatttcccccaaaagaatcctttaaccaaaaagttgtggtttcttgccttgctaactgta

SEQ ID NO: 297232 - DNA, 120 bp, Artificial Sequence
  ENSG00000132341_29 (sequence is synthesized)
ctggagtgcagcttccgcctcctaagctcaagccatcctcttacctcagcatcctgagtagcttggactataggcacgtgccactatgcctgactaatttttgtatttttttgtagagat

SEQ ID NO: 297233 - DNA, 63 bp, Artificial Sequence
  ENSG00000132341_30 (sequence is synthesized)
ttgcttggcctatctggattttttaagacaggaataatgttttccagtatagccagccattta

SEQ ID NO: 297234 - DNA, 120 bp, Artificial Sequence
  ENSG00000132341_31 (sequence is synthesized)
taagacaggaataatgttttccagtatagccagccatttaaagaccttctgaagaatgtgtttccaggccctaccctcagaatatggcagcttggttatccagaatctcatttagcatta

SEQ ID NO: 297235 - DNA, 120 bp, Artificial Sequence
  ENSG00000132341_32 (sequence is synthesized)
attacttcagatacttttttgggatgaggggagtattaatggtgaagtatatcagggagatttgatagggtcagctcatctctcttaggaggaattgtgtattaacatttttagaattga

SEQ ID NO: 297236 - DNA, 120 bp, Artificial Sequence
  ENSG00000132341_33 (sequence is synthesized)
cagagaccttgaaagtgaggggagagatacaggtgactcgttgaggtctaagactataactagttgaatcctagtctctggttcttagcattcttcacttgtgcagtaaactgagtgtac

SEQ ID NO: 297237 - DNA, 120 bp, Artificial Sequence
  ENSG00000132341_34 (sequence is synthesized)
tggtgaatttgagaagaagtatgtaggtatgtgctggaaaaccttgcttgtggaaatatgtgagaaatgggtaagttcatccactcaatcgcatcgtttccgtttcagccaccttgggtg

SEQ ID NO: 297238 - DNA, 120 bp, Artificial Sequence
  ENSG00000132341_35 (sequence is synthesized)
atctttccagcctcagtcggacgggcgcggagacgcttctggaaggaacgccgcgatggctgcgcagggagagccccaggtccagttcaaaccttcctctggcttgctaggaagctcatt

SEQ ID NO: 297239 - DNA, 120 bp, Artificial Sequence
  ENSG00000132341_36 (sequence is synthesized)
tccgccatctttccagcctcagtcggacgggcgcggagacgcttctggaaggaacgccgcgatggctgcgcagggagagccccagcttgtattggttggtgatggtggtactggaaaaac

SEQ ID NO: 297240 - DNA, 120 bp, Artificial Sequence
  ENSG00000132341_37 (sequence is synthesized)
ccggccaggagaaattcggtggactgagagatggctattatatccaagagatggggattcaccatgttgcccatgctggtctggaactcatgagctcagcccagtgtgccatcataatgt

SEQ ID NO: 297241 - DNA, 120 bp, Artificial Sequence
  ENSG00000132341_38 (sequence is synthesized)
tgcgcttccgccatctttccagcctcagtcggacgggcgcggagacgcttctggaaggaacgccgcgatggctgcgcagggagagccccaggtccagttcaaagtaggtaaccctgcggg

SEQ ID NO: 297242 - DNA, 120 bp, Artificial Sequence
  ENSG00000132341_39 (sequence is synthesized)
gcgggaggcggccgagcccgaccgcgtgcgactcgcgggtccctcctcctggggccacgatggctgtaatggggccccgcatccacattctttgttttaagtgagcctgtggtggttaaa

SEQ ID NO: 297243 - DNA, 120 bp, Artificial Sequence
  ENSG00000132356_0 (sequence is synthesized)
cgcagcgccatgcgcagactcagttcctggagaaagatggcgacagccgagaagcagaaacacgacgggcgggtgaagatcggccactacattctgggtgacacgctgggggtcggcacc

SEQ ID NO: 297244 - DNA, 120 bp, Artificial Sequence
  ENSG00000132356_1 (sequence is synthesized)
ttcggcaaagtgaaggttggcaaacatgaattgactgggcataaagtagctgtgaagatactcaatcgacagaagattcggagccttgatgtggtaggaaaaatccgcagagaaattcag

SEQ ID NO: 297245 - DNA, 120 bp, Artificial Sequence
  ENSG00000132356_2 (sequence is synthesized)
aacctcaagcttttcaggcatcctcatataattaaactgtaccaggtcatcagtacaccatctgatattttcatggtgatggaatatgtctcaggaggagagctatttgattatatctgt

SEQ ID NO: 297246 - DNA, 120 bp, Artificial Sequence
  ENSG00000132356_3 (sequence is synthesized)
aagaatggaaggctggatgaaaaagaaagtcggcgtctgttccaacagatcctttctggtgtggattattgtcacaggcatatggtggtccatagagatttgaaacctgaaaatgtcctg

SEQ ID NO: 297247 - DNA, 120 bp, Artificial Sequence
  ENSG00000132356_4 (sequence is synthesized)
cttgatgcacacatgaatgcaaagatagctgattttggtctttcaaacatgatgtcagatggtgaatttttaagaacaagttgtggctcacccaactatgctgcaccagaagtaatttca

SEQ ID NO: 297248 - DNA, 120 bp, Artificial Sequence
  ENSG00000132356_5 (sequence is synthesized)
ggaagattgtatgcaggcccagaggtagatatatggagcagtggggttattctctatgctttattatgtggaacccttccatttgatgatgaccatgtgccaactctttttaagaagata

SEQ ID NO: 297249 - DNA, 120 bp, Artificial Sequence
  ENSG00000132356_6 (sequence is synthesized)
tgtgatgggatcttctatacccctcaatatttaaatccttctgtgattagccttttgaaacatatgctgcaggtggatcccatgaagagggccacaatcaaagatatcagggaacatgaa

SEQ ID NO: 297250 - DNA, 120 bp, Artificial Sequence
  ENSG00000132356_7 (sequence is synthesized)
tggtttaaacaggaccttccaaaatatctctttcctgaggatccatcatatagttcaaccatgattgatgatgaagccttaaaagaagtatgtgaaaagtttgagtgctcagaagaggaa

SEQ ID NO: 297251 - DNA, 120 bp, Artificial Sequence
  ENSG00000132356_8 (sequence is synthesized)
gttctcagctgtctttacaacagaaatcaccaggatcctttggcagttgcctaccatctcataatagataacaggagaataatgaatgaagccaaagatttctatttggcgacaagccca

SEQ ID NO: 297252 - DNA, 120 bp, Artificial Sequence
  ENSG00000132356_9 (sequence is synthesized)
cctgattcttttcttgatgatcatcacctgactcggccccatcctgaaagagtaccattcttggttgctgaaacaccaagggcacgccatacccttgatgaattaaatccacagaaatcc

SEQ ID NO: 297253 - DNA, 120 bp, Artificial Sequence
  ENSG00000132356_10 (sequence is synthesized)
aaacaccaaggtgtaaggaaagcaaaatggcatttaggaattagaagtcaaagtcgaccaaatgatattatggcagaagtatgtagagcaatcaaacaattggattatgaatggaaggtt

SEQ ID NO: 297254 - DNA, 120 bp, Artificial Sequence
  ENSG00000132356_11 (sequence is synthesized)
gtaaacccatattatttgcgtgtacgaaggaagaatcctgtgacaagcacttactccaaaatgagtctacagttataccaagtggatagtagaacttatctactggatttccgtagtatt

SEQ ID NO: 297255 - DNA, 120 bp, Artificial Sequence
  ENSG00000132356_12 (sequence is synthesized)
gatgatgaaattacagaagccaaatcagggactgctactccacagagatcgggatcagttagcaactatcgatcttgccaaaggagtgattcagatgctgaggctcaaggaaaatcctca

SEQ ID NO: 297256 - DNA, 120 bp, Artificial Sequence
  ENSG00000132356_13 (sequence is synthesized)
gaagtttctcttacctcatctgtgacctcacttgactcttctcctgttgacctaactccaagacctggaagtcacacaatagaattttttgagatgtgtgcaaatctaattaaaattctt

SEQ ID NO: 297257 - DNA, 120 bp, Artificial Sequence
  ENSG00000132356_14 (sequence is synthesized)
gcacaataaacagaaaactttgcttatttcttttgcagcaataagcatgcataataagtcacagccaaatgcttccatttgtaatcaagttatacataattataaccgagggctggcgtt

SEQ ID NO: 297258 - DNA, 120 bp, Artificial Sequence
  ENSG00000132356_15 (sequence is synthesized)
ttggaatgcaatttgcacagggattggaacatgatttatagttaaaagcctaatatgcagaaatgaattaagatcattttgttgttcattgtgcagtatgtatatagcataatatacaca

SEQ ID NO: 297259 - DNA, 120 bp, Artificial Sequence
  ENSG00000132356_16 (sequence is synthesized)
gtgaattataggtctcaggcttacttgatttttggctattttatatttagtgtacacagggctttgaaatattaatttacataaaggccttcatatattattacgtgttatatattacgt

SEQ ID NO: 297260 - DNA, 120 bp, Artificial Sequence
  ENSG00000132356_17 (sequence is synthesized)
gttataaatttattcaataaatatttgcctagaattcccaagacctttataggtgattttgttttctgggctccttaacttcataaatagctagtatcttccagcagtagtaacagtctg

SEQ ID NO: 297261 - DNA, 120 bp, Artificial Sequence
  ENSG00000132356_18 (sequence is synthesized)
tcataaatagctagtatcttccagcagtagtaacagtctggataacttcttccatatccctccctctttgtttttttgagacagtgtcactttgtcacccaggctggagtgcaatggtgt

SEQ ID NO: 297262 - DNA, 73 bp, Artificial Sequence
  ENSG00000132356_19 (sequence is synthesized)
gcgtgtgccaccacacccggctaatttttcgtatttttagtgtgcgtgatccaccacctcagcttcccaaagt

SEQ ID NO: 297263 - DNA, 83 bp, Artificial Sequence
  ENSG00000132356_20 (sequence is synthesized)
catatcccccttttaaaattctgtagtgtatggtaagtcatatcagatatcagacctaatttaaatttcattttagctttaca

SEQ ID NO: 297264 - DNA, 120 bp, Artificial Sequence
  ENSG00000132356_21 (sequence is synthesized)
aacacagaatttatatattcagatactctagcactaattttagtcttaaaatattcccacgatattctgtacacaaaatgttctttttgttacaagagctgagttgcatatactgtagat

SEQ ID NO: 297265 - DNA, 120 bp, Artificial Sequence
  ENSG00000132356_22 (sequence is synthesized)
aaatcatattatttttgccaatttcacaaattcctctggcccatcatgtcagtcattattgagtatatgcacacattgctacttatttgattatgtatcttttaaattgattcagtgcat

SEQ ID NO: 297266 - DNA, 120 bp, Artificial Sequence
  ENSG00000132356_23 (sequence is synthesized)
agaaaactatctcttacaaactttaagtgctctgatatgacttcccccccaaattttattatgaacatttttaaaaacagaaaaattgaaaaactgtttggtaagcacatgtatatctac

SEQ ID NO: 297267 - DNA, 120 bp, Artificial Sequence
  ENSG00000132356_24 (sequence is synthesized)
catttagattcagcagttgttaatgttttgtcatttgttttctctatacctatatatgtatagatacagctagttatgcatatatatgcatatatgtgtttgtttgtgtatgtatatatg

SEQ ID NO: 297268 - DNA, 120 bp, Artificial Sequence
  ENSG00000132356_25 (sequence is synthesized)
cttttttccccctgaaccatttggatgttacagacatacttatcaccgtgaaaatacttcaagtatctcctacagataatgacattctcctaaaaatccgtaataccattgtaaaagtaa

SEQ ID NO: 297269 - DNA, 120 bp, Artificial Sequence
  ENSG00000132356_26 (sequence is synthesized)
taattccccaatatcatctaatcaagccatatttaaatttctgaagttaactccaaatttctttatagctgattatttcaaactaggatccaattaaagtttacatatgacacttggtta

SEQ ID NO: 297270 - DNA, 120 bp, Artificial Sequence
  ENSG00000132356_27 (sequence is synthesized)
taactctttagttggatataacattattattattttgataaaatatggaacaaatcaattctattaataagtggtcacatttgttttgggcttaaattactttttaaagatactggattt

SEQ ID NO: 297271 - DNA, 120 bp, Artificial Sequence
  ENSG00000132356_28 (sequence is synthesized)
tcctaagatttctgatttacactgatatttttttttgtcattcttaattgcatcacacaatagatgtaaatgaagatgtagtcacctcagataaaattggtatcgtgtatgataatattg

SEQ ID NO: 297272 - DNA, 120 bp, Artificial Sequence
  ENSG00000132356_29 (sequence is synthesized)
attgtatcatttatatttgccttatgttaactttaagaaattgatttttttgtattaatcattttcccattgcaacagagctatattttttctattttaagaatcatattttaggattat

SEQ ID NO: 297273 - DNA, 120 bp, Artificial Sequence
  ENSG00000132356_30 (sequence is synthesized)
ggcaaatacagtgagcacttatgtaaccagatgataatgaactcaaatgtcatgatagcttgcataaatggtgactctagtagatttgactcaagcacttctagaatcatgcactgaatt

SEQ ID NO: 297274 - DNA, 120 bp, Artificial Sequence
  ENSG00000132356_31 (sequence is synthesized)
caaaagaaaaatcttgctgctttttgtccagggcttgttctattcaacttctaatttgaaagctgtacaaagtaatagaagttccatttaaatatgagttcaaaactgtatttacttttt

SEQ ID NO: 297275 - DNA, 120 bp, Artificial Sequence
  ENSG00000132356_32 (sequence is synthesized)
atgtggccctctctttaggggattctaattttacttagggtctctaagtgcagcataatgttcctgatgttaacagaagactgtatttttaaagttacaaatttgtatatggaattaagt

SEQ ID NO: 297276 - DNA, 120 bp, Artificial Sequence
  ENSG00000132356_33 (sequence is synthesized)
aatggcgctatatacgctgttgtggggaggggggaagaaaaggaggaaccaattaaataggaccttttaaaaattgttaattttgtaaactttgcttctcttataagttattgtgattca

SEQ ID NO: 297277 - DNA, 120 bp, Artificial Sequence
  ENSG00000132356_34 (sequence is synthesized)
ttttagttactgtgttttattttgaaaatatttaaatattgcacttctataaatagtatgataaatgcacagacaattgcagtaaattcttttttaagctaggatatttgaaatgacaac

SEQ ID NO: 297278 - DNA, 120 bp, Artificial Sequence
  ENSG00000132356_35 (sequence is synthesized)
ctttggttaagtgtgtcaaggttgcaacagaattttcacaatttttttgttgtttgcaaattgttactaatattgaagaggtaagggaggcaatgcaaatgatttttaatctttttttat

SEQ ID NO: 297279 - DNA, 120 bp, Artificial Sequence
  ENSG00000132356_36 (sequence is synthesized)
tatcttttcagcagtttatattttttgtgactttatgcaaccatatttttactttgtcttgacaactgaaagatgtataaggttttttgccagaaatgtactgtatacatagttttaagt

SEQ ID NO: 297280 - DNA, 120 bp, Artificial Sequence
  ENSG00000132356_37 (sequence is synthesized)
ataacagattttactgatatgtaaaaattttgccattaaaataaatgatttctcactgagaggaacttttctaccaggttggggcatatgggagcttaatatatcatatctaatttaaaa

SEQ ID NO: 297281 - DNA, 120 bp, Artificial Sequence
  ENSG00000132356_38 (sequence is synthesized)
taatttcactgaaataaactccattgcttttacctaatttttttcttgagatgcttttgtagtttttcagagttttagatgattttatacaaaatcctctgcctagcactgctctttttg

SEQ ID NO: 297282 - DNA, 120 bp, Artificial Sequence
  ENSG00000132356_39 (sequence is synthesized)
atgttgtagtgacaccatttacattgaattaatgcttggtagcctggggctagatgtggaactccatggatctgtgttctgactggcacctttggaatgaaagaaaagtgtgtgctgtcc

SEQ ID NO: 297283 - DNA, 120 bp, Artificial Sequence
  ENSG00000132356_40 (sequence is synthesized)
aaattttttccccttaattctttccctcatcttctcacccataatagaaattttatttccattgtgagttctgacaagaatgaaattccacatacaacataactgtaaattgttggtagg

SEQ ID NO: 297284 - DNA, 120 bp, Artificial Sequence
  ENSG00000132356_41 (sequence is synthesized)
tagaagttaatatttgtggttcatgtatattttgaccagagtatatttaagtatataatttcagcttccttgatttagaaatatgatataataaagaaaaactccatttatcatctgtta

SEQ ID NO: 297285 - DNA, 120 bp, Artificial Sequence
  ENSG00000132356_42 (sequence is synthesized)
acagtgtcgctttttgaatagtttggaaaacaggagaatttaatatttttaagaataactctttgtccttcactatactactgaaattgaaaacagaagctgaagtttgctagatttata

SEQ ID NO: 297286 - DNA, 120 bp, Artificial Sequence
  ENSG00000132356_43 (sequence is synthesized)
atgaacttttaataacttttcacccaaaccatgcttatttgtgtgaatgttttgcatcttgattaactcaatgcagaaatactgtagtattttctatttttataagcttgttggcctaga

SEQ ID NO: 297287 - DNA, 120 bp, Artificial Sequence
  ENSG00000132356_44 (sequence is synthesized)
ctgctcaaagaaatgagatttgtgtaaaaatatggctgtgagtaaggcaggagtacctaattttagatttgtcaagtttcatcttttttttaaatattaacttaatgtcaaaaattattt

SEQ ID NO: 297288 - DNA, 120 bp, Artificial Sequence
  ENSG00000132356_45 (sequence is synthesized)
aaaaaatttttaaaaaaatggtgttgtctatcttaattcttttaggaataaaacaattcaggacatggagactgtggaaagttgttatttaaataaataaaaagaaatgttataactgtg

SEQ ID NO: 297289 - DNA, 120 bp, Artificial Sequence
  ENSG00000132356_46 (sequence is synthesized)
accttgttactaacttggtattttacgccttgattcttttgaggcttcttgacttgttcctagtaattcaactgcaaaggaataaaaaatgtgatttcttgtgcctttgcaatattaaca

SEQ ID NO: 297290 - DNA, 120 bp, Artificial Sequence
  ENSG00000132356_47 (sequence is synthesized)
tttatgaatcttatttttcttgtaatcttatagcatattgtccttttaagattatcatcttgtaaaatccttaaagccaggtgtagtctgatcctaaggtgatagttttctgctgcattt

SEQ ID NO: 297291 - DNA, 120 bp, Artificial Sequence
  ENSG00000132356_48 (sequence is synthesized)
tgttaacctacttaatgtgacaagtgagaaaaatgactgacacttctttttgtttcctaagggttttgaaaagtttcttcctaggctgtgtgcggtggctcacacctgtaattccagtac

SEQ ID NO: 297292 - DNA, 80 bp, Artificial Sequence
  ENSG00000132356_49 (sequence is synthesized)
attctcctggcagcccccgcccgccccgccagggggagcgtctgcgcccgacgtaggctgcggggcctgggctggcggcg

SEQ ID NO: 297293 - DNA, 120 bp, Artificial Sequence
  ENSG00000132357_0 (sequence is synthesized)
agaggaaacaggaacaatggctaccgagagtactccctcagagatcatagaaagagaaagaaaaaagttgcttgaaatccttcaacatgatcctgattctatcttagacacgttaacttc

SEQ ID NO: 297294 - DNA, 120 bp, Artificial Sequence
  ENSG00000132357_1 (sequence is synthesized)
tcggaggctgatttctgaggaagagtatgagactctggagaatgttacagatctcctgaagaaaagtcggaagctgttaattttggtacagaaaaagggagaggcgacctgtcagcattt

SEQ ID NO: 297295 - DNA, 120 bp, Artificial Sequence
  ENSG00000132357_2 (sequence is synthesized)
tctcaagtgtttatttagtacttttccacagtcagctgccatttgcggcttaaggcatgaagttttaaaacatgagaatacagtacctcctcaatctatgggggcaagcagtaattcaga

SEQ ID NO: 297296 - DNA, 120 bp, Artificial Sequence
  ENSG00000132357_3 (sequence is synthesized)
agatgctttttctcctggaataaaacagcctgaagcccctgagatcacagtgttcttcagtgagaaggaacacttggatttggaaacctctgagtttttcagggacaagaaaactagtta

SEQ ID NO: 297297 - DNA, 120 bp, Artificial Sequence
  ENSG00000132357_4 (sequence is synthesized)
tagggaaacagctttgtctgccaggaagaatgagaaggaatatgacacaccagaagtcacattatcatattcagttgagaaagttggatgtgaagttccagcaactattacatatataaa

SEQ ID NO: 297298 - DNA, 120 bp, Artificial Sequence
  ENSG00000132357_5 (sequence is synthesized)
agatggacagagatatgaggagctagatgattctttatacttaggaaaagaggaatatctaggatctgttgacacccctgaagatgcagaagccactgtggaagaggaggtttatgatga

SEQ ID NO: 297299 - DNA, 120 bp, Artificial Sequence
  ENSG00000132357_6 (sequence is synthesized)
cccagagcacgttggatatgatggtgaagaggacttcgagaattcagaaaccacagagttctctggtgaagaaccaagttatgagggatcagaaaccagcctttcattggaggaggaaca

SEQ ID NO: 297300 - DNA, 120 bp, Artificial Sequence
  ENSG00000132357_7 (sequence is synthesized)
ggagaaaagtatagaagaaagaaaaaaggtgtttaaagatgtcctgttatgtttgaacatggatagaagcagaaaggttctgccagattttgttaaacaattctccttagatcgaggatg

SEQ ID NO: 297301 - DNA, 120 bp, Artificial Sequence
  ENSG00000132357_8 (sequence is synthesized)
taagtggacccctgagagtccaggagacttagcctggaatttcctgatgaaagttcaagcacgagatgtgacggctagggattcaatcctcagtcacaaggttctggatgaagatagcaa

SEQ ID NO: 297302 - DNA, 120 bp, Artificial Sequence
  ENSG00000132357_9 (sequence is synthesized)
ggaggatttgctggctggagtggagaatttggaaattcgagacatacaaaccattaatccccttgacgtgctttgtgccaccatgctgtgttcagatagctctttgcaacgccaagtcat

SEQ ID NO: 297303 - DNA, 120 bp, Artificial Sequence
  ENSG00000132357_10 (sequence is synthesized)
gtcaaacatgtatcagtgccagtttgctcttcccctgctactgccagatgcagaaaacaacaaaagcatcttaatgctgggggccatgaaagacattgtgaagaagcagtcaacacagtt

SEQ ID NO: 297304 - DNA, 120 bp, Artificial Sequence
  ENSG00000132357_11 (sequence is synthesized)
ttcaggggggcctacagaggatacagaaaagtttctgactctcatgaagatgcctgtcatctcttttgtgcgtctaggatactgtagcttctctaagtccagaatcctcaacacacttct

SEQ ID NO: 297305 - DNA, 120 bp, Artificial Sequence
  ENSG00000132357_12 (sequence is synthesized)
cagccctgcccagttgaaattacacaaaatctttcttcatcaagatttgcctcttttggtgcttccccggcaaatctctgatggcctggttgagataacatggtgttttcctgatagcga

SEQ ID NO: 297306 - DNA, 120 bp, Artificial Sequence
  ENSG00000132357_13 (sequence is synthesized)
tgatagaaaggaaaacccctttttccaaaagcctgttgctctggctaatctccgtggaaatctagaaagcttttggactcagtttggttttttgatggaagtttcttcagctgtgttttt

SEQ ID NO: 297307 - DNA, 120 bp, Artificial Sequence
  ENSG00000132357_14 (sequence is synthesized)
tttcactgactgtttaggtgagaaggaatgggacttgctaatgtttttaggagaggctgccattgaaagatgctactttgttctcagttcccaagccagggagagtgaagaggctcaaat

SEQ ID NO: 297308 - DNA, 120 bp, Artificial Sequence
  ENSG00000132357_15 (sequence is synthesized)
ttttcagaggatactgaacttgaagccagcacagctactgttttgggagaggggagatgctggggatagaaggaagaacatggagggccttcaagctgccctccaggaagtgatgttctc

SEQ ID NO: 297309 - DNA, 120 bp, Artificial Sequence
  ENSG00000132357_16 (sequence is synthesized)
tgaaaacactcagagaattcaagtttcctctggagaaaacatggctgggacagctgaaggtgagggtcagcaaagacacagtcagctaaaaagctcatctaaaagccaggctctaatgcc

SEQ ID NO: 297310 - DNA, 120 bp, Artificial Sequence
  ENSG00000132357_17 (sequence is synthesized)
aattcaagagcctgggactcaatgtgagctcagccagaatcttcagaatctctatggtaccccagtattcaggcctgttctagagaactcctggctctttccaaccagaattggaggtaa

SEQ ID NO: 297311 - DNA, 120 bp, Artificial Sequence
  ENSG00000132357_18 (sequence is synthesized)
ctttaaccatgtttccttgaaagcctcctgggttatgggccgcccctttgggtcagagcagaggcctaagtggttccatcctttgccttttcagaatgcaggggcccagggccgaggtaa

SEQ ID NO: 297312 - DNA, 120 bp, Artificial Sequence
  ENSG00000132357_19 (sequence is synthesized)
aagttttggtattcaatccttccatccccagatattttattcaggtgaaagattcatgaaattttccagagttgctcggggatgtcactcgaatggaacatttgggagactgccaagacc

SEQ ID NO: 297313 - DNA, 120 bp, Artificial Sequence
  ENSG00000132357_20 (sequence is synthesized)
catttgtcagcatgtacaggcctgccctgagagaccacaaatgatgggaactcttgaaaggtctagggcagtagcctccaagataggtcactcctattccctggattcacagccagcaag

SEQ ID NO: 297314 - DNA, 120 bp, Artificial Sequence
  ENSG00000132357_21 (sequence is synthesized)
agcagtagggaagccatggcctcagcaagcttgcaccagggtaacagagttaactgaagcaactggaaaactgataagaacatcccatattggaaagcctcaccctcagtcctttcaacc

SEQ ID NO: 297315 - DNA, 120 bp, Artificial Sequence
  ENSG00000132357_22 (sequence is synthesized)
agcagcagccacacaaaaactaagacctgcttctcagcaaggagtccagatgaagacacaaggtggggcttcaaatccagctctccaaatagggtcccatcccatgtgcaagagctctca

SEQ ID NO: 297316 - DNA, 120 bp, Artificial Sequence
  ENSG00000132357_23 (sequence is synthesized)
gttcaaatccgatcagtccaacccatccacagtcaaacactcccagcctaaacccttccattctgtgccctctcaacctaaatcctctcagacaaaatcctgtcagtcccagccctccca

SEQ ID NO: 297317 - DNA, 120 bp, Artificial Sequence
  ENSG00000132357_24 (sequence is synthesized)
aactaaaccttctccatgcaaatctactcagcctaagccaagccagccctggcctccccagtctaagccttctcagcccagaccccctcaacctaagtcatcctcaaccaatccttcaca

SEQ ID NO: 297318 - DNA, 120 bp, Artificial Sequence
  ENSG00000132357_25 (sequence is synthesized)
agctaaggcacaccactcaaaagcagggcagaagaggggagggaagcattaaagagctaactccagagatctataaagcatatcctttacccaggccattcctatcatatagtaagcaga

SEQ ID NO: 297319 - DNA, 120 bp, Artificial Sequence
  ENSG00000132357_26 (sequence is synthesized)
tcatatagtaagcagaagagttgccatgaaagtaaaagactactgtcattagcatgtaaaacaaagaaagatatacatgactgaattggatatctttgtttgtttgtttgagacagagtt

SEQ ID NO: 297320 - DNA, 74 bp, Artificial Sequence
  ENSG00000132357_27 (sequence is synthesized)
aggcctctcaaagtgttgggattacgtgtgtaagccacagtgcccagcccgaattggatatctttaagatatct

SEQ ID NO: 297321 - DNA, 120 bp, Artificial Sequence
  ENSG00000132357_28 (sequence is synthesized)
ccacagtgcccagcccgaattggatatctttaagatatctgtaagtgttatatccctaaccaagaagaaaaatatgaaaataattaagactagaatcaagcagtagataattgaatccaa

SEQ ID NO: 297322 - DNA, 120 bp, Artificial Sequence
  ENSG00000132357_29 (sequence is synthesized)
tcttgggtattattagataatgtataacttgcacccagggaatgggggtctatgagacaaccccacttggagaagaatggggttagggtctctaattgcaaagtgactgtacaataggac

SEQ ID NO: 297323 - DNA, 120 bp, Artificial Sequence
  ENSG00000132357_30 (sequence is synthesized)
gaaagttgcctctgtgtctgagaaagtatcttagttgttggctgctccagaggtatctttgtcaaaagcttctggttcaatatcagccactgagcagataaccctgcttatttggtgtgg

SEQ ID NO: 297324 - DNA, 120 bp, Artificial Sequence
  ENSG00000132357_31 (sequence is synthesized)
ttaaatcaactagcttctgctaatagccccaatttgcttgaatgggaaaactctctcatttgacccttataggtagaaataatgaattaacaaccaataaaattaatcatttggcattaa

SEQ ID NO: 297325 - DNA, 120 bp, Artificial Sequence
  ENSG00000132359_0 (sequence is synthesized)
gcagacagacatcggcacgtatggacggcgcgagccggtactgcgttccggaggagccatccggcgtcacaggctgtgctggggaggtggggtgaccgtcctcagaaacccccgcgggcg

SEQ ID NO: 297326 - DNA, 120 bp, Artificial Sequence
  ENSG00000132359_1 (sequence is synthesized)
gggcgctgcacacacgtccacctatagggtgtgtgtgcgtgcgtgaggtgtgcagcccctgtcaggatctggcgagagaagctgaccgggatggaggtcagaggatcgacaagaccatgc

SEQ ID NO: 297327 - DNA, 120 bp, Artificial Sequence
  ENSG00000132359_2 (sequence is synthesized)
tggcaagtctgaaggtcaagaagcaggagctggccaacagctcggatgcgaccctcccagaccggccgctctcccctcctctcacggcacctcccaccatgaagtcgtcggagttctttg

SEQ ID NO: 297328 - DNA, 120 bp, Artificial Sequence
  ENSG00000132359_3 (sequence is synthesized)
agatgctggagaaaatgcaggggatcaagcttgaagagcagaagccgggaccccagaagaacaaggacgactatatcccataccccagcatcgacgaggttgtggagaagggaggcccgt

SEQ ID NO: 297329 - DNA, 120 bp, Artificial Sequence
  ENSG00000132359_4 (sequence is synthesized)
accctcaggtcatcctgccacagtttgggggctattggatcgaggacccggagaacgtgggcaccccaacatcgctggggagcagcatctgtgaggaggaggaagaggacaacctcagcc

SEQ ID NO: 297330 - DNA, 120 bp, Artificial Sequence
  ENSG00000132359_5 (sequence is synthesized)
ccaacacatttggctacaagctcgagtgcaagggtgaagccagggcctaccggaggcacttcctggggaaggatcatctaaacttttactgtaccggcagcagcctggggaacttgatcc

SEQ ID NO: 297331 - DNA, 120 bp, Artificial Sequence
  ENSG00000132359_6 (sequence is synthesized)
tgtccgtcaagtgcgaggaagcagaggggatcgagtacctccgggtcatccttaggtccaaactgaagacggtacatgagcggatccccttggctggactgagcaagcttcccagtgtcc

SEQ ID NO: 297332 - DNA, 120 bp, Artificial Sequence
  ENSG00000132359_7 (sequence is synthesized)
ctcagattgcaaaggctttctgtgatgatgcagtgggactgagattcaatcctgtcctgtaccccaaggcctcccaaatgattgtgtcctatgatgagcatgaagtcaacaacacattca

SEQ ID NO: 297333 - DNA, 120 bp, Artificial Sequence
  ENSG00000132359_8 (sequence is synthesized)
aattcggagtcatttatcaaaaagccaggcagaccctggaggaggagctatttgggaacaatgaggagagcccagcttttaaggagttcttggacctgctgggggacacgatcacactgc

SEQ ID NO: 297334 - DNA, 120 bp, Artificial Sequence
  ENSG00000132359_9 (sequence is synthesized)
aggatttcaaaggtttccgaggaggcctggacgtgacccacggacagacaggggtggaatcagtgtacacaacattccgggacagggagatcatgtttcacgtttccacaaagctgccat

SEQ ID NO: 297335 - DNA, 120 bp, Artificial Sequence
  ENSG00000132359_10 (sequence is synthesized)
ttaccgacggagacgcccagcagctccagagaaagagacacattggaaatgacatcgtggccatcatcttccaagaggaaaacacgccgtttgtcccagacatgatagcctccaatttct

SEQ ID NO: 297336 - DNA, 120 bp, Artificial Sequence
  ENSG00000132359_11 (sequence is synthesized)
tacatgcctacatcgtcgtgcaggtcgagaccccaggcacagagaccccatcctacaaggtctctgtcactgcgcgggaagatgtgcccacctttggtccacctctgcccagtccccccg

SEQ ID NO: 297337 - DNA, 120 bp, Artificial Sequence
  ENSG00000132359_12 (sequence is synthesized)
ttttccagaagggcccggaattcagggagtttctgctcaccaagctcaccaatgccgagaacgcctgctgcaagtcggacaagtttgcaaagctggaggaccggaccagggctgccctcc

SEQ ID NO: 297338 - DNA, 120 bp, Artificial Sequence
  ENSG00000132359_13 (sequence is synthesized)
ctggagtcttttaagagggccatccgcgtacgcagccactccatggagaccatggtgggcggccagaagaagtcgcacagtgggggcatccctggcagcctcagcgggggcatctcccac

SEQ ID NO: 297339 - DNA, 120 bp, Artificial Sequence
  ENSG00000132359_14 (sequence is synthesized)
aacagcatggaggtcaccaagaccaccttctcgcctccagtggtggcggcaacggtgaagaaccagtcacggagtcccatcaagcgacgctcggggctcttcccccgcctgcacacgggc

SEQ ID NO: 297340 - DNA, 120 bp, Artificial Sequence
  ENSG00000132359_15 (sequence is synthesized)
tcagaaggccagggcgacagccgggcacgatgtgacagcacatccagcacacccaagaccccagatggtggacactcctctcaggagataaagtctgagacctcatccaatcccagctct

SEQ ID NO: 297341 - DNA, 120 bp, Artificial Sequence
  ENSG00000132359_16 (sequence is synthesized)
ccggaaatctgccccaacaaggagaagcccttcatgaagttgaaggaaaacggccgtgccatctcccgctcctcctccagcaccagcagcgtcagcagcactgcaggggagggcgaggcc

SEQ ID NO: 297342 - DNA, 120 bp, Artificial Sequence
  ENSG00000132359_17 (sequence is synthesized)
atggaggagggcgacagtgggggcagccagccgtccacgacctcacccttcaagcaggaggtgtttgtctacagcccgtccccgagcagcgagagccccagcctgggggcagctgccacc

SEQ ID NO: 297343 - DNA, 120 bp, Artificial Sequence
  ENSG00000132359_18 (sequence is synthesized)
ccgatcatcatgagccggagtcccacagatgccaaaagcagaaactccccgagatcgaacctgaaattccgctttgacaagctcagccatgccagctctggtgcgggtcactaatgtgaa

SEQ ID NO: 297344 - DNA, 120 bp, Artificial Sequence
  ENSG00000132359_19 (sequence is synthesized)
agtggagtccttcgcctgtccaagggaatcccctcttctgtcctggaaaaggctcctgtaccagcagtttgggagtgccgtccacgaccctgacagtcccagccctgctgccccatggcc

SEQ ID NO: 297345 - DNA, 120 bp, Artificial Sequence
  ENSG00000132359_20 (sequence is synthesized)
acgtgcccacagatgtgctgttggtccaggtgtcccagtctggccacagccctgcctccgccctcacctacatgccctcccagcccctcccatctctggacgaggcctccttcctcaggt

SEQ ID NO: 297346 - DNA, 120 bp, Artificial Sequence
  ENSG00000132359_21 (sequence is synthesized)
tcctcctgctcctgacctcccagtgtgatgtccgggtcctttatcatcctattcatcctggagaggaaaagtgtcgggcaaagggggatctggggggagctcagcagtgactggggagct

SEQ ID NO: 297347 - DNA, 120 bp, Artificial Sequence
  ENSG00000132359_22 (sequence is synthesized)
ggtctgcctcagagacagagtagggggtgggagcagagcctcggtgagggtcttggccacagggcagtgccttcctgaacgtggcaggctttactaccaggaacgcactcggtggtggag

SEQ ID NO: 297348 - DNA, 120 bp, Artificial Sequence
  ENSG00000132359_23 (sequence is synthesized)
gccccatgttcccaggagccaagattcgtagcatccttgaggccatcctgataaaattcggcgctattgcccccgtagctctggagctctaaaccgtctatctgcttctgtgctgaacgc

SEQ ID NO: 297349 - DNA, 120 bp, Artificial Sequence
  ENSG00000132359_24 (sequence is synthesized)
ctttcccatctgctgacgtaggcccagggctgccctgcccctgctgccagtgtaccgtgagcggggctccagccagttcaagctcagagccagagctggacgggccagaactgcgctgca

SEQ ID NO: 297350 - DNA, 120 bp, Artificial Sequence
  ENSG00000132359_25 (sequence is synthesized)
cacttcctggactgaggcggggactttgggtcccacccggtttctcctgattatggctgctgtggggtgaggggagggaggggcagccccgaggcagtctcttccctttgagaagatatt

SEQ ID NO: 297351 - DNA, 120 bp, Artificial Sequence
  ENSG00000132359_26 (sequence is synthesized)
caggagtgagaaggaattcagggagagcaaaggagccagtgctgagatgctgctgtgttggttgaggaaaacctcgggcctgagggccaggccggagcccaggtctctgctgacaatggg

SEQ ID NO: 297352 - DNA, 120 bp, Artificial Sequence
  ENSG00000132359_27 (sequence is synthesized)
ggttcaaggaagacgtcgttatctcccctccccacttactcgaggagagagagcccccttgctgggacagccagctcacctccaaggacatcccctcctggcttctcccccttccgagtc

SEQ ID NO: 297353 - DNA, 120 bp, Artificial Sequence
  ENSG00000132359_28 (sequence is synthesized)
ccaggtacaacgagcctgaagagcccctttcagtgcagacggggctgcagagtgacactggctgggcacctgccccacgaccaatgacaaggatttccagctgaatgctttattcccata

SEQ ID NO: 297354 - DNA, 120 bp, Artificial Sequence
  ENSG00000132359_29 (sequence is synthesized)
gggatctggacctgtgcccaagatataaatactacactttttttttttttttttaactgacattgtgaaattctccctatagcttttgccattcaagcaacattgtgatctttcttcccc

SEQ ID NO: 297355 - DNA, 120 bp, Artificial Sequence
  ENSG00000132359_30 (sequence is synthesized)
gccacgtgtgtgggaatgattgagtcctgtttgcaagctggagaggagctctccctttgctagtactttctctaaagtactagtctagtaaaatttattcttgttagaaggtcaacaaaa

SEQ ID NO: 297356 - DNA, 120 bp, Artificial Sequence
  ENSG00000132359_31 (sequence is synthesized)
agtgagggtgggaaaggccagcttcggccacgtggagccctggaacacgccctctgcctcctggccagctgagagtggccatctcctgcctctggaactctccagaacacaaaggccgac

SEQ ID NO: 297357 - DNA, 120 bp, Artificial Sequence
  ENSG00000132359_32 (sequence is synthesized)
actgaccccgctgtaccacggccctcttgcggacagccccggggacgtcgttgggacatcgctgggaccccgggctctgcagccacaaccatgtttggccggaagcgcagtgtctccttt

SEQ ID NO: 297358 - DNA, 120 bp, Artificial Sequence
  ENSG00000132359_33 (sequence is synthesized)
cacttactcgaggagagaggtgagggggggatgacttgcgggttctgatcaggcccctgggtggggaaggggcacagtgtccctcagcagcttacgcccctggagtcttggggggcccag

SEQ ID NO: 297359 - DNA, 120 bp, Artificial Sequence
  ENSG00000132359_34 (sequence is synthesized)
cctggccctggggccttttccagctactgtgcccttgggcagctgcgtctggggctcaaccccccaatcctgttcccctctccagctgcgggtctgtaggcagctgtcacatctgaaggg

SEQ ID NO: 297360 - DNA, 120 bp, Artificial Sequence
  ENSG00000132359_35 (sequence is synthesized)
acggctggaaagaggcctgtacgttctggacgcgttttgttggctgggcttctggaggcactggcaaggtcaaactgcatttctttaagaacagttgcaggatctggctcgcctctgtgg

SEQ ID NO: 297361 - DNA, 120 bp, Artificial Sequence
  ENSG00000132359_36 (sequence is synthesized)
gaagccggcattacaggtgcttggtggatgggccgtgtcacattgccatctggggtcctttggggtttccaggttgtcaccatgctgtcccatttgggaatcccatacctgcctgtcccc

SEQ ID NO: 297362 - DNA, 120 bp, Artificial Sequence
  ENSG00000132359_37 (sequence is synthesized)
actgcgctggctgacccttgctgcctgctgcctcttgggagggctttgtccctgcctctgagctggtgggcaggatggctgggtggcccccagagaagcacagacctgagatggggtctc

SEQ ID NO: 297363 - DNA, 120 bp, Artificial Sequence
  ENSG00000132359_38 (sequence is synthesized)
catgcccggtttgctgttggaatgatctgaacaggaccccaaatgcctcttccctctggtcatgcctcactatctctaggagctccatcctgtggcttccagagtgtgcacttccagccc

SEQ ID NO: 297364 - DNA, 120 bp, Artificial Sequence
  ENSG00000132359_39 (sequence is synthesized)
acccgggcagtgctgagagggaggaggagaacaaggatggcccagcctcccctccctcccctagaccacggggcgggcagctcgggttcctggagggctgtttcccccacgctgtcccta

SEQ ID NO: 297365 - DNA, 120 bp, Artificial Sequence
  ENSG00000132359_40 (sequence is synthesized)
catctgctctgatctaaaatgtctttccttttatgctgcgcccagtcttggggctcaaagatttgcccaaacctcattggccctcgtgactaggctcatctagatggtgctcacgctggt

SEQ ID NO: 297366 - DNA, 120 bp, Artificial Sequence
  ENSG00000132359_41 (sequence is synthesized)
gtttgaggcatttccactgtgatctccacgaggggatgttttccgggacacatctctggctctgggaactgcctgactcactgaagaaactacttttcaggcactgtagggtcacccata

SEQ ID NO: 297367 - DNA, 120 bp, Artificial Sequence
  ENSG00000132359_42 (sequence is synthesized)
tgcctccagctcagttgacgcttaaaaacaggtgcagaaaagctcgcgatggaaggtcttaatgagagtgtctgtctatgccaatcatgtaaaatgacgtttcttgaaaaagattcagtg

SEQ ID NO: 297368 - DNA, 120 bp, Artificial Sequence
  ENSG00000132359_43 (sequence is synthesized)
gttcagctttgtcagcatcatctcaacacaagcctgctggctctttttagcatctcatccaaccatgtcatcgtccagatgagaaatcttagcccaggtgaggggagtaacttgcttgag

SEQ ID NO: 297369 - DNA, 120 bp, Artificial Sequence
  ENSG00000132359_44 (sequence is synthesized)
gtcacacagctggctgttggcaaagctgggattagaaccctcaacccagggtcccttcctctgcagcgcctacatggttggttgaataagtggctgcgtttcctggggccctgggttttg

SEQ ID NO: 297370 - DNA, 120 bp, Artificial Sequence
  ENSG00000132359_45 (sequence is synthesized)
gggaagccagttagctgctgctttggcactggcatggaggtgagcagtcaaggatgctggtgaggctgcagtttctgctctttttcatcaggggggatagtctctaggatttttcagtga

SEQ ID NO: 297371 - DNA, 120 bp, Artificial Sequence
  ENSG00000132359_46 (sequence is synthesized)
ggacccttgggctttggatgcagcttgaaccaagaaaacgaggagggaaagggattcagtgaactattcctcagtgggatcggttcttcagctcctgatgggggctgtgtaatgggggca

SEQ ID NO: 297372 - DNA, 120 bp, Artificial Sequence
  ENSG00000132359_47 (sequence is synthesized)
gaggccagggaaaaagatgctgttcacccaccctcagcttcccttttcctaaattaagaggaaaagtggtcaaagaaaaactcttcatttctccctgattcttaaacgaaggtggttaat

SEQ ID NO: 297373 - DNA, 120 bp, Artificial Sequence
  ENSG00000132359_48 (sequence is synthesized)
agaaactcaggctcccgtgacaaggcaggacaagagcctgtttcgctttcctccctgaccctgccaggtgccaactcaaacactacctttctcattggtttctaagtcagtagagacaga

SEQ ID NO: 297374 - DNA, 120 bp, Artificial Sequence
  ENSG00000132359_49 (sequence is synthesized)
tctgttttaagcagttgggggttcgagtagatctcatgggtacaggaggccagcagggaccaggccagtcagccatgctcaggacccctcggctcctcccccagcctctagctaccctgt

SEQ ID NO: 297375 - DNA, 120 bp, Artificial Sequence
  ENSG00000132359_50 (sequence is synthesized)
atcgaggcaaggggaggccagtaaagtttgccaagcctgatcctgcagcctggtggggctggctggggtattcttttaccaaactctgttttaccgccagccccttgtacaccccaatcc

SEQ ID NO: 297376 - DNA, 120 bp, Artificial Sequence
  ENSG00000132359_51 (sequence is synthesized)
catgtctccctcccttcagctggaccgtgtgcccctttgggaggaagaagacaagccccactagggccaagggcagcagagccctgccgagtgagaggctgtggggcagcggctctgtcc

SEQ ID NO: 297377 - DNA, 120 bp, Artificial Sequence
  ENSG00000132359_52 (sequence is synthesized)
tgtgccttaccagccctggggaggggggcatttggctggaagactggaatttaattgccatcgtctttgattttgtgacatttctgcttggaagtgtgaactacccccccccccccgctt

SEQ ID NO: 297378 - DNA, 120 bp, Artificial Sequence
  ENSG00000132359_53 (sequence is synthesized)
cctgctccttagcatgcgtgcagctctctcctgttttgggtgttccccttggacactccagctcggggactgctggcgtgtgaatgtgcagattcccctgtgtggtcgaacctaagaact

SEQ ID NO: 297379 - DNA, 120 bp, Artificial Sequence
  ENSG00000132359_54 (sequence is synthesized)
gtggcttggaagtgatgctccatgtgacgacgactttgctttctttcctcttagtgaggaggtgattcgtagatcccaactgcctatgtaatgtaaataatgtacatttaatttattgct

SEQ ID NO: 297380 - DNA, 120 bp, Artificial Sequence
  ENSG00000132359_55 (sequence is synthesized)
atggtagcacattgtatttgttaatgtacaaaacaaattctaaaaggttgacaaatgtatattttgttgcttaaatgtgtctttgcagaaattgacaataaataacatattttgtgtcca

SEQ ID NO: 297381 - DNA, 120 bp, Artificial Sequence
  ENSG00000132359_56 (sequence is synthesized)
ggccgggcgaggcatggcgggccgccgggcgccgggggagaagcgctggcagctggtgcgctggtacgtgcaggaagggcggttccgaatcgaggagaggacgctgacagccttccagtg

SEQ ID NO: 297382 - DNA, 120 bp, Artificial Sequence
  ENSG00000132359_57 (sequence is synthesized)
caaccgaacccactctgtgttcaacctgatttatgaaaaagcagaagacaaatgggcatatggaccttcacccccggctcccatcacgcactctggacgccactgcccaccaaagccgtg

SEQ ID NO: 297383 - DNA, 120 bp, Artificial Sequence
  ENSG00000132359_58 (sequence is synthesized)
gctatgcgcagcttctcgggccacgcaaggtggggcacccttacatcaggtgccctcctgctcctgagtgtatccagtgagctgtagccatgggcaggcgtgttccccaccccttgctcc

SEQ ID NO: 297384 - DNA, 120 bp, Artificial Sequence
  ENSG00000132361_0 (sequence is synthesized)
cggccgccccggccgacagcgcccgggaacacggctcgcaggccgggggcaaggggcggccgggcgcggccgagctgccatcagtcatgctcttaaacggggactgcccagagagcctga

SEQ ID NO: 297385 - DNA, 120 bp, Artificial Sequence
  ENSG00000132361_1 (sequence is synthesized)
agaaggaggcggcggcggccgagccacccagggaaaatgggcttgacgaggccggcccgggagatgagaccaccggccaggaagtcattgtcattcaggacacgggcttttctgtgaaga

SEQ ID NO: 297386 - DNA, 120 bp, Artificial Sequence
  ENSG00000132361_2 (sequence is synthesized)
tcctcgcccctgggatcgagcccttctccctgcaggtgtccccccaggagatggtgcaggagattcaccaggtgctcatggaccgggaggacacgtgtcaccgcacctgcttctcactgc

SEQ ID NO: 297387 - DNA, 120 bp, Artificial Sequence
  ENSG00000132361_3 (sequence is synthesized)
acctggatggcaacgtgctggaccacttctcggagctgcgcagcgtcgaggggctgcaggagggctctgtgctgcgtgtggtggaagagccgtacacggtgcgtgaggcccgcatccacg

SEQ ID NO: 297388 - DNA, 120 bp, Artificial Sequence
  ENSG00000132361_4 (sequence is synthesized)
tgcgccatgtccgagacctgctcaagagcctggacccatccgatgccttcaacggggttgactgcaactccttgtccttcctgagtgtcttcaccgacggcgacctgggagacagcggga

SEQ ID NO: 297389 - DNA, 120 bp, Artificial Sequence
  ENSG00000132361_5 (sequence is synthesized)
agcggaagaagggcttggagatggaccccatcgactgcacaccacccgagtacatcctgccagggagccgggagcggccactgtgtcccctgcagccccaaaaccgtgactggaagccct

SEQ ID NO: 297390 - DNA, 120 bp, Artificial Sequence
  ENSG00000132361_6 (sequence is synthesized)
tgcagtgcctgaaagtactcaccatgagcggatggaacccgcccccggggaaccggaagatgcacggggacctcatgtacctgtttgtgatcacagccgaggaccggcaagtcagcatca

SEQ ID NO: 297391 - DNA, 120 bp, Artificial Sequence
  ENSG00000132361_7 (sequence is synthesized)
ccgcgtccacacggggcttttacctgaatcagtccacagcttatcacttcaaccccaagcccgccagcccccgcttcctaagccattccctagtggagctgctcaaccagatcagcccga

SEQ ID NO: 297392 - DNA, 120 bp, Artificial Sequence
  ENSG00000132361_8 (sequence is synthesized)
ccttcaagaagaacttcgctgtgctgcagaagaaaagggtccagcgccacccgttcgagaggatcgccaccccattccaggtgtacagctggacagccccccaggcggagcatgccatgg

SEQ ID NO: 297393 - DNA, 120 bp, Artificial Sequence
  ENSG00000132361_9 (sequence is synthesized)
attgcgtgcgtgcagaggacgcctacacctcgaggctgggctatgaggagcacattcctggacagacccgagactggaatgaggagctgcagacgacgagggagctgcctcgcaagaacc

SEQ ID NO: 297394 - DNA, 120 bp, Artificial Sequence
  ENSG00000132361_10 (sequence is synthesized)
tgcctgagcggctgctccgagaaagggccatattcaaggtgcacagcgacttcaccgcggcagccaccaggggcgccatggccgtcattgacggcaacgtgatggccatcaaccccagcg

SEQ ID NO: 297395 - DNA, 120 bp, Artificial Sequence
  ENSG00000132361_11 (sequence is synthesized)
aggagaccaagatgcagatgttcatctggaacaacatcttcttcagcctgggcttcgacgtccgagaccactacaaggacttcgggggggacgtggcggcctacgtggcgcccaccaacg

SEQ ID NO: 297396 - DNA, 120 bp, Artificial Sequence
  ENSG00000132361_12 (sequence is synthesized)
acctgaatggcgtccgcacgtacaacgcggtggacgtggaggggctgtacacgctgggcacggtggtggtggattaccgcggctaccgggtcacggcccagtccatcatccccggcatcc

SEQ ID NO: 297397 - DNA, 120 bp, Artificial Sequence
  ENSG00000132361_13 (sequence is synthesized)
tggagcgggaccaggagcagagcgtcatctacggctccatcgacttcggcaagaccgtggtgtcacacccgcggtacctggagctgctggagcgcacgagtcggcccctcaagatcctgc

SEQ ID NO: 297398 - DNA, 120 bp, Artificial Sequence
  ENSG00000132361_14 (sequence is synthesized)
ggcaccaggtgctcaacgaccgtgacgaggaggtggagctctgctcctcggtcgagtgcaagggcatcattggcaacgacgggcgccactacatcctcgacctgctgcgcaccttccccc

SEQ ID NO: 297399 - DNA, 120 bp, Artificial Sequence
  ENSG00000132361_15 (sequence is synthesized)
cggacctcaacttcctgcccgtgcctggcgaggagctgcctgaggaatgcgcccgcgccggcttcccccgcgcccaccggcacaagctctgctgcctgcgccaggagctggtggacgcct

SEQ ID NO: 297400 - DNA, 120 bp, Artificial Sequence
  ENSG00000132361_16 (sequence is synthesized)
tcgtggagcacaggtacctcctctttatgaagctggccgccttgcagctgatgcagcagaacgccagccagctggagaccccctcctccctggaaaatggtggtccttcctccttggagt

SEQ ID NO: 297401 - DNA, 120 bp, Artificial Sequence
  ENSG00000132361_17 (sequence is synthesized)
ccaagtctgaggatcctccaggacaggaggcgggaagtgaggaggagggtagcagcgccagcggcctggccaaggtgaaggagctggcagagaccatcgccgcagacgacggcacagacc

SEQ ID NO: 297402 - DNA, 120 bp, Artificial Sequence
  ENSG00000132361_18 (sequence is synthesized)
ctcggagccgggaggtgatccgcaacgcgtgcaaggcggtcggctccatcagcagcaccgccttcgacattcgcttcaatcctgacatcttctcaccaggggttcgtttccctgagtcct

SEQ ID NO: 297403 - DNA, 120 bp, Artificial Sequence
  ENSG00000132361_19 (sequence is synthesized)
gccaggatgaagttcgggaccagaagcagctgctgaaggacgcggctgccttcctgctctcctgccagatccctggcttggtgaaggactgcatggagcacgcggtcctgcccgtggacg

SEQ ID NO: 297404 - DNA, 120 bp, Artificial Sequence
  ENSG00000132361_20 (sequence is synthesized)
gggcaacgctggcagaggtgatgcgccagcggggcatcaacatgcgctacctgggcaaggtgctggagctggtgctgcggagcccggcccgccaccagctggaccacgtctttaaaatcg

SEQ ID NO: 297405 - DNA, 120 bp, Artificial Sequence
  ENSG00000132361_21 (sequence is synthesized)
gctctccggcctctcagccgccatcagccacttcctgaactgcttcctgagctcctacccaaaccccgtggcccacctgcccgccgacgagctggtctccaagaagcggaataagaggag

SEQ ID NO: 297406 - DNA, 120 bp, Artificial Sequence
  ENSG00000132361_22 (sequence is synthesized)
gaaaaaccggcccccgggggctgcagataacacagcctgggctgtcatgaccccccaggagctctggaagaacatctgccaggaggccaagaactactttgacttcgacctcgagtgtga

SEQ ID NO: 297407 - DNA, 120 bp, Artificial Sequence
  ENSG00000132361_23 (sequence is synthesized)
gaccgtggaccaggctgtggagacctacggcctgcagaagataacgctcctgcgggagatctcgctgaaaacagggatccaggtcctgctgaaggagtacagcttcgacagtcgccacaa

SEQ ID NO: 297408 - DNA, 120 bp, Artificial Sequence
  ENSG00000132361_24 (sequence is synthesized)
gcccgcgttcaccgaggaggacgtgctcaacatcttccccgtggtcaagcacgtcaaccccaaggcctcggatgccttccatttcttccagagcgggcaggccaaagtgcagcagggctt

SEQ ID NO: 297409 - DNA, 120 bp, Artificial Sequence
  ENSG00000132361_25 (sequence is synthesized)
cctgaaggagggctgtgagctcatcaatgaggccctgaacctgtttaacaacgtctacggagccatgcacgtggagacctgcgcctgcctgcgcctcctcgcccgcctccactacatcat

SEQ ID NO: 297410 - DNA, 120 bp, Artificial Sequence
  ENSG00000132361_26 (sequence is synthesized)
gggcgactacgcagaggccctgagtaaccagcagaaggcggtgctgatgagcgagcgggtgatgggcaccgagcaccccaacaccatccaggaatacatgcacctggccctgtactgctt

SEQ ID NO: 297411 - DNA, 120 bp, Artificial Sequence
  ENSG00000132361_27 (sequence is synthesized)
cgccagcagccagctgtccaccgccctgagcctgctgtaccgcgcccgctacctcatgctgctggtgttcggggaagaccaccccgagatggcgctgctggacaacaacatcgggctggt

SEQ ID NO: 297412 - DNA, 120 bp, Artificial Sequence
  ENSG00000132361_28 (sequence is synthesized)
gctgcacggggtgatggagtacgacctgtcgctgcgcttcctggagaacgcgctggccgtcagcaccaagtaccacgggcccaaggccctcaaggtggccctcagccaccaccttgtcgc

SEQ ID NO: 297413 - DNA, 120 bp, Artificial Sequence
  ENSG00000132361_29 (sequence is synthesized)
ccgagtctacgagagcaaagctgagttccggtcggccctgcagcacgagaaggagggttacaccatctacaagacgcagctgggcgaggaccatgagaagaccaaggaaagctccgagta

SEQ ID NO: 297414 - DNA, 120 bp, Artificial Sequence
  ENSG00000132361_30 (sequence is synthesized)
cctcaagtgcctgacccagcaggccgtggccctgcagcgcaccatgaacgagatctaccgcaacggctccagcgccaacatcccgcccctcaagttcacggcccccagcatggccagcgt

SEQ ID NO: 297415 - DNA, 120 bp, Artificial Sequence
  ENSG00000132361_31 (sequence is synthesized)
cttggagcagctgaacgtcattaacggcatcctcttcattcctctcagccaaaaagacctggagaatctgaaagccgaggtggcgcggcggcaccagctccaggaggccagcagaaacag

SEQ ID NO: 297416 - DNA, 120 bp, Artificial Sequence
  ENSG00000132361_32 (sequence is synthesized)
ggatagagccgaggagcccatggctaccgagcccgcgccagcgggggccccaggagacctgggctcccagcccccggctgccaaggacccttctccgagcgtgcagggatagagagggag

SEQ ID NO: 297417 - DNA, 120 bp, Artificial Sequence
  ENSG00000132361_33 (sequence is synthesized)
ccagacggacagccagccagcggccccgtcaccagggagcccgactgcgggagaagggggcgagcctgcgggcggaagaggaagcaaggccctcttcctccacgtctcaccccaccccac

SEQ ID NO: 297418 - DNA, 120 bp, Artificial Sequence
  ENSG00000132361_34 (sequence is synthesized)
ccccgtgtcctcctgggagcctggcctgcctgccccgcagaaggtgtttttgcgctggttcaatgaatagatgatgcagaggccccattggagacacgtgaatggcgtgtgcggccatca

SEQ ID NO: 297419 - DNA, 120 bp, Artificial Sequence
  ENSG00000132361_35 (sequence is synthesized)
gttcccggctggggggcaggtgttgcttcggcccccgccgtccggccggcgtgtgcgagtgcgcccctggctgtgagtgttgaccgttcctctcccctgtacatagcccgagccagtcct

SEQ ID NO: 297420 - DNA, 120 bp, Artificial Sequence
  ENSG00000132361_36 (sequence is synthesized)
gagtgggtgactcctgagtgggtgacgcgcagacgggatttctcaggtcatttgtatggtcgacatgatggctgctgctttggctgccaccacccccgggcccagcctgtctgaaagttc

SEQ ID NO: 297421 - DNA, 120 bp, Artificial Sequence
  ENSG00000132361_37 (sequence is synthesized)
agggtttaggccgaaaaacccggtggggaggggtggggagccggagctctgtggcggggctggagggctggggtgcactttagtttggggcgggacgggagccgccgttgtgactggcgt

SEQ ID NO: 297422 - DNA, 120 bp, Artificial Sequence
  ENSG00000132361_38 (sequence is synthesized)
ggtctggctgctgctcccgaacggaggggtcggggttggcttgctgggccctcagagcccagtgggtggctctgactcggctccctactccctgcacccagctgggcgcagccttggggc

SEQ ID NO: 297423 - DNA, 120 bp, Artificial Sequence
  ENSG00000132361_39 (sequence is synthesized)
ctgcggtctgaatgtatccctcccctcagttttaacctgagctgccgaacgcacagtgggccgggggcgaggctgggggaagcggggcccaattacggatcccgggagttacaggtgccg

SEQ ID NO: 297424 - DNA, 120 bp, Artificial Sequence
  ENSG00000132361_40 (sequence is synthesized)
acgtgatgtcgcttctctggtgcccagctcccttcctggtctgagactagctctgggggtggcgggggcccccacacgctgctcccgctccaccctgcccgtgctgctgctctgtgcctg

SEQ ID NO: 297425 - DNA, 120 bp, Artificial Sequence
  ENSG00000132361_41 (sequence is synthesized)
ctgtcagagccctggtgggggaggatgtggccaccctgagacccggaggagacgggcgtctgcctgggtttgcggagagccgcttatgggtgtggtccgtccagacaccttgtttcaagg

SEQ ID NO: 297426 - DNA, 120 bp, Artificial Sequence
  ENSG00000132361_42 (sequence is synthesized)
gggatgggcgtgagcgggcaagcagagcatccccaccgctgagcaagaactttttcttgtttttaaaccatcacgtcctcatttcacattggaataaagtgagtttttgaaacctgcggc

SEQ ID NO: 297427 - DNA, 120 bp, Artificial Sequence
  ENSG00000132361_43 (sequence is synthesized)
acagtgcccgcccgacgggcagcgagcagcagggagtctccccgaggccccgccccgcgagggcgcccagcctccctgggccttgagtcagaagctgccatcagtcatgctcttaaacgg

SEQ ID NO: 297428 - DNA, 120 bp, Artificial Sequence
  ENSG00000132361_44 (sequence is synthesized)
ggtgactccgtccttccctcagcagccgcggcgcgcagggcacttgggttagtggcgcggcgggcggcgcggacagccgaggcggacgcccgctcccgccaccatggttatcaagacgga

SEQ ID NO: 297429 - DNA, 120 bp, Artificial Sequence
  ENSG00000132361_45 (sequence is synthesized)
aaaggccacggcgcgcaccacgtgggccggtgactccgtccttccctcagcagccgcggcgcgcagggcacttggagctgccatcagtcatgctcttaaacggggactgcccagagagcc

SEQ ID NO: 297430 - DNA, 120 bp, Artificial Sequence
  ENSG00000132361_46 (sequence is synthesized)
ttcttggcctgcgctcctgccagaggctgggcacattctgacatcctgactgggagctggagccttcggggtccttctccagggcctcccaggatagctgtgctcccccagaaggactca

SEQ ID NO: 297431 - DNA, 120 bp, Artificial Sequence
  ENSG00000132361_47 (sequence is synthesized)
gaactcatcacccgctcggccaagcacatcttcaagacgtacttacaggtgccacccgtccgctctgcggctggccatggcctcccagggtggtgtggggcgtcgggaaagagcctgagg

SEQ ID NO: 297432 - DNA, 120 bp, Artificial Sequence
  ENSG00000132361_48 (sequence is synthesized)
tggggctgagggccctcatgactcggatccaacctgcctcgcagggagtcgagctctccggcctctcagccgccatcagccacttcctgaactgcttcctgagctcctacccaaaccccg

SEQ ID NO: 297433 - DNA, 120 bp, Artificial Sequence
  ENSG00000132361_49 (sequence is synthesized)
ggggtcgctccgacgtttgcgggacagcccccttcggcacctgctccgcggcggcctcccaggcatcccctgtgcgcagggctgcagccctgggagtgaagctccgctcgaggcttccca

SEQ ID NO: 297434 - DNA, 120 bp, Artificial Sequence
  ENSG00000132361_50 (sequence is synthesized)
agagcttgacaaacgctccgaaggttataggcctcgggtgcttcccaaaggccccctgcggcctggccaggaaagacccaccggcgctctctgcctggagcacttcaactcactgcaaga

SEQ ID NO: 297435 - DNA, 120 bp, Artificial Sequence
  ENSG00000132361_51 (sequence is synthesized)
cctggtcccaatgtcccctctgcagcattctctgacctcaccgttccgtccccgccaagcccctgccaagtgaaaaatacgagttaaagcgtcctggctgtggatggagtcagacccggc

SEQ ID NO: 297436 - DNA, 120 bp, Artificial Sequence
  ENSG00000132361_52 (sequence is synthesized)
tcctgccagatccctggcttggtgagggaggggctgcggggctgggtggggcttgtgtggagggtgctggtccctcatctgtctccgacttggaggcccatgaacacaggctcgcaggag

SEQ ID NO: 297437 - DNA, 120 bp, Artificial Sequence
  ENSG00000132361_53 (sequence is synthesized)
atccagtcttctgagccctggatggtggcatggctgggggacggggccagagctcagtgggggctgcccatcctcctcctcctcccgcaggctctgtgtctggttccaggatgctgggtg

SEQ ID NO: 297438 - DNA, 120 bp, Artificial Sequence
  ENSG00000132361_54 (sequence is synthesized)
ctcccccaacaccgtggcctccaagcctcaggacacggggctgggggtcaagtagtgcccccaagcgggcacctctgcttctcccacatggttagagggggcctgtaccaccaccgggct

SEQ ID NO: 297439 - DNA, 120 bp, Artificial Sequence
  ENSG00000132376_0 (sequence is synthesized)
agtccgcgacagctaggcgcgtgagaccggccgcccgcagggctgctctggccgggacccgctggccgggagacgcgaacctgccggaccaccgcgcggggacgacggcggccatgagct

SEQ ID NO: 297440 - DNA, 120 bp, Artificial Sequence
  ENSG00000132376_1 (sequence is synthesized)
cgcggaagctgagcgggccgaaaggcaggaggctcagcatacacgtcgtgacttggaacgtggcttcggcagcgccccctctagatctcagtgacctgcttcagctgaacaaccggaacc

SEQ ID NO: 297441 - DNA, 120 bp, Artificial Sequence
  ENSG00000132376_2 (sequence is synthesized)
tcaatcttgacatatatgttattggtttgcaggaattgaactctgggatcataagcctcctttccgatgctgcctttaatgactcgtggagcagtttcctcatggatgtgctttcccctc

SEQ ID NO: 297442 - DNA, 120 bp, Artificial Sequence
  ENSG00000132376_3 (sequence is synthesized)
tgagcttcatcaaggtctcccatgtccgtatgcaggggatcctcttactggtctttgccaagtatcagcatttgccctatatccagattctgtctactaaatccacccccactggcctgt

SEQ ID NO: 297443 - DNA, 120 bp, Artificial Sequence
  ENSG00000132376_4 (sequence is synthesized)
ttgggtactgggggaacaaaggtggagtcaacatctgcctgaagctttatggctactatgtcagcatcatcaactgccacctgcctccccacatttccaacaattaccagcggctggagc

SEQ ID NO: 297444 - DNA, 120 bp, Artificial Sequence
  ENSG00000132376_5 (sequence is synthesized)
actttgaccggatcctggagatgcagaattgtgaggggcgagacatcccaaacatcctggaccacgacctcattatctggtttggagacatgaactttcggatcgaggactttgggttgc

SEQ ID NO: 297445 - DNA, 120 bp, Artificial Sequence
  ENSG00000132376_6 (sequence is synthesized)
actttgttcgggaatccattaaaaatcggtgctacggtggcctgtgggagaaggaccagctcagcattgccaagaaacatgacccgctgctccgggagttccaggagggccgcctactct

SEQ ID NO: 297446 - DNA, 120 bp, Artificial Sequence
  ENSG00000132376_7 (sequence is synthesized)
tcccgcccacctacaagtttgataggaactccaacgactatgacaccagtgagaaaaaacgcaagcctgcatggaccgatcgcatcctgtggaggctgaagcggcagccctgtgctggcc

SEQ ID NO: 297447 - DNA, 120 bp, Artificial Sequence
  ENSG00000132376_8 (sequence is synthesized)
ccgacactcccataccgccggcgtcacacttctccttgtctctgaggggctacagcagccacatgacgtacggcatcagcgaccacaagcctgtctccggcacgttcgacttggagctga

SEQ ID NO: 297448 - DNA, 120 bp, Artificial Sequence
  ENSG00000132376_9 (sequence is synthesized)
agccattggtgtctgctccgctgatcgtcctgatgcccgaggacctgtggaccgtggaaaatgacatgatggtcagctactcttcaacctcggacttccccagcagcccgtgggactgga

SEQ ID NO: 297449 - DNA, 120 bp, Artificial Sequence
  ENSG00000132376_10 (sequence is synthesized)
ttggactgtacaaggtggggctgcgggacgttaatgactacgtgtcctatgcctgggtcggggacagcaaggtctcctgcagcgacaacctgaaccaggtttacatcgacatcagcaata

SEQ ID NO: 297450 - DNA, 120 bp, Artificial Sequence
  ENSG00000132376_11 (sequence is synthesized)
taagcagacccttccagatcccgcctggctccttgagggaggacccactgggtgaagcacagccacagatctgagccaggatgggagtgaatcccaggcggaggccagagctggcagcca

SEQ ID NO: 297451 - DNA, 120 bp, Artificial Sequence
  ENSG00000132376_12 (sequence is synthesized)
gctctgcctttccactgccgggagtgctgggggcccagcctggccccctgaagagacagccaagtgtcgtccacatactcctcccagagtgagctctaaccaggctcatttgctctctcc

SEQ ID NO: 297452 - DNA, 120 bp, Artificial Sequence
  ENSG00000132376_13 (sequence is synthesized)
actactcatctctggaattagccgcttaaatacaggtttttgttgctgagatgtgagtgaaaccagctagtgtgtcaacagtgaagacctggggacagttctgcgtctcatttctggatt

SEQ ID NO: 297453 - DNA, 120 bp, Artificial Sequence
  ENSG00000132376_14 (sequence is synthesized)
cctaccccctcttctagtcttgcccaagtagtcctgccaggcacatgccccatttggcacaggcctgcattcttgtcgtgccgtcctgggcctcaggctgtctgggaggggagatgctca

SEQ ID NO: 297454 - DNA, 120 bp, Artificial Sequence
  ENSG00000132376_15 (sequence is synthesized)
catttgtacaggctacatagactggtgcaagcagtgctggattccaggagtcttggcatctcatagcttgtccccgtgaggagtgagcagagggtctgggatttctgctttcagcaaaag

SEQ ID NO: 297455 - DNA, 120 bp, Artificial Sequence
  ENSG00000132376_16 (sequence is synthesized)
cagtctgactcagtgggcagaatggaggggcccctctagccaggctcttacgccatggttatgagcaggttgatgagggtccttcggccagcacaaccttcctccctactcacggcatgg

SEQ ID NO: 297456 - DNA, 120 bp, Artificial Sequence
  ENSG00000132376_17 (sequence is synthesized)
agtctgactgcatggaagttccagatcctgacagagagaactgggaaggatccaggttcgcttccgttggtagcttgagtcccatgcctccaccctgccatctgaggaaggggtgacaag

SEQ ID NO: 297457 - DNA, 120 bp, Artificial Sequence
  ENSG00000132376_18 (sequence is synthesized)
tggtcaaggagctgtggccacagacttttccagggtggtccttggcaggtgaggtgcgtctgtgccacccttgtcaggagccattgacgacgggccccccctggaccccccgggacctca

SEQ ID NO: 297458 - DNA, 120 bp, Artificial Sequence
  ENSG00000132376_19 (sequence is synthesized)
gagtgggggcaggcagaagggagaaccagctcaagacattttggaggatctggccctggggttcttcagagaacaccctctaggggctttggggacatggcctgtccccacatccagcac

SEQ ID NO: 297459 - DNA, 120 bp, Artificial Sequence
  ENSG00000132376_20 (sequence is synthesized)
ttgcctccgccatggtcactcggcagcccttttcccaggagaagacacctctgggagcctgctcagtgcttgtcctgccatcctgtgtcctgggactgagggttactccagttgctctgt

SEQ ID NO: 297460 - DNA, 120 bp, Artificial Sequence
  ENSG00000132376_21 (sequence is synthesized)
gttgcatactctcccccgcaagcctgtgtatgaagaattgtcccctggcttccagcaggccatggctggctgttttgtgactgttacattgtgcaggggtaattattagcgtggctttta

SEQ ID NO: 297461 - DNA, 120 bp, Artificial Sequence
  ENSG00000132376_22 (sequence is synthesized)
atttcttgaagtgcttttgagaacgtcgacctctaaggacggggtctgttggaggagagatgttttggcattaactgcccttttctcccatccccctgtaccctctgccattccagatct

SEQ ID NO: 297462 - DNA, 120 bp, Artificial Sequence
  ENSG00000132376_23 (sequence is synthesized)
ggacttgccttaggtcccatgtcctccctgaccactgatggcctgactccccctcacaggtggggctgcgggacgttaatgactacgtgtcctatgcctgggtcggggacagcaaggtct

SEQ ID NO: 297463 - DNA, 120 bp, Artificial Sequence
  ENSG00000132376_24 (sequence is synthesized)
cctgcagcgacaacctgaaccaggtacgtcaccagcaccaggtacatcaccagcaggcaggcctgcctcagcactcctgtcttgtggaaggaacagagtgctgaataacttgtcactcag

SEQ ID NO: 297464 - DNA, 120 bp, Artificial Sequence
  ENSG00000132376_25 (sequence is synthesized)
ctgggtggagcccagagccctggagctgaccccagtcctgtccatccccctccaggtttacatcgacatcagcaatatccctaccactgaagatgagtttctcctctgttactacagcaa

SEQ ID NO: 297465 - DNA, 120 bp, Artificial Sequence
  ENSG00000132376_26 (sequence is synthesized)
cgcggaagctgagcgggccgaaaggcaggaggctcagcacatacatcaggaggtctgcctgatcccatggtgaaccccgggaatccgaaatcagattgagataagatcctttagggaagt

SEQ ID NO: 297466 - DNA, 120 bp, Artificial Sequence
  ENSG00000132376_27 (sequence is synthesized)
gacttagcctggtctcttgcctgctctttcacggggaacaacgctaatcgcccacttagtctaagtcacgatgcttggatttgctgctaatcgtcggatttgagagtgggaacaagaaat

SEQ ID NO: 297467 - DNA, 120 bp, Artificial Sequence
  ENSG00000132376_28 (sequence is synthesized)
ttgtgaggggcgagacatcccaaacatcctggaccacgagtgagcctgggtctggcagaccgttccccgccctctgccccacgctaacccccactaacccccacgagtgagcctgggtct

SEQ ID NO: 297468 - DNA, 120 bp, Artificial Sequence
  ENSG00000132376_29 (sequence is synthesized)
gcagaccgctccccgccctctgccccacgctgacccccacgagtgagcctgggtctgcagactgttccccgccctctgccccacgctgaccgccacgagtgagcctgggtctgcagactg

SEQ ID NO: 297469 - DNA, 120 bp, Artificial Sequence
  ENSG00000132376_30 (sequence is synthesized)
aagccctccatccctggattcgaatgtcagccagtcccccaggggagacctgtggaggccatgattgcctttcctgccaggtcggatatcccagctcctcttaggagccgttgatggctc

SEQ ID NO: 297470 - DNA, 120 bp, Artificial Sequence
  ENSG00000132376_31 (sequence is synthesized)
ctggcctcattatctggtttggagacatgaactttcggatcgaggactttgggttgcactttgttcgggaatccattaaaaatcggtgctacggtggcctgtgggagaaggaccagctca

SEQ ID NO: 297471 - DNA, 120 bp, Artificial Sequence
  ENSG00000132376_32 (sequence is synthesized)
tcatgtgggctcatttctgctcttagccaaccctttcttctttccccattcttcctctttatgccccctgcccctgcagtgagaaaaaacgcaagcctgcatggaccgatcgcatcctgt

SEQ ID NO: 297472 - DNA, 120 bp, Artificial Sequence
  ENSG00000132376_33 (sequence is synthesized)
gagggctcctgggagctgggcagatgctgacgaactcaccctcatccaccccagcggttcttctgtagctaaaggctggcagtgaagggcggcggggaggcacacagtacggtagccagg

SEQ ID NO: 297473 - DNA, 120 bp, Artificial Sequence
  ENSG00000132376_34 (sequence is synthesized)
aaactccatctcaaaaaaaaaaaaagaagaagaatagggaaccagaagggctttgcaccaggtaccatcatgcgtcagcccatcgtgtccctgtcgtctttcccatccccagcctcgttt

SEQ ID NO: 297474 - DNA, 120 bp, Artificial Sequence
  ENSG00000132376_35 (sequence is synthesized)
atccccagcctcgtttccctcttggagggtgaggtgcccctttggagaaccctggcttccccaggttcccctctgacacatgtctgctagtgatctcccctagagatggaattccaagtt

SEQ ID NO: 297475 - DNA, 120 bp, Artificial Sequence
  ENSG00000132376_36 (sequence is synthesized)
ggccttggtaatgtttccgaaaggattcgcctgctttctggtgggagtgggctgctgagtagtcactggggcagtgaggaattggagtggcattgcttgactcttgccccatttgtgacg

SEQ ID NO: 297476 - DNA, 120 bp, Artificial Sequence
  ENSG00000132376_37 (sequence is synthesized)
gcatgtgctgatcccttgaatggagtgtggtactgggccactgggtcgagactactgggagacggggactatgactttgtctgcagctcagcattgccaagaaacatgacccgctgctcc

SEQ ID NO: 297477 - DNA, 90 bp, Artificial Sequence
  ENSG00000132376_38 (sequence is synthesized)
ctctagatctcagtgacctgcttcagctgaacaaccggaacctcaatcttgacatatatgttattggaatgcttggccgggcgcgagagg

SEQ ID NO: 297478 - DNA, 120 bp, Artificial Sequence
  ENSG00000132376_39 (sequence is synthesized)
agctttgcgctcgtgggagagtcccgcctccttctgcgaaccgcaccacccagatcccggggtgcgcggagggcgcgtctctgacggaagccggggcggacggtcggagtccggaagaaa

SEQ ID NO: 297479 - DNA, 120 bp, Artificial Sequence
  ENSG00000132376_40 (sequence is synthesized)
cctttcctcgtgaccagttaaggagaggaaggaagggccacagcctgctctgtgtttgccagagcaggctctttggtaggtctctccggtttgaatggtggtttaggagccatgagaaca

SEQ ID NO: 297480 - DNA, 120 bp, Artificial Sequence
  ENSG00000132376_41 (sequence is synthesized)
gttccagaggacccacgcgtgccctggcgtctcacttgcccctcaggttttctgtgccccagcagcccttgggttgagcaggctgagccacctggtgatctcccttccccgacttcatca

SEQ ID NO: 297481 - DNA, 120 bp, Artificial Sequence
  ENSG00000132382_0 (sequence is synthesized)
tccgagatgggcccttagaaatgcccccctggggctccaaaggggcagatgccacagccgccagggcggagcgggtgtgagcagaaggctgggaaagatgggacgccgctaggcgaggga

SEQ ID NO: 297482 - DNA, 120 bp, Artificial Sequence
  ENSG00000132382_1 (sequence is synthesized)
cttccgctcagagctacggcggaaatgccgctcttttaactctgggccggtctctcttggttcccccgcccctccgggttcttccgcctccgagccgacacaaaccggtgcgcatgcgcc

SEQ ID NO: 297483 - DNA, 120 bp, Artificial Sequence
  ENSG00000132382_2 (sequence is synthesized)
gtgccctgacctggaagcggctggggccggagcacacgtgtttcgtgtttcggtgagtgtggcggagatggagagccgggatcccgcccagccgatgtcgcctggagaagcgacgcagag

SEQ ID NO: 297484 - DNA, 120 bp, Artificial Sequence
  ENSG00000132382_3 (sequence is synthesized)
tggcgcccggcctgccgaccgctatggcctattgaagcacagtcgcgagttcttggacttcttctgggacattgcgaagcctgagcaggagacgcgacttgcggccacggagaagctgct

SEQ ID NO: 297485 - DNA, 120 bp, Artificial Sequence
  ENSG00000132382_4 (sequence is synthesized)
ggagtatctgcgtggcaggccgaaggggtccgagatgaaatatgccctgaagcgtctaatcacgggactcggggtcgggcgagaaacagcccggccctgctacagtttggccctggcaca

SEQ ID NO: 297486 - DNA, 120 bp, Artificial Sequence
  ENSG00000132382_5 (sequence is synthesized)
gctgttacagtcttttgaagacctccccttgtgcagcatcctgcagcagatacaagaaaaatatgacctgcatcaggtgaagaaggcaatgctgagacctgctctctttgcaaacctgtt

SEQ ID NO: 297487 - DNA, 120 bp, Artificial Sequence
  ENSG00000132382_6 (sequence is synthesized)
tggagtgctcgccctctttcagtcaggtcggctggtgaaggaccaggaggcactgatgaagtcggtgaagctgctgcaggccctggcccagtaccaaaaccacttgcaggagcagccccg

SEQ ID NO: 297488 - DNA, 120 bp, Artificial Sequence
  ENSG00000132382_7 (sequence is synthesized)
gaaggccctggtggacatcctctccgaggtctcgaaggccacattgcaggagatcctgccggaggtcctcaaagccgacttgaatataatactcagctcccctgaacagctagagctctt

SEQ ID NO: 297489 - DNA, 120 bp, Artificial Sequence
  ENSG00000132382_8 (sequence is synthesized)
cctcctggcccagcagaaggtgccctccaagctcaagaagctggtgggatccgtgaacctattctcagatgagaatgtccccaggctggtgaatgtgctgaagatggccgcctcctctgt

SEQ ID NO: 297490 - DNA, 120 bp, Artificial Sequence
  ENSG00000132382_9 (sequence is synthesized)
gaagaaggaccgcaagctgcccgccattgctctggacctgctccgcctggcactcaaggaagacaagttcccacggttctggaaggaggtggtggaacaagggctgctgaagatgcagtt

SEQ ID NO: 297491 - DNA, 120 bp, Artificial Sequence
  ENSG00000132382_10 (sequence is synthesized)
ctggccagccagctacctgtgtttccgcctgctgggcgcggccctgcccctgctgaccaaggagcagctgcacctggtgatgcagggagacgtgatccgccattacggggagcacgtgtg

SEQ ID NO: 297492 - DNA, 120 bp, Artificial Sequence
  ENSG00000132382_11 (sequence is synthesized)
cactgctaagctcccaaagcagttcaagtttgccccagagatggacgattacgtgggcaccttcctagaggggtgccaggatgaccctgagcggcagctggccgtgctagtggccttctc

SEQ ID NO: 297493 - DNA, 120 bp, Artificial Sequence
  ENSG00000132382_12 (sequence is synthesized)
atctgtcaccaaccaaggcctccctgtcacgcctactttctggcgggtcgtgcggttcctgagccctccggccctgcagggctatgtggcctggctgcgggccatgtttctccagccaga

SEQ ID NO: 297494 - DNA, 120 bp, Artificial Sequence
  ENSG00000132382_13 (sequence is synthesized)
cctggactccttggttgacttcagcaccaacaaccagaagaaagcccaggattcatcgctccacatgcctgagcgagctgtgttccggctgaggaaatggatcatctttcgattggtgag

SEQ ID NO: 297495 - DNA, 120 bp, Artificial Sequence
  ENSG00000132382_14 (sequence is synthesized)
cattgtggacagcctgcacctggagatggaggaggccttgactgagcaggtggccaggttttgtttgttccactcgttctttgtcacaaagaagcccacatcccagatccctgagacaaa

SEQ ID NO: 297496 - DNA, 120 bp, Artificial Sequence
  ENSG00000132382_15 (sequence is synthesized)
gcacccgttctccttccctttggaaaaccaggcccgagaggctgtcagcagtgccttcttcagtctgttgcagaccctcagcacgcagttcaagcaggcaccgggccagacccagggtgg

SEQ ID NO: 297497 - DNA, 120 bp, Artificial Sequence
  ENSG00000132382_16 (sequence is synthesized)
gcagccctggacctaccacctggtgcagttcgcagacctcctgttgaatcacagccacaacgtgaccaccgtgacacccttcactgcgcagcagcgccaggcctgggaccggatgctgca

SEQ ID NO: 297498 - DNA, 120 bp, Artificial Sequence
  ENSG00000132382_17 (sequence is synthesized)
gactctgaaggagctggaggcccactccgcagaggccagggctgctgccttccagcaccttctgctcctcgtgggcatccacctcctcaagtcccctgcagagagctgtgacctgctggg

SEQ ID NO: 297499 - DNA, 120 bp, Artificial Sequence
  ENSG00000132382_18 (sequence is synthesized)
tgacatccagacctgcatcaggaaaagtctgggagagaagccccgccggagccgcaccaagaccatcgacccccaggaacccccgtgggtagaggtgctggtggagatcttgctggccct

SEQ ID NO: 297500 - DNA, 120 bp, Artificial Sequence
  ENSG00000132382_19 (sequence is synthesized)
gttggcccagcccagccacctcatgcgccaggtggcccggagcgtgtttggccacatctgctcccacctgaccccgcgtgccctgcagctaattctggatgtgctgaaccccgagaccag

SEQ ID NO: 297501 - DNA, 120 bp, Artificial Sequence
  ENSG00000132382_20 (sequence is synthesized)
gagaatgaccgtgtggtggtgacggacgattctgatgagcggcggctgaagggtgcagaggacaagagcgaggaaggtgaggacaacagaagctcagagagtgaagaggagagcgagggg

SEQ ID NO: 297502 - DNA, 120 bp, Artificial Sequence
  ENSG00000132382_21 (sequence is synthesized)
gaggagagcgaggaggaggagcgcgacggggacgtggatcagggcttccgggaacagctgatgaccgtgctgcaggctgggaaggcgctgggtggagaggacagtgagaacgaggaggag

SEQ ID NO: 297503 - DNA, 120 bp, Artificial Sequence
  ENSG00000132382_22 (sequence is synthesized)
ctgggggatgaggccatgatggccctggaccagagcctcgccagcctctttgccgagcagaagctgcgtatccaggcccggcgagacgagaagaacaagctgcagaaggagaaggctctg

SEQ ID NO: 297504 - DNA, 120 bp, Artificial Sequence
  ENSG00000132382_23 (sequence is synthesized)
cggcgcgacttccagatccgggtgctggacctggtggaggtgctagtgaccaagcagcccgagaatgccctggtcctggagctgctggagccgctgctgagcatcatccggcgcagcctg

SEQ ID NO: 297505 - DNA, 120 bp, Artificial Sequence
  ENSG00000132382_24 (sequence is synthesized)
cgcagcagcagctccaaacaggagcaggaccttctgcacaagacggcgcgcatcttcacgcaccacctgtgccgtgcccggcgctactgccacgacttgggtgagcgcgcaggggccctg

SEQ ID NO: 297506 - DNA, 120 bp, Artificial Sequence
  ENSG00000132382_25 (sequence is synthesized)
cacgcccaggtggagcggttggtgcagcaggctggccgccagcccgactcccccaccgccctctaccacttcaacgcctctctctacctgctccgggtcttgaagggcaacactgctgag

SEQ ID NO: 297507 - DNA, 120 bp, Artificial Sequence
  ENSG00000132382_26 (sequence is synthesized)
ggctgcgtgcatgagacacaggagaagcagaaagctggcactgaccccagccacatgcccacgggcccgcaggctgccagctgcttggacttgaacctggtgacccgggtgtactcgaca

SEQ ID NO: 297508 - DNA, 120 bp, Artificial Sequence
  ENSG00000132382_27 (sequence is synthesized)
gcactgagctccttcctgaccaagcgcaacagccccctcacagttcccatgttcctcagcctcttctcccggcacccggtgctctgtcagagcctgctccccatcctggtccagcatatc

SEQ ID NO: 297509 - DNA, 120 bp, Artificial Sequence
  ENSG00000132382_28 (sequence is synthesized)
acgggcccggtgcggccccgtcatcaggcctgcctgctgctccagaagaccctgtccatgcgggaggtgaggtcgtgctttgaggaccccgagtggaagcagctgatgggccaggtccta

SEQ ID NO: 297510 - DNA, 120 bp, Artificial Sequence
  ENSG00000132382_29 (sequence is synthesized)
gcaaaggtcaccgagaacttgcgcgtgctgggggaggcgcagaccaaggcgcagcatcagcaggcactgtcctccctggagctgctcaacgttctcttcaggacctgcaaacatgagaag

SEQ ID NO: 297511 - DNA, 120 bp, Artificial Sequence
  ENSG00000132382_30 (sequence is synthesized)
ctgaccttggacctgacggtgctcctgggtgtgctgcaggggcaacagcagagcctacagcagggggcacactccaccggctccagccgcctgcacgacctctactggcaggccatgaaa

SEQ ID NO: 297512 - DNA, 120 bp, Artificial Sequence
  ENSG00000132382_31 (sequence is synthesized)
accctgggagtccagcgccccaagttggagaagaaggatgccaaggagatccccagtgccacccagagccccatcagtaagaagcggaagaaaaagggattcttgccagagacgaagaag

SEQ ID NO: 297513 - DNA, 120 bp, Artificial Sequence
  ENSG00000132382_32 (sequence is synthesized)
cgcaagaaacgcaagtcagaggatggcacgccagcggaggatggcacacctgcagccaccggcgggagccagccccccagcatgggcaggaagaagaggaacaggacaaaggctaaggtc

SEQ ID NO: 297514 - DNA, 120 bp, Artificial Sequence
  ENSG00000132382_33 (sequence is synthesized)
ccagcccaggcaaacgggacgccaaccaccaagagtccagcccctggcgcccccacccggagccccagcacccctgccaaatccccaaaactgcagaagaaaaaccagaagccgtcccag

SEQ ID NO: 297515 - DNA, 120 bp, Artificial Sequence
  ENSG00000132382_34 (sequence is synthesized)
gtgaatggagctcccgggtcccccacggaacctgcaggccaaaagcagcatcagaaggctcttcccaaaaagggggtcttgggcaaatcaccactgtccgcgctggcacggaaaaaggca

SEQ ID NO: 297516 - DNA, 120 bp, Artificial Sequence
  ENSG00000132382_35 (sequence is synthesized)
aggctgtctttggtcatcaggagtcccagcctgcttcagagtggggccaagaagaaagcacaggtgaggaaggcagggaagccctgagcacaggtacgggcccccctcagcccctgcctc

SEQ ID NO: 297517 - DNA, 120 bp, Artificial Sequence
  ENSG00000132382_36 (sequence is synthesized)
catctgcctgagacgcctattttttttttttttttttaaaccatgattttaatacgcaagctgtttctaaggcgctgccactggggagggtggctgttgccgcctgcccgggcatcctgc

SEQ ID NO: 297518 - DNA, 120 bp, Artificial Sequence
  ENSG00000132382_37 (sequence is synthesized)
tctggcaagcacagcctgagccattcctgcaggggtcccagggtgcagagacctccccacccccggttctgggctgggaccctggctccagggccatgtccagggctctggtgtttgcct

SEQ ID NO: 297519 - DNA, 120 bp, Artificial Sequence
  ENSG00000132382_38 (sequence is synthesized)
gggttggtgcaggttgatgtgctggctgcaggcaggtgtgaccatctctcgtgcctgccacctctttgcccccaggcttttttgctgtgagggagccaccagggggtgatttaaataggt

SEQ ID NO: 297520 - DNA, 120 bp, Artificial Sequence
  ENSG00000132382_39 (sequence is synthesized)
ttatttcttcatttacaagaggaatatatttggcttctctcttaagactctgagattcacaatcagcagctctaaaaaataaaggagcagtttggcttccggaaggaagaggaggcaaca

SEQ ID NO: 297521 - DNA, 120 bp, Artificial Sequence
  ENSG00000132382_40 (sequence is synthesized)
gtcccagcctgcttcagagtggggccaagaagaaagcacagactctgagattcacaatcagcagctctaaaaaataaaggagcagtttggcttccggaaggaagaggaggcaacactcgg

SEQ ID NO: 297522 - DNA, 120 bp, Artificial Sequence
  ENSG00000132382_41 (sequence is synthesized)
gggccgggcgggggcggtggggagtgggacgatcggggaggtgtgtgacgcgcctgcctctaccacacaggacaagagcgaggaaggtgaggacaacagaagctcagagagtgaagagga

SEQ ID NO: 297523 - DNA, 120 bp, Artificial Sequence
  ENSG00000132382_42 (sequence is synthesized)
agagcgagggggaggagagcgaggaggaggagcgcgacggggacgtggatcagggcttccgggaacagctgatgaccgtgctgcaggctgggaagccgcctgcacgacctctactggcag

SEQ ID NO: 297524 - DNA, 120 bp, Artificial Sequence
  ENSG00000132382_43 (sequence is synthesized)
ctgtggcctgggtcgcctctgtcgtcttctaggtctgtttccccacttataaagtgggacttgggttggctctgcttggcggagcagggtggaccgagaatgttctgaccagctctcgtc

SEQ ID NO: 297525 - DNA, 120 bp, Artificial Sequence
  ENSG00000132382_44 (sequence is synthesized)
ttaacccgcttaaccctcttctgactggatattgtgaggccccagagcgctgtcctggtgagcacgggcacagctgtccctgccccactggcttggctgtgggtacatggtctctgaagg

SEQ ID NO: 297526 - DNA, 120 bp, Artificial Sequence
  ENSG00000132382_45 (sequence is synthesized)
gggtggccgtgccctggcccctgccacacagtgaacacacaggagctgagggggcagggccagcctcactcccgcagccactgctgcccatctggccacacacaggatgcccctggtagt

SEQ ID NO: 297527 - DNA, 120 bp, Artificial Sequence
  ENSG00000132382_46 (sequence is synthesized)
gtctgctctggtgccagggctgttgggggcaggctggaggaagatggcactaagccaataatgggcaggaattgtcccaacctgaggtcccacctctatccagctgggaggccttggtgt

SEQ ID NO: 297528 - DNA, 120 bp, Artificial Sequence
  ENSG00000132382_47 (sequence is synthesized)
ccccacctgcacacaaaggcacaggagcaggtagtcacagagcccagagcagcaggcagcctcacacgctgcccacagcagtgcccagcgggcccccgagccctcatgcatccctgagcc

SEQ ID NO: 297529 - DNA, 120 bp, Artificial Sequence
  ENSG00000132382_48 (sequence is synthesized)
gggggcgccctttccccaccccctcagaatcagttctccgggagaccgatctctgggaaagaagtgaggattggagcctgagtccagagtcgggagaactggggttgtcccaggagacgg

SEQ ID NO: 297530 - DNA, 120 bp, Artificial Sequence
  ENSG00000132382_49 (sequence is synthesized)
tggggttctatggcacaatgggccccctaccgagaggcttttgagggctgtgcgggtttccaggaaaggttctgggggagttaagttgggaggtttttgaagccaactttgtcacaggtg

SEQ ID NO: 297531 - DNA, 120 bp, Artificial Sequence
  ENSG00000132382_50 (sequence is synthesized)
gaaacatccctccggccacttagcggcaccagctggtgtcctaggctttccatgcaggatctcgtaatccccacagctttgaggcagacaccccctctccatgtttgacatggagaaact

SEQ ID NO: 297532 - DNA, 120 bp, Artificial Sequence
  ENSG00000132382_51 (sequence is synthesized)
ggactgggggaatgtaggctggcttgggatgggtgggggacagtcgtgtgccctgctcataccctctgtccctctgtggggaccaggaccaggaggcactgatgaagtcggtgaagctgc

SEQ ID NO: 297533 - DNA, 120 bp, Artificial Sequence
  ENSG00000132383_0 (sequence is synthesized)
ctcgggccaataactgcgcagcgcgcgggacccgggtggggaagctggagctgttgcggggtccgcggggaagtcttggcggtggagccatggtcggccaactgagcgagggggccattg

SEQ ID NO: 297534 - DNA, 120 bp, Artificial Sequence
  ENSG00000132383_1 (sequence is synthesized)
cggccatcatgcagaagggggatacaaacataaagcccatcctccaagtcatcaacatccgtcccattactacggggaatagtccgccgcgttatcgactgctcatgagtgatggattga

SEQ ID NO: 297535 - DNA, 120 bp, Artificial Sequence
  ENSG00000132383_2 (sequence is synthesized)
acactctatcctctttcatgttggcgacacagttgaaccctctcgtggaggaagaacaattgtccagcaactgtgtatgccagattcacagatttattgtgaacactctgaaagacggaa

SEQ ID NO: 297536 - DNA, 120 bp, Artificial Sequence
  ENSG00000132383_3 (sequence is synthesized)
ggagagtagttatcttgatggaattagaagttttgaagtcagctgaagcagttggagtgaagattggcaatccagtgccctataatgaaggactcgggcagccgcaagtagctcctccag

SEQ ID NO: 297537 - DNA, 120 bp, Artificial Sequence
  ENSG00000132383_4 (sequence is synthesized)
cgccagcagccagcccagcagcaagcagcaggccccagccgcagaatggaagctcgggaatgggttctactgtttctaaggcttatggtgcttcaaagacatttggaaaagctgcaggtc

SEQ ID NO: 297538 - DNA, 120 bp, Artificial Sequence
  ENSG00000132383_5 (sequence is synthesized)
ccagcctgtcacacacttctgggggaacacagtccaaagtggtgcccattgccagcctcactccttaccagtccaagtggaccatttgtgctcgtgttaccaacaaaagtcagatccgta

SEQ ID NO: 297539 - DNA, 120 bp, Artificial Sequence
  ENSG00000132383_6 (sequence is synthesized)
cctggagcaactcccgaggggaagggaagcttttctccctagaactggttgacgaaagtggtgaaatccgagctacagctttcaatgagcaagtggacaagttctttcctcttattgaag

SEQ ID NO: 297540 - DNA, 120 bp, Artificial Sequence
  ENSG00000132383_7 (sequence is synthesized)
tgaacaaggtgtattatttctcgaaaggcaccctgaagattgctaacaagcagttcacagctgttaaaaatgactacgagatgaccttcaataacgagacttccgtcatgccctgtgagg

SEQ ID NO: 297541 - DNA, 120 bp, Artificial Sequence
  ENSG00000132383_8 (sequence is synthesized)
acgaccatcatttacctacggttcagtttgatttcacggggattgatgacctcgagaacaagtcgaaagactcacttgtagacatcatcgggatctgcaagagctatgaagacgccacta

SEQ ID NO: 297542 - DNA, 120 bp, Artificial Sequence
  ENSG00000132383_9 (sequence is synthesized)
aaatcacagtgaggtctaacaacagagaagttgccaagaggaatatctacttgatggacacatccgggaaggtggtgactgctacactgtggggggaagatgctgataaatttgatggtt

SEQ ID NO: 297543 - DNA, 120 bp, Artificial Sequence
  ENSG00000132383_10 (sequence is synthesized)
ctagacagcccgtgttggctatcaaaggagcccgagtctctgatttcggtggacggagcctctccgtgctgtcttcaagcactatcattgcgaatcctgacatcccagaggcctataagc

SEQ ID NO: 297544 - DNA, 120 bp, Artificial Sequence
  ENSG00000132383_11 (sequence is synthesized)
ttcgtggatggtttgacgcagaaggacaagccttagatggtgtttccatctctgatctaaagagcggcggagtcggagggagtaacaccaactggaaaaccttgtatgaggtcaaatccg

SEQ ID NO: 297545 - DNA, 120 bp, Artificial Sequence
  ENSG00000132383_12 (sequence is synthesized)
agaacctgggccaaggcgacaagccggactactttagttctgtggccacagtggtgtatcttcgcaaagagaactgcatgtaccaagcctgcccgactcaggactgcaataagaaagtga

SEQ ID NO: 297546 - DNA, 120 bp, Artificial Sequence
  ENSG00000132383_13 (sequence is synthesized)
ttgatcaacagaatggattgtaccgctgtgagaagtgcgacaccgaatttcccaatttcaagtaccgcatgatcctgtcagtaaatattgcagattttcaagagaatcagtgggtgactt

SEQ ID NO: 297547 - DNA, 120 bp, Artificial Sequence
  ENSG00000132383_14 (sequence is synthesized)
gtttccaggagtctgctgaagctatccttggacaaaatgctgcttatcttggggaattaaaagacaagaatgaacaggcatttgaagaagttttccagaatgccaacttccgatctttca

SEQ ID NO: 297548 - DNA, 120 bp, Artificial Sequence
  ENSG00000132383_15 (sequence is synthesized)
tattcagagtcagggtcaaagtggagacctacaacgacgagtctcgaattaaggccactgtgatggacgtgaagcccgtggactacagagagtatggccgaaggctggtcatgagcatca

SEQ ID NO: 297549 - DNA, 120 bp, Artificial Sequence
  ENSG00000132383_16 (sequence is synthesized)
ggagaagtgcattgatgtgagaggagcagtgccaatcgggcagaagtttgcaaataggcagaatggaatcgatttcctcccacctccgtgtgacgatcccatgttagctacacagtgcag

SEQ ID NO: 297550 - DNA, 120 bp, Artificial Sequence
  ENSG00000132383_17 (sequence is synthesized)
aggctcttgatggtggactaagcaatttcccccctcgtgcgcatctcagaacccatcggtaggcaaaggaaaatacgctcaggtggttgtggtgtagactgtgtcaggcctacggagtca

SEQ ID NO: 297551 - DNA, 120 bp, Artificial Sequence
  ENSG00000132383_18 (sequence is synthesized)
gccagtggctagcgcaagaccagtcactccctctgccttcaggcttctgtcaatttcattatcatcaagcaggaattatgtcgtaagtcactgaccctaactgcagaccatgaagtaaat

SEQ ID NO: 297552 - DNA, 120 bp, Artificial Sequence
  ENSG00000132383_19 (sequence is synthesized)
tatgtaactaggtttttgcttctccagtggtgaccacccccccccatccccgctcacaacttgggttcttctcagcggggcgagctgagaagcggtcatgagcacctggggattttagta

SEQ ID NO: 297553 - DNA, 120 bp, Artificial Sequence
  ENSG00000132383_20 (sequence is synthesized)
catagttggtaatgcttggaatggcaatagggtagaatgattaatcaaaggcatatcttctatatctgaagagtatccttccttcagggtttaatagactgagtcagatgggtctgatat

SEQ ID NO: 297554 - DNA, 120 bp, Artificial Sequence
  ENSG00000132383_21 (sequence is synthesized)
taatcaaaattgtctcttctgaggaccgctgataagcattgacttgccgtcccctaaggaaatccgagcggctacaaagcgtttctttacttctcacttcaattaatgctgcgcttcgct

SEQ ID NO: 297555 - DNA, 120 bp, Artificial Sequence
  ENSG00000132383_22 (sequence is synthesized)
tggtgagtgcgtactttttctacctgtacacattcctgcattcatgtattttgttttttttgactaaagctatgttacatggaaaggattttgaagccttttgtttcccttgctttgttt

SEQ ID NO: 297556 - DNA, 120 bp, Artificial Sequence
  ENSG00000132383_23 (sequence is synthesized)
taataaacagtatattctttggttgtgaatcctactttctttgaatgcaaagagttcctataactggaaagcaattaattagccttcataataaatgttcacttgggggggatgttaact

SEQ ID NO: 297557 - DNA, 120 bp, Artificial Sequence
  ENSG00000132383_24 (sequence is synthesized)
cattataaacccgaagattagtccaaggcatggagatccttcttcctagtgtttgcagccctgaaatgcatctttcaaagcatgaaaacactaaaaacaaaaagccattttgcctgagga

SEQ ID NO: 297558 - DNA, 120 bp, Artificial Sequence
  ENSG00000132383_25 (sequence is synthesized)
tgctgatgatctggcacttgggattttattgatgtttacgcagcagtctaacaccaaccacgctttgaaatgtgtacagacagtgagctggtaagaaaacagtaattatgctagtgggcc

SEQ ID NO: 297559 - DNA, 120 bp, Artificial Sequence
  ENSG00000132383_26 (sequence is synthesized)
tttcagtcagcaaaagcatgctcgctctgtgtgttcctaatcatattaattatctatccggtggctgcaacacaccgcctgccattggccgcacatctcgccgtcgtaccccggcagtgc

SEQ ID NO: 297560 - DNA, 120 bp, Artificial Sequence
  ENSG00000132383_27 (sequence is synthesized)
ggcggtcactctgcagccagaggacctgctgttcatcactgcacatgccgcctgcggaggcttttggatatggggagtgatggtgtcctgtctgtctcccccctcggtgtctgccgttga

SEQ ID NO: 297561 - DNA, 120 bp, Artificial Sequence
  ENSG00000132383_28 (sequence is synthesized)
cataggggccagccagccctagacgggatgacttccgttcctgaggacagacacagagggactcctgctcagcctcactaattgtttagacacattccttcctacccttctctagtctca

SEQ ID NO: 297562 - DNA, 120 bp, Artificial Sequence
  ENSG00000132383_29 (sequence is synthesized)
ggagatggtaactgggtcgcatttcagtctctgactgaggcctcagccatttttacggaagttcttttctgtctgaccttgcttataaagcatcgacgagaaaattacagtcttcaaccc

SEQ ID NO: 297563 - DNA, 120 bp, Artificial Sequence
  ENSG00000132383_30 (sequence is synthesized)
tcttctggattgacaaattgtggctgggaagtggcgatctagctttcagcccagtaaccagtctttcatgcctactactcccagcattccctcctctccccacgtgtctgtccacacagt

SEQ ID NO: 297564 - DNA, 120 bp, Artificial Sequence
  ENSG00000132383_31 (sequence is synthesized)
gaagaggcctgaccagccgtggtaccaggacaggacgtgtccagggaacgctgacacctgtcctcgcgccttctcagtggccagcgtgatgaaaccagcacgtctccgtggatgtgattg

SEQ ID NO: 297565 - DNA, 120 bp, Artificial Sequence
  ENSG00000132383_32 (sequence is synthesized)
ggaacccaggggcagtgccagggggagggctccctcgaggaggctgtttctaacagatttccccactcaaagatcagatcaccagcagaggagcatcagaaactggctccactgttgggc

SEQ ID NO: 297566 - DNA, 120 bp, Artificial Sequence
  ENSG00000132383_33 (sequence is synthesized)
ttttcagagattttggtccctgcgggttgcctaaatagattctggcccacagtttacctcgaaaggctgttgatgttgttctgtttctcctctttcacttagagatcaatgttgattttg

SEQ ID NO: 297567 - DNA, 120 bp, Artificial Sequence
  ENSG00000132383_34 (sequence is synthesized)
cgtacaccatgacatcagcgttaggcaattaggagaaaaaaatctaatcatttcgcctttatttcaagtggttcttgaattccctccagtctcattgtgaaaggggcagggaaaaaaata

SEQ ID NO: 297568 - DNA, 120 bp, Artificial Sequence
  ENSG00000132383_35 (sequence is synthesized)
aaagggtaataatctgatttctgtccatatttccagtgttttatgctttccattaaaaccttgctaatctctcgcgtgctgttccttttttgaactgcagggtcaaaaatgttcccctcc

SEQ ID NO: 297569 - DNA, 120 bp, Artificial Sequence
  ENSG00000132383_36 (sequence is synthesized)
cccacttctgtttcctgagtgggctgtcttcaaaaagtataaatactattgatcgtggtatttaatacactaatgaaacccatggttattgactacataattaatatactgtccaaaagt

SEQ ID NO: 297570 - DNA, 120 bp, Artificial Sequence
  ENSG00000132383_37 (sequence is synthesized)
gaagtttggccgcccagtatgtaaaggtttatattgactcatgtttctttggcaatatgccgcccaaggttttatttatagaggatgaaacaggttgtttggtctccttttcttcttttc

SEQ ID NO: 297571 - DNA, 120 bp, Artificial Sequence
  ENSG00000132383_38 (sequence is synthesized)
acctgttagaaggccactattcccctagtaaactgattgtttccttgtctcaaagggaagattccccccactccccggccaccttttatgtggtttgttaactcttagtcttatatccac

SEQ ID NO: 297572 - DNA, 120 bp, Artificial Sequence
  ENSG00000132383_39 (sequence is synthesized)
tccgctggtagagttctggcttttataaacacctttggaagtcatcggttcctcaaaaagagagcatagatgtttaattttcacttattcaaaaaaactggtatttttgttattaagaca

SEQ ID NO: 297573 - DNA, 120 bp, Artificial Sequence
  ENSG00000132383_40 (sequence is synthesized)
tttaacctcctctgggataccaacccgtgcactcgccagagaccgaggcgagaacgcctcgagaaccgctcagacgcgcccggaactgcgccctggtctccctcccagcgcccgcgcagc

SEQ ID NO: 297574 - DNA, 120 bp, Artificial Sequence
  ENSG00000132383_41 (sequence is synthesized)
agtgctgggatgacaggcatgagcccactgcacctggccctctctggaaattattttaataagtggaaaaagaacattaacctctccccatcttctcagtgtgtctttttattatttctt

SEQ ID NO: 297575 - DNA, 120 bp, Artificial Sequence
  ENSG00000132383_42 (sequence is synthesized)
cattacttcagacaattctagagaaaggcgaaaagaatcttcaaatcactggccccattaaaggaaaggattgtttgcccttacaccaagtcaaaacataaaagcctcatttgacaccaa

SEQ ID NO: 297576 - DNA, 120 bp, Artificial Sequence
  ENSG00000132386_0 (sequence is synthesized)
agtgtgcaggcttagagggactaggctgggtgtggagctgcagcgtatccacaggccccaggatgcaggccctggtgctactcctctgcattggagccctcctcgggcacagcagctgcc

SEQ ID NO: 297577 - DNA, 120 bp, Artificial Sequence
  ENSG00000132386_1 (sequence is synthesized)
agaaccctgccagccccccggaggagggctccccagaccccgacagcacaggggcgctggtggaggaggaggatcctttcttcaaagtccccgtgaacaagctggcagcggctgtctcca

SEQ ID NO: 297578 - DNA, 120 bp, Artificial Sequence
  ENSG00000132386_2 (sequence is synthesized)
acttcggctatgacctgtaccgggtgcgatccagcacgagccccacgaccaacgtgctcctgtctcctctcagtgtggccacggccctctcggccctctcgctgggagcggagcagcgaa

SEQ ID NO: 297579 - DNA, 120 bp, Artificial Sequence
  ENSG00000132386_3 (sequence is synthesized)
cagaatccatcattcaccgggctctctactatgacttgatcagcagcccagacatccatggtacctataaggagctccttgacacggtcactgccccccagaagaacctcaagagtgcct

SEQ ID NO: 297580 - DNA, 120 bp, Artificial Sequence
  ENSG00000132386_4 (sequence is synthesized)
cccggatcgtctttgagaagaagctgcgcataaaatccagctttgtggcacctctggaaaagtcatatgggaccaggcccagagtcctgacgggcaaccctcgcttggacctgcaagaga

SEQ ID NO: 297581 - DNA, 120 bp, Artificial Sequence
  ENSG00000132386_5 (sequence is synthesized)
aaagtttgactccagaaagacttccctcgaggatttctacttggatgaagagaggaccgtgagggtccccatgatgtcggaccctaaggctgttttacgctatggcttggattcagatct

SEQ ID NO: 297582 - DNA, 120 bp, Artificial Sequence
  ENSG00000132386_6 (sequence is synthesized)
cagctgcaagattgcccagctgcccttgaccggaagcatgagtatcatcttcttcctgcccctgaaagtgacccagaatttgaccttgatagaggagagcctcacctccgagttcattca

SEQ ID NO: 297583 - DNA, 120 bp, Artificial Sequence
  ENSG00000132386_7 (sequence is synthesized)
tgacatagaccgagaactgaagaccgtgcaggcggtcctcactgtccccaagctgaagctgagttatgaaggcgaagtcaccaagtccctgcaggagatgaagctgcaatccttgtttga

SEQ ID NO: 297584 - DNA, 120 bp, Artificial Sequence
  ENSG00000132386_8 (sequence is synthesized)
ttcaccagactttagcaagatcacaggcaaacccatcaagctgactcaggtggaacaccgggctggctttgagtggaacgaggatggggcgggaaccacccccagcccagggctgcagcc

SEQ ID NO: 297585 - DNA, 120 bp, Artificial Sequence
  ENSG00000132386_9 (sequence is synthesized)
tgcccacctcaccttcccgctggactatcaccttaaccagcctttcatcttcgtactgagggacacagacacaggggcccttctcttcattggcaagattctggaccccaggggccccta

SEQ ID NO: 297586 - DNA, 120 bp, Artificial Sequence
  ENSG00000132386_10 (sequence is synthesized)
atatcccagtttaatattccaataccctagaagaaaacccgagggacagcagattccacaggacacgaaggctgcccctgtaaggtttcaatgcatacaataaaagagctttatccctaa

SEQ ID NO: 297587 - DNA, 120 bp, Artificial Sequence
  ENSG00000132386_11 (sequence is synthesized)
gaaccctgccagccccccggaggagagagctcatgcgtgatcagggagtaaaactcattcccgttttaggccaaacacagaaaaattaggaaggacagccccaaggggccagaaccacca

SEQ ID NO: 297588 - DNA, 120 bp, Artificial Sequence
  ENSG00000132386_12 (sequence is synthesized)
atcttaagggctatgatgggagaagtacagggactggtacctctcactccctcactcccaccttccaggcctgatgcctttaacctacttcaggaaaatctctaaggatgaaaattcctt

SEQ ID NO: 297589 - DNA, 120 bp, Artificial Sequence
  ENSG00000132386_13 (sequence is synthesized)
gccagcagaagtcctggcaagtcacaggaagatgctggctgggaagtcagggcctgctgagcgctaaaccagaacccgagcctggcaggctctcaaagacgggatgcttgtcgtcgagtc

SEQ ID NO: 297590 - DNA, 79 bp, Artificial Sequence
  ENSG00000132386_14 (sequence is synthesized)
tcaaaaaactttaggcttaaaggagggtcccctgacgcagacagtggaacaaaagcacaagcttatggccccaggatgc

SEQ ID NO: 297591 - DNA, 120 bp, Artificial Sequence
  ENSG00000132386_15 (sequence is synthesized)
aggtaaagcagctccctggctgctctgatgccagggacggcgggagaggctcccctgggctggggggacaggggagaggcaggggcactccagggagcagaaaagaggggtgcaagggag

SEQ ID NO: 297592 - DNA, 80 bp, Artificial Sequence
  ENSG00000132388_0 (sequence is synthesized)
ttcctcggctccggcgctccggtcgcggggcccgggttcctcggcacaccccgctccagccgcccccagagcctgtcccc

SEQ ID NO: 297593 - DNA, 120 bp, Artificial Sequence
  ENSG00000132388_1 (sequence is synthesized)
agcccttcggaagccccggcgccagcccgggccctcggcagggaggatgacggagctgcagtcggcactgctactgcgaagacagctggcagaactcaacaaaaatccagtggaaggctt

SEQ ID NO: 297594 - DNA, 120 bp, Artificial Sequence
  ENSG00000132388_2 (sequence is synthesized)
ttctgcaggtttaatagatgacaatgatctctaccgatgggaagtccttattattggccctccagatacactttatgaaggtggtgtttttaaggctcatcttactttcccaaaagatta

SEQ ID NO: 297595 - DNA, 120 bp, Artificial Sequence
  ENSG00000132388_3 (sequence is synthesized)
tcccctccgacctcctaaaatgaaattcattacagaaatctggcacccaaatgttgataaaaatggtgatgtgtgcatttctattcttcatgagcctggggaagataagtatggttatga

SEQ ID NO: 297596 - DNA, 120 bp, Artificial Sequence
  ENSG00000132388_4 (sequence is synthesized)
aaagccagaggaacgctggctccctatccacactgtggaaaccatcatgattagtgtcatttctatgctggcagaccctaatggagactcacctgctaatgttgatgctgcgaaagaatg

SEQ ID NO: 297597 - DNA, 120 bp, Artificial Sequence
  ENSG00000132388_5 (sequence is synthesized)
gagggaagatagaaatggagaatttaaaagaaaagttgcccgctgtgtaagaaaaagccaagagactgcttttgagtgacatttatttagcagctagtaacttcacttatttcagggtct

SEQ ID NO: 297598 - DNA, 120 bp, Artificial Sequence
  ENSG00000132388_6 (sequence is synthesized)
ccaattgagaaacatggcactgtttttcctgcactctacccacctattgctggacttctgttgtacaagttggcaaacactggctggaactgggctgcaataaaacatgccagttatcaa

SEQ ID NO: 297599 - DNA, 120 bp, Artificial Sequence
  ENSG00000132388_7 (sequence is synthesized)
tgctgacaagagcctaacaagtgccaacttacagatgattacgcattttgaattctaatgaactgttttaaccttcaggaagaattgtaaagacctgtacatagcacaacatgatccgga

SEQ ID NO: 297600 - DNA, 120 bp, Artificial Sequence
  ENSG00000132388_8 (sequence is synthesized)
taatatatatactgttcatgtacatccacaaatacaccttgtaccaaataatgctttcttgtagtagaataagaatcgtgtaaattctaagagattttagcaggttttctttcctattca

SEQ ID NO: 297601 - DNA, 120 bp, Artificial Sequence
  ENSG00000132388_9 (sequence is synthesized)
ttgtttcttatcagtttaaaaggattcctttaagcatgtcagatgaaaagcaattaggattaaaagtttccatttaatttcccttaaacccttgaggcttcattaaactcttttcactta

SEQ ID NO: 297602 - DNA, 120 bp, Artificial Sequence
  ENSG00000132388_10 (sequence is synthesized)
ctaaacttttgtatcttctttgttttgacacactcccctttgcttttatctcttacctgccagaatgttctcaaatgatttagttcaaatactgaaatacttaatgagcaattacttgat

SEQ ID NO: 297603 - DNA, 120 bp, Artificial Sequence
  ENSG00000132388_11 (sequence is synthesized)
ttttaatgatgacttcgaaggagtcatcactaggtgctttgtcctttttgtattctagttgcacccacctcttggattggatatagcaataacatttattggccgttgtgagctcttgat

SEQ ID NO: 297604 - DNA, 120 bp, Artificial Sequence
  ENSG00000132388_12 (sequence is synthesized)
cccagtcattacccctgagaactaaaaatagatggttcttaattcaacttactgaaaatttccccaaacaatagcaaatctgacttttccctcttcagttgcctggtattaaggttggat

SEQ ID NO: 297605 - DNA, 120 bp, Artificial Sequence
  ENSG00000132388_13 (sequence is synthesized)
aaatgaagcatgcacagctacaggctttctacttaacttctgggtttgctattacaaatcctatttactctcatacccttctccttagtccttcatatttctctgcctctattcttctat

SEQ ID NO: 297606 - DNA, 120 bp, Artificial Sequence
  ENSG00000132388_14 (sequence is synthesized)
actgcagatttttctcacctattgtacaaagaaattgcgatgtatattttcatgtaatttgattttggaattctgtcaccttatgtagtgagttcttccaaaatataattttttttcaat

SEQ ID NO: 297607 - DNA, 120 bp, Artificial Sequence
  ENSG00000132388_15 (sequence is synthesized)
aattgtcaagttgttggcttttattgtattgaatgaaggctataatactgagtgccagagaagtggtttaggaaaatctcaggttgattccttatgcaaatgaacttttaatacttgaaa

SEQ ID NO: 297608 - DNA, 120 bp, Artificial Sequence
  ENSG00000132388_16 (sequence is synthesized)
gcagtatatgtatttggttctatctagattcttctgtgaatctaaaagcattacaggggtaaatgctttgctatttgacgtatagatcccgtcactaacaatagtacacttggatgtgat

SEQ ID NO: 297609 - DNA, 120 bp, Artificial Sequence
  ENSG00000132388_17 (sequence is synthesized)
taatgtttgagcttcaatatatttcatatcatacagttttctaaaacaacttcagcaaatggtaaaatgaacatgtgcagtgttaaaggcaggccttaggctccttcatgtttgttgtga

SEQ ID NO: 297610 - DNA, 120 bp, Artificial Sequence
  ENSG00000132388_18 (sequence is synthesized)
ggttgtgtgtgggaagtagtctttggcttataagggatagaacttgagacagtagcagatgggacatggtgtttgattgtgagaatcagtgagaattcgtgcatctctgctctgtggggt

SEQ ID NO: 297611 - DNA, 120 bp, Artificial Sequence
  ENSG00000132388_19 (sequence is synthesized)
ttggagaaatgctttggcagaagagtgaaagaactcctgccaagagcccagacctctacaaacgttgtatgtccttttttaagcagaaataaaatggttgaggatgtagtcacagtagag

SEQ ID NO: 297612 - DNA, 120 bp, Artificial Sequence
  ENSG00000132388_20 (sequence is synthesized)
agtgatttttttctaagtccctgtcctctactctgaagcgttataaaaacctgtaaacattatacaaacccacaaaccttatagaaactcgtaagtgtgttgtgactggaaattgattca

SEQ ID NO: 297613 - DNA, 120 bp, Artificial Sequence
  ENSG00000132388_21 (sequence is synthesized)
ttagaacccagttttctttaagaactttgtgacttggttttttttttccttttccaaagactgtaaaaatagttgccccaaaatgtcagcactgcacaccctccagggacttggaataca

SEQ ID NO: 297614 - DNA, 85 bp, Artificial Sequence
  ENSG00000132388_22 (sequence is synthesized)
aaatgtcagcactgcacaccctccagggacttggaatacaatcctttttacttttttttttttttttttaagaaactggcgatca

SEQ ID NO: 297615 - DNA, 120 bp, Artificial Sequence
  ENSG00000132388_23 (sequence is synthesized)
caggtgtatgccaccatgcctggctaatacaaaaaaattcttttaagagatgggatccctcccttttaaaatcagaacttgttcacatggtggttgcttgtggcaaaacggagttcaaat

SEQ ID NO: 297616 - DNA, 120 bp, Artificial Sequence
  ENSG00000132388_24 (sequence is synthesized)
ggtggttgcttgtggcaaaacggagttcaaattttgctctcctattgctataattctgctagcaatctgttgaggtgaaacttgggatctgactcttcagcaagcagcaaatgacctagt

SEQ ID NO: 297617 - DNA, 120 bp, Artificial Sequence
  ENSG00000132388_25 (sequence is synthesized)
aactcagggacaactatttttgaactttaagtgccactttaatgcagttagtttgataaaaccatgtgggttttttttttagggctagctctacgggagtggaagtgagagccaggcatg

SEQ ID NO: 297618 - DNA, 120 bp, Artificial Sequence
  ENSG00000132388_26 (sequence is synthesized)
agtgcgtctccacatgcttttccacctgccctgagtgtgttacatactgaaacaggcctacatagatgttacaacttcccttcctctgtcggagatgtcatctgtgcctttctcagtgtt

SEQ ID NO: 297619 - DNA, 120 bp, Artificial Sequence
  ENSG00000132388_27 (sequence is synthesized)
catctgataatgtaaatttaaatgcctctacatttgatacgaaacccacattcaggtgacactgaacgaggtggcttttgtcccaccagtgcctcatcagtgtgaggcgattcctctctg

SEQ ID NO: 297620 - DNA, 120 bp, Artificial Sequence
  ENSG00000132388_28 (sequence is synthesized)
ctttaggaaaatgatttttccccctaaacttgtgccaaccatcaacaacatctccatagatcttatggattgtagaactgttggctgtttcctaaatttattccaagttctcgtagaggc

SEQ ID NO: 297621 - DNA, 120 bp, Artificial Sequence
  ENSG00000132388_29 (sequence is synthesized)
atatagatttcagtctgtgcttgtatgggatagatgatctgagtggctttctggcctcttttttgagtttaaaatccatatgaggttgacgtgtcatactaaggtaacatgtttgtgagg

SEQ ID NO: 297622 - DNA, 120 bp, Artificial Sequence
  ENSG00000132388_30 (sequence is synthesized)
ttattccactagtactgtgatcacgtgggtgtcagtatctttaacggccttcattcttggttgtgagattttatttgatatgcccactcaccctcgacgaatctgcccgctttgggctgt

SEQ ID NO: 297623 - DNA, 120 bp, Artificial Sequence
  ENSG00000132388_31 (sequence is synthesized)
ggtgcctgtgtatctttgcccgtctggtctccagttggtggaattaccttttttgtactgccacttctcagcatctttgaaatttgacataatgttgcttcatttcagtttttttagttc

SEQ ID NO: 297624 - DNA, 120 bp, Artificial Sequence
  ENSG00000132388_32 (sequence is synthesized)
tgtaatttgttgattgtatttaactatgtgagttctgttgtgatgtttactgtattgtaaagcacctcattcatgtgatgagtgctctataaatcaataaatgatgacttagaggctgta

SEQ ID NO: 297625 - DNA, 120 bp, Artificial Sequence
  ENSG00000132388_33 (sequence is synthesized)
tttagacattctctgttgacttcttgctatgacagatgttttcagtcccacttctcactactgatctccctcgtacgacggtcactgaactggcgcctctctggggttctgcccagaaga

SEQ ID NO: 297626 - DNA, 120 bp, Artificial Sequence
  ENSG00000132388_34 (sequence is synthesized)
aagatcaacaagagaccttcccttgtaagatgagaattgtgtagtaggtgactattagaagagtaaacaagtcttaagtctgtaaacattttttcagtaaatgcaatggagtaccagata

SEQ ID NO: 297627 - DNA, 120 bp, Artificial Sequence
  ENSG00000132388_35 (sequence is synthesized)
tctctcgttactatgactaaagaaagttcaatggtgacctacttctgcctgagtattgctagaattctttctttatccttgaagttcagtaacttcatcaggatataactcggtcttggt

SEQ ID NO: 297628 - DNA, 120 bp, Artificial Sequence
  ENSG00000132388_36 (sequence is synthesized)
gggggaaggcaccggtggggccgacgggcgggttgaaggagggaagcgggcgagcgaagtcccagtgcgcgccgcggcagcccgggcaccctccccttccgggcgtgagtcgctgtgaaa

SEQ ID NO: 297629 - DNA, 120 bp, Artificial Sequence
  ENSG00000132394_0 (sequence is synthesized)
gcgggtgtccgaggcggcggcggcggcatggcagggcggcgggtgaacgtgaacgtgggcgtgctgggccacatcgacagcggcaagacggcgctggcgcgggcgctaagcaccacagcc

SEQ ID NO: 297630 - DNA, 120 bp, Artificial Sequence
  ENSG00000132394_1 (sequence is synthesized)
tccaccgccgcctttgacaagcagccgcagagccgcgagcgcggcatcacgctcgatctgggcttctcgtgcttctcggtgccgctgcccgcgcgcctgcggtcgtctttgcccgagttc

SEQ ID NO: 297631 - DNA, 120 bp, Artificial Sequence
  ENSG00000132394_2 (sequence is synthesized)
caggcagcgcccgaggccgagcccgagcccggcgagccactgcttcaggtcacgctggtcgactgccccgggcacgcctccctcatccggaccatcatcggcggggcccagatcattgat

SEQ ID NO: 297632 - DNA, 120 bp, Artificial Sequence
  ENSG00000132394_3 (sequence is synthesized)
ctgatgatgctggtcatcgatgtgaccaaggggatgcagacccagtcagcggaatgccttgtgatcggccagattgcctgccagaagctggtcgtggtgctgaacaaaatagacctctta

SEQ ID NO: 297633 - DNA, 120 bp, Artificial Sequence
  ENSG00000132394_4 (sequence is synthesized)
cctgaaggaaagagacaggcagcaattgataaaatgaccaagaaaatgcagaagaccctagagaacaccaagttccgaggtgcaccgattatacccgtggcggccaagccggggggacca

SEQ ID NO: 297634 - DNA, 120 bp, Artificial Sequence
  ENSG00000132394_5 (sequence is synthesized)
gaggcccccgaaactgaagctccacagggcattccagagctcattgagctcctgacgtcccagatttccatcccaacgagagatccctcgggaccgttcctcatgtctgtggaccactgt

SEQ ID NO: 297635 - DNA, 120 bp, Artificial Sequence
  ENSG00000132394_6 (sequence is synthesized)
ttctccatcaaaggccaaggcactgtgatgacagggaccatcctttcaggctccatcagcctcggtgacagtgtggagatccctgccctcaaggtggtgaagaaggtgaagtccatgcag

SEQ ID NO: 297636 - DNA, 120 bp, Artificial Sequence
  ENSG00000132394_7 (sequence is synthesized)
atgttccacatgcccatcacttcagccatgcaaggagaccggctgggcatctgcgtcacccagtttgaccctaagctgctggagcgcgggttggtgtgtgcccccgagtccctgcacact

SEQ ID NO: 297637 - DNA, 120 bp, Artificial Sequence
  ENSG00000132394_8 (sequence is synthesized)
gtccatgcggccctcatctctgtggaaaagataccgtatttccgggggcccctgcaaaccaaggccaagttccacattacagtgggccatgaaacagtcatgggccggttgatgttcttc

SEQ ID NO: 297638 - DNA, 120 bp, Artificial Sequence
  ENSG00000132394_9 (sequence is synthesized)
ttcaacttctctcaagaataccttttccaggagcagtacctgtccaaggatttgacaccagcagtgacagacaatgatgaggccgacaagaaggccggccaggccacagagggccattgt

SEQ ID NO: 297639 - DNA, 120 bp, Artificial Sequence
  ENSG00000132394_10 (sequence is synthesized)
cctcggcagcagtgggccctggtggagtttgagaagcccgtcacctgccctcggctgtgcctggtgattggctccaggctagatgcggacattcacaccaacacgtgccggctagccttc

SEQ ID NO: 297640 - DNA, 120 bp, Artificial Sequence
  ENSG00000132394_11 (sequence is synthesized)
catggcatcctgctccacgggctagaggacaggaactacgccgacagcttcctgcccaggctgaaggtgtacaagctgaagcacaagcatggccttgtggagcgggcgatggatgactac

SEQ ID NO: 297641 - DNA, 120 bp, Artificial Sequence
  ENSG00000132394_12 (sequence is synthesized)
agtgtgatcggccgctccctgttcaaaaaggaaaccaacatccagctcttcgtggggctcaaggtgcacttgtccactggggaactgggcatcatcgacagtgccttcggccagagcggc

SEQ ID NO: 297642 - DNA, 120 bp, Artificial Sequence
  ENSG00000132394_13 (sequence is synthesized)
aagttcaagatccacatcccaggtggcctcagccccgagtccaagaagatcctgacacccgccctcaagaagcgggcccgggctggccgtggggaggccaccaggcaggaggagagcgcc

SEQ ID NO: 297643 - DNA, 120 bp, Artificial Sequence
  ENSG00000132394_14 (sequence is synthesized)
gagcggagcgagccctcacagcatgtggtgctcagcctgactttcaagcgttatgtcttcgacacccacaagcgcatggttcagtctccctgagtgtccggtgacctcccccagggcctc

SEQ ID NO: 297644 - DNA, 120 bp, Artificial Sequence
  ENSG00000132394_15 (sequence is synthesized)
cttgcccagcccagtccaggctgctgtgccaaatcccaaccagccacgcctcagcctctcccagtctctccctgcagtcctgcagcagcagcccccacccccaagcttggtgctgagccc

SEQ ID NO: 297645 - DNA, 120 bp, Artificial Sequence
  ENSG00000132394_16 (sequence is synthesized)
tggtgaggagctgagggggatgggttgctggggccaggagggtctctcctccagcccctgcacactcccacccaggacagcccccagcccaactaggaaagggccatgggcagagggctg

SEQ ID NO: 297646 - DNA, 120 bp, Artificial Sequence
  ENSG00000132394_17 (sequence is synthesized)
gtagccagtatcttccactgccccatctgttggccacctgcaggccagtctcaaccctcccccaggtgggcaggcacttgatggctacaaataaatgtcccgtggccccagcccactcta

SEQ ID NO: 297647 - DNA, 120 bp, Artificial Sequence
  ENSG00000132394_18 (sequence is synthesized)
agcctgggcctggtcctgagagaaggttgctacccacgtgttgagagaatgtgcgtgcgccacctcagctgcgccccgtggacattagcgaatgtttgaggagtgagttattcagtagat

SEQ ID NO: 297648 - DNA, 120 bp, Artificial Sequence
  ENSG00000132405_0 (sequence is synthesized)
gtcggacccgctgcctaccgcgtgcccggcgtcctcgtcgcgcgagttgccggtcccgcggggcctgggctgcgggcccacgggtcccggggatggcgtcggagccgcgctaactccgtt

SEQ ID NO: 297649 - DNA, 120 bp, Artificial Sequence
  ENSG00000132405_1 (sequence is synthesized)
actccgtttctccttggaccaagatgactgatggaaaactctccacctctacaaatggcgtagccttcatgggtattctggatggtcgaccaggaaacccccttcagaacctgcaacacg

SEQ ID NO: 297650 - DNA, 120 bp, Artificial Sequence
  ENSG00000132405_2 (sequence is synthesized)
tcaatctcaaggcgccccgactcctctccgcgcctgagtacgggcccaagctgaaactcagggctttagaagaccggcacagcctccagtccgtggactcggggattcctaccctggaga

SEQ ID NO: 297651 - DNA, 120 bp, Artificial Sequence
  ENSG00000132405_3 (sequence is synthesized)
tcgggaacccggagcctgtaccctgcagcgcggtccacgtgaggaggaagcagtccgactccgacctcatccccgagcgggccttccagagcgcctgcgcgctgccatcctgtgcgccac

SEQ ID NO: 297652 - DNA, 120 bp, Artificial Sequence
  ENSG00000132405_4 (sequence is synthesized)
cagctcctagcagcaccgagcgggaacagagcgtgcgcaaatcctccacgtttcccaggacaggctatgactcggtaaagctctatagcccgacctccaaagccctgacccgcagcgatg

SEQ ID NO: 297653 - DNA, 120 bp, Artificial Sequence
  ENSG00000132405_5 (sequence is synthesized)
atgtctccgtctgcagcgtgtccagtcttgggacagagctgtccaccacgctgtccgtcagcaatgaggacatcttggaccttgtggtcacgagcagctccagtgccattgtgaccctgg

SEQ ID NO: 297654 - DNA, 120 bp, Artificial Sequence
  ENSG00000132405_6 (sequence is synthesized)
agaatgacgatgacccacagtttaccaacgtcaccttgagctctatcaaggaaacccgtggcttacaccagcaggactgtgttcatgaagctgaggaggggagtaaattgaaaatattgg

SEQ ID NO: 297655 - DNA, 120 bp, Artificial Sequence
  ENSG00000132405_7 (sequence is synthesized)
ggccatttagtaacttctttgcaaggaacttgcttgctagaaaacaaagtgcaaggcttgacaaacacaatgacttgggatggaagttatttgggaaagcgccactccgagagaatgccc

SEQ ID NO: 297656 - DNA, 120 bp, Artificial Sequence
  ENSG00000132405_8 (sequence is synthesized)
agaaggattcaaagagaatacagaaggaatatgaagacaaggctggaagacctagcaagccaccctctccaaagcagaatgtgaggaagaatcttgactttgaaccactttccaccaccg

SEQ ID NO: 297657 - DNA, 120 bp, Artificial Sequence
  ENSG00000132405_9 (sequence is synthesized)
cactcatcctcgaggacagaccagcaaatctcccagcaaaaccagctgaagaagctcagaagcacagacagcagtatgaagaaatggtggttcaggccaaaaagcgagagctgaaagaag

SEQ ID NO: 297658 - DNA, 120 bp, Artificial Sequence
  ENSG00000132405_10 (sequence is synthesized)
cccagcgaaggaagaagcagctggaagaaagatgcagagtcgaggaaagcattggaaacgctgtgctcacctggaataatgagatcttacctaactgggaaacaatgtggtgctctagaa

SEQ ID NO: 297659 - DNA, 120 bp, Artificial Sequence
  ENSG00000132405_11 (sequence is synthesized)
aagttcgagatttatggtggcagggaatccctccaagtgtgagaggcaaagtctggagcttagccattggcaacgagttaaatatcacccacgagctctttgacatctgtcttgcccgag

SEQ ID NO: 297660 - DNA, 120 bp, Artificial Sequence
  ENSG00000132405_12 (sequence is synthesized)
ccaaggagaggtggcggtcccttagcacaggaggctctgaagtggagaacgaagatgctggtttttcagcagcagacagagaagccagtctggagcttattaaactggacatttctagaa

SEQ ID NO: 297661 - DNA, 120 bp, Artificial Sequence
  ENSG00000132405_13 (sequence is synthesized)
catttcctaatctctgcattttccagcaaggtggtccatatcatgacatgttgcacagtattttgggcgcttatacttgttaccggccagatgtgggttatgtccagggcatgtccttca

SEQ ID NO: 297662 - DNA, 120 bp, Artificial Sequence
  ENSG00000132405_14 (sequence is synthesized)
tagcagcagtgttgatcttgaacttagatactgcagatgcctttattgccttttctaaccttctgaataaaccctgtcaaatggcgttttttagagtggaccatggccttatgttgactt

SEQ ID NO: 297663 - DNA, 120 bp, Artificial Sequence
  ENSG00000132405_15 (sequence is synthesized)
attttgctgcatttgaagtattctttgaagaaaatttgccgaaattatttgcgcatttcaagaagaacaacctaactccagatatctacctaattgattggatctttaccttatatagta

SEQ ID NO: 297664 - DNA, 120 bp, Artificial Sequence
  ENSG00000132405_16 (sequence is synthesized)
aatctctgcccctcgacctggcctgtcgtatctgggacgtgttctgtcgcgatggggaagagttcctgttccgcacggccctgggcatcctgaagctgttcgaggacatcctgaccaaga

SEQ ID NO: 297665 - DNA, 120 bp, Artificial Sequence
  ENSG00000132405_17 (sequence is synthesized)
tggacttcattcacatggcccagttcctgacccggctgcccgaggacctgcccgccgaggagctgtttgcctccatcgccacgatccagatgcagagccgaaacaagaagtgggctcagg

SEQ ID NO: 297666 - DNA, 120 bp, Artificial Sequence
  ENSG00000132405_18 (sequence is synthesized)
tactgactgcattgcagaaagacagccgggaaatggagaagggaagtccgtccctccgacactgaggctgcagcgggaattcgcactcggcaccaatcagagccccatgccgcggcccct

SEQ ID NO: 297667 - DNA, 120 bp, Artificial Sequence
  ENSG00000132405_19 (sequence is synthesized)
ctgttgtttcagactgacacccgggcagccgagaagaacagacgctctttaagtttgattcctaacactggagttggccttaaacaaaacaaacacaaaaacttttaaagaattaaacca

SEQ ID NO: 297668 - DNA, 120 bp, Artificial Sequence
  ENSG00000132405_20 (sequence is synthesized)
aggatgagctgctgcggaccacagccagccactgcatctgctgcacagttgaacgatgggcagtggctcacccccactcctttatttcagcaaaagctaattaaattgtaatgtttctat

SEQ ID NO: 297669 - DNA, 120 bp, Artificial Sequence
  ENSG00000132405_21 (sequence is synthesized)
gtcaactactgggaagtatgttacagtcttagccaggatgcatgagagatgttatttgggagacttgagatgctttggctgatatttacatgttttcgataagaaagggatcgctgattg

SEQ ID NO: 297670 - DNA, 120 bp, Artificial Sequence
  ENSG00000132405_22 (sequence is synthesized)
agttattgagatagtttttccagagctggaggtcacgtttctaaaactcacctacgaaagatagcattaaaggaacaggggctctctgaggatggccactgatgtgtgtttgtggatacc

SEQ ID NO: 297671 - DNA, 120 bp, Artificial Sequence
  ENSG00000132405_23 (sequence is synthesized)
tgggcatcgacccagcctgcaggtgagctctgggccatgttgccttgacacagtcacagtgtagaggctgcaggtgcacacgtgggctccagtgggactgcgctctgggagactgctccc

SEQ ID NO: 297672 - DNA, 120 bp, Artificial Sequence
  ENSG00000132405_24 (sequence is synthesized)
tggcatcggtcctgcggaggtggaaagttcgagaggaggagctatttgcgaggaagccctgtggcaatagagataggcttaaaagcggagagaacacagagtggaatcagccccctgtaa

SEQ ID NO: 297673 - DNA, 120 bp, Artificial Sequence
  ENSG00000132405_25 (sequence is synthesized)
gtaaaagggtagagaaagagatgtgtggctgggccctctcccacctgcctgttcagtggaggccagggcagcagcccagaacagcacatgtgggggaggtggccccttgtgccagcagtg

SEQ ID NO: 297674 - DNA, 120 bp, Artificial Sequence
  ENSG00000132405_26 (sequence is synthesized)
gctcctctctgcctttgagccctgcacagctggacccatcctaagtgccagtgagtccctcacacatttgactttagaacgtgtgcttcatgacccgttgtacagacggaggagcgagca

SEQ ID NO: 297675 - DNA, 120 bp, Artificial Sequence
  ENSG00000132405_27 (sequence is synthesized)
acacacgtctaacagcctagacaatctcgtcagatgctcatactggaccatcagcctccccattttagctgactttcccagggtcgttggcaaattttttgttctgtcttttccttgact

SEQ ID NO: 297676 - DNA, 120 bp, Artificial Sequence
  ENSG00000132405_28 (sequence is synthesized)
aattgtagaactttgtgtgaggactttggttatccaaaatcacagaaatgaaccgttttgcagctgcgcagtctaaagggcaggccagtgtctggaagcagggcccacgtggcggtccgc

SEQ ID NO: 297677 - DNA, 120 bp, Artificial Sequence
  ENSG00000132405_29 (sequence is synthesized)
tggcaggctggtcctggggagcattctgcggacccggtcacgggcttggttagtcatgcgtacatgtgtgccttggggtgctctgcactccacggcccttctcagccacacttcccaccc

SEQ ID NO: 297678 - DNA, 120 bp, Artificial Sequence
  ENSG00000132405_30 (sequence is synthesized)
cagggggtgcccccaggctgatctcatttctgatgttgagggctgtttggctctgtctgtatagcttgtaacaggagccttgggctaggggctggggaaggaaagccgagctggcattcg

SEQ ID NO: 297679 - DNA, 120 bp, Artificial Sequence
  ENSG00000132405_31 (sequence is synthesized)
ttctctggactttttatgcctgccatacccgctaatgctcctcgaggtgcaggagcaggttgctgagccagtggctgccccgtgccctccttcccagcactatcatgtgtcacgtttccc

SEQ ID NO: 297680 - DNA, 120 bp, Artificial Sequence
  ENSG00000132405_32 (sequence is synthesized)
ggactctgcccctacatctcagctgaatctccagggaggctgcagagcatcgtggagaccactttctgcctcggcctttaaatgctgactcacctcctctcggaggaggcgtcctgtctt

SEQ ID NO: 297681 - DNA, 120 bp, Artificial Sequence
  ENSG00000132405_33 (sequence is synthesized)
cacgggggggtcccggtggcctccagacgtagccatttcctgacatcaagatgttgaatgtaatctggtctgagctgggcctgtgggaggggccgcctgaggcctgtgcgctgttgtcct

SEQ ID NO: 297682 - DNA, 120 bp, Artificial Sequence
  ENSG00000132405_34 (sequence is synthesized)
cgcagatgtacttatttttgttcatgttacgggcgttccgttccttaaagatgtatatattttcttactgtacataaagatgttccttaagtcgtacagaaggtggcgcggcaaagggcc

SEQ ID NO: 297683 - DNA, 120 bp, Artificial Sequence
  ENSG00000132405_35 (sequence is synthesized)
tcgtgcagtgtgttcagattgcccctggggatcttctgtgtcttcagcgcccagccctgcgtgttcctggtgaagcagtttcacatcagtctctccagatagcactacgatgtattccgc

SEQ ID NO: 297684 - DNA, 120 bp, Artificial Sequence
  ENSG00000132405_36 (sequence is synthesized)
ttctgaacaggatcccatgccagtgtggaacaccttcccaatcttagttcagaagtggcttgtatgacctgttcaggggtcacatgaggtctcgccagtttcctgggtcctcttcagagg

SEQ ID NO: 297685 - DNA, 120 bp, Artificial Sequence
  ENSG00000132405_37 (sequence is synthesized)
ccagaaagttctaagttctgagtccccggccagggtcccttaacacctcggcacagaggctgttggcaagtgtagaggctgcctctgtgtgtggtttaagtaaactggaaatgagacatt

SEQ ID NO: 297686 - DNA, 120 bp, Artificial Sequence
  ENSG00000132405_38 (sequence is synthesized)
gacgtgctgctcctccagaggtctgcacactccacttcacatgccgttgactctcacagtctaagacttcagggccgggacctttgtccagcctgcacagtagagtgaggctgcctctcc

SEQ ID NO: 297687 - DNA, 120 bp, Artificial Sequence
  ENSG00000132405_39 (sequence is synthesized)
cgccaggcattgggatcccatttagaaacggcattcacttcagaaggtactttttaactgctcagtttttgactattttaaatagtttgctgaaaactcctgataacacttgctacatat

SEQ ID NO: 297688 - DNA, 120 bp, Artificial Sequence
  ENSG00000132405_40 (sequence is synthesized)
catgttttaattgcttgtacagttaacctttaattttatttagtaaagtgtatcaaagtaggacttttttgaattgtaaataggtggttttattaaataaaagtcaatgtaaaattgtta

SEQ ID NO: 297689 - DNA, 80 bp, Artificial Sequence
  ENSG00000132405_41 (sequence is synthesized)
cagcgcggatcgcctcgctgtgtctgcgcgcgattgagcggcctgccgccccgccccgccccgcgagtctgaggagccgc

SEQ ID NO: 297690 - DNA, 120 bp, Artificial Sequence
  ENSG00000132405_42 (sequence is synthesized)
ctctggcgtgccaggaatgcggcacggggagagtccgtgcttctgcagccggcccctcggagctgcgaggtcacagtagacatgatggccatctcccctgcgctcctgttcatggacagg

SEQ ID NO: 297691 - DNA, 120 bp, Artificial Sequence
  ENSG00000132405_43 (sequence is synthesized)
atagattaagagactgaggctggctgggaggacgccacggcgccgctcccaagaccaccgcggcggggcctgagctccggtgtcacgcaaagcttcccttccgcggcggggcccgggccg

SEQ ID NO: 297692 - DNA, 120 bp, Artificial Sequence
  ENSG00000132405_44 (sequence is synthesized)
tctcccgcacaccggccggggcaggggagccccatcgatgcgctccgccgctcggctccctacgcctgagccctgcccgctcgagccccttccccctcccggccgcttcccacttccaag

SEQ ID NO: 297693 - DNA, 120 bp, Artificial Sequence
  ENSG00000132405_45 (sequence is synthesized)
gaaaagttttcctactccgacgcgaggctcccggcctgagaagaggcgcctcggtgcgccagaccccgaccccggagcccccttccacctcggaccctcagtccccaggcagcggaccct

SEQ ID NO: 297694 - DNA, 120 bp, Artificial Sequence
  ENSG00000132405_46 (sequence is synthesized)
cctccttggagcccctgaccccgctttcatctctgacccctctacccctggagcccctgacccgcgaaaccccctttcatctcggagccctgacctccttggacctccacccacgcgaac

SEQ ID NO: 297695 - DNA, 120 bp, Artificial Sequence
  ENSG00000132405_47 (sequence is synthesized)
taaatatcacccacggtgagtggcctgcatgatcctggggagtccacctccaggccctttggcttcttctctcccttttgccctgttggaaagaatggcagccattgccacgaatctgtg

SEQ ID NO: 297696 - DNA, 120 bp, Artificial Sequence
  ENSG00000132405_48 (sequence is synthesized)
tcttttgagagaccaggagactgtgtccttcaggagagaggggcagttgggaggcctgggtttagtgctgtgcactccggttacctgacagctcagcgcaggagctcttgaatagagggg

SEQ ID NO: 297697 - DNA, 120 bp, Artificial Sequence
  ENSG00000132406_0 (sequence is synthesized)
gcatttcggggcggtaccaagatggactcctcgcgggcccggcagcagctccggcggcgattcctcctcctgccggacgccgaggcccagctggaccgcgagggtgacgccgggccggaa

SEQ ID NO: 297698 - DNA, 120 bp, Artificial Sequence
  ENSG00000132406_1 (sequence is synthesized)
acctccacagctgttgagaaaaaggagaaacctcttccaagacttaatatccattctggattctggattttggcatccattgttgtgacctattatgttgacttctttaaaacccttaaa

SEQ ID NO: 297699 - DNA, 120 bp, Artificial Sequence
  ENSG00000132406_2 (sequence is synthesized)
gaaaacttccacactagcagctggtttctctgtggcagtgccttgttgcttgtcagtttatcaattgcattttactgcatagtctacctggaatggtattgtggaattggagaatatgat

SEQ ID NO: 297700 - DNA, 120 bp, Artificial Sequence
  ENSG00000132406_3 (sequence is synthesized)
gtcaagtatccagccttgatacccattaccactgcctcctttattgcagcaggaatttgcttcaacattgctttatggcatgtgtggtcgtttttcactccattgttgttgtttacccag

SEQ ID NO: 297701 - DNA, 120 bp, Artificial Sequence
  ENSG00000132406_4 (sequence is synthesized)
ttgtttacccagtttatgggggttgtcatgtttatcacactccttggatgatttccgaagagacagggtcttctatgttgcccaggctgtctttgaactcctgggatcaagtgatcctcc

SEQ ID NO: 297702 - DNA, 120 bp, Artificial Sequence
  ENSG00000132406_5 (sequence is synthesized)
gacatgtaaatttgaagtgaatggttaaacatccagctagctgaaagcatggcagaccctaacagaaaagctacagtgtgtttttgcagctatgaagtgaatggtttcctggggaaaatt

SEQ ID NO: 297703 - DNA, 120 bp, Artificial Sequence
  ENSG00000132406_6 (sequence is synthesized)
gtgactttgtataactgttgttgaaaccagaataaattatatttcacttgcatatgcataaattattaaaattttcagaagtcagtgatacagaagtactattttgcaatgttaatctgt

SEQ ID NO: 297704 - DNA, 120 bp, Artificial Sequence
  ENSG00000132406_7 (sequence is synthesized)
ttgagtctttggagaaagtggtttcattgtaggtacatagtgcactgttaatattttaaacaagtagttcactcttccatttaagggatagcagttccttgtataaaatgactggatgtg

SEQ ID NO: 297705 - DNA, 120 bp, Artificial Sequence
  ENSG00000132406_8 (sequence is synthesized)
tataaaggaattatgttgtcatgtgcctttaaccagctttagtaattactataatctcatatttatgatagttttgttaggtgacaggaccaaatgaaaatattttatgttttctcatca

SEQ ID NO: 297706 - DNA, 120 bp, Artificial Sequence
  ENSG00000132406_9 (sequence is synthesized)
tctcatcactttagattttatcattatgtacattactgggtttttagcatttcctaatgtgaagttttaatcacttttaagtatacatttttttctgtatcatttaaataaaatattttt

SEQ ID NO: 297707 - DNA, 120 bp, Artificial Sequence
  ENSG00000132406_10 (sequence is synthesized)
cggtaccaagatggactcctcgcgggcccggcagcagctccggcggcgattcctcctcctgccggacgccgaggcccagctggaccgcgagggtgacgccgggccgggtgaggcgcgcac

SEQ ID NO: 297708 - DNA, 120 bp, Artificial Sequence
  ENSG00000132406_11 (sequence is synthesized)
caagccgccccgaggttctcagaggcgaggcgtcggaaaacggccggcctccggcagccctggcccagtctggaaggactgagtttcggctttgcaagtcgaatatttaatgtcagggaa

SEQ ID NO: 297709 - DNA, 120 bp, Artificial Sequence
  ENSG00000132406_12 (sequence is synthesized)
gatccttagaatcgcggagtgctgtgcatcgtcatttcagctgcgcttcagaattctctggagagctgatttgacacctatttggaaatagcgattaaaattaaaaatacccaccagttt

SEQ ID NO: 297710 - DNA, 120 bp, Artificial Sequence
  ENSG00000132406_13 (sequence is synthesized)
taagtcttaaggatttaccagaaacatgcgtgtaccgcagtgtacaatgatgtgcgcagtgtttcacttcaggattgcttgtaatagcgaattactggaaatatctgccttgcccgtcag

SEQ ID NO: 297711 - DNA, 120 bp, Artificial Sequence
  ENSG00000132406_14 (sequence is synthesized)
cagaaagctgtttaagtaaatttgggtatatgtatacctgacacatcaggtcgactcgtatgtaccaatggggatgattttcaaagggaagtgtggaacactatggtatgccgccatttg

SEQ ID NO: 297712 - DNA, 120 bp, Artificial Sequence
  ENSG00000132423_0 (sequence is synthesized)
gggatcgtttgtcgcgatgtggagtggccgtaagctgggctcctccgggggttggtttttaagagtgctggggcctggaggctgtaatacaaaagctgcgcgtcccttaatttcctcggc

SEQ ID NO: 297713 - DNA, 120 bp, Artificial Sequence
  ENSG00000132423_1 (sequence is synthesized)
ggtttatgtgaagaaccagctcagtgggactctacagattaaaccaggggttttcaatgaatacagaaccatatggttcaaatcctacaggacgatcttttcctgtttgaacagaataaa

SEQ ID NO: 297714 - DNA, 120 bp, Artificial Sequence
  ENSG00000132423_2 (sequence is synthesized)
gagtttcaggtacccttgggcgagactgtacagtacttcccaaaccactgtcgacagcggtgaggtaaaaaccttcttggccctggctcacaaatggtgggatgaacaaggagtatatgc

SEQ ID NO: 297715 - DNA, 120 bp, Artificial Sequence
  ENSG00000132423_3 (sequence is synthesized)
acctcttcattccatgaatgacctgagggtgccatttattagggacaatcttctgaaaacaattcctaatcaccagccaggaaaacctttgttggggatgaagattcttgacgttggctg

SEQ ID NO: 297716 - DNA, 120 bp, Artificial Sequence
  ENSG00000132423_4 (sequence is synthesized)
tggtggtgggctgttaactgaacctctagggcggcttggggcttcagttattggaatcgaccctgtggatgagaacattaaaacagcacaatgccataaatcatttgatccagtcctgga

SEQ ID NO: 297717 - DNA, 120 bp, Artificial Sequence
  ENSG00000132423_5 (sequence is synthesized)
gaatagagtacagagtgtgttccctggaagagattgtggaagagactgcagaaacatttgatgctgttgtagcttctgaagttgtagaacatgtgattgatctagaaacatttttacagt

SEQ ID NO: 297718 - DNA, 120 bp, Artificial Sequence
  ENSG00000132423_6 (sequence is synthesized)
gctgctgtcaagtgttaaaacccggtggttctttattcattactacaatcaacaaaacacaactttcctatgccttgggaattgttttttcagagcaaattgcaagtattgtaccaaaag

SEQ ID NO: 297719 - DNA, 120 bp, Artificial Sequence
  ENSG00000132423_7 (sequence is synthesized)
gtactcatacatgggagaagtttgtttcacctgaaacactagagagcattctggaatcaaatggtctgtcagttcaaacagtggtaggaatgctctataaccccttctcaggttactggc

SEQ ID NO: 297720 - DNA, 120 bp, Artificial Sequence
  ENSG00000132423_8 (sequence is synthesized)
attggagtgaaaataccagccttaactatgcagcttatgctgtgaaatccagggtccaggaacacccagcctctgctgagtttgttttaaagggagaaacagaagagctccaagctaatg

SEQ ID NO: 297721 - DNA, 120 bp, Artificial Sequence
  ENSG00000132423_9 (sequence is synthesized)
cctgcaccaatccagctgtgcatgaaaagctgaagaaatgaattgtttctgagaactatagtaatatggcttggatatctgatgttttcaaatacaaaaatgtacaatttatcctttgag

SEQ ID NO: 297722 - DNA, 120 bp, Artificial Sequence
  ENSG00000132423_10 (sequence is synthesized)
agagaatcatgaagaaaagaaggtcaataaaaagggctaaaaccttggacaaaagtttttgttatttcgtctaatagctactttcaagggattctgtgaataaaaagttttgtcaagata

SEQ ID NO: 297723 - DNA, 120 bp, Artificial Sequence
  ENSG00000132424_0 (sequence is synthesized)
atcttgtcttgttcccgaagaagtagaagcatcgaaagcgttggagaggtgttaccggaacggcggcgacaagggtgttcccgaactagagtggggcatacataatcttgctgctatgct

SEQ ID NO: 297724 - DNA, 120 bp, Artificial Sequence
  ENSG00000132424_1 (sequence is synthesized)
tcgaagctgtagtctgaatcaacctaagttttaaacagaaggtgaacctctgagatagaaaatcaagtatattttaaaagaagggatgtgggatcaaggaggacagccttggcagcagtg

SEQ ID NO: 297725 - DNA, 120 bp, Artificial Sequence
  ENSG00000132424_2 (sequence is synthesized)
gcccttgaaccagcaacaatggatgcagtcattccagcaccaacaggatccaagccagattgattgggctgcattggcccaagcttggattgcccaaagagaagcttcaggacagcaaag

SEQ ID NO: 297726 - DNA, 120 bp, Artificial Sequence
  ENSG00000132424_3 (sequence is synthesized)
catggtagaacaaccaccaggaatgatgccaaatggacaagatatgtctacaatggaatctggtccaaacaatcatgggaatttccaaggggattcaaacttcaacagaatgtggcaacc

SEQ ID NO: 297727 - DNA, 120 bp, Artificial Sequence
  ENSG00000132424_4 (sequence is synthesized)
agaatggggaatgcatcagcaacccccacacccccctccagatcagccatggatgccaccaacaccaggcccaatggacattgttcctccttctgaagacagcaacagtcaggacagtgg

SEQ ID NO: 297728 - DNA, 120 bp, Artificial Sequence
  ENSG00000132424_5 (sequence is synthesized)
ggaatttgcccctgacaacaggcatatatttaaccagaacaatcacaactttggtggaccacccgataattttgcagtggggccagtgaaccagtttgactatcagcatggggctgcttt

SEQ ID NO: 297729 - DNA, 120 bp, Artificial Sequence
  ENSG00000132424_6 (sequence is synthesized)
tggtccaccgcaaggtggatttcatcctccttattggcaaccaggacctccaggacctccagcacctccccagaatcgaagagaaaggccatcatcattcagggatcgtcagcgttcacc

SEQ ID NO: 297730 - DNA, 120 bp, Artificial Sequence
  ENSG00000132424_7 (sequence is synthesized)
tattgcacttcctgtgaagcaggagcctccacaaattgacgcagtaaaacgcaggactcttcccgcttggattcgcgaaggtcttgaaaaaatggaacgtgaaaagcagaagaaattgga

SEQ ID NO: 297731 - DNA, 120 bp, Artificial Sequence
  ENSG00000132424_8 (sequence is synthesized)
gaaagaaagaatggaacaacaacgttcacaattgtccaaaaaagaaaaaaaggccacagaagatgctgaaggaggggatggccctcgtttacctcagagaagtaaatttgatagtgatga

SEQ ID NO: 297732 - DNA, 120 bp, Artificial Sequence
  ENSG00000132424_9 (sequence is synthesized)
ggaagaagaagacactgaaaatgttgaggctgcaagtagtgggaaagtcaccagaagtccatccccagttcctcaagaagagcacagtgaccctgagatgactgaagaggagaaagagta

SEQ ID NO: 297733 - DNA, 120 bp, Artificial Sequence
  ENSG00000132424_10 (sequence is synthesized)
tcaaatgatgttgctgacaaaaatgcttctaacagaaattctgctggatgtcacagatgaagaaatttattacgtagccaaagatgcacaccgcaaagcaacgaaagctcctgcaaaaca

SEQ ID NO: 297734 - DNA, 120 bp, Artificial Sequence
  ENSG00000132424_11 (sequence is synthesized)
gctggcacagtccagtgcactggcttccctcactggactcggtggactgggtggttatggatcaggagacagtgaagatgagaggagtgacagaggatctgagtcatctgacactgatga

SEQ ID NO: 297735 - DNA, 120 bp, Artificial Sequence
  ENSG00000132424_12 (sequence is synthesized)
tgaagaattacggcatcgaatccggcaaaaacaggaagctttttggagaaaagaaaaagaacagcagctattacatgataaacagatggaagaagaaaagcagcaaacagaaagggttac

SEQ ID NO: 297736 - DNA, 120 bp, Artificial Sequence
  ENSG00000132424_13 (sequence is synthesized)
aaaagagatgaatgaatttatccataaagagcaaaatagtttatcactactagaagcaagagaagcagacggtgatgtggttaatgaaaagaagagaactccaaatgaaaccacatcagt

SEQ ID NO: 297737 - DNA, 120 bp, Artificial Sequence
  ENSG00000132424_14 (sequence is synthesized)
tttagaaccaaaaaaagagcataaagaaaaagaaaaacaaggaaggagtaggtcgggaagttctagtagtggtagttccagtagcaatagcagaactagtagtactagtagtactgtctc

SEQ ID NO: 297738 - DNA, 120 bp, Artificial Sequence
  ENSG00000132424_15 (sequence is synthesized)
tagctcttcatacagttctagctcaggtagtagtcgtacttcttctcggtcttcttctcctaaaaggaaaaagagacacagtaggagtagatctccaacaatcaaagctagacgtagcag

SEQ ID NO: 297739 - DNA, 120 bp, Artificial Sequence
  ENSG00000132424_16 (sequence is synthesized)
gagtagaagctattctcgcagaattaaaatagagagcaatagggctagggtaaagattagagatagaaggagatctaatagaaatagcattgaaagagaaagacgacgaaatcggagtcc

SEQ ID NO: 297740 - DNA, 120 bp, Artificial Sequence
  ENSG00000132424_17 (sequence is synthesized)
ttcccgagagagacgtagaagtagaagtcgctcaagggatagacgaaccaatcgtgccagtcgcagtaggagtcgagataggcgtaaaattgatgatcaacgtggaaatcttagtgggaa

SEQ ID NO: 297741 - DNA, 120 bp, Artificial Sequence
  ENSG00000132424_18 (sequence is synthesized)
cagtcataagcataaaggtgaggctaaagaacaagagaggaaaaaggagaggagtcgaagtatagataaagataggaaaaagaaagacaaagaaagggaacgtgaacaggataaaagaaa

SEQ ID NO: 297742 - DNA, 120 bp, Artificial Sequence
  ENSG00000132424_19 (sequence is synthesized)
agagaaacaaaaaagggaagaaaaagattttaagttcagtagtcaggatgatagattaaaaaggaaacgagaaagtgaaagaacattttctaggagtggttctatatctgttaaaatcat

SEQ ID NO: 297743 - DNA, 120 bp, Artificial Sequence
  ENSG00000132424_20 (sequence is synthesized)
aagacatgattctagacaggatagtaagaaaagtactaccaaagatagtaaaaaacattcaggctctgattctagtggaaggagcagttctgagtctccaggaagtagcaaagaaaagaa

SEQ ID NO: 297744 - DNA, 120 bp, Artificial Sequence
  ENSG00000132424_21 (sequence is synthesized)
aaacacaagtctaagtcccgatcaaggtagtatactttttaaagtattttgtctgatttttaaaaaaaattgactgaatttattcaaagttgaaagtgtcctttctctctctctttaata

SEQ ID NO: 297745 - DNA, 120 bp, Artificial Sequence
  ENSG00000132424_22 (sequence is synthesized)
gttgaaagtgtcctttctctctctctttaataaactcagtttggtacttgataaataatcatagtcttaaatgttagaaatcctatataatattatttatttaaaattgcagatttttaa

SEQ ID NO: 297746 - DNA, 120 bp, Artificial Sequence
  ENSG00000132424_23 (sequence is synthesized)
ttttcccttttttttcagatcaacaacccctccccgtcgtaaacgctgaggaatgatgtggcaagaatgccatgatgttctttaaaaaaattccatgagttttaagggcttgtctcatta

SEQ ID NO: 297747 - DNA, 120 bp, Artificial Sequence
  ENSG00000132424_24 (sequence is synthesized)
tagaggcacattgtggctgtgtaggtgaaaccagaatcttttttttttttaatctgtaaataggtgtactttttccaatgctgctccaagttacttaataggatttctttgtattacgtt

SEQ ID NO: 297748 - DNA, 120 bp, Artificial Sequence
  ENSG00000132424_25 (sequence is synthesized)
tttttcaaaaaatatagtgcataataagactataaacatgccattctctttcagctgtaatgttcttaaaattattcttgaatgtactgtgatgtcaataaagctctttagttcattttt

SEQ ID NO: 297749 - DNA, 120 bp, Artificial Sequence
  ENSG00000132424_26 (sequence is synthesized)
gttaaactcttgcaccttaattttatggttttaatctaaggaacgtacttttataaaaaggcagctggaattttgtataacaggttttaaaggtaccttctctcacctcccccaaagaaa

SEQ ID NO: 297750 - DNA, 120 bp, Artificial Sequence
  ENSG00000132424_27 (sequence is synthesized)
atggtttttacttaatagtttgtcaaagtttgtaaattgtacccatggacttttgccagattccaactttaagggtatgaaagagggctagaaatagacctttacttttcatttggaagt

SEQ ID NO: 297751 - DNA, 120 bp, Artificial Sequence
  ENSG00000132424_28 (sequence is synthesized)
atttgacaactttctaaacttttcttcctattttggggattttcaagtaatatattctctgtgtgtataacgtgtggttcactcctgtaaaatgaaattgctggaatcaatcaagccagt

SEQ ID NO: 297752 - DNA, 120 bp, Artificial Sequence
  ENSG00000132424_29 (sequence is synthesized)
gcaccagtagagttatttgtaaggaacgattgtgtttgacagtaatagtcaagtctggaactatattctacagtcacccacttctgttttagaagcattttgaaacactttttggggtta

SEQ ID NO: 297753 - DNA, 120 bp, Artificial Sequence
  ENSG00000132424_30 (sequence is synthesized)
tagaaataagactcatgattcaatatatttatttatatttttaaagtataatatgacctcaaatcaatggaggaatgctgtattatgcaggtttgtgtcaatttcctgacattaaaattg

SEQ ID NO: 297754 - DNA, 120 bp, Artificial Sequence
  ENSG00000132424_31 (sequence is synthesized)
tctgattttgtccgtttcttaaaattatgattagtgagtggtctaacagtttaaggcattgataacttacaagtagaatggggctctcaaagcattttaactcagttgctttagggtcca

SEQ ID NO: 297755 - DNA, 120 bp, Artificial Sequence
  ENSG00000132424_32 (sequence is synthesized)
tttttttatgtaatcacttactcagtgataaatgaatctctgaaaacaaatgcttttacattttaatttaaaaagaaaacaggtgcaggccacagaaaagttttaaagtatgccttctta

SEQ ID NO: 297756 - DNA, 120 bp, Artificial Sequence
  ENSG00000132424_33 (sequence is synthesized)
ccagcaatagttcattttaaaaatcatgccagatttttgccaagatcagtgtttcctcaacatgaagatagaaatagatttgtatagtgtgctcttgtacctctacatagattattatat

SEQ ID NO: 297757 - DNA, 120 bp, Artificial Sequence
  ENSG00000132424_34 (sequence is synthesized)
aattttgagcagttacacatttatctaaaggaaataaatcaactgtgaataaatgcatgtttaccaaaatggctgtttacagtgcatttagttctgatatttataaagatgacatttcac

SEQ ID NO: 297758 - DNA, 120 bp, Artificial Sequence
  ENSG00000132424_35 (sequence is synthesized)
agaataactttaaaatagtttgaaattctatatagtttagacatcgatcacatctggagacaaaataaaatgtgcaatattttttatgtaggcgagctaacacagtgtacctaattgcag

SEQ ID NO: 297759 - DNA, 120 bp, Artificial Sequence
  ENSG00000132424_36 (sequence is synthesized)
atctgattaatttgtaatagataagttgtataacattttcatatcttaaaatgttttttagatcaatcttgaagtgaaatattttcaaaataaaattctacagaaaaattctgttggcta

SEQ ID NO: 297760 - DNA, 120 bp, Artificial Sequence
  ENSG00000132424_37 (sequence is synthesized)
gctatgatatgcacatttttgggcaagttatgaactagagccaaaagtagtatttgacagttttatttactctgccgtaatttgcaagcttatcagttaagtctgtagtttttttaaaag

SEQ ID NO: 297761 - DNA, 120 bp, Artificial Sequence
  ENSG00000132424_38 (sequence is synthesized)
ccgtcatgatatttgtgattattagtacataaaccagtgttataatttgatatttgggtttttcagacttttagtggcagatttagagaattctttattttcttgacatgtgatatagta

SEQ ID NO: 297762 - DNA, 120 bp, Artificial Sequence
  ENSG00000132424_39 (sequence is synthesized)
tttatttaccttgagtggtaaggttttataaggtagggtttccatgatttaggatgtgaatgcaaaaacttacacataagttaattagatgtataatttggttatgaaatcttttctaaa

SEQ ID NO: 297763 - DNA, 120 bp, Artificial Sequence
  ENSG00000132424_40 (sequence is synthesized)
ataataccaccagaaaattaacagatcaaatttttgagacaatccttggtctggattggttaatgaaaatgtcttgtttaagaggttctattaaaaaatatttctagtgtattagtcata

SEQ ID NO: 297764 - DNA, 120 bp, Artificial Sequence
  ENSG00000132424_41 (sequence is synthesized)
attgtttttgtggagtgggggtaaaccacaccattaagggaataaaatgtaatttgaaagaggtgattataagatttgtttcaggccccaaaatataaataaaaattggtgtggaatctc

SEQ ID NO: 297765 - DNA, 120 bp, Artificial Sequence
  ENSG00000132424_42 (sequence is synthesized)
ccgggtgagacaaatcgggcgccatcttgtcttgttcccgaagaagtagaagcatcgaaagcgttggagaggtgttaccggaacggcggcgacaagggtgttcccgaactagagtggata

SEQ ID NO: 297766 - DNA, 120 bp, Artificial Sequence
  ENSG00000132424_43 (sequence is synthesized)
taaacagaaggtgaacctctgagcatacaggaaaggatcaatctagaaggattcatttagtaaacatttattaaatgcctgctatgaactaagccttgggatacaaaaataaagaagaaa

SEQ ID NO: 297767 - DNA, 120 bp, Artificial Sequence
  ENSG00000132424_44 (sequence is synthesized)
ggtattttggttctgatgactattttggcctttttttgttgtccttgttggatttctaccagatatttgaatattctcttgcatgttttaactcttaaagattagattcgtagacaccat

SEQ ID NO: 297768 - DNA, 120 bp, Artificial Sequence
  ENSG00000132424_45 (sequence is synthesized)
attaaagctatacaaatatttttgttttatctgacctacatgagtacaaattagcaatcatgctgttttcctctaaaatgtattgtggaaaattccaggtgttcagtttatttcacctga

SEQ ID NO: 297769 - DNA, 120 bp, Artificial Sequence
  ENSG00000132424_46 (sequence is synthesized)
ttttttttaatagataacatggcattgttgtgtgacttctgatacagtttattttgactaatgaattttgaattatctacctacaatttttagtttaccacttatctcttacagaagcaa

SEQ ID NO: 297770 - DNA, 120 bp, Artificial Sequence
  ENSG00000132424_47 (sequence is synthesized)
gtgatttcctacccctagatttttagtaacaccttaaaaatgtattgaaaacaaaaattaagttacatgtcataatctcagaagtagacatacagatatacctgtcaacattttttctca

SEQ ID NO: 297771 - DNA, 120 bp, Artificial Sequence
  ENSG00000132424_48 (sequence is synthesized)
ttataaaccaatttcagctcacatcagagttataatttcaaagccagacatgatactggtttaaaatgaatgttatgtttttaatgtttcttctctccccaaaaagcagcaatagtagta

SEQ ID NO: 297772 - DNA, 120 bp, Artificial Sequence
  ENSG00000132424_49 (sequence is synthesized)
tgaggtcagtttaaatagcagttggtgtgtcttcttggtgtttcctatttatttgttaactcttaattaaagttgtaagcgaagttacttttcaagggctctgataacctatttagcctt

SEQ ID NO: 297773 - DNA, 120 bp, Artificial Sequence
  ENSG00000132424_50 (sequence is synthesized)
aaaggagtctaaaggcgtacttgggaaactggacaggacaaaaaggggaggaagaaggaaacactgaacagaggttagaaaaaaatatatttaacttggaactgatacccaaaccagttg

SEQ ID NO: 297774 - DNA, 120 bp, Artificial Sequence
  ENSG00000132424_51 (sequence is synthesized)
ttggcctcatttgtgctatgtagtgcctattttgccatattctaataatgtcattgtaattgattacattagtgtaacttgaagacaggtacatttgactcataagtaaatcaaggtgac

SEQ ID NO: 297775 - DNA, 120 bp, Artificial Sequence
  ENSG00000132424_52 (sequence is synthesized)
aaagaaatacacctcccataactcacagtgttcttcatttgagggattagtatctgccgcagatagaactatacctgtatggcattctgggaatgctgcgaagactggagttggaaacct

SEQ ID NO: 297776 - DNA, 120 bp, Artificial Sequence
  ENSG00000132424_53 (sequence is synthesized)
ttaaaagcctgaattgtaatcgccaattgtcctattagagttaatatctctattttttttgttatccaacttgcctactttttgtgatcctgcaatacaaaggcttgcttttatcttgtt

SEQ ID NO: 297777 - DNA, 120 bp, Artificial Sequence
  ENSG00000132424_54 (sequence is synthesized)
agtcactggttcttgaacagggttgtgtatcagtgttggaataaagtacaaagatattagacttgtaagacttttaaaccttttattaggaatgttttcagactagcttacagaaaagtt

SEQ ID NO: 297778 - DNA, 120 bp, Artificial Sequence
  ENSG00000132424_55 (sequence is synthesized)
gggctagtgtgatgattcccccccataccatctcctaaattaatagttattaacataaagtaccttccctcccatcttttccatgctatttatatgttaagaaaccaggtcttggaggct

SEQ ID NO: 297779 - DNA, 120 bp, Artificial Sequence
  ENSG00000132424_56 (sequence is synthesized)
gtcttactttctggatttaataccgtttatctcatttctttatcctttaaaattgctttatattggaagtaaaatccaaaagctcagttggactcagttaaacatttttgatgagaattc

SEQ ID NO: 297780 - DNA, 120 bp, Artificial Sequence
  ENSG00000132424_57 (sequence is synthesized)
ttagtgattctgggagcatagtagacacctaataatctgtaggggtgatattttggcaacctttgaatttctgatttctcatcaacttttcttgtaaggtttcctgaattaatattttat

SEQ ID NO: 297781 - DNA, 120 bp, Artificial Sequence
  ENSG00000132424_58 (sequence is synthesized)
ctgctgaagctatttggttactatcttaaaggaatcttgattggggagaaatgaaatcacttttttcctacaatcttcaaaataattacatatccagaaatttatattgtacaaaaaata

SEQ ID NO: 297782 - DNA, 120 bp, Artificial Sequence
  ENSG00000132424_59 (sequence is synthesized)
gagttttttttaaagtcttttttgagctaaattcattgtgttatgcttgccaccaaattctgagaccagcattaacataaaattttctacctcgtttggtaccctaaaaattctagttgc

SEQ ID NO: 297783 - DNA, 120 bp, Artificial Sequence
  ENSG00000132424_60 (sequence is synthesized)
ctctggcaagctattgacaagaattttagacctctgatgaaataaatgtatcatcatataataatttctgatgtgaggttttaagattaaataactcactataatttttaaactatgttt

SEQ ID NO: 297784 - DNA, 120 bp, Artificial Sequence
  ENSG00000132424_61 (sequence is synthesized)
aacagaatgaagattattattaaattttttaatttgcttagttgtatgacttctggaaattaatgcttcttaaagaataggcagttttcaatttgatttgactttgacattttgtggtta

SEQ ID NO: 297785 - DNA, 120 bp, Artificial Sequence
  ENSG00000132424_62 (sequence is synthesized)
aaattattctgtactcattctgctagctttgtggcactcagtttgattcttttcttggttcttcattcctaggctgacaggggctgggaacactctggaaacctcacttggcatctaggg

SEQ ID NO: 297786 - DNA, 120 bp, Artificial Sequence
  ENSG00000132424_63 (sequence is synthesized)
aagagagcattctttgtctctctattgcaacctctggccttttcagaagcagcactggcagagtaaaacatgtctagcctctaattaaagaaaaattgtgtcactgtgtgacaaattagt

SEQ ID NO: 297787 - DNA, 120 bp, Artificial Sequence
  ENSG00000132424_64 (sequence is synthesized)
ctgtcaaatatactctgcccctaccatccgcctacctttttcttccctttttttttttcagatagtgaagatctttcataagtttttgtgtgttttacttttttgtttgttttatttcac

SEQ ID NO: 297788 - DNA, 120 bp, Artificial Sequence
  ENSG00000132424_65 (sequence is synthesized)
agtatgatgtagatttcttgatgctaattcagtcttccatggcttgtgttattcctttttaatagtcacttgaaactatggaggaatcagcctctcatttgggtatgctgatggtgaagt

SEQ ID NO: 297789 - DNA, 120 bp, Artificial Sequence
  ENSG00000132424_66 (sequence is synthesized)
aagtcataacctcctttccctattaatactttttgtttctccttataagaatggagacctcagtcgagaccagcctgggcaacatagcaaggccctgtctctacaaaaaaaaaaaaaaaa

SEQ ID NO: 297790 - DNA, 120 bp, Artificial Sequence
  ENSG00000132424_67 (sequence is synthesized)
aagtgttttccatatttgtgagagggcctaaagggaaaaatcacacatacattgtctctctgcgtgttctattttgaaactgtattagtcctactcagtttataaaaacctaggtcttag

SEQ ID NO: 297791 - DNA, 120 bp, Artificial Sequence
  ENSG00000132424_68 (sequence is synthesized)
ggttatgtcatcctgtctaaaaaggtttgcctatttttttgactaacgcattcacagtgagaaatttataaatgtgatggttaattcatagtttattggggcaggttatattggaagatt

SEQ ID NO: 297792 - DNA, 120 bp, Artificial Sequence
  ENSG00000132424_69 (sequence is synthesized)
gatttccttattgctccaatatatgcattttatatatatataattatatatgaacacctatagtttgtacttaataattcataatttagccatgatagtatctaagctcactttcagaat

SEQ ID NO: 297793 - DNA, 120 bp, Artificial Sequence
  ENSG00000132424_70 (sequence is synthesized)
agaacctatccactaatgcttttaataacttacatagattgtgttgcggcaagtcaagttttaatatagaggaaagggtttatcttatcatagtaaaatagtagtgatgtgttcataatt

SEQ ID NO: 297794 - DNA, 120 bp, Artificial Sequence
  ENSG00000132424_71 (sequence is synthesized)
tactatttgcatggtatattatcaaggctgtaaaagcttgaatttgccttttccacatcttcatttcaaattaatttttgtgaggacccagagaagtgggtagaaccaaatgcccatgtg

SEQ ID NO: 297795 - DNA, 120 bp, Artificial Sequence
  ENSG00000132424_72 (sequence is synthesized)
gttttgttatggttatttagatcatttcagggtggggagtattttcagcaccataatatttctgtaccagggagattatagtattctaatttttttagggaaaaattgcttagctctagg

SEQ ID NO: 297796 - DNA, 120 bp, Artificial Sequence
  ENSG00000132424_73 (sequence is synthesized)
gatttctaaactttgaacaataaaagttaattttagaaatactttcagggtcatcattaagctttagcgtggctttgttactgccctgttaagtagttttgttggttagtatggacagta

SEQ ID NO: 297797 - DNA, 120 bp, Artificial Sequence
  ENSG00000132424_74 (sequence is synthesized)
cagcaaacccattatcattcctttacagtgagaaaaatatgaaatagtccagaaagaataagatattaagtaacctttgcctgaaggttctgtgaactccttaagcgtttgaatgtatac

SEQ ID NO: 297798 - DNA, 120 bp, Artificial Sequence
  ENSG00000132424_75 (sequence is synthesized)
ttctccccaccccgaataagcgtattcttctgggaaaaggcaatgaaaaaagaaatgaactttcttctcagaccttgaaaagtttttagtgcatagtataatttttttcatatgatagac

SEQ ID NO: 297799 - DNA, 120 bp, Artificial Sequence
  ENSG00000132424_76 (sequence is synthesized)
tttgactatcaggtgaaagatattttgttgctttaatattgtagatgtgcacgtaatccattctttggaagtgtctcatcaagaatacctaagatacgtgtttcacttttcagacttgta

SEQ ID NO: 297800 - DNA, 120 bp, Artificial Sequence
  ENSG00000132424_77 (sequence is synthesized)
taaataagcacattctgtctcagttatcaatttttgagtattaaaataattagaatttgttttctgatttttttatttcattaggaaaatggtataaaagatcattacggaaaacttttg

SEQ ID NO: 297801 - DNA, 120 bp, Artificial Sequence
  ENSG00000132424_78 (sequence is synthesized)
aattaaaaatgtataagtgcaatagctatatgatgttttattttctaatttatatttcaaaatggtatatttaaatgttaaagactagagaatgcacagtaattgaatatagctcatggt

SEQ ID NO: 297802 - DNA, 120 bp, Artificial Sequence
  ENSG00000132424_79 (sequence is synthesized)
tggttaagacatgaataaaaaatatagatcattttcctaagtgtaattccttgtgctatgtagaattatgactgtttttctagtgtcattttttttccattctgacatgacatgttaatg

SEQ ID NO: 297803 - DNA, 120 bp, Artificial Sequence
  ENSG00000132424_80 (sequence is synthesized)
gaattgtatataatttcctctgtagcatccaattcattcctagggacatagaactctgtggggaatagtgttgtatgttgggctttatttacttcattccctctgccagggtctaccctt

SEQ ID NO: 297804 - DNA, 120 bp, Artificial Sequence
  ENSG00000132424_81 (sequence is synthesized)
aaattatagtgctaggtgtcattttgaaataactgattgcaattattaacttataaactgctatcataatttaaaattttgaaagaattatttcatgaattctagggtagatttgataat

SEQ ID NO: 297805 - DNA, 120 bp, Artificial Sequence
  ENSG00000132424_82 (sequence is synthesized)
tgagatggtaatcctctcattaataaatattcagatacttgtatacttggtatacagatacaacagtttttatgttgtttgaagaaatataatggcagggagcatctgcttaccctactt

SEQ ID NO: 297806 - DNA, 120 bp, Artificial Sequence
  ENSG00000132424_83 (sequence is synthesized)
ttgcatggtagatcccatgtaaacaagacaaagagctgtattggcagctggcctagaaaagcctctgaaaatagcaaaattgcagaaaatatttaatgattcattaacttctatctttgc

SEQ ID NO: 297807 - DNA, 120 bp, Artificial Sequence
  ENSG00000132424_84 (sequence is synthesized)
ttataaatgaatatatctgcaagattatagaaacagcttaagttgtttagttcactttttgttcactgtaagtaggatgttgaaattgacaaaaatgtctagttaaagagaaattagtat

SEQ ID NO: 297808 - DNA, 120 bp, Artificial Sequence
  ENSG00000132424_85 (sequence is synthesized)
ctatttgatgtcttagtgttggtaggattagcttgtaaatggattcagaatgaaaaatttcatatacttcttgaaagtagcttatcagctggcttttagaagcctctttgcatttacata

SEQ ID NO: 297809 - DNA, 120 bp, Artificial Sequence
  ENSG00000132424_86 (sequence is synthesized)
gccggaaaatcttaagacaagtaagcctaggttcttgggaccatagaagtatcggtggatattagagccatggaattcttggatgtgctgcacacatggatttctactgtcccagttcat

SEQ ID NO: 297810 - DNA, 120 bp, Artificial Sequence
  ENSG00000132429_0 (sequence is synthesized)
cccgctgcggtcacgctgcgcccggcgccgcagggtgggcggcgaggcactcacgagggggacgctgagggcttccgcgcgggccacccgggtcaagcgcgctccgccgggaaacttctg

SEQ ID NO: 297811 - DNA, 120 bp, Artificial Sequence
  ENSG00000132429_1 (sequence is synthesized)
gctccgccgggaaacttctgcgggcgccgggctgaagctccgggcagggctgggaaggaaaggaaataccaaaatatttgcagactggatccaaatcaggagcccagatgaacttaaaga

SEQ ID NO: 297812 - DNA, 120 bp, Artificial Sequence
  ENSG00000132429_2 (sequence is synthesized)
agcgagcatgggattcttagtttttcaagatccgtacacacgaagcctttaatcagcatcaactccagtgtccgttttctctggttttgtgaagactgcacaaaactctcatgatggaga

SEQ ID NO: 297813 - DNA, 120 bp, Artificial Sequence
  ENSG00000132429_3 (sequence is synthesized)
accaaaggacttagttacctgtttcagtgtcatctaaagtcaactgaaaagtgaagcaggcagtaatacagccatggaaagaaattcaagtttatggaagaacctaatagatgaacaccc

SEQ ID NO: 297814 - DNA, 120 bp, Artificial Sequence
  ENSG00000132429_4 (sequence is synthesized)
agtctgcacaacctggaagcaagaggccgaaggagccatttatcatcttgccagtattttatttgtagtaggtttcatgggtggcagtggattcttcgggctcctttatgtcttcagttt

SEQ ID NO: 297815 - DNA, 120 bp, Artificial Sequence
  ENSG00000132429_5 (sequence is synthesized)
gctggggttgggttttctctgttctgctgtctgggcttgggtagatgtctgtgcagctgacatattttcctggaattttgtactgtttgtcatctgcttcatgcaatttgttcatattgc

SEQ ID NO: 297816 - DNA, 120 bp, Artificial Sequence
  ENSG00000132429_6 (sequence is synthesized)
atatcaagttcgcagcataacctttgcccgagaattccaagtgttgtacagctcccttttccagcccctggggatctctttgcctgtcttcagaacgattgctttgagctctgaagtggt

SEQ ID NO: 297817 - DNA, 120 bp, Artificial Sequence
  ENSG00000132429_7 (sequence is synthesized)
atcagagtgacagttgatggcgaatttctgcattacattttcccccttcagttcctggattctcctgagtgggattcactgagacccacagaggaaggcatttttcaggtaaccctcact

SEQ ID NO: 297818 - DNA, 120 bp, Artificial Sequence
  ENSG00000132429_8 (sequence is synthesized)
gcagaaactgattgtcgatatgtgtcttggaggagaaagaaattatatctgctctttgctcagcatcgctacatctcccgccttttttcagtgctaattggcagtgacattgcagataaa

SEQ ID NO: 297819 - DNA, 120 bp, Artificial Sequence
  ENSG00000132429_9 (sequence is synthesized)
ctctatgccttgaatgacagggtatatataggaaaaagatatcactatgatattcggctacccaacttctatcaaatgtcaactccagaaatacgcagatcacccctgacacaacatttt

SEQ ID NO: 297820 - DNA, 120 bp, Artificial Sequence
  ENSG00000132429_10 (sequence is synthesized)
cagaattccagacgatactgtgataaatgacatcaaagtctgaaatttataagtataaaaaaagactctctcttcatcattccccagtgaaatagcaaaatacaaaaaaagagctcccta

SEQ ID NO: 297821 - DNA, 120 bp, Artificial Sequence
  ENSG00000132429_11 (sequence is synthesized)
atgtttttataaatcaaattcagaagcgagatgccattgccaactgttttattcctttcaacaactgcattgtgaataaactttacaaatttttcttgtatttctcattgttataattgg

SEQ ID NO: 297822 - DNA, 120 bp, Artificial Sequence
  ENSG00000132429_12 (sequence is synthesized)
ggagggggtggataactatgggcagtttgcccttttctgcatcaaaactgggagaatgaaattccactttctcaattcttttctcacatttactcaaatgcattgtcttgccctatagac

SEQ ID NO: 297823 - DNA, 120 bp, Artificial Sequence
  ENSG00000132429_13 (sequence is synthesized)
tcaggagttgcttctcaagaaagagccagcaagtattctcagcctgagggtgggttgctactgtccacataggcatttccggaattcacttttttgctacaacctccagtgaaagcaatt

SEQ ID NO: 297824 - DNA, 120 bp, Artificial Sequence
  ENSG00000132429_14 (sequence is synthesized)
atttattttaaatgtgcagttacttgatgcgactaaaaagtagaataaatgcaagagataataatatgtgaatcttgaagcctattttattgctacaaataaaataacatttaaaaagaa

SEQ ID NO: 297825 - DNA, 120 bp, Artificial Sequence
  ENSG00000132429_15 (sequence is synthesized)
agtgttcttgaagtcattacttactgagaaaagaatcactatccaagatgaaaaatcaggaacttcaacaacagctcctttatttccatttctacttctgaaataccaaaatatttgcag

SEQ ID NO: 297826 - DNA, 120 bp, Artificial Sequence
  ENSG00000132429_16 (sequence is synthesized)
gttttattgaagtataatatgcacacataaatggacatatataaatgtacaacttgatgaattttctgatgaatttcactcaatattccagaatcctgactgtataaggaacatgataac

SEQ ID NO: 297827 - DNA, 120 bp, Artificial Sequence
  ENSG00000132429_17 (sequence is synthesized)
atgaatcttacaggacattatgtcacttattataatgtatgaatttaatattttgcctttcaaaatcataaagggcaagagtcatcagggatctgaaatacacttcctctaccccccacc

SEQ ID NO: 297828 - DNA, 120 bp, Artificial Sequence
  ENSG00000132432_0 (sequence is synthesized)
atcagcaagctccagtgctacgtgtccctggcattttaggtgtcggttgggtaggcagtcatggatcaggtaatgcagtttgttgagccaagtcggcagtttgtaaaggactccattcgg

SEQ ID NO: 297829 - DNA, 120 bp, Artificial Sequence
  ENSG00000132432_1 (sequence is synthesized)
aggatttgctataatgggattcattggcttctttgtgaaattgatccatattcctattaataacatcattgttggtggctgaatacattttggaagagagtttttcatcttagagattgg

SEQ ID NO: 297830 - DNA, 120 bp, Artificial Sequence
  ENSG00000132432_2 (sequence is synthesized)
tgaacaagtgtgagggtgtgagaaactcacagaatacaaatttgcctgtatgttttgtgggtttttttttttcctttcaagatgttttctatttctaaattaaagtaatttcaaagtaaa

SEQ ID NO: 297831 - DNA, 120 bp, Artificial Sequence
  ENSG00000132432_3 (sequence is synthesized)
ggcagaaacccggattccggttccggtgggcctccatcagcaagctccagtgctacgtgtccctggcattttaggtgtcggttgggcagtcatggatcaggtaatgcagtttgttgagcc

SEQ ID NO: 297832 - DNA, 120 bp, Artificial Sequence
  ENSG00000132432_4 (sequence is synthesized)
aaaccccgtctctactgacggtttcagccatccggcggggggttcctggaatgcatccttgtgggaagcgtggccgggcgcacgtcgcgctgcgcttgcgcactgaggtttcgcgtaagg

SEQ ID NO: 297833 - DNA, 120 bp, Artificial Sequence
  ENSG00000132432_5 (sequence is synthesized)
ggcattttaggtgtcggttgggtaggtgagtttcttcccaccggtcggtacgggcgaacggggcggccacacctttgcgactcttgggggcagcgggcgtgggcgagccggcgtgtctcc

SEQ ID NO: 297834 - DNA, 120 bp, Artificial Sequence
  ENSG00000132432_6 (sequence is synthesized)
gtaagtaaactttatgaaatagactaggattgaatgaaactcaaaaccatttgagatgacaggctgttatttcgttaatatagagatgcatctcttgactttttagtgctgttggagtct

SEQ ID NO: 297835 - DNA, 120 bp, Artificial Sequence
  ENSG00000132432_7 (sequence is synthesized)
actgatatttacgagtacctgataattgagggcttttagatcttacatgatctgtccagaaattctgtgtgctaggcactattttctttaataaataaaattttacagagtcaagaaagt

SEQ ID NO: 297836 - DNA, 120 bp, Artificial Sequence
  ENSG00000132432_8 (sequence is synthesized)
attaaagacactcatatgtcacaaagccagcattgaaacctaagtcctctttgtgctgttaccttgttaatttctaatgtgcagagcaaatgcttcccatccaaaaatcactgctgtgat

SEQ ID NO: 297837 - DNA, 120 bp, Artificial Sequence
  ENSG00000132432_9 (sequence is synthesized)
tagatccaaaacctttttcttgttatgcagtagctgtcctagcttcaggcaatttgcctaacctctctgtgcccagtttattcagtggggataatagttcttacttggattatgacttta

SEQ ID NO: 297838 - DNA, 120 bp, Artificial Sequence
  ENSG00000132432_10 (sequence is synthesized)
agtcatgtaaggccccagaaacaatttgggtaagaatacaagtgaaagttgttactataatgagccattgatactgataggagaatatcataacttttaagtatgttaggaggcaaaaaa

SEQ ID NO: 297839 - DNA, 120 bp, Artificial Sequence
  ENSG00000132432_11 (sequence is synthesized)
ggctgagaaacactgggatcactttatttgtttccaaataattttgctttttaaattcattacaagtcattgggacaccttgtggcattgagcaattagagcaattaggtaattcagttt

SEQ ID NO: 297840 - DNA, 120 bp, Artificial Sequence
  ENSG00000132432_12 (sequence is synthesized)
agggtaaggacttagtatgagtttcagtacttactttgtgattttgtatgcatttaatctcagcctcatccactgtttggaggtaataaaatctattattacctgataataatatcaggt

SEQ ID NO: 297841 - DNA, 120 bp, Artificial Sequence
  ENSG00000132432_13 (sequence is synthesized)
gtatcagtgcttgtatccattaaaagcactgaataagtgttagttgaattaagtgaacaacttcaggttctttgccttttctgatggtgatggtggcaataataattaacattcattgag

SEQ ID NO: 297842 - DNA, 120 bp, Artificial Sequence
  ENSG00000132434_0 (sequence is synthesized)
gggctggcgcagcaggggccggtgaaatgcaggctgacgacggcgcgccaggggctgagctcgccccggtcggcgacgcgcacacaccttgagtgacagcgacctcttctctacaggttt

SEQ ID NO: 297843 - DNA, 120 bp, Artificial Sequence
  ENSG00000132434_1 (sequence is synthesized)
tccccgcgggagcgtggccctagcgggcgttcggttttctttggaaatcgcggagggggctggccgggcgcagcgatccccaccccgggactccagccccggccgtgcgcgtcgccgcgg

SEQ ID NO: 297844 - DNA, 120 bp, Artificial Sequence
  ENSG00000132434_2 (sequence is synthesized)
acgggctctgcgggccacggggaaggtgcgaggaggcgcgagcaggctgtgagccgctgggcgctcccgcgagcccgctcctctccgtcgggagcagggcaaaggcgccaggaacagggc

SEQ ID NO: 297845 - DNA, 120 bp, Artificial Sequence
  ENSG00000132434_3 (sequence is synthesized)
agaggcacagcgcccaccgcctctgcggccgcctgatgtgcgagcagcccgcgacgaggcagtgcacgctcagacgccccgctcctcccgccagcgcgcggcctcgctcctcctagagga

SEQ ID NO: 297846 - DNA, 120 bp, Artificial Sequence
  ENSG00000132434_4 (sequence is synthesized)
cgctctctgcgcgggccctcggaggaggcggcggcggggcgagctgcagcgccgggacaggaggtttgtccccgcccgcgcgccgtaccgcggcggagatgggcgagaccatgtcaaaga

SEQ ID NO: 297847 - DNA, 120 bp, Artificial Sequence
  ENSG00000132434_5 (sequence is synthesized)
ggctgaagctccacctgggaggggaggcagaaatggaggaacgggcgttcgtcaaccccttcccggactacgaggccgccgccggggcgctgctcgcctccggagcggccgaagagacag

SEQ ID NO: 297848 - DNA, 120 bp, Artificial Sequence
  ENSG00000132434_6 (sequence is synthesized)
gctgtgttcgtcccccggcgaccacggatgagcccggcctcccttttcatcaggacgggaagatcattcataatttcataagacggatccagaccaaaattaaagatcttctgcagcaaa

SEQ ID NO: 297849 - DNA, 120 bp, Artificial Sequence
  ENSG00000132434_7 (sequence is synthesized)
tggaagaagggctgaagacagctgatccccatgactgctctgcttatactggctggacaggcatagcccttttgtacctgcagttgtaccgggtcacatgtgaccaaacctacctgctcc

SEQ ID NO: 297850 - DNA, 120 bp, Artificial Sequence
  ENSG00000132434_8 (sequence is synthesized)
gatccctggattacgtaaaaagaacacttcggaatctgaatggccgcagggtcaccttcctctgtggggatgctggccccctggctgttggagctgtgatttatcacaaactcagaagtg

SEQ ID NO: 297851 - DNA, 120 bp, Artificial Sequence
  ENSG00000132434_9 (sequence is synthesized)
actgtgagtcccaggaatgtgtcacaaaacttttgcagctccagagatcggttgtctgccaagaatcagaccttcctgatgagctgctttatggacgggcaggttatctgtatgccttac

SEQ ID NO: 297852 - DNA, 120 bp, Artificial Sequence
  ENSG00000132434_10 (sequence is synthesized)
tgtacctgaacacagagataggtccaggcaccgtgtgtgagtcagctattaaagaggtagtcaatgctattattgaatcgggtaagactttgtcaagggaagaaagaaaaacggagcgct

SEQ ID NO: 297853 - DNA, 120 bp, Artificial Sequence
  ENSG00000132434_11 (sequence is synthesized)
gcccgctgttgtaccagtggcaccggaagcagtacgttggagcagcccatggcatggctggaatttactatatgttaatgcagccggcagcaaaagtggaccaagaaaccttgacagaaa

SEQ ID NO: 297854 - DNA, 120 bp, Artificial Sequence
  ENSG00000132434_12 (sequence is synthesized)
tggtgaaacccagtattgattatgtgcgccacaaaaaattccgatctgggaattacccatcatcattaagcaatgaaacagaccggctggtgcactggtgccacggcgccccgggggtca

SEQ ID NO: 297855 - DNA, 120 bp, Artificial Sequence
  ENSG00000132434_13 (sequence is synthesized)
tccacatgctcatgcaggcgtacaaggtctttaaggaggagaagtacttgaaagaggccatggagtgtagcgatgtgatttggcagcgaggtttgctgcggaagggctacgggatatgcc

SEQ ID NO: 297856 - DNA, 120 bp, Artificial Sequence
  ENSG00000132434_14 (sequence is synthesized)
atgggactgctggcaacggctattccttcctgtccctttaccgtctcacgcaggataagaagtacctctaccgagcttgcaagtttgcagagtggtgtctagattacggagcacacgggt

SEQ ID NO: 297857 - DNA, 120 bp, Artificial Sequence
  ENSG00000132434_15 (sequence is synthesized)
gccgcattcctgacagaccctattcgctctttgaaggcatggctggcgctattcactttctctctgatgtcctgggaccagagacatcacggtttccagcatttgaacttgactcttcga

SEQ ID NO: 297858 - DNA, 120 bp, Artificial Sequence
  ENSG00000132434_16 (sequence is synthesized)
agagggattaaaaggtgcaaaaagacaactaaaatacccatttggaccaaaagccaccagattgcttagtgcctgacacagaaacaactgggaatcctgaaagagaagcagacaccgtca

SEQ ID NO: 297859 - DNA, 120 bp, Artificial Sequence
  ENSG00000132434_17 (sequence is synthesized)
caggcccctctggttagactagcatgagtgaccgaagccatccatcaacattttctaacagcaccctcatcaatataaaatatgacttcttcacatacagattctctgtagtgtttgcat

SEQ ID NO: 297860 - DNA, 120 bp, Artificial Sequence
  ENSG00000132434_18 (sequence is synthesized)
tgttttaaatggaaggcccttctattcctgagggctcagagctgaccatgcatgaatgtatggcagtgtccacttttctgtataaaatgtataaagtggggtttcttccatattgacaaa

SEQ ID NO: 297861 - DNA, 120 bp, Artificial Sequence
  ENSG00000132434_19 (sequence is synthesized)
tgagggaacaggtggtgtctatcttgtatatcagaaagattatctagggtctatcctagtgataatacattgtcagccttttctgtggcaccttccagatgagaatgagggagcgaccac

SEQ ID NO: 297862 - DNA, 120 bp, Artificial Sequence
  ENSG00000132434_20 (sequence is synthesized)
tccaaggacggacaggaccagcagttctgcaggggcgtgctggggtggtttgggagtgcacagctgaacgcttcccgtttggattttacactcaccttcgtgttttaaagaagcctcaga

SEQ ID NO: 297863 - DNA, 120 bp, Artificial Sequence
  ENSG00000132434_21 (sequence is synthesized)
gtgcattgcagctctgtcagggccccattcccagcagaggcttcaggtgctttgtgtagagtccagggcagctggagctttgttggggagacttctggacccaaagggagctttcccaag

SEQ ID NO: 297864 - DNA, 120 bp, Artificial Sequence
  ENSG00000132434_22 (sequence is synthesized)
aagcctttgatggccacactgtaggcagcagtgactaagcactggcagttccagaacatttacccaggtatatgttactaaaacaggctccacctcagtttatcaacattataagttact

SEQ ID NO: 297865 - DNA, 120 bp, Artificial Sequence
  ENSG00000132434_23 (sequence is synthesized)
gttctaagaaaagtaaatacagttccagatgggttattgcagattaacagaaagacactcaactggactcatgtccctgcaattaaacttacttcaaccttttggaaagttatcaaaatc

SEQ ID NO: 297866 - DNA, 120 bp, Artificial Sequence
  ENSG00000132434_24 (sequence is synthesized)
taaatttggaatgaatgcatttcctattttttgtctacttttgggtgataaaaagtactagcccttatttatagatatgagaaacataatgttctaaccaacaacattatggtatttgtg

SEQ ID NO: 297867 - DNA, 120 bp, Artificial Sequence
  ENSG00000132434_25 (sequence is synthesized)
tgacttttatttgaaaaaatgtgagcagtaatttgggttagcctaccttcattaattctatcacatagatttcagtttttagaagggtttctgtcatcatggaagaggtggtctgggact

SEQ ID NO: 297868 - DNA, 120 bp, Artificial Sequence
  ENSG00000132434_26 (sequence is synthesized)
aggtacttctcgtcttgtgagctaaggcttgtgtcatgaaagacaagaggcctctcttaacagcccagtccttgtctgcagggggaggcctgagcatttcccagccccagtgtccacacc

SEQ ID NO: 297869 - DNA, 120 bp, Artificial Sequence
  ENSG00000132434_27 (sequence is synthesized)
tctcagaaaagagaaaaaagaatgtcagtttaggagaaaagcttcctttttacttgtgtggttatgtgtggggctggcacccgaaatgtgtgacattcagcttctaaacgatgcctggag

SEQ ID NO: 297870 - DNA, 120 bp, Artificial Sequence
  ENSG00000132434_28 (sequence is synthesized)
agtctgtttgctgcagacacccttgctcctgagtcattattttctttcatgttagattgatgacttctgtgaatagaaatcatcctgatcctattttacctggcctccagggcctgttga

SEQ ID NO: 297871 - DNA, 120 bp, Artificial Sequence
  ENSG00000132434_29 (sequence is synthesized)
tgggctttgcaggcagtccagcagcccacacctgcaggcaggatgctgtcgtcaatgagctgagggtagctgctttgctgaagacctcacacgatgtccaatctcatccaaataacattg

SEQ ID NO: 297872 - DNA, 120 bp, Artificial Sequence
  ENSG00000132434_30 (sequence is synthesized)
ttcccatcctccccacccaccacatcaaaacataacacatcacagcactcagtagaggtcctgcctccccatttctcaagggaagccagtaggcaacacagccagcacggtgctctccag

SEQ ID NO: 297873 - DNA, 120 bp, Artificial Sequence
  ENSG00000132434_31 (sequence is synthesized)
ggcagcccctctcagacgaggaggcagcgggtgcagccaggtgtctgcagagcagccacaaaggtggcctaggatgcgggtgtctccccaggtgagtccatccacacacgtttgaaaaac

SEQ ID NO: 297874 - DNA, 120 bp, Artificial Sequence
  ENSG00000132434_32 (sequence is synthesized)
actattagtctttctaacacactgagggaaagattaaaatctgtggaataaaggaggagattttatttacagatttttttaaaagccacctgggttgacaccttcctacttatccactag

SEQ ID NO: 297875 - DNA, 120 bp, Artificial Sequence
  ENSG00000132434_33 (sequence is synthesized)
atgtcatcagaggtgctgttccgtggttctgcattaacccctgcctcatgtctgtaacatgtgacagtaattccagctcggtccctccaggcaaaggagaaacgggacttacttcacagg

SEQ ID NO: 297876 - DNA, 120 bp, Artificial Sequence
  ENSG00000132434_34 (sequence is synthesized)
acagaggattgacagaagtcagtttaagataagtgtttgaatcagatttcagtacatctcattcatttcttagatttgtattcacaattgtgttctctaaaatgtgtctaaattttaaaa

SEQ ID NO: 297877 - DNA, 120 bp, Artificial Sequence
  ENSG00000132434_35 (sequence is synthesized)
atatgtacatgcataatgtcattttaaaatctgaaggaaagaatttgaagtccacaaaaagtgtttgaggttctttggttttgttagtaaaagccagttctgtggtgatgacctatggaa

SEQ ID NO: 297878 - DNA, 120 bp, Artificial Sequence
  ENSG00000132434_36 (sequence is synthesized)
ttctcagcctccagcccagaagagttacattaggaactctagagaaaacatgctctcagggagatgataagcaactcatgctgaagaatttttttttcagagcttccaaatattctactt

SEQ ID NO: 297879 - DNA, 120 bp, Artificial Sequence
  ENSG00000132434_37 (sequence is synthesized)
tcatatccgtttgactcaacatctttaaagaaatggataatgatgaaagacttcaaaaagtgttaaggattaatttgaaagagaagttatataccctgaatagaaaaattgaagaaagaa

SEQ ID NO: 297880 - DNA, 120 bp, Artificial Sequence
  ENSG00000132434_38 (sequence is synthesized)
gttgcttctggaatcatcagctgaagcggcaggaggaaggtgccagggagaacagagtgtcgttgagccgttcggttttcacctcggacttcccagcagctgtaaggcagaccccactct

SEQ ID NO: 297881 - DNA, 120 bp, Artificial Sequence
  ENSG00000132434_39 (sequence is synthesized)
acagctgaggcagccgcaagcagagccttgctgggcctcacccctggaagagggggtgcagtagcccatggagcccacgctgaatgccctacagctgggggtccacttccctgatgcctg

SEQ ID NO: 297882 - DNA, 120 bp, Artificial Sequence
  ENSG00000132434_40 (sequence is synthesized)
cggactacgaggccgccgccggggcgctgctcgcctccggagcggccgaagagacaggctgtgttcgtcccccggcgaccacggatgagcccggcctcccttttcatcaggacgggaagt

SEQ ID NO: 297883 - DNA, 120 bp, Artificial Sequence
  ENSG00000132434_41 (sequence is synthesized)
agaaaccaaaggtcaagacacaggaggcctaagttactaacatggagtcaaaaagtttttaagaagttggatggagaaccagacagttactctttttggtgcattcagtaacagaagcaa

SEQ ID NO: 297884 - DNA, 120 bp, Artificial Sequence
  ENSG00000132434_42 (sequence is synthesized)
agttaaatacatttacaagcacatcaccaaaacaatagggaatggcaaatccagaaagcattgctaatcattcataatttcataagacggatccagaccaaaattaaagatcttctgcag

SEQ ID NO: 297885 - DNA, 120 bp, Artificial Sequence
  ENSG00000132436_0 (sequence is synthesized)
gccagcgtcccacaccagccgcaggtgaaaaccggcagaaagacattaagagattttcctgcagtcactgctggcagatgatagagccaggatttgaaagcaggcagcctggctccagac

SEQ ID NO: 297886 - DNA, 120 bp, Artificial Sequence
  ENSG00000132436_1 (sequence is synthesized)
cctgtgctcttaactcccgttttgcatcaagaacagaatcctatgaaaggcttgcacagtgcttggtactgagatagcagcatcaaggagcattgtgtacatgcagaagtgcacagtacc

SEQ ID NO: 297887 - DNA, 120 bp, Artificial Sequence
  ENSG00000132436_2 (sequence is synthesized)
tggagtgaaactgcttgtgttcgatttctgataccattcataactggctgtgtgatctcaaaacctctaaaatgcagacctccagctctagatctgtgcacctgagtgaatggcagaaga

SEQ ID NO: 297888 - DNA, 120 bp, Artificial Sequence
  ENSG00000132436_3 (sequence is synthesized)
attacttcgcaattacatctggcatatgtaccggaccgaaggcagatgcataccgtgcacagatattacgcattcagtatgcatgggcaaactctgagatttcccaggtctgtgctacca

SEQ ID NO: 297889 - DNA, 120 bp, Artificial Sequence
  ENSG00000132436_4 (sequence is synthesized)
aactgttcaaaaaatatgcagagaaatattctgcaattattgattctgacaatgttgaatctgggttgaataattatgcagaaaacattttaactttggcaggatctcaacaaacagata

SEQ ID NO: 297890 - DNA, 120 bp, Artificial Sequence
  ENSG00000132436_5 (sequence is synthesized)
gtgacaagtggcagtctggattgtcaataaataatgttttcaaaatgagtagtgtacagaagatgatgcaagctggcaaaaaattcaaagactctctgttggaacctgctcttgcatcag

SEQ ID NO: 297891 - DNA, 120 bp, Artificial Sequence
  ENSG00000132436_6 (sequence is synthesized)
tggtaatccataaggaggccactgtctttgatcttcctaaatttagtgtttgtggtagttctcaagagagtgactcattacctaactcagctcatgatcgagaccggacccaagacttcc

SEQ ID NO: 297892 - DNA, 120 bp, Artificial Sequence
  ENSG00000132436_7 (sequence is synthesized)
cggagagcaatcgtttgaaactccttcagaatgcccagccacctatggtgactaacactgctaggacttgtcctacattctcagcacctgtaggtgagtcagctactgcaaaattccatg

SEQ ID NO: 297893 - DNA, 120 bp, Artificial Sequence
  ENSG00000132436_8 (sequence is synthesized)
tcacaccattgtttggaaatgtcaaaaaggaaaatcacagctctgcaaaagaaaacataggacttaatgtgttcttatctaaccagtcttgttttcctgctgcctgtgaaaatccacaga

SEQ ID NO: 297894 - DNA, 120 bp, Artificial Sequence
  ENSG00000132436_9 (sequence is synthesized)
ggaagtctttttatggttctggcaccattgatgcactttccaatccaatactgaataaggcttgtagtaaaacagaagataatggcccaaaggaggatagcagcctgcctacatttaaaa

SEQ ID NO: 297895 - DNA, 120 bp, Artificial Sequence
  ENSG00000132436_10 (sequence is synthesized)
ctgcaaaagaacaattatgggtagatcagcaaaaaaagtaccaccaacctcagcgtgcatcagggtcttcatatggtggtgtaaaaaagtctctaggagctagtagatcccgagggatac

SEQ ID NO: 297896 - DNA, 120 bp, Artificial Sequence
  ENSG00000132436_11 (sequence is synthesized)
ttggaaagtttgttcctcctatacccaagcaagatgggggagagcagaatggaggaatgcaatgtaagccttatggggcaggacctacagaaccagcacatccagttgatgagcgtctga

SEQ ID NO: 297897 - DNA, 120 bp, Artificial Sequence
  ENSG00000132436_12 (sequence is synthesized)
agaacttggagccaaagatgattgaacttattatgaatgagattatggatcatggacctccagtaaattgggaagatattgcaggagtagaatttgctaaagccaccataaaggaaatag

SEQ ID NO: 297898 - DNA, 120 bp, Artificial Sequence
  ENSG00000132436_13 (sequence is synthesized)
ttgtgtggcccatgttgaggccagacatctttactggtttaaggggaccccctaaaggaattttgctctttggtcctcctgggactggtaaaactctaattggcaagtgcattgctagtc

SEQ ID NO: 297899 - DNA, 120 bp, Artificial Sequence
  ENSG00000132436_14 (sequence is synthesized)
cagctgtgatatttattgacgaaattgattccttgttatctcaacggggagatggtgagcatgaatcttctagaaggataaaaacagaatttttagttcaattagatggagcaacaacat

SEQ ID NO: 297900 - DNA, 120 bp, Artificial Sequence
  ENSG00000132436_15 (sequence is synthesized)
cttctgaagatcgtatcctagtggtgggagcaacaaatcggccacaagaaattgatgaggctgcccggagaagattggtgaaaaggctttatattcccctcccagaagcttcagccagga

SEQ ID NO: 297901 - DNA, 120 bp, Artificial Sequence
  ENSG00000132436_16 (sequence is synthesized)
aacagatagtaattaatctaatgtccaaagagcagtgttgcctcagtgaagaagaaattgaacagattgtacagcagtctgatgcgttttcaggagcagacatgacacagctttgcaggg

SEQ ID NO: 297902 - DNA, 120 bp, Artificial Sequence
  ENSG00000132436_17 (sequence is synthesized)
aggcttctcttggtcctattcgcagtttacaaactgctgacattgctaccataacaccggatcaagttcgacccatagcttacattgattttgaaaatgcttttagaactgtgcgaccta

SEQ ID NO: 297903 - DNA, 120 bp, Artificial Sequence
  ENSG00000132436_18 (sequence is synthesized)
gtgtttctccaaaagatttagagctttatgaaaactggaacaaaacttttggttgtggaaagtaagtgggatacttggaatcaaggcatctctgtagtacagtcttctttattttttagc

SEQ ID NO: 297904 - DNA, 120 bp, Artificial Sequence
  ENSG00000132436_19 (sequence is synthesized)
atagaaagttggggatgtgttaattgtatttttaagaatatattctaagttctgtacttcaaataatagcacagattttacatctgattgacatagtgtatgttaatgtaagttttgctt

SEQ ID NO: 297905 - DNA, 120 bp, Artificial Sequence
  ENSG00000132436_20 (sequence is synthesized)
tccagtgattacctgatacgtaagcctatttgaacaaagtgagaatgaacttttgtttctaagaagtctttatcttgaagctatataacatgaaaagtgagctcaaattttttttagttg

SEQ ID NO: 297906 - DNA, 120 bp, Artificial Sequence
  ENSG00000132436_21 (sequence is synthesized)
aagattacatataaagttgtgtctgattaatattcatcttttattgaagaaagtgccttctgatggccacataattcttaatgtcagctagtataatggtttacatttggacaaagtatt

SEQ ID NO: 297907 - DNA, 120 bp, Artificial Sequence
  ENSG00000132436_22 (sequence is synthesized)
gcttagtgttatttaagtagatttaagatctcaaagctaaagtgccaatttttactttcttcagccaatttgttacctcttttatggtttttaatttttatcaggactaacattttcaga

SEQ ID NO: 297908 - DNA, 120 bp, Artificial Sequence
  ENSG00000132436_23 (sequence is synthesized)
aatagcaaggtgtgatctagtattagattcacagaactgaaaggttaattaagaatgttggttattttcacgggagcgtgtgatatttaacattaatattttatttgacactacagcctg

SEQ ID NO: 297909 - DNA, 120 bp, Artificial Sequence
  ENSG00000132436_24 (sequence is synthesized)
taatactgctctctttcaaaaacaagttttcagatttttataacagacccattttgttttatgaaacatgttcattacagaaacatgagaaaatagagataagtaaaaagaataaaagtc

SEQ ID NO: 297910 - DNA, 120 bp, Artificial Sequence
  ENSG00000132436_25 (sequence is synthesized)
actattatcctaccactttgcgggacacactattaatatttaagcatagattcttccagatgttttgttttatacagcagtaggattgtgtaatgtattctctcttgtagcctattcttc

SEQ ID NO: 297911 - DNA, 120 bp, Artificial Sequence
  ENSG00000132436_26 (sequence is synthesized)
aaagcgtatcttcactttccatgttaacataaatgtccttttatgattgtctaggattccatggatggatggaatataattgagtcatctggtagagcgcatataggacaggacgctagg

SEQ ID NO: 297912 - DNA, 120 bp, Artificial Sequence
  ENSG00000132436_27 (sequence is synthesized)
ttgtttatcttttgtttattgtaaaggaactatgtgggatgcatttggtgatctttttaaaaaatgtataaatttcttgagtaattcctggattaaagaatatgcactttttaaagcttt

SEQ ID NO: 297913 - DNA, 120 bp, Artificial Sequence
  ENSG00000132436_28 (sequence is synthesized)
gaatggaatggaaaacaattcctccctgcagaagccaactgtctaggaagacagataatgacattattaaaataatcagaacattggcaaaataaagaagattgaaatgcagttcatatg

SEQ ID NO: 297914 - DNA, 120 bp, Artificial Sequence
  ENSG00000132436_29 (sequence is synthesized)
acagtgctaattaatcatactttttagatctaggaaaggccataaaggttaaattgacttggaaatggtaaacaagacaatggttgtgtcactgatcggtgatggccagtttttggttat

SEQ ID NO: 297915 - DNA, 120 bp, Artificial Sequence
  ENSG00000132436_30 (sequence is synthesized)
ccttatttgccatttaaatgattgaattgaaaggaagaagtaagacttggaagatgaatattgaaggaaaggtgaagatggaaaagagaagggggtttattctgagaacagtgactagaa

SEQ ID NO: 297916 - DNA, 120 bp, Artificial Sequence
  ENSG00000132436_31 (sequence is synthesized)
ctctgaggtatggtagaaatttcaggataacagatgataaaggggaatgaagccatggagaggaagagaatgataatattaattgtgaaagtttgtgtcaagtgttttctgagtcacctt

SEQ ID NO: 297917 - DNA, 120 bp, Artificial Sequence
  ENSG00000132436_32 (sequence is synthesized)
tctttcagtttctcatttctagtattgtataaatgagtttaacatcaaaatggtatagtgaaaaaaaggatgaactgcttgacagaagaggtcagatctagttttgactctagcttattt

SEQ ID NO: 297918 - DNA, 120 bp, Artificial Sequence
  ENSG00000132436_33 (sequence is synthesized)
agctttacagctttaaataaattacagtgtctttaaagctctggatcttaagttttctaattgttttttaaacaaagatttgtgaacacctacttacaatgtgacaaatgtctttgtaag

SEQ ID NO: 297919 - DNA, 120 bp, Artificial Sequence
  ENSG00000132436_34 (sequence is synthesized)
gcattatgggagataaaagctgcattaaacctggctgttgtacttacaagtaatttggaaggcaaaatttcaaatacttgaacctaaagtagggtttcttggttttcatttaattgaaat

SEQ ID NO: 297920 - DNA, 120 bp, Artificial Sequence
  ENSG00000132436_35 (sequence is synthesized)
actgttaggaaacaaaaatttttcataaatttttcttgtggatatgtaagtaaattctatatatctagcaatatgatacatctatagttctgtttaaaggtaacaatgtgaggaagctta

SEQ ID NO: 297921 - DNA, 120 bp, Artificial Sequence
  ENSG00000132436_36 (sequence is synthesized)
tgcgaataacttgacagaagaaatctaaagtaaaagcattttcctagtaggctagcttgttctcttatttcatttattgtaacagtttcactttttaataattatgtgaaattaggaaac

SEQ ID NO: 297922 - DNA, 120 bp, Artificial Sequence
  ENSG00000132436_37 (sequence is synthesized)
agatattctagggcattctgtttagggtgatgaacttattcatgaatgttattaaaaccatttaaatatgccatagtttaaatttgtgatccatgctgttcaatctgtgacctaggatag

SEQ ID NO: 297923 - DNA, 120 bp, Artificial Sequence
  ENSG00000132436_38 (sequence is synthesized)
cacagtgcttggtactgagtaggcactccgtcagtattttagtagctattattccaaaggacactgtattctagatttaaagtattttctttgttttccttcatactgattttcattttt

SEQ ID NO: 297924 - DNA, 120 bp, Artificial Sequence
  ENSG00000132436_39 (sequence is synthesized)
acggcgcgagtccgagggcgacagcagcgcgcaggcgcacgtcagtccccgcgcttttcggaggctgccagcgtcccacaccagccgcaggatagcagcatcaaggagcattgtgtacat

SEQ ID NO: 297925 - DNA, 120 bp, Artificial Sequence
  ENSG00000132436_40 (sequence is synthesized)
acggcgcgagtccgagggcgacagcagcgcgcaggcgcacgtcagtccccgcgcttttcggaggctgccagcgtcccacaccagccgcagaacctctaaaatgcagacctccagctctag

SEQ ID NO: 297926 - DNA, 120 bp, Artificial Sequence
  ENSG00000132436_41 (sequence is synthesized)
gtgcacagtacctggagtgaaactgcttgtgttcgatttctgataccattcataactggctgtgtgatctcaaataagaaaactgaagaaccagctgggcgcggtagctcacgcctgtaa

SEQ ID NO: 297927 - DNA, 120 bp, Artificial Sequence
  ENSG00000132436_42 (sequence is synthesized)
attttcctgcagtcactgctggcagatgatagagccaggatttgaaagcaggcagcctggctccagaccctgtgctcttaactcccgttttgcatcaagaacagaatcctatgaaaggat

SEQ ID NO: 297928 - DNA, 120 bp, Artificial Sequence
  ENSG00000132437_0 (sequence is synthesized)
ggagagagagaggacagagagcaagtcactcccggctgcctttttcacctctgacagagcccagacaccatgaacgcaagtgaattccgaaggagagggaaggagatggtggattacatg

SEQ ID NO: 297929 - DNA, 120 bp, Artificial Sequence
  ENSG00000132437_1 (sequence is synthesized)
gccaactacatggaaggcattgagggacgccaggtctaccctgacgtggagcccgggtacctgcggccgctgatccctgccgctgcccctcaggagccagacacgtttgaggacatcatc

SEQ ID NO: 297930 - DNA, 120 bp, Artificial Sequence
  ENSG00000132437_2 (sequence is synthesized)
aacgacgttgagaagataatcatgcctggggtgacgcactggcacagcccctacttcttcgcctacttccccactgccagctcgtacccggccatgcttgcggacatgctgtgcggggcc

SEQ ID NO: 297931 - DNA, 120 bp, Artificial Sequence
  ENSG00000132437_3 (sequence is synthesized)
attggctgcatcggcttctcctgggcggcaagcccagcatgcacagagctggagactgtgatgatggactggctcgggaagatgctggaactaccaaaggcatttttgaatgagaaagct

SEQ ID NO: 297932 - DNA, 120 bp, Artificial Sequence
  ENSG00000132437_4 (sequence is synthesized)
ggagaagggggaggagtgatccagggaagtgccagtgaagccaccctggtggccctgctggccgctcggaccaaagtgatccatcggctgcaggcagcgtccccagagctcacacaggcc

SEQ ID NO: 297933 - DNA, 120 bp, Artificial Sequence
  ENSG00000132437_5 (sequence is synthesized)
gctatcatggagaagctggtggcttactcatccgatcaggcacactcctcagtggaaagagctgggttaattggtggagtgaaattaaaagccatcccctcagatggcaacttcgccatg

SEQ ID NO: 297934 - DNA, 120 bp, Artificial Sequence
  ENSG00000132437_6 (sequence is synthesized)
cgtgcgtctgccctgcaggaagccctggagagagacaaagcggctggcctgattcctttctttatggttgccaccctggggaccacaacatgctgctcctttgacaatctcttagaagtc

SEQ ID NO: 297935 - DNA, 120 bp, Artificial Sequence
  ENSG00000132437_7 (sequence is synthesized)
ggtcctatctgcaacaaggaagacatatggctgcacgttgatgcagcctacgcaggcagtgcattcatctgccctgagttccggcaccttctgaatggagtggagtttgcagattcattc

SEQ ID NO: 297936 - DNA, 120 bp, Artificial Sequence
  ENSG00000132437_8 (sequence is synthesized)
tggctattggtgaattttgactgttctgccatgtgggtgaaaaagagaacagacttaacgggagcctttagactggaccccacttacctgaagcacagccatcaggattcagggcttatc

SEQ ID NO: 297937 - DNA, 120 bp, Artificial Sequence
  ENSG00000132437_9 (sequence is synthesized)
actgactaccggcattggcagataccactgggcagaagatttcgctctttgaaaatgtggtttgtatttaggatgtatggagtcaaaggactgcaggcttatatccgcaagcatgtccag

SEQ ID NO: 297938 - DNA, 120 bp, Artificial Sequence
  ENSG00000132437_10 (sequence is synthesized)
ctgtcccatgagtttgagtcactggtgcgccaggatccccgctttgaaatctgtgtggaagtcattctggggcttgtctgctttcggctaaagggttccaacaaagtgaatgaagctctt

SEQ ID NO: 297939 - DNA, 120 bp, Artificial Sequence
  ENSG00000132437_11 (sequence is synthesized)
ctgcaaagaataaacagtgccaaaaaaatccacttggttccatgtcacctcagggacaagtttgtcctgcgctttgccatctgttctcgcacggtggaatctgcccatgtgcagcgggcc

SEQ ID NO: 297940 - DNA, 120 bp, Artificial Sequence
  ENSG00000132437_12 (sequence is synthesized)
tgggaacacatcaaagagctggcggccgacgtgctgcgagcagagagggagtaggagtgaagccagctgcaggaatcaaaaattgaagagagatatatctgaaaactggaataagaagca

SEQ ID NO: 297941 - DNA, 120 bp, Artificial Sequence
  ENSG00000132437_13 (sequence is synthesized)
aataaatatcatcctgccttcatggaactcagctgtctgtggcttcccatgtctttctccaaagttatccagagggttgtgattttgtctgcttagtatctcatcaacaaagaaatatta

SEQ ID NO: 297942 - DNA, 120 bp, Artificial Sequence
  ENSG00000132437_14 (sequence is synthesized)
tttgctaattaaaaagttaatcttcatggccatagcttttattcattagctgtgatttttgttgattaaaacattatagattttcatgttcttgcagtcatcagaagtggtaggaaagcc

SEQ ID NO: 297943 - DNA, 120 bp, Artificial Sequence
  ENSG00000132437_15 (sequence is synthesized)
tcactgatatattttccagggcaatcaatgttcacgcaacttgaaattatatctgtggtcttcaaattgtcttttgtcatgtggctaaatgcctaataaacaattcaagtgaaatactaa

SEQ ID NO: 297944 - DNA, 120 bp, Artificial Sequence
  ENSG00000132437_16 (sequence is synthesized)
aagaagagtgactgtctcagtgccgagtgcctcagcagcttctccacatgctcttcagtccccaaagttggagaatcccatcaaggagagtagccctgtaaggaattcgaatttccagca

SEQ ID NO: 297945 - DNA, 120 bp, Artificial Sequence
  ENSG00000132437_17 (sequence is synthesized)
gcaatccagtgtgtaggtccagggcgacaagcgctgctcccatggctggggtaagtccctccagcattcagccttgctccctgtgcttatctggatgcggtgtaggatgaagatgaccct

SEQ ID NO: 297946 - DNA, 120 bp, Artificial Sequence
  ENSG00000132437_18 (sequence is synthesized)
ctcttaaaaattactaaataagtttgaagagacacagccatctgcctacagtgccacccctgagcttcacgccaccctggtctccaggaaaggggagagtctcaggaatattgaatgcag

SEQ ID NO: 297947 - DNA, 120 bp, Artificial Sequence
  ENSG00000132437_19 (sequence is synthesized)
caaagttagcacgcagagcaaggtgacagccaagacattttgaaggatgcaaaaagagtctgccagtggatcaaggtgtacctgccatcttatcccaaaagtcttatctttctccgttgc

SEQ ID NO: 297948 - DNA, 120 bp, Artificial Sequence
  ENSG00000132437_20 (sequence is synthesized)
ggtccagacaaccagtgcgtatgttaaggctgaagaaaacctgcttagtcagtgcggtggtgagaaggagttgagcctttcgggacgtggagtgcctgccgcagagctgatgccccgagg

SEQ ID NO: 297949 - DNA, 120 bp, Artificial Sequence
  ENSG00000132437_21 (sequence is synthesized)
ctgccgcagacgctgcagagctgatgccagcaagttggcggctgtgcgctcatctctcccggacaactcttccccggcgctcggggttcagttcagccaccagcctgtgaggggaaattt

SEQ ID NO: 297950 - DNA, 120 bp, Artificial Sequence
  ENSG00000132437_22 (sequence is synthesized)
gacaaagtggaggtgatgtagggaagagacacaggacacacagggatgaggccaggccatttggaaaaggccatttggaaaatttccttgtagaaggaattaaacgtaagccctaagaca

SEQ ID NO: 297951 - DNA, 120 bp, Artificial Sequence
  ENSG00000132437_23 (sequence is synthesized)
tgggagcaggtgcctgagctgaggcaggtggggagaggggagaggtggtccagtctagggtacttggttatcagccctttcatttgttctctaaaaccagggtgaaaaagagaacagact

SEQ ID NO: 297952 - DNA, 120 bp, Artificial Sequence
  ENSG00000132446_0 (sequence is synthesized)
actatccgccattcttgtcacctcagctgctgccctcgctaccgcaccgacttcgcccgtgtgctcgcctgcacttgcgctgcccgccatggccaccgcccagccgtcgcaggtgcgcca

SEQ ID NO: 297953 - DNA, 120 bp, Artificial Sequence
  ENSG00000132446_1 (sequence is synthesized)
gaagtacgacaccaactgcgacgccgccatcaacagccacatcacgctggagctctacacctcctacctgtacctgtctatggccttctacttcaaccgggacgacgtggccctggagaa

SEQ ID NO: 297954 - DNA, 120 bp, Artificial Sequence
  ENSG00000132446_2 (sequence is synthesized)
cttcttccgctacttcctgcgcctgtcggacgacaaaatggagcatgcccagaagctgatgaggctgcagaacctgcgcggtggccacatctgccttcacgatatcaggaagccagagtg

SEQ ID NO: 297955 - DNA, 120 bp, Artificial Sequence
  ENSG00000132446_3 (sequence is synthesized)
tggccgtggagaagggcgacccccagctgtgccacttcctggagagccactacctgcacgagcaagtcaagaccatcaaagagctgggtggctacgtgagcaacctgcgcaagatttgtt

SEQ ID NO: 297956 - DNA, 120 bp, Artificial Sequence
  ENSG00000132446_4 (sequence is synthesized)
ccccggaagccggcctggctgagtacctgttcgacaagctcaccctgggcggccgcgtcaaagagacttgagcccagatgggccccacagccacggggtcccttccctgggtcaggccac

SEQ ID NO: 297957 - DNA, 120 bp, Artificial Sequence
  ENSG00000132446_5 (sequence is synthesized)
taggcggggcgtgcatgttgccctttcagaacgttctcttcagttttatctttcagttttaccattgttagcaaaaaagttatctggttctcaaagcaataaaggtgtccatttgataca

SEQ ID NO: 297958 - DNA, 120 bp, Artificial Sequence
  ENSG00000132463_0 (sequence is synthesized)
acttccgttccaccatcgctgctggagcagctgccttcaggccctgcgccgcctccggagtccatggccggcacgcgctgggtactcggggcgctgctccggggctgcggctgtaactgc

SEQ ID NO: 297959 - DNA, 120 bp, Artificial Sequence
  ENSG00000132463_1 (sequence is synthesized)
gtaactgcagcagctgccggcgcaccggcgccgcctgcctgcccttctactccgccgctggctctatcccgtcgggcgtctcgggccgccgccgcctgctgctgctgctcggggccgccg

SEQ ID NO: 297960 - DNA, 120 bp, Artificial Sequence
  ENSG00000132463_2 (sequence is synthesized)
cccagacgcgtggcctccagaccgggcctgtgcctcccgggaggctggcggggcctcccgctgtggccacctctgccgcggccgcggccgccgcgtcctactctgccctccgtgcctctc

SEQ ID NO: 297961 - DNA, 120 bp, Artificial Sequence
  ENSG00000132463_3 (sequence is synthesized)
tctctgctgccgcagtcgctggcggcggcggccgccgtcccgacgcgcagctacagccaggagtccaaaactacttacctggaagaccttccaccaccccctgagtatgaattggccccg

SEQ ID NO: 297962 - DNA, 120 bp, Artificial Sequence
  ENSG00000132463_4 (sequence is synthesized)
tccaagttagaagaggaagtggatgatgtctttctcattcgagctcaaggactgccctggtcatgcactatggaagatgtgcttaactttttttcagactgcagaatccgcaacggtgag

SEQ ID NO: 297963 - DNA, 120 bp, Artificial Sequence
  ENSG00000132463_5 (sequence is synthesized)
aatggaatacattttctcctaaacagagatgggaaacgaaggggtgatgccttaattgaaatggagtcagagcaggatgtgcagaaagccttagagaagcaccgcatgtacatgggccag

SEQ ID NO: 297964 - DNA, 120 bp, Artificial Sequence
  ENSG00000132463_6 (sequence is synthesized)
cggtatgtggaagtatatgagataaacaatgaagatgtggatgccttaatgaagagcttgcaggtcaaatcttcgcctgtggtaaatgatggtgtggttcgtttgagaggacttccttat

SEQ ID NO: 297965 - DNA, 120 bp, Artificial Sequence
  ENSG00000132463_7 (sequence is synthesized)
agttgcaatgagaaagacattgtagacttctttgcaggactgaatatagttgacattacttttgtgatggactatagagggaggcgaaaaacaggggaagcctatgtgcaatttgaagaa

SEQ ID NO: 297966 - DNA, 120 bp, Artificial Sequence
  ENSG00000132463_8 (sequence is synthesized)
ccagaaatggccaaccaagccctgttgaaacacagggaagaaattggtaatcgatacatcgagatatttccaagcagaaggaatgaagttcgaacacatgtcggttcttataagggaaag

SEQ ID NO: 297967 - DNA, 120 bp, Artificial Sequence
  ENSG00000132463_9 (sequence is synthesized)
aaaatcgcatcttttcctactgctaagtatataactgagccagaaatggtctttgaagaacatgaagtaaatgaggatattcaacccatgacagcttttgaaagtgagaaggaaatagaa

SEQ ID NO: 297968 - DNA, 120 bp, Artificial Sequence
  ENSG00000132463_10 (sequence is synthesized)
ttgcctaaggaggtgccagaaaagcttccagaggctgctgattttggaactacgtcttctctgcattttgtccacatgagaggattacctttccaagccaatgcccaagacattataaac

SEQ ID NO: 297969 - DNA, 120 bp, Artificial Sequence
  ENSG00000132463_11 (sequence is synthesized)
ttttttgctccactcaagcctgttagaatcaccatggaatacagctccagtgggaaggccactggagaagctgatgtgcactttgagacccatgaggatgctgttgcagcgatgctcaag

SEQ ID NO: 297970 - DNA, 120 bp, Artificial Sequence
  ENSG00000132463_12 (sequence is synthesized)
gatcggtcccacgttcatcataggtatattgaactgttcctgaattcatgtccaaaaggaaaataagactctaggggctccagataataagggtgaagcaagaagcatttcatttgcaca

SEQ ID NO: 297971 - DNA, 120 bp, Artificial Sequence
  ENSG00000132463_13 (sequence is synthesized)
tctttcttggacttgggatatacagttccagtttattagcagcaactgctagggaaatgattttggtgttttgggttaattgcttctaagaaaagtttcatagtggactgtttagaagaa

SEQ ID NO: 297972 - DNA, 120 bp, Artificial Sequence
  ENSG00000132463_14 (sequence is synthesized)
gaaatgaaagatccagtttgggattatgaaataaaccacaaattaaaatttttgtttaaactgtccaggatctgatttaaaaatatggtctttgttttatatgattaaatggtttgtttt

SEQ ID NO: 297973 - DNA, 120 bp, Artificial Sequence
  ENSG00000132463_15 (sequence is synthesized)
catagatgatatgttactcattgtaaagaccacatatttttattcagcagtgttctttaaacggtttcatttaaaaagtaactttttttttttgcctgtgaattgagtgctctgatgtaa

SEQ ID NO: 297974 - DNA, 120 bp, Artificial Sequence
  ENSG00000132463_16 (sequence is synthesized)
aacttctcatggagtgaaacagtgatttattttaaccaaacattcaccaaagcaaagaacggtttcagacctttgaactggtatggtttggcagaatagttttaaattttgctgtatttg

SEQ ID NO: 297975 - DNA, 120 bp, Artificial Sequence
  ENSG00000132463_17 (sequence is synthesized)
attacttagagataggaatttttaaaaatcaaaacaaaaaataccacagcttagtgtaaatgacaatttggcggttttatgtctttagaaatgttttgcctttctaagccttgtgctaaa

SEQ ID NO: 297976 - DNA, 120 bp, Artificial Sequence
  ENSG00000132463_18 (sequence is synthesized)
ggcgtataacggtggtgcctatctacttaagggggcattctagtcttaacttaaaagttgtctaaactgtccctccctggctttttttggtttggggtagacctaagggtgtttgttagt

SEQ ID NO: 297977 - DNA, 120 bp, Artificial Sequence
  ENSG00000132463_19 (sequence is synthesized)
ctcaaaactgtgaagtgacatgtcagaacagtccagactggtaagaaaattaatggcttcacttgaatttaaaccagctctagataggaaaaaaatcagtctcctcatttgctttttaaa

SEQ ID NO: 297978 - DNA, 120 bp, Artificial Sequence
  ENSG00000132463_20 (sequence is synthesized)
tggagtagtacatcccatattttagaacaagtaggggtgccttgcttaaataaaaatagcatttaatgtataattgtgtgaagggtttatggataaagctgtacttctgtcacaatgtgg

SEQ ID NO: 297979 - DNA, 120 bp, Artificial Sequence
  ENSG00000132463_21 (sequence is synthesized)
cagtactttctgctttaatattaaacagcttgttatttaaatattggacaaaatggctggcttcaaaatatagtcattaataaactaactttatgtgcacctgtgtaggagaatcaaaat

SEQ ID NO: 297980 - DNA, 120 bp, Artificial Sequence
  ENSG00000132463_22 (sequence is synthesized)
cctgtatgctttctttgccttgttcctgttctcagggtgacgactgccaccaggagatgcagttctagttcttaaaattaaatttgcccaggtttctgacaggtgatacctggaagagag

SEQ ID NO: 297981 - DNA, 120 bp, Artificial Sequence
  ENSG00000132463_23 (sequence is synthesized)
actatgtcttctcttacttaatacataaccatctttgattaccagctaagatgcgaaatcactgtactgtagtcaataaatgaagacttgtttcaggctgaagattacctaagagtattt

SEQ ID NO: 297982 - DNA, 120 bp, Artificial Sequence
  ENSG00000132463_24 (sequence is synthesized)
attattggagtctgtgagtcaactgaatatattattacctcaagtcctgctatattaatataagtagtaagggttaattttcgtgtgtgtgttctctaaaatcctgtgaacatgacttaa

SEQ ID NO: 297983 - DNA, 120 bp, Artificial Sequence
  ENSG00000132463_25 (sequence is synthesized)
ccagcttaacatcatcagtagtactgcctagatggaaatgcgttttcatatatggttgaatatgccaagctatgagaactggtatctgtagttgtacgaactattagaatgtgatctttg

SEQ ID NO: 297984 - DNA, 120 bp, Artificial Sequence
  ENSG00000132463_26 (sequence is synthesized)
ttgctctttcacatttggtatctgatttgctgtggaaaagatctgtggggcctactgtgaggaattcatctgcaattgatttaagctaatgagttttatttgcacatctctggaaaaaga

SEQ ID NO: 297985 - DNA, 120 bp, Artificial Sequence
  ENSG00000132463_27 (sequence is synthesized)
agcattaaaatgctatatgatggatgggtaaggttgaaaggatatatcttcttggcacgctacaggctgagttttctgtacaaaatgtggccattattgggaaatcattttatgtatttg

SEQ ID NO: 297986 - DNA, 120 bp, Artificial Sequence
  ENSG00000132463_28 (sequence is synthesized)
aatgctcccttttgtttttgttcatgatctaggctagtacgtaagtgattgctaaggtggatgtagttatgggaaaggaagagaagcacataatacagtaaaagtaatcttatttccatg

SEQ ID NO: 297987 - DNA, 120 bp, Artificial Sequence
  ENSG00000132463_29 (sequence is synthesized)
caagtggaagacggtaccgtctccccacatttgagaagactgttttgcatcactctttgctattgaaggaagcagtgatggtgaatttccttctgtttgggttccttgtgtctataactt

SEQ ID NO: 297988 - DNA, 120 bp, Artificial Sequence
  ENSG00000132463_30 (sequence is synthesized)
cctttgtggtaaagccatcaggaagaatagtgggagtggggcatatggtcagggtgctcatatcctgctttagcctagctgctgcttacggagtgcaagggagaactctgagaagcagta

SEQ ID NO: 297989 - DNA, 120 bp, Artificial Sequence
  ENSG00000132463_31 (sequence is synthesized)
tgtaaataccagggagctgattgctgaatattgtggtctcatctgaatattgtggtctcatctaaatattgacaccaggcaatgaagcagaaatagagtatgtgtccctttatgcgtggg

SEQ ID NO: 297990 - DNA, 120 bp, Artificial Sequence
  ENSG00000132463_32 (sequence is synthesized)
taacttaagcttctgtcatgtgggaagggggaccgaatcttccctgggaggaaggctccaaattctcactacttctgtgttacttgaagggggaagcataaggaacccagtttgaaggca

SEQ ID NO: 297991 - DNA, 120 bp, Artificial Sequence
  ENSG00000132463_33 (sequence is synthesized)
acattgtgtgccatgaatctgcttattaatcaacatgccttgttaatgtcctctgccctgaacagcccttactcagttctcatttggaaagttattttttggggttacatcctgtttgtt

SEQ ID NO: 297992 - DNA, 90 bp, Artificial Sequence
  ENSG00000132463_34 (sequence is synthesized)
gtcaggagttcaagattagcctggccaacttagtgaaactccggctctactgaaaatgcaaaaattagccaggtgtggcacaaggcagga

SEQ ID NO: 297993 - DNA, 62 bp, Artificial Sequence
  ENSG00000132463_35 (sequence is synthesized)
cgcttgaacctgggaggcagaggttgtagctcaaaaaaaccaaaatacaaaaaactccattg

SEQ ID NO: 297994 - DNA, 120 bp, Artificial Sequence
  ENSG00000132463_36 (sequence is synthesized)
tgtcaaaatcaaaaaaaccaaaatacaaaaaactccattgttctgagagtttcccctaaattatcggaagacactcacattgaattggtaggacctatagtatagaggagaatggtatgt

SEQ ID NO: 297995 - DNA, 120 bp, Artificial Sequence
  ENSG00000132463_37 (sequence is synthesized)
atgtcagcagtagagttccaatccaaattgcgctatcgcattagaaatacattaccctcccactccccaagttcagcaaattagaagagaatctgaagtttgtaggaagggaataaagct

SEQ ID NO: 297996 - DNA, 120 bp, Artificial Sequence
  ENSG00000132463_38 (sequence is synthesized)
gctataaacatttatgtgcaggtttttgtgtagactcgttttcagctcctttgggtaaataccaaggaaccaggttgctggattgtaagttaagagtatgtttagttttggaagaaactg

SEQ ID NO: 297997 - DNA, 120 bp, Artificial Sequence
  ENSG00000132463_39 (sequence is synthesized)
ccaaactgttccaacatgactattttgaattcccattgacaatgaataagagttcctgtagctcctcaccctcattagtatttggtgatgtcactcttgcattttagctaatgggtgaat

SEQ ID NO: 297998 - DNA, 120 bp, Artificial Sequence
  ENSG00000132463_40 (sequence is synthesized)
agtggtctcatcgttttaattcccaatcccatagtgatgtggagcaccttttcatatacttaatctgccatccttatatcatcattggtgaggtgtctggattttctgtccagaatttta

SEQ ID NO: 297999 - DNA, 120 bp, Artificial Sequence
  ENSG00000132463_41 (sequence is synthesized)
gttctagtggttttcttatttttagaaaggaagtataggaaggaaggtttaatctgtcttaagcctgattatatgaaaatcaagaataggctaggtgtggtggctgacatctgtaatccc

SEQ ID NO: 298000 - DNA, 120 bp, Artificial Sequence
  ENSG00000132463_42 (sequence is synthesized)
tggctgacatctgtaatccccgcactttgtgaggctgaagtgggaggactgcttgagcctgggaagtcaagcctgcagtgagccatgactgttgctgcactccagcctgagtgacagagt

SEQ ID NO: 298001 - DNA, 120 bp, Artificial Sequence
  ENSG00000132463_43 (sequence is synthesized)
aaaaaagcaggctcattttaaagttgtttatattttattttttgaaggaaataaacttgaagagatacaaacggtagtgaagattctccttcccctcctgtaattcagctgtttagtttc

SEQ ID NO: 298002 - DNA, 120 bp, Artificial Sequence
  ENSG00000132463_44 (sequence is synthesized)
tattctcgcacagccctgttatcagtttctagtgtaagcttgcagtgacttttactttatttataagcaagtgttagtgggtgttgtcatttcttttaaaaatataaattatactgtaca

SEQ ID NO: 298003 - DNA, 120 bp, Artificial Sequence
  ENSG00000132463_45 (sequence is synthesized)
tgctattttgtattttggcttttctcccacctaaacaccctaaagatcattttctgtcagtatataaaatcttggtgatgccaatacccatcccttagattgtacaagcagcattttgcc

SEQ ID NO: 298004 - DNA, 120 bp, Artificial Sequence
  ENSG00000132463_46 (sequence is synthesized)
atgctttatcccatagcctgcctcctgcagtctcatctttttttctatatgcatgtccaagtaagttgtagacatttttcacttttaatcctttcagcatacatgtcatgggaatttgtt

SEQ ID NO: 298005 - DNA, 120 bp, Artificial Sequence
  ENSG00000132463_47 (sequence is synthesized)
tttgtttttgttttttgtgtttgagacagtcgctctgtcacccaggctggagttatagtgacgtgatcccagctcattacagcctccacctcccagtttcaagcaattctcatgcctcag

SEQ ID NO: 298006 - DNA, 120 bp, Artificial Sequence
  ENSG00000132463_48 (sequence is synthesized)
attacaggcatcagccaccacacccagccgtcattggagtttttttgagggagatttgcagtaaggtgaataaatgttaagtgtatcatttgatgaggttttttcttttttttttttttt

SEQ ID NO: 298007 - DNA, 76 bp, Artificial Sequence
  ENSG00000132463_49 (sequence is synthesized)
ttttttttttttgagatggagtcttgtatcgcccaggctagagtgcagtggcgtctcctgcctcagcctcccgagt

SEQ ID NO: 298008 - DNA, 120 bp, Artificial Sequence
  ENSG00000132463_50 (sequence is synthesized)
ttacaggtgtgagccaccatacccagactcatttgatgagttttgatgtaaaagcatgtaactcaaacccctatgtctggaacatctgtattacatctgaattttttcacctagtcaatt

SEQ ID NO: 298009 - DNA, 120 bp, Artificial Sequence
  ENSG00000132463_51 (sequence is synthesized)
tattacatctgaattttttcacctagtcaattcctgcacctctctctcctgtcccttcttccctcccctggcagtcagctactgttaggattttgttcactgtagattaattttgcctat

SEQ ID NO: 298010 - DNA, 120 bp, Artificial Sequence
  ENSG00000132463_52 (sequence is synthesized)
tctagaacttcatataacggactcacttatgcagtatgtattctgtaagttccttttactcagcatgtttgtatgttcatcagtgtgtttaagctttgttcctttttatggctgagcagt

SEQ ID NO: 298011 - DNA, 120 bp, Artificial Sequence
  ENSG00000132463_53 (sequence is synthesized)
gttctatgtatgaatgccacattttaacgtttcacctgttaggtgaacaactaactggtgaacaatgggctgtttctagtttggggctatcatgaataaagttggtatgaacatgtacaa

SEQ ID NO: 298012 - DNA, 120 bp, Artificial Sequence
  ENSG00000132463_54 (sequence is synthesized)
acccgcccccgtccaccctgtgctcctattgggccctggaacaagggaagctctcccaggcgtcgggtcttctgcttgttttgttctcgcctcgagtctctggtcggttgggcagtgtaa

SEQ ID NO: 298013 - DNA, 120 bp, Artificial Sequence
  ENSG00000132463_55 (sequence is synthesized)
ccgccgtcccgacgcgcagctacagccaggtacgtgggcgccgtgagggacctggcgcgagatccctcccgggccgcgtgcacgcgcccccgcgcccctccgtccctccgtgtgcgcctc

SEQ ID NO: 298014 - DNA, 120 bp, Artificial Sequence
  ENSG00000132463_56 (sequence is synthesized)
cctcgcgggcacgcccggggatccgcgacactcgccgcacacccgcccccgtccaccctgtgctcctattgggccctggaacaagggaagctctcccaggcgtcgggtcttctgcttgtt

SEQ ID NO: 298015 - DNA, 120 bp, Artificial Sequence
  ENSG00000132463_57 (sequence is synthesized)
gcacacagttgcgtgggctggcttgtagggaaggagcctgtccccatcgcgccgttccctctcctgtccccagggaaagacgagctgtcccggtttactgaaggtcacctctgcaactcc

SEQ ID NO: 298016 - DNA, 120 bp, Artificial Sequence
  ENSG00000132463_58 (sequence is synthesized)
aatatagtgtttctgcgttggatagtaagatggcatcttcctggttgcaaagcttgcttctttttctgtagctgaaaagtgtggcttggtattacttttttttgtgacagagtctcgctc

SEQ ID NO: 298017 - DNA, 90 bp, Artificial Sequence
  ENSG00000132463_59 (sequence is synthesized)
tccgccttggtctaccgagtagctgggattacaggcaggcgccaccatgcccggctaattttagtattttcagtagagatggggtttcac

SEQ ID NO: 298018 - DNA, 120 bp, Artificial Sequence
  ENSG00000132463_60 (sequence is synthesized)
gagattacaggtgtgagccaccatgctcgctgagagcagatatttgaaatgtcactttgagttctgagaaaaagtaaaaagccagaagacatactagatatataaatatattactgctta

SEQ ID NO: 298019 - DNA, 120 bp, Artificial Sequence
  ENSG00000132463_61 (sequence is synthesized)
actgcttaaaaagatttcctaaaaagaaatgtatcaagtgtatgaatcaaagtctgaaagaaagatgaagagccaccagacttctaggtaggtttacatccatcatgttcctcttgactg

SEQ ID NO: 298020 - DNA, 120 bp, Artificial Sequence
  ENSG00000132463_62 (sequence is synthesized)
tcagggtgaagcaagaagcatttcatttgcacatctttcttggacttgggatatacagttccagtttattagcagcaactgctagggaaatgattttggtgttttgggttaattgcttct

SEQ ID NO: 298021 - DNA, 120 bp, Artificial Sequence
  ENSG00000132464_0 (sequence is synthesized)
ctttttattttgagcctttttgatactgaacatgatatctgagtgaagaatttttgttttattattaagaaataaatgtatcttgcttcttgagatctccctggcttcagcaatttgtag

SEQ ID NO: 298022 - DNA, 120 bp, Artificial Sequence
  ENSG00000132464_1 (sequence is synthesized)
ttatttccactatagaccattaagaatatatttcaaaggcaagctaacaaagttcaagtaaaaattattttttatatattacagcttctaattggcattggtttcttctcaggttaaagc

SEQ ID NO: 298023 - DNA, 120 bp, Artificial Sequence
  ENSG00000132464_2 (sequence is synthesized)
tgtatttttcttaaaggcttataaaaattttgctgaaaaaaatgttggtgcttcggtgcaggcttggaacctcttttcctaaactagataacttggtaccaaaaggcaaaatgaagattc

SEQ ID NO: 298024 - DNA, 120 bp, Artificial Sequence
  ENSG00000132464_3 (sequence is synthesized)
tcctggtctttctagggcttcttggtaattctgttgctatgccaatgcacatgccccgaatgcctggatttagcagtaaaagtgaggagatgatgcggtataatcaattcaactttatga

SEQ ID NO: 298025 - DNA, 120 bp, Artificial Sequence
  ENSG00000132464_4 (sequence is synthesized)
acggcccacatatggcacacctggggcccttctttggaaacggtctccctcagcaatttccacagtaccagatgcccatgtggcctcagccaccacccaacacatggcatccacggaaat

SEQ ID NO: 298026 - DNA, 120 bp, Artificial Sequence
  ENSG00000132464_5 (sequence is synthesized)
cctcagcacccaaacgtcataacaagactgatcagacccaagaaacccagaaacccaaccagactcagtcaaaaaagccaccacaaaagcggcctttgaagcagccatcacataatcaac

SEQ ID NO: 298027 - DNA, 120 bp, Artificial Sequence
  ENSG00000132464_6 (sequence is synthesized)
ctcagcccgaagaggaagctcaaccccctcaggcattcccaccatttggaaatgggctattcccctatcaacaaccaccatggcaaattccacagaggttaccaccaccaggttatggac

SEQ ID NO: 298028 - DNA, 120 bp, Artificial Sequence
  ENSG00000132464_7 (sequence is synthesized)
gcccaccaatcagcaatgaagaaggggggaatccttactttggatattttggatatcatggctttgggggtcgccctccttattattcagaagaaatgtttgaacaagattttgaaaaac

SEQ ID NO: 298029 - DNA, 120 bp, Artificial Sequence
  ENSG00000132464_8 (sequence is synthesized)
ccaaagaagaagatcctcctaaagcagaaagtccaggcacagaacccacagctaattcaacagtcactgagacgaattctacccaaccaaatcctaaagggagtcagggaggaaatgaca

SEQ ID NO: 298030 - DNA, 120 bp, Artificial Sequence
  ENSG00000132464_9 (sequence is synthesized)
ccagccccacaggaaacagtaccccaggactaaacactgggaacaaccctccagctcaaaatgggattggcccactccctgcagtcaacgcttcaggccagggagggccaggaagtcaaa

SEQ ID NO: 298031 - DNA, 120 bp, Artificial Sequence
  ENSG00000132464_10 (sequence is synthesized)
tcccatggagaccaagtcagccaaatattcgtgaaaatcatccatatcctaatataagaaattttccttcaggaagacagtggtatttcactggtactgtcatggggcacagacagaata

SEQ ID NO: 298032 - DNA, 120 bp, Artificial Sequence
  ENSG00000132464_11 (sequence is synthesized)
ggcctttttacagaaatcaacaagttcaaaggggtcctcggtggaacttctttgcttgggaacgtaaacaagtagctcgtccaggaaatccagtttatcacaaagcttaccctcctactt

SEQ ID NO: 298033 - DNA, 120 bp, Artificial Sequence
  ENSG00000132464_12 (sequence is synthesized)
caagaggcaattatcccaattatgcaggaaatccagcaaatctcagaagaaagcctcaggggccaaataaacaccctgtaggaactactgttgccccactgggtcccaaacctggccctg

SEQ ID NO: 298034 - DNA, 120 bp, Artificial Sequence
  ENSG00000132464_13 (sequence is synthesized)
ttgttcgcaatgaaaaaatccaaaatccaaaggagaagcccctgggtccaaaagaacaaataatagttcctacaaagaatccaaccagcccctggagaaactctcaacagtatgaagtta

SEQ ID NO: 298035 - DNA, 120 bp, Artificial Sequence
  ENSG00000132464_14 (sequence is synthesized)
ataaatcaaattataaactgcctcactctgagggttatatgccagtcccaaattttaattctgttgatcaacatgaaaactcctattacccaagaggagattccagaaaagtcccaaatt

SEQ ID NO: 298036 - DNA, 120 bp, Artificial Sequence
  ENSG00000132464_15 (sequence is synthesized)
ctgatggacaaacccaaagccagaatttgcccaaagggattgttttagggtcaagaaggatgccatatgaatcagaaactaatcagtcagaattaaagcacagctcatatcagcctgctg

SEQ ID NO: 298037 - DNA, 120 bp, Artificial Sequence
  ENSG00000132464_16 (sequence is synthesized)
tataccctgaggaaatcccttctcctgcaaaagaacattttcctgctggaagaaatacttgggaccaccaagaaatctctccaccttttaaggaagatccagggaggcaagaagaacatt

SEQ ID NO: 298038 - DNA, 120 bp, Artificial Sequence
  ENSG00000132464_17 (sequence is synthesized)
taccccatccttcccatggttctagaggaagtgttttctaccctgaatataacccatatgatcccagggaaaactcaccataccttagaggcaatacatgggatgagagagatgattctc

SEQ ID NO: 298039 - DNA, 120 bp, Artificial Sequence
  ENSG00000132464_18 (sequence is synthesized)
ccaatactatggggcaaaaagaaagtccactctaccccataaataccccagaccagaaggagatagtcccttataatgaagaggacccagttgatccaactggagatgaagtctttcctg

SEQ ID NO: 298040 - DNA, 120 bp, Artificial Sequence
  ENSG00000132464_19 (sequence is synthesized)
gacaaaatagatggggtgaagagttgagcttcaaaggaggcccaacagttaggcactatgaaggtgaacaatatacctcaaatcagccaaaggaatatcttccctattctttagataatc

SEQ ID NO: 298041 - DNA, 120 bp, Artificial Sequence
  ENSG00000132464_20 (sequence is synthesized)
catcaaaaccaagggaggatttttattacagtgaattttacccatggagcccggatgagaattttccatcatataatacagcttctactatgccaccacctatagagagcaggggctact

SEQ ID NO: 298042 - DNA, 120 bp, Artificial Sequence
  ENSG00000132464_21 (sequence is synthesized)
acgttaataatgccgctggaccagaagaaagcactctatttccttcacggaattcctgggaccacaggatacaagcccaagggcagagagaaagaaggccgtattttaacagaaatatct

SEQ ID NO: 298043 - DNA, 120 bp, Artificial Sequence
  ENSG00000132464_22 (sequence is synthesized)
gggatcaggcaacacatttacaaaaagccccagctaggccaccagaccagaaaggtaaccagccctattacagtaacaccccagctgggcttcagaaaaatccaatatggcatgaaggtg

SEQ ID NO: 298044 - DNA, 120 bp, Artificial Sequence
  ENSG00000132464_23 (sequence is synthesized)
ctccagagagagaacattcatctttccctaacttcatcccaccaagttacccatcaggtcaaaaagaagcacatttatttcacctaagccagagaggctcttgctgtgctggtagctcca

SEQ ID NO: 298045 - DNA, 120 bp, Artificial Sequence
  ENSG00000132464_24 (sequence is synthesized)
cagggcccaaggacaatccactagctctacaagactacactccatcctatggtcttgcacctggggagaaccaagacaccagtcctctgtatacagacggtagtcataccaagcagacaa

SEQ ID NO: 298046 - DNA, 120 bp, Artificial Sequence
  ENSG00000132464_25 (sequence is synthesized)
gagatatcatctccccaacaagcatcctaccaggccaaagaaacagctcagagaagagggaaagccaaaacccttttagagatgatgtgtccacgctgaggaggaacacaccatgttcta

SEQ ID NO: 298047 - DNA, 120 bp, Artificial Sequence
  ENSG00000132464_26 (sequence is synthesized)
taaagaatcaactgggccaaaaggaaattatgccctttcctgaagccagttcccttcaatcaaagaatacaccttgtctcaaaaatgatcttggaggagatgggaacaacattctggaac

SEQ ID NO: 298048 - DNA, 120 bp, Artificial Sequence
  ENSG00000132464_27 (sequence is synthesized)
aagtttttgaagacaaccagctcaatgaaagaactgttgaccttactcctgagcagcttgttattggtacacctgatgaaggctccaatccagaaggcatccaaagtcaagtccaagaaa

SEQ ID NO: 298049 - DNA, 120 bp, Artificial Sequence
  ENSG00000132464_28 (sequence is synthesized)
atgagagtgagaggcaacagcaaagaccatctaacattctgcatttgccatgctttggctccaaattagcaaagcatcactcttccaccaccggaactccatctagcgatggaaggcaaa

SEQ ID NO: 298050 - DNA, 120 bp, Artificial Sequence
  ENSG00000132464_29 (sequence is synthesized)
gcccatttgatggggattcaattacgcctactgaaaatcctaacacattggttgagttagctactgaggaacaatttaagagtataaatgtagacccacttgatgcagatgaacacagtc

SEQ ID NO: 298051 - DNA, 120 bp, Artificial Sequence
  ENSG00000132464_30 (sequence is synthesized)
catttgaattccttcaaagagggaccaatgtacaggaccaggtacaagactgcttactacttcaggcctaggggttatccaaccaagcattcttggggaaagagaaatcactgacattct

SEQ ID NO: 298052 - DNA, 120 bp, Artificial Sequence
  ENSG00000132464_31 (sequence is synthesized)
ataccaatggttcccaaaattttttccccaagacttaattaagtgtctgactgtcttggtgatccttaagttttctcccctctcagcaataggagtagcgacccaggtggagctgagatt

SEQ ID NO: 298053 - DNA, 120 bp, Artificial Sequence
  ENSG00000132464_32 (sequence is synthesized)
aggcctctggggatcaccagatctagcactttcacagattagtgcagaccttaaaaaagcaagaaggccatgaccatccctgcctcgaaacttgcaagtcacttgtctgagttagtttcc

SEQ ID NO: 298054 - DNA, 120 bp, Artificial Sequence
  ENSG00000132464_33 (sequence is synthesized)
ttttgcttgatgacttcttttgctctcaaagttccatacttgcaaaattggtttttcaagactgaaaggcagattaactttccattctacttatggagatccacacatcagtatagtcct

SEQ ID NO: 298055 - DNA, 120 bp, Artificial Sequence
  ENSG00000132464_34 (sequence is synthesized)
gatgcactgtacgttttttgcttgtgttgatcttgtcaggtttttttcctactcaatattctcttcaagcattttttttcttccactgccactctctttacctttatcatttctttttct

SEQ ID NO: 298056 - DNA, 120 bp, Artificial Sequence
  ENSG00000132464_35 (sequence is synthesized)
tagctttcttccttcttttctctctccctcaaccattctgtatttagctttctaatcctcatctttttctctctgtatatcacttcttacatattaaattagctattttaaccatttcta

SEQ ID NO: 298057 - DNA, 120 bp, Artificial Sequence
  ENSG00000132464_36 (sequence is synthesized)
gtctcttctttatgtctacctcctccattatgtcttcgtctcttccaacctatctgttctgtctcccaatgtaccacttatcaactaatccctctcctctctgattcctttcttcccttc

SEQ ID NO: 298058 - DNA, 120 bp, Artificial Sequence
  ENSG00000132464_37 (sequence is synthesized)
aatttatctttttccctgttacaccattttcatcttaagactgcatgtcactctcttcctttttgtatccactctccaaatcgtaccctaaatttttcttgacccagcttaaccatcatt

SEQ ID NO: 298059 - DNA, 120 bp, Artificial Sequence
  ENSG00000132464_38 (sequence is synthesized)
acagaatatattttggaaatggtagacactgatagctactttgtttttagttatcttagggtctctaccaagtagacacagttcagttagagagacgtatttaaggagaagggaaggcag

SEQ ID NO: 298060 - DNA, 120 bp, Artificial Sequence
  ENSG00000132464_39 (sequence is synthesized)
gatacccagaactagcagcctagggaaaaggcttaggaagatggagaatgaggaactgaagaaactgccgctctgagactgcacatccaggaaaaaagactaggacttgccacacactgc

SEQ ID NO: 298061 - DNA, 120 bp, Artificial Sequence
  ENSG00000132464_40 (sequence is synthesized)
caattcataatccgcaggatctgtagaagacattttgggaaacactgtcttaaataaaaactcaatgtttagttgtttttttttttttttactagttcagcataagggattctaccagta

SEQ ID NO: 298062 - DNA, 120 bp, Artificial Sequence
  ENSG00000132464_41 (sequence is synthesized)
tgtgctactactaacattcttcatgtccatgcagaattacttacagacactctttcttggtatcttgaataaattgtgtaaattattttgaaaagtggatatttctatatgccttgctta

SEQ ID NO: 298063 - DNA, 120 bp, Artificial Sequence
  ENSG00000132464_42 (sequence is synthesized)
taatacatcagggattattattcttattaataacatgttggcctattatctggatgtcccttgcctagagcaggaaaaaagtctcagaattacctaaaaacatactttataactttaaga

SEQ ID NO: 298064 - DNA, 120 bp, Artificial Sequence
  ENSG00000132464_43 (sequence is synthesized)
gatttcttaggatacatcttcaggggcagatttcataacaacatctcaaaaatttggggaaacacaacgttgaaaacttcctaagaaaaggaatcttgcccttgaatcttctgaagtacc

SEQ ID NO: 298065 - DNA, 120 bp, Artificial Sequence
  ENSG00000132464_44 (sequence is synthesized)
tagcacagtgtcttcaacatagaaggtacccaataaatatatatcaattcattttttaatgactttcaacactcccatgaaaacaccgtagtctgcttttcctgaaaggtgactgtctag

SEQ ID NO: 298066 - DNA, 120 bp, Artificial Sequence
  ENSG00000132464_45 (sequence is synthesized)
gatgctgaatgagccaccactccgtagctttatatattcagcaacatttccatcatagaatttcagcgttagaagggatcttagaggtagattatccaggccatcccctactgcttacat

SEQ ID NO: 298067 - DNA, 120 bp, Artificial Sequence
  ENSG00000132464_46 (sequence is synthesized)
tcccctccccctggccagttttatattttaatcacacattgaaaaattcattaacttattctgtataaaactgtcttttaagaattatcctttcaaaataaaaatgttattgtttcacta

SEQ ID NO: 298068 - DNA, 120 bp, Artificial Sequence
  ENSG00000132464_47 (sequence is synthesized)
aaaagctcagagtactaactgagctcaatcattgacttgagctatttttagacaccctgagtcttacaaacaaatggcggcatcgaacgtggttttctcctgtgttcactgtgtttttca

SEQ ID NO: 298069 - DNA, 120 bp, Artificial Sequence
  ENSG00000132465_0 (sequence is synthesized)
agaagaagtgaagtcaagatgaagaaccatttgcttttctggggagtcctggcggtttttattaaggctgttcatgtgaaagcccaagaagatgaaaggattgttcttgttgacaacaaa

SEQ ID NO: 298070 - DNA, 120 bp, Artificial Sequence
  ENSG00000132465_1 (sequence is synthesized)
tgtaagtgtgcccggattacttccaggatcatccgttcttccgaagatcctaatgaggacattgtggagagaaacatccgaattattgttcctctgaacaacagggagaatatctctgat

SEQ ID NO: 298071 - DNA, 120 bp, Artificial Sequence
  ENSG00000132465_2 (sequence is synthesized)
cccacctcaccattgagaaccagatttgtgtaccatttgtctgacctctgtaaaaaatgtgatcctacagaagtggagctggataatcagatagttactgctacccagagcaatatctgt

SEQ ID NO: 298072 - DNA, 120 bp, Artificial Sequence
  ENSG00000132465_3 (sequence is synthesized)
gatgaagacagtgctacagagacctgctacacttatgacagaaacaagtgctacacagctgtggtcccactcgtatatggtggtgagaccaaaatggtggaaacagccttaaccccagat

SEQ ID NO: 298073 - DNA, 120 bp, Artificial Sequence
  ENSG00000132465_4 (sequence is synthesized)
gcctgctatcctgactaatttaagtcattgctgactgcatagctctttttcttgagaggctctccattttgattcagaaagttagcatatttattaccaatgaatttgaaaccagggctt

SEQ ID NO: 298074 - DNA, 120 bp, Artificial Sequence
  ENSG00000132465_5 (sequence is synthesized)
ttcttaattatatgttcatactctaagtatcaaaatcttccaattatcatgctcacctgaaagaggtatgctctcttaggaatacagtttctagcattaaacaaataaacaaggggagaa

SEQ ID NO: 298075 - DNA, 120 bp, Artificial Sequence
  ENSG00000132465_6 (sequence is synthesized)
aataaaactcaaggactgaaaatcaggaggtgtaataaaatgttcctcgcattcccccccgcttttttttttttttttgactttgccttggagagccagagcttccgcattttctttact

SEQ ID NO: 298076 - DNA, 120 bp, Artificial Sequence
  ENSG00000132465_7 (sequence is synthesized)
attctttttaaaaaaagtttcactgtgtagagaacatatatgcataaacataggtcaattatatgtctccattagaaaaataataattggaaaacatgttctagaactagttacaaaaat

SEQ ID NO: 298077 - DNA, 120 bp, Artificial Sequence
  ENSG00000132465_8 (sequence is synthesized)
aatttaaggtgaaatctctaatatttataaaagtagcaaaataaatgcataattaaaatatatttggacataacagacttggaagcagatgatacagacttctttttttcataatcaggt

SEQ ID NO: 298078 - DNA, 120 bp, Artificial Sequence
  ENSG00000132465_9 (sequence is synthesized)
tagtgtaagaaattgccatttgaaacaatccattttgtaactgaaccttatgaaatatatgtatttcatggtacgtattctctagcacagtctgagcaattaaatagattcataagcata

SEQ ID NO: 298079 - DNA, 120 bp, Artificial Sequence
  ENSG00000132465_10 (sequence is synthesized)
gggaccttaaaggactttcatttctctccccttccttcatctctcctccttcacttaccttcatttattattctaggcatgacaagtgtcagatgtctgatttgaagactaatatgaata

SEQ ID NO: 298080 - DNA, 120 bp, Artificial Sequence
  ENSG00000132465_11 (sequence is synthesized)
ttgtgattgtttttagtttgttagctgcctggagtgttattttaagaaagcagaagcaccatcatttgcacactccttatagatcacacaccttaaccctgactttttttgctccagttt

SEQ ID NO: 298081 - DNA, 120 bp, Artificial Sequence
  ENSG00000132465_12 (sequence is synthesized)
tttttgctccagtttttcagaagaagtgaagtcaagatgaagaaccatttgcttttctggggagtcctggcggtttttattaaggctgttcatgtgaaaggttcaagagattcttctgcc

SEQ ID NO: 298082 - DNA, 120 bp, Artificial Sequence
  ENSG00000132466_0 (sequence is synthesized)
agtagaggtgaccgaggcggtggcggcggaggcggcaccgattgctgtgtcggccccagtgcggccgaagtcgcggtagagcgtagccccacgcccctcccccgtccgcgccctccctct

SEQ ID NO: 298083 - DNA, 120 bp, Artificial Sequence
  ENSG00000132466_1 (sequence is synthesized)
ctctttccctggggatggagaaggcgacggttccggtggcggcggcgacggctgcagaaggagaagggagccccccggcggtggcggctgtggcgggcccccccgcggcggcggaggtcg

SEQ ID NO: 298084 - DNA, 120 bp, Artificial Sequence
  ENSG00000132466_2 (sequence is synthesized)
cggcgttggcggcagcagcagagctcgctcggcctcgtctcctcgtgggatggtgcgagtctgcgacctgctcctgaagaagaagccgccgcagcagcagcaccacaaggccaagcgtaa

SEQ ID NO: 298085 - DNA, 120 bp, Artificial Sequence
  ENSG00000132466_3 (sequence is synthesized)
ccggacttgccgaccccccagcagcagcgaaagcagcagcgacagcgacaacagcggcggcggtggaggcggcggtggaggcggaggtggcggcggcggcaccagcagtaacaacagcga

SEQ ID NO: 298086 - DNA, 120 bp, Artificial Sequence
  ENSG00000132466_4 (sequence is synthesized)
ggaagaagaggacgacgacgacgaggaagaggaggtttctgaggtggagtctttcattttggatcaggatgatttggaaaatccaatgctggaaacagcttccaagttgctcttatcagg

SEQ ID NO: 298087 - DNA, 120 bp, Artificial Sequence
  ENSG00000132466_5 (sequence is synthesized)
tactgctgatggtgcagacctcaggacagtagatccagaaacacaggctagactggaagctttactagaagctgcaggaataggaaaattgtccacggctgatggtaaagcctttgcaga

SEQ ID NO: 298088 - DNA, 120 bp, Artificial Sequence
  ENSG00000132466_6 (sequence is synthesized)
tcctgaagtacttcggaggttgacatcgtctgttagttgtgcgttggatgaagctgctgctgcacttacccgtatgagagctgaaagcacagcaaatgcagggcagtcggacaaccgcag

SEQ ID NO: 298089 - DNA, 120 bp, Artificial Sequence
  ENSG00000132466_7 (sequence is synthesized)
tttggcagaagcctgttcagaaggagatgtaaatgctgtgcgaaagttactcattgaagggcgaagtgtaaatgaacacacagaggaaggggagagcctcctttgtttagcttgttctgc

SEQ ID NO: 298090 - DNA, 120 bp, Artificial Sequence
  ENSG00000132466_8 (sequence is synthesized)
tggatactatgagcttgcacaggttttgttggcaatgcatgcaaatgtggaagataggggaatcaaaggtgacattacacctttaatggctgctgctaatggaggacatgtcaaaattgt

SEQ ID NO: 298091 - DNA, 120 bp, Artificial Sequence
  ENSG00000132466_9 (sequence is synthesized)
gaagttgctgctagctcataaagcagatgttaatgcacagtcttcaacaggcaatacagcacttacatatgcttgtgctggaggctatgtagatgttgtaaaggtgctcttggaatccgg

SEQ ID NO: 298092 - DNA, 120 bp, Artificial Sequence
  ENSG00000132466_10 (sequence is synthesized)
tgctagtattgaggaccataatgaaaatggtcatacccctcttatggaagctggaagtgctggacatgtggaagtagccagattgctgctagaaaatggggctggcattaatacgcattc

SEQ ID NO: 298093 - DNA, 120 bp, Artificial Sequence
  ENSG00000132466_11 (sequence is synthesized)
taatgaatttaaagagagtgcccttaccttagcttgttacaaaggacacttagagatggtgcgatttcttttggaagcaggcgcggatcaagagcataaaacagatgaaatgcacactgc

SEQ ID NO: 298094 - DNA, 120 bp, Artificial Sequence
  ENSG00000132466_12 (sequence is synthesized)
tctgatggaggcttgcatggatggccatgttgaagtagctaggttacttcttgacagcggtgcccaagtgaacatgcctgctgattcatttgagtcaccattaactttggctgcatgtgg

SEQ ID NO: 298095 - DNA, 120 bp, Artificial Sequence
  ENSG00000132466_13 (sequence is synthesized)
tgggcatgtggaacttgcggctttacttattgaaagaggagctagcctggaagaggtcaatgatgaaggttatacaccattgatggaagcagctcgagaaggacatgaagaaatggtggc

SEQ ID NO: 298096 - DNA, 120 bp, Artificial Sequence
  ENSG00000132466_14 (sequence is synthesized)
attacttcttggtcaaggagcaaatatcaatgcacagacagaagaaactcaagaaactgccttgactctggcttgctgtggaggctttctggaagtggcagactttctaattaaggcagg

SEQ ID NO: 298097 - DNA, 120 bp, Artificial Sequence
  ENSG00000132466_15 (sequence is synthesized)
agccgatatagaactagggtgttctacccctttaatggaagctgctcaagagggtcatttggagttagttaaatacttattagctgcaggagctaacgttcatgcaacaacagcaacagg

SEQ ID NO: 298098 - DNA, 120 bp, Artificial Sequence
  ENSG00000132466_16 (sequence is synthesized)
ggatacagcactaacatatgcctgtgaaaatggtcatactgatgtagcagatgtcttacttcaggcaggcgcagatctggaacatgaatctgaaggtggaagaactcctttaatgaaagc

SEQ ID NO: 298099 - DNA, 120 bp, Artificial Sequence
  ENSG00000132466_17 (sequence is synthesized)
tgcaagagctggtcatgtttgtactgttcagttcttaattagtaaaggagcgaatgtgaatagaaccacagctaataatgaccatactgtactgtccctggcttgtgcagggggtcatct

SEQ ID NO: 298100 - DNA, 120 bp, Artificial Sequence
  ENSG00000132466_18 (sequence is synthesized)
ggcagtggtggaactacttttggctcatggggcagatcctactcaccgtttgaaagatggctcaactatgttgatagaagcagcaaaaggtggccatacaagtgttgtttgctatctctt

SEQ ID NO: 298101 - DNA, 120 bp, Artificial Sequence
  ENSG00000132466_19 (sequence is synthesized)
ggattatcctaataacttgctttcagcccctccaccagatgtcactcagttaactcccccatcccacgatttaaatagggctcctcgtgtaccagttcaagcactgcccatggttgttcc

SEQ ID NO: 298102 - DNA, 120 bp, Artificial Sequence
  ENSG00000132466_20 (sequence is synthesized)
acctcaggagcctgacaaaccacctgccaatgttgccaccactcttcccatcaggaataaagctgcttctaaacaaaagtccagcagccatttgccagcaaacagccaggatgtacaggg

SEQ ID NO: 298103 - DNA, 120 bp, Artificial Sequence
  ENSG00000132466_21 (sequence is synthesized)
ttacatcaccaatcagtctccagagagcattgtagaagaggctcagggaaagttaacagaactggaacagaggataaaagaagccatagaaaagaatgcacagctgcagtccttggaact

SEQ ID NO: 298104 - DNA, 120 bp, Artificial Sequence
  ENSG00000132466_22 (sequence is synthesized)
ggctcatgctgaccaacttaccaaggagaagatcgaggagctcaacaaaacaagggaggaacaaattcagaagaaacaaaagattttggaggaactacagaaagtagaacgagagttaca

SEQ ID NO: 298105 - DNA, 120 bp, Artificial Sequence
  ENSG00000132466_23 (sequence is synthesized)
actgaaaactcagcagcagctaaaaaagcagtatctagaggttaaagctcaaagaattcaacttcagcaacagcagcaacagtcttgccaacacctgggattactaactcctgttggagt

SEQ ID NO: 298106 - DNA, 120 bp, Artificial Sequence
  ENSG00000132466_24 (sequence is synthesized)
tggagagcagctttctgagggagactatgcacggttacagcaagtggatcctgttttacttaaagatgaaccccagcagactgctgctcagatgggttttgcgccaatccagcctctggc

SEQ ID NO: 298107 - DNA, 120 bp, Artificial Sequence
  ENSG00000132466_25 (sequence is synthesized)
gatgcctcaagctttgcctctggcggcaggtcccttgcctccagggtccatcgcaaatcttacagaactgcaaggagtgatagttggacagccagtactgggccaagcacagttggcagg

SEQ ID NO: 298108 - DNA, 120 bp, Artificial Sequence
  ENSG00000132466_26 (sequence is synthesized)
gctggggcaaggaattctgacagaaacacaacaagggttaatggtagccagccctgctcagaccctcaatgacacgctggatgacatcatggcagcagtcagtggaagagcatctgcaat

SEQ ID NO: 298109 - DNA, 120 bp, Artificial Sequence
  ENSG00000132466_27 (sequence is synthesized)
gtcaaacactcctacccacagtattgctgcatccatttcccaacctcagactccaactccaagtcctatcatctctccttcagccatgcttcctatctaccctgccattgatattgatgc

SEQ ID NO: 298110 - DNA, 120 bp, Artificial Sequence
  ENSG00000132466_28 (sequence is synthesized)
acagactgagagtaatcatgacacggcactaacacttgcctgtgctggtggccacgaggaactggtacaaacactgctagagagaggagctagtatagagcaccgagacaagaaaggttt

SEQ ID NO: 298111 - DNA, 120 bp, Artificial Sequence
  ENSG00000132466_29 (sequence is synthesized)
tactccactcatcttggctgccacagctggtcatgttggtgttgtggaaatattgctggacaatggtgcagacattgaagcccagtctgaaagaaccaaggacacaccactctccttggc

SEQ ID NO: 298112 - DNA, 120 bp, Artificial Sequence
  ENSG00000132466_30 (sequence is synthesized)
ttgttctgggggaagacaggaggtggtggagctattgttagctcgaggggcaaataaagagcacaggaatgtttctgattacacacctctaagtctggctgcttctggtggctatgtgaa

SEQ ID NO: 298113 - DNA, 120 bp, Artificial Sequence
  ENSG00000132466_31 (sequence is synthesized)
catcatcaaaatattactaaatgcaggagctgagattaactctagaactggtagcaaattgggcatctctcctctgatgttagcagctatgaatgggcatacagctgctgttaagctcct

SEQ ID NO: 298114 - DNA, 120 bp, Artificial Sequence
  ENSG00000132466_32 (sequence is synthesized)
gttagacatgggctctgacataaatgctcagatagaaaccaatcggaacactgcccttactttagcctgcttccaaggaagaactgaagtggttagtcttctgcttgatagaaaagcaaa

SEQ ID NO: 298115 - DNA, 120 bp, Artificial Sequence
  ENSG00000132466_33 (sequence is synthesized)
tgttgaacacagagctaagactggtctcacaccactaatggaagctgcctctggtggatatgcggaggtgggccgagttcttttggataaaggtgctgatgttaatgcccctccagttcc

SEQ ID NO: 298116 - DNA, 120 bp, Artificial Sequence
  ENSG00000132466_34 (sequence is synthesized)
ctcctcaagagatacagctttaaccatagcagcagataaagggcattacaaattctgtgagcttcttattggcaggggagctcatattgatgtacgtaacaagaaggggaacactccatt

SEQ ID NO: 298117 - DNA, 120 bp, Artificial Sequence
  ENSG00000132466_35 (sequence is synthesized)
gtggctagcagcaaatggtggacacctcgatgtggttcagttactggtgcaagcaggtgcagatgtggatgcagcagataaccgcaagataactcctcttatggcagcatttagaaaggg

SEQ ID NO: 298118 - DNA, 120 bp, Artificial Sequence
  ENSG00000132466_36 (sequence is synthesized)
tcatgtgaaggtggtgcgctacttagtcaaagaagtcaatcagtttccatcagattctgaatgtatgagatacatagcaaccatcactgataaggagatgctgaagaagtgtcatctttg

SEQ ID NO: 298119 - DNA, 120 bp, Artificial Sequence
  ENSG00000132466_37 (sequence is synthesized)
tatggagtcaatagtacaagccaaagatagacaggctgctgaagcaaacaaaaacgccagcattttgttagaggagttagacttggaaaagttaagggaagaaagtcggaggctggcttt

SEQ ID NO: 298120 - DNA, 120 bp, Artificial Sequence
  ENSG00000132466_38 (sequence is synthesized)
ggctgcgaaaagagaaaaaagaaaagagaagagaaggaagaaaaaggaagaacaaagaaggaaactagaagaaattgaagccaaaaataaagagaactttgaactccaagctgctcaaga

SEQ ID NO: 298121 - DNA, 120 bp, Artificial Sequence
  ENSG00000132466_39 (sequence is synthesized)
aaaagaaaagcttaaagttgaagatgagcctgaagtcttgacagaacctccaagtgccacaaccactactaccataggtatatctgcaacctggacaactttggcaggttctcatggtaa

SEQ ID NO: 298122 - DNA, 120 bp, Artificial Sequence
  ENSG00000132466_40 (sequence is synthesized)
aagaaataataccataactacaaccagttcaaagaggaaaaacaggaaaaataaaattactccagaaaacgttcaaattatatttgatgatccactaccaatttcatacagtcagccaga

SEQ ID NO: 298123 - DNA, 120 bp, Artificial Sequence
  ENSG00000132466_41 (sequence is synthesized)
gaaggtgaatggagagtccaagagcagcagtaccagcgagagtggggacagtgataacatgaggatttccagctgcagcgatgaaagtagtaacagcaacagcagtcgtaagagtgacaa

SEQ ID NO: 298124 - DNA, 120 bp, Artificial Sequence
  ENSG00000132466_42 (sequence is synthesized)
tcattcaccagctgtggtcactaccactgtgagcagcaaaaagcagccatcagttcttgttacatttccaaaggaagagagaaaatctgtttctggcaaggcttcaataaaattgtcaga

SEQ ID NO: 298125 - DNA, 120 bp, Artificial Sequence
  ENSG00000132466_43 (sequence is synthesized)
aactatcagtgaagggaccagtaattctctatctacttgtacaaaatctggtccatctcccctttcttctccaaatgggaagttaacagtagcaagtcctaagcgtgggcaaaagaggga

SEQ ID NO: 298126 - DNA, 120 bp, Artificial Sequence
  ENSG00000132466_44 (sequence is synthesized)
tgcacacatagatattgataaacagaaagacaagactggagaccggataatcactataaggggtggcactgaatcaacaagacaagcaactcaattgattaatgctttgatcaaggatcc

SEQ ID NO: 298127 - DNA, 120 bp, Artificial Sequence
  ENSG00000132466_45 (sequence is synthesized)
agacaaagaaattgatgaacttattccaaagaatcgtttgaaaagctcctcagcaaattccaaaatagggtcatcagcacctaccaccactgctgctaacacttccttaatgggaattaa

SEQ ID NO: 298128 - DNA, 120 bp, Artificial Sequence
  ENSG00000132466_46 (sequence is synthesized)
aatgacaactgtagctctgtcatcaacatctcaaactgccacagcactcactgtgcctgcaatttcttctgcatccactcacaaaaccattaagaacccagtgaataatgtgaggcctgg

SEQ ID NO: 298129 - DNA, 120 bp, Artificial Sequence
  ENSG00000132466_47 (sequence is synthesized)
ttttccagtttctcttccattagcatatcctcctccacagtttgcacatgctttgcttgctgctcagactttccagcagatccgtccaccaaggttgcccatgacccactttggaggtac

SEQ ID NO: 298130 - DNA, 120 bp, Artificial Sequence
  ENSG00000132466_48 (sequence is synthesized)
ttttccaccagctcaatccacttggggtccgtttcctgtcaggcctttgagccctgccagagctactaactcgcctaagcctcacatggtgcctcgccatagcaatcagaatagcagtgg

SEQ ID NO: 298131 - DNA, 120 bp, Artificial Sequence
  ENSG00000132466_49 (sequence is synthesized)
ttctcaggtgaattcagcaggttctttaacttcaagcccaacaactacaaccagttcatcagcttcaacggtgcctggtacatctacaaatggcagtccaagttcaccttctgtccgaag

SEQ ID NO: 298132 - DNA, 120 bp, Artificial Sequence
  ENSG00000132466_50 (sequence is synthesized)
gcagctttttgtcacagttgtgaagacatccaatgccaccacaacaacagtcacaaccacggcaagcaacaacaacactgcacccacaaatgccacatatcctatgcctactgccaaaga

SEQ ID NO: 298133 - DNA, 120 bp, Artificial Sequence
  ENSG00000132466_51 (sequence is synthesized)
acactatccagtatcatccccatcttccccatcaccaccagcccagccaggaggggtttctagaaacagccctttggattgtggatcagcatctccaaataaagtggcatcttcctccga

SEQ ID NO: 298134 - DNA, 120 bp, Artificial Sequence
  ENSG00000132466_52 (sequence is synthesized)
acaggaagcaggtagtccaccagtagtagaaacaacaaacactagacctccaaacagcagcagttcttctgggagttcatcagctcattctaatcagcaacaacctccgggatctgtttc

SEQ ID NO: 298135 - DNA, 120 bp, Artificial Sequence
  ENSG00000132466_53 (sequence is synthesized)
tcaggaaccaagaccacctcttcagcagtctcaggttcctcccccggaagttagaatgactgttcctcctttagcaacaagttctgctccagtggcggtgccttctactgccccagtgac

SEQ ID NO: 298136 - DNA, 120 bp, Artificial Sequence
  ENSG00000132466_54 (sequence is synthesized)
ttaccctatgcctcagacaccaatgggatgcccccagcctactcctaaaatggaaacccctgctattagaccaccccctcatggcacaactgcccctcacaagaattcagcttcagtgca

SEQ ID NO: 298137 - DNA, 120 bp, Artificial Sequence
  ENSG00000132466_55 (sequence is synthesized)
aaattcatctgttgcagtcctcagtgtcaatcacattaaaagacctcacagtgttccctcttctgtccagctaccttcgaccttaagtacacaaagtgcttgtcagaattcagtacatcc

SEQ ID NO: 298138 - DNA, 120 bp, Artificial Sequence
  ENSG00000132466_56 (sequence is synthesized)
agcaaataagcctattgctcccaatttcagtgcccccttaccatttgggccctttagcacattgtttgaaaacagccctacttctgctcatgccttctggggaggatctgttgtttcatc

SEQ ID NO: 298139 - DNA, 120 bp, Artificial Sequence
  ENSG00000132466_57 (sequence is synthesized)
tcagtcaacaccagaatctatgctatcaggaaaatcctcatatttgccaaattcagatcctttacatcagtctgatacttccaaagctccaggttttagaccaccattacagagacctgc

SEQ ID NO: 298140 - DNA, 120 bp, Artificial Sequence
  ENSG00000132466_58 (sequence is synthesized)
tccaagtccctcaggtattgtcaatatggactcgccatatggttctgtaacaccttcttcaacacatttgggaaactttgcttcaaacatttcaggaggtcagatgtacggacctggggc

SEQ ID NO: 298141 - DNA, 120 bp, Artificial Sequence
  ENSG00000132466_59 (sequence is synthesized)
accccttggaggagcacccgcagctgctaactttaacagacaacatttttccccgcttagtttgttgactccgtgttcatcagcatcaaatgattcttctgcacagtcagtatcctcggg

SEQ ID NO: 298142 - DNA, 120 bp, Artificial Sequence
  ENSG00000132466_60 (sequence is synthesized)
agttcgtgcaccatctcctgccccatcatcagtaccgttagggtcagaaaagcccagcaatgtgtctcaggacaggaaagttccagtccctattgggactgaacgttctgcacgtatcag

SEQ ID NO: 298143 - DNA, 120 bp, Artificial Sequence
  ENSG00000132466_61 (sequence is synthesized)
gcaaactggaacgtcagctccatctgttattgggagcaatttgtctacatcagtaggacatagtggcatctggtcctttgaagggattggtggcaatcaagacaaagtagactggtgtaa

SEQ ID NO: 298144 - DNA, 120 bp, Artificial Sequence
  ENSG00000132466_62 (sequence is synthesized)
ccctgggatgggaaatcctatgatccacagaccgatgtctgacccaggagtattttcacaacatcaagcaatggagcgagatagtacaggaattgtaactccttctggtacattccatca

SEQ ID NO: 298145 - DNA, 120 bp, Artificial Sequence
  ENSG00000132466_63 (sequence is synthesized)
gcatgttcctgcaggctacatggactttcctaaagttgggggtatgcctttttctgtgtatgggaatgcaatgattcctccagtagcacctatccctgatggtgctggaggacccatatt

SEQ ID NO: 298146 - DNA, 120 bp, Artificial Sequence
  ENSG00000132466_64 (sequence is synthesized)
taatggccctcatgctgcagacccttcttggaactcactgataaagatggtttccagctccacggaaaataatggccctcaaacggtgtggactggaccctgggcacctcacatgaacag

SEQ ID NO: 298147 - DNA, 120 bp, Artificial Sequence
  ENSG00000132466_65 (sequence is synthesized)
tgtgcatatgaaccagcttggctgatgaggatcagcttgttagcctgcagattccttttcatttggaggaaatcacaagtggccgaaaaaaaaaattatgctcccaaatcattctactga

SEQ ID NO: 298148 - DNA, 120 bp, Artificial Sequence
  ENSG00000132466_66 (sequence is synthesized)
tgtgcttgactgaagtgtgtaggctttttgcagaagatcttactaactgacctattttctgtgaacatttgtgactgcccattccccatcatcatccgttttaccttagttagcattttt

SEQ ID NO: 298149 - DNA, 120 bp, Artificial Sequence
  ENSG00000132466_67 (sequence is synthesized)
cttatcatttttctttttttctttccctcttcccctttggacataactttctgttgaagctgttctttggctggttggttttagtactgtaaactgcttctgagcaaacacggaaattta

SEQ ID NO: 298150 - DNA, 120 bp, Artificial Sequence
  ENSG00000132466_68 (sequence is synthesized)
gcaaaattatgtaaacttgatcctgaagttttagaatggcaaataaatgtacaattgtttacataacagaaaaggctaagcagaaagtaaatttcaatatgtcagtatagaggctctact

SEQ ID NO: 298151 - DNA, 120 bp, Artificial Sequence
  ENSG00000132466_69 (sequence is synthesized)
ttatgtagacttaaattaatgtgagatatgtaccttcatattcagaaatctggatgtttccttcatacattaaactattaataagcataacttttctactggtgtaatttaagtataaag

SEQ ID NO: 298152 - DNA, 120 bp, Artificial Sequence
  ENSG00000132466_70 (sequence is synthesized)
taaaataatgggcattatcattggatgtttccccacattggcttttaaaatacccatcttgctttctttttggtttatttgtagcaaggcacatatagaagaagaaatttctggcttttc

SEQ ID NO: 298153 - DNA, 120 bp, Artificial Sequence
  ENSG00000132466_71 (sequence is synthesized)
catgttgttttattaccttttctcacttttaaaactaatacagacttatctcctcactcctttttctctccttacctttaccactaataccagtaaaattatctttctgatagtgaaaag

SEQ ID NO: 298154 - DNA, 120 bp, Artificial Sequence
  ENSG00000132466_72 (sequence is synthesized)
gttctgtcaagattttcactgtaatggctgctacagagatggaccatcttcatcatcaccagtggtttcttctaattataaaatgtttaaactttctgagaatttaaaaagccaccactg

SEQ ID NO: 298155 - DNA, 120 bp, Artificial Sequence
  ENSG00000132466_73 (sequence is synthesized)
ttcccagtcagcatatacaagctcttaatattctgtttattaaataattcaatgtactattttatattggatgatattgattcttaacattggcttttcagtcatcaacagtcaacataa

SEQ ID NO: 298156 - DNA, 120 bp, Artificial Sequence
  ENSG00000132466_74 (sequence is synthesized)
aaatttcaattttcagtaatttagtggaaaatatcttatttcttttttcaattttaaaggcttcctgcttttttacccttgtatattatcagtgaaaaggatcaacagttaatttgagcc

SEQ ID NO: 298157 - DNA, 120 bp, Artificial Sequence
  ENSG00000132466_75 (sequence is synthesized)
aagtaataaaagaaattctgcatttgtcacgaagacaatttatggtagacagataaatacacagattacagtgtaaagtctccatttaacctgtttataaaagatacaaggccacactaa

SEQ ID NO: 298158 - DNA, 120 bp, Artificial Sequence
  ENSG00000132466_76 (sequence is synthesized)
actactcagtgggatttatatattccatccacttgaaacaataaacagtaatgtatccaagaagattatgtgtcctaccctgtctcatggaaaaattaattatatggttgaaatgtaaaa

SEQ ID NO: 298159 - DNA, 120 bp, Artificial Sequence
  ENSG00000132466_77 (sequence is synthesized)
gtaagcataaaaatcgagtaatgtatatatcaatttgtcttctttttttttaattagacataaaatttcacactggtaaaacataaaaactaactaaaattcatataaatcacctagagt

SEQ ID NO: 298160 - DNA, 120 bp, Artificial Sequence
  ENSG00000132466_78 (sequence is synthesized)
gagttgatgatattaacatggttccttggttgtcaagtaaatcaaatgatttcttccatctgagtaaagagtaaagcctgagtaaagagtaaaaagatgacttctcaaacatatccagaa

SEQ ID NO: 298161 - DNA, 120 bp, Artificial Sequence
  ENSG00000132466_79 (sequence is synthesized)
atttgtaaacagtacactcatatcttttagtttaagaagtggtcttaaaatatataaatttgtttttccacctatgtttaatatgcccaaatttaaagggagagctaaaagacagcctac

SEQ ID NO: 298162 - DNA, 120 bp, Artificial Sequence
  ENSG00000132466_80 (sequence is synthesized)
cagcctacaaataaatatagctatgaaataaaattatagcactttactaaaaaagggatgtaataatgttatttaacgaagtattttatatatgacttgccactattctatacataaaat

SEQ ID NO: 298163 - DNA, 120 bp, Artificial Sequence
  ENSG00000132466_81 (sequence is synthesized)
ttaattctttcctgtgttaactagggttattttctatttaaggtaatcctgctggagaacagatgctatccaatatttattacaacacatgagttgtgttgtttcacaatactgaatttc

SEQ ID NO: 298164 - DNA, 120 bp, Artificial Sequence
  ENSG00000132466_82 (sequence is synthesized)
ttaggtgaggtattttatttaaaaaggagggggaaaactcctatattttcttgacttcaaacctgtggggccaggggatatagattgaaatgctccgtatttagtcttggggatcaggct

SEQ ID NO: 298165 - DNA, 120 bp, Artificial Sequence
  ENSG00000132466_83 (sequence is synthesized)
tgtttagtacaataccatggttttagaagtctgtactaggaacatttttaaaatacattttttatatttcagatgtaatgcagtgcacttttatttgaacaataaaaaaacccataactt

SEQ ID NO: 298166 - DNA, 120 bp, Artificial Sequence
  ENSG00000132466_84 (sequence is synthesized)
tttgagaccatgaaggtcttttattttttaattttgaaaatatgtggtatgtgtatatgcagactacatcattgttttaagaaatgatttaactcttggacattacacttgggttagttc

SEQ ID NO: 298167 - DNA, 120 bp, Artificial Sequence
  ENSG00000132466_85 (sequence is synthesized)
acaccttaaatccccaagtagttaatatctcaattattgtataatcagtttataccatccattcccaacaaaattccacatttcatgccttttcaacatacatttcaacataatcaacat

SEQ ID NO: 298168 - DNA, 120 bp, Artificial Sequence
  ENSG00000132466_86 (sequence is synthesized)
atttacaaacactgacttcactgtttataaagaagaaatttcccctcctatttcccattactgaaaagtcaagtcatttttattgatacatgaaaattaatttttttgtaaatgactacg

SEQ ID NO: 298169 - DNA, 120 bp, Artificial Sequence
  ENSG00000132466_87 (sequence is synthesized)
tatagtcatttttctcctttggaaaaggtaaatagcttattaactaatcctgtcttgttcttcacaaaaataatagtccatccgtgttttgactcaaataacctaaatacacattttgta

SEQ ID NO: 298170 - DNA, 120 bp, Artificial Sequence
  ENSG00000132466_88 (sequence is synthesized)
aaaattttgtaccctatattacttatttttaaaacagtacagtgttagactaaacaggaaaactcaaagttataaaatctcttcagatcctctagtttattaaatctattttcatgttga

SEQ ID NO: 298171 - DNA, 120 bp, Artificial Sequence
  ENSG00000132466_89 (sequence is synthesized)
tcctgttcccttgctgacacagaggagtgttcctgctggcaatgatctaatcatagtgcagtaagaaacatggcagtttgataaaacatggtggagacagcggctgaaatggaagcatat

SEQ ID NO: 298172 - DNA, 120 bp, Artificial Sequence
  ENSG00000132466_90 (sequence is synthesized)
ttattatttacccattttaaaattagtcttatattgttaatttgatcttgatattgtaaaaatattgtctctttagagtggtttgaatatgatcttgataaaacaatgaattgaactaga

SEQ ID NO: 298173 - DNA, 120 bp, Artificial Sequence
  ENSG00000132466_91 (sequence is synthesized)
tgactttgaattttatgatatcatggtttccttatgattaaatgattatgtgacaacttcttctccagggtaaatttcaacgttatatttctgctttattgatctttaacagttaaggga

SEQ ID NO: 298174 - DNA, 120 bp, Artificial Sequence
  ENSG00000132466_92 (sequence is synthesized)
gacttggaaaaggcagactacaacatcattcccatctattcccatggggagtaaaatacaccaaaacagcatatagtttggacagtcttatagcttcttcacttcccttttctgccacat

SEQ ID NO: 298175 - DNA, 120 bp, Artificial Sequence
  ENSG00000132466_93 (sequence is synthesized)
tttcccctataattctgtactctagaacttaactgaatagtaatcataggaaaataattggtttggcattgaatattatggaactgccatatctcatcttttataaaaaggtcagtggct

SEQ ID NO: 298176 - DNA, 120 bp, Artificial Sequence
  ENSG00000132466_94 (sequence is synthesized)
taagtgggagctgaacattgagtacacatggacactaagaagggaacaataggcaccagggcctacttgagaatgggaggaaggaataggaaaattgtccacggctgatggtaaagcctt

SEQ ID NO: 298177 - DNA, 120 bp, Artificial Sequence
  ENSG00000132466_95 (sequence is synthesized)
ctttatataacatggtgtaatatttgcataaaaattatgcacattctcccatatactttaaatcatctctacattacctctaatacctaacgcaaatgctatgtaaatagttgttatact

SEQ ID NO: 298178 - DNA, 120 bp, Artificial Sequence
  ENSG00000132466_96 (sequence is synthesized)
ttttgttttgttttttgaatactttcaatctagtgttggttaaatctatggataaagaggactgactgtattgtgggaaggaaccattgccatgaaaccaccaaaaatatgtgcatgcaa

SEQ ID NO: 298179 - DNA, 120 bp, Artificial Sequence
  ENSG00000132467_0 (sequence is synthesized)
agtagccgatcaggagtctgcaaactccggtggtaggggagcgcgctgctgtttagagccacgagttaccggagcgcctgattcctgcgccgaagtcagtggtggccgaaagtccggagt

SEQ ID NO: 298180 - DNA, 120 bp, Artificial Sequence
  ENSG00000132467_1 (sequence is synthesized)
cgctgtaaaacctgagattgtgagccatggtggggagatcccggcggcgcggagcagctaagtgggcagctgtgcgagccaaggcaggtcccacgctcaccgacgaaaatggagatgatt

SEQ ID NO: 298181 - DNA, 120 bp, Artificial Sequence
  ENSG00000132467_2 (sequence is synthesized)
taggattgccaccctcaccaggggacaccagctactaccaagatcaggtagatgactttcatgaggcacgatcccgggccgccttagctaagggctggaatgaagtacagagtggagacg

SEQ ID NO: 298182 - DNA, 120 bp, Artificial Sequence
  ENSG00000132467_3 (sequence is synthesized)
aggaggatggcgaggaggaggaggaggaggtgctagccctagatatggacgatgaggacgacgaagatggagggaatgcgggggaggaggaggaggaggagaatgccgatgatgatggtg

SEQ ID NO: 298183 - DNA, 120 bp, Artificial Sequence
  ENSG00000132467_4 (sequence is synthesized)
ggagctccgtgcaaagtgaagctgaggcctctgtggatcccagtttgtcgtggggtcagaggaaaaaactttactatgacacggactatggttccaagtcccgaggccggcagagtcaac

SEQ ID NO: 298184 - DNA, 120 bp, Artificial Sequence
  ENSG00000132467_5 (sequence is synthesized)
aggaggcagaggaggaggaaagagaggaggaggaggaggcacagatcattcagcggcgcctagcccaagcgctgcaagaggatgattttggtgtcgcctgggttgaggcctttgcaaaac

SEQ ID NO: 298185 - DNA, 120 bp, Artificial Sequence
  ENSG00000132467_6 (sequence is synthesized)
cagtgcctcaggtagatgaggctgagacacgggtcgtgaaggatttggctaaagtttcagtgaaagagaagctgaaaatgttgcgaaaggaatcaccagaactcttggagctgatagaag

SEQ ID NO: 298186 - DNA, 120 bp, Artificial Sequence
  ENSG00000132467_7 (sequence is synthesized)
acctgaaagtcaagttgacagaggttaaggatgagctggagccattgttagagttggtggaacaagggatcattccacccggaaaaggaagccaatacttgaggaccaagtacaacctct

SEQ ID NO: 298187 - DNA, 120 bp, Artificial Sequence
  ENSG00000132467_8 (sequence is synthesized)
aaatttgatcaacaagctgtccgttgtggatcagaagctgtcctcagaaattcgtcatctgttgacacttaaggatgatgctgtaaagaaagaactgattccaaaagcaaaatccaccaa

SEQ ID NO: 298188 - DNA, 120 bp, Artificial Sequence
  ENSG00000132467_9 (sequence is synthesized)
gcccaaaccaaagtctgtttcaaagacttctgctgctgcctgtgctgttacagatctttctgatgattctgattttgatgaaaaagcaaaactgaagtactataaagaaatagaagacag

SEQ ID NO: 298189 - DNA, 120 bp, Artificial Sequence
  ENSG00000132467_10 (sequence is synthesized)
gcaaaagctaaagagaaagaaagaagaaaatagcactgaagaacaggctcttgaagatcaaaatgcaaagagagctattacctatcaaattgctaaaaataggggacttactcctaggag

SEQ ID NO: 298190 - DNA, 120 bp, Artificial Sequence
  ENSG00000132467_11 (sequence is synthesized)
aaagaagattgatcgcaatcccagagtgaaacacagagagaagttcagaagagccaaaattagaagaagaggccaggttcgtgaagttcgtaaagaagagcaacgttatagtggtgaatt

SEQ ID NO: 298191 - DNA, 120 bp, Artificial Sequence
  ENSG00000132467_12 (sequence is synthesized)
atctggcattcgtgcaggagttaaaaagagcattaagcttaaatgaagtttttgcttagcataaggtttttggcagttttggatcaataaatttttacttttaactaaagtcattgtatt

SEQ ID NO: 298192 - DNA, 120 bp, Artificial Sequence
  ENSG00000132467_13 (sequence is synthesized)
aatatataatactttaaattttaaaaattcttgtccacaaggaaatttgtctgggttattggacaatttataagaactatgggagcaatatgaaggtgcttgagaaaagagatgatgttg

SEQ ID NO: 298193 - DNA, 120 bp, Artificial Sequence
  ENSG00000132467_14 (sequence is synthesized)
aagttttccaatattctgttgaagttttccaatattaagtattagcttagggaaatttcacagttcattgtggagtgttaaacttagaacatgtgtaacttttcacataaagagaatgca

SEQ ID NO: 298194 - DNA, 120 bp, Artificial Sequence
  ENSG00000132467_15 (sequence is synthesized)
tctttgacagttatcttatttgtaaggcagcctataaaatagttctgaagtattttatttacctaactataattattgggccagatacttgttaataaatgggcttaatgttaacatgga

SEQ ID NO: 298195 - DNA, 120 bp, Artificial Sequence
  ENSG00000132470_0 (sequence is synthesized)
cccccaacccccgcgcccgccctcggacagtccctgctcgcccgcgcgctgcagccccatctcctagcggcagcccaggcgcggagggagcgagtccgccccgaggtaggtccaggacgg

SEQ ID NO: 298196 - DNA, 120 bp, Artificial Sequence
  ENSG00000132470_1 (sequence is synthesized)
gcgcacagcagcagccgaggctggccgggagagggaggaagaggatggcagggccacgccccagcccatgggccaggctgctcctggcagccttgatcagcgtcagcctctctgggacct

SEQ ID NO: 298197 - DNA, 120 bp, Artificial Sequence
  ENSG00000132470_2 (sequence is synthesized)
tggcaaaccgctgcaagaaggccccagtgaagagctgcacggagtgtgtccgtgtggataaggactgcgcctactgcacagacgagatgttcagggaccggcgctgcaacacccaggcgg

SEQ ID NO: 298198 - DNA, 120 bp, Artificial Sequence
  ENSG00000132470_3 (sequence is synthesized)
agctgctggccgcgggctgccagcgggagagcatcgtggtcatggagagcagcttccaaatcacagaggagacccagattgacaccaccctgcggcgcagccagatgtccccccaaggcc

SEQ ID NO: 298199 - DNA, 120 bp, Artificial Sequence
  ENSG00000132470_4 (sequence is synthesized)
tgcgggtccgtctgcggcccggtgaggagcggcattttgagctggaggtgtttgagccactggagagccccgtggacctgtacatcctcatggacttctccaactccatgtccgatgatc

SEQ ID NO: 298200 - DNA, 120 bp, Artificial Sequence
  ENSG00000132470_5 (sequence is synthesized)
tggacaacctcaagaagatggggcagaacctggctcgggtcctgagccagctcaccagcgactacactattggatttggcaagtttgtggacaaagtcagcgtcccgcagacggacatga

SEQ ID NO: 298201 - DNA, 120 bp, Artificial Sequence
  ENSG00000132470_6 (sequence is synthesized)
ggcctgagaagctgaaggagccctggcccaacagtgacccccccttctccttcaagaacgtcatcagcctgacagaagatgtggatgagttccggaataaactgcagggagagcggatct

SEQ ID NO: 298202 - DNA, 120 bp, Artificial Sequence
  ENSG00000132470_7 (sequence is synthesized)
caggcaacctggatgctcctgagggcggcttcgatgccatcctgcagacagctgtgtgcacgagggacattggctggcgcccggacagcacccacctgctggtcttctccaccgagtcag

SEQ ID NO: 298203 - DNA, 120 bp, Artificial Sequence
  ENSG00000132470_8 (sequence is synthesized)
ccttccactatgaggctgatggcgccaacgtgctggctggcatcatgagccgcaacgatgaacggtgccacctggacaccacgggcacctacacccagtacaggacacaggactacccgt

SEQ ID NO: 298204 - DNA, 120 bp, Artificial Sequence
  ENSG00000132470_9 (sequence is synthesized)
cggtgcccaccctggtgcgcctgctcgccaagcacaacatcatccccatctttgctgtcaccaactactcctatagctactacgagaagcttcacacctatttccctgtctcctcactgg

SEQ ID NO: 298205 - DNA, 120 bp, Artificial Sequence
  ENSG00000132470_10 (sequence is synthesized)
gggtgctgcaggaggactcgtccaacatcgtggagctgctggaggaggccttcaatcggatccgctccaacctggacatccgggccctagacagcccccgaggccttcggacagaggtca

SEQ ID NO: 298206 - DNA, 120 bp, Artificial Sequence
  ENSG00000132470_11 (sequence is synthesized)
cctccaagatgttccagaagacgaggactgggtcctttcacatccggcggggggaagtgggtatataccaggtgcagctgcgggcccttgagcacgtggatgggacgcacgtgtgccagc

SEQ ID NO: 298207 - DNA, 120 bp, Artificial Sequence
  ENSG00000132470_12 (sequence is synthesized)
tgccggaggaccagaagggcaacatccatctgaaaccttccttctccgacggcctcaagatggacgcgggcatcatctgtgatgtgtgcacctgcgagctgcaaaaagaggtgcggtcag

SEQ ID NO: 298208 - DNA, 120 bp, Artificial Sequence
  ENSG00000132470_13 (sequence is synthesized)
ctcgctgcagcttcaacggagacttcgtgtgcggacagtgtgtgtgcagcgagggctggagtggccagacctgcaactgctccaccggctctctgagtgacattcagccctgcctgcggg

SEQ ID NO: 298209 - DNA, 120 bp, Artificial Sequence
  ENSG00000132470_14 (sequence is synthesized)
agggcgaggacaagccgtgctccggccgtggggagtgccagtgcgggcactgtgtgtgctacggcgaaggccgctacgagggtcagttctgcgagtatgacaacttccagtgtccccgca

SEQ ID NO: 298210 - DNA, 120 bp, Artificial Sequence
  ENSG00000132470_15 (sequence is synthesized)
cttccgggttcctctgcaatgaccgaggacgctgctccatgggccagtgtgtgtgtgagcctggttggacaggcccaagctgtgactgtcccctcagcaatgccacctgcatcgacagca

SEQ ID NO: 298211 - DNA, 120 bp, Artificial Sequence
  ENSG00000132470_16 (sequence is synthesized)
atgggggcatctgtaatggacgtggccactgtgagtgtggccgctgccactgccaccagcagtcgctctacacggacaccatctgcgagatcaactactcggcgatccacccgggcctct

SEQ ID NO: 298212 - DNA, 120 bp, Artificial Sequence
  ENSG00000132470_17 (sequence is synthesized)
gcgaggacctacgctcctgcgtgcagtgccaggcgtggggcaccggcgagaagaaggggcgcacgtgtgaggaatgcaacttcaaggtcaagatggtggacgagcttaagagagccgagg

SEQ ID NO: 298213 - DNA, 120 bp, Artificial Sequence
  ENSG00000132470_18 (sequence is synthesized)
aggtggtggtgcgctgctccttccgggacgaggatgacgactgcacctacagctacaccatggaaggtgacggcgcccctgggcccaacagcactgtcctggtgcacaagaagaaggact

SEQ ID NO: 298214 - DNA, 120 bp, Artificial Sequence
  ENSG00000132470_19 (sequence is synthesized)
gccctccgggctccttctggtggctcatccccctgctcctcctcctcctgccgctcctggccctgctactgctgctatgctggaagtactgtgcctgctgcaaggcctgcctggcacttc

SEQ ID NO: 298215 - DNA, 120 bp, Artificial Sequence
  ENSG00000132470_20 (sequence is synthesized)
tcccgtgctgcaaccgaggtcacatggtgggctttaaggaagaccactacatgctgcgggagaacctgatggcctctgaccacttggacacgcccatgctgcgcagcgggaacctcaagg

SEQ ID NO: 298216 - DNA, 120 bp, Artificial Sequence
  ENSG00000132470_21 (sequence is synthesized)
gccgtgacgtggtccgctggaaggtcaccaacaacatgcagcggcctggctttgccactcatgccgccagcatcaaccccacagagctggtgccctacgggctgtccttgcgcctggccc

SEQ ID NO: 298217 - DNA, 120 bp, Artificial Sequence
  ENSG00000132470_22 (sequence is synthesized)
gcctttgcaccgagaacctgctgaagcctgacactcgggagtgcgcccagctgcgccaggaggtggaggagaacctgaacgaggtctacaggcagatctccggtgtacacaagctccagc

SEQ ID NO: 298218 - DNA, 120 bp, Artificial Sequence
  ENSG00000132470_23 (sequence is synthesized)
agaccaagttccggcagcagcccaatgccgggaaaaagcaagaccacaccattgtggacacagtgctgatggcgccccgctcggccaagccggccctgctgaagcttacagagaagcagg

SEQ ID NO: 298219 - DNA, 120 bp, Artificial Sequence
  ENSG00000132470_24 (sequence is synthesized)
ccacgacctcaaggtggcccccggctactacaccctcactgcagaccaggacgcccggggcatggtggagttccaggagggcgtggagctggtggacgtacgggtgcccctctttatccg

SEQ ID NO: 298220 - DNA, 120 bp, Artificial Sequence
  ENSG00000132470_25 (sequence is synthesized)
gcctgaggatgacgacgagaagcagctgctggtggaggccatcgacgtgcccgcaggcactgccaccctcggccgccgcctggtaaacatcaccatcatcaaggagcaagccagagacgt

SEQ ID NO: 298221 - DNA, 120 bp, Artificial Sequence
  ENSG00000132470_26 (sequence is synthesized)
ggtgtcctttgagcagcctgagttctcggtcagccgcggggaccaggtggcccgcatccctgtcatccggcgtgtcctggacggcgggaagtcccaggtctcctaccgcacacaggatgg

SEQ ID NO: 298222 - DNA, 120 bp, Artificial Sequence
  ENSG00000132470_27 (sequence is synthesized)
caccgcgcagggcaaccgggactacatccccgtggagggtgagctgctgttccagcctggggaggcctggaaagagctgcaggtgaagctcctggagctgcaagaagttgactccctcct

SEQ ID NO: 298223 - DNA, 120 bp, Artificial Sequence
  ENSG00000132470_28 (sequence is synthesized)
gcggggccgccaggtccgccgtttccacgtccagctcagcaaccctaagtttggggcccacctgggccagccccactccaccaccatcatcatcagggacccagatgaactggaccggag

SEQ ID NO: 298224 - DNA, 120 bp, Artificial Sequence
  ENSG00000132470_29 (sequence is synthesized)
cttcacgagtcagatgttgtcatcacagccaccccctcacggcgacctgggcgccccgcagaaccccaatgctaaggccgctgggtccaggaagatccatttcaactggctgcccccttc

SEQ ID NO: 298225 - DNA, 120 bp, Artificial Sequence
  ENSG00000132470_30 (sequence is synthesized)
tggcaagccaatggggtacagggtaaagtactggattcagggtgactccgaatccgaagcccacctgctcgacagcaaggtgccctcagtggagctcaccaacctgtacccgtattgcga

SEQ ID NO: 298226 - DNA, 120 bp, Artificial Sequence
  ENSG00000132470_31 (sequence is synthesized)
ctatgagatgaaggtgtgcgcctacggggctcagggcgagggaccctacagctccctggtgtcctgccgcacccaccaggaagtgcccagcgagccagggcgtctggccttcaatgtcgt

SEQ ID NO: 298227 - DNA, 120 bp, Artificial Sequence
  ENSG00000132470_32 (sequence is synthesized)
ctcctccacggtgacccagctgagctgggctgagccggctgagaccaacggtgagatcacagcctacgaggtctgctatggcctggtcaacgatgacaaccgacctattgggcccatgaa

SEQ ID NO: 298228 - DNA, 120 bp, Artificial Sequence
  ENSG00000132470_33 (sequence is synthesized)
gaaagtgctggttgacaaccctaagaaccggatgctgcttattgagaaccttcgggagtcccagccctaccgctacacggtgaaggcgcgcaacggggccggctgggggcctgagcggga

SEQ ID NO: 298229 - DNA, 120 bp, Artificial Sequence
  ENSG00000132470_34 (sequence is synthesized)
ggccatcatcaacctggccacccagcccaagaggcccatgtccatccccatcatccctgacatccctatcgtggacgcccagagcggggaggactacgacagcttccttatgtacagcga

SEQ ID NO: 298230 - DNA, 120 bp, Artificial Sequence
  ENSG00000132470_35 (sequence is synthesized)
tgacgttctacgctctccatcgggcagccagaggcccagcgtctccgatgacactggctgcggctggaagttcgagcccctgctgggggaggagctggacctgcggcgcgtcacgtggcg

SEQ ID NO: 298231 - DNA, 80 bp, Artificial Sequence
  ENSG00000132470_36 (sequence is synthesized)
cccccggagctcatcccgcgcctgtcggccagcagcgggcgctcctccgacgccgaggcgccccacgggcccccggacga

SEQ ID NO: 298232 - DNA, 120 bp, Artificial Sequence
  ENSG00000132470_37 (sequence is synthesized)
cagtgcgacacccgggccccccggagagcacctggtgaatggccggatggactttgccttcccgggcagcaccaactccctgcacaggatgaccacgaccagtgctgctgcctatggcac

SEQ ID NO: 298233 - DNA, 120 bp, Artificial Sequence
  ENSG00000132470_38 (sequence is synthesized)
ccacctgagcccacacgtgccccaccgcgtgctaagcacatcctccaccctcacacgggactacaactcactgacccgctcagaacactcacactcgaccacactgcccagggactactc

SEQ ID NO: 298234 - DNA, 120 bp, Artificial Sequence
  ENSG00000132470_39 (sequence is synthesized)
caccctcacctccgtctcctcccacgactctcgcctgactgctggtgtgcccgacacgcccacccgcctggtgttctctgccctggggcccacatctctcagagtgagctggcaggagcc

SEQ ID NO: 298235 - DNA, 120 bp, Artificial Sequence
  ENSG00000132470_40 (sequence is synthesized)
gcggtgcgagcggccgctgcagggctacagtgtggagtaccagctgctgaacggcggtgagctgcatcggctcaacatccccaaccctgcccagacctcggtggtggtggaagacctcct

SEQ ID NO: 298236 - DNA, 120 bp, Artificial Sequence
  ENSG00000132470_41 (sequence is synthesized)
gcccaaccactcctacgtgttccgcgtgcgggcccagagccaggaaggctggggccgagagcgtgagggtgtcatcaccattgaatcccaggtgcacccgcagagcccactgtgtcccct

SEQ ID NO: 298237 - DNA, 120 bp, Artificial Sequence
  ENSG00000132470_42 (sequence is synthesized)
gccaggctccgccttcactttgagcactcccagtgccccaggcccgctggtgttcactgccctgagcccagactcgctgcagctgagctgggagcggccacggaggcccaatggggatat

SEQ ID NO: 298238 - DNA, 120 bp, Artificial Sequence
  ENSG00000132470_43 (sequence is synthesized)
cgtcggctacctggtgacctgtgagatggcccaaggaggagggccagccaccgcattccgggtggatggagacagccccgagagccggctgaccgtgccgggcctcagcgagaacgtgcc

SEQ ID NO: 298239 - DNA, 120 bp, Artificial Sequence
  ENSG00000132470_44 (sequence is synthesized)
ctacaagttcaaggtgcaggccaggaccactgagggcttcgggccagagcgcgagggcatcatcaccatagagtcccaggatggaggacccttcccgcagctgggcagccgtgccgggct

SEQ ID NO: 298240 - DNA, 120 bp, Artificial Sequence
  ENSG00000132470_45 (sequence is synthesized)
cttccagcacccgctgcaaagcgagtacagcagcatcaccaccacccacaccagcgccaccgagcccttcctagtggatgggctgaccctgggggcccagcacctggaggcaggcggctc

SEQ ID NO: 298241 - DNA, 120 bp, Artificial Sequence
  ENSG00000132470_46 (sequence is synthesized)
cctcacccggcatgtgacccaggagtttgtgagccggacactgaccaccagcggaacccttagcacccacatggaccaacagttcttccaaacttgaccgcaccctgccccacccccgcc

SEQ ID NO: 298242 - DNA, 120 bp, Artificial Sequence
  ENSG00000132470_47 (sequence is synthesized)
acgtcccactaggcgtcctcccgactcctctcccggagcctcctcagctactccatccttgcacccctgggggcccagcccacccgcatgcacagagcaggggctaggtgtctcctggga

SEQ ID NO: 298243 - DNA, 120 bp, Artificial Sequence
  ENSG00000132470_48 (sequence is synthesized)
ggcatgaagggggcaaggtccgtcctctgtgggcccaaacctatttgtaaccaaagagctgggagcagcacaaggacccagcctttgttctgcacttaataaatggttttgctactgcta

SEQ ID NO: 298244 - DNA, 120 bp, Artificial Sequence
  ENSG00000132470_49 (sequence is synthesized)
ctgggaacacgggaggagcaggcttccgctgtcctgggccctggggtcccggagtcgggctcagatgaaagggttccccccttccaggggcccacgagactctataatcctggctgggag

SEQ ID NO: 298245 - DNA, 120 bp, Artificial Sequence
  ENSG00000132470_50 (sequence is synthesized)
ccggcggcggcacccagctcctgccccgacaggtgcgcgccgcgcgaaggaatgcagccggtctgactcaccagcgcctccttcctacctgcgcgcccgccccataaagcgctgcccgcc

SEQ ID NO: 298246 - DNA, 120 bp, Artificial Sequence
  ENSG00000132470_51 (sequence is synthesized)
ccccacccccccaacccccgcgcccgccctcggacagtccctgctcgcccgcgcgctgcagccccatctcctagcggcagcccaggcgcggagggagcgagtccgccccgaggaggaaga

SEQ ID NO: 298247 - DNA, 120 bp, Artificial Sequence
  ENSG00000132470_52 (sequence is synthesized)
tggaacagagggccttccacgacctcaaggtggcccccggctactacaccctcactgcagaccagggtaggagggcgggtccgctgtgccactgcctcgcacctcccgcctgtgtggccc

SEQ ID NO: 298248 - DNA, 120 bp, Artificial Sequence
  ENSG00000132470_53 (sequence is synthesized)
cagcccaatgccgggaaaaagtgagtagaagactcgtgggtgagagggcccccacttcctgcccgcctgtccccagcccagccactgcctcgtccgtccctactccatctccatcccata

SEQ ID NO: 298249 - DNA, 120 bp, Artificial Sequence
  ENSG00000132471_0 (sequence is synthesized)
attgcgttttgagtctcgggacccctgttggagagactatggcgctcaacaagaatcactcggagggcggcggagtgatcgtcaataacaccgagagcatcctaatgtcctatgatcacg

SEQ ID NO: 298250 - DNA, 120 bp, Artificial Sequence
  ENSG00000132471_1 (sequence is synthesized)
tggaactcacattcaatgacatgaagaacgtgccagaagccttcaaagggaccaagaaaggcactgtctaccttaccccttaccgggtcatctttctgtccaagggcaaggatgccatgc

SEQ ID NO: 298251 - DNA, 120 bp, Artificial Sequence
  ENSG00000132471_2 (sequence is synthesized)
agtccttcatgatgccattttatctcatgaaagactgtgagatcaagcagcccgtatttggtgcaaactacatcaagggaacagtgaaggcggaagcgggaggtggctgggaaggctctg

SEQ ID NO: 298252 - DNA, 120 bp, Artificial Sequence
  ENSG00000132471_3 (sequence is synthesized)
cttcctacaagttgactttcacggcagggggcgccattgagttcggacagcggatgctccaggtggcatctcaagcctccagaggtgaagtccccagtggagcctatggctactcttaca

SEQ ID NO: 298253 - DNA, 120 bp, Artificial Sequence
  ENSG00000132471_4 (sequence is synthesized)
tgcccagcggggcctatgtctatcccccgccagtcgccaatggaatgtacccctgccctcctggctacccctatccaccgcccccacctgagttctatccaggaccccccatgatggacg

SEQ ID NO: 298254 - DNA, 120 bp, Artificial Sequence
  ENSG00000132471_5 (sequence is synthesized)
gggccatgggatacgtgcagcccccaccaccgccctaccctgggcccatggaacctccggtcagcggccccgatgtcccctccactcctgcagccgaagccaaggccgcagaagcagccg

SEQ ID NO: 298255 - DNA, 120 bp, Artificial Sequence
  ENSG00000132471_6 (sequence is synthesized)
ccagcgcctattacaacccaggcaatcctcacaacgtctacatgcccacgagccagccgccgccacctccctactacccaccggaagataagaagacccagtaggccctcctgcctccct

SEQ ID NO: 298256 - DNA, 120 bp, Artificial Sequence
  ENSG00000132471_7 (sequence is synthesized)
gaggggagggggcgccttgttctccctccaggtctgatcataaacaattaccaggaactagcattgtgggacattagggcccccggcctcgggagaggtgccgcccagcttcccatgcca

SEQ ID NO: 298257 - DNA, 120 bp, Artificial Sequence
  ENSG00000132471_8 (sequence is synthesized)
gcccggagcccacagtgctgcccagcgtacctccctcaccgtctggggctcttctgggagcacggagcatcccctgttcctgtttcactctcagcttctcccctcgaagggactctctgg

SEQ ID NO: 298258 - DNA, 120 bp, Artificial Sequence
  ENSG00000132471_9 (sequence is synthesized)
ccacctcctccaccgcagtccagctccctcagtctggcacccactgctacactcagcctcatgagccacttcagaccagccaggtgtcttcccgggccctgccagaccctgctcacattc

SEQ ID NO: 298259 - DNA, 120 bp, Artificial Sequence
  ENSG00000132471_10 (sequence is synthesized)
cctctgctggtctgtgctggtctcagaaggccaccgcgcccgcattccactcagccagggtccagctgcagcccccgccacccttccttcccttccctgtcctgggtcatgttgttgcca

SEQ ID NO: 298260 - DNA, 120 bp, Artificial Sequence
  ENSG00000132471_11 (sequence is synthesized)
ccctgtgtgacttttgaagctgtaaaatgagcttccagggcttgggtggcgtcggggcagggccgccgaggctgggaggaagcccttctgccttttgctggtgtttctggaatttgcttt

SEQ ID NO: 298261 - DNA, 120 bp, Artificial Sequence
  ENSG00000132471_12 (sequence is synthesized)
ccctcacctctcacttccttctagaaggagcttcctgactggaaccagagaatgcatgtctgtccacttggtggctgctgggtggggccgggaacaagggcccctgaccctgtgtgctgg

SEQ ID NO: 298262 - DNA, 120 bp, Artificial Sequence
  ENSG00000132471_13 (sequence is synthesized)
ccgggacctgccaccagccccccagcctgcttcttccccttaagctttgtgcccctggatgcgctaacattcactcttgtttgtccctggactggccatgaagtgaggagatggttattt

SEQ ID NO: 298263 - DNA, 120 bp, Artificial Sequence
  ENSG00000132471_14 (sequence is synthesized)
aaagagaattccctatttatttgacaaaaaatccagttaatatattaatgtgaaataaaccctgtttgcacctcgatttgtttgctgaaaatgtgaaatagtaaaaatgaaataactgga

SEQ ID NO: 298264 - DNA, 120 bp, Artificial Sequence
  ENSG00000132471_15 (sequence is synthesized)
attgcacaggacctcacagaacgctgctgtttcctgatcttttctagtgaggcagctttgtttcttcacataggagacctccctggaaagcgaagtcaagcaggtggatctagaggttgg

SEQ ID NO: 298265 - DNA, 120 bp, Artificial Sequence
  ENSG00000132471_16 (sequence is synthesized)
ccaccacagtcaggaaagcagctgtctactgaaaagcaaactctaattccttaacattaacgagtaccggaactaccacgtgggaagtgcagccccctctctccgcctcacggattcagc

SEQ ID NO: 298266 - DNA, 120 bp, Artificial Sequence
  ENSG00000132471_17 (sequence is synthesized)
tcggaggaggaactggaaggagggagtaaactattaccacgtgacgttcgggtcaggtgtttgggccagcctccgcactcgagctttgattggctgactctaataagaagacgccactag

SEQ ID NO: 298267 - DNA, 120 bp, Artificial Sequence
  ENSG00000132471_18 (sequence is synthesized)
attgcgttttgagtctcgggacccctgttggagagactatggcgctcaacaagaatcactcggagggcggcggagtgatcgtcaataacaccgagaggtgaaaacactgcggaaggatcc

SEQ ID NO: 298268 - DNA, 120 bp, Artificial Sequence
  ENSG00000132471_19 (sequence is synthesized)
gggcttgttcctgtgaagctgccgagtgcttgactgggggcggagagaaaccttgatgtggccttggcacccgtgtacatattgggccaagggtgggaggacaggcttgttccaggaagg

SEQ ID NO: 298269 - DNA, 120 bp, Artificial Sequence
  ENSG00000132471_20 (sequence is synthesized)
agaggccattgttccaaagggggaagcgagtacagcagggccaggccaggctgcagtgctggctcctatgcaggcagcaggctggaaaccatggcaccaggaagtccccatcacagtgca

SEQ ID NO: 298270 - DNA, 120 bp, Artificial Sequence
  ENSG00000132471_21 (sequence is synthesized)
atgggaactcagggacacgcatggggcctgcagggaggtgtcctgggaacctctgactgccgccgtgggggcgtccccttcagacccttatcgccctagccatgacctcttcccagctct

SEQ ID NO: 298271 - DNA, 120 bp, Artificial Sequence
  ENSG00000132471_22 (sequence is synthesized)
gggctgccagctggtggggtttgattgccaagaggtggggaaaatgctggcatgaaagacagcagctcagatcagcttttcagagcgtgaagtctgcagaagcctgcggactgagtcaag

SEQ ID NO: 298272 - DNA, 120 bp, Artificial Sequence
  ENSG00000132471_23 (sequence is synthesized)
cactctgcctgtttctctgtcacatgctcctggattccagaatcaccaggctctttgtgtaactgacctgaccactgggcagtgaacccatgtcaattccagagccgctgctgcaaaatc

SEQ ID NO: 298273 - DNA, 120 bp, Artificial Sequence
  ENSG00000132471_24 (sequence is synthesized)
tctatagagttggatgcagccgctggcatgacttgggcctggaggccagactattattattaatattttgttttctgtgagagtagcccatgaagccctgtgtgtatccagagtgagaaa

SEQ ID NO: 298274 - DNA, 120 bp, Artificial Sequence
  ENSG00000132471_25 (sequence is synthesized)
ttcgggaccagccctctcctccccgatgtcgcacagagagcctcagaatggccagagactgctgagagccgcagatgatggatgacccctggactaccccaggggcccagcagggctgtg

SEQ ID NO: 298275 - DNA, 120 bp, Artificial Sequence
  ENSG00000132471_26 (sequence is synthesized)
gcctggtggagcggagctagattctggccccacccccatcccttagctatccatgtgccctgggcggggaaggtcaccctgtgtgcctctcgatcctctcatctacactcagctggtcgg

SEQ ID NO: 298276 - DNA, 120 bp, Artificial Sequence
  ENSG00000132471_27 (sequence is synthesized)
tcacagtggcacctggggcattggctcaaggattagatgaggtgagacatgcgatgggcctggaaaggaccgtgccagcgcgtggcatgtgctcaggaaacctcacctgctgctctcatt

SEQ ID NO: 298277 - DNA, 120 bp, Artificial Sequence
  ENSG00000132471_28 (sequence is synthesized)
gttggagagactatggcgctcaacaagaatcactcggagggcggcggagtgatcgtcaataacaccgagaggcttgaaaaacaaaccagcaaaaacagaacatctatcacaaggacttaa

SEQ ID NO: 298278 - DNA, 120 bp, Artificial Sequence
  ENSG00000132471_29 (sequence is synthesized)
ggaaggatcctggaggaccaaagttcgggtgtcgaggaagtgggcggtgggtggtgggtggtggggaataagcccctgaagagggagcactgatggagtgagcatcctaatgtcctatga

SEQ ID NO: 298279 - DNA, 88 bp, Artificial Sequence
  ENSG00000132471_30 (sequence is synthesized)
ataagcggggtttgggaaattttacagaacccccaacctgctcatttcttccatggctatattaatgggtttttttgttggtttttag

SEQ ID NO: 298280 - DNA, 66 bp, Artificial Sequence
  ENSG00000132471_31 (sequence is synthesized)
ctatgaatggctttatttatttatttgtttttgagacagagcttctctcttgttgcccaggctgga

SEQ ID NO: 298281 - DNA, 70 bp, Artificial Sequence
  ENSG00000132471_32 (sequence is synthesized)
cactgcgcctggccctatgaatggctttatttatttatttgtttttgagacagagcttctctcttgttgc

SEQ ID NO: 298282 - DNA, 120 bp, Artificial Sequence
  ENSG00000132471_33 (sequence is synthesized)
tacgggcgtgagccaccgcgcccagccctatgaatagttttaatgccgcactattgagaggttatgagagctgacgtgccgggcagctgcttgggagaaaggcccagtgtctgggtgacg

SEQ ID NO: 298283 - DNA, 120 bp, Artificial Sequence
  ENSG00000132471_34 (sequence is synthesized)
tccttttcgttttgctttttcaagaactcaagaggtaagtgtttgggcaccaggctgaccaggcctaggagttgggaaggaaagctgtcattggcatcagctctgtcctgtacctcagag

SEQ ID NO: 298284 - DNA, 120 bp, Artificial Sequence
  ENSG00000132471_35 (sequence is synthesized)
actgcgtttccctgcctggggcaggtggatgacgttttgacaaagctgtttggactcaaggacactttactatggcctcataaaacaaacactaaaccaaccattcgactgcggttccgc

SEQ ID NO: 298285 - DNA, 120 bp, Artificial Sequence
  ENSG00000132471_36 (sequence is synthesized)
agccattgaaaatgaccgagggatgggccagcagacatcctccgccagctcactcctaccccagccctgagcctccctcccggcctctgtccaccctccagccttgcccttgacctccct

SEQ ID NO: 298286 - DNA, 120 bp, Artificial Sequence
  ENSG00000132471_37 (sequence is synthesized)
tgccttcccctggctctgacctctcccgtcctctctcatccctgaccaaggtggccccccgagtatgggtggagggtggagtgggatggacagaggatgtctgcggggcacattcctgag

SEQ ID NO: 298287 - DNA, 120 bp, Artificial Sequence
  ENSG00000132471_38 (sequence is synthesized)
acccagtagctcccatctgcaggcagcggggctgccctctccccgccccaaggcaggccacgctcatttctctttccccttgtactcgtagcctccagaggtgaagtccccagtggagcc

SEQ ID NO: 298288 - DNA, 120 bp, Artificial Sequence
  ENSG00000132475_0 (sequence is synthesized)
gagcgcagagcggtttggtcgttcgttgggcggtgctggtttttcgctcgtcgactgcggctcttcctcgggcagcggaagcggcgcggcggtcggagaagtggcctaaaacttcggcgt

SEQ ID NO: 298289 - DNA, 120 bp, Artificial Sequence
  ENSG00000132475_1 (sequence is synthesized)
tgggtgaaagaaaatggcccgaaccaagcagactgctcgtaagtccaccggtgggaaagccccccgcaaacagctggccacgaaagccgccaggaaaagcgctccctctaccggcggggt

SEQ ID NO: 298290 - DNA, 120 bp, Artificial Sequence
  ENSG00000132475_2 (sequence is synthesized)
gaagaagcctcatcgctacaggcccgggaccgtggcgcttcgagagattcgtcgttatcagaagtcgaccgagctgctcatccggaagctgcccttccagaggttggtgagggagatcgc

SEQ ID NO: 298291 - DNA, 120 bp, Artificial Sequence
  ENSG00000132475_3 (sequence is synthesized)
gcaggatttcaaaaccgacctgaggtttcagagcgcagccatcggtgcgctgcaggaggctagcgaagcgtacctggtgggtctgttcgaagataccaacctgtgtgccatccacgctaa

SEQ ID NO: 298292 - DNA, 120 bp, Artificial Sequence
  ENSG00000132475_4 (sequence is synthesized)
gagagtcaccatcatgcccaaagacatccagttggctcgccggatacggggagagagagcttaagtgaaggcagtttttatggcgttttgtagtaaattctgtaaaatactttggtttaa

SEQ ID NO: 298293 - DNA, 120 bp, Artificial Sequence
  ENSG00000132475_5 (sequence is synthesized)
tttgtgactttttttgtaagaaattgtttataatatgttgcatttgtacttaagtcattccatctttcactcaggatgaatgcgaaaagtgactgttcacagacctcagtgatgtgagca

SEQ ID NO: 298294 - DNA, 120 bp, Artificial Sequence
  ENSG00000132475_6 (sequence is synthesized)
ctgttgctcaggagtgacaagttgctaatatgcagaagggatgggtgatacttcttgcttctcatgatgcatgtttctgtatgttaatgacttgttgggtagctattaaggtactagagt

SEQ ID NO: 298295 - DNA, 120 bp, Artificial Sequence
  ENSG00000132475_7 (sequence is synthesized)
tgataaatgtgtacagggtccttttgcaataaaactggttatgacttgatccaagtgtttaacaattggggctgttaagtctgaccatacatcactgtgatagaatgtgggctttttcaa

SEQ ID NO: 298296 - DNA, 120 bp, Artificial Sequence
  ENSG00000132475_8 (sequence is synthesized)
gggtgaagatacaagtcttaaccacagtgtaacttacagtttcctttaaaaaaaaaaaaagtaaacctggcagctatagaatacactatgtgcatttataatagctattttatatattgt

SEQ ID NO: 298297 - DNA, 120 bp, Artificial Sequence
  ENSG00000132475_9 (sequence is synthesized)
agtatcaacatttttaaattaaatgttttacattcacaagtggtggggagtcttgtcattaaggtgtgtgtaatttagagtccagttggttttcttctgactgcacttgttctcatagta

SEQ ID NO: 298298 - DNA, 120 bp, Artificial Sequence
  ENSG00000132475_10 (sequence is synthesized)
gtaaaatgctatgcgcatttataccttgcataagtcctcattctaccacatgttaaccctctagctgataatgcaaacactaactgggggattttatttataagggctctagaaaaaacg

SEQ ID NO: 298299 - DNA, 120 bp, Artificial Sequence
  ENSG00000132475_11 (sequence is synthesized)
tgtgtggttggtctcataactaggttgagtttttctcctctgctgaggaaacagtaccgaagttctttttcttgtggcatttgtattataaaaacttggtgtgggggaggagcacaaaac

SEQ ID NO: 298300 - DNA, 120 bp, Artificial Sequence
  ENSG00000132475_12 (sequence is synthesized)
tccagcccactgaacctctgccaattaagatggtgttgggttaggttacatctggttactgtcctgggaaaatcatttttatagagatggccttccaagtggttttaaaatttactgaag

SEQ ID NO: 298301 - DNA, 120 bp, Artificial Sequence
  ENSG00000132475_13 (sequence is synthesized)
tttttaggtcaattatgtatgttgactaaatttacaaataaacttgtttatccaactaagtgtccaaaacctaaattgaatgtactaagttttcacatgtcccattatctaggtccttgt

SEQ ID NO: 298302 - DNA, 120 bp, Artificial Sequence
  ENSG00000132475_14 (sequence is synthesized)
atactaatgttttgaacttagatcatttcaggtgttgtttggtggataaaggaaccttttatttataaagatactgtagaaagcatgtgaacagctctctgcttgattaagatgccataa

SEQ ID NO: 298303 - DNA, 120 bp, Artificial Sequence
  ENSG00000132475_15 (sequence is synthesized)
tagtgctgtatttgcagtgtgggctaagacaaagtatattaataagcttttcagcccccccactcccgttccgtagtgtagaagcccacaggtgtagaactcagtcttaaacttcagtat

SEQ ID NO: 298304 - DNA, 120 bp, Artificial Sequence
  ENSG00000132475_16 (sequence is synthesized)
gaaaccagtttccttgtgcgatgatggccactaaagcatagtacgtggatgtcagtgagacagcatgagagccagcagtcatcaaagcgttccacgtttgaagttagcaactgcttaaag

SEQ ID NO: 298305 - DNA, 120 bp, Artificial Sequence
  ENSG00000132475_17 (sequence is synthesized)
ttataccccattaaaattgctttctcaaaagtttgggttagtttcaaatgtgatattttggagggaaggtaaagtaggtatctttcaggtcgtgataatgagctcctatgaaaggatgca

SEQ ID NO: 298306 - DNA, 120 bp, Artificial Sequence
  ENSG00000132475_18 (sequence is synthesized)
atataatgacccgcttttctagaaagttcataatcagctctggaacaagcacacttgattcctcactgtgcttcagaatgagattaagatcagatgttggaacgtgctatgctgtagcgt

SEQ ID NO: 298307 - DNA, 120 bp, Artificial Sequence
  ENSG00000132475_19 (sequence is synthesized)
gtctggaaacaaagtacacaaacctggctacggtgatgagttagcttctgcttactacctgtgacaacccaagtgggtgacactagtgaaccttctccagtctgcaggctggcatagaag

SEQ ID NO: 298308 - DNA, 120 bp, Artificial Sequence
  ENSG00000132475_20 (sequence is synthesized)
gctcttagattatattgggcagcttgcaatctgccgaagcagtgacttgcatttccacacttggcttgagcactcaacccagaaggcgaagatagcttttggttgtaggcggcttcctgt

SEQ ID NO: 298309 - DNA, 120 bp, Artificial Sequence
  ENSG00000132475_21 (sequence is synthesized)
atgggatatccctcggtaagggtaaaggagcagaggcaaaggagaaaagcagaagttgcagctgatgcaggtatcctatgcccttgatggatgagactaaaataaaatttttgaagttaa

SEQ ID NO: 298310 - DNA, 120 bp, Artificial Sequence
  ENSG00000132475_22 (sequence is synthesized)
gcgttcgtaggtttacccgcggcttcaggttctgccaaccgttggcgccgcgcgccgcggccgttgggagccgagcggcgggggctgctcgggccgctggcgtcgggtcgggtatggggc

SEQ ID NO: 298311 - DNA, 120 bp, Artificial Sequence
  ENSG00000132475_23 (sequence is synthesized)
cgggaggtttccccttggggctttgttccggaactgtgtccccgccttttcccggcggtgattcagaggtcccgacgccgggttccgggcagtcgggcctccgcccgtcgaggaagggaa

SEQ ID NO: 298312 - DNA, 120 bp, Artificial Sequence
  ENSG00000132475_24 (sequence is synthesized)
gtgactcctccccgcgctccccctcccgggggaggctgccgctcctcgcagcctgagtcattaggggagggggaggaggttggcggccctcggccatctgctgccgcgaggtggggcgcg

SEQ ID NO: 298313 - DNA, 120 bp, Artificial Sequence
  ENSG00000132475_25 (sequence is synthesized)
caggtaagacaaaggcctggagccgggggagggctgggcggtttccgctccccgagtgggattaatagtgcggctctcgtcctcaacaggaggctagcgaagcgtacctggtgggtctgt

SEQ ID NO: 298314 - DNA, 120 bp, Artificial Sequence
  ENSG00000132475_26 (sequence is synthesized)
acatcactcaggagcccatggggatgagaggcattcacagagcatcagggaaaatggaaagcaacattttgcttaacaggagaaaccgccccttattcatctttctcccacatcacctaa

SEQ ID NO: 298315 - DNA, 120 bp, Artificial Sequence
  ENSG00000132475_27 (sequence is synthesized)
ctctagggaatgcttaacgtggcttgaaggaaatgaagacagcgacctaaaagcacacagatgcaagacttccaggaagaggttttcccatcctgctggactcctgtagtgtcagtattt

SEQ ID NO: 298316 - DNA, 120 bp, Artificial Sequence
  ENSG00000132475_28 (sequence is synthesized)
ggggctccctctaatgctacatttctgctgagcctgcagacatacttggaacccatcaccttcgggctcccagactcaggctccgcacagcccgcgagggaaacggtcatgggcacgcac

SEQ ID NO: 298317 - DNA, 120 bp, Artificial Sequence
  ENSG00000132475_29 (sequence is synthesized)
ggacacgtttccatctttgcatgtttatctacgtcgactgtgaattcaagcaagtgtggccctcgtggacaacctacgagccttagggacacaaaaggcttcctgcgcaaactgcacgga

SEQ ID NO: 298318 - DNA, 120 bp, Artificial Sequence
  ENSG00000132475_30 (sequence is synthesized)
atctcctgacaggacttcacgttaatcatcattcataggtgggttctggggctggaccccacggaactcctcttggttgtgtcttggacttctcactgccccaaaggagcctactactgt

SEQ ID NO: 298319 - DNA, 120 bp, Artificial Sequence
  ENSG00000132475_31 (sequence is synthesized)
ggttttatggtctgaggaacagttaggcctcgaaggcctggcctagggagagtgcactctgcatcccgagctcccgccttccccactcggcggccgggaccgagtttcccgccccacagc

SEQ ID NO: 298320 - DNA, 120 bp, Artificial Sequence
  ENSG00000132475_32 (sequence is synthesized)
ccgaccagaggttggtggcagttggaggcagttgggaccggccccagcaggttggaaccggtctgggccgggccggaggaggaagggggggaggaagaggccgcctcgcgctctccctgc

SEQ ID NO: 298321 - DNA, 120 bp, Artificial Sequence
  ENSG00000132475_33 (sequence is synthesized)
gcgcgtgactcacgctggccgctgacgtcaggcgtgcgcgcgcggcgggggggggggggctctacgtacgtgtagtgctgcggtttctcgggctgtgcctgcagcacctgagcggtagcg

SEQ ID NO: 298322 - DNA, 120 bp, Artificial Sequence
  ENSG00000132475_34 (sequence is synthesized)
gccgggggcgccgaggaagctgcggagccgccgggcccggggcccttcgacatggtcttgtcttcctgcctcttcgccgctccccttttattattcagtctgcgcggtccgcgccgagga

SEQ ID NO: 298323 - DNA, 120 bp, Artificial Sequence
  ENSG00000132475_35 (sequence is synthesized)
cccagtgcgcctgcgccgcgccacgagaacgtgaagaccccccacacggcagcaggggttgctgggagttgtggttctatgtccggctggaattttaccgtcggcagagggttgctggca

SEQ ID NO: 298324 - DNA, 120 bp, Artificial Sequence
  ENSG00000132475_36 (sequence is synthesized)
aagcacaggaccacaatacccagggatccttgctgctagtgtcccggatgctgagggcctgcgacggcttctgggaattgcagtccggtcgcatttctccttcttaccagcgcgttttca

SEQ ID NO: 298325 - DNA, 120 bp, Artificial Sequence
  ENSG00000132475_37 (sequence is synthesized)
ctggagcgcctggaggagaaggggcccagagctagggaggccctagcgatttctgcgaaagagttccaagtataatttcactgccaacagtgtcataactactttgcctttatacttagt

SEQ ID NO: 298326 - DNA, 120 bp, Artificial Sequence
  ENSG00000132475_38 (sequence is synthesized)
acagctaggttcggttctaatgccagctcagagcagtgctccaagcagggcttaagaatctgtgttgtcggttcttagttctgggccctgtgctgcaggcacctgcaatccgccagcaac

SEQ ID NO: 298327 - DNA, 120 bp, Artificial Sequence
  ENSG00000132475_39 (sequence is synthesized)
cccttcatccctgcggcgggtctaacctaagaggcattgagaaagctttgctaaggaggaggtacaccgcacgctacagttcccgcgcctttgccgaggcgcttcatttacctttgccaa

SEQ ID NO: 298328 - DNA, 120 bp, Artificial Sequence
  ENSG00000132475_40 (sequence is synthesized)
actcgacacctggaactccacgacttgtgtgctttctcagcctgacacctggcctgaccaacttgtttccagtacattaagggccaaggacgaatttaatctccgcctagaatagtctct

SEQ ID NO: 298329 - DNA, 120 bp, Artificial Sequence
  ENSG00000132475_41 (sequence is synthesized)
gaggtacactgacaagttgccagtgttgagaagcatcacagggtccagaggaaaggcctgggtttgagtagggcgtgcccgtatttatccactctagttttcttgtctggacgtcagcct

SEQ ID NO: 298330 - DNA, 120 bp, Artificial Sequence
  ENSG00000132475_42 (sequence is synthesized)
ttttacttgggacattatctttcccctctctgcttcccaccagtcaagcaaagttcttcactttataaaataagccagatgccccagacctaggcatttgtttctgtgagttttagaatg

SEQ ID NO: 298331 - DNA, 120 bp, Artificial Sequence
  ENSG00000132475_43 (sequence is synthesized)
ttctccgtagatattttaaccgttgtcatttaatttggtttttcatattgaatctatttcaaatccactggttttgatttatattttcttagatgggattatattaacaaatgattatct

SEQ ID NO: 298332 - DNA, 120 bp, Artificial Sequence
  ENSG00000132475_44 (sequence is synthesized)
cattaaagaaacacattccaaataaccttagggatgaagggtggtggggctaatggaaaatcgttaatgtttgagtgacacatacttattttatttagctccaagttccctcacatcaga

SEQ ID NO: 298333 - DNA, 120 bp, Artificial Sequence
  ENSG00000132475_45 (sequence is synthesized)
agccacatcacagagttgagaaactggtttttcctaaacaggctaaatcgtttagccactaggggcgtttgaaaatgaaaaattacaaaaggacaaataaaagttgtagtatattgcttt

SEQ ID NO: 298334 - DNA, 120 bp, Artificial Sequence
  ENSG00000132475_46 (sequence is synthesized)
aatcctatgattaaacgcaagttacttggtttatgttagcctcacaatactcaagtgtgatctgactgaagaaatagagttcacagcactggattttaaataatagatgtatatcatgag

SEQ ID NO: 298335 - DNA, 120 bp, Artificial Sequence
  ENSG00000132475_47 (sequence is synthesized)
cttcagaataagtgtgtactggtggagttgggagatgatatcatccaaactgcttaatttacaaaagaggaaaccgaaacccagagaagctaagtaacttgcacaaagttactcagcaag

SEQ ID NO: 298336 - DNA, 120 bp, Artificial Sequence
  ENSG00000132475_48 (sequence is synthesized)
ttggtaacaagaggaactaggacagtagcctacaagactacatcacattcactgttgggttttgtttgttttgttttcttctgctttttttcattgtataaacattttttattcttcctc

SEQ ID NO: 298337 - DNA, 120 bp, Artificial Sequence
  ENSG00000132478_0 (sequence is synthesized)
gcactgggtcctcggcgcggaccgcgcagactgaataataaaaggggagcggcgaagaggcaggaagacaagaccatgtcgaagggccccgggcccggcggctccgcagcttcctcggcg

SEQ ID NO: 298338 - DNA, 120 bp, Artificial Sequence
  ENSG00000132478_1 (sequence is synthesized)
cccccggccgctaccgctcaggtgctgcaggcacagcccgagaaaccgcagcactacacgtacctgaaagaattccgcacagagcagtgcccactctttgtgcaacacaaatgcacgcag

SEQ ID NO: 298339 - DNA, 120 bp, Artificial Sequence
  ENSG00000132478_2 (sequence is synthesized)
catcggccctacacctgcttccactggcacttcgtgaaccagcggcgccgccggtccatccgccgtcgggacggcaccttcaattacagccctgacgtctactgcaccaagtacgacgag

SEQ ID NO: 298340 - DNA, 120 bp, Artificial Sequence
  ENSG00000132478_3 (sequence is synthesized)
gctacaggcctctgcccggagggcgacgagtgcccattcctgcacagaaccacaggggacactgagcgcaggtaccaccttcgttactacaaaactggaatctgcatccacgagacagac

SEQ ID NO: 298341 - DNA, 120 bp, Artificial Sequence
  ENSG00000132478_4 (sequence is synthesized)
tcgaaaggcaactgcaccaaaaacggcctgcactgcgcttttgcccacgggccccatgacctccgctcccctgtctacgacatcagggagcttcaggccatggaggccttgcagaatggc

SEQ ID NO: 298342 - DNA, 120 bp, Artificial Sequence
  ENSG00000132478_5 (sequence is synthesized)
cagaccacggtagaggggagcatagagggccagtcggctggggctgcgagccatgccatgatagaaaagatcctcagcgaggagcctcggtggcaagagactgcttatgtgctggggaac

SEQ ID NO: 298343 - DNA, 120 bp, Artificial Sequence
  ENSG00000132478_6 (sequence is synthesized)
tataagacggagccttgcaagaagcccccgcggctgtgccgccaaggctatgcctgtccctactaccacaacagcaaggaccggcggcggagcccccggaagcacaaatacaggtcgtct

SEQ ID NO: 298344 - DNA, 120 bp, Artificial Sequence
  ENSG00000132478_7 (sequence is synthesized)
ccatgtccaaacgtcaagcacggggatgagtggggagaccctggcaagtgtgagaacggagacgcctgccagtactgccacacccgcaccgagcagcagttccaccccgagatctacaag

SEQ ID NO: 298345 - DNA, 120 bp, Artificial Sequence
  ENSG00000132478_8 (sequence is synthesized)
tccaccaagtgcaacgacatgcagcagtcgggcagctgtccccgaggacccttctgcgcctttgcccacgtagaacagccacccctgagtgacgacctgcagccttcctcagctgtgtcc

SEQ ID NO: 298346 - DNA, 120 bp, Artificial Sequence
  ENSG00000132478_9 (sequence is synthesized)
agccccacccagccaggtcctgtcctgtacatgccatctgccgccggagactcggtgcctgtgagcccctccagcccgcatgcccctgacctcagtgccctcctctgtagaaacagcagc

SEQ ID NO: 298347 - DNA, 120 bp, Artificial Sequence
  ENSG00000132478_10 (sequence is synthesized)
ctaggcagcccgtctaacctctgcggctccccaccgggctccatcaggaagcccccaaacctggagggcatcgtcttccctggggagtctggcctggcccctggcagctataagaaggct

SEQ ID NO: 298348 - DNA, 120 bp, Artificial Sequence
  ENSG00000132478_11 (sequence is synthesized)
cccggcttcgagagggaagaccaggtgggagccgagtacctgaaaaatttcaaatgccaggccaaattaaaaccccactcattagagcccaggagtcaagagcagcctctgcttcagccc

SEQ ID NO: 298349 - DNA, 120 bp, Artificial Sequence
  ENSG00000132478_12 (sequence is synthesized)
aaacaggacatgctgggcatcctccccgcaggcagccccctgacctcaagcatctcttctagtatcacctccagcctggcagctaccccccctagcccagtgggcaccagcagcgtcccc

SEQ ID NO: 298350 - DNA, 120 bp, Artificial Sequence
  ENSG00000132478_13 (sequence is synthesized)
ggcatgaatgcaaacgctctgcccttctaccccaccagcgacacggtagagtcagtcatagagtctgctttggatgacctggacctgaatgagtttggcgtggccgccctggagaagact

SEQ ID NO: 298351 - DNA, 120 bp, Artificial Sequence
  ENSG00000132478_14 (sequence is synthesized)
ttcgataacagcacagtgccccacccaggaagcatcaccatcggcggcagcttgctgcagagctctgcacccgtgaacatccccggctccttgggcagctctgcctccttccactcagca

SEQ ID NO: 298352 - DNA, 120 bp, Artificial Sequence
  ENSG00000132478_15 (sequence is synthesized)
tccccgtcccctcccgtcagcctctcctcgcatttcctgcagcagccccagggccacctgagtcagtcggaaaacacatttttgggaacctcagcatcacatggatctttgggtctgaac

SEQ ID NO: 298353 - DNA, 120 bp, Artificial Sequence
  ENSG00000132478_16 (sequence is synthesized)
gggcacttcccccgctttcctatcagggccaggggctgccgagctggcccgacttcggcaagagctggatgaagccaacagcaccatcaagcagtgggaggagtcctggaagcaggccaa

SEQ ID NO: 298354 - DNA, 120 bp, Artificial Sequence
  ENSG00000132478_17 (sequence is synthesized)
gcaggcttgtgatgcctggaagaaagaggcggaggaggctggtgagcgggccagtgcggcgggcgccgagtgcgagctggcccgggagcagcgggatgcactggaggtgcaggtgaagaa

SEQ ID NO: 298355 - DNA, 120 bp, Artificial Sequence
  ENSG00000132478_18 (sequence is synthesized)
gctccaggaggagctggagcggctacacgcggggcctgagccccaggccctgcccgccttctccgacctggaggcgctctcactctccaccctctactccctccagaaacaactgcgggc

SEQ ID NO: 298356 - DNA, 120 bp, Artificial Sequence
  ENSG00000132478_19 (sequence is synthesized)
ccacctggaacaagtggacaaggccgtgttccacatgcagtcggtgaaatgccttaagtgtcaggaacagaagcgggcagtgctgccgtgccaacacgctgcgctgtgtgagctctgcgc

SEQ ID NO: 298357 - DNA, 120 bp, Artificial Sequence
  ENSG00000132478_20 (sequence is synthesized)
tgagggcagcgagtgccccatctgccagcctggccgggcccacaccctccagtcgtgaccctgcaggcctggcccagcctggcccagatcttctcacctaggactttttaaagtatatat

SEQ ID NO: 298358 - DNA, 120 bp, Artificial Sequence
  ENSG00000132478_21 (sequence is synthesized)
atatatatgaatatatatatatatgtgtatgtatgtatgtatatgtatatgattatgtatatgtatacatttccgtatgtatgtatatgtatacatttccgtatgtgtgcaggtatgcgt

SEQ ID NO: 298359 - DNA, 120 bp, Artificial Sequence
  ENSG00000132478_22 (sequence is synthesized)
ggtggtgtggacagtgtctgtgtgtatatctgtacatagatatagacacacactttaaaagacttaccaagcactttttaaaagaagaaactattttgcagtcctcccctacccactccc

SEQ ID NO: 298360 - DNA, 120 bp, Artificial Sequence
  ENSG00000132478_23 (sequence is synthesized)
tgcccttcccactgcagagatgacatcccctcttctcccactggccttttggcagagaatctggttctgtctcttttttaatgtaggaactaactatttttaacttcttcctggggcctg

SEQ ID NO: 298361 - DNA, 120 bp, Artificial Sequence
  ENSG00000132478_24 (sequence is synthesized)
agcagggaagggtgggactggaaggcactaaggggaagggagaagccctcagggcaggccctgctccccctacctccttgccagggcaagggtggagtgtggaagacgtgggtcccccag

SEQ ID NO: 298362 - DNA, 120 bp, Artificial Sequence
  ENSG00000132478_25 (sequence is synthesized)
agcaggcctggcccccagctgtgagggcctcagggaggcccgagggggagtgctgggggtctcagctggcttagctcctaagtttaccaaatgttaatttagtcttggggagaacagcaa

SEQ ID NO: 298363 - DNA, 120 bp, Artificial Sequence
  ENSG00000132478_26 (sequence is synthesized)
gggctggaggccagtgctgcagggccagccccactcctgacacctgggcccttgaagctccttgaggggcaaggcccaggagttccagccctcaggttcctgagggtccaccctcagtcc

SEQ ID NO: 298364 - DNA, 120 bp, Artificial Sequence
  ENSG00000132478_27 (sequence is synthesized)
ttccccccgccgcccctccccggactccccacaagagcctccctggccccagggccgcctaccaggctggtactcattctatgaccaccgcccccaaccagctgcccccagctctccctg

SEQ ID NO: 298365 - DNA, 120 bp, Artificial Sequence
  ENSG00000132478_28 (sequence is synthesized)
ccccctcccctctctggcagctagcagggcaattggcggggaggagtgcggactgaggactgaggaccaagggggcccaggccctgccctcctacccggaggggctccgtttgcattcct

SEQ ID NO: 298366 - DNA, 120 bp, Artificial Sequence
  ENSG00000132478_29 (sequence is synthesized)
tggtgctctctgagtgcagctggtgtcccgccctgttctgggcggacgcctgtgtgcgtgtgtgtgtgcctgtccagtgtatattgtgtcttagcttccattttaaaaattgttctgtac

SEQ ID NO: 298367 - DNA, 120 bp, Artificial Sequence
  ENSG00000132478_30 (sequence is synthesized)
agagagagatgcagcaggggcgggagggcagagtgggcggaggggagcagccgcacccccagcaccgggtgtctgcggtaggaacaagagggctgagagggtctggtcctggcccaggct

SEQ ID NO: 298368 - DNA, 120 bp, Artificial Sequence
  ENSG00000132478_31 (sequence is synthesized)
cccccttgggctcagcacgaaagggctttcaatgaattaagtgaaaactttttccttttttacaaaaatgcaaaaatcaacaaagctccaaacctattggaaataaaatatgaacttgca

SEQ ID NO: 298369 - DNA, 120 bp, Artificial Sequence
  ENSG00000132478_32 (sequence is synthesized)
cccgagaaaccgcagcactacacctatgttagatactaaagaaggcttccccacaacccatatgcatctgctttgactggtggtttctatcatcctacaaagactgtgacttattggtga

SEQ ID NO: 298370 - DNA, 120 bp, Artificial Sequence
  ENSG00000132478_33 (sequence is synthesized)
tctctgcaaatagcaccccagataagtgcacaaaagcaagataccctcgtggacctacacgtcctcccgcttttcaacaccctgatgcctgaaggtgaggtctctttcctgtgtgtctta

SEQ ID NO: 298371 - DNA, 120 bp, Artificial Sequence
  ENSG00000132478_34 (sequence is synthesized)
gaagccatgagcacgcttaggtaactagagccctgccacagcctgagcagcacagcacacatctgcaggctttcctgccagacctttacctaaaggtaatttttctcattaggagagact

SEQ ID NO: 298372 - DNA, 120 bp, Artificial Sequence
  ENSG00000132478_35 (sequence is synthesized)
cacggcagaggagagagaccagtgaaggttgggaggaggcggccaaaaggagacagcttcatgcccccaggacataaatagcccggctgctgcaggtacctgaaagaattccgcacagag

SEQ ID NO: 298373 - DNA, 120 bp, Artificial Sequence
  ENSG00000132478_36 (sequence is synthesized)
agtagattgtcttcccttttaacatcttggatgaatttgggtcacactaattgttatgtgaagatggatgttgaattgtgtagaatttgacagcagtatcaagagctgaggagaaggaga

SEQ ID NO: 298374 - DNA, 120 bp, Artificial Sequence
  ENSG00000132478_37 (sequence is synthesized)
tgacagcctgtgacagtatcatcaagtcgtatctgaacttattgaactgtttcctccccttccttattctttattcacagtttgcttttcatgtgcataagttgactcatttgtttcctg

SEQ ID NO: 298375 - DNA, 120 bp, Artificial Sequence
  ENSG00000132478_38 (sequence is synthesized)
ttagcatttgaaacaccatatagccaccataagtcctgacaaaatgacttttaataaggagggggaaggtccatgtcccaccttcctatgaaattttggcctattcacaagtctaccccc

SEQ ID NO: 298376 - DNA, 120 bp, Artificial Sequence
  ENSG00000132478_39 (sequence is synthesized)
acataagagaagtagttatgttctgtaaagaagaggttgataaaaacctttagcatggtgttttgtgacttagaagttttaagtagtcgttcttatatctaagcatttattaattttggt

SEQ ID NO: 298377 - DNA, 120 bp, Artificial Sequence
  ENSG00000132478_40 (sequence is synthesized)
aagaacattactatacgtttctgatgtcacttttactgttaagaggtgccaggcatctggtgacctgtcacttcaggatttgtgtgaatcagaccatctaaatataatataaattagaga

SEQ ID NO: 298378 - DNA, 120 bp, Artificial Sequence
  ENSG00000132478_41 (sequence is synthesized)
ctggtacttgtatttcctgattaaaaacaaagtaacgtctgttttactattgaagtaagagtactttataatgaatacaaaaatgtatattaaatatccagtagagcatgctaaagtgaa

SEQ ID NO: 298379 - DNA, 120 bp, Artificial Sequence
  ENSG00000132478_42 (sequence is synthesized)
ctcccctgtctacgacatcaggtgggctgggtgctgggctgggctgatggcagtaggctggggtccagggcaggggcctggcggctaatgatgggagcttcaggccatggaggccttgca

SEQ ID NO: 298380 - DNA, 120 bp, Artificial Sequence
  ENSG00000132478_43 (sequence is synthesized)
tacattagcctaattgctaacaatgccaagaatttaggtttactatccctctggacaatgtagcttcttgttttcttaccatatagataactctatagattcaccccagccagtcatctt

SEQ ID NO: 298381 - DNA, 120 bp, Artificial Sequence
  ENSG00000132481_0 (sequence is synthesized)
acaatcggcggcgccctgggcggccgcggagtcatggacggcagtggacccttcagctgccccatctgcctagagccactccgggagccggtgacgctgccctgcggccacaacttctgt

SEQ ID NO: 298382 - DNA, 120 bp, Artificial Sequence
  ENSG00000132481_1 (sequence is synthesized)
ctcgcctgcctgggcgcgctctggccgcatcgtggcgcgagtggagccggcggacccggaggcgcggcccgctgcccgctgtgccaggagcccttccccgacggccttcagctccgcaag

SEQ ID NO: 298383 - DNA, 120 bp, Artificial Sequence
  ENSG00000132481_2 (sequence is synthesized)
cttccccgacggccttcagctccgcaagaaccacacgctgtccgagctgctgcagctccgccagggctcgggccccgggtccggccccggcccggcccctgccctggccccggagccctc

SEQ ID NO: 298384 - DNA, 120 bp, Artificial Sequence
  ENSG00000132481_3 (sequence is synthesized)
gcgaagagccagtgcgctgcgacgcgtgccccgagggcgcggccctgcccgccgcgctgtcctgcctctcctgcctcgcctccttttgccccgcgcacctgggcccgcacgagcgcagcc

SEQ ID NO: 298385 - DNA, 120 bp, Artificial Sequence
  ENSG00000132481_4 (sequence is synthesized)
gcctcgcctccttttgccccgcgcacctgggcccgcacgagcgcagccccgccctccgcggacaccgcctggtgccgccgctgcgccggctagaggagagcctgtgcccgcgccacctac

SEQ ID NO: 298386 - DNA, 120 bp, Artificial Sequence
  ENSG00000132481_5 (sequence is synthesized)
gagcgctactgccgcgcggagcgcgtgtgtctgtgcgaggcctgcgccgcacaggagcaccgcggccacgagctggtgccgctggagcaggagcgcgcgcttcaggaggctgagcagtcc

SEQ ID NO: 298387 - DNA, 120 bp, Artificial Sequence
  ENSG00000132481_6 (sequence is synthesized)
aaagtcctgagcgccgtggaggaccgcatggacgagctgggtgctggcattgcacagtccaggcgcacagtggccctcatcaagagtgcagccgtagcagagcgggagagggtgagccgg

SEQ ID NO: 298388 - DNA, 120 bp, Artificial Sequence
  ENSG00000132481_7 (sequence is synthesized)
ctgtttgcagatgctgcggccgccctgcagggcttccagacccaggtgctgggcttcatcgaggagggggaagctgccatgctaggccgctcccagggtgacctgcggcgacaggaggaa

SEQ ID NO: 298389 - DNA, 120 bp, Artificial Sequence
  ENSG00000132481_8 (sequence is synthesized)
cagcgcagccgcctgagccgagcccgccagaatctcagccaggtccctgaagctgactcagtcagcttcctgcaggagctgctggcactaaggctggccctggaggatgggtgtggccct

SEQ ID NO: 298390 - DNA, 120 bp, Artificial Sequence
  ENSG00000132481_9 (sequence is synthesized)
ggccgggtggcaacgaggatgggccacagaagctggactcggaagctgatgctgagccccaagacctcgagagtacgaacctcttggagagtgaagctcccagggactatttcctcaagt

SEQ ID NO: 298391 - DNA, 120 bp, Artificial Sequence
  ENSG00000132481_10 (sequence is synthesized)
ttgcctatattgtggatttggacagcgacacagcagacaagttcctgcagctgtttggaaccaaaggtgtcaagagggtgctgtgtcctatcaactaccccttgtcgcccacccgcttca

SEQ ID NO: 298392 - DNA, 120 bp, Artificial Sequence
  ENSG00000132481_11 (sequence is synthesized)
cccattgtgagcaggtgctgggcgagggtgccctggaccgaggcacctactactgggaggtggagattatcgagggctgggtcagcatgggggtcatggccgaagacttctccccacaag

SEQ ID NO: 298393 - DNA, 120 bp, Artificial Sequence
  ENSG00000132481_12 (sequence is synthesized)
agccctacgaccgcggccggctgggccgcaacgcccactcctgctgcctgcagtggaatggacgcagcttctccgtctggtttcatgggctggaggctcccctgccccaccccttctcgc

SEQ ID NO: 298394 - DNA, 120 bp, Artificial Sequence
  ENSG00000132481_13 (sequence is synthesized)
ccacggttggggtctgcctggaatacgctgaccgtgccttggccttctatgctgtacgggacggcaagatgagcctcctgcggaggctgaaggcctcccggccccgccggggtggcatcc

SEQ ID NO: 298395 - DNA, 120 bp, Artificial Sequence
  ENSG00000132481_14 (sequence is synthesized)
cggcctcccccattgaccccttccagagccgcctggacagtcactttgcggggctcttcacccacagactcaagcctgccttcttcctggagagtgtggacgcccacttgcagatcgggc

SEQ ID NO: 298396 - DNA, 120 bp, Artificial Sequence
  ENSG00000132481_15 (sequence is synthesized)
ccctcaagaagtcctgcatatccgtgctgaagaggaggtgatgccgggcacgggcgctcctgctgccgtctctgctccaggaagctgcctcctctgggccctctccttcgtctgggaagg

SEQ ID NO: 298397 - DNA, 120 bp, Artificial Sequence
  ENSG00000132481_16 (sequence is synthesized)
caccagcatgagtcccacacacccagccttctcatttctagaggcttccacctttttatacactcagccttccctctcccaggcaggaggacccccagaccctgttcccctgcagacctc

SEQ ID NO: 298398 - DNA, 120 bp, Artificial Sequence
  ENSG00000132481_17 (sequence is synthesized)
acttctgggagacagagctacagctgggacagctccaagctaccctaacccctcctttcccaggtttctagaatagtgtctggcatgtagtagatgctcaataaacacttgttgaatgaa

SEQ ID NO: 298399 - DNA, 120 bp, Artificial Sequence
  ENSG00000132481_18 (sequence is synthesized)
tgcttgctccctggtggctctggactctgggaggaagtgaagggggtagggattgtagtcacaggttcagaggggggcagtctgggggcgttctcaccactgtctcctcttctacagctg

SEQ ID NO: 298400 - DNA, 120 bp, Artificial Sequence
  ENSG00000132481_19 (sequence is synthesized)
gggagcagctgagggggccgggtggcaacgaggatgggccacagaagctggactcggaaggtgggcaccgccccacgcccccccgatgactcaccctctgccagcctctcgcacaggccc

SEQ ID NO: 298401 - DNA, 120 bp, Artificial Sequence
  ENSG00000132481_20 (sequence is synthesized)
accatgcccatacctactgagcacaagtgtcccctgacctggcccagatccaggacaggctcagtctggcccctctgtcccctcaagagggccggtgggaagccggggtcagggaaggag

SEQ ID NO: 298402 - DNA, 120 bp, Artificial Sequence
  ENSG00000132481_21 (sequence is synthesized)
gggggtacagtccgggacggttctttgccctcattgccccctctactgtcgtcctgtgcagagtgcagccgtagcagagcgggagagggtgagccggctgtttgcagatgctgcggccgc

SEQ ID NO: 298403 - DNA, 120 bp, Artificial Sequence
  ENSG00000132481_22 (sequence is synthesized)
atccccttttttccaggcctggactgtggatgcaggctctttgggaacagtgatcctcaggacagcttaatgcctccttgtgcagtcacccctccgccgcccacctcccaacctaactgg

SEQ ID NO: 298404 - DNA, 120 bp, Artificial Sequence
  ENSG00000132481_23 (sequence is synthesized)
cttactctctgcctcttccccgccggaggaagttctcaaattcatctgagcaacactgagaccagcggacggccctgtactaggcctcctgtcagagacccgaggcagacacccagtcag

SEQ ID NO: 298405 - DNA, 120 bp, Artificial Sequence
  ENSG00000132481_24 (sequence is synthesized)
acgccccccaggcgttcaggaaaggcaccagcctgggctgcaggcacctctggcatattatgggacatcgtggccactccagtcccacctgatgcacagataccactccccagtcacccc

SEQ ID NO: 298406 - DNA, 120 bp, Artificial Sequence
  ENSG00000132485_0 (sequence is synthesized)
gaagacatagctgcgggtggctgtgctggtggcgttcaagatgtcgaccaagaatttccgagtcagtgacggggactggatttgccctgacaaaaaatgtggaaatgtaaactttgctag

SEQ ID NO: 298407 - DNA, 120 bp, Artificial Sequence
  ENSG00000132485_1 (sequence is synthesized)
aagaaccagctgtaatcgatgtggtcgggagaaaacaactgaggccaagatgatgaaagctgggggcactgaaataggaaagacacttgcagaaaagagccgaggcctatttagtgctaa

SEQ ID NO: 298408 - DNA, 120 bp, Artificial Sequence
  ENSG00000132485_2 (sequence is synthesized)
tgactggcaatgtaaaacttgcagcaatgtgaattgggccagaagatcagagtgtaatatgtgtaatactccaaagtatgctaaattagaagaaagaacaggatatggtggtggttttaa

SEQ ID NO: 298409 - DNA, 120 bp, Artificial Sequence
  ENSG00000132485_3 (sequence is synthesized)
tgaaagagaaaatgttgaatatatagaaagagaagaatctgatggtgaatatgatgagtttggacgtaaaaagaaaaaatacagagggaaagcagttggtcctgcatctatattaaagga

SEQ ID NO: 298410 - DNA, 120 bp, Artificial Sequence
  ENSG00000132485_4 (sequence is synthesized)
agttgaagataaagaatcagagggagaagaagaggatgaggatgaagatctttctaaatataagttagatgaggatgaggatgaagatgacgctgatctctcaaaatataatcttgatgc

SEQ ID NO: 298411 - DNA, 120 bp, Artificial Sequence
  ENSG00000132485_5 (sequence is synthesized)
cagtgaagaagaagatagtaataaaaagaaatctaatagacgaagtcgctcaaagtctcgatcttcacattcacgatcttcatcacgctcatcctccccctcaagttcaaggtctaggtc

SEQ ID NO: 298412 - DNA, 120 bp, Artificial Sequence
  ENSG00000132485_6 (sequence is synthesized)
caggtcccgttcaagaagttcttccagttcgcagtcaagatctcgttccagttccagagaacgttcgagatctcgtgggtcgaaatcaagatccagctccaggtcccacaggggctcttc

SEQ ID NO: 298413 - DNA, 120 bp, Artificial Sequence
  ENSG00000132485_7 (sequence is synthesized)
ttccccacgaaaaagatcttattcaagttcatcatcttctcctgagaggaacagaaagagaagtcgttctagatcttcttcatctggtgatcgcaaaaaaagacgaacaagatcacggtc

SEQ ID NO: 298414 - DNA, 120 bp, Artificial Sequence
  ENSG00000132485_8 (sequence is synthesized)
acccgaaagacgccacaggtcatcatctggatcatcccattctggttcccgttcaagttcaaaaaagaaataatgtattaaaatttacatcttaaaaaaatccagtacagtgcatgaagc

SEQ ID NO: 298415 - DNA, 120 bp, Artificial Sequence
  ENSG00000132485_9 (sequence is synthesized)
atatttttaaagaagttggtgtcttacttggtcagaagtgctaaatctgctagtagaggtgcatgcctttcattgcttttcaaaacaatacagctgtgtttatttgtgaagttaaaagta

SEQ ID NO: 298416 - DNA, 120 bp, Artificial Sequence
  ENSG00000132485_10 (sequence is synthesized)
aatagcattttaagccataatgtcccaaaatagatgttctgtcattcattatttacaaccatttgcttcatttaaaaccatttcagctataacaaagtactttgcttcctaatttaaacc

SEQ ID NO: 298417 - DNA, 120 bp, Artificial Sequence
  ENSG00000132485_11 (sequence is synthesized)
cttgcctgaactttgggcatggaagaaagactggaaactagttggaaacaacatacttatggaaaagaaagtcagcctttttatgctgttaacagatgtcagagtgattctcaccaaaaa

SEQ ID NO: 298418 - DNA, 120 bp, Artificial Sequence
  ENSG00000132485_12 (sequence is synthesized)
aagttaaactatgttgtaagcagccaactgtaaatgtctattttgaaattccctatgctaagggtgccttagaatcattgtgtctcttttatccagctttacttttttgctccacattta

SEQ ID NO: 298419 - DNA, 120 bp, Artificial Sequence
  ENSG00000132485_13 (sequence is synthesized)
atgcaaaagaatcttgtgatgtctacaaggagagaagtgggatatattttcctttctgacacataatttggggcaaaaaagaaagtcttaagagtttatcttttctctgctgatacggtt

SEQ ID NO: 298420 - DNA, 120 bp, Artificial Sequence
  ENSG00000132485_14 (sequence is synthesized)
gcttgataaagacatctcaaaatgtttaccaatgttttaagaagctttgtgtgatattcttccaaatgtagttaccaaatataatatggtagaaaaggctaaatcatacttaatgagcaa

SEQ ID NO: 298421 - DNA, 120 bp, Artificial Sequence
  ENSG00000132485_15 (sequence is synthesized)
attgaagtaagcttttaaagtatatttctcttttggtgaaaggccaatggagacattgtgaatttaagtgaacatttgcctcaagatgttaactataaacacactgcatacaattttctt

SEQ ID NO: 298422 - DNA, 120 bp, Artificial Sequence
  ENSG00000132485_16 (sequence is synthesized)
ctgaataacaaatgaatgcttattgctgcatgatgtaagcaaaagtcattatttttcctattcatttgaaataagttatggcttaaaatgcttttggagtttatttctcaaaattaaaat

SEQ ID NO: 298423 - DNA, 120 bp, Artificial Sequence
  ENSG00000132485_17 (sequence is synthesized)
ctggtcacatgagctttagtttgttttctggtttaaaaaataaaaaggtttctcttaacagtatttccagtgacaatgcaaggtaagtatatcaaaggaaatcaacagttgtgcttgggg

SEQ ID NO: 298424 - DNA, 120 bp, Artificial Sequence
  ENSG00000132485_18 (sequence is synthesized)
gctttttgttatgggatattgatttcttgttttttttccgtaacattgtctgctgcaatttaaataaaaattacgacattttaagatatttcatagacaaaccaaacaaaaatatatgtt

SEQ ID NO: 298425 - DNA, 120 bp, Artificial Sequence
  ENSG00000132485_19 (sequence is synthesized)
tttactttaaagtgaatgtttttctcttcagctgatctaaaaatgaaagcaagatatcttatgtagaaatattttgataatatttttacagtgagctttcccatgtttttatgtcttaag

SEQ ID NO: 298426 - DNA, 120 bp, Artificial Sequence
  ENSG00000132485_20 (sequence is synthesized)
tttctttgctgcgtttatgtaggttgcacaagaacttttactcacttgtaattgtgcctcagactttttgaaagtctaccttctaaattgccccgacgatctagattctacatgttacca

SEQ ID NO: 298427 - DNA, 120 bp, Artificial Sequence
  ENSG00000132485_21 (sequence is synthesized)
ttggtttattcttgtgctttctgtatttaaaactttggctgtactaagcaaatgcaaggttataatttagctaatagtagtttacagacaattctgatgattatgatttcatttggttta

SEQ ID NO: 298428 - DNA, 120 bp, Artificial Sequence
  ENSG00000132485_22 (sequence is synthesized)
actaagctgtactagttcatttcataaggaaatgatactgtagacaaatgtaaataaagcctgtgagtcaagcatcaagtggtgtttgttagaaataaactagagatttttaaactctga

SEQ ID NO: 298429 - DNA, 120 bp, Artificial Sequence
  ENSG00000132485_23 (sequence is synthesized)
tctagtgccacgaaggcctcctgcctgggttgtccttatggcgcctgtgagtttagttctagaaaagatatttgtattttaacttttccatctaacaaacagtagcacaggcatcttagt

SEQ ID NO: 298430 - DNA, 120 bp, Artificial Sequence
  ENSG00000132485_24 (sequence is synthesized)
ctggacaacaacgtacaagctgaattcctggctagttccctcattatcaaaccctgacacagtagtaggcgcgagtcaggcagtgtggggacagccccgagttgccgaaagtccccggcc

SEQ ID NO: 298431 - DNA, 120 bp, Artificial Sequence
  ENSG00000132485_25 (sequence is synthesized)
gtcttctgttgaataagcagtaagtattcttccttataaaattttcatagttgttataaatcctgtttatttttggagctatctgataactaaataatcttccttatttcttcttttaat

SEQ ID NO: 298432 - DNA, 120 bp, Artificial Sequence
  ENSG00000132485_26 (sequence is synthesized)
tgttttatagttgagtggctttagggtaatttaatcacctggaaagtgatatttttttaattaccttttgttactaaatcttatctaatttaaaatactatgttttgaaagtatatatct

SEQ ID NO: 298433 - DNA, 120 bp, Artificial Sequence
  ENSG00000132485_27 (sequence is synthesized)
cttaaaaaaagtttaaattctattttgatatagtaagcagggttttaattacacatgatagaattttaaagagacaaaattaaaatgtttaagtagaatgttttcatggttgatccagaa

SEQ ID NO: 298434 - DNA, 120 bp, Artificial Sequence
  ENSG00000132485_28 (sequence is synthesized)
ttttcataaaaatagtattgtaaatataaatcatcttaaagttagtttttatttcttcttgaatatttagcagttaagtacagttactagtcttttgttgctgtgccatatacctggttt

SEQ ID NO: 298435 - DNA, 120 bp, Artificial Sequence
  ENSG00000132485_29 (sequence is synthesized)
ttccataacagtttaatgagttgaataattccacatggaattatgtttattttcctcaggaagtggtatataagatacatattttaatcctcaaatggaaggatgtagttcctaaacgta

SEQ ID NO: 298436 - DNA, 120 bp, Artificial Sequence
  ENSG00000132485_30 (sequence is synthesized)
ccgactttctacttttcaactttgaacttcaaaaaaacattactttgcttatcctttgtactttgatcaggttgtttagaattgtagatcaaaccattctttgatcattttattgtttaa

SEQ ID NO: 298437 - DNA, 120 bp, Artificial Sequence
  ENSG00000132485_31 (sequence is synthesized)
atttttagttccatttataatttttatagccaactctcggttatttctgtcttttgagattgcaattcagaagctgtatgtcgaagtaatttatgagttgacttttatacttaggcttct

SEQ ID NO: 298438 - DNA, 120 bp, Artificial Sequence
  ENSG00000132485_32 (sequence is synthesized)
ttaaatactaatagtcaagaattctagagcatctaataaaaaattaactttcagatcattgggaatctgtcctcatttaaatatgtgtaaatgcatttccacagcaaattgcttcatgcc

SEQ ID NO: 298439 - DNA, 120 bp, Artificial Sequence
  ENSG00000132485_33 (sequence is synthesized)
ctttgtctataaggaaattattccttgtagctaatacatttttcattttgcagtccaaatcttttttgagaaaggcctatattaggttactttatctgtactgacacttttaatattgga

SEQ ID NO: 298440 - DNA, 120 bp, Artificial Sequence
  ENSG00000132485_34 (sequence is synthesized)
agaatgcaactgtcatctgtcagccttttctgcaacaggctaattactcagtttcattaattttctctttgttcccaattatatagtcattttaatggctttatttgtagtctttgcaaa

SEQ ID NO: 298441 - DNA, 120 bp, Artificial Sequence
  ENSG00000132485_35 (sequence is synthesized)
tttttcatattttattagcttgtgaaaataaagattatgtaaagtctattaattgctgggttcagtggtaggattatctcatgattcctacttgtacagaatgattagttttgcttcttc

SEQ ID NO: 298442 - DNA, 120 bp, Artificial Sequence
  ENSG00000132485_36 (sequence is synthesized)
acattttggagtttagatgttaagatttcacacagtcttgtttctctgcatttgtttctttgtaaaaaaaattactctgtttttgagtggaattcattctgttgctttcttaccacttct

SEQ ID NO: 298443 - DNA, 120 bp, Artificial Sequence
  ENSG00000132485_37 (sequence is synthesized)
gcaaatttttatcttagccacatataatccccctagtttgttgtcatctaaacttaatgaacatgttctctattccataagccaggtgattggtgaaaacactaaacaaccctgagccca

SEQ ID NO: 298444 - DNA, 120 bp, Artificial Sequence
  ENSG00000132507_0 (sequence is synthesized)
gtactaagacccgtgtgcagcagcggcggcggcggtagaggcggcggcggcggcggcagcgggctcggaggcagcggttgggctcgcggcgagcggacggggtcgagtcagtgcgttcgc

SEQ ID NO: 298445 - DNA, 120 bp, Artificial Sequence
  ENSG00000132507_1 (sequence is synthesized)
gcgagttggaatcgaagcctcttaaaatggcagatgacttggacttcgagacaggagatgcaggggcctcagccaccttcccaatgcagtgctcagcattacgtaagaatggctttgtgg

SEQ ID NO: 298446 - DNA, 120 bp, Artificial Sequence
  ENSG00000132507_2 (sequence is synthesized)
tgctcaaaggccggccatgtaagatcgtcgagatgtctacttcgaagactggcaagcacggccacgccaaggtccatctggttggtattgacatctttactgggaagaaatatgaagata

SEQ ID NO: 298447 - DNA, 120 bp, Artificial Sequence
  ENSG00000132507_3 (sequence is synthesized)
tctgcccgtcaactcataatatggatgtccccaacatcaaaaggaatgacttccagctgattggcatccaggatgggtacctatcactgctccaggacagcggggaggtacgagaggacc

SEQ ID NO: 298448 - DNA, 120 bp, Artificial Sequence
  ENSG00000132507_4 (sequence is synthesized)
ttcgtctccctgagggagaccttggcaaggagattgagcagaagtacgactgtggagaagagatcctgatcacggtgctgtctgccatgacagaggaggcagctgttgcaatcaaggcca

SEQ ID NO: 298449 - DNA, 120 bp, Artificial Sequence
  ENSG00000132507_5 (sequence is synthesized)
ccccctccccgagcctggcctggctctggcccggtcctaagctggactcctcctacacaatttatttgacgttttattttggttttccccaccccctcaatctgtcggggagcccctgcc

SEQ ID NO: 298450 - DNA, 120 bp, Artificial Sequence
  ENSG00000132507_6 (sequence is synthesized)
cttcacctagctcccttggccaggagcgagcgaagctgtggccttggtgaagctgccctcctcttctcccctcacactacagccctggtgggggagaagggggtgggtgctgcttgtggt

SEQ ID NO: 298451 - DNA, 120 bp, Artificial Sequence
  ENSG00000132507_7 (sequence is synthesized)
tcttttttttttttttttttttaattcaatctggaatcagaaagcggtggattctggcaaatggtccttgtgccctccccactcatccctggtctggtcccctgttgcctatagcccttt

SEQ ID NO: 298452 - DNA, 120 bp, Artificial Sequence
  ENSG00000132507_8 (sequence is synthesized)
ctttaccctgagcaccaccccaacagactggggaccagccccctcgcctgcctgtgtctctccccaaacccctttagatggggagggaagaggaggagaggggaggggacctgccccctc

SEQ ID NO: 298453 - DNA, 120 bp, Artificial Sequence
  ENSG00000132507_9 (sequence is synthesized)
ctcaggcatctgggagggccctgcccccatgggctttacccttccctgcgggctctctccccgacacatttgttaaaatcaaacctgaataaaactacaagtttaatatgaagcccccaa

SEQ ID NO: 298454 - DNA, 120 bp, Artificial Sequence
  ENSG00000132507_10 (sequence is synthesized)
gcaggagccggcagcccctagcgcggggagctagtcctcgcgggggttccgagggggcctgagattttgaggagtggaagccggaggctcgggtcctaatcaccccggagggcctgctgc

SEQ ID NO: 298455 - DNA, 120 bp, Artificial Sequence
  ENSG00000132507_11 (sequence is synthesized)
ccacgcgggagaggccgccaggcggccacgccggggcgagggccaggggccagatcggcccaccggggcaagggtacctgggccgttgaggacccggctcagcgcggccacgtgagttgg

SEQ ID NO: 298456 - DNA, 120 bp, Artificial Sequence
  ENSG00000132507_12 (sequence is synthesized)
gctcagcgcggccacgtgagggcctgctgcaggcatatgttagcgcttcccaacctcaagggccccaggagctttcctgaaaaaccctcctgtgaagtgtggcggtcagccaggtttgga

SEQ ID NO: 298457 - DNA, 120 bp, Artificial Sequence
  ENSG00000132507_13 (sequence is synthesized)
tcgaagactggcaagcacggccacgccaaggttagaatttcacctccgcatcttgccttccccatgcctccagtatctttggcgctcccagcagcaagctgccaacagtgctgactttcc

SEQ ID NO: 298458 - DNA, 120 bp, Artificial Sequence
  ENSG00000132507_14 (sequence is synthesized)
tcttcagcctcttctgtggttacccttctgtccccgcatcattctctggcagtccctccgtttctccagctttgtgccaatctcttcaattcataggcctttatgctctagctattcagt

SEQ ID NO: 298459 - DNA, 120 bp, Artificial Sequence
  ENSG00000132507_15 (sequence is synthesized)
tgctccttccttattcttggttttcactttttctttcttcccttgagccgttgttaagtggttgcttccatcacgttgcccagggtttctccaattctacgccttcccctggagggactc

SEQ ID NO: 298460 - DNA, 120 bp, Artificial Sequence
  ENSG00000132507_16 (sequence is synthesized)
ctgcgtcaattctgagctttcaggtcaccttgctgcttcgttccccagttctagctttccctttggaactctgacgcaggatcaaactgcccctacctgccccatcccactctccttggg

SEQ ID NO: 298461 - DNA, 120 bp, Artificial Sequence
  ENSG00000132507_17 (sequence is synthesized)
ttccttgagcctccatgctttcatgggttttaacattcttgctagcacttccctcatcacctcagacttttcctgtctctttagaatttcaacctgattcgttcttgttgaatttcttgt

SEQ ID NO: 298462 - DNA, 120 bp, Artificial Sequence
  ENSG00000132507_18 (sequence is synthesized)
accacactagcgcgctagaagagtggggcggaaagacatctcccgcgcatgtgtggaactggggggactgattccaagacaaggcgcccaccccacagagcaagttttctgaaacgtttg

SEQ ID NO: 298463 - DNA, 120 bp, Artificial Sequence
  ENSG00000132507_19 (sequence is synthesized)
acgactgtggagaagagatcctggtatggtgcctccctccctgcttctgtgctcagctttgttctgtacgtttcttcctgagctcagacatctcttggctatccctcttgcttctccaga

SEQ ID NO: 298464 - DNA, 120 bp, Artificial Sequence
  ENSG00000132510_0 (sequence is synthesized)
aggttccccccagggcaacatgccagccccgtagcactgcccaccccacccactgtggtctgttgtaccccactgctggggtggtggttccaatgagacagggcacaccaaactccatct

SEQ ID NO: 298465 - DNA, 120 bp, Artificial Sequence
  ENSG00000132510_1 (sequence is synthesized)
ggctgttactgaggcggagacacgggtgatgattggctttctggggagagaggaagtcctgtgattggccagatctctggagcttgccgacgcggtgtgaggacgctcccacggaggccg

SEQ ID NO: 298466 - DNA, 120 bp, Artificial Sequence
  ENSG00000132510_2 (sequence is synthesized)
gaattggctgtgaaaggactgaggcagccatctgggggtagcgggcactcttatcagagcggctggagccggaccatcgtcccagagagctggggcagggggccgtgcccaatctccagg

SEQ ID NO: 298467 - DNA, 120 bp, Artificial Sequence
  ENSG00000132510_3 (sequence is synthesized)
gctcctggggccactgctgacctggctggatgcatcgggcagtggaccctccaggggcccgcgctgcacgggaagcctttgcccttgggggcctgagctgtgctggggcctggagctcct

SEQ ID NO: 298468 - DNA, 120 bp, Artificial Sequence
  ENSG00000132510_4 (sequence is synthesized)
gcccgcctcatccccctcctcgtagcgcatggctgcctggaggcagatgctcagccagcattgggcagcccccgcttcctgctcccctacccccttcacatggcagtagttctgggcacc

SEQ ID NO: 298469 - DNA, 120 bp, Artificial Sequence
  ENSG00000132510_5 (sequence is synthesized)
ccagcaaaccatattatgctccaggggcgcccactccaagacccctccatgggaagctggaatccctgcatggctgtgtgcaggcattgctccgggagccagcccagccagggctttggg

SEQ ID NO: 298470 - DNA, 120 bp, Artificial Sequence
  ENSG00000132510_6 (sequence is synthesized)
aacagcttgggcaactgtacgagtcagagcacgatagtgaggaggccacacgctgctaccacagcgcccttcgatacggaggaagcttcgctgagctggggccccgcattggccgactgc

SEQ ID NO: 298471 - DNA, 120 bp, Artificial Sequence
  ENSG00000132510_7 (sequence is synthesized)
agcaggcccagctctggaactttcatactggctcctgccagcaccgagccaaggtcctgcccccactggagcaagtgtggaacttgctacaccttgagcacaaacggaactatggagcca

SEQ ID NO: 298472 - DNA, 120 bp, Artificial Sequence
  ENSG00000132510_8 (sequence is synthesized)
agcggggaggtcccccggtgaagcgagctgctgaacccccagtggtgcagcctgtgcctcctgcagcactctcaggcccctcaggggaggagggcctcagccctggaggcaagcgaagga

SEQ ID NO: 298473 - DNA, 120 bp, Artificial Sequence
  ENSG00000132510_9 (sequence is synthesized)
ggagggcctcagccctggaggcaagcgaaggagaggctgcaactctgaacagactggccttcccccagggctgccactgcctccaccaccattaccaccaccaccaccaccaccaccacc

SEQ ID NO: 298474 - DNA, 120 bp, Artificial Sequence
  ENSG00000132510_10 (sequence is synthesized)
gccccccatttcagctaaccaagccagggctgtggagtaccctgcatggagatgcctggggcccagagcgcaagggttcagcacccccagagcgccaggagcagcggcactcgctgcctc

SEQ ID NO: 298475 - DNA, 120 bp, Artificial Sequence
  ENSG00000132510_11 (sequence is synthesized)
acccatatccatacccagctccagcgtacaccgcgcacccccctggccaccggctggtcccggctgctcccccaggcccaggcccccgccccccaggagcagagagccatggctgcctgc

SEQ ID NO: 298476 - DNA, 120 bp, Artificial Sequence
  ENSG00000132510_12 (sequence is synthesized)
ctgccacccgtccccccggaagtgaccttagagagagcagagttcagaggtcgcggatggactccagcgtttcaccagcagcaaccaccgcctgcgtgccttacgccccttcccggcccc

SEQ ID NO: 298477 - DNA, 120 bp, Artificial Sequence
  ENSG00000132510_13 (sequence is synthesized)
ctggcctccccggcaccaccaccagcagcagcagtagcagcagcagcaacactggtctccggggcgtggagccgaacccaggcattcccggcgctgaccattaccaaactcccgcgctgg

SEQ ID NO: 298478 - DNA, 120 bp, Artificial Sequence
  ENSG00000132510_14 (sequence is synthesized)
aggtctctcaccatggccgcctggggccctcggcacacagcagtcggaaaccgttcttgggggctcccgctgccactccccacctatccctgccacctggaccttcctcaccccctccac

SEQ ID NO: 298479 - DNA, 120 bp, Artificial Sequence
  ENSG00000132510_15 (sequence is synthesized)
ccccctgtccccgcctcttacgccccccaccaccccctgcctggttgaagggtccggcctgccgggcagcccgagaggatggagagatcttagaagagctcttctttgggactgagggac

SEQ ID NO: 298480 - DNA, 120 bp, Artificial Sequence
  ENSG00000132510_16 (sequence is synthesized)
ccccccgccctgccccaccacccctcccccatcgcgagggcttcttggggcctccggcctcccgcttttctgtgggcactcaggattctcacacccctcccactcccccaaccccaacca

SEQ ID NO: 298481 - DNA, 120 bp, Artificial Sequence
  ENSG00000132510_17 (sequence is synthesized)
ccagcagtagcaacagcaacagtggcagccacagcagcagccctgctgggcctgtgtcctttcccccaccaccctatctggccagaagtatagacccccttccccggcctcccagcccag

SEQ ID NO: 298482 - DNA, 120 bp, Artificial Sequence
  ENSG00000132510_18 (sequence is synthesized)
cacagaacccccaggacccacctcttgtacccctgactcttgccctgcctccagcccctccttcctcctgccaccaaaatacctcaggaagcttcaggcgcccggagagcccccggccca

SEQ ID NO: 298483 - DNA, 120 bp, Artificial Sequence
  ENSG00000132510_19 (sequence is synthesized)
gggtctccttcccaaagacccccgaggtggggccggggccacccccaggccccctgagtaaagccccccagcctgtgccgcccggggttggggagctgcctgcccgaggccctcgactct

SEQ ID NO: 298484 - DNA, 120 bp, Artificial Sequence
  ENSG00000132510_20 (sequence is synthesized)
ttgattttccccccactccgctggaggaccagtttgaggagccagccgaattcaagatcctacctgatgggctggccaacatcatgaagatgctggacgaatccattcgcaaggaagagg

SEQ ID NO: 298485 - DNA, 120 bp, Artificial Sequence
  ENSG00000132510_21 (sequence is synthesized)
aacagcaacaacacgaagcaggcgtggccccccaacccccgctgaaggagccctttgcatctctgcagtctcctttccccaccgacacagcccccaccactactgctcctgctgtcgccg

SEQ ID NO: 298486 - DNA, 120 bp, Artificial Sequence
  ENSG00000132510_22 (sequence is synthesized)
accaccaccaccaccaccaccaccacggccacccaggaagaggagaagaagccaccaccagccctaccaccaccaccgcctctagccaagttccctccaccctctcagccacagccacca

SEQ ID NO: 298487 - DNA, 120 bp, Artificial Sequence
  ENSG00000132510_23 (sequence is synthesized)
agccaccaccacccccaccccccagcccggccagcctgctcaaatccttggcctccgtgctggagggacaaaagtactgttatcgggggactggagcagctgtttccacccggcctgggc

SEQ ID NO: 298488 - DNA, 120 bp, Artificial Sequence
  ENSG00000132510_24 (sequence is synthesized)
ccttgcccaccactcagtattcccctggccccccatcaggtgctaccgccctgccgcccacctcagcggcccctagcgcccagggctccccacagccctctgcttcctcgtcatctcagt

SEQ ID NO: 298489 - DNA, 120 bp, Artificial Sequence
  ENSG00000132510_25 (sequence is synthesized)
tctctacctcaggcgggccctgggcccgggagcgcagggcgggcgaagagccagtcccgggccccatgacccccacccaaccgcccccacccctatctctgccccctgctcgctctgagt

SEQ ID NO: 298490 - DNA, 120 bp, Artificial Sequence
  ENSG00000132510_26 (sequence is synthesized)
ctgaggtgctagaagagatcagccgggcttgcgagacccttgtggagcgggtgggccggagtgccactgacccagccgacccagtggacacagcagagccagcggacagtgggactgagc

SEQ ID NO: 298491 - DNA, 120 bp, Artificial Sequence
  ENSG00000132510_27 (sequence is synthesized)
gcctgtaaggacagtgtgggtcgtcggccccgtgagggcagggcaaaggccaaggccaaggtccccaaagaaaagagccgccgggtgctggggaacctggacctgcagagcgaggagatc

SEQ ID NO: 298492 - DNA, 120 bp, Artificial Sequence
  ENSG00000132510_28 (sequence is synthesized)
cagggtcgtgagaagtcccggcccgatcttggcggggcctccaaggccaagccacccacagctccagcccctccatcagctcctgcaccttctgcccagcccacacccccgtcagcctct

SEQ ID NO: 298493 - DNA, 120 bp, Artificial Sequence
  ENSG00000132510_29 (sequence is synthesized)
gtccctggaaagaaggctcgggaggaagccccagggccaccgggtgtcagccgggccgacatgctgaagctgcgctcacttagtgaggggccccccaaggagctgaagatccggctcatc

SEQ ID NO: 298494 - DNA, 120 bp, Artificial Sequence
  ENSG00000132510_30 (sequence is synthesized)
aaggtagagagtggtgacaaggagacctttatcgcctctgaggtggaagagcggcggctgcgcatggcagacctcaccatcagccactgtgctgctgacgtcgtgcgcgccagcaggaat

SEQ ID NO: 298495 - DNA, 120 bp, Artificial Sequence
  ENSG00000132510_31 (sequence is synthesized)
gccaaggtgaaagggaagtttcgagagtcctacctttcccctgcccagtctgtgaaaccgaagatcaacactgaggagaagctgccccgggaaaaactcaacccccctacacccagcatc

SEQ ID NO: 298496 - DNA, 120 bp, Artificial Sequence
  ENSG00000132510_32 (sequence is synthesized)
tatctggagagcaaacgggatgccttctcacctgtcctgctgcagttctgtacagaccctcgaaatcccatcacagtgatccggggcctggcgggctccctgcggctcaacttgggcctc

SEQ ID NO: 298497 - DNA, 120 bp, Artificial Sequence
  ENSG00000132510_33 (sequence is synthesized)
ttctccaccaagaccctggtggaagcgagtggcgaacacaccgtggaagttcgcacccaggtgcagcagccctcagatgagaactgggatctgacaggcactcggcagatctggccttgt

SEQ ID NO: 298498 - DNA, 120 bp, Artificial Sequence
  ENSG00000132510_34 (sequence is synthesized)
gagagctcccgttcccacaccaccattgccaagtacgcacagtaccaggcctcatccttccaggagtctctgcaggaggagaaggagagtgaggatgaggagtcagaggagccagacagc

SEQ ID NO: 298499 - DNA, 120 bp, Artificial Sequence
  ENSG00000132510_35 (sequence is synthesized)
accactggaacccctcctagcagcgcaccagacccgaagaaccatcacatcatcaagtttggcaccaacatcgacttgtctgatgctaagcggtggaagccccagctgcaggagctgctg

SEQ ID NO: 298500 - DNA, 120 bp, Artificial Sequence
  ENSG00000132510_36 (sequence is synthesized)
aagctgcccgccttcatgcgggtaacatccacgggcaacatgctgagccacgtgggccacaccatcctgggcatgaacacggtgcagctgtacatgaaggtgcccggcagccgaacgcca

SEQ ID NO: 298501 - DNA, 120 bp, Artificial Sequence
  ENSG00000132510_37 (sequence is synthesized)
ggccaccaggagaataacaacttctgctccgtcaacatcaacattggcccaggcgactgcgagtggttcgcggtgcacgagcactactgggagaccatcagcgctttctgtgatcggcac

SEQ ID NO: 298502 - DNA, 120 bp, Artificial Sequence
  ENSG00000132510_38 (sequence is synthesized)
ggcgtggactacttgacgggttcctggtggccaatcctggatgatctctatgcatccaatattcctgtgtaccgcttcgtgcagcgacccggagacctcgtgtggattaatgcggggact

SEQ ID NO: 298503 - DNA, 120 bp, Artificial Sequence
  ENSG00000132510_39 (sequence is synthesized)
gtgcactgggtgcaggccaccggctggtgcaacaacattgcctggaacgtggggcccctcaccgcctatcagtaccagctggccctggaacgatacgagtggaatgaggtgaagaacgtc

SEQ ID NO: 298504 - DNA, 120 bp, Artificial Sequence
  ENSG00000132510_40 (sequence is synthesized)
aaatccatcgtgcccatgattcacgtgtcatggaacgtggctcgcacggtcaaaatcagcgaccccgacttgttcaagatgatcaagttctgcctgctgcagtccatgaagcactgccag

SEQ ID NO: 298505 - DNA, 120 bp, Artificial Sequence
  ENSG00000132510_41 (sequence is synthesized)
gtgcaacgcgagagcctggtgcgggcagggaagaaaatcgcttaccagggccgtgtcaaggacgagccagcctactactgcaacgagtgcgatgtggaggtgtttaacatcctgttcgtg

SEQ ID NO: 298506 - DNA, 120 bp, Artificial Sequence
  ENSG00000132510_42 (sequence is synthesized)
acaagtgagaatggcagccgcaacacgtacctggtacactgcgagggctgtgcccggcgccgcagcgcaggcctgcagggcgtggtggtgctggagcagtaccgcactgaggagctggct

SEQ ID NO: 298507 - DNA, 120 bp, Artificial Sequence
  ENSG00000132510_43 (sequence is synthesized)
caggcctacgacgccttcacgctggtgagggcccggcgggcgcgcgggcagcggaggagggcactggggcaggctgcagggacgggcttcgggagcccggccgcgcctttccctgagccc

SEQ ID NO: 298508 - DNA, 120 bp, Artificial Sequence
  ENSG00000132510_44 (sequence is synthesized)
cggctttctccccccaggccccagccagcacgtcgcgatgaggccggacgccccgcccgcctgcctgcccgcgcaaggcgccgcggggccaccagcacatgcctgggctggacctaggtc

SEQ ID NO: 298509 - DNA, 120 bp, Artificial Sequence
  ENSG00000132510_45 (sequence is synthesized)
ggtcccgcctgtggccgagaagggggtcgggcccagcccttccaccccattggcagctcccctcacttaatttattaagaaaaactttttttttttttttagcaaatatgaggaaaaaag

SEQ ID NO: 298510 - DNA, 120 bp, Artificial Sequence
  ENSG00000132510_46 (sequence is synthesized)
gaaaaaaaatgggagacgggggagggggctggcagcccctcgcccaccagcgcctcccctcaccgactttggcctttttagcaacagacacaaggaccaggctccggcggcggcgggggt

SEQ ID NO: 298511 - DNA, 120 bp, Artificial Sequence
  ENSG00000132510_47 (sequence is synthesized)
cacatacgggttccctcaccctgccagccgcccgcccgcccggcgcagatgcacgcggctcgtgtatgtacatagacgttacggcagccgaggtttttaatgagattctttctatgggct

SEQ ID NO: 298512 - DNA, 120 bp, Artificial Sequence
  ENSG00000132510_48 (sequence is synthesized)
ggctttacccctcccccggaacctccttttttacttccaatgctagctgtgacccctgtacatgtctctttattcacttggttatgatttgtattttttgttcttttcttgtttttttgt

SEQ ID NO: 298513 - DNA, 120 bp, Artificial Sequence
  ENSG00000132510_49 (sequence is synthesized)
aatttataacagtcccactcacctctatttattcatttttgggaaaacccgacctcccacacccccaagccatcctgcccgcccctccagggaccgcccgtcgccgggctctccccgcgc

SEQ ID NO: 298514 - DNA, 120 bp, Artificial Sequence
  ENSG00000132510_50 (sequence is synthesized)
cccagtgtgtgtccgggcccggcccgaccgtctccacccgtccgcccgcggctccagccgggttctcatggtgctcaaacccgctcccctcccctacgtcctgcactttctcggaccagt

SEQ ID NO: 298515 - DNA, 120 bp, Artificial Sequence
  ENSG00000132510_51 (sequence is synthesized)
ccccccactcccgacccgaccccagccccacctgagggtgagcaactcctgtactgtaggggaagaagtgggaactgaaatggtattttgtaaaaaaaataaataaaataaaaaaattaa

SEQ ID NO: 298516 - DNA, 120 bp, Artificial Sequence
  ENSG00000132510_52 (sequence is synthesized)
aggttttaaagaaagaactatgaggaaaaggaaccccgtccttcccagccccggccaactttaaaaaacacagaccttcacccccacccccttttctttttaagtgtgaaacaacccagg

SEQ ID NO: 298517 - DNA, 120 bp, Artificial Sequence
  ENSG00000132510_53 (sequence is synthesized)
gccagggcctcactggggcagggacaccccggggtgagtttctctggggctttattttcgttttgttggttgttttttctccacgctggggctgcggaggggtggggggtttacagtccc

SEQ ID NO: 298518 - DNA, 120 bp, Artificial Sequence
  ENSG00000132510_54 (sequence is synthesized)
gcaccctcgcactgcactgtctctctgccccaggggcagaggggtcttcccaaccctacccctattttcggtgatttttgtgtgagaatattaatattaaaaataaacggagaaaaaaaa

SEQ ID NO: 298519 - DNA, 120 bp, Artificial Sequence
  ENSG00000132510_55 (sequence is synthesized)
attgaagacccagaaagccaggggaagtagaggacctggaggaactgggctgttactgaggcggagacacgggtgatgattggctttctggggagagaggaagtcctgtgattggccaga

SEQ ID NO: 298520 - DNA, 120 bp, Artificial Sequence
  ENSG00000132510_56 (sequence is synthesized)
tggggagatagtggagatcactgccagccacagcagtcttggcatttcacctttccttccagatctctttcagtcccattctctccccactgcactatagcatttgcccccatacctaag

SEQ ID NO: 298521 - DNA, 120 bp, Artificial Sequence
  ENSG00000132510_57 (sequence is synthesized)
tcttactcttctgcttccctctctccttctgtcagttctctgcctgaggccctgctttatttcccattcctttgtaggagaaaagggaagataatccctaagccaggggcttaagttctc

SEQ ID NO: 298522 - DNA, 120 bp, Artificial Sequence
  ENSG00000132514_0 (sequence is synthesized)
aaacccaactctccccacccacacatggtctctgtgtgttctaatccctgttcattctcatttactgtctaaagttgaggagatgggatgtcccagatgatagggctcctgggatttcag

SEQ ID NO: 298523 - DNA, 120 bp, Artificial Sequence
  ENSG00000132514_1 (sequence is synthesized)
acccaagaccagcaggactccagtcacctctaccccagctctccaggacacagcgctcccaactctgagtgacgtcccacctctggtccttgcagcacaaccaacgtgggaatcacaccc

SEQ ID NO: 298524 - DNA, 120 bp, Artificial Sequence
  ENSG00000132514_2 (sequence is synthesized)
tccagacctcccacagctccaccccagactgggcgccggccctgcctccatttcagctgtgacaacctcagagccgtgttggcccaagcatgacaaggacgtatgaaaacttccagtact

SEQ ID NO: 298525 - DNA, 120 bp, Artificial Sequence
  ENSG00000132514_3 (sequence is synthesized)
tggagaataaggtgaaagtccaggggtttaaaaatgggccacttcctctccagtccctcctgcagcgtctctgctctgggccctgccatctcctgctgtccctgggcctcggcctcctgc

SEQ ID NO: 298526 - DNA, 120 bp, Artificial Sequence
  ENSG00000132514_4 (sequence is synthesized)
tgctggtcatcatctgtgtggttggattccaaaattccaaatttcagagggacctggtgaccctgagaacagattttagcaacttcacctcaaacactgtggcggagatccaggcactga

SEQ ID NO: 298527 - DNA, 120 bp, Artificial Sequence
  ENSG00000132514_5 (sequence is synthesized)
cttcccagggcagcagcttggaagaaacgatagcatctctgaaagctgaggtggagggtttcaagcaggaacggcaggcaggggtatctgagctccaggaacacactacgcagaaggcac

SEQ ID NO: 298528 - DNA, 120 bp, Artificial Sequence
  ENSG00000132514_6 (sequence is synthesized)
acctaggccactgtccccactgcccatctgtgtgtgtcccagttcattctgaaatgctcctgcgagtccagcagctggtgcaagacctgaagaaactgacctgccaggtggctactctca

SEQ ID NO: 298529 - DNA, 120 bp, Artificial Sequence
  ENSG00000132514_7 (sequence is synthesized)
agctgaagaacgcccacctggtggtcatcaactccagggaggagcagaattttgtccagaaatatctaggctccgcatacacctggatgggcctcagtgaccctgaaggagcctggaagt

SEQ ID NO: 298530 - DNA, 120 bp, Artificial Sequence
  ENSG00000132514_8 (sequence is synthesized)
gggtggatggaacagactatgcgaccggcttccagaactggaagccaggccagccagacgactggcaggggcacgggctgggtggaggcgaggactgtgctcacttccatccagacggca

SEQ ID NO: 298531 - DNA, 120 bp, Artificial Sequence
  ENSG00000132514_9 (sequence is synthesized)
ggtggaatgacgacgtctgccagaggccctaccactgggtctgcgaggctggcctgggtcagaccagccaggagagtcactgagctgcctttggtgggaccacccggccacagaaatggc

SEQ ID NO: 298532 - DNA, 120 bp, Artificial Sequence
  ENSG00000132514_10 (sequence is synthesized)
ggtgggaggaggactcttctcacgacctcctcgcaagaccgctctgggagagaaataagcactgggagattggaagcactgctaacattttgaatttttttctctttaattttaaaaaga

SEQ ID NO: 298533 - DNA, 120 bp, Artificial Sequence
  ENSG00000132514_11 (sequence is synthesized)
tggtatagtgttcttaagcttttattttttttccaacttttgaaagtcaacttcatgaaggtataatttttacataataaaaatgcactcatttaaagagtagagatgactttgacaaat

SEQ ID NO: 298534 - DNA, 120 bp, Artificial Sequence
  ENSG00000132514_12 (sequence is synthesized)
atgcatgcctaggtgactaccactccgatcgcaatagataacattgccatcgcccccaccagtcccctcatgcctctgggcagtccaaccacttccctgtttccaggccagtgatctact

SEQ ID NO: 298535 - DNA, 120 bp, Artificial Sequence
  ENSG00000132514_13 (sequence is synthesized)
tctttttcactatttattggccttgcctcttctagagcttctagaacttcatataagtgaaatcatacactctcgtgtatatacttcatataagtgaatatatactctcgtgagaactta

SEQ ID NO: 298536 - DNA, 120 bp, Artificial Sequence
  ENSG00000132514_14 (sequence is synthesized)
gtggctactctcaacaacaatggtgaggaagcctccactgaagggacctgctgccctgtcaactgggtggagcaccaagacagctgctactggttctctcactctgggatgtcctgggcc

SEQ ID NO: 298537 - DNA, 120 bp, Artificial Sequence
  ENSG00000132514_15 (sequence is synthesized)
gtcatcaactccagggaggagcaggtgagggcttctggtactcagttcctaagacatgtcccatttagggaaatggttcttaagcttggccgcacattggaatcatctgggagcttccag

SEQ ID NO: 298538 - DNA, 120 bp, Artificial Sequence
  ENSG00000132514_16 (sequence is synthesized)
aatgactgtcatctgtgccacaccctcagagatttaataggcctgagcatccagagaaacatctccaaactcctcagttgatttaacgaagagctaaagttgagaatcactagtttaagg

SEQ ID NO: 298539 - DNA, 120 bp, Artificial Sequence
  ENSG00000132514_17 (sequence is synthesized)
agttggctgggatgggaagaagtcaccactgcccttctgtcaccgcagaattttgtccagaaatatctaggctccgcatacacctggatgggcctcagtgaccctgaaggagcctggaag

SEQ ID NO: 298540 - DNA, 120 bp, Artificial Sequence
  ENSG00000132514_18 (sequence is synthesized)
tgggtggatggaacagactatgcgaccggcttccagtgagtgcaccctggctttctgtgccaatgtcctccgtcagcgtttcccccagggatctgactggcagcctctcctcccctgaac

SEQ ID NO: 298541 - DNA, 120 bp, Artificial Sequence
  ENSG00000132514_19 (sequence is synthesized)
cctaaaatgccctctttatatgtttagaaggatttctcctatcatttctgtacctccaccacgcgcactggtgggtcctaactctgaggaggtcaggccccagcctctgacgggcctagt

SEQ ID NO: 298542 - DNA, 120 bp, Artificial Sequence
  ENSG00000132514_20 (sequence is synthesized)
gtgaagaggatgcaaggtctctagaaagactgggacagggaggatcacagtggacccagcttctgatgctctgtggggtggggatgagagctgcgcattggtggagggaaagataagtag

SEQ ID NO: 298543 - DNA, 82 bp, Artificial Sequence
  ENSG00000132517_0 (sequence is synthesized)
gcaaaagcgctagggttgcaagtggcaccagagacgtgcccttgtcccggggtccatttgagggtgagcgtgttggtgccga

SEQ ID NO: 298544 - DNA, 120 bp, Artificial Sequence
  ENSG00000132517_1 (sequence is synthesized)
caggtgtgagccaccgcacccggccagtgctgagctgttttgacaacttggaccccgggtcctctgtgggtaggaaaatcagctccctctttgctcctctggggcagctgcacctcgggc

SEQ ID NO: 298545 - DNA, 120 bp, Artificial Sequence
  ENSG00000132517_2 (sequence is synthesized)
cagctgcacctcgggccagctttctgcctgtctgcctgccggcactgctgggtcgctgtacccaaacgcacagccggtgccccgtgctagaaggtcttcagtttccagaagaaccaaagc

SEQ ID NO: 298546 - DNA, 120 bp, Artificial Sequence
  ENSG00000132517_3 (sequence is synthesized)
atctttggacctacctagggaaggacctgcctgtgacctttgccctgtcctggagggtccagctttgggctgaatggcagcacccacgctgggccgtctggtgctgacccacctgctggt

SEQ ID NO: 298547 - DNA, 120 bp, Artificial Sequence
  ENSG00000132517_4 (sequence is synthesized)
ggccctttttggcatgggctcctgggctgctgtgaacgggatctgggtggagctgcctgtggtggtaaaagaccttccagagggttggagcctcccctcatacctctctgtggttgtggc

SEQ ID NO: 298548 - DNA, 120 bp, Artificial Sequence
  ENSG00000132517_5 (sequence is synthesized)
gctgggaaacctgggtctgctggtggtgaccctgtggaggcagctggccccgggcaagggcgagcaggtccccatccaggtggtacaggtgctgagtgtagtgggcacagccctgctggc

SEQ ID NO: 298549 - DNA, 120 bp, Artificial Sequence
  ENSG00000132517_6 (sequence is synthesized)
ccctctgtggcaccacgtggccccagtggcagggcagctccactctgtggccttcctaactctggccttggtgttggcaatggcctgttgtacctctaatgtcactttcctgcccttcct

SEQ ID NO: 298550 - DNA, 120 bp, Artificial Sequence
  ENSG00000132517_7 (sequence is synthesized)
gccgcctcgagtgcccaccagcgcccaccaatggcacctctgggcctcccctcgacttccctgagcgttttcctgccagcaccttcttctgggcactgactgcccttctggtcacttcag

SEQ ID NO: 298551 - DNA, 120 bp, Artificial Sequence
  ENSG00000132517_8 (sequence is synthesized)
ctgccgccttccggggtctcctgttgctgttgccatcactaccctctgtaaccacagggggctcagggcctgaacttcaactgggatccccaggagcagaggaggaagagaaggaggaag

SEQ ID NO: 298552 - DNA, 120 bp, Artificial Sequence
  ENSG00000132517_9 (sequence is synthesized)
aagaggctttgccattgcaggagccaccgagccaggcagcaggcaccatccctggcccagaccctgaggcccatcagctgttctcagcccatggtgccttcctgctgggcctgatggcct

SEQ ID NO: 298553 - DNA, 120 bp, Artificial Sequence
  ENSG00000132517_10 (sequence is synthesized)
tcaccagtgccgtgaccaatggcgtgctgccttctgtgcagagcttttcctgtttgccctatgggcgcctggcctaccacctggctgtggtgctgggcagtgccgccaacccccttgcct

SEQ ID NO: 298554 - DNA, 120 bp, Artificial Sequence
  ENSG00000132517_11 (sequence is synthesized)
gcttcctggccatgggcgtgctgtgcaggtccctggcagggctggttggtctttctctgctgggcatgctctttggggcctacctgatggcactggcaatcctgagcccctgcccacccc

SEQ ID NO: 298555 - DNA, 120 bp, Artificial Sequence
  ENSG00000132517_12 (sequence is synthesized)
tggtgggcaccactgcaggggtggtccttgtggtgctgtcgtgggtgctgtgtctgtgtgtgttctcatatgtgaaggtggctgcaagctccctgctgcatggtgggggtcggccggcat

SEQ ID NO: 298556 - DNA, 120 bp, Artificial Sequence
  ENSG00000132517_13 (sequence is synthesized)
tgctggcagctggtgtggccatccaagtgggctccctgcttggtgccggtgccatgttccctcccaccagcatctaccacgtgtttcaaagcagaaaggactgtgtagacccctgtggcc

SEQ ID NO: 298557 - DNA, 120 bp, Artificial Sequence
  ENSG00000132517_14 (sequence is synthesized)
cctgagcctgggcaggtggggacccaactccaccccacctgtcttcatcgtgaggctgccacagtgcctgactacttgtggcccaggcaggcttcccccaacacaggaacgctcatggac

SEQ ID NO: 298558 - DNA, 120 bp, Artificial Sequence
  ENSG00000132517_15 (sequence is synthesized)
acctgcacactccacagaagacgttggcatgtgaggccagggtgggcaccaaagaccaggcccagagccaggggacaggttggggctgtgggcttggacccagggcctgagacctttgtg

SEQ ID NO: 298559 - DNA, 120 bp, Artificial Sequence
  ENSG00000132517_16 (sequence is synthesized)
ggatttgtgcaataaagtgtttttatttaaaaccaaaaacaaaaacaaaagcctaatgaaaaccttataagaaatatataatgaaatcaggaaactggattaaataatttttcatacata

SEQ ID NO: 298560 - DNA, 120 bp, Artificial Sequence
  ENSG00000132517_17 (sequence is synthesized)
ctgggattacaggcctgagccacggtgcctggcctatctttcattttcaaagcttgtttttgagtggtggcatggggcacacccctgtactgctaatgcaaaggaatattagaatcacca

SEQ ID NO: 298561 - DNA, 120 bp, Artificial Sequence
  ENSG00000132517_18 (sequence is synthesized)
aatattagaatcaccatttgtgaaagaaacttggcagtctgttacaagagcctcagctatgtcatacagtttcacccaataattctatttcaagagacttatccaggaaaaaaaaaaaaa

SEQ ID NO: 298562 - DNA, 120 bp, Artificial Sequence
  ENSG00000132517_19 (sequence is synthesized)
aaaagaccaaaataagaaaagctttgtaatgagcccttgttgcttttacctacccagtgcctctgttcctcttctggtaactgaattcctccttcatctaccaatttatagcagcagggt

SEQ ID NO: 298563 - DNA, 120 bp, Artificial Sequence
  ENSG00000132517_20 (sequence is synthesized)
ttgagattctttcactgaattccaaccaatcaaattatctgaaaagtattatttttcttttttcagacagggtctcgctctttcacccaggctggagcacggtggtgtgaccccagttca

SEQ ID NO: 298564 - DNA, 120 bp, Artificial Sequence
  ENSG00000132517_21 (sequence is synthesized)
gccatgttgcttgggctggtctcgaactcctgggctcctgcgatccgcccatctcagcctcccagagtgctgggactacaggcatgggccattgcacctggcctttaaaatattcttttc

SEQ ID NO: 298565 - DNA, 120 bp, Artificial Sequence
  ENSG00000132517_22 (sequence is synthesized)
ttttcaagtgagaaatggtatcctactgatgtcttaatttgcctttctttgatatatacagtcagggagagcatcttttccacatgtctattggccatgtgtatttcccatgaaatattt

SEQ ID NO: 298566 - DNA, 120 bp, Artificial Sequence
  ENSG00000132517_23 (sequence is synthesized)
ttcccatgaaatatttcataccacccccctcaccattttacaatatgatctttatcaatgtcacagtgataggatatgtctctaacctgtatcttttattttctttctttcctttttttt

SEQ ID NO: 298567 - DNA, 86 bp, Artificial Sequence
  ENSG00000132517_24 (sequence is synthesized)
ttctttctttccttttttttttttttgatacggagttttcctcttgtcgtccagtctggaatgcaatgacatgatctcggctcacc

SEQ ID NO: 298568 - DNA, 120 bp, Artificial Sequence
  ENSG00000132517_25 (sequence is synthesized)
tgggattacaggcacgaactactatgcctgggattaacctgtatcttttgacttattaacttgtctgtgcttactggagtggcactctgagctgagcctggacagctagaaggtcttcag

SEQ ID NO: 298569 - DNA, 120 bp, Artificial Sequence
  ENSG00000132518_0 (sequence is synthesized)
gattaagggctctggccggctgtacccacgcccccgccctggcctgggctggcaaggaagacctgtgggcgggcgtcaaaagggggaccggccctgtgacccctcaccgggggccgtggg

SEQ ID NO: 298570 - DNA, 120 bp, Artificial Sequence
  ENSG00000132518_1 (sequence is synthesized)
cctgtgacccctcaccgggggccgtgggcccgagcccccggacttccctaagccggcaatgaccgcctgcgcccgccgagcgggtgggcttccggaccccgggctctgcggtcccgcgtg

SEQ ID NO: 298571 - DNA, 120 bp, Artificial Sequence
  ENSG00000132518_2 (sequence is synthesized)
cgggccctgccccggctcccgctcctgctgctcctgcttctgctgcagccccccgccctctccgccgtgttcacggtgggggtcctgggcccctgggcttgcgaccccatcttctctcgg

SEQ ID NO: 298572 - DNA, 120 bp, Artificial Sequence
  ENSG00000132518_3 (sequence is synthesized)
ccccatcttctctcgggctcgcccggacctggccgcccgcctggccgccgcccgcctgaaccgcgaccccggcctggcaggcggtccccgcttcgaggtagcgctgctgcccgagccttg

SEQ ID NO: 298573 - DNA, 120 bp, Artificial Sequence
  ENSG00000132518_4 (sequence is synthesized)
ctgggggccgtgtcctccgcgctggcccgcgtgtcgggcctcgtgggtccggtgaaccctgcggcctgccggccagccgagctgctcgccgaagaagccgggatcgcgctggtgccctgg

SEQ ID NO: 298574 - DNA, 120 bp, Artificial Sequence
  ENSG00000132518_5 (sequence is synthesized)
ctggggctgcccctggacgcaggcggagggcaccacggcccctgccgtgacccccgccgcggatgccctctacgccctgcttcgcgcattcggctgggcgcgcgtggccctggtcaccgc

SEQ ID NO: 298575 - DNA, 120 bp, Artificial Sequence
  ENSG00000132518_6 (sequence is synthesized)
caggacctgtgggtggaggcgggacgctcactgtccacggcactcagggcccggggcctgcctgtcgcctccgtgacttccatggagcccttggacctgtctggagcccgggaggccctg

SEQ ID NO: 298576 - DNA, 120 bp, Artificial Sequence
  ENSG00000132518_7 (sequence is synthesized)
aggaaggttcgggacgggcccagggtcacagcagtgatcatggtgatgcactcggtgctgctgggtggcgaggagcagcgctacctcctggaggccgcagaggagctgggcctgaccgat

SEQ ID NO: 298577 - DNA, 120 bp, Artificial Sequence
  ENSG00000132518_8 (sequence is synthesized)
ggctccctggtcttcctgcccttcgacacgatccactacgccttgtccccaggcccggaggccttggccgcactcgccaacagctcccagcttcgcagggcccacgatgccgtgctcacc

SEQ ID NO: 298578 - DNA, 120 bp, Artificial Sequence
  ENSG00000132518_9 (sequence is synthesized)
ctcacgcgccactgtccctctgaaggcagcgtgctggacagcctgcgcagggctcaagagcgccgcgagctgccctctgacctcaatctgcagcaggtctccccactctttggcaccatc

SEQ ID NO: 298579 - DNA, 120 bp, Artificial Sequence
  ENSG00000132518_10 (sequence is synthesized)
tatgacgcggtcttcttgctggcaaggggcgtggcagaagcgcgggctgccgcaggtggcagatgggtgtccggagcagctgtggcccgccacatccgggatgcgcaggtccctggcttc

SEQ ID NO: 298580 - DNA, 120 bp, Artificial Sequence
  ENSG00000132518_11 (sequence is synthesized)
tgcggggacctaggaggagacgaggagcccccattcgtgctgctagacacggacgcggcgggagaccggctttttgccacatacatgctggatcctgcccggggctccttcctctccgcc

SEQ ID NO: 298581 - DNA, 120 bp, Artificial Sequence
  ENSG00000132518_12 (sequence is synthesized)
ggtacccggatgcacttcccgcgtgggggatcagcacccggacctgacccctcgtgctggttcgatccaaacaacatctgcggtggaggactggagccgggcctcgtctttcttggcttc

SEQ ID NO: 298582 - DNA, 120 bp, Artificial Sequence
  ENSG00000132518_13 (sequence is synthesized)
ctcctggtggttgggatggggctggctggggccttcctggcccattatgtgaggcaccggctacttcacatgcaaatggtctccggccccaacaagatcatcctgaccgtggacgacatc

SEQ ID NO: 298583 - DNA, 120 bp, Artificial Sequence
  ENSG00000132518_14 (sequence is synthesized)
acctttctccacccacatgggggcacctctcgaaaggtggcccaggggagtcgatcaagtctgggtgcccgcagcatgtcagacattcgcagcggccccagccaacacttggacagcccc

SEQ ID NO: 298584 - DNA, 120 bp, Artificial Sequence
  ENSG00000132518_15 (sequence is synthesized)
gctccaggagctccggcatgagaacgtggccctctacctggggcttttcctggctcggggagcagaaggccctgcggccctctgggagggcaacctggctgtggtctcagagcactgcac

SEQ ID NO: 298585 - DNA, 120 bp, Artificial Sequence
  ENSG00000132518_16 (sequence is synthesized)
gcggggctctcttcaggacctcctcgctcagagagaaataaagctggactggatgttcaagtcctccctcctgctggaccttatcaagggaataaggtatctgcaccatcgaggcgtggc

SEQ ID NO: 298586 - DNA, 120 bp, Artificial Sequence
  ENSG00000132518_17 (sequence is synthesized)
tcatgggcggctgaagtcacggaactgcatagtggatggcagattcgtactcaagatcactgaccacggccacgggagactgctggaagcacagaaggtgctaccggagcctcccagagc

SEQ ID NO: 298587 - DNA, 120 bp, Artificial Sequence
  ENSG00000132518_18 (sequence is synthesized)
ggaggaccagctgtggacagccccggagctgcttagggacccagccctggagcgccggggaacgctggccggcgacgtctttagcttggccatcatcatgcaagaagtagtgtgccgcag

SEQ ID NO: 298588 - DNA, 120 bp, Artificial Sequence
  ENSG00000132518_19 (sequence is synthesized)
tgccccttatgccatgctggagctcactcccgaggaagtggtgcagagggtgcggagcccccctccactgtgtcggcccttggtgtccatggaccaggcacctgtcgagtgtatcctcct

SEQ ID NO: 298589 - DNA, 120 bp, Artificial Sequence
  ENSG00000132518_20 (sequence is synthesized)
gatgaagcagtgctgggcagagcagccggaacttcggccctccatggaccacaccttcgacctgttcaagaacatcaacaagggccggaagacgaacatcattgactcgatgcttcggat

SEQ ID NO: 298590 - DNA, 120 bp, Artificial Sequence
  ENSG00000132518_21 (sequence is synthesized)
gctggagcagtactctagtaacctggaggatctgatccgggagcgcacggaggagctggagctggaaaagcagaagacagaccggctgcttacacagatgctgcctccgtctgtggctga

SEQ ID NO: 298591 - DNA, 120 bp, Artificial Sequence
  ENSG00000132518_22 (sequence is synthesized)
ggccttgaagacggggacaccagtggagcccgagtactttgagcaagtgacactgtactttagtgacattgtgggcttcaccaccatctctgccatgagtgagcccattgaggttgtgga

SEQ ID NO: 298592 - DNA, 120 bp, Artificial Sequence
  ENSG00000132518_23 (sequence is synthesized)
cctgctcaacgatctctacacactctttgatgccatcattggttcccacgatgtctacaaggtggagacaataggggacgcctatatggtggcctcggggctgccccagcggaatgggca

SEQ ID NO: 298593 - DNA, 120 bp, Artificial Sequence
  ENSG00000132518_24 (sequence is synthesized)
gcgacacgcggcagagatcgccaacatgtcactggacatcctcagtgccgtgggcactttccgcatgcgccatatgcctgaggttcccgtgcgcatccgcataggcctgcactcgggtcc

SEQ ID NO: 298594 - DNA, 120 bp, Artificial Sequence
  ENSG00000132518_25 (sequence is synthesized)
atgcgtggcaggcgtggtgggcctcaccatgccgcggtactgcctgtttggggacacggtcaacaccgcctcgcgcatggagtccaccgggctgccttaccgcatccacgtgaacttgag

SEQ ID NO: 298595 - DNA, 120 bp, Artificial Sequence
  ENSG00000132518_26 (sequence is synthesized)
cactgtggggattctccgtgctctggactcgggctaccaggtggagctgcgaggccgcacggagctgaagggcaagggcgccgaggacactttctggctagtgggcagacgcggcttcaa

SEQ ID NO: 298596 - DNA, 120 bp, Artificial Sequence
  ENSG00000132518_27 (sequence is synthesized)
caagcccatccccaaaccgcctgacctgcaaccggggtccagcaaccacggcatcagcctgcaggagatcccacccgagcggcgacggaagctggagaaggcgcggccgggccagttctc

SEQ ID NO: 298597 - DNA, 120 bp, Artificial Sequence
  ENSG00000132518_28 (sequence is synthesized)
ttgagaagtgaggcccggccccggacagggtctgggccctgctccctgtcccatctgcagtggaccccaggcacccccctttgaggaggtggggtgaactgctccttggcagggatttgt

SEQ ID NO: 298598 - DNA, 120 bp, Artificial Sequence
  ENSG00000132518_29 (sequence is synthesized)
gacactgcattgctgggctgtgttcctcgggctcttctggaccttgcaccgtggataccaggccatgtgccatggtatttgggtcctgggagggtgggtgaaataaaggcatgctgtctt

SEQ ID NO: 298599 - DNA, 120 bp, Artificial Sequence
  ENSG00000132518_30 (sequence is synthesized)
agttccacgcagactcgagatcccccacccctcaccccagtccgcctaagtccttccctctcccatgtctccccagggcaagggcgccgaggacactttctggctagtgggcagacgcgg

SEQ ID NO: 298600 - DNA, 120 bp, Artificial Sequence
  ENSG00000132518_31 (sequence is synthesized)
gctgccgcgtcccctctgctgcctgcagaacgtcccacccaagccaggtgtcccgatccctttctgacttagagagcccaggctggttcctaaaccccggggcttcccctgggagggaag

SEQ ID NO: 298601 - DNA, 120 bp, Artificial Sequence
  ENSG00000132518_32 (sequence is synthesized)
cagccattgcaggaattttggttcagtagatctggagtggtttggaaatccaggcttaggaaactccgtaatcggggccttctgtggcccctcccctggccctatctcatccccagtgca

SEQ ID NO: 298602 - DNA, 120 bp, Artificial Sequence
  ENSG00000132522_0 (sequence is synthesized)
ggagccgctgagaaagcgcagagaaggcgggccccgtctgaggtctggcagtcagagacagccgggcgcccacggcccgagcgcccacggcagcaccatgcccgcactcctggagcgccc

SEQ ID NO: 298603 - DNA, 120 bp, Artificial Sequence
  ENSG00000132522_1 (sequence is synthesized)
caagctttccaacgccatggccagggcgctgcaccggcacattatgatggagcgggagcgcaagcggcaggaggaagaagaggtggataagatgatggaacagaagatgaaggaagaaca

SEQ ID NO: 298604 - DNA, 120 bp, Artificial Sequence
  ENSG00000132522_2 (sequence is synthesized)
ggagagaaggaagaaaaaggagatggaagagagaatgtcattagaggagaccaaggaacaaattctgaagttggaggagaagcttttggctctacaggaagagaagcaccagcttttcct

SEQ ID NO: 298605 - DNA, 120 bp, Artificial Sequence
  ENSG00000132522_3 (sequence is synthesized)
gcagctcaagaaagttttacatgaggaagaaaaacggaggcgaaaggaacagagtgacctgaccaccctaacatcagctgcataccagcagagcctgactgttcacacaggaactcatct

SEQ ID NO: 298606 - DNA, 120 bp, Artificial Sequence
  ENSG00000132522_4 (sequence is synthesized)
gacccggcactacgtgggctcagcagctgcttttgcagggacaccagagcatggacaattccaaggcagtcctggtggtgcctatgggactgctcagcccccacctcactatgggcccac

SEQ ID NO: 298607 - DNA, 120 bp, Artificial Sequence
  ENSG00000132522_5 (sequence is synthesized)
acagccagcttatagtcctagtcagcagctcagagctccttcggcattccctgcagtgcagtacctatctcagccacagccacagccctatgctgtgcatggccactttcagcccactca

SEQ ID NO: 298608 - DNA, 120 bp, Artificial Sequence
  ENSG00000132522_6 (sequence is synthesized)
gacaggtttcctccagcctggtggtgccctgtccttgcaaaagcagatggaacatgctaaccagcagactggcttctccgactcatcctctctgcgccccatgcacccccaggctctgca

SEQ ID NO: 298609 - DNA, 120 bp, Artificial Sequence
  ENSG00000132522_7 (sequence is synthesized)
tccagcccctggactccttgcttccccccagctccctgtgcagatgcagccagcaggaaagtcgggctttgcagctaccagccaacctggccctcggctccccttcatccaacacagcca

SEQ ID NO: 298610 - DNA, 120 bp, Artificial Sequence
  ENSG00000132522_8 (sequence is synthesized)
gaacccgcgattctaccacaagtgaccatcagattatatcttcaacaccacaccccccaccccatcgtgggtgagggtatcccctgtgtgtcccaggccaataaaatctacctgccactg

SEQ ID NO: 298611 - DNA, 80 bp, Artificial Sequence
  ENSG00000132522_9 (sequence is synthesized)
gcagagaaggcgggtaggaagggcagtcgtccgcgctggctgggcagggagcggcagcagcgagccggggaccccggcgc

SEQ ID NO: 298612 - DNA, 80 bp, Artificial Sequence
  ENSG00000132522_10 (sequence is synthesized)
gacgggcttccgcctgggccgggcgcggccccctctgagcgcccgcctccccgcaggccccgtctgaggtctggcagtca

SEQ ID NO: 298613 - DNA, 120 bp, Artificial Sequence
  ENSG00000132522_11 (sequence is synthesized)
cggcgacggggtttgtacgccgcgggcacccgtcgcagcgcgcttccgccttctttcacctgtgaggtcggccgccgccgtgactccggaaggactcggccgggccgccggatgtgacgc

SEQ ID NO: 298614 - DNA, 120 bp, Artificial Sequence
  ENSG00000132522_12 (sequence is synthesized)
aacaaatgtttggaccccaagtgcttacggtgagagtaggattggatgcctagcccctagtacttccatccatgcatccttgccaccagtattcaagtcacaaacatatcaagcacttaa

SEQ ID NO: 298615 - DNA, 120 bp, Artificial Sequence
  ENSG00000132522_13 (sequence is synthesized)
aagcgtcctgttccacgctccagaacccttgagatgggaaggaccttggagagcacctgataaagcctttccgttccctattgccgcgatggggagcttgtcccctcgaggcaaagagca

SEQ ID NO: 298616 - DNA, 120 bp, Artificial Sequence
  ENSG00000132522_14 (sequence is synthesized)
tacaggcgtgttgggatgactgggttttgctggtcttcaatctgtaacgttggaattgttttcactaccctgcctcttcttcattctgcctgattctccagaggaagaagaggtggataa

SEQ ID NO: 298617 - DNA, 120 bp, Artificial Sequence
  ENSG00000132522_15 (sequence is synthesized)
gcacattatgatggagcgggagcgcaagcggcagggtgagccggggccatagcagggggacgcacggcccagaatggctcctgtacctcaaggctggcctcaacccaccggccaaccagc

SEQ ID NO: 298618 - DNA, 120 bp, Artificial Sequence
  ENSG00000132522_16 (sequence is synthesized)
catgctaaccagcagactggcttctccgactcagtgagtatggcaccttgggaggtcagggttagggatatgttaaggggagcttcagtatgcctcaggccctgactctgttctctgcag

SEQ ID NO: 298619 - DNA, 120 bp, Artificial Sequence
  ENSG00000132522_17 (sequence is synthesized)
gaggactaaagaaaccaccagatggaaccggccttcttggaggtcacagcctcccatttcagcatcatgaagcccttctccctttctagggagccctggaggacacaatcgcccaggcac

SEQ ID NO: 298620 - DNA, 120 bp, Artificial Sequence
  ENSG00000132522_18 (sequence is synthesized)
gggggccaagtggaactgggatcaggtagtaaaagaaccagtgtttaatggcaaaagagaaggcatctgtccttgactttgacctgtcttcctttcactccagtgacctgaccaccctaa

SEQ ID NO: 298621 - DNA, 120 bp, Artificial Sequence
  ENSG00000132522_19 (sequence is synthesized)
atgccattcagtaaaagattttaatggctctgtcttttcctttctcagctccttcggcattccctgcagtgcagtacctatctcagccacagccacagccctatgctgtgcatggccact

SEQ ID NO: 298622 - DNA, 120 bp, Artificial Sequence
  ENSG00000132522_20 (sequence is synthesized)
cccagctccctgtgcagatgcagccagcaggaaaggtaagaatggtaatagaatttacctgtcagaatccctacactagggatccggaaaagcaggattaggtaggacaggtggcccaca

SEQ ID NO: 298623 - DNA, 120 bp, Artificial Sequence
  ENSG00000132522_21 (sequence is synthesized)
gggatagccaagagatgtctgagctcaggaagaaacgtacagaacaaagctgagcacagaagcagggagggaggcaccataccaggatctcttctccacagtcgtacttctgctcaatct

SEQ ID NO: 298624 - DNA, 120 bp, Artificial Sequence
  ENSG00000132522_22 (sequence is synthesized)
ccttgccaaggtctccctcagggagacgaaggtcctctcgtacctccccgctgtcctggagcagtgataggtacccatcctggatgccaatcagctgggggcagatagggaaggaggctg

SEQ ID NO: 298625 - DNA, 120 bp, Artificial Sequence
  ENSG00000132530_0 (sequence is synthesized)
gaaactcaaccgaaagcctgcagagagcagaacatggaaggagacttctcggtgtgcaggaactgtaaaagacatgtagtctctgccaacttcaccctccatgaggcttactgcctgcgg

SEQ ID NO: 298626 - DNA, 120 bp, Artificial Sequence
  ENSG00000132530_1 (sequence is synthesized)
ttcctggtcctgtgtccggagtgtgaggagcctgtccccaaggaaaccatggaggagcactgcaagcttgagcaccagcaggttgggtgtacgatgtgtcagcagagcatgcagaagtcc

SEQ ID NO: 298627 - DNA, 120 bp, Artificial Sequence
  ENSG00000132530_2 (sequence is synthesized)
tcgctggagtttcataaggccaatgagtgccaggagcgccctgttgagtgtaagttctgcaaactggacatgcagctcagcaagctggagctccacgagtcctactgtggcagccggaca

SEQ ID NO: 298628 - DNA, 120 bp, Artificial Sequence
  ENSG00000132530_3 (sequence is synthesized)
gagctctgccaaggctgtggccagttcatcatgcaccgcatgctcgcccagcacagagatgtctgtcgcagtgaacaggcccagctcgggaaaggggaaagaatttcagctcctgaaagg

SEQ ID NO: 298629 - DNA, 120 bp, Artificial Sequence
  ENSG00000132530_4 (sequence is synthesized)
gaaatctactgtcattattgcaaccaaatgattccagaaaataagtatttccaccatatgggtaaatgttgtccagactcagagtttaagaaacactttcctgttggaaatccagaaatt

SEQ ID NO: 298630 - DNA, 120 bp, Artificial Sequence
  ENSG00000132530_5 (sequence is synthesized)
cttccttcatctcttccaagtcaagctgctgaaaatcaaacttccacgatggagaaagatgttcgtccaaagacaagaagtataaacagatttcctcttcattctgaaagttcatcaaag

SEQ ID NO: 298631 - DNA, 120 bp, Artificial Sequence
  ENSG00000132530_6 (sequence is synthesized)
aaagcaccaagaagcaaaaacaaaaccttggatccacttttgatgtcagagcccaagcccaggaccagctcccctagaggagataaagcagcctatgacattctgaggagatgttctcag

SEQ ID NO: 298632 - DNA, 120 bp, Artificial Sequence
  ENSG00000132530_7 (sequence is synthesized)
tgtggcatcctgcttcccctgccgatcctaaatcaacatcaggagaaatgccggtggttagcttcatcaaaaggaaaacaagtgagaaatttcagctagatttggaaaaggaaaggtact

SEQ ID NO: 298633 - DNA, 120 bp, Artificial Sequence
  ENSG00000132530_8 (sequence is synthesized)
acaaattcaaaagatttcacttttaacactggcattcctgcctacttgctgtggtggtcttgtgaaaggtgatgggttttattcgttgggctttaaaagaaaaggtttggcagaactaaa

SEQ ID NO: 298634 - DNA, 120 bp, Artificial Sequence
  ENSG00000132530_9 (sequence is synthesized)
aacaaaactcacgtatcatctcaatagatacagaaaaggcttttgataaaattcaacttgacttcatgttaaaaaccctcaacaaaccaggcgtcgaaggaacatacctcaaaataataa

SEQ ID NO: 298635 - DNA, 120 bp, Artificial Sequence
  ENSG00000132530_10 (sequence is synthesized)
catctatgacaaaaccacagccaacatcatactgaatgagcaaaagctggagcattactcttgagaagtagaacaaggcacttcagtcctattcaacatagtactggaagtcctcgccac

SEQ ID NO: 298636 - DNA, 120 bp, Artificial Sequence
  ENSG00000132530_11 (sequence is synthesized)
ccacagcaatcaggcaagagaaagaaataaaaggcaaccaaaaagaaaggaagtcgaagtatctctgtttgcagacgatatgattctatatctagaaaaccccatgatcttggcccaaaa

SEQ ID NO: 298637 - DNA, 120 bp, Artificial Sequence
  ENSG00000132530_12 (sequence is synthesized)
gctcctagatctgataaacaacttcagctaactttcaggagacaaaatcaatatacaaaatatggtagcatttttatacaccaacgacatccaagctgagagccaaatcaagaatgcaat

SEQ ID NO: 298638 - DNA, 77 bp, Artificial Sequence
  ENSG00000132530_13 (sequence is synthesized)
acctaggaatacagctaaccagggagatgaaagatctctacaacaaggaaaaacattccatacttatggataggaag

SEQ ID NO: 298639 - DNA, 120 bp, Artificial Sequence
  ENSG00000132530_14 (sequence is synthesized)
aatgctattcctatcaaactaccaataacattcttcacagaatcagaaaaaaaaagcattaaaatttatttgaaaccaaaaaagagcccaaaaagccaaagcaatcctaagcaaaaagaa

SEQ ID NO: 298640 - DNA, 75 bp, Artificial Sequence
  ENSG00000132530_15 (sequence is synthesized)
gctgcatgatactggtacaaaagcatggtgctggtacaaaagcagacacatagatcaatggaacagaatagaggg

SEQ ID NO: 298641 - DNA, 120 bp, Artificial Sequence
  ENSG00000132530_16 (sequence is synthesized)
acaaaagcagacacatagatcaatggaacagaatagagggcccagaaataaagctacacacctacaaccatctaatctttgacaaagttgacaaaaatacgcaatggggaaagaattccc

SEQ ID NO: 298642 - DNA, 120 bp, Artificial Sequence
  ENSG00000132530_17 (sequence is synthesized)
tggggaaagaattccccattcagtaagtggtactgggataactagctagccatatgcagaggattgaaactgaaccacttccttacaccatatgcaaaaatcaactcaagatggattaaa

SEQ ID NO: 298643 - DNA, 120 bp, Artificial Sequence
  ENSG00000132530_18 (sequence is synthesized)
cccaaactataaaaactctggaagataacctaggcaataccattctggacataggaacggaaaaagatttcatgacaaagatcccaaaaataattgtaacgaaagcaaaaattgacaaat

SEQ ID NO: 298644 - DNA, 120 bp, Artificial Sequence
  ENSG00000132530_19 (sequence is synthesized)
gggacatgattaaacagaattaccatttgactcagcaatcccattattggttatatacccaaaggaatctaaatcattctgtcataaagacatatatacacaaatgttcacggcagcact

SEQ ID NO: 298645 - DNA, 120 bp, Artificial Sequence
  ENSG00000132530_20 (sequence is synthesized)
tgttcacggcagcactatacacaatcgcaaagtcagggaatcaaactaaatgtccatcagtggtagaaaggataaagaaaatgtggtggcagggagtggtggctcatgtctgtaatccca

SEQ ID NO: 298646 - DNA, 120 bp, Artificial Sequence
  ENSG00000132530_21 (sequence is synthesized)
ctggccaacatggagaaactccgtctccgctaaaaatacgaaaattagccaggcgtggtggcgagcacctgtcatcccagctacttgggaggcctaggcgtgagaatcgcttgaacctgg

SEQ ID NO: 298647 - DNA, 87 bp, Artificial Sequence
  ENSG00000132530_22 (sequence is synthesized)
aaaattagccaggcgtggtggcgagcacctgtcatcccagctacttgggaggcctaggcgtgagaatcgcttgaacctggaaggtgg

SEQ ID NO: 298648 - DNA, 86 bp, Artificial Sequence
  ENSG00000132530_23 (sequence is synthesized)
atcatgtcctgtgcagcaacgtggatggagctggaagccattatcctaaatgaactcactcagaaacagaaaaccaaataccacat

SEQ ID NO: 298649 - DNA, 120 bp, Artificial Sequence
  ENSG00000132530_24 (sequence is synthesized)
taccacatgttctcacttataagtagaagctaaacattgagtacacatggatacaaagaagggaaccgcagacactggggcctacctgaggtcggagcatggaaggagggtgaggatcaa

SEQ ID NO: 298650 - DNA, 120 bp, Artificial Sequence
  ENSG00000132530_25 (sequence is synthesized)
ggaaggagggtgaggatcaaaaaactacctatctggtactatgctttttatctggatgatgaaataatctgtacaacaaaccctggtgacatgcaatttacctatatagcaagcctacac

SEQ ID NO: 298651 - DNA, 120 bp, Artificial Sequence
  ENSG00000132530_26 (sequence is synthesized)
atgtgcccctgaacctaaaaaaaaagttaaaagaaaaacgtttggattattttccctctttcgaacaaagacattggtttgcccaaggactacaaataaaccaacgggaaaaaagaaagg

SEQ ID NO: 298652 - DNA, 120 bp, Artificial Sequence
  ENSG00000132530_27 (sequence is synthesized)
ttccagttttgtctgaaaattctgattaagcctctgggccctacagcctggagaacctggagaatcctacacccacagaacccggctttgtccccaaagaataaaaacacctctctaaaa

SEQ ID NO: 298653 - DNA, 120 bp, Artificial Sequence
  ENSG00000132530_28 (sequence is synthesized)
aaatgtctctccattacggttgctgctgccctgagtgcacatctgtggccataaaggaaatgatgtgggtgattcggccaagagttgcctgtgtggtcaaggatgccggcagcgcaggaa

SEQ ID NO: 298654 - DNA, 120 bp, Artificial Sequence
  ENSG00000132530_29 (sequence is synthesized)
gttgtttagagttcttctgttagcacagctgtttctagggtctggaaaaactctaaggacccccaggaggatacacaccagattgggtctgggctcacaccaccctgcatccccagagcc

SEQ ID NO: 298655 - DNA, 120 bp, Artificial Sequence
  ENSG00000132530_30 (sequence is synthesized)
tccctggacgctgtttgcaaggtcctcaccgcctggaagtccaggagccatttttagggaacagcattcaagctcaacatgctgtgggctgggccatcggaaaactttcagttttgtttc

SEQ ID NO: 298656 - DNA, 120 bp, Artificial Sequence
  ENSG00000132530_31 (sequence is synthesized)
cttgagcaccagcaggtgaggaggcggcagggaggatggggtctgagagtcaaggtgagtgttcagtcctccctgcaggtgagatggggtctgagagttgggggacgagggtctagtcct

SEQ ID NO: 298657 - DNA, 120 bp, Artificial Sequence
  ENSG00000132530_32 (sequence is synthesized)
ggagccggagatgggggagaagggtgggaggtggatggtttggaaaagggatggagacccagacggagagaagccagccagccagggtgagggaacaagctgctgtgctgcccaggagag

SEQ ID NO: 298658 - DNA, 120 bp, Artificial Sequence
  ENSG00000132530_33 (sequence is synthesized)
gcctggcctcaggctgccagcctcagggaggtagatgcggctgtgacagcagcaaagaatgacggccaagggcgacagcaggggctggccatgctgtaaaggggcttcttgggagggtcc

SEQ ID NO: 298659 - DNA, 120 bp, Artificial Sequence
  ENSG00000132530_34 (sequence is synthesized)
aagactggctgttctcttgagatctgtaaagagaggatgtgaaaaaggaaggtcctggaaggcagtcagatggagccctgtttcccgcctttccatgtccattcctcctggggcccctga

SEQ ID NO: 298660 - DNA, 120 bp, Artificial Sequence
  ENSG00000132530_35 (sequence is synthesized)
tctgtctctctggagatactcaagctcaggcagccgttgccaactcagactggtctgacaaacacttcttgaacactgggcggggtgctagagagacactgaggtagccacatcggatcc

SEQ ID NO: 298661 - DNA, 120 bp, Artificial Sequence
  ENSG00000132530_36 (sequence is synthesized)
atccctgccctctgggagttcacagacccaaacccggaacactgtgagccaaagtggatgtggggcaggccctgggtgctgggtggacccacatctggtgtgtgtgtgtgtgtgtgtgtg

SEQ ID NO: 298662 - DNA, 120 bp, Artificial Sequence
  ENSG00000132530_37 (sequence is synthesized)
cctaaatcaacatcaggtactcagcctctgttctctgcttacctttctgggaaccatccgcacagtgtcttaaaaaaatccaagacctgaaagatgttcacaaatgttgtggctgaaaag

SEQ ID NO: 298663 - DNA, 120 bp, Artificial Sequence
  ENSG00000132530_38 (sequence is synthesized)
gccgttttctctgactcccacttctctgggtgcccaaatgcactatctcgtagcacttaccacctggtttatttgcatcacctccgagagactgagtcacctttgactcaagccaggtct

SEQ ID NO: 298664 - DNA, 120 bp, Artificial Sequence
  ENSG00000132530_39 (sequence is synthesized)
ttgaaggtagagccaggtccctcttctctgtgtctccagcttctaggccagggattgatttggagcaactgcttcaaaactgttgagtaaatgaatgaatcagaggatacccagtctatc

SEQ ID NO: 298665 - DNA, 120 bp, Artificial Sequence
  ENSG00000132530_40 (sequence is synthesized)
tctctcatggtgtagatatggcactgaggcccagagatgagatgtcttggtcaagatcctaagccagttggtggtggcttacctccagcagatcaaggtttgcttcaagaagatcagggt

SEQ ID NO: 298666 - DNA, 120 bp, Artificial Sequence
  ENSG00000132530_41 (sequence is synthesized)
ttgtaggcatctccctgaatatcatgatttttatgtcctaggttattttctagtaataataataactggcattagaggttgttaaccattgtgtgccagttacaatacagagctctttat

SEQ ID NO: 298667 - DNA, 120 bp, Artificial Sequence
  ENSG00000132530_42 (sequence is synthesized)
aatcttcatcataaacaataggcatgcattttatctccattttacagataaggtgaagtagctttccaaggagtatacaattagaaggtggcaggatccagcctgagtccacatgtatat

SEQ ID NO: 298668 - DNA, 120 bp, Artificial Sequence
  ENSG00000132530_43 (sequence is synthesized)
agctccaaagtttatgctcttaagctccagattaaatgccttacttaaaaaatttattttttttcaaaatacataagtactagattttgttggagctagttgatataatatcatataaag

SEQ ID NO: 298669 - DNA, 120 bp, Artificial Sequence
  ENSG00000132530_44 (sequence is synthesized)
aagtataaaagcaaagctaaccctaattccccaaccccataccctgagataccactttggacagtcttatgggcatcttttcaaagctctacctttgcatatacaagcctaaacaagcat

SEQ ID NO: 298670 - DNA, 120 bp, Artificial Sequence
  ENSG00000132530_45 (sequence is synthesized)
ggggtctgagagtcaaggcgagtgttcagtcctctctgcaggtgagatggggtctgagagtcaaggcaagtgttcagtcctctctgcaggtgagatggggtctgggagtcaaggcgagtg

SEQ ID NO: 298671 - DNA, 120 bp, Artificial Sequence
  ENSG00000132530_46 (sequence is synthesized)
ttcagtcctctctgcaggacagatggggtctgagagtcaaggcgagtgttcagtcctctctgcaggtgagatggggtctgggagtcaaggcgagtgttcagtcctccctgcaggtgagat

SEQ ID NO: 298672 - DNA, 120 bp, Artificial Sequence
  ENSG00000132530_47 (sequence is synthesized)
agtgcaacacaacacaacacaacacaacacagcttcaacactgtcaacaaaaatgtgttcaaccaacacctggtctgatcacagagtctgaaaactggtgcaatgaaagagcacagtcag

SEQ ID NO: 298673 - DNA, 120 bp, Artificial Sequence
  ENSG00000132530_48 (sequence is synthesized)
aactcaaccgaaagcctgcagagagcagaacatggaaggagacttctcggtgtgcaggaactggtaagaaagtgctttctccagcggcagacccgggctggcgagggagagacgtagacg

SEQ ID NO: 298674 - DNA, 120 bp, Artificial Sequence
  ENSG00000132530_49 (sequence is synthesized)
aggacaagcagctggagaccgtgggccccaaggtaaaagacatgtagtctctgccaacttcaccctccatgaggcttactgcctgcggttcctggtcctgtgtccggagtgtgaggagcc

SEQ ID NO: 298675 - DNA, 120 bp, Artificial Sequence
  ENSG00000132535_0 (sequence is synthesized)
ctcttcggctccacggctccctcggccgctgccgtttccaacccccccaccccactcccccgccacggcccctagcccctggccgtttggcaagacccccccctaccccggggctccccg

SEQ ID NO: 298676 - DNA, 120 bp, Artificial Sequence
  ENSG00000132535_1 (sequence is synthesized)
aaatccagttcccctcccccaccccagctcatgccccagcccccgaactccggggctgccagcccccggtgcccccgcccctcctgagaatcggggtgtgctccccaagccccctcccct

SEQ ID NO: 298677 - DNA, 120 bp, Artificial Sequence
  ENSG00000132535_2 (sequence is synthesized)
ccactggggagccccttttagggcccccttcccctccctcccacgctcccctccccttcccttctccaaccccctccttcccctctcacccctccccccatcctggccccccctgcaaaa

SEQ ID NO: 298678 - DNA, 120 bp, Artificial Sequence
  ENSG00000132535_3 (sequence is synthesized)
gtggggtgcggaggggggaggggtgagaacccacggaggggaggaacgaaactccgatgaagtcagagccccttacccgccgccgcggccaggccccccaacatggactgtctctgtata

SEQ ID NO: 298679 - DNA, 120 bp, Artificial Sequence
  ENSG00000132535_4 (sequence is synthesized)
gtgacaaccaagaaataccgctaccaagatgaagacacgccccctctggagcacagcccggcccacctccccaaccaggccaattctcccccagtgattgtcaacacagataccctagaa

SEQ ID NO: 298680 - DNA, 120 bp, Artificial Sequence
  ENSG00000132535_5 (sequence is synthesized)
gccccaggatatgtgaacgggaccgagggggagatggaatacgaggaaatcacattggaaaggggtaactcaggtctgggcttcagcatcgcaggtggcactgacaacccacacatcggt

SEQ ID NO: 298681 - DNA, 120 bp, Artificial Sequence
  ENSG00000132535_6 (sequence is synthesized)
gacgacccatccattttcatcaccaagatcattcctggtggggctgcggcccaggatggccgcctcagggtcaacgacagcatcctgtttgtaaatgaagtggacgtgcgcgaggtgacc

SEQ ID NO: 298682 - DNA, 120 bp, Artificial Sequence
  ENSG00000132535_7 (sequence is synthesized)
cactcagcggcggtggaagccctcaaagaggcaggctccatcgttcgcctctatgtcatgcgccggaagcccccggctgagaaggtcatggagatcaagctcatcaaggggcctaaaggt

SEQ ID NO: 298683 - DNA, 120 bp, Artificial Sequence
  ENSG00000132535_8 (sequence is synthesized)
cttggcttcagcatcgcagggggcgtagggaaccagcacatcccaggagataatagcatctatgtaacaaagatcatcgaagggggtgctgcccacaaggatgggaggttgcagattgga

SEQ ID NO: 298684 - DNA, 120 bp, Artificial Sequence
  ENSG00000132535_9 (sequence is synthesized)
gacaagatcctggcggtcaacagtgtggggctagaggacgtcatgcatgaagatgctgtggcagccctgaagaacacgtatgatgttgtctacctaaaggtggccaagcccagcaatgcc

SEQ ID NO: 298685 - DNA, 120 bp, Artificial Sequence
  ENSG00000132535_10 (sequence is synthesized)
tacctgagtgacagctatgctcccccagacatcacaacctcttattcccagcacctggacaatgagatcagtcacagcagctacctgggcaccgactaccccacagccatgacccccact

SEQ ID NO: 298686 - DNA, 120 bp, Artificial Sequence
  ENSG00000132535_11 (sequence is synthesized)
tcccctcggcgctactctccagtggccaaggacctgctcggggaggaagacattccccgagaaccgaggcgaattgtgatccaccggggctccacgggcctgggcttcaacatcgtgggt

SEQ ID NO: 298687 - DNA, 120 bp, Artificial Sequence
  ENSG00000132535_12 (sequence is synthesized)
ggcgaggacggtgaaggcatcttcatctcctttatcctggccgggggccctgcagacctcagtggggagctgcggaagggggaccagatcctgtcggtcaacggtgtggacctccgaaat

SEQ ID NO: 298688 - DNA, 120 bp, Artificial Sequence
  ENSG00000132535_13 (sequence is synthesized)
gccagccatgagcaggctgccattgccctgaagaatgcgggtcagacggtcacgatcatcgctcagtataaaccagaagagtacagccgattcgaggccaagatccacgaccttcgggaa

SEQ ID NO: 298689 - DNA, 120 bp, Artificial Sequence
  ENSG00000132535_14 (sequence is synthesized)
ttacgacaagaccaaggactgcggcttcctgagccaggccctgagcttccgctttggggatgtgctgcatgtcatcgatgctagtgatgaggagtggtggcaggcacggcgggtccactc

SEQ ID NO: 298690 - DNA, 120 bp, Artificial Sequence
  ENSG00000132535_15 (sequence is synthesized)
tgacagtgagaccgacgacattgggttcatccccagcaaacggcgggttgagcgacgagagtggtcaaggttaaaggccaaggactggggctccagctctggatcgcagggtcgagaaga

SEQ ID NO: 298691 - DNA, 120 bp, Artificial Sequence
  ENSG00000132535_16 (sequence is synthesized)
ctcggttctgagctacgagacagtgacgcagatggaagtgcactatgctcgccccatcatcatccttgggcccaccaaggaccgcgccaacgatgatcttctctccgagttccccgacaa

SEQ ID NO: 298692 - DNA, 120 bp, Artificial Sequence
  ENSG00000132535_17 (sequence is synthesized)
gtttggatcctgtgttccccatacgacacggcccaagcgggagtatgagatagatggccgggattaccactttgtgtcgtcccgggagaaaatggagaaggacattcaggcgcacaagtt

SEQ ID NO: 298693 - DNA, 120 bp, Artificial Sequence
  ENSG00000132535_18 (sequence is synthesized)
cattgaggccggccagtacaacagccacctctatgggaccagcgtccagtccgtgcgagaggtggcagagcaggggaagcactgcatcctcgatgtctcggccaatgccgtgcggcggct

SEQ ID NO: 298694 - DNA, 120 bp, Artificial Sequence
  ENSG00000132535_19 (sequence is synthesized)
gcaggcggcccacctgcaccccatcgccatcttcatccgcccccgctccctggagaatgtgctagagattaacaagcggatcacagaggagcaagcccgcaaagccttcgacagagccac

SEQ ID NO: 298695 - DNA, 120 bp, Artificial Sequence
  ENSG00000132535_20 (sequence is synthesized)
caagctggagcaggagttcacagagtgcttctcagccatcgtggagggtgacagctttgaggagatctaccacaaggtgaagcgtgtcatcgaggacctctcaggcccctacatctgggt

SEQ ID NO: 298696 - DNA, 120 bp, Artificial Sequence
  ENSG00000132535_21 (sequence is synthesized)
tccagcccgagagagactctgattcctgccctggcttggcctggactcgccctgcctccatcacctgggcccttggtctggactgaattgcccaagcccttggctccccccggcctccct

SEQ ID NO: 298697 - DNA, 120 bp, Artificial Sequence
  ENSG00000132535_22 (sequence is synthesized)
cccaccccttcttatttatttcctttctaactggatccagcctgttggaggggggacactcctctgcatgtatccccgcaccccagaactgggctcctgaacgccaggaacctggggtct

SEQ ID NO: 298698 - DNA, 120 bp, Artificial Sequence
  ENSG00000132535_23 (sequence is synthesized)
gggggggagctgggctccttgttccgagcccttgctccttaggatccccgcccccacctgcccccaatgcacacacagacccaccgggggccacctgccctcccccatcctctcccacac

SEQ ID NO: 298699 - DNA, 120 bp, Artificial Sequence
  ENSG00000132535_24 (sequence is synthesized)
acattccagaagtcagggccccctcgaggagcacccgctgcagggatgcagggccacaggcctccgctctctcctaaggcagggtctggggtcacccctgccctcatcgtaattccccat

SEQ ID NO: 298700 - DNA, 120 bp, Artificial Sequence
  ENSG00000132535_25 (sequence is synthesized)
gttccttgatttctcatttattttttccactttttttcttctcaaaggtggttttttggggggagaagcaggggactccgcagcgggcccctgccttccacatgcccccaccatttttct

SEQ ID NO: 298701 - DNA, 120 bp, Artificial Sequence
  ENSG00000132535_26 (sequence is synthesized)
ttgccggtttgcatgagtggaaggtctaaatgtggcttttttttttttttttcctgggaatttttttggggaaaagggagggatgggtctagggagtgggaaatgcgggagggagggtgg

SEQ ID NO: 298702 - DNA, 120 bp, Artificial Sequence
  ENSG00000132535_27 (sequence is synthesized)
ggggcaggggtcgggggtcgggtgtccgggagccagggaagactggaaatgctgccgccttctgcaatttatttatttttttcttttgagagagtgaaaggaagagacagatacttgaaa

SEQ ID NO: 298703 - DNA, 120 bp, Artificial Sequence
  ENSG00000132535_28 (sequence is synthesized)
tgtggtgttacatccggtgagaagctcccttcccccaagcctacccccctctccccactctttgccatctgctgctcccctctccgtctggctgtctcccttcccgcttctcctacacct

SEQ ID NO: 298704 - DNA, 120 bp, Artificial Sequence
  ENSG00000132535_29 (sequence is synthesized)
ccttccacatgcagggggccccgggctgggcagagttagatccttgcgcgtgtgcatctgtgcgtgtgtgtgcgcgtgcgcatgtgcacgcgtgtgcgtgtgtgtgatgtggattgaggc

SEQ ID NO: 298705 - DNA, 120 bp, Artificial Sequence
  ENSG00000132535_30 (sequence is synthesized)
tgggcccttgagcagctctcagggtggcggagtgggcttggctaagaggctgaaagggtagccacgctgatgggaccctccgttatgggctccctctcgagtcaaggctcaggctgcttt

SEQ ID NO: 298706 - DNA, 120 bp, Artificial Sequence
  ENSG00000132535_31 (sequence is synthesized)
ccccagcccaggccgctggggcctgatcagtcctttccctcatcagtcctctccctccatcagccagctcccctttcccatgttccctcttgcctattcatcttcaccttccctcttttc

SEQ ID NO: 298707 - DNA, 120 bp, Artificial Sequence
  ENSG00000132535_32 (sequence is synthesized)
ctcctcccctctctcatcctcttgggttctcacctctgccatatcttctttctatccccctctgccccctccatcatcccccaccacctgtttccctttctcctctctgctcacagcgtc

SEQ ID NO: 298708 - DNA, 120 bp, Artificial Sequence
  ENSG00000132535_33 (sequence is synthesized)
ctcctctctccagtcccgggaggcctggtttctgggaccttccattctccagtccactttccatcttccccttcctccatctcctcttctggggacacaggatggggaggactggagagc

SEQ ID NO: 298709 - DNA, 120 bp, Artificial Sequence
  ENSG00000132535_34 (sequence is synthesized)
gagctgtagttccctggagcccggccctgcgttccgctgacttagagggatctccaagcgtccctcgtctcccccaaactccttaatcccgcccgtccgacctagagtctagtcctccga

SEQ ID NO: 298710 - DNA, 120 bp, Artificial Sequence
  ENSG00000132535_35 (sequence is synthesized)
cggggtgatgggataggatgggacagaagaggaaggggcttaagtcactgcagccagagggatggaggtggactgaagggagggcttctccggtggggttagaagggaaaagtagggaaa

SEQ ID NO: 298711 - DNA, 120 bp, Artificial Sequence
  ENSG00000132535_36 (sequence is synthesized)
gagaagtgtaaggtagatggcagaggcagagacatggaaagacagactctagggttcctgatgaaatctatctcggccaacacaaaagggagggtacagtggtggggggcacccaagcta

SEQ ID NO: 298712 - DNA, 120 bp, Artificial Sequence
  ENSG00000132535_37 (sequence is synthesized)
gggtgtgagtaccctaagtgtattcttctgagatgtaggccattcactaactcttggaacagctacagtttcacagtaggaagacccccccagattcactgcccctcccttagtaaagcc

SEQ ID NO: 298713 - DNA, 120 bp, Artificial Sequence
  ENSG00000132535_38 (sequence is synthesized)
tctgagaccttcctgaacattcccttctgtctttgccctctgttccttccagagaccatgtgcccaggcagatggattcctcccgggcctgagaggaactgcaggaattctcctgcctct

SEQ ID NO: 298714 - DNA, 120 bp, Artificial Sequence
  ENSG00000132535_39 (sequence is synthesized)
tacccgtaaaaccccaacttctctagccctagggcaggaagtcccaaacaatttctacccctttttctgcaattctcattggggtgagaggaggcccaggaggagagagagctgggctca

SEQ ID NO: 298715 - DNA, 120 bp, Artificial Sequence
  ENSG00000132535_40 (sequence is synthesized)
gcttctttttgagctgctggagccctctgtgaggaggccctctttgctggcttctcaggagagcgtggctaggttctgcctgcctatgggaagagggggccagggtgtgtggagcaagat

SEQ ID NO: 298716 - DNA, 120 bp, Artificial Sequence
  ENSG00000132535_41 (sequence is synthesized)
ggtggcggtgctggtgccttgggacctgggggaatgggacagctggtcggctcagagacggcctactttactcacagctggaatttagtggggagaagcagctcaactccaatcctggag

SEQ ID NO: 298717 - DNA, 120 bp, Artificial Sequence
  ENSG00000132535_42 (sequence is synthesized)
gattagggagattaaagtgagagaagagagagatgtcccagagaccaagagctcccaggtcagccctctggctcctggcacccccactgctgcggtgggcacccccactcctcacagtgc

SEQ ID NO: 298718 - DNA, 120 bp, Artificial Sequence
  ENSG00000132535_43 (sequence is synthesized)
ccagagaggttagtggcctggaaaatgggccagggaggtaactggcaaatcaaggaacccgagttggtgaagactgagcctgggaaggtctggagctctgtccaaagtcatgacaggcca

SEQ ID NO: 298719 - DNA, 120 bp, Artificial Sequence
  ENSG00000132535_44 (sequence is synthesized)
gaaaggggaggctggaacttgtctggggccctgcagacttagtccagctctgatccctgccgggctgtctcagtcctgttgggaagcacaacagtccttaaaggaaaatagagaggaaac

SEQ ID NO: 298720 - DNA, 88 bp, Artificial Sequence
  ENSG00000132535_45 (sequence is synthesized)
gggaagcacaacagtccttaaaggaaaatagagaggaaacttcgttcattcatgttcatggagttgtggacagagctaggatctggaa

SEQ ID NO: 298721 - DNA, 67 bp, Artificial Sequence
  ENSG00000132535_46 (sequence is synthesized)
agtgcagtggctcgatctcggctcactgtgatctctgccaattactgccaccatgcctggctaattt

SEQ ID NO: 298722 - DNA, 120 bp, Artificial Sequence
  ENSG00000132535_47 (sequence is synthesized)
cgcgcctggcctggaaatgatctttacagagttctgctgataagaactgctgtgtgaatatacgctaggtttctttatgcgccccccccacccttttttttttttttttgagacagagtt

SEQ ID NO: 298723 - DNA, 61 bp, Artificial Sequence
  ENSG00000132535_48 (sequence is synthesized)
tttttgagacagagtttcgctctttcgccacggttctcctgcctcagcctctcgaatagct

SEQ ID NO: 298724 - DNA, 68 bp, Artificial Sequence
  ENSG00000132535_49 (sequence is synthesized)
tttagtagagatggggttttgttggcctcccacagtgttaagattacaggcatgagccactacgccca

SEQ ID NO: 298725 - DNA, 120 bp, Artificial Sequence
  ENSG00000132535_50 (sequence is synthesized)
tgagccactacgcccagcctttatgtcctatctctatgggaaagatctgaggcagctttgtaaataatgagggtaggaaaataagaatctaaatgccaaagatgaaaactggagaaatgt

SEQ ID NO: 298726 - DNA, 120 bp, Artificial Sequence
  ENSG00000132535_51 (sequence is synthesized)
atatgaactgtgagggtaaatgtgatctctgagcttcctgatagccatggcaaaaaaggaaattgtcaattacctacttctttattataagggagaaataattttagttcttttagggag

SEQ ID NO: 298727 - DNA, 120 bp, Artificial Sequence
  ENSG00000132535_52 (sequence is synthesized)
tcatattttcctggccctaagtcctaactgaagctcctgagatcctgctatgtagaatggtgactctcagccttctgccttcttcatgtgtttggcacagatgaacctttgggggcacct

SEQ ID NO: 298728 - DNA, 120 bp, Artificial Sequence
  ENSG00000132535_53 (sequence is synthesized)
gctggggtactattcctttctctgattctcaggtgctccagtgggtaaggctgaggcagagggccctaagagttatggtggttaaatcccaaacagtgcaaaagggcattttttgtagcc

SEQ ID NO: 298729 - DNA, 120 bp, Artificial Sequence
  ENSG00000132535_54 (sequence is synthesized)
actcctgactaaagttgagagtttcatgcaaaagaccaacccaggggtagtgattctgtggatggcatggccgtccaagcctaaagtagtccaagaatagaggcagagattgctgaaggg

SEQ ID NO: 298730 - DNA, 120 bp, Artificial Sequence
  ENSG00000132535_55 (sequence is synthesized)
gtgtcacttcaaccagtagccacgtattgccctgcaggattttctatgcaggaccgagtccatcaggatcctggggatagggaccaggggtctgcatttctggaaagctcccgggtgatt

SEQ ID NO: 298731 - DNA, 120 bp, Artificial Sequence
  ENSG00000132535_56 (sequence is synthesized)
tggaaagctcccgggtgattttgatgtctcactgggtggagaagcactgcttcagaggatttttttttttttttttttgaggtcgagtttcacttttgttgcccaagctggagtgcaatg

SEQ ID NO: 298732 - DNA, 66 bp, Artificial Sequence
  ENSG00000132535_57 (sequence is synthesized)
cttcccaagtagctgggattacagatgcgtgccataacacacagctattttttattgacctcaggt

SEQ ID NO: 298733 - DNA, 120 bp, Artificial Sequence
  ENSG00000132535_58 (sequence is synthesized)
tccttctcttagcttggttctgtgtaatagcagatggcttgaggctgtgataacgttctctatcgtgagctgaagggagaaatctaggagctgaggaaggtgtgtgcaggtaatgcgtct

SEQ ID NO: 298734 - DNA, 120 bp, Artificial Sequence
  ENSG00000132535_59 (sequence is synthesized)
aaggtgtgtgcaggtaatgcgtctgcgtgttaaactagaaggggcagaatcacatatttgacctggatggggtagaatcacataattttgcatgtattattattattattattattatta

SEQ ID NO: 298735 - DNA, 61 bp, Artificial Sequence
  ENSG00000132535_60 (sequence is synthesized)
accccccatgcattattttgtaaattataatcagtacacgtacctgacaacaattcaaata

SEQ ID NO: 298736 - DNA, 120 bp, Artificial Sequence
  ENSG00000132535_61 (sequence is synthesized)
atcttccctttcctttccctctgtcttttactctgtccatacccgcttcctgcctgactctctgcccccgtgtttcttgacatccatgtcactccccttcggccaacttcccattcccca

SEQ ID NO: 298737 - DNA, 120 bp, Artificial Sequence
  ENSG00000132535_62 (sequence is synthesized)
cctctccccgtccgtgtccctccggcactgctctctgtcctttctcgccacccgctggcccccctccgcccaccctgcctgcccccaggggaagcactgcatcctcgatgtctcggccaa

SEQ ID NO: 298738 - DNA, 120 bp, Artificial Sequence
  ENSG00000132535_63 (sequence is synthesized)
ccccgccgcagcctccagttgccgcggccgccgcagcccccgcccctctgcccctccccctcccccaacccccgggacccttgatatcccacctacccccttccctcagtccccctcccc

SEQ ID NO: 298739 - DNA, 120 bp, Artificial Sequence
  ENSG00000132535_64 (sequence is synthesized)
cacgacatccctgtagctgtccctcttcagatattccctatgaaatagccacaacctctgatccttgctgttgttggagaagagatggaaaatcaattaccataaaagaactagaaaaga

SEQ ID NO: 298740 - DNA, 120 bp, Artificial Sequence
  ENSG00000132535_65 (sequence is synthesized)
gcagctggggaaccccggattcccggggtgcagggtttagggcaaatgtctgtgaaagccaattctcccccagtgattgtcaacacagataccctagaagccccaggatatgagttgcag

SEQ ID NO: 298741 - DNA, 120 bp, Artificial Sequence
  ENSG00000132535_66 (sequence is synthesized)
ctctggagcacagcccggcccacctccccaaccaggtaaacgcccccgagctggtgcacgtggcggagaggaacttgtcccacctcgaggctggccacggggtcgtgggccacgcccacc

SEQ ID NO: 298742 - DNA, 120 bp, Artificial Sequence
  ENSG00000132535_67 (sequence is synthesized)
ggaggggtgagaacccacggaggggaggaacgaaactccgatgaagtcagagccccttacccgccgccgcggccaggccccccaacatggactgtctctgtatagtgacaaccaaggcca

SEQ ID NO: 298743 - DNA, 120 bp, Artificial Sequence
  ENSG00000132535_68 (sequence is synthesized)
ggcctcccctttgctcccccaacacctgtggccctgggcctcacaaggcgtctgcgttcaactctcccttcagaaccctggacagcggtttcagcagcccctgagggggatccctggaac

SEQ ID NO: 298744 - DNA, 120 bp, Artificial Sequence
  ENSG00000132535_69 (sequence is synthesized)
ccagaggatgtgggggaatcgggtctttcccctcctctcctgccttggctagacaggactacatttcccagcagcccctggggcataccagctggggcgagtcagggcctctagggctgt

SEQ ID NO: 298745 - DNA, 120 bp, Artificial Sequence
  ENSG00000132535_70 (sequence is synthesized)
tgggaattggagtccgaatcccatctctggggctgaaggctggaaggatgaagctccgtagatgtccctggagtagccacacctggctggggcggttgcgggtggcaggggggtgggggg

SEQ ID NO: 298746 - DNA, 120 bp, Artificial Sequence
  ENSG00000132535_71 (sequence is synthesized)
tggttctcatctgtggccccagaggatattgggaattgtatttttttttttgctatgtgctccaaatagaagaatacttaacattcctggatagaggagataaaaggcagggtcaggtgg

SEQ ID NO: 298747 - DNA, 120 bp, Artificial Sequence
  ENSG00000132535_72 (sequence is synthesized)
cgggtcttgactggtcctagataccgttgctaggcaacacggtccttagaggaaggggtggattggacggctggttggtgagaccgagggaggggcctgcagctggggaaccccggattc

SEQ ID NO: 298748 - DNA, 120 bp, Artificial Sequence
  ENSG00000132535_73 (sequence is synthesized)
acaggcactgaagttcccaaggtcccccggggtgggcagccaacaggggatgggtttgccctctgaactcctaggggtttgtctgttgggccctcctggggtccgtggctcccatgagcc

SEQ ID NO: 298749 - DNA, 120 bp, Artificial Sequence
  ENSG00000132535_74 (sequence is synthesized)
aggggtgtcagctggcccagagtatggagaaggggttgtcagctggctcagagcatgggggtggcagggggtaggcattcccctacccgcgtatccctccatgtatcccacagggttgag

SEQ ID NO: 298750 - DNA, 120 bp, Artificial Sequence
  ENSG00000132535_75 (sequence is synthesized)
aggttattcaggatgcgctgcgcccacaaacctcttcagcccggcctcctctcggcctggctaacgtggggcggggcccagggcaggagaggcggggctagcggatcccttctgcgctca

SEQ ID NO: 298751 - DNA, 120 bp, Artificial Sequence
  ENSG00000132535_76 (sequence is synthesized)
cttggatcctctggtgatccaagccttcctaccagatatgaaactaggacattgggggtcatcttgggggcgcatgtaacagatgccgatcaacggggtcaatctcgcttggaaataccg

SEQ ID NO: 298752 - DNA, 120 bp, Artificial Sequence
  ENSG00000132541_0 (sequence is synthesized)
agtccagtaagaagccagcagggctggtgctggggcttcttctcctgaaggggctgcaagagggaaggcttagccatgtcgtccttgatcagaagggtgatcagcaccgcgaaagcccca

SEQ ID NO: 298753 - DNA, 120 bp, Artificial Sequence
  ENSG00000132541_1 (sequence is synthesized)
ggggccattggaccctacagtcaagctgtattagtcgacaggaccatttacatttcaggacagataggcatggacccttcaagtggacagcttgtgtcaggaggggtagcagaagaagct

SEQ ID NO: 298754 - DNA, 120 bp, Artificial Sequence
  ENSG00000132541_2 (sequence is synthesized)
aaacaagctcttaaaaacatgggtgaaattctgaaagctgcaggctgtgacttcactaacgtggtgaaaacaactgttcttctggctgacataaatgacttcaatactgtcaatgaaatc

SEQ ID NO: 298755 - DNA, 120 bp, Artificial Sequence
  ENSG00000132541_3 (sequence is synthesized)
tacaaacagtatttcaagagtaattttcctgctagagctgcttaccaagttgctgctttacccaaaggcagccgaattgaaattgaagcagtagctatccaaggaccactgacaacggca

SEQ ID NO: 298756 - DNA, 120 bp, Artificial Sequence
  ENSG00000132541_4 (sequence is synthesized)
agtctggaattgttaacattttaatttttacaattgatgtaacatcttaattaaccttttaattttcacaattgatgacagtgtgagtttgatgaaaatatctgaagctattatggaaat

SEQ ID NO: 298757 - DNA, 120 bp, Artificial Sequence
  ENSG00000132541_5 (sequence is synthesized)
accatgtaatagggagagttgaacatgaatattagagaaggaatccagttacttttttaaattacacctgtgtgcacctgtattactgaatataggaaagagatacccattacatagtta

SEQ ID NO: 298758 - DNA, 120 bp, Artificial Sequence
  ENSG00000132541_6 (sequence is synthesized)
ctcagtaaacaaaagagaaataccaggtaggaaagaagagttactattcctgagaaataatcaagaacatatttaatttaaactaatgatgtgaactatttagttttgatgtccgttatg

SEQ ID NO: 298759 - DNA, 120 bp, Artificial Sequence
  ENSG00000132541_7 (sequence is synthesized)
tgattctgcttttacttgagtaaaattaaagtgtttaaatttgagatcaaggagaagatagtggaacaaaatgttatatagataatatttttctaatggaaataaaataggcagatttcc

SEQ ID NO: 298760 - DNA, 120 bp, Artificial Sequence
  ENSG00000132541_8 (sequence is synthesized)
atcgaatgaagaacaccagaaattatttctgtggacattggctgaacaattaacacattttagcactgaagaaggaacttcaacctagtctttttacgcacaaaaggagacaacattttc

SEQ ID NO: 298761 - DNA, 120 bp, Artificial Sequence
  ENSG00000132541_9 (sequence is synthesized)
accatatatcagaaagactcattctattaaaggaaagccaagaaacacacttgtaagcgagtagggaggatttttctgcaacataggctatttaaggaggtattagtaaaagatgattaa

SEQ ID NO: 298762 - DNA, 120 bp, Artificial Sequence
  ENSG00000132541_10 (sequence is synthesized)
aagagggaaggcttagccatgtcgtccttgatcagaagggtgatcagcaccgcgaaagccccaggggccattggaccctacagtggtagcatttagaaaaacatctttacctccaaacaa

SEQ ID NO: 298763 - DNA, 120 bp, Artificial Sequence
  ENSG00000132541_11 (sequence is synthesized)
gagacactttgtcctggagcctgctaaagagcataccccttccttgacctatttagagatactctgtggactttgttcaggaaagaaagcataacagtaatgttcctggttgacttgaag

SEQ ID NO: 298764 - DNA, 120 bp, Artificial Sequence
  ENSG00000132549_0 (sequence is synthesized)
ggcgcggtacaggagcagcactgccggcgggggcgggtgccagggacttggaggtggaggggacgcggcggtactctggcgtcttccgacttcgactccttaccttaaaagatgctggag

SEQ ID NO: 298765 - DNA, 120 bp, Artificial Sequence
  ENSG00000132549_1 (sequence is synthesized)
tcatatgtaactccaattttaatgagctatgtgaatcgctacatcaagaacttaaagccgtcggatctacagctttcactatggggtggagacgtggtactcagcaagctcgagttaaag

SEQ ID NO: 298766 - DNA, 120 bp, Artificial Sequence
  ENSG00000132549_2 (sequence is synthesized)
ttggatgtgctggaacaggaactgaaattaccattcacttttttaagtggacatattcatgaattgaggattcatgtaccatggacaaaactgggttcagaaccagtggtaattaccatc

SEQ ID NO: 298767 - DNA, 120 bp, Artificial Sequence
  ENSG00000132549_3 (sequence is synthesized)
aatactatggaatgcattttgaaacttaaggatgggatacaggatgaccatgaaagctgtggttctaattctaccaaccgtagtactgctgagagcacaaaatcatcaatcaaaccgcgg

SEQ ID NO: 298768 - DNA, 120 bp, Artificial Sequence
  ENSG00000132549_4 (sequence is synthesized)
agaatgcagcaggctgctcctacagatcctgacttaccaccaggttatgtgcagagtctgattagacgagttgtaaataatgtaaacattgtgataaataatctcatactaaaatatgtt

SEQ ID NO: 298769 - DNA, 120 bp, Artificial Sequence
  ENSG00000132549_5 (sequence is synthesized)
gaagatgatatcgtcctttccgtcaatatcacttctgcagaatgttatacagtaggtgaattatgggatcgtgcattcatggatatttctgcaactgatttggtgctgagaaaggttatc

SEQ ID NO: 298770 - DNA, 120 bp, Artificial Sequence
  ENSG00000132549_6 (sequence is synthesized)
aatttttctgactgtacagtttgtcttgataaacggaatgccagtggtaaaatagaattttaccaggatcctttattatacaaatgttccttcagaactcgtcttcattttacatatgaa

SEQ ID NO: 298771 - DNA, 120 bp, Artificial Sequence
  ENSG00000132549_7 (sequence is synthesized)
aacctaaattccaagatgccatctgttattaaaattcatactttagtggaaagtttgaaactttctatcacagatcaacaactgcctatgtttattcgtataatgcaacttggaattgct

SEQ ID NO: 298772 - DNA, 120 bp, Artificial Sequence
  ENSG00000132549_8 (sequence is synthesized)
ctttactatggagaaataggcaattttaaagaaggcgaaatagaggaccttacttgtcataataaagatatgctaggaaacattacaggttctgaagatgaaacaagaatagatatgcaa

SEQ ID NO: 298773 - DNA, 120 bp, Artificial Sequence
  ENSG00000132549_9 (sequence is synthesized)
tatcctgctcagcataaaggtcaagagttatattcacagcaagatgaggagcagccacagggatgggtgtcatgggcctggtcctttgtgcctgcaattgtgagttatgacgatggcgag

SEQ ID NO: 298774 - DNA, 120 bp, Artificial Sequence
  ENSG00000132549_10 (sequence is synthesized)
gaagactttgttgggaacgatcctgcatcaaccatgcatcaacaaaaagcacagactttgaaggatcctattgtttctataggattttattgcacaaaggcaacggtgactttcaaactc

SEQ ID NO: 298775 - DNA, 120 bp, Artificial Sequence
  ENSG00000132549_11 (sequence is synthesized)
acagaaatgcaagttgagagtagttattacagtccacagaaagtaaaatctaaagaagtattgtgttgggaacaagaaggaactacagttgaggcccttatgatgggagaacctttcttt

SEQ ID NO: 298776 - DNA, 120 bp, Artificial Sequence
  ENSG00000132549_12 (sequence is synthesized)
gattgccagattgggtttgttggttgcagagccatgtgccttaaaggaattatgggtgttaaagattttgaagagaatatgaatagaagtgaaactgaagcctgtttcttcatttgtggt

SEQ ID NO: 298777 - DNA, 120 bp, Artificial Sequence
  ENSG00000132549_13 (sequence is synthesized)
gacaatttgagtacgaaaggtttcacataccttacaaattcattgtttgattaccgaagcccagaaaataatggtactcgcgcagaatttatcttggattcaactcatcataaggagaca

SEQ ID NO: 298778 - DNA, 120 bp, Artificial Sequence
  ENSG00000132549_14 (sequence is synthesized)
tacactgagatagctggaatgcaacggtttggggctttttatatggattacctgtatacaatggagaacactagtggcaaaggttccacaaatcaacaagacttttcttcagggaaaagt

SEQ ID NO: 298779 - DNA, 120 bp, Artificial Sequence
  ENSG00000132549_15 (sequence is synthesized)
gaagatttgggaacagttcaggagaagtccaccaaaagccttgttataggtcctcttgattttcgtttggatagcagtgcggtgcataggattttgaaaatgattgtgtgtgccttggaa

SEQ ID NO: 298780 - DNA, 120 bp, Artificial Sequence
  ENSG00000132549_16 (sequence is synthesized)
catgaatatgaaccatatagcaggctaaaatcagatattaaggatgaaaatgaaacaatactgaatcctgaagaggtggctcttctggaggaatatattcctactcgacatacaagtgtt

SEQ ID NO: 298781 - DNA, 120 bp, Artificial Sequence
  ENSG00000132549_17 (sequence is synthesized)
actctcctcaaatgtacctgcacaatttccatggctgaattcaacttgctggaccatttactacctgtcattatgggagaaaagaactcaagtaacttcatgaatactacaaacttccag

SEQ ID NO: 298782 - DNA, 120 bp, Artificial Sequence
  ENSG00000132549_18 (sequence is synthesized)
tctcttcggcctttgccatccattcgaatattggtggataaaattaatctggaacattcagtgccaatgtatgctgaacagttggtgcatgtggtcagcagccttactcaaccttctgat

SEQ ID NO: 298783 - DNA, 120 bp, Artificial Sequence
  ENSG00000132549_19 (sequence is synthesized)
aacctgcttcattattgttatgtacactgctatcttaagatatttggtttccaggcaggactgacgtctttggattgcagtggatcttactgcttacctgtaccagttattccctctttc

SEQ ID NO: 298784 - DNA, 120 bp, Artificial Sequence
  ENSG00000132549_20 (sequence is synthesized)
agcactgctctttatgggaaacttctgaaactccccacatgctggaccaaaagatctcagattgctataactgaaggtatatttgaacttccaaatctcacaattcaagctacaagagca

SEQ ID NO: 298785 - DNA, 120 bp, Artificial Sequence
  ENSG00000132549_21 (sequence is synthesized)
cagacacttctcttgcaagcaatatatcaaagttggtctcatcttggaaatgtcagctcttccgcagtgattgaagctttgataaatgaaatcttcctaagtataggtgtgaaatctaag

SEQ ID NO: 298786 - DNA, 120 bp, Artificial Sequence
  ENSG00000132549_22 (sequence is synthesized)
aatcccctgccaactcttgagggctcaatccagaatgttgaattgaagtactgcagcacatcattggtcaaatgtgcctctgggaccatgggatcaataaaaatttgtgccaaagcccca

SEQ ID NO: 298787 - DNA, 120 bp, Artificial Sequence
  ENSG00000132549_23 (sequence is synthesized)
gttgatagtggaaaagagaagttgattcccttgcttcagggtccttctgacactaaagaccttcatagcaccaagtggctcaatgagagtagaaagccagagtctctcttagctccagat

SEQ ID NO: 298788 - DNA, 120 bp, Artificial Sequence
  ENSG00000132549_24 (sequence is synthesized)
ttgatggccttcacaatccaagttccacaatatattgactactgccacaattccggtgctgtacttctttgcagtatacaaggactagcagttaatattgacccaatcttatatacgtgg

SEQ ID NO: 298789 - DNA, 120 bp, Artificial Sequence
  ENSG00000132549_25 (sequence is synthesized)
ctcatctatcagcctcagaaacgaacaagtagacatatgcaacagcagcctgtggtagctgttcctcttgttatgccagtttgtagaaggaaagaggatgaggtgtctattggaagtgcc

SEQ ID NO: 298790 - DNA, 120 bp, Artificial Sequence
  ENSG00000132549_26 (sequence is synthesized)
cccttggcaaagcagcaatcatatcaggcctctgaatatgccagcagccctgtaaaaacaaaaacggtaacagaatcccgcccattgtcagttcctgttaaagccatgttgaatatatct

SEQ ID NO: 298791 - DNA, 120 bp, Artificial Sequence
  ENSG00000132549_27 (sequence is synthesized)
gaaagctgtagaagtcctgaagaaagaatgaaggaatttattggaattgtttggaatgcagtgaagcatctcacactacagcttgaagtacaatcttgttgtgtgtttattccaaatgat

SEQ ID NO: 298792 - DNA, 120 bp, Artificial Sequence
  ENSG00000132549_28 (sequence is synthesized)
agcctgccttccccaagtacaattgtatctggtgacattcctggaacagtaagaagttggtaccatggacaaaccagcatgccgggaacacttgtcctctgtttgcctcaaataaagatt

SEQ ID NO: 298793 - DNA, 120 bp, Artificial Sequence
  ENSG00000132549_29 (sequence is synthesized)
attagtgctgggcacaagtatatggaacctctgcaggagattccatttgttatcccacgacccatccttgaagaaggtgatgcttttccttggacgatcagcttgcataatttcagcata

SEQ ID NO: 298794 - DNA, 120 bp, Artificial Sequence
  ENSG00000132549_30 (sequence is synthesized)
tatacccttcttggaaaacaagtgacactttgcctagtggaacctatgggttgcacctccactctagctgtcacgtctcaaaaactgcttgctacgggacctgatacacgacattcattt

SEQ ID NO: 298795 - DNA, 120 bp, Artificial Sequence
  ENSG00000132549_31 (sequence is synthesized)
gttgtctgtctccatgttgacctagagtcactagagataaaatgctctaatccccaggtccagctcttctatgaactaactgatatcatgaataaggtctggaacaagattcagaagaga

SEQ ID NO: 298796 - DNA, 120 bp, Artificial Sequence
  ENSG00000132549_32 (sequence is synthesized)
ggcaatctcaacctatctccaacctctccagagaccatggcagggcctgttcctacttctccagttagaagcagtataggcacagctcctccagataccagcacatgcagcccatctgct

SEQ ID NO: 298797 - DNA, 120 bp, Artificial Sequence
  ENSG00000132549_33 (sequence is synthesized)
gacattgggactactactgagggagattctatacaagcaggtgaggaatcaccattctcagattctgtgaccttggaacaaactacaagtaatattggaggaaccagtggacgtgttagt

SEQ ID NO: 298798 - DNA, 120 bp, Artificial Sequence
  ENSG00000132549_34 (sequence is synthesized)
ttatggatgcagtgggtgcttcccaaaattactataaagctctttgctccagatcctgaaaataaaggcacagaggtttgtatggtcagtgaactagaagatctcagtgcttccatagat

SEQ ID NO: 298799 - DNA, 120 bp, Artificial Sequence
  ENSG00000132549_35 (sequence is synthesized)
gtccaggatgtatataccaaagtgaaatgtaaaatagagagtttcaatattgatcactatagaagcagccttggggaagagtgttggtctttggggcaatgtggaggtgtcttcctttcc

SEQ ID NO: 298800 - DNA, 120 bp, Artificial Sequence
  ENSG00000132549_36 (sequence is synthesized)
tgtactgacaagctgaacagacgcaccttgttggttcgacccatcagcaagcaggaccctttcagtaattgctctggcttctttccttctacaactacaaaacttctagatggcactcat

SEQ ID NO: 298801 - DNA, 120 bp, Artificial Sequence
  ENSG00000132549_37 (sequence is synthesized)
cagcagcatggattcctctctctgacatacacaaaagctgtaacaaaaaatgtccgccacaagttaacatcaagaaatgagcgaagaagttttcataagttatctgaaggcctaatggat

SEQ ID NO: 298802 - DNA, 120 bp, Artificial Sequence
  ENSG00000132549_38 (sequence is synthesized)
ggttctcctcattttcttcatgaaattcttctttcagcacaagcttttgatattgttctttattttcctttacttaatgccattgcaagtatatttcaagcaaaactaccaaagacccaa

SEQ ID NO: 298803 - DNA, 120 bp, Artificial Sequence
  ENSG00000132549_39 (sequence is synthesized)
aaagagaaaagaaaatctcctggtcagcccatgaggacccatacactgacatcccgcaatttacctttgatttatgtcaacacaagtgtaatcagaatttttattccaaaaacagaagaa

SEQ ID NO: 298804 - DNA, 120 bp, Artificial Sequence
  ENSG00000132549_40 (sequence is synthesized)
atgcagccaactgttgaagctaatcaggcagcaaaagaagacactgtggttttgaagattggctctgttgccatggctccccaggctgacaatccccttggcagatctgtccttaggaaa

SEQ ID NO: 298805 - DNA, 120 bp, Artificial Sequence
  ENSG00000132549_41 (sequence is synthesized)
gatatttaccagagagccttgaacttaggaattcttcgagatcctggatcagaaatcgaagacagacaataccaaatagatctgcagtccatcaatattggtactgcacagtggcatcaa

SEQ ID NO: 298806 - DNA, 120 bp, Artificial Sequence
  ENSG00000132549_42 (sequence is synthesized)
ctaaaaccagagaaggaaagtgtctcaggaggggtggtaacagagactgaaaggaattctcaaaatccagcccttgagtggaatatggccagcagcatacggcggcatcaagaaaggaga

SEQ ID NO: 298807 - DNA, 120 bp, Artificial Sequence
  ENSG00000132549_43 (sequence is synthesized)
gcaattttgacccccgttttgacagatttttctgtccgaataactggagcacctgctgtcattttcaccaaagtagtttctccagaaaatttgcatactgaggagattttagtgtgtggc

SEQ ID NO: 298808 - DNA, 120 bp, Artificial Sequence
  ENSG00000132549_44 (sequence is synthesized)
cattccttagaagtgaatataaccacaaacctggacttcttcctaagtgtggctcaagttcaactcttacatcagttaatagtagcaaatatgactggactggaaccatcaaacaaggct

SEQ ID NO: 298809 - DNA, 120 bp, Artificial Sequence
  ENSG00000132549_45 (sequence is synthesized)
gcagagatctctaaacaagaacagaaaaaagtggatatatttgatggaggcatggctgaaacctcatctcgctacagtggtgctcaggatagtggaattggcagtgacagtgttaaaatc

SEQ ID NO: 298810 - DNA, 120 bp, Artificial Sequence
  ENSG00000132549_46 (sequence is synthesized)
agaatagtgcaaatagagcagcacagtggtgccagtcagcatcgcattgcccgtccctcacgccagtcatcaattgtaaaaaatctaaattttattccctttgacatatttattactgca

SEQ ID NO: 298811 - DNA, 120 bp, Artificial Sequence
  ENSG00000132549_47 (sequence is synthesized)
agtagaatctcactaatgacctattcctgtatggccttatccaaatcgaaatcacaagaacagaagaataatgaaaaaacagacaagagttcattaaatctcccagaagttgattcagat

SEQ ID NO: 298812 - DNA, 120 bp, Artificial Sequence
  ENSG00000132549_48 (sequence is synthesized)
gttgctaagcccaaccaggcatgtatttccacggtgacagcagaagatctcttaaggagcagcatttcttttccttcagggaaaaaaataggggtcctctctcttgaaagtcttcatgca

SEQ ID NO: 298813 - DNA, 120 bp, Artificial Sequence
  ENSG00000132549_49 (sequence is synthesized)
tccacaaggtcatctgctagacaagcacttggtataactattgttcggcagcctggtcgaagaggaactggtgacttacagctagagccttttctgtactttattgtgtcccagccttcc

SEQ ID NO: 298814 - DNA, 120 bp, Artificial Sequence
  ENSG00000132549_50 (sequence is synthesized)
ttgcttctgagttgtcaccacagaaagcagcgagtggaagtatccatttttgatgctgtgcttaaaggggtggcctctgattacaaatgtatagatcctgggaagactctgcctgaagcc

SEQ ID NO: 298815 - DNA, 120 bp, Artificial Sequence
  ENSG00000132549_51 (sequence is synthesized)
cttgattattgcactgtttggctacagacagtgcctggagaaatagacagcaaaagtggtattccaccttcctttataacactacagattaaagactttctgaatggaccagcggatgtc

SEQ ID NO: 298816 - DNA, 120 bp, Artificial Sequence
  ENSG00000132549_52 (sequence is synthesized)
aatttggatatatcaaagcctttgaaagcaaacctgagtttcaccaaactggatcagataaacctttttttaaagaagataaaaaatgcacacagtttggcacatagtgaagagacttca

SEQ ID NO: 298817 - DNA, 120 bp, Artificial Sequence
  ENSG00000132549_53 (sequence is synthesized)
gccatgtccaacaccatggtgaataaggatgatcttccagtctccaaatattaccgtggaaagttgtctaaacccaaaattcatggtgatggagtgcaaaagatttcagctcaagaaaac

SEQ ID NO: 298818 - DNA, 120 bp, Artificial Sequence
  ENSG00000132549_54 (sequence is synthesized)
atgtggagagctgtttcctgctttcaaaaaatttctgttcaaactactcagattgtgatctccatggaaactgtaccccataccagcaaaccatgcctgttagcatctctctcaaacctc

SEQ ID NO: 298819 - DNA, 120 bp, Artificial Sequence
  ENSG00000132549_55 (sequence is synthesized)
aatggaagccttagtgtcaaggcaacacaaaaagtacctggcataattcttgggtcatcatttctactcagtataaacgattttctccttaaaacaagtctcaaagaaagaagccgcatt

SEQ ID NO: 298820 - DNA, 120 bp, Artificial Sequence
  ENSG00000132549_56 (sequence is synthesized)
ctgataggaccatgttgtgctactgccaatctggaagctaagtggtgtaaacacagcgggaatccaggcccagaacaatccataccaaaaatatccattgacttaagaggaggtctacta

SEQ ID NO: 298821 - DNA, 120 bp, Artificial Sequence
  ENSG00000132549_57 (sequence is synthesized)
caggtcttctggggtcaagaacatttgaattgtttagttcttctacatgaattactcaatggataccttaatgaggagggaaattttgaagtacaagtttctgaaccagtgcctcaaatg

SEQ ID NO: 298822 - DNA, 120 bp, Artificial Sequence
  ENSG00000132549_58 (sequence is synthesized)
ctacggacaggtctatttcagtatgtacaggatgctgaatctttgaaattgcctggggtctatgaagtcttattttataatgaaactgaagattgcccagggatgatgttatggagatat

SEQ ID NO: 298823 - DNA, 120 bp, Artificial Sequence
  ENSG00000132549_59 (sequence is synthesized)
ccagaacctagagtactcacccttgtacgaataactcctgtaccttttaacaccacagaggatccagatattagcacagcagaccttggtgatgtgctacaggttccttgtagcttggaa

SEQ ID NO: 298824 - DNA, 120 bp, Artificial Sequence
  ENSG00000132549_60 (sequence is synthesized)
tactgggatgaactccagaaggtttttgttgcatttagagaatttaatctgtctgaaagcaaagtttgtgaactgcagttgccggatatcaatctcgtgaatgaccagaagaaattagta

SEQ ID NO: 298825 - DNA, 120 bp, Artificial Sequence
  ENSG00000132549_61 (sequence is synthesized)
tcttcagatctttggagaattgtcttgaacagcagtcaaaatggagctgatgaccaaagctctgcaagtgagtctggttctcaaagcacttgtgatccacttgtgactccaacagccctg

SEQ ID NO: 298826 - DNA, 120 bp, Artificial Sequence
  ENSG00000132549_62 (sequence is synthesized)
gctgcctgtaccagagttgactcctgctttaccccatggtttgtcccatccctttgcgtttctttccagtttgctcacctggaattccatctttgtcatcaccttgaccaactaggcaca

SEQ ID NO: 298827 - DNA, 120 bp, Artificial Sequence
  ENSG00000132549_63 (sequence is synthesized)
gctgcaccacagtacctacagccatttgtttccgacagaaatatgccatctgaactagaatacatgattgtttccttcagagaaccacacatgtatcttcgacagtggaataatggttct

SEQ ID NO: 298828 - DNA, 120 bp, Artificial Sequence
  ENSG00000132549_64 (sequence is synthesized)
gtctgtcaggagatccagttcttagctcaagcagactgtaaacttctagagtgcagaaatgtcactatgcaaagtgtggtgaaacccttcagcatcttcgggcagatggcagtttccagc

SEQ ID NO: 298829 - DNA, 120 bp, Artificial Sequence
  ENSG00000132549_65 (sequence is synthesized)
gatgtagtggaaaagctgcttgactgcaccgtgatagttgattctgtatttgtaaaccttggacagcatgtagtccattcactaaacactgcaatacaagcttggcaacagaacaaatgc

SEQ ID NO: 298830 - DNA, 120 bp, Artificial Sequence
  ENSG00000132549_66 (sequence is synthesized)
cctgaggtagaggagttggtcttcagccattttgtgatctgtaatgacacacaggagacactgcggtttggccaggtggatactgatgaaaatattctgctggcgagtctccacagtcac

SEQ ID NO: 298831 - DNA, 120 bp, Artificial Sequence
  ENSG00000132549_67 (sequence is synthesized)
cagtacagctggcgctctcacaaatccccacagctgttacacatctgtattgaaggttggggcaactggcgttggtcagagcctttcagtgtggaccatgccgggacttttattagaaca

SEQ ID NO: 298832 - DNA, 120 bp, Artificial Sequence
  ENSG00000132549_68 (sequence is synthesized)
attcagtacaggggtcgaactgcttctctcatcatcaaggttcagcaactcaatggagtacaaaaacagattatcatctgtggaagacagatcatctgtagttacttgtctcaaagcata

SEQ ID NO: 298833 - DNA, 120 bp, Artificial Sequence
  ENSG00000132549_69 (sequence is synthesized)
gaactaaaagtcgttcagcattacattggtcaagatggacaagctgtagttcgggaacattttgactgcctcacagccaaacagaaattgccttcgtacatactagaaaacaatgaactg

SEQ ID NO: 298834 - DNA, 120 bp, Artificial Sequence
  ENSG00000132549_70 (sequence is synthesized)
acggagctgtgtgtgaaggccaaaggagatgaagactggtcaagagatgtgtgcctggaatccaaagcccctgagtacagcattgtcattcaggtgccatcttcaaacagttccattatt

SEQ ID NO: 298835 - DNA, 120 bp, Artificial Sequence
  ENSG00000132549_71 (sequence is synthesized)
tatgtctggtgcacagttttgactttagaacccaactctcaagtgcaacaacgaatgattgtgttcagccctctttttatcatgaggagtcatcttccagaccccattatcatacatttg

SEQ ID NO: 298836 - DNA, 120 bp, Artificial Sequence
  ENSG00000132549_72 (sequence is synthesized)
gagaaaaggagtctgggattgagtgaaacacaaattattccaggaaaagggcaggaaaaaccactgcaaaacatagaacctgaccttgtacatcacctgacattccaagcaagagaagaa

SEQ ID NO: 298837 - DNA, 120 bp, Artificial Sequence
  ENSG00000132549_73 (sequence is synthesized)
tatgatccttcagattgtgcagttcccatctcaacatccctcattaagcaaatagccactaaggtacaccctggaggcacagttaatcagatccttgacgaattctatgggccagaaaag

SEQ ID NO: 298838 - DNA, 120 bp, Artificial Sequence
  ENSG00000132549_74 (sequence is synthesized)
tcgcttcaacccatatggccctataataagaaggattctgacaggaatgaacagctaagtcagtgggatagcccaatgcgagtgaagctgtcaatctggaagccatatgttagaactttg

SEQ ID NO: 298839 - DNA, 120 bp, Artificial Sequence
  ENSG00000132549_75 (sequence is synthesized)
ttgatagaacttctgccctgggccctgcttatcaatgaatccaaatgggacctctggctatttgaaggagagaaaattgttctacaggttcctgctggcaaaattattattcctcctaat

SEQ ID NO: 298840 - DNA, 120 bp, Artificial Sequence
  ENSG00000132549_76 (sequence is synthesized)
tttcaggaagcttttcaaattggaatatactgggcaaatacaaacactgtgcacaagtcagtagcaattaaactggtccataacctgacatctccaaagtggaaagatggaggtaatggt

SEQ ID NO: 298841 - DNA, 120 bp, Artificial Sequence
  ENSG00000132549_77 (sequence is synthesized)
gaagttgtgacactggatgaagaagcgtttgttgatactgaaataagacttggtgcttttccaggacatcagaagttatgtcagttctgcatttcctccatggtacagcaaggtatacaa

SEQ ID NO: 298842 - DNA, 120 bp, Artificial Sequence
  ENSG00000132549_78 (sequence is synthesized)
attattcagattgaagacaagactacaataatcaataatacaccatatcaaatattttataaaccacagctatctgtctgcaatccccattctggaaaggagtattttcgtgttccagac

SEQ ID NO: 298843 - DNA, 120 bp, Artificial Sequence
  ENSG00000132549_79 (sequence is synthesized)
agtgctacttttagcatttgcccaggtggagagcagcctgctatgaaatccagctcccttccttgctgggacttgatgcctgacatcagtcagtcagtactggatgcatccctgcttcag

SEQ ID NO: 298844 - DNA, 120 bp, Artificial Sequence
  ENSG00000132549_80 (sequence is synthesized)
aaacagatcatgctgggcttttctcctgccccaggtgctgacagctcacagtgctggagcctgccagctatagttagaccagagtttcccagacagagtgtggcagtacccctcgggaat

SEQ ID NO: 298845 - DNA, 120 bp, Artificial Sequence
  ENSG00000132549_81 (sequence is synthesized)
ttccgggaaaatggattctgtaccagggctatagtgctgacatatcaagaacacctcggagtgacttatttaaccctctcagaagaccctagtcctcgagtaattatccacaatagatgt

SEQ ID NO: 298846 - DNA, 120 bp, Artificial Sequence
  ENSG00000132549_82 (sequence is synthesized)
ccagtaaaaatgcttataaaggaaaacattaaagatattccaaagtttgaggtttattgcaaaaaaattccctccgagtgctcaattcatcatgagctgtatcatcagatttccagttat

SEQ ID NO: 298847 - DNA, 120 bp, Artificial Sequence
  ENSG00000132549_83 (sequence is synthesized)
ccggactgcaagaccaaagacttacttccaagcctacttttgagagttgaacctctagatgaagtaacaactgagtggagtgatgccattgacatcaacagtcagggaacacaggttgtg

SEQ ID NO: 298848 - DNA, 120 bp, Artificial Sequence
  ENSG00000132549_84 (sequence is synthesized)
ttcctgactggctttggctatgtgtatgtggatgttgtacatcagtgtggcacagtcttcatcactgtggccccagaaggaaaagcaggacctattttaaccaataccaacagagcgcca

SEQ ID NO: 298849 - DNA, 120 bp, Artificial Sequence
  ENSG00000132549_85 (sequence is synthesized)
gagaagattgttacatttaaaatgttcatcactcagttaagcctggcagtgtttgatgacctcacccaccacaaagcatcagctgagcttctgagactcacactggacaacatttttctc

SEQ ID NO: 298850 - DNA, 120 bp, Artificial Sequence
  ENSG00000132549_86 (sequence is synthesized)
tgtgtggccccgggagctggtcccctccctggggaagagcctgtggctgcgttgtttgaactttactgtgtggagatctgctgtggggacctgcagctagacaaccagctttataacaag

SEQ ID NO: 298851 - DNA, 120 bp, Artificial Sequence
  ENSG00000132549_87 (sequence is synthesized)
tccaatttccactttgctgtcttagtctgccagggagaaaaagcagaacccattcagtgttccaaaatgcagagtctcctcatatccaacaaagagttggaagaatacaaggaaaaatgt

SEQ ID NO: 298852 - DNA, 120 bp, Artificial Sequence
  ENSG00000132549_88 (sequence is synthesized)
tttatcaaactttgcatcaccttaaatgaaggcaagagcatcctctgtgatattaatgagttcagctttgaattaaaacctgctcggttatacgtggaagacacatttgtatactacatc

SEQ ID NO: 298853 - DNA, 120 bp, Artificial Sequence
  ENSG00000132549_89 (sequence is synthesized)
aagactttgtttgacacctaccttcctaacagcaggttggctggtcactccacacacctctccgggggtaaacaggtgttgcccatgcaggtcacacagcacgccagggccttggtgaat

SEQ ID NO: 298854 - DNA, 120 bp, Artificial Sequence
  ENSG00000132549_90 (sequence is synthesized)
cctgtgaagttacggaaactggtgatccagccagtaaatttgctcgtcagcatccacgcttccctcaagctgtacatagcctcagaccacactcctctctccttctcggtgtttgaaaga

SEQ ID NO: 298855 - DNA, 120 bp, Artificial Sequence
  ENSG00000132549_91 (sequence is synthesized)
ggacccatcttcaccactgcgaggcagcttgtgcacgccctggcaatgcactatgccgctggggccctttttagagcaggctgggtagttgggtctctggatattcttggcagccctgca

SEQ ID NO: 298856 - DNA, 120 bp, Artificial Sequence
  ENSG00000132549_92 (sequence is synthesized)
agcctggtgagaagcatcgggaacggggtcgccgacttcttcaggcttccgtatgaggggctgacccggggccctggagccttcgtgagtggcgtctccagagggaccacatcgtttgta

SEQ ID NO: 298857 - DNA, 120 bp, Artificial Sequence
  ENSG00000132549_93 (sequence is synthesized)
aagcacatctccaaaggtaccctcacatccatcaccaacctcgccacaagcctggcccggaacatggaccggctctcactggatgaggagcactacaaccggcaggaggagtggcggcgg

SEQ ID NO: 298858 - DNA, 120 bp, Artificial Sequence
  ENSG00000132549_94 (sequence is synthesized)
cagctccccgagagcctgggcgaggggcttcgacagggcctgtcccggctgggcatcagcctgcttggtgcaattgctggtatagttgatcagccgatgcagaacttccagaaaacatct

SEQ ID NO: 298859 - DNA, 120 bp, Artificial Sequence
  ENSG00000132549_95 (sequence is synthesized)
gaggcacaggcttcagcaggacacaaggccaagggtgtcatctcgggtgtggggaaaggaatcatgggggtgttcacaaagcccatcggaggagctgctgagctggtgtcacagactggc

SEQ ID NO: 298860 - DNA, 120 bp, Artificial Sequence
  ENSG00000132549_96 (sequence is synthesized)
tatggtattttacatggagctggactttctcagcttcccaaacagcgccatcagccaagtgatctacatgctgaccaggctccaaacagccatgtcaaatatgtctggaaaatgcttcag

SEQ ID NO: 298861 - DNA, 120 bp, Artificial Sequence
  ENSG00000132549_97 (sequence is synthesized)
tctctgggcagaccagaagtccacatggccctggacgtggttctggtgaggggctcaggccaggagcatgaagggtgcttgctgctgacatcagaagtgctcttcgtggtgagtgtcagt

SEQ ID NO: 298862 - DNA, 120 bp, Artificial Sequence
  ENSG00000132549_98 (sequence is synthesized)
gaggacacacagcagcaggccttccccgtcacagaaatcgactgtgcacaggacagcaagcagaacaacttactcacagtgcagctcaagcagccaagagtggcctgtgatgtggaggta

SEQ ID NO: 298863 - DNA, 120 bp, Artificial Sequence
  ENSG00000132549_99 (sequence is synthesized)
gatggagtccgagagagactgtcagagcaacagtacaacagactggtggactacatcacaaagacatcttgtcacctggcccccagctgttcttccatgcaaataccatgccctgtggtg

SEQ ID NO: 298864 - DNA, 120 bp, Artificial Sequence
  ENSG00000132549_100 (sequence is synthesized)
gctgcagaacctcccccctccactgttaaaacataccattacctggttgatccacattttgctcaggtcttccttagtaaatttaccatggtgaaaaataaagccctgaggaaagggttt

SEQ ID NO: 298865 - DNA, 120 bp, Artificial Sequence
  ENSG00000132549_101 (sequence is synthesized)
ccttgagtcccctctgaggtgtttattcctgcttgtgtgatttagtttttgggtttctttgagacagggtctcactgcattgcccttgctgacctcaaattctggggttcaagcaatcct

SEQ ID NO: 298866 - DNA, 120 bp, Artificial Sequence
  ENSG00000132549_102 (sequence is synthesized)
cccacctcaacccacaagtagctacgactgcaagcacctgccaccataaagggctgcattttgccaccataaagggctgcatttttttaaaaagcctaggcagctctaacatcatctgat

SEQ ID NO: 298867 - DNA, 120 bp, Artificial Sequence
  ENSG00000132549_103 (sequence is synthesized)
atggacacaaggccaacagtttccttatttacatccttacctctaaaagatacttcaaagtgacaaaaacgtgttccttccccacttagagacaatgattaacagggccctatatgttct

SEQ ID NO: 298868 - DNA, 120 bp, Artificial Sequence
  ENSG00000132549_104 (sequence is synthesized)
taccacatacagaggatgcatttatttttgctctatgacacttgcaaaaatctctactgtaattaatttgggtctattattaactctctgttccatcatagaatgtggccaggccttaca

SEQ ID NO: 298869 - DNA, 120 bp, Artificial Sequence
  ENSG00000132549_105 (sequence is synthesized)
atggagagccagagttaaaacttcaagttgcatctgtttttgggctgagtcaccacctttgcctcatgctcctttgtctgcaaaggcctaggattctttctttaaatgaaatgcttagga

SEQ ID NO: 298870 - DNA, 120 bp, Artificial Sequence
  ENSG00000132549_106 (sequence is synthesized)
ctttgtggcttgttacatttgtcatttaactgcagtgctattctttgaaagctgctatgtgtattttctctgaagtctgcattttactaaaatttacaacagtctgatgattgattgatt

SEQ ID NO: 298871 - DNA, 120 bp, Artificial Sequence
  ENSG00000132549_107 (sequence is synthesized)
actgtccaggtacattttagaaaaagtgttcttcttccagtttgttttactaagcaaactttgagtaaatcctttgtcctatattgaatccagtcccaaagtgttcaggtgagtttctct

SEQ ID NO: 298872 - DNA, 120 bp, Artificial Sequence
  ENSG00000132549_108 (sequence is synthesized)
agttccataaacaaaacatacatagtgggaactccctggtatgccatagagcacacaagaaccccaatattaatgctaacaattataccagtccattttgtttattctgtggaattgact

SEQ ID NO: 298873 - DNA, 120 bp, Artificial Sequence
  ENSG00000132549_109 (sequence is synthesized)
tgacaaagcatgaagatattcccagtgtctgtctgataatattttgcatctaagaatgggtttgactcaagatcttgggttaccaagatgtcttaaatgttcagtaaatatctttcttac

SEQ ID NO: 298874 - DNA, 120 bp, Artificial Sequence
  ENSG00000132549_110 (sequence is synthesized)
agtccagtagcttagagcatgtttgctgattgatattacatttaaacttggggctacagcttgttacctagaattttgagatactaagagaatgcaattttaaatgcccactggttttat

SEQ ID NO: 298875 - DNA, 120 bp, Artificial Sequence
  ENSG00000132549_111 (sequence is synthesized)
ttgttttggagagagggtctcattctgtcacccaggctagagtacagtgggaacagtcatggctcactgcagcttaagctcactgcctgggctcaagtgatcttactccagcctcccaag

SEQ ID NO: 298876 - DNA, 120 bp, Artificial Sequence
  ENSG00000132549_112 (sequence is synthesized)
cagctgggactacaccaccacaggtatgcaccaccatacctggctgatttttaaaattttttctagagatgaggtctcactatgttgcccagctggtctcatactcctcagttcacgcat

SEQ ID NO: 298877 - DNA, 120 bp, Artificial Sequence
  ENSG00000132549_113 (sequence is synthesized)
ttacaggtgtgagccaccatgcccaacacccactgatctttaactctcacatgttgggcataagaagtcactatataattgttactggaaagcaagacttaacgaacaattctgactatg

SEQ ID NO: 298878 - DNA, 120 bp, Artificial Sequence
  ENSG00000132549_114 (sequence is synthesized)
aaagcaagacttaacgaacaattctgactatgaaaaatgtctctttcagtttgttctgtaaatatttagaaaagtgacagctgtcaacctcagagtaactatttctaaaaatgtaaatat

SEQ ID NO: 298879 - DNA, 120 bp, Artificial Sequence
  ENSG00000132549_115 (sequence is synthesized)
gtattaatccttgtatcttttatggtaattttgcatattgatatgaattatataaaattgtttaaaataaaaggtgtccttgaattactgaccacccatagatgtctactgttaccaggt

SEQ ID NO: 298880 - DNA, 120 bp, Artificial Sequence
  ENSG00000132549_116 (sequence is synthesized)
tttacaatgcaaattttcactaatacctgggtttaatacagctcacatcactgaatgttacacatgagtttaaatgggtaatatacaggttttgttataataaagttactgattaaatta

SEQ ID NO: 298881 - DNA, 120 bp, Artificial Sequence
  ENSG00000132549_117 (sequence is synthesized)
gctgcaaataaggaagtttctgttttgaagtccatatgtgtgtgtgcttgagatgccagctggtgtatttatgttgcatgcacagatgtaaaactgccaactgattttacaccaaataaa

SEQ ID NO: 298882 - DNA, 120 bp, Artificial Sequence
  ENSG00000132549_118 (sequence is synthesized)
gtctaatctttttatatgtactttgtgtcaaagttatgaagtggtatgtaagaatattctcatgacttaggtcttttaaaataaaagctgctattaaaaatatgaactcataagatgatt

SEQ ID NO: 298883 - DNA, 120 bp, Artificial Sequence
  ENSG00000132549_119 (sequence is synthesized)
aggaaagagaggaaagaggatagtgatagagatggtatttcttaactattatcctgtgtataataatgttgttatgactatatcattagataagtaaagttttgatttattataattatg

SEQ ID NO: 298884 - DNA, 120 bp, Artificial Sequence
  ENSG00000132549_120 (sequence is synthesized)
aatgatatatattctcttttgtggctagagtcagtcaggtctttgtgaaatcccaatttatgaatactgaaatgtgaaagacaaatttatataattacttgacttgcaggctttggctat

SEQ ID NO: 298885 - DNA, 120 bp, Artificial Sequence
  ENSG00000132549_121 (sequence is synthesized)
tattcaagtttgctttgcattcagtagatgtgagatagagtctaacagttcttacttcataaaattacatggctcctccacttgaaatctttgaattctgatcccttcctgtcttcttag

SEQ ID NO: 298886 - DNA, 120 bp, Artificial Sequence
  ENSG00000132549_122 (sequence is synthesized)
ggcattctccacatttcttttttattagcttcatggatagttttttgccctattgaatcattcagttggtgtacaaacatgccttaatattgtcattaaaaaagaaaggaacagcaaaaa

SEQ ID NO: 298887 - DNA, 120 bp, Artificial Sequence
  ENSG00000132549_123 (sequence is synthesized)
aagtgccgggattggaggcccaagccactgtgcctggccctttataaattatgttataatttcatgtaatacataattgtatagtcaaaatggctcacatattaaatattctttatacaa

SEQ ID NO: 298888 - DNA, 120 bp, Artificial Sequence
  ENSG00000132549_124 (sequence is synthesized)
gcatttgttccaactttacattcacagtaggaaaactataattaagctgactgctttctgcttaattattctgtgtttaactttattcaaaatatagtcataagtcattttggattgata

SEQ ID NO: 298889 - DNA, 120 bp, Artificial Sequence
  ENSG00000132549_125 (sequence is synthesized)
gtagatcattcttgaaggtcttcatgttgaatagtagactgaggaggaggaagaggaggggttcgtcttgtctcagaagtggcagaggtggaagaaaatccacatcagcctgtggtagct

SEQ ID NO: 298890 - DNA, 120 bp, Artificial Sequence
  ENSG00000132549_126 (sequence is synthesized)
gtaacagctccattcttccagtctctcagtcctaataccttggaatcatctttgctttctcttgtactatacatctaatccatcactattctcgtactcagaatcccgcccattgtcagt

SEQ ID NO: 298891 - DNA, 120 bp, Artificial Sequence
  ENSG00000132549_127 (sequence is synthesized)
ctaatcaggcagcaaaagaagacactgtggttttgaagattggctctgttgccatggctccccaggctgacaatccccttggcagatctgtccttaggaaagatatttaccacatacggc

SEQ ID NO: 298892 - DNA, 120 bp, Artificial Sequence
  ENSG00000132549_128 (sequence is synthesized)
gatcctgactgtgtggaccaaactccgtctgaacattgtattttgatgacgataataaatgtctactgcccttggtgtacttagataactggtaaacaaatgggtagtaaagacctttat

SEQ ID NO: 298893 - DNA, 120 bp, Artificial Sequence
  ENSG00000132549_129 (sequence is synthesized)
aatgagggtggggactcattttcaatccagataaaactgtgttccagatggagcctttcattttccgaggattttaagcctctgtccttactgagggcttttgttattccaggtgcaatt

SEQ ID NO: 298894 - DNA, 120 bp, Artificial Sequence
  ENSG00000132549_130 (sequence is synthesized)
ccagggagcccaggagtagccattgttggcactggcatctcaggcagcacaagagcactgtagagggacaggaagaggctgctgttgccaggtttggggctggctgcacaactcctctgt

SEQ ID NO: 298895 - DNA, 120 bp, Artificial Sequence
  ENSG00000132549_131 (sequence is synthesized)
tccgtacctaaccactcaaggaaggtcatacattggcagagaaacccagtcttgctagagggcctgagattccctgtggaaccagcactctaattagaggtgctatttctaatggggaga

SEQ ID NO: 298896 - DNA, 120 bp, Artificial Sequence
  ENSG00000132549_132 (sequence is synthesized)
aaaggagctaataagcaaaaccaagggaaatctttgttcccaggaggaagcaggttctgttaatcagaatcagtctgagaactgacaattacatttcaagctaaaatgggtaactggatt

SEQ ID NO: 298897 - DNA, 120 bp, Artificial Sequence
  ENSG00000132549_133 (sequence is synthesized)
ggtgagggccctttgcccttgtggaggttgccccattggtaaataatgagcactgataagtgaccatcttttcacagctggcccctggcctcacttttctccttttaaacaggaaaatgc

SEQ ID NO: 298898 - DNA, 80 bp, Artificial Sequence
  ENSG00000132554_0 (sequence is synthesized)
acgctagccagcgtagctccggagcccgcgcgccgtcgccgcgtcgctcaggccctgacccgcgctggacccgcgcgcta

SEQ ID NO: 298899 - DNA, 120 bp, Artificial Sequence
  ENSG00000132554_1 (sequence is synthesized)
gggacggcatgcccgagaagaggctcaccgcggagccaccaactattacagaagaagaatttgaagattctctggcaacagatgatttccttgtagactactttaatgaattcctaagcc

SEQ ID NO: 298900 - DNA, 120 bp, Artificial Sequence
  ENSG00000132554_2 (sequence is synthesized)
ttccaaccttttcagaggcaattagatttaatgcagattatggagtttttgaagtagctaatgatgctccacaatttctggaaaaacaactgaaaaaaattctacaaaaccagcaacctc

SEQ ID NO: 298901 - DNA, 120 bp, Artificial Sequence
  ENSG00000132554_3 (sequence is synthesized)
gaaatcccatttatgatgttgtaaggaaaggaaagaatgaggttaaacctgttcaaatgaatgcccccgatgaagatgagaccattaatgtcaactacaatattatgtgtctcagtcgtg

SEQ ID NO: 298902 - DNA, 120 bp, Artificial Sequence
  ENSG00000132554_4 (sequence is synthesized)
aagaaggtattaagtggatcaaaaaagaaagacttccagcatttctggaaagtgattgttactttgaatacaggttagccaaattggtctcacaagtaagatggagcaagtccggcatga

SEQ ID NO: 298903 - DNA, 120 bp, Artificial Sequence
  ENSG00000132554_5 (sequence is synthesized)
atttcacagtaggatcaaatttttctccctggatcgtgaaaaaaccacccagtctaccacctcctgccactgaagaagataatcttgtaattatgaaaaagttctatgtatcacttggtg

SEQ ID NO: 298904 - DNA, 120 bp, Artificial Sequence
  ENSG00000132554_6 (sequence is synthesized)
aggcttcctatactcaaacaaaagattggtttgcattagcaaaacaaagtcagcaaacagtatcaaccttttcgttaccctgttgtgtaccctacaacaaacttaaatcaccagctattt

SEQ ID NO: 298905 - DNA, 120 bp, Artificial Sequence
  ENSG00000132554_7 (sequence is synthesized)
catctgtttctgagaattttatctttgatgatggagttcaccctaggacaaaaaaggacccatctaaaaccaacaaattgatttctgaatttgaagaagaagaaggagaagaagaagagg

SEQ ID NO: 298906 - DNA, 120 bp, Artificial Sequence
  ENSG00000132554_8 (sequence is synthesized)
tgtctgtatctctacaagacactccttctcaagctcttctgagagtataccttgaaaagaaacaggatgttgatgaaagcctgacaatgcatttctcaacatgtgaagaatttttaagct

SEQ ID NO: 298907 - DNA, 120 bp, Artificial Sequence
  ENSG00000132554_9 (sequence is synthesized)
cctatatatactttattttgagaggagcaattcagcaaattgttggaaagccagttggagaaaccccagactatataaacttcaacaatataacaaaagtgtcatttgatgattgttttg

SEQ ID NO: 298908 - DNA, 120 bp, Artificial Sequence
  ENSG00000132554_10 (sequence is synthesized)
agtctattcatggcaagaattttttaagtgaattagttcaaactacaaaggagaggtcagaagagatagaacaaacaagtttaagttcaaagaatgagagcgctggaccagagagcaggg

SEQ ID NO: 298909 - DNA, 120 bp, Artificial Sequence
  ENSG00000132554_11 (sequence is synthesized)
cggactggtgtatttctcataggacttatgacattggcaatagaaaggagtttgaaagatttaagaaatttataaaaggtacattgggagagagatattggtggctatggatggatattg

SEQ ID NO: 298910 - DNA, 120 bp, Artificial Sequence
  ENSG00000132554_12 (sequence is synthesized)
agaggttaaaagttcttaaggatcctggaagacatcaaagacatcttgagaagatgaaaaaatgctatctagtgagcaatggagattactacctttctgcagaaatcttatcaaaattta

SEQ ID NO: 298911 - DNA, 120 bp, Artificial Sequence
  ENSG00000132554_13 (sequence is synthesized)
aactgttagatggatcacagtggaatgaagagcatttaagaaatattcagtctgaagttttaaaacctttacttctgtattgggcaccaagattctgtgttactcattcagcctcaacaa

SEQ ID NO: 298912 - DNA, 120 bp, Artificial Sequence
  ENSG00000132554_14 (sequence is synthesized)
aatatgctagtgctgaactgaaattctggcacctccgtcaagcaaaaccaaggaaggatattgacccttttccacaaatggcaaccctcttgccattaagacccaaatcttgcattccac

SEQ ID NO: 298913 - DNA, 120 bp, Artificial Sequence
  ENSG00000132554_15 (sequence is synthesized)
agatacctgagatccagaaagaagaattcagcttatcacaacctcctaaatctcccaataaatcacctgaagtaaaaacagcaactcaaaagccttggaagcgggagcttttgtatccag

SEQ ID NO: 298914 - DNA, 120 bp, Artificial Sequence
  ENSG00000132554_16 (sequence is synthesized)
gttcttctaaggatgatgtgattgagaaagggtcaaagtacatgtcagaaagcagcaaagtcattcatttaacatcttttactgacatttctgaatgtctcaagccccagctggatagaa

SEQ ID NO: 298915 - DNA, 120 bp, Artificial Sequence
  ENSG00000132554_17 (sequence is synthesized)
aaaaccgtgtcagatgttggtgccttgggaggatctgacatggaaaatttgttgcaatctttgtatgtagaaaatagagctggattcttctttactaaattctgcgagcattcagggaac

SEQ ID NO: 298916 - DNA, 120 bp, Artificial Sequence
  ENSG00000132554_18 (sequence is synthesized)
aagttgtggaagaacagtgtgtacttttggtttgacctgcaggcttatcatcagcttttctaccaagaaacacttcagccttttaaagtatgcaagcaagcgcaatatctttttgccaca

SEQ ID NO: 298917 - DNA, 120 bp, Artificial Sequence
  ENSG00000132554_19 (sequence is synthesized)
tacgttgctccttctgccactcttgacattggactccaacaggaaaagaaaaaagaaatttatatgaaaatacagccaccatttgaagacctttttgacacagcagaggaatatatcctt

SEQ ID NO: 298918 - DNA, 120 bp, Artificial Sequence
  ENSG00000132554_20 (sequence is synthesized)
ctcctccttcttgagccatggacaaagatggtaaaatcggaccaaattgcttataaaaaggtggagctggtggaagaaactcgacagttagactccacatacttcagaaagctacaggct

SEQ ID NO: 298919 - DNA, 120 bp, Artificial Sequence
  ENSG00000132554_21 (sequence is synthesized)
ttgcataaagagacattttccaagaaagctgaggacaccacttgtgaaattggaactggcattttatcactctctaacgtctctaaacgaacagaatattgggataatgttcctgcagaa

SEQ ID NO: 298920 - DNA, 120 bp, Artificial Sequence
  ENSG00000132554_22 (sequence is synthesized)
tacaagcattttaagtttagtgatctgcttaacaacaaactggagtttgaacatttccgtcagtttcttgagactcattcttcaagcatggatcttatgtgctggacagacattgagcag

SEQ ID NO: 298921 - DNA, 120 bp, Artificial Sequence
  ENSG00000132554_23 (sequence is synthesized)
ttccggagaataacttacagagatcgaaatcaaaggaaggcaaaatctatatacattaaaaacaaataccttaataaaaaatatttctttggacccaacagtccagcttctctgtatcag

SEQ ID NO: 298922 - DNA, 120 bp, Artificial Sequence
  ENSG00000132554_24 (sequence is synthesized)
cagaaccaggtaatgcatttaagtggtggctgggggaagattcttcatgagcagcttgatgcacctgttctagttgaaatccagaagcatgtgcaaaataggctagaaaatgtatggctg

SEQ ID NO: 298923 - DNA, 120 bp, Artificial Sequence
  ENSG00000132554_25 (sequence is synthesized)
ccattgtttcttgcaagtgaacagtttgcagcacgtcagaagataaaggtacagatgaaagacatagcagaagagctcttactacagaaggctgaaaagaaaatcggggtctggaagcct

SEQ ID NO: 298924 - DNA, 120 bp, Artificial Sequence
  ENSG00000132554_26 (sequence is synthesized)
gtggagagtaagtggatctcttcatcttgtaaaatcattgcttttcgcaaagcattattgaatccagttacttcaagacaatttcaacgttttgtggctctaaaaggagatttattggaa

SEQ ID NO: 298925 - DNA, 120 bp, Artificial Sequence
  ENSG00000132554_27 (sequence is synthesized)
aatggtttactcttttggcaagaagtacaaaaatataaggacttgtgccattctcattgtgatgagtctgtcatccagaagaagattacaactattatcaactgctttattaattccagt

SEQ ID NO: 298926 - DNA, 120 bp, Artificial Sequence
  ENSG00000132554_28 (sequence is synthesized)
attccaccagctttacaaattgacattccagtagagcaagcccagaagattattgaacaccggaaggagttaggaccatatgtatttagagaggcacagatgacaatttttggggttctg

SEQ ID NO: 298927 - DNA, 120 bp, Artificial Sequence
  ENSG00000132554_29 (sequence is synthesized)
tttaaattctggcctcagttctgtgagtttaggaagaatttaacagatgaaaatattatgagtgttttagagagaagacaagaatataataagcagaaaaaaaaattggcagtcctagaa

SEQ ID NO: 298928 - DNA, 120 bp, Artificial Sequence
  ENSG00000132554_30 (sequence is synthesized)
gacgaaaaatctggaaaggatggaatcaaacaatatgcaaatacttcagtgcctgctatcaaaactgctttactcagtgattccttcctaggcctccaaccatatggccgacagccaacc

SEQ ID NO: 298929 - DNA, 120 bp, Artificial Sequence
  ENSG00000132554_31 (sequence is synthesized)
tggtgctactcaaagtatatagaagccttagaacaggagagaattcttcttaagatccaagaagaactagaaaaaaagttgtttgcaggcttgcaacctctcacaaattttaaggctagc

SEQ ID NO: 298930 - DNA, 120 bp, Artificial Sequence
  ENSG00000132554_32 (sequence is synthesized)
tcttcaactatgtctttgaaaaagaatatgtctgcccacagcagccagaagtgacagcattcttgtgaatgtttacatcctgctgctgataggttcaaggaattctttaaaccagattct

SEQ ID NO: 298931 - DNA, 120 bp, Artificial Sequence
  ENSG00000132554_33 (sequence is synthesized)
gctgacatgagaagctccagtgatttgtttttttgaaggtctgtatcagagcaagcctaacatctaaataaagtttgattctggattttccaggtgggaaataaataaagaaaatttggc

SEQ ID NO: 298932 - DNA, 120 bp, Artificial Sequence
  ENSG00000132554_34 (sequence is synthesized)
ttgtcttactctcgcagttttaaaattatagctattctgtacacatgacatacaagactataagaactgtttaacttatttagaataaaacaactactatctaggtttgaagaaccaaaa

SEQ ID NO: 298933 - DNA, 120 bp, Artificial Sequence
  ENSG00000132554_35 (sequence is synthesized)
attagtgaccaggcaggattccagaggcctttccttcccacttccaccttgaattccaacttaaaatgcaagccatgtacagagaatgaacagagggccagaaatgtgctacgtttgcct

SEQ ID NO: 298934 - DNA, 120 bp, Artificial Sequence
  ENSG00000132554_36 (sequence is synthesized)
gtgtataacgtagggctaggtgctgtctcccatgatttcatttactcaaaggaaatcagatttgagggagataatgtaatattttgtcttgtttcagagccaccaactattacagaagaa

SEQ ID NO: 298935 - DNA, 120 bp, Artificial Sequence
  ENSG00000132554_37 (sequence is synthesized)
gtatctgctaattcttactggatccccatgaagaaagcattatcatcatttttcaagtgataaaacaagtgaaaagacatatagtcatgagttgacagaaaagctgaattttgaaaacta

SEQ ID NO: 298936 - DNA, 120 bp, Artificial Sequence
  ENSG00000132554_38 (sequence is synthesized)
tacattgttacggctagagtattacagtgaaaaagcaggagatgagctgaaaagtgaggttcagaatgctatttcttatctgtcatattaaagaatctggagattattctctatgaactc

SEQ ID NO: 298937 - DNA, 120 bp, Artificial Sequence
  ENSG00000132554_39 (sequence is synthesized)
aatattttaatcactgggttatcttgtgaaaccaatttatcagggataatgctttttaaaaaaatattaaagcatttaggtaaaggttttatctttttacatagttaatcatttggattt

SEQ ID NO: 298938 - DNA, 120 bp, Artificial Sequence
  ENSG00000132554_40 (sequence is synthesized)
gaatcatatttagaaattattcttattgaagaaatctggagtttttctaaccattaaaaagcattctgtacaaactctggttcagctgtatttggcaccatgttaggcttttttttttga

SEQ ID NO: 298939 - DNA, 120 bp, Artificial Sequence
  ENSG00000132554_41 (sequence is synthesized)
attagattgacacaccaaagctcctgctccctttccaagaacaagcctgagcaacaccacaggatattcaaggagttcttgtttgtgcaaaggatggtgttgaaatagtcttaactgaag

SEQ ID NO: 298940 - DNA, 120 bp, Artificial Sequence
  ENSG00000132554_42 (sequence is synthesized)
aacatattgtacttaaatttctccttttggacaagggagattgttagccttcatggctcctaaggatgaaagacaatgggagcattatttcttcctttactcattcttccctagtgatcc

SEQ ID NO: 298941 - DNA, 120 bp, Artificial Sequence
  ENSG00000132554_43 (sequence is synthesized)
ggaatgaagagcatttaagaaatattcagtctgaagttttaaaacctttacttctgtattgagacaagcttggtatgttgtccaggctggtttgaactcctggcctcaagcaatcctccc

SEQ ID NO: 298942 - DNA, 87 bp, Artificial Sequence
  ENSG00000132554_44 (sequence is synthesized)
gaataagtctcaggagatctgatgggtttaacaggggtttccgcttttggttcttcctcgttttctctccaccaccatgtaagaagt

SEQ ID NO: 298943 - DNA, 120 bp, Artificial Sequence
  ENSG00000132554_45 (sequence is synthesized)
atgaaaattgtgtccagtcccaaacgagaaatctgggatcgcaggcaaaaaggcagcaattaaattgttgccatgggattactgtatttgaaatcagcaaaatattgttttataatatga

SEQ ID NO: 298944 - DNA, 120 bp, Artificial Sequence
  ENSG00000132554_46 (sequence is synthesized)
tttgtgagttttcagttttatgtcttttatttggtttgctttattttctcttgccaactacttgttcttctgataaagaacatctctctctcttttttttctaatgtatacctttttggt

SEQ ID NO: 298945 - DNA, 120 bp, Artificial Sequence
  ENSG00000132554_47 (sequence is synthesized)
ttggttttgagtgatttaaaagaagaccccgagaatggacatgtaatgaatcattgaagtgatggggaacagagacattgaccaatgttgctctctgagcttcctgcagatatcagctgt

SEQ ID NO: 298946 - DNA, 120 bp, Artificial Sequence
  ENSG00000132554_48 (sequence is synthesized)
atggactgtggagccagaggagtagaaggagcaatggaaacctggcaggaagattctctggcaacagatgatttccttgtagactactttaatgaattcctaagccttccatatcttttt

SEQ ID NO: 298947 - DNA, 83 bp, Artificial Sequence
  ENSG00000132554_49 (sequence is synthesized)
cctagctcactgcaggctccggcagcagctggaattacagcatggatcttatgtgctggacagacattgagcagttccggaga

SEQ ID NO: 298948 - DNA, 120 bp, Artificial Sequence
  ENSG00000132561_0 (sequence is synthesized)
agcgcctcccaggcagccagcgagcgaagggagcgctctgggatgggacttggagcaagcggcggcggcggagacagaggcagaggcagaagctggggctccgtcctcgcctcccacgag

SEQ ID NO: 298949 - DNA, 120 bp, Artificial Sequence
  ENSG00000132561_1 (sequence is synthesized)
cgatccccgaggagagccgcggccctcggcgaggcgaagaggccgacgaggaagacccgggtggctgcgcccctgcctcgcttcccaggcgccggcggctgcagccttgcccctcttgct

SEQ ID NO: 298950 - DNA, 120 bp, Artificial Sequence
  ENSG00000132561_2 (sequence is synthesized)
cgccttgaaaatggaaaagatgctcgcaggctgctttctgctgatcctcggacagatcgtcctcctccctgccgaggccagggagcggtcacgtgggaggtccatctctaggggcagaca

SEQ ID NO: 298951 - DNA, 120 bp, Artificial Sequence
  ENSG00000132561_3 (sequence is synthesized)
cgctcggacccacccgcagacggcccttctggagagttcctgtgagaacaagcgggcagacctggttttcatcattgacagctctcgcagtgtcaacacccatgactatgcaaaggtcaa

SEQ ID NO: 298952 - DNA, 120 bp, Artificial Sequence
  ENSG00000132561_4 (sequence is synthesized)
ggagttcatcgtggacatcttgcaattcttggacattggtcctgatgtcacccgagtgggcctgctccaatatggcagcactgtcaagaatgagttctccctcaagaccttcaagaggaa

SEQ ID NO: 298953 - DNA, 120 bp, Artificial Sequence
  ENSG00000132561_5 (sequence is synthesized)
gtccgaggtggagcgtgctgtcaagaggatgcggcatctgtccacgggcaccatgactgggctggccatccagtatgccctgaacatcgcattctcagaagcagagggggcccggcccct

SEQ ID NO: 298954 - DNA, 120 bp, Artificial Sequence
  ENSG00000132561_6 (sequence is synthesized)
gagggagaatgtgccacgggtcataatgatcgtgacagatgggagacctcaggactccgtggccgaggtggctgctaaggcacgggacacgggcatcctaatctttgccattggtgtggg

SEQ ID NO: 298955 - DNA, 120 bp, Artificial Sequence
  ENSG00000132561_7 (sequence is synthesized)
ccaggtagacttcaacaccttgaagtccattgggagtgagccccatgaggaccatgtcttccttgtggccaatttcagccagattgagacgctgacctccgtgttccagaagaagttgtg

SEQ ID NO: 298956 - DNA, 120 bp, Artificial Sequence
  ENSG00000132561_8 (sequence is synthesized)
cacggcccatatgtgcagcaccctggagcataactgtgcccacttctgcatcaacatccctggctcatacgtctgcaggtgcaaacaaggctacattctcaactcggatcagacgacttg

SEQ ID NO: 298957 - DNA, 120 bp, Artificial Sequence
  ENSG00000132561_9 (sequence is synthesized)
cagaatccaggatctgtgtgccatggaggaccacaactgtgagcagctctgtgtgaatgtgccgggctccttcgtctgccagtgctacagtggctacgccctggctgaggatgggaagag

SEQ ID NO: 298958 - DNA, 120 bp, Artificial Sequence
  ENSG00000132561_10 (sequence is synthesized)
gtgtgtggctgtggactactgtgcctcagaaaaccacggatgtgaacatgagtgtgtaaatgctgatggctcctacctttgccagtgccatgaaggatttgctcttaacccagataaaaa

SEQ ID NO: 298959 - DNA, 120 bp, Artificial Sequence
  ENSG00000132561_11 (sequence is synthesized)
aacgtgcacaaagatagactactgtgcctcatctaatcacggatgtcagcacgagtgtgttaacacagatgattcctattcctgccactgcctgaaaggctttaccctgaatccagataa

SEQ ID NO: 298960 - DNA, 120 bp, Artificial Sequence
  ENSG00000132561_12 (sequence is synthesized)
gaaaacctgcagaaggatcaactactgtgcactgaacaaaccgggctgtgagcatgagtgcgtcaacatggaggagagctactactgccgctgccaccgtggctacactctggaccccaa

SEQ ID NO: 298961 - DNA, 120 bp, Artificial Sequence
  ENSG00000132561_13 (sequence is synthesized)
tggcaaaacctgcagccgagtggaccactgtgcacagcaggaccatggctgtgagcagctgtgtctgaacacggaggattccttcgtctgccagtgctcagaaggcttcctcatcaacga

SEQ ID NO: 298962 - DNA, 120 bp, Artificial Sequence
  ENSG00000132561_14 (sequence is synthesized)
ggacctcaagacctgctcccgggtggattactgcctgctgagtgaccatggttgtgaatactcctgtgtcaacatggacagatcctttgcctgtcagtgtcctgagggacacgtgctccg

SEQ ID NO: 298963 - DNA, 120 bp, Artificial Sequence
  ENSG00000132561_15 (sequence is synthesized)
cagcgatgggaagacgtgtgcaaaattggactcttgtgctctgggggaccacggttgtgaacattcgtgtgtaagcagtgaagattcgtttgtgtgccagtgctttgaaggttatatact

SEQ ID NO: 298964 - DNA, 120 bp, Artificial Sequence
  ENSG00000132561_16 (sequence is synthesized)
ccgtgaagatggaaaaacctgcagaaggaaagatgtctgccaagctatagaccatggctgtgaacacatttgtgtgaacagtgatgactcatacacgtgcgagtgcttggagggattccg

SEQ ID NO: 298965 - DNA, 120 bp, Artificial Sequence
  ENSG00000132561_17 (sequence is synthesized)
accatggctgcgaacacatttgtgttaataatgggaattcctacatctgcaaatgctcagagggatttgttctagctgaggacggaagacggtgcaagaaatgcactgaaggcccaattg

SEQ ID NO: 298966 - DNA, 120 bp, Artificial Sequence
  ENSG00000132561_18 (sequence is synthesized)
acctggtctttgtgatcgatggatccaagagtcttggagaagagaattttgaggtcgtgaagcagtttgtcactggaattatagattccttgacaatttcccccaaagccgctcgagtgg

SEQ ID NO: 298967 - DNA, 120 bp, Artificial Sequence
  ENSG00000132561_19 (sequence is synthesized)
ggctgctccagtattccacacaggtccacacagagttcactctgagaaacttcaactcagccaaagacatgaaaaaagccgtggcccacatgaaatacatgggaaagggctctatgactg

SEQ ID NO: 298968 - DNA, 120 bp, Artificial Sequence
  ENSG00000132561_20 (sequence is synthesized)
ggctggccctgaaacacatgtttgagagaagttttacccaaggagaaggggccaggcccctttccacaagggtgcccagagcagccattgtgttcaccgacggacgggctcaggatgacg

SEQ ID NO: 298969 - DNA, 120 bp, Artificial Sequence
  ENSG00000132561_21 (sequence is synthesized)
tctccgagtgggccagtaaagccaaggccaatggtatcactatgtatgctgttggggtaggaaaagccattgaggaggaactacaagagattgcctctgagcccacaaacaagcatctct

SEQ ID NO: 298970 - DNA, 120 bp, Artificial Sequence
  ENSG00000132561_22 (sequence is synthesized)
tctatgccgaagacttcagcacaatggatgagataagtgaaaaactcaagaaaggcatctgtgaagctctagaagactccgatggaagacaggactctccagcaggggaactgccaaaaa

SEQ ID NO: 298971 - DNA, 120 bp, Artificial Sequence
  ENSG00000132561_23 (sequence is synthesized)
cggtccaacagccaacagaatctgagccagtcaccataaatatccaagacctactttcctgttctaattttgcagtgcaacacagatatctgtttgaagaagacaatcttttacggtcta

SEQ ID NO: 298972 - DNA, 120 bp, Artificial Sequence
  ENSG00000132561_24 (sequence is synthesized)
cacaaaagctttcccattcaacaaaaccttcaggaagccctttggaagaaaaacacgatcaatgcaaatgtgaaaaccttataatgttccagaaccttgcaaacgaagaagtaagaaaat

SEQ ID NO: 298973 - DNA, 120 bp, Artificial Sequence
  ENSG00000132561_25 (sequence is synthesized)
taacacagcgcttagaagaaatgacacagagaatggaagccctggaaaatcgcctgagatacagatgaagattagaaatcgcgacacatttgtagtcattgtatcacggattacaatgaa

SEQ ID NO: 298974 - DNA, 120 bp, Artificial Sequence
  ENSG00000132561_26 (sequence is synthesized)
cgcagtgcagagccccaaagctcaggctattgttaaatcaataatgttgtgaagtaaaacaatcagtactgagaaacctggtttgccacagaacaaagacaagaagtatacactaacttg

SEQ ID NO: 298975 - DNA, 120 bp, Artificial Sequence
  ENSG00000132561_27 (sequence is synthesized)
tataaatttatctaggaaaaaaatccttcagaattctaagatgaatttaccaggtgagaatgaataagctatgcaaggtattttgtaatatactgtggacacaacttgcttctgcctcat

SEQ ID NO: 298976 - DNA, 120 bp, Artificial Sequence
  ENSG00000132561_28 (sequence is synthesized)
cctgccttagtgtgcaatctcatttgactatacgataaagtttgcacagtcttacttctgtagaacactggccataggaaatgctgtttttttgtactggactttaccttgatatatgta

SEQ ID NO: 298977 - DNA, 120 bp, Artificial Sequence
  ENSG00000132561_29 (sequence is synthesized)
tatggatgtatgcataaaatcataggacatatgtacttgtggaacaagttggattttttatacaatattaaaattcaccacttcagagaatggtattcagtgcaaaaattcttagtttaa

SEQ ID NO: 298978 - DNA, 120 bp, Artificial Sequence
  ENSG00000132561_30 (sequence is synthesized)
ctttaaatggaagatatgtatgtatgagaaatggccaacatgcctatgaaaaaaatgctgaatctcatcagtaatcaggaaaatgcaggttaaaacaataccatttttcacccatcagct

SEQ ID NO: 298979 - DNA, 120 bp, Artificial Sequence
  ENSG00000132561_31 (sequence is synthesized)
tagcaaaaatgagtatattttttaacaagtgttggtaaggatgtggaaatgtgaggttcttgtagtaagaatgcaaatggcactctttgtagagtaagtctgttgacatctcataaaact

SEQ ID NO: 298980 - DNA, 120 bp, Artificial Sequence
  ENSG00000132561_32 (sequence is synthesized)
gaaaatgcacacaaccctgtaaatctagcaactgcactcagttgatttcagcccatacatacaaagagacctgcataagaatgttactaggctttgtaaaagcaaaaaataaggaacaac

SEQ ID NO: 298981 - DNA, 120 bp, Artificial Sequence
  ENSG00000132561_33 (sequence is synthesized)
ttaaacatcatcagaaggggaactgataaactctggtgtaatccataccacagaaatacaacaccgcatgtacaggaatgtgctacatctatacaaataaatggtcaaactcaaaacaaa

SEQ ID NO: 298982 - DNA, 120 bp, Artificial Sequence
  ENSG00000132561_34 (sequence is synthesized)
gagtggagccaggtggcagcaggcagggcgcgccgccagagtgcccagctcccggggctgcccacagggtggggccgccctcgccgccgctccctctccgcgccttccccatccccaaag

SEQ ID NO: 298983 - DNA, 120 bp, Artificial Sequence
  ENSG00000132561_35 (sequence is synthesized)
agtcttacagtgattaaagtgatgaaaaattccaactatgcatgccctgctcggagcgtccaagaagagcctaccaacgggggctacttaagctctcaaaggccaaacacacaaacggca

SEQ ID NO: 298984 - DNA, 120 bp, Artificial Sequence
  ENSG00000132561_36 (sequence is synthesized)
ttttgagtgcaagtggtctgtttgaactctgaaaaggcggggcagcgggcctgcagctcctggagttcagggagacccggaaatctcaccctgccctcttcttgtgttgtgtttgtcaca

SEQ ID NO: 298985 - DNA, 120 bp, Artificial Sequence
  ENSG00000132561_37 (sequence is synthesized)
tgcgtccaagagagagcccacacacgtggttggatgcagctggagatggagaattccagttcaaggaaaaggcctgggcatgtagaagcacgaggctgatgactcatttaccattggaag

SEQ ID NO: 298986 - DNA, 120 bp, Artificial Sequence
  ENSG00000132561_38 (sequence is synthesized)
gctttcagacatgatgaaagagagggcatggtctcgaaaaggcaagcttgggttttgcctgcatttgtggagccctaactcatagcaagctttcctgtgggagtgggcagagaccccatc

SEQ ID NO: 298987 - DNA, 120 bp, Artificial Sequence
  ENSG00000132561_39 (sequence is synthesized)
gtttacccagttgagtgaaatggcagccctaataacccacttctccttctctcttgctgtgataaacaatttctgatttctacatctcagattaaataacagcaagagctataaaaagta

SEQ ID NO: 298988 - DNA, 120 bp, Artificial Sequence
  ENSG00000132561_40 (sequence is synthesized)
aggtgatggctggtgggttcagagtaattaagactgatggataactgcagagaggaaatctagttttcagggcaaacagatgcgtccaagagagagcccacacacgtggttggatgcagc

SEQ ID NO: 298989 - DNA, 120 bp, Artificial Sequence
  ENSG00000132561_41 (sequence is synthesized)
tggagatggagaattccagttcaaggaaaaggcctgggcagtatgtgtttggtggtggtcgttgaccctgaaaatagatggaatcttggagggagaaagcgagtgtggaaagtgaagtcc

SEQ ID NO: 298990 - DNA, 120 bp, Artificial Sequence
  ENSG00000132561_42 (sequence is synthesized)
agactcatgggagctagagctttctgagaggagctttttccccatcctgagtatgagactgcaaaagacattatgaaggaggtttgaagagaggtgtattttctttaaaagagattactt

SEQ ID NO: 298991 - DNA, 120 bp, Artificial Sequence
  ENSG00000132561_43 (sequence is synthesized)
tgttttgacacaccagcatgcttcatcctcacaaacaccctagagaaatgatcatttaactaaaaatcaatcattatataaatcaggagagctgaagtgcaatttcagaatatacctata

SEQ ID NO: 298992 - DNA, 120 bp, Artificial Sequence
  ENSG00000132561_44 (sequence is synthesized)
attggagtggaaaggggcgtacctagttcttccaagcccactgttaaaattaatgcctttctgcatggactacttgtttacagaatatcagactgccctttagacttcagattttgttat

SEQ ID NO: 298993 - DNA, 120 bp, Artificial Sequence
  ENSG00000132561_45 (sequence is synthesized)
gcatgcttttctccagtttactaactgtgccagatatgcttacagatagcagttctgcctatttttccttgtactcatgtccccggctcaccagttagatcccagtctaagtgctgtgtc

SEQ ID NO: 298994 - DNA, 120 bp, Artificial Sequence
  ENSG00000132561_46 (sequence is synthesized)
ttacccctctagggaaagaactcttgagatgaggggtaacagggagggaaggcctttcagatttctgagtagagaatgttttgcctcttgattgtttcatgcaagttaaaatgcctcaag

SEQ ID NO: 298995 - DNA, 120 bp, Artificial Sequence
  ENSG00000132561_47 (sequence is synthesized)
tggagctgctgccactgcaactaaaatccctcaacaacttcaccttttttttctgccctactttctagacatgacatttttgggagcattcttaagatgtacttagggggtccaagcttc

SEQ ID NO: 298996 - DNA, 120 bp, Artificial Sequence
  ENSG00000132561_48 (sequence is synthesized)
tcttacgagagagaattgccctagagtggtcataagtatcatggtaaccaactgcttttttgaatctttggtgttaccaaacaaaactaaaaaaccttaggttatggcaggtaggtaagg

SEQ ID NO: 298997 - DNA, 120 bp, Artificial Sequence
  ENSG00000132561_49 (sequence is synthesized)
ggcactctaaaaaatgaaacactccaccaagggaacagcaggatccaatgattcatttaaacaatattaaataaaaggaatgcttggggataataaagaaaagaggattcggtgctttta

SEQ ID NO: 298998 - DNA, 120 bp, Artificial Sequence
  ENSG00000132561_50 (sequence is synthesized)
tgctgatggaaggtggggtccactcatgggggcgggcgggttcactagcaaccagttatttctggagcccaccgggtttcctgatggtctgtcaggtgtatccttccttatcctcagttt

SEQ ID NO: 298999 - DNA, 120 bp, Artificial Sequence
  ENSG00000132561_51 (sequence is synthesized)
tccttccttatcctcagtttcatcacccatagaatgtgactattaatgctatcggcctagccaacttgggttgcaaggattaaaagaattaataggaataggctgggcgcggtggctcac

SEQ ID NO: 299000 - DNA, 120 bp, Artificial Sequence
  ENSG00000132561_52 (sequence is synthesized)
cagcgctatatccttttcttgcattatgcttctgtatggaatgcaaagaatattatcaaaacttcacacactctatgtaggttttatcaactgaagtaaatcccacgaagtcacaaagaa

SEQ ID NO: 299001 - DNA, 120 bp, Artificial Sequence
  ENSG00000132561_53 (sequence is synthesized)
gctgccgaagtaagatgtctgcaaatcaacccaccatggctgcgaacacatttgtgttaataatgggaattcctacatctgcaaatgctcagagggatttgttctagctgaggacggaag

SEQ ID NO: 299002 - DNA, 80 bp, Artificial Sequence
  ENSG00000132563_0 (sequence is synthesized)
gctgctgcagcggctgctgctgctactgcggctcctgctgccgccgccgccgccgctcggcctcaggcagctgcatcctc

SEQ ID NO: 299003 - DNA, 120 bp, Artificial Sequence
  ENSG00000132563_1 (sequence is synthesized)
ccatggtgtcctggatcatctctcgcctggtggtgctcatctttggcaccctgtacccagcctattcttcctacaaggccgtgaagacaaaaaacgtgaaggaatatgtgaaatggatga

SEQ ID NO: 299004 - DNA, 120 bp, Artificial Sequence
  ENSG00000132563_2 (sequence is synthesized)
tgtactggatcgtctttgccttcttcaccacggccgagacgctcacggatatagtgctctcctggttccccttctactttgaactgaagatcgccttcgtgatatggctgctgtcccctt

SEQ ID NO: 299005 - DNA, 120 bp, Artificial Sequence
  ENSG00000132563_3 (sequence is synthesized)
acaccaagggctccagcgtgctctaccgcaagttcgtgcacccaacgctgtccaacaaggagaaggagatcgacgagtacatcacgcaggcccgagacaagagctatgagaccatgatga

SEQ ID NO: 299006 - DNA, 120 bp, Artificial Sequence
  ENSG00000132563_4 (sequence is synthesized)
gggtgggcaagaggggcctgaaccttgccgccaatgctgcagtcacagctgccgccaagggggtgctgtcagagaagctccgcagcttcagcatgcaggacctgaccctgatccgggacg

SEQ ID NO: 299007 - DNA, 120 bp, Artificial Sequence
  ENSG00000132563_5 (sequence is synthesized)
aggacgcactgcccctgcagaggcctgacggccgcctccgacccagccctggcagcctcctggacaccatcgaggacttaggagatgaccctgccctgagtctaaggtccagcacaaacc

SEQ ID NO: 299008 - DNA, 120 bp, Artificial Sequence
  ENSG00000132563_6 (sequence is synthesized)
cggcagattcccggacagaggcttctgaggatgacatgggagacaaagctcccaagagggccaaacccatcaaaaaagcgcccaaagctgagccactggcttccaagacactgaagaccc

SEQ ID NO: 299009 - DNA, 120 bp, Artificial Sequence
  ENSG00000132563_7 (sequence is synthesized)
ggcccaagaagaagacctctggcgggggcgactcagcttgagcccctccacccccgcaggctgcagagcaaggatgaagcctcaggaggggcctcagacccagcccctgctccacactgt

SEQ ID NO: 299010 - DNA, 120 bp, Artificial Sequence
  ENSG00000132563_8 (sequence is synthesized)
cccagtggccactcttctggaaggggcttggaaaagaggaaggaggcccagctgtgggggttgagggtagagggtggaccagaggctgaggactgagccacccaaggaggtggggactgc

SEQ ID NO: 299011 - DNA, 120 bp, Artificial Sequence
  ENSG00000132563_9 (sequence is synthesized)
tcggcctccaccgctgttccgctgcagccccgccctgccccacccacccagtgccttgctgaagcccatagcaatccgcttctcagaggtcctgtcgtgtttccactgctcgccttggtt

SEQ ID NO: 299012 - DNA, 120 bp, Artificial Sequence
  ENSG00000132563_10 (sequence is synthesized)
tgggagcagggagggggaagtcctagcccagatggaccaaggacgggcctgaaggcacatgggggaaagggagcacacggggaggacgttggggaccctgggtggggcctccaggtgcag

SEQ ID NO: 299013 - DNA, 120 bp, Artificial Sequence
  ENSG00000132563_11 (sequence is synthesized)
ctgtggatggaagacagggattggcctgtgcttcagcgaccaggatggccaggccagagctgcagctgggggctcttttcctggtcattgggtggggctgagtgccacatgttcccacat

SEQ ID NO: 299014 - DNA, 120 bp, Artificial Sequence
  ENSG00000132563_12 (sequence is synthesized)
taaaaaggggggtccagggctgtgtgagtgtgtctttctgggtctagggctcggggtagtttgggtcaaggactgtccctccagcagtcgcctcctcccaccctgagccccacagtcatc

SEQ ID NO: 299015 - DNA, 120 bp, Artificial Sequence
  ENSG00000132563_13 (sequence is synthesized)
tggccctttccctgctcaaccctccatcctaggctctgagcctcagaggacccagcccatgagagaacggggatctggggggcctctcacctgctcctatgaccttgctcccttttaggt

SEQ ID NO: 299016 - DNA, 120 bp, Artificial Sequence
  ENSG00000132563_14 (sequence is synthesized)
caccccattgccaccgtgcccctgggctggactcccgtgctcctcagggcccacccctgctctgtctggtacaggcccctgctgagtgggcccctctcctctgcccctggggtccatccc

SEQ ID NO: 299017 - DNA, 120 bp, Artificial Sequence
  ENSG00000132563_15 (sequence is synthesized)
ctcttgcccagggtccccatcctgtaccaagcagactgggccctaagacccctggcagaacccagcctctgctcacacccgccccagcttctgccacggcttcagtcagggccaggagga

SEQ ID NO: 299018 - DNA, 120 bp, Artificial Sequence
  ENSG00000132563_16 (sequence is synthesized)
acacgtgaaggagaaagagaaatgcaggagccgcggggctcccggttccttgggaagagggtgcccattggacctttggcactggatgagccaataaaccaaactctggcacctcattta

SEQ ID NO: 299019 - DNA, 120 bp, Artificial Sequence
  ENSG00000132563_17 (sequence is synthesized)
caggctctactgctatctggccgagtcactttgattgtccggccatttccccatctgtccccagaggcaaagtgtggccctgccccagccctcagctctgtctgtgtgggactgggtgag

SEQ ID NO: 299020 - DNA, 120 bp, Artificial Sequence
  ENSG00000132563_18 (sequence is synthesized)
gacagtgtggggagggcaccgagcctggggctgctgccagcaccatggtgacctctatctccaccccgccccttccccccggctctcccggtgcgtggtggtgaccctagggccaggggg

SEQ ID NO: 299021 - DNA, 74 bp, Artificial Sequence
  ENSG00000132563_19 (sequence is synthesized)
aatattttttattttttgtagagatggggttttgctgtgttgtcaggctggtcttgaactcctgggctcagatg

SEQ ID NO: 299022 - DNA, 120 bp, Artificial Sequence
  ENSG00000132563_20 (sequence is synthesized)
ctgtgttgtcaggctggtcttgaactcctgggctcagatgatcctcccaccttggctcccaaagtgctgggagattacaggccactgtgccaggcctatacatgtgtcttgacacagcaa

SEQ ID NO: 299023 - DNA, 120 bp, Artificial Sequence
  ENSG00000132563_21 (sequence is synthesized)
tccagagcctgcagcctcatacagactggccctccctgtggggcccagagcccaaagtgacttggcagggctgccgtggcctcccggagcaggcaggggcctctgtccaggggtgaacaa

SEQ ID NO: 299024 - DNA, 120 bp, Artificial Sequence
  ENSG00000132563_22 (sequence is synthesized)
agggtcacacatggggccggtgctgctggacacagggcacctcccaactccctgccctgtactctgcgcttgcccctgtcccaacaggttccccttctactttgaactgaagatcgcctt

SEQ ID NO: 299025 - DNA, 120 bp, Artificial Sequence
  ENSG00000132563_23 (sequence is synthesized)
agctcagagccatcaccaggccccttggtctctcccttccactcactgtcaggagactggggacgagggcatatgcccttaggccccctagggaggaagtctgggtatcgggaagcagaa

SEQ ID NO: 299026 - DNA, 120 bp, Artificial Sequence
  ENSG00000132563_24 (sequence is synthesized)
tcatctctcgcctggtggtgggctgatgcggagctgggagggagaggccactgcccttggctgagaggcccagtaaccatgcctgcctccctaggctcatctttggcaccctgtacccag

SEQ ID NO: 299027 - DNA, 120 bp, Artificial Sequence
  ENSG00000132570_0 (sequence is synthesized)
agagtccacctggcggccaagggcgctggcgaccgctgaagctcctgggggtgttcggggtccgggctgcgcctgtgcccgcgggaaggctgggcgcttcccacacacagaccccgctcc

SEQ ID NO: 299028 - DNA, 120 bp, Artificial Sequence
  ENSG00000132570_1 (sequence is synthesized)
gctgggcgcttcccacacacagaccccgctccgggccagccccgcagggagactaccagggctggcggtagctgggcgtggtcgggtcgggggcggctgtgggcggccggcaggcagcgc

SEQ ID NO: 299029 - DNA, 120 bp, Artificial Sequence
  ENSG00000132570_2 (sequence is synthesized)
gcggtgctcggggcgctcggggcgacgcggcgcttgttggcggcgctgcgaggccagagcctagggctagcggccatgtcatcaggtactcacaggttgactgcagaggagaggaaccaa

SEQ ID NO: 299030 - DNA, 120 bp, Artificial Sequence
  ENSG00000132570_3 (sequence is synthesized)
gctatacttgaccttaaagcagcaggatggtcggaattaagtgagagagatgccatctacaaagaattctccttccacaattttaatcaggcatttggctttatgtcccgagttgcccta

SEQ ID NO: 299031 - DNA, 120 bp, Artificial Sequence
  ENSG00000132570_4 (sequence is synthesized)
caagcagagaagatgaatcatcacccagaatggttcaatgtatacaacaaggtccagataactctcacctcacatgactgtggtgaactgaccaaaaaagatgtgaagctggccaagttt

SEQ ID NO: 299032 - DNA, 120 bp, Artificial Sequence
  ENSG00000132570_5 (sequence is synthesized)
gtgatttcttccaaaatacatgtaaaatcttgtacacatcttagctgcaatgtatgttgaaggaaatttatgtgaacaaatagagttgttctttttctcttttttttaagacagagtgtt

SEQ ID NO: 299033 - DNA, 120 bp, Artificial Sequence
  ENSG00000132570_6 (sequence is synthesized)
tacaggcatgagccaccatgcctggctgttgaattgttcttaaggcatcatatctagaagcaaagaaaaaagaaaaataacaatttaagttgtgtaaattgtttgcctttatatattaca

SEQ ID NO: 299034 - DNA, 120 bp, Artificial Sequence
  ENSG00000132570_7 (sequence is synthesized)
tttggtaaaatcagtgcttaaatacgcaatgatttaaactggaacctgaggtatttttcatgctatctaatcatatacctaagataaaccaacccagttacttatattaataatattcag

SEQ ID NO: 299035 - DNA, 120 bp, Artificial Sequence
  ENSG00000132570_8 (sequence is synthesized)
cacagtggagaaagcaggatatggctcataatgacagtggtgaagacctgcgaatgaagttgctagttatcacctacattagggtttgacataggtctatgttatgggtcgctgcatctg

SEQ ID NO: 299036 - DNA, 120 bp, Artificial Sequence
  ENSG00000132570_9 (sequence is synthesized)
ctggaactcacagactttactatagagaatcaaagatcccgtatccgaagtctatggaaatgctcatggtggtaaattccaacagaatgaaacaccaaacttgcttaaagtaactcacgt

SEQ ID NO: 299037 - DNA, 120 bp, Artificial Sequence
  ENSG00000132570_10 (sequence is synthesized)
ttcaatttgaaagagatattgtcaaaattggaggcccccaggttcctgtctgttccaaatctttgcatgatgacagtggtttctctgatgtggtaagctttggctttcttctgttttctt

SEQ ID NO: 299038 - DNA, 120 bp, Artificial Sequence
  ENSG00000132570_11 (sequence is synthesized)
tctaaaagatcactggagtagagaggagttaaacagacatgacctttgacctcttgcatgacctccacagatagcaaaccgggccgacacatggttgacgatgtccttttctacaatgaa

SEQ ID NO: 299039 - DNA, 120 bp, Artificial Sequence
  ENSG00000132570_12 (sequence is synthesized)
gttaatgaaagttctgaaaatagtgattactttctgacattgataggatttaggaaacctctggataaatagcttaagcatggctgtttatgtttttgctatagacaaaaagcagcagca

SEQ ID NO: 299040 - DNA, 120 bp, Artificial Sequence
  ENSG00000132570_13 (sequence is synthesized)
tgtacattgtatttggacacaagcctgcctcggttaatatattgaactattggaccactagggttagtagggagcggtctgtacactttctgattcagcattcagaaacattctaggtgg

SEQ ID NO: 299041 - DNA, 120 bp, Artificial Sequence
  ENSG00000132570_14 (sequence is synthesized)
actctgtagctttcagttttgtaaagttatcagaaaaacatcgggagggtttggccatcatatgtgagctttgtgtttcaatgccagttactcaggattagtaaattaatgactgtccag

SEQ ID NO: 299042 - DNA, 120 bp, Artificial Sequence
  ENSG00000132570_15 (sequence is synthesized)
aggacttcagggtcaccaagctgctgcacctgccattggctgactctccccggctatctgtggctgagatggtgctgcttaggtcacgcagagcatgagctgctgctgaaagggcacagg

SEQ ID NO: 299043 - DNA, 120 bp, Artificial Sequence
  ENSG00000132570_16 (sequence is synthesized)
agatggcccttgggcttctcatcccaggatgcctgccctgcccaccaatccatgagaagatatgtatgatttcagtaggccctggatcagcttgtcacctctggtttcctgtttgctttc

SEQ ID NO: 299044 - DNA, 120 bp, Artificial Sequence
  ENSG00000132570_17 (sequence is synthesized)
cactcactcagctggagtttcatttccagactaaagtcttcatcattggcttcagaaacagcattcatctgtggctgtgctgatgtagtacaccaagaacaactgggctcttctctgtca

SEQ ID NO: 299045 - DNA, 120 bp, Artificial Sequence
  ENSG00000132570_18 (sequence is synthesized)
ctttcagtgggctaccttccctcacctctccaagcagcatgaaagaattctttacatttttaatctcttttttgtttttccctgaaagtatgctttggtgcttaaagagagaagtcacaa

SEQ ID NO: 299046 - DNA, 120 bp, Artificial Sequence
  ENSG00000132570_19 (sequence is synthesized)
aagtatactactgagtttcctggagatgaaatcctgttgtccctagctatgtgaatgagcacagggatccctgatgccattattttgtatattcatacggcacacacttactgagggcct

SEQ ID NO: 299047 - DNA, 120 bp, Artificial Sequence
  ENSG00000132570_20 (sequence is synthesized)
tctgtgtgccctaggggattgagcacagtgacatatcagggcaggtagaaacagatggagagctgatgcgggctgtcttagagcagctgccccaggaggcccctgtggatggatgttggg

SEQ ID NO: 299048 - DNA, 120 bp, Artificial Sequence
  ENSG00000132570_21 (sequence is synthesized)
caggagccctgagacgttaggggcatataactaaaggacatagcaggagttataggaggagctgatccctgagggaaacaatgaagacggagaagatggggctaaagtttgaattgtggg

SEQ ID NO: 299049 - DNA, 120 bp, Artificial Sequence
  ENSG00000132570_22 (sequence is synthesized)
gacattaatcacagtgattcttaaaactttgctgttgatgattttaaatggagaaaatgagtacgtaagatgttatttcccagttcagtatattggttgcccacaaagtattttcctacc

SEQ ID NO: 299050 - DNA, 120 bp, Artificial Sequence
  ENSG00000132570_23 (sequence is synthesized)
atgaatggtcatatatacttgttgtagaataccagggacagcagagatggtggggtagttacttccttttcttacagcccaagaactttggtgtccaggagattgaccaatttagccact

SEQ ID NO: 299051 - DNA, 120 bp, Artificial Sequence
  ENSG00000132570_24 (sequence is synthesized)
gagcatttaatacaacacagggctacccagatcccactgtcctgatttgccctgaaagccaaaggagttaggagaaggtgagtggggagaatatattaatcctgagagttgaacagagca

SEQ ID NO: 299052 - DNA, 120 bp, Artificial Sequence
  ENSG00000132570_25 (sequence is synthesized)
aaaatccctattacttttgtacttaaaacatctctgccacatgtgctcactctttatattctgtttaggtggtttatatgtgcacatcccatcctatgcctgcagttagccaactcaggg

SEQ ID NO: 299053 - DNA, 87 bp, Artificial Sequence
  ENSG00000132570_26 (sequence is synthesized)
tttaagagatggggtctcattctatcatgttgtaacctccaacgcctggactaaagtgatcctcctaccttggcctctctggtagct

SEQ ID NO: 299054 - DNA, 120 bp, Artificial Sequence
  ENSG00000132570_27 (sequence is synthesized)
acagtctcactatcttgctcaggctagtcctgaactcctgggctcaagttatcttgctgcctcagcctcccatgggtaatttttatttcctttttttttttttttggagatggagtttcg

SEQ ID NO: 299055 - DNA, 84 bp, Artificial Sequence
  ENSG00000132570_28 (sequence is synthesized)
cctcctgagtagctgagattacaggcaactgccaccatgcgcggctaatttatgtatttttttttagtataaactcctgacctc

SEQ ID NO: 299056 - DNA, 120 bp, Artificial Sequence
  ENSG00000132570_29 (sequence is synthesized)
agtgctgggattacaggcatgagccgctatgcctcgtcgctgatttttatttcttattttttttttagagatgggggtctcactatgttgctcaggctgatctcaaactcctggcctcaa

SEQ ID NO: 299057 - DNA, 120 bp, Artificial Sequence
  ENSG00000132570_30 (sequence is synthesized)
tcctcccaccttagcctcccaagttgctgggattataagtgtgagccactatccctacctcactattaccttctttgcttctcttgttttcttttgttctaagtcaaacccatcacaatc

SEQ ID NO: 299058 - DNA, 120 bp, Artificial Sequence
  ENSG00000132570_31 (sequence is synthesized)
ttttcttgtccttccaggtgttttccagtgctgtgccctggatgtgctctctttctcttagagcccagagaacttgcttttcccccttatatatgacccttaactttttctaacacatta

SEQ ID NO: 299059 - DNA, 120 bp, Artificial Sequence
  ENSG00000132570_32 (sequence is synthesized)
ttaagggcctgtgtctatcagctgggggcacttcttgaagggagggcctttgtgtggtctgtttctagtgacttccagctttaacccagagcctcatgattgctgggtgcccatagcctt

SEQ ID NO: 299060 - DNA, 120 bp, Artificial Sequence
  ENSG00000132570_33 (sequence is synthesized)
tttgctgaatggaggcactcagtctccttgggaagagagaatccatgatagacccacttgggagctccccacttcaggggcctacacactggtaatgcaacagaatgcccaagagtgacc

SEQ ID NO: 299061 - DNA, 120 bp, Artificial Sequence
  ENSG00000132570_34 (sequence is synthesized)
tcataaagcaaggattcccttcgtggccccttctctgctgcctctcagaatccagacgctaaggaaaatccctaagcagagattttctgttggatgctaaaagcaaggaataaaagttga

SEQ ID NO: 299062 - DNA, 120 bp, Artificial Sequence
  ENSG00000132570_35 (sequence is synthesized)
aaatttggaaaatgtctcaacaccgtcaccagcgccactcgagagtcatttctagttcaccagttgacactacatcggtgggattttgcccaacattcaagaaatttaagtaaatattat

SEQ ID NO: 299063 - DNA, 120 bp, Artificial Sequence
  ENSG00000132570_36 (sequence is synthesized)
ctatctccattgcctgttaagaaatgtgctagtagaagtgtgagggcagggtgtcagtgttctctcagcctcttccctcagatactcgtctgcttaccaaaataagttgcatgtccttga

SEQ ID NO: 299064 - DNA, 120 bp, Artificial Sequence
  ENSG00000132570_37 (sequence is synthesized)
caatctggtttctatgattggtgaggctggcatgctattacctttatgtgccctgtagacttgaatgaccagtttgaccagtttgactgttagataatctgaaggcttttctcttttttt

SEQ ID NO: 299065 - DNA, 120 bp, Artificial Sequence
  ENSG00000132570_38 (sequence is synthesized)
atctgaaggcttttctctttttttataatagaccccatctcaaatcagataatgaaaattacatatcttgatatattagaaaagtatatacattctggctgggcacggtggctcacacct

SEQ ID NO: 299066 - DNA, 120 bp, Artificial Sequence
  ENSG00000132570_39 (sequence is synthesized)
aaaaagaaaaggaaaaagaaaaatatatattctatatttttttaacttatgagaatgtgttcatttcatttgtaacatataatgggaaacagtaatacgtactctgagaaaaattgcaaa

SEQ ID NO: 299067 - DNA, 120 bp, Artificial Sequence
  ENSG00000132570_40 (sequence is synthesized)
gcacagataaatggaaataaacaggaaaaagaatcacctataacctcaccatccatagacagacactgttaaaattttggcatatttcctgctgattttttctactgctgatttttgcac

SEQ ID NO: 299068 - DNA, 120 bp, Artificial Sequence
  ENSG00000132570_41 (sequence is synthesized)
aggtgagataattttgaacagagaattttgtatctttggtttttgtgttttgctgcacacaaaaacaaaagatataaaaatggatcataaacatttttctaaatcctgaaaaatgcatag

SEQ ID NO: 299069 - DNA, 120 bp, Artificial Sequence
  ENSG00000132570_42 (sequence is synthesized)
acatattttagtgcctgtatttcacaagatggacataccataatttacttacacagtcctttttgttagatgtttaagttgttttcaagcttctcagtgctggaaaaaatactgagatag

SEQ ID NO: 299070 - DNA, 120 bp, Artificial Sequence
  ENSG00000132570_43 (sequence is synthesized)
acatgtttagttgaagttatttcatttcaggttatattatcttgggtcagagaatgaatggttctcaggcttttcaaaagagctggtcagtttttatgcctctggcagtttttgagagtg

SEQ ID NO: 299071 - DNA, 120 bp, Artificial Sequence
  ENSG00000132570_44 (sequence is synthesized)
ctcaatcatactacactgttgccagcattagatcttatcacatttaagtcattgctaattttataaacaaaaacaatggttttactttgcatctccctgattggtattgctgtagaacat

SEQ ID NO: 299072 - DNA, 120 bp, Artificial Sequence
  ENSG00000132570_45 (sequence is synthesized)
atttggagaagtttgtttgtctttggtgtttatttcatgaatagattgtgtgcccattttctcttggggtattcagttttttattactgatgtgagcatgtgtatgggtgattatttgat

SEQ ID NO: 299073 - DNA, 120 bp, Artificial Sequence
  ENSG00000132570_46 (sequence is synthesized)
gattatcagttttgcttagtagactggcaatatttagtcttgctgtcactgtgttcccagtgcctactagattgcttgatatgtagttgccactcaataaagatttgttgagtcaatgaa

SEQ ID NO: 299074 - DNA, 120 bp, Artificial Sequence
  ENSG00000132570_47 (sequence is synthesized)
tgataaatgattttgggatttctgaagtgggagtgagttgcagcttaatggcagagaatccagggaatgcagcttagcccacagttgccctttgatgaggagccttcactaatgttcatc

SEQ ID NO: 299075 - DNA, 120 bp, Artificial Sequence
  ENSG00000132570_48 (sequence is synthesized)
tttcttccaaaatacatgaggaacgatgatgaatgtcgggcatttgtgaagagagtcataatgagccgtttctttaagataattatgattagcactgtcacatcgaatgcgttttttatg

SEQ ID NO: 299076 - DNA, 120 bp, Artificial Sequence
  ENSG00000132570_49 (sequence is synthesized)
ccttgtggaccagttatgacataaggtaccgcttgttcagacttcttgagggtggtggtacagccattgaaaataacatgtatgaaagcccctggttaactgtgaaactgagaaattatt

SEQ ID NO: 299077 - DNA, 120 bp, Artificial Sequence
  ENSG00000132570_50 (sequence is synthesized)
aacacttctgggaactccactgaaggtgccgggaaagatgtgagagagccctgatctctcacctctggctaaccttgaggctctgtgcaagcaggaaatgaaggctgaggcagagtgttc

SEQ ID NO: 299078 - DNA, 120 bp, Artificial Sequence
  ENSG00000132570_51 (sequence is synthesized)
tcggagatcttctttgtgtccatctgcacatctgagttgtccatgaaggtctatgtggaccccatcaactactggaagaacggctacaacctgctggatgtgatcattatcatcgttatg

SEQ ID NO: 299079 - DNA, 120 bp, Artificial Sequence
  ENSG00000132570_52 (sequence is synthesized)
tttttaccctatgccctccgccagctcatgggcaaacagttcacttacctgtatatcgctgatggcatgcagtccctgcgcatcctcaagcttatcggctatagccagggcatccggacg

SEQ ID NO: 299080 - DNA, 120 bp, Artificial Sequence
  ENSG00000132581_0 (sequence is synthesized)
gaagatttggggctccgcgatacagttaggatggctgtagtacctctgctgttgttggggggtttgtggagcgctgtgggagcgtccagcctgggtgtcgttacttgcggctccgtggtg

SEQ ID NO: 299081 - DNA, 120 bp, Artificial Sequence
  ENSG00000132581_1 (sequence is synthesized)
aagctactcaatacgcgccacaacgtccgactgcactcacacgacgtgcgctatgggtcaggtagtgggcagcagtcagtgacaggtgtaacctctgtggatgacagcaacagttactgg

SEQ ID NO: 299082 - DNA, 120 bp, Artificial Sequence
  ENSG00000132581_2 (sequence is synthesized)
aggatacgggggaagagtgccacagtgtgtgagaggggaacccccatcaagtgtggccagcccatccggctgacacatgtcaacactggccgaaacctccatagtcaccacttcacttca

SEQ ID NO: 299083 - DNA, 120 bp, Artificial Sequence
  ENSG00000132581_3 (sequence is synthesized)
cctctttctggaaaccaggaagtgagtgcttttggtgaggaaggtgaaggtgattatctggatgactggacagtgctctgtaatggaccctactgggtgagagatggtgaggtgcggttc

SEQ ID NO: 299084 - DNA, 120 bp, Artificial Sequence
  ENSG00000132581_4 (sequence is synthesized)
aaacactcttccactgaggtactgctgtctgtcacaggagaacaatatggtcgacctatcagtgggcaaaaagaggtgcatggcatggcccagccaagtcagaacaactactggaaagcc

SEQ ID NO: 299085 - DNA, 120 bp, Artificial Sequence
  ENSG00000132581_5 (sequence is synthesized)
catctgttgctgcctcaccttgggatccctgccacaagttccttgggcagtggccatgtcaccattgagatgaagatatacaacagaaaatagtggctgtgtttggaagcttcagccctg

SEQ ID NO: 299086 - DNA, 120 bp, Artificial Sequence
  ENSG00000132581_6 (sequence is synthesized)
cacatttgaactagtcactctcccagacttgcgtgggtcagttctttctgagtagaggacttgctggtaaaggggcagatgctttttattagtactgataaaacaaactgagggaaacat

SEQ ID NO: 299087 - DNA, 120 bp, Artificial Sequence
  ENSG00000132581_7 (sequence is synthesized)
ccctcttagctgggaaacttttactcttcaggagcttggcatcatggactgttaatgtatgtgattttccccctattttctctctccaaaatgataaaaacaataattttattatgagtc

SEQ ID NO: 299088 - DNA, 120 bp, Artificial Sequence
  ENSG00000132581_8 (sequence is synthesized)
actgtgttgttatttattaggtgtgctatttcattagctgcttaatcctttgagtcctaagactctttggagacgctatgaagctccaatgtgggcccttttaagagcttttcttgcata

SEQ ID NO: 299089 - DNA, 120 bp, Artificial Sequence
  ENSG00000132581_9 (sequence is synthesized)
caaaccttttctccctctactttgacttctctccaggcatctcatctttaatagatctttgactaattatagctaaaaactctcagagaatacagcataataaatagccagtgaaatgtt

SEQ ID NO: 299090 - DNA, 120 bp, Artificial Sequence
  ENSG00000132581_10 (sequence is synthesized)
cggctccctgtcaccgggagtgggcgggccatttcttgttctctctcccgctctcggaagctttcgtctcgtgggtgcgaaaggtaaccgaagcggctcaggaaggcagctgtcactgag

SEQ ID NO: 299091 - DNA, 83 bp, Artificial Sequence
  ENSG00000132581_11 (sequence is synthesized)
tcaagcacggtagtgggcagcagtcagtgacaggtgtaacctctgtggatgacagcaacagttactggaggatacgggggaag

SEQ ID NO: 299092 - DNA, 120 bp, Artificial Sequence
  ENSG00000132581_12 (sequence is synthesized)
tgagccaccacacccagcctaaaaaattttttttttatttaaaagaagaaaaaggctgggcacagtggctcaccatcaatcccagcactttgggaggtcaagtttcactcccagagtgct

SEQ ID NO: 299093 - DNA, 120 bp, Artificial Sequence
  ENSG00000132581_13 (sequence is synthesized)
ttacaagcgtgagccaccacgcccagtatgatttgtattttttataaatattttaatgttgtagaagaaaaaatattgccaagcatagcatttttctccccaccccttcttacctgttta

SEQ ID NO: 299094 - DNA, 120 bp, Artificial Sequence
  ENSG00000132581_14 (sequence is synthesized)
tttaatgacacggcacaatattggccataggcaagaagggtgaggctgagctcacttgctgtttttttttttgaggaatgggtaccaaatttatttgttaatttcttgcatttgaagtac

SEQ ID NO: 299095 - DNA, 120 bp, Artificial Sequence
  ENSG00000132581_15 (sequence is synthesized)
acagtcacatccttggcctgaaattctttgctgtagcccttcactgtgacacaactgcaaccaaccactttacaaagttttccttgtctatcagttttacaaaggcttagccatgtctct

SEQ ID NO: 299096 - DNA, 120 bp, Artificial Sequence
  ENSG00000132581_16 (sequence is synthesized)
ggtttcttaaggtcatcaaccttaattgggttgatttggtgttcggcacaaagggccacccctagcttgacatacataggctcttcacatttggatgcaagcacgcaaagatgggcttgg

SEQ ID NO: 299097 - DNA, 120 bp, Artificial Sequence
  ENSG00000132581_17 (sequence is synthesized)
ctttgcaggttccacctgctaggccatcatggctgagggcggtcttcagtctcttgtagagcagtattaatatccattacacctccagcagcgtgtcttccttggtcatggtggtgggtt

SEQ ID NO: 299098 - DNA, 120 bp, Artificial Sequence
  ENSG00000132581_18 (sequence is synthesized)
acaggtgaaggtgaatcttgagcgcactcaagcttctgtctctgagcatgttgtccatggcagagaaagagagttgcctttcttttcttaactgcaggtagtgggcagcagtcagtgaca

SEQ ID NO: 299099 - DNA, 120 bp, Artificial Sequence
  ENSG00000132581_19 (sequence is synthesized)
ctacccaaaccttaacctccttcttgtaagaaacttggagcagtgacaggaattgcagagaaaactgcttttttttttttttttttttagcgtttgaaattaaaatgtttagtaataaat

SEQ ID NO: 299100 - DNA, 120 bp, Artificial Sequence
  ENSG00000132581_20 (sequence is synthesized)
ataatcagtcaagaaaattacaatataataaaaacagactaaaaaaagaaagtcttatctgcctgaaaaaaaaagataaagttaaaaaaaaagaatgaaggtcagctagtgagatgtgag

SEQ ID NO: 299101 - DNA, 120 bp, Artificial Sequence
  ENSG00000132581_21 (sequence is synthesized)
aggcatctaagatagctggtagatttttgtcttgaatgactgatgatgctgtttgctgagggaggaaagagttctgtcaggtgggctagtctggttcatgattcccaaaacccatctgat

SEQ ID NO: 299102 - DNA, 120 bp, Artificial Sequence
  ENSG00000132581_22 (sequence is synthesized)
cagtcagactaggcaaggacatgagttatcatcactgcgatgtcttaataattctagcacccattcagtgaacacctaccatgttgtcaggcttattttttactttgttttggtttccta

SEQ ID NO: 299103 - DNA, 120 bp, Artificial Sequence
  ENSG00000132581_23 (sequence is synthesized)
ctttggatctactgaattagagtggaggtggacagaggcttggcagtagcaatctgtaggtttaaaaagctcttcaggtggttctgatggacagccagatttgggaaccaggttcagtcc

SEQ ID NO: 299104 - DNA, 80 bp, Artificial Sequence
  ENSG00000132589_0 (sequence is synthesized)
agcgagcgggcggccggccgctgggggtggcgggataggctgggcgcggccggcgctgcagacccgctgctgttgtccgg

SEQ ID NO: 299105 - DNA, 120 bp, Artificial Sequence
  ENSG00000132589_1 (sequence is synthesized)
gtctgtgcggtcccgagggccctccgtgccgccggcgccatgggcaattgccacacggtggggcccaacgaggcgctggtggtttcagggggctgttgtggttccgactataaacagtac

SEQ ID NO: 299106 - DNA, 120 bp, Artificial Sequence
  ENSG00000132589_2 (sequence is synthesized)
gtgtttggcggctgggcctgggcctggtggtgtatctccgacactcagaggatttccctagagattatgacgttgcagccccgctgcgaggacgtagagacggccgagggggtagcttta

SEQ ID NO: 299107 - DNA, 120 bp, Artificial Sequence
  ENSG00000132589_3 (sequence is synthesized)
actgtgacgggtgtcgcccaggtgaagatcatgacggagaaggaactcctggccgtggcttgtgagcagtttctgggtaagaatgtgcaggacatcaaaaacgtcgtcctgcagaccctg

SEQ ID NO: 299108 - DNA, 120 bp, Artificial Sequence
  ENSG00000132589_4 (sequence is synthesized)
gagggacatctgcgctccatcctcgggaccctgacagtggagcagatttatcaggaccgggaccagtttgccaagctggtgcgggaggtggcagcccctgatgttggccgcatgggcatt

SEQ ID NO: 299109 - DNA, 120 bp, Artificial Sequence
  ENSG00000132589_5 (sequence is synthesized)
gagatcctcagcttcaccatcaaggacgtgtatgacaaagtggactatctgagctccctgggcaagacgcagactgccgtggtgcagagagatgctgacattggcgtggccgaggctgaa

SEQ ID NO: 299110 - DNA, 120 bp, Artificial Sequence
  ENSG00000132589_6 (sequence is synthesized)
cgggacgcaggcatccgggaagctgagtgcaagaaggagatgctggatgtgaagttcatggcagacaccaagattgctgactctaagcgagccttcgagctgcaaaagtcagccttcagt

SEQ ID NO: 299111 - DNA, 120 bp, Artificial Sequence
  ENSG00000132589_7 (sequence is synthesized)
gaggaggttaacatcaagacagctgaggcccagttggcctatgagctgcagggggcccgtgaacagcagaagatccggcaggaagagattgagattgaggttgtgcagcgcaagaaacag

SEQ ID NO: 299112 - DNA, 120 bp, Artificial Sequence
  ENSG00000132589_8 (sequence is synthesized)
attgccgtggaggcacaggagatcctgcgtacggacaaggagctcatcgctacagtgcgccggcctgccgaggccgaggcccaccgcatccagcagattgccgagggtgaaaaggtgaag

SEQ ID NO: 299113 - DNA, 120 bp, Artificial Sequence
  ENSG00000132589_9 (sequence is synthesized)
caggtcctcttggcacaggcagaggctgagaagatccgcaaaatcggggaggcggaagcggcagtcatcgaggcgatgggcaaggcagaggctgagcggatgaagctcaaggcagaagcc

SEQ ID NO: 299114 - DNA, 120 bp, Artificial Sequence
  ENSG00000132589_10 (sequence is synthesized)
taccagaaatacggggatgcagccaagatggccttggtgctagaggccctgccccagattgctgccaaaatcgctgccccacttaccaaggtcgatgagattgtggtcctcagtggagac

SEQ ID NO: 299115 - DNA, 120 bp, Artificial Sequence
  ENSG00000132589_11 (sequence is synthesized)
gactgctggccgagctgcctgcctctgtgcatgccctcacaggcgtggacctgtctaagatacccctgatcaagaaggccactggtgtgcaggtgtgaggctcctgcaggcccactctct

SEQ ID NO: 299116 - DNA, 120 bp, Artificial Sequence
  ENSG00000132589_12 (sequence is synthesized)
tcagcagccacccggccctccctccagcacccgttttaatcccacagaacaacgggaacgttactgactctggtgccttatctcgaagggaccagaagtgctgcgtgttcaggccatctc

SEQ ID NO: 299117 - DNA, 120 bp, Artificial Sequence
  ENSG00000132589_13 (sequence is synthesized)
tggctgtcttcctgtctctcctgtctgtccacctcctcctcttcctctcctttaccccactttcactgccactttcatcaggtttgtgtctcatctccctgcgtgtcttttcctttgtct

SEQ ID NO: 299118 - DNA, 120 bp, Artificial Sequence
  ENSG00000132589_14 (sequence is synthesized)
gtctttttctttcccccatgcacatcatgtagattaagctgaagatgtttattacaatcactctctgtggggggtggccctgctgctcctcagaatcctggtgccttgaagttctctgtg

SEQ ID NO: 299119 - DNA, 120 bp, Artificial Sequence
  ENSG00000132589_15 (sequence is synthesized)
catctgtccatcctccctatggccctggccagagctcagcatgggcaggggttctgggtaggacggtcactgtcctctctcctggactggtcttcccagccctaaaccctgccccaggaa

SEQ ID NO: 299120 - DNA, 120 bp, Artificial Sequence
  ENSG00000132589_16 (sequence is synthesized)
gcccacagcctcacctgctgctgcccctctaggtctgggcagccatgacctgcagggcccagagacactgtccttcccctcatccacccaaggccccagccagcgctcataccctgtcct

SEQ ID NO: 299121 - DNA, 120 bp, Artificial Sequence
  ENSG00000132589_17 (sequence is synthesized)
ttctccctgaccccaagggcacagaggcaaggcctcctgtctacagcagcttcctcagtttcctactgccttaggaggcccctgcttgtgctcagggaaggcctcttcatgggcatgttc

SEQ ID NO: 299122 - DNA, 120 bp, Artificial Sequence
  ENSG00000132589_18 (sequence is synthesized)
ctgctggggcggtgcggtttggtcccaactctgctaagttttctgagatgagggtctagccctgttggggacagaaaagtgtgtagaccttcttcctgctagggctgcactgtcctgggt

SEQ ID NO: 299123 - DNA, 120 bp, Artificial Sequence
  ENSG00000132589_19 (sequence is synthesized)
gttgggcccttctggtggacaaggctgtgccaaccctgtacagaatcgagtgctgtagcctggccagaccccagagcccttgtgccatctttcttcctggccagagtgatggggttccag

SEQ ID NO: 299124 - DNA, 120 bp, Artificial Sequence
  ENSG00000132589_20 (sequence is synthesized)
ccatggggaagcaacccaatcctctgtctccttgctccaatggaggcagaagagcccaggacccaagcgtcttggcaggggtgctgtgaatgtccagtggtcccagctccccaccctggc

SEQ ID NO: 299125 - DNA, 120 bp, Artificial Sequence
  ENSG00000132589_21 (sequence is synthesized)
cctgccccagcctgtgtagctcttcctgcatgtggatgctgcatgtctggtctggggcttggatgttgcactgccccactgcctgtcccttctggtaaaataaagaactcttaatgccca

SEQ ID NO: 299126 - DNA, 120 bp, Artificial Sequence
  ENSG00000132589_22 (sequence is synthesized)
gtgccgccggcgccatgggcaattgccacacggtggggcccaacgaggcgctggtggtttcaggtgagggggcggcgaggaaggtgggagctgtggaggctggctgggtccctggggagc

SEQ ID NO: 299127 - DNA, 120 bp, Artificial Sequence
  ENSG00000132589_23 (sequence is synthesized)
ctgttcagcctttgaggagcctcacggggcccctaagccaaggcagggaggtgtgcagggctgggcagggggcctgtttcacaggagtttcaagctaaaacacttttcctcaaatattta

SEQ ID NO: 299128 - DNA, 120 bp, Artificial Sequence
  ENSG00000132589_24 (sequence is synthesized)
atttcaaaacttcaggtgacttgagttaaggagagggtatgagtgaaggggtgggatgggggctgtcggtctgctcaggaacctagtgctgcttgggacacttttcctcattcagcctgg

SEQ ID NO: 299129 - DNA, 120 bp, Artificial Sequence
  ENSG00000132589_25 (sequence is synthesized)
actgtgcagcaggaagctcggtgttaagtgctgttgagaagataccccaggaagacccagctcagagtgcagcaccccgcatgcacccctacctctacatgcatgcctcctcccttcccc

SEQ ID NO: 299130 - DNA, 120 bp, Artificial Sequence
  ENSG00000132589_26 (sequence is synthesized)
cgctgtgagaatattgagacgtcggagggggttccactattcgtaacaggggttgcacaggtcccttgcccttgcctattggactgcaagtggggaaacagcaagggattctggaagctc

SEQ ID NO: 299131 - DNA, 120 bp, Artificial Sequence
  ENSG00000132589_27 (sequence is synthesized)
cgggaccagtttgccaagctggtgcgggaggtggcagcccctgatgttggccgcatgggcattgagatcctcagcttcaccatcaaggacccaagcgtcttggcaggggtgctgtgaatg

SEQ ID NO: 299132 - DNA, 120 bp, Artificial Sequence
  ENSG00000132589_28 (sequence is synthesized)
gtttgctgtgtcccctccttcccttcctgtccctacctctccccaccccctggctgctcctcagactgtctctggaggttatgaccatcctgtgtcgctgtgagaatattgagacgtcgg

SEQ ID NO: 299133 - DNA, 120 bp, Artificial Sequence
  ENSG00000132591_0 (sequence is synthesized)
gcagtgccttgcggctgtaatggctgcccccagctggcgcggggctaggcttgttcaatcggtgttaagagtctggcaggtgggccctcatgtcgcgagggagcgggtgatccctttttc

SEQ ID NO: 299134 - DNA, 120 bp, Artificial Sequence
  ENSG00000132591_1 (sequence is synthesized)
ctcactcttaggcttccaacggaggtgcgtgtcctgcgtcgcggggtccgctttctctggtccccgcttggcctcggcttctcgcagtaatggccagggctctgccctggaccacttcct

SEQ ID NO: 299135 - DNA, 120 bp, Artificial Sequence
  ENSG00000132591_2 (sequence is synthesized)
cggattctctcagcccgacagttcggtgactccttgcgtccccgcggtgtccatgaacagagatgagcaggatgtcctcttggtccatcaccctgatatgcctgagaattcccgggtcct

SEQ ID NO: 299136 - DNA, 120 bp, Artificial Sequence
  ENSG00000132591_3 (sequence is synthesized)
acgagtggtcctcctgggagccccgaatgcagggaagtcaacactctccaaccagctactgggccgaaaggtgttccctgtttccaggaaggtgcatactactcgctgccaagctctggg

SEQ ID NO: 299137 - DNA, 120 bp, Artificial Sequence
  ENSG00000132591_4 (sequence is synthesized)
ggtcatcacagagaaggagacccaggtgattctacttgacacacctggcattatcagtcctggtaaacagaagaggcatcacctggagctctctttgttggaagatccatggaagagcat

SEQ ID NO: 299138 - DNA, 120 bp, Artificial Sequence
  ENSG00000132591_5 (sequence is synthesized)
ggaatctgctgatcttgttgtggttcttgtggatgtctcagacaagtggacacggaaccagctcagcccccagttgctcaggtgcttgaccaagtactcccagatccctagtgtcctggt

SEQ ID NO: 299139 - DNA, 120 bp, Artificial Sequence
  ENSG00000132591_6 (sequence is synthesized)
catgaacaaggtagattgtttgaagcagaagtcagttctcctggagctcacggcagccctcactgaaggtgtggtcaatggcaaaaagctcaagatgaggcaggccttccactcacaccc

SEQ ID NO: 299140 - DNA, 120 bp, Artificial Sequence
  ENSG00000132591_7 (sequence is synthesized)
cacaatctgtgggaaatcctcagaggattggctggccccacttcaaggagatcttcatgttgtcagccctaagccaggaggacgtgaaaacactaaagcaataccttctgacacaggccc

SEQ ID NO: 299141 - DNA, 120 bp, Artificial Sequence
  ENSG00000132591_8 (sequence is synthesized)
agccagggccctgggagtaccacagtgcagtcctcactagccagacaccagaagagatctgtgccaacattatccgagagaagctcctagaacacctgccccaggaggtgccttacaatg

SEQ ID NO: 299142 - DNA, 120 bp, Artificial Sequence
  ENSG00000132591_9 (sequence is synthesized)
tacagcagaagacagcagtgtgggaggaaggaccaggtggggagctggttatccaacagaagcttctggtgcccaaagaatcttatgtgaaactcctgattggtccgaagggccacgtga

SEQ ID NO: 299143 - DNA, 120 bp, Artificial Sequence
  ENSG00000132591_10 (sequence is synthesized)
tctcccagatagcacaggaggcaggccatgacctcatggacatcttcctctgcgatgttgacatccgcctctctgtgaagctcctcaagtgaccaccctctactgaccctcccagggcat

SEQ ID NO: 299144 - DNA, 120 bp, Artificial Sequence
  ENSG00000132591_11 (sequence is synthesized)
tccagctcaagctgctggcaggaactgaccagttctgtccttggctggggaccctccaggcactggtgagagacatgaacactgactggccactagctggcctggccctgttgagtctgc

SEQ ID NO: 299145 - DNA, 120 bp, Artificial Sequence
  ENSG00000132591_12 (sequence is synthesized)
acagtccctgcccagctgtgtcttctgttggaagaaggaacctgccttagctcagtttccaggtggttcctctgcctggcaccacagctacaaaggtgtagctaagaagatggcccattg

SEQ ID NO: 299146 - DNA, 120 bp, Artificial Sequence
  ENSG00000132591_13 (sequence is synthesized)
gtgggagcaatgtcaccctgcctccagctagctatgggcccagagtttctccctgagtcgctgttgctagcagggagatttctcttcctgccctcacttctttcaccttgaacttggata

SEQ ID NO: 299147 - DNA, 120 bp, Artificial Sequence
  ENSG00000132591_14 (sequence is synthesized)
agaactcgtgtctcctgagtgaggtagcgcctcccatctgctccccaattcttgatctctcccaccccatccctctccccagtcttggatactaataaaatataagcattctggttctca

SEQ ID NO: 299148 - DNA, 120 bp, Artificial Sequence
  ENSG00000132591_15 (sequence is synthesized)
gtactgaaagagggtggggagattccattataggggctggaaaacccctttaccataccacatccctcatcagaaatgccttagtcataagacctttcctgactgatgtatgtctgtccc

SEQ ID NO: 299149 - DNA, 120 bp, Artificial Sequence
  ENSG00000132591_16 (sequence is synthesized)
gctctctttgttggaagatccatggaagagcatggaatctgctgatcttggttaggttcaggatgggaaccttaagcccagtttacaggggtcatggcctttcattccttggtagtttgg

SEQ ID NO: 299150 - DNA, 120 bp, Artificial Sequence
  ENSG00000132600_0 (sequence is synthesized)
ctttggggttctgtgtgcagcgagcatggtgtccttggcaccagggtttcggcagaggagcctagcgtgggcctacttggactcctccgcgtggggcagctcgggacacccgggcctgca

SEQ ID NO: 299151 - DNA, 120 bp, Artificial Sequence
  ENSG00000132600_1 (sequence is synthesized)
ggagagcggggttctaggctggccccggctctgcagtgcagccgggtgcctgccactcgcggggctctgtcgcagtactcgtgcctggcgcctcccctcagccacagagaccgcagtagc

SEQ ID NO: 299152 - DNA, 120 bp, Artificial Sequence
  ENSG00000132600_2 (sequence is synthesized)
tccaaccatcgcacccctaactgggccacgagttctctgattgccagacctgttgtctttgccactcactgttctgagtaattggagagtcgtgtattcactacacgccaaccagagtgg

SEQ ID NO: 299153 - DNA, 120 bp, Artificial Sequence
  ENSG00000132600_3 (sequence is synthesized)
tcctgtaaaagcgtaagcctagtgtagatacgcttctgcttaaaactcttgagtggctcccagtgcttttagaacaaaatccaaacgcctttccgaagtcgacaaggcccagcttgattg

SEQ ID NO: 299154 - DNA, 120 bp, Artificial Sequence
  ENSG00000132600_4 (sequence is synthesized)
agcagaagatgtgataggagatgaggagcggggggcttctgcaaaagtgcttcggtcgctcaggcttttggcacattttgcttatgcaacctagttctttctaccttagggccttttctt

SEQ ID NO: 299155 - DNA, 120 bp, Artificial Sequence
  ENSG00000132600_5 (sequence is synthesized)
acctagttctttctaccttagggccttttcttgggaaagttgggagtctcactctgctgcctaggctgagtgcagtggtgtgatcgaggcgcactgcagccttgacctcctgggctcaag

SEQ ID NO: 299156 - DNA, 120 bp, Artificial Sequence
  ENSG00000132600_6 (sequence is synthesized)
actacaggcacgcgccactacactcggatttctgacagtcagacttgtccacaagaactcaactggcaaggctgcttttctgtgctaaaactggggagctagtgggcaccatgaagatct

SEQ ID NO: 299157 - DNA, 120 bp, Artificial Sequence
  ENSG00000132600_7 (sequence is synthesized)
tctgcagtcgggccaatccgaccacggggtctgtggagtggctggaggaggatgaacactatgattaccaccaggagattgcaaggtcatcttatgcagatatgctacatgacaaagaca

SEQ ID NO: 299158 - DNA, 120 bp, Artificial Sequence
  ENSG00000132600_8 (sequence is synthesized)
gaaatgtaaaatactaccaaggtatccgggctgccgtgagcagggtgaaggacagaggacagaaggccttggttctcgacattggcactggcacgggactcttgtcaatgatggcggtca

SEQ ID NO: 299159 - DNA, 120 bp, Artificial Sequence
  ENSG00000132600_9 (sequence is synthesized)
cagcaggtgccgacttctgctatgccatcgaggttttcaagcctatggctgatgctgctgtgaagattgtggagaaaaatggctttagtgataagattaaggttatcaacaagcattcca

SEQ ID NO: 299160 - DNA, 120 bp, Artificial Sequence
  ENSG00000132600_10 (sequence is synthesized)
ccgaggtgactgtaggtccagagggtgacatgccatgccgtgccaacatcctggtcacagagttgtttgacacagagctgatcggggagggggcgctgccctcctatgagcacgcacaca

SEQ ID NO: 299161 - DNA, 120 bp, Artificial Sequence
  ENSG00000132600_11 (sequence is synthesized)
ggcatctcgtggaggaaaattgtgaggccgtgccccacagagccaccgtctatgcacagctggtggagtccgggaggatgtggtcgtggaacaagctatttcccatccacgtgcagacca

SEQ ID NO: 299162 - DNA, 120 bp, Artificial Sequence
  ENSG00000132600_12 (sequence is synthesized)
gcctcggagagcaggtcatcgtccctcccgttgacgtggagagctgccctggcgcaccctctgtctgtgacattcagctgaaccaggtgtcaccagccgactttacagtcctcagcgatg

SEQ ID NO: 299163 - DNA, 120 bp, Artificial Sequence
  ENSG00000132600_13 (sequence is synthesized)
tgctgcccatgttcagcatagacttcagcaagcaagtcagtagctcagcagcctgccatagcaggcggtttgaacctctgacatctggccgagctcaggtggttctctcgtggtgggaca

SEQ ID NO: 299164 - DNA, 120 bp, Artificial Sequence
  ENSG00000132600_14 (sequence is synthesized)
ttgaaatggaccctgaggggaagatcaagtgcaccatggcccccttctgggcacactcagacccagaggagatgcagtggcgggaccactggatgcagtgtgtgtacttcctgccacaag

SEQ ID NO: 299165 - DNA, 120 bp, Artificial Sequence
  ENSG00000132600_15 (sequence is synthesized)
aggagcctgtggtgcagggctcagcgctctatctggtagcccaccacgatgactactgcgtatggtacagcctgcagaggaccagccctgaaaagaatgagagagtccgccagatgcgcc

SEQ ID NO: 299166 - DNA, 120 bp, Artificial Sequence
  ENSG00000132600_16 (sequence is synthesized)
ccgtgtgtgactgccaggctcacctgctctggaaccggcctcggtttggagagatcaatgaccaggacagaactgatcgatacgtccaggctctgaggaccgtgctgaagccagacagcg

SEQ ID NO: 299167 - DNA, 120 bp, Artificial Sequence
  ENSG00000132600_17 (sequence is synthesized)
ctggcccatcacctgggggtggagcaggtgtttacagtcgagagttcagcagcttctcacaaactgttgagaaaaatcttcaaggctaaccacttggaagataaaattaacatcatagag

SEQ ID NO: 299168 - DNA, 120 bp, Artificial Sequence
  ENSG00000132600_18 (sequence is synthesized)
aaacggccggaattattaacaaatgaggacctacagggcagaaaggtctctctcctcctgggcgagccgttcttcactaccagcctgctgccgtggcacaacctctacttctggtacgtg

SEQ ID NO: 299169 - DNA, 120 bp, Artificial Sequence
  ENSG00000132600_19 (sequence is synthesized)
cggaccgctgtggaccagcacctggggccaggtgccatggtgatgccccaggcagcctcgctgcacgctgtggttgtggagttcagggacctgtggcggatccggagcccctgtggtgac

SEQ ID NO: 299170 - DNA, 120 bp, Artificial Sequence
  ENSG00000132600_20 (sequence is synthesized)
tgcgaaggcttcgacgtgcacatcatggacgacatgattaagcgtgccctggacttcagggagagcagggaagctgagccccacccgctgtgggagtacccatgccgcagcctctccgag

SEQ ID NO: 299171 - DNA, 120 bp, Artificial Sequence
  ENSG00000132600_21 (sequence is synthesized)
ccctggcagatcctgacctttgacttccagcagccggtgcccctgcagcccctgtgtgccgagggcaccgtggagctcagaaggcccgggcagagccacgcagcggtgctatggatggag

SEQ ID NO: 299172 - DNA, 120 bp, Artificial Sequence
  ENSG00000132600_22 (sequence is synthesized)
taccacctgaccccggagtgcacgctcagcactggcctcctggagcctgcagaccccgaggggggctgctgctggaacccccactgcaagcaggccgtctacttcttcagccctgcccca

SEQ ID NO: 299173 - DNA, 120 bp, Artificial Sequence
  ENSG00000132600_23 (sequence is synthesized)
gatcccagagcactgctgggtggcccacggactgtcagctatgcagtggagtttcaccccgacacaggcgacatcatcatggagttcaggcatgcagataccccagactgaccactcttg

SEQ ID NO: 299174 - DNA, 120 bp, Artificial Sequence
  ENSG00000132600_24 (sequence is synthesized)
agcaataaagtggcctgagggctggggttctgagtggctcatggctttctagcggggaaggctgaaggccctcctctcctctctgggagctgctcggcctcagggatgggaaagactgcg

SEQ ID NO: 299175 - DNA, 120 bp, Artificial Sequence
  ENSG00000132600_25 (sequence is synthesized)
ccgtgttgcatcttgttgcatctttgcactgctggcctctggctccagctgtggcaggaagcatgagagggtgactgaatttggagccctggaggggctgggaagacccccctgcttgtg

SEQ ID NO: 299176 - DNA, 120 bp, Artificial Sequence
  ENSG00000132600_26 (sequence is synthesized)
cttctgaggtgctgagaatgctccaacacagagacatctctccccagctgggaagggagtggaagcacagggagcttgtggggctggccggtggggttgtccacgccgcccttggcgagc

SEQ ID NO: 299177 - DNA, 120 bp, Artificial Sequence
  ENSG00000132600_27 (sequence is synthesized)
agtccccgtggcgggagcctgtcctgtctgtctcactctcgaggatctccgggtccctgctcttctggcttctgctaggagggtggagatgctgagttgtggctgggtctctggggcttg

SEQ ID NO: 299178 - DNA, 120 bp, Artificial Sequence
  ENSG00000132600_28 (sequence is synthesized)
aagaccctggctgggcccgggctgagaggcctgggttctggccctttcacctgacaggtaacttcaagccacatccataggtgtctggcctcagtgctgcaccagctggtggcctgccag

SEQ ID NO: 299179 - DNA, 120 bp, Artificial Sequence
  ENSG00000132600_29 (sequence is synthesized)
gacctgagactggacacaaggcagctgtcccagagcagttcctgagatgcaggcccaggaaagtggctgtcaggggagctgggaggcagccctgttccctgcacctccctcagattggaa

SEQ ID NO: 299180 - DNA, 120 bp, Artificial Sequence
  ENSG00000132600_30 (sequence is synthesized)
agcccctcctgcaggtggggtatggcagggagcagcccctgcccagcgccgcttcaccaggaaggtcagtaggtgccgtggccttgcttctctcacacactaacccccctttggttatgt

SEQ ID NO: 299181 - DNA, 120 bp, Artificial Sequence
  ENSG00000132600_31 (sequence is synthesized)
cccagctctcagaggtaacagcagacaccacgtgagagaacccagtggcctctggctcgcagcttagaaggtgaggcttgtgccaggccagccgagccgcctgtatgagcagagttccgg

SEQ ID NO: 299182 - DNA, 120 bp, Artificial Sequence
  ENSG00000132600_32 (sequence is synthesized)
tgtcctcggattcagggcagacttgggcagtgcctgtcctgcagttgggggcaggaactccctcccctgcccccaggcgtgcccctgaggcctggccccagcttgtcgctgaaataagtg

SEQ ID NO: 299183 - DNA, 120 bp, Artificial Sequence
  ENSG00000132600_33 (sequence is synthesized)
gagaacaccagccttgagcctcacagttttattttctcctcgttatccatccttcctttcagcaccagtaaggaaaaagaacacctctcttcgcaaaatattttatcaggtgtaaagact

SEQ ID NO: 299184 - DNA, 120 bp, Artificial Sequence
  ENSG00000132600_34 (sequence is synthesized)
tgtttttcttctagggaagaaccgtctggatatatatttgataatgtttttaccaaaaccataggtgtgcttaccatagaaaacccctaatgtcccatgaagatacaatacagaaaaaaa

SEQ ID NO: 299185 - DNA, 120 bp, Artificial Sequence
  ENSG00000132600_35 (sequence is synthesized)
ctcgacgctgcgaggtcccgccccgcgtgctggccgcggtaaaagtggtagcagcggaggcgagcggagggtttcccgcggcggccttgagggctgcacctagatgaacttgtgaggctc

SEQ ID NO: 299186 - DNA, 120 bp, Artificial Sequence
  ENSG00000132600_36 (sequence is synthesized)
atcacccttttgatgccagttctgtattagctgtctaatgttatttaacaaattaccttaaattttaatagcctcttaatatttcttactaacttggcaggtcatcagtctatttaaaag

SEQ ID NO: 299187 - DNA, 120 bp, Artificial Sequence
  ENSG00000132600_37 (sequence is synthesized)
atttgcacatattttttccatcatctttagttattttcaacagaagggtcactgtgcctattgagtcagaccgttatagatgaaagatgtatgtgtttactaaagacagaagtaaaaatc

SEQ ID NO: 299188 - DNA, 120 bp, Artificial Sequence
  ENSG00000132600_38 (sequence is synthesized)
atacatattgcagcagagcggctttaacacaaggagctggctacccagctgtgggagggctagaaagcaaatgggaacgctgagtaacctaacagtagagattgcagggagcagttacct

SEQ ID NO: 299189 - DNA, 120 bp, Artificial Sequence
  ENSG00000132600_39 (sequence is synthesized)
tgcctagggctgagaaactaaacgagaagattaggatttccagaagccacaagcattgaggagagatcctgtggaccactgtccaagtacggctgcagctctgaggggcccaaggagctg

SEQ ID NO: 299190 - DNA, 120 bp, Artificial Sequence
  ENSG00000132600_40 (sequence is synthesized)
aaatgaggacctacagggcagaaaggtcgcctccgtccccagcacctgcaggttcccttccacacttcgtggtcctcagcagcatcttctaaatcacattccttctgattttgaaccctg

SEQ ID NO: 299191 - DNA, 120 bp, Artificial Sequence
  ENSG00000132600_41 (sequence is synthesized)
atgaaaacttctagtgacatccaccacccccactgccgcctccgggatgagtccagcccctcaccctgtcctggctgccttgggctgggctggcttctgtccagctccacaccctcacct

SEQ ID NO: 299192 - DNA, 120 bp, Artificial Sequence
  ENSG00000132600_42 (sequence is synthesized)
cacaaatgttcacagaacatctggtcacggcactggcccactgctgggggatgctgggccaccagtccctgctcttgtggtgctcagagcctggggagggagacggagacaagccccggt

SEQ ID NO: 299193 - DNA, 120 bp, Artificial Sequence
  ENSG00000132600_43 (sequence is synthesized)
aagtcctgagataaagcgtccagtgggggttgacaggatgccactctggaagccccgtctggcacgtttatttctgggctccctccatgacccccttccttgcttttttctatcacatgg

SEQ ID NO: 299194 - DNA, 120 bp, Artificial Sequence
  ENSG00000132600_44 (sequence is synthesized)
ggtcagccccactttgtctgcttccctcttctgctctgctctcctgagcacgggactcatgtctggttgtaatctttacagcctccagggcaggtacagagcaccttgctgccttgcttg

SEQ ID NO: 299195 - DNA, 120 bp, Artificial Sequence
  ENSG00000132600_45 (sequence is synthesized)
aggggatgttggagaaaaaagcagaggaggcgggtggggaaccttgttttcttgcaggaaccttgggtgcctgtagagcggctcaggccttgatgatttgagcttgtgttttctttctgt

SEQ ID NO: 299196 - DNA, 120 bp, Artificial Sequence
  ENSG00000132600_46 (sequence is synthesized)
gtcagcacactgtggggttgaatagaagatgcttgccttttaaaaaatgcgataatttgacatacgaaatggaaatggctgagtgttgtcattttacaattgtggcttatcagaataatt

SEQ ID NO: 299197 - DNA, 120 bp, Artificial Sequence
  ENSG00000132600_47 (sequence is synthesized)
agctttccagttctgctttaggacccgccccccagcacgctcctcgacgctgcgaggtcccgccccgcgtgctggccgcggtaaaagtggtagcagcggaggcgagcggagggtttcccg

SEQ ID NO: 299198 - DNA, 120 bp, Artificial Sequence
  ENSG00000132600_48 (sequence is synthesized)
tgacagagcaagaccttgtctcaaaaaaagaaatctcatggacaccagaggagcgggaagcagcggtggccccgcagcagcagctatgcatcgggaggtggggcttttctgcttctgctc

SEQ ID NO: 299199 - DNA, 120 bp, Artificial Sequence
  ENSG00000132600_49 (sequence is synthesized)
gggaggtggggcttttctgcttctgctcacctttctgctctcattttcccatagtgaacatggattgcctgtgtgtgaacacttttttaagtaaattaaaccttgtggatattttcagtt

SEQ ID NO: 299200 - DNA, 120 bp, Artificial Sequence
  ENSG00000132600_50 (sequence is synthesized)
tgtatcttatctgcccctcacagcagaccattgactgttcgatgcttttagaaatctccttcgtgctgagccctgcgtgctctggacccatgcgctctacgcctcctctgggcccctgct

SEQ ID NO: 299201 - DNA, 120 bp, Artificial Sequence
  ENSG00000132600_51 (sequence is synthesized)
catggcctgcccaccctggctgtccctgtcccctcttgctgatacggttctgctactctggtcctgggccagtgtctgtctctcgtgtgctaaggcagatggccgagagtggtgggtatc

SEQ ID NO: 299202 - DNA, 120 bp, Artificial Sequence
  ENSG00000132600_52 (sequence is synthesized)
ccacagtggggtgccaggcatttttacttctatgctttccaaatccacctgcccttccccacccttagcctggcccttccagtgccctgtcttagacctggcgccacttcacacgaccag

SEQ ID NO: 299203 - DNA, 120 bp, Artificial Sequence
  ENSG00000132600_53 (sequence is synthesized)
ccaggcccagggccccgggcatcctccctggcaagtcctcccatcccctgccattggtcttcgtgctcctggtgagcctccgacccaggctgtcccctgactgctgccgtcctggtttga

SEQ ID NO: 299204 - DNA, 120 bp, Artificial Sequence
  ENSG00000132600_54 (sequence is synthesized)
gcccctcctgctctggccgtcctccacacggagcccacatgaacttgtagatctgagtctggccacatccccactgcaggaatgccctagctggctccccacaccacacctgcagagtgg

SEQ ID NO: 299205 - DNA, 120 bp, Artificial Sequence
  ENSG00000132600_55 (sequence is synthesized)
ctcaaggccccctctggcccttctcctgccggctcccatttgaccgtcacctcccctcctccaggtagctttctgcatccctcctggatgcaggtgcccccagcctgccgccaggcaccg

SEQ ID NO: 299206 - DNA, 120 bp, Artificial Sequence
  ENSG00000132600_56 (sequence is synthesized)
gggctgtactgtcacgcatttatccctccctgtggcccggggcccacctgtcggggccacacagctgtggtggtcaccaagtttctaggtgctgggtgttctcaccagtgatgtagatat

SEQ ID NO: 299207 - DNA, 120 bp, Artificial Sequence
  ENSG00000132600_57 (sequence is synthesized)
gtggtcctcagaaggcttgagacaggcagcaccaccccatcttaaaaatccggagagcgaggctcagagccagcggtgcctggggagccactgatgagagagaagtggcagagagggggc

SEQ ID NO: 299208 - DNA, 120 bp, Artificial Sequence
  ENSG00000132600_58 (sequence is synthesized)
gccgctggtctgctgggcgctcggcatctttatgggagaacgcacaccccttgtgactgcagtcagtgggagccaagccggggagcggtacctctgtctagctgccggcctgtctctgca

SEQ ID NO: 299209 - DNA, 120 bp, Artificial Sequence
  ENSG00000132600_59 (sequence is synthesized)
aaaggaaactattatcttgatgtggggtgttttgaagtcttggattacaagaaggttaagaatccctgggggtcatgatgttaaatgatactgagaggcgtatggtgtagaagtcaggaa

SEQ ID NO: 299210 - DNA, 120 bp, Artificial Sequence
  ENSG00000132600_60 (sequence is synthesized)
atcagttgggagactgggtcctacttctggctctatttttgttgtttaatctcccagctttatcaagatagaactgacaaataaaaatggtctatgtttatggtaatacaatgtgatgaa

SEQ ID NO: 299211 - DNA, 120 bp, Artificial Sequence
  ENSG00000132600_61 (sequence is synthesized)
tttgaagtccactgcgtacccctccttgatcccatctctttcccttctcttttaggagttaactatcctgattccttgctatgctttttagtgtgatccctgaagaacgtatcactccat

SEQ ID NO: 299212 - DNA, 120 bp, Artificial Sequence
  ENSG00000132600_62 (sequence is synthesized)
tttgcatagctataaatttcatagaaatggaatcgtattgcatgtgttgtgtgatttgctgtttttgctcatcattatattcctgggattatccatttttaggtttatgtgtgactgtaa

SEQ ID NO: 299213 - DNA, 120 bp, Artificial Sequence
  ENSG00000132600_63 (sequence is synthesized)
tttattgtttagatgaaagttttcctggtttgacttgctctatcttcatatttttccttaagctaagggttcagcatacgaaggcagtattggtggcacttctttaacagtaccccatct

SEQ ID NO: 299214 - DNA, 120 bp, Artificial Sequence
  ENSG00000132600_64 (sequence is synthesized)
cttctcctagccttgagggctgcacctagatgaacttgtgaggctcatttgaaccttttggaagcaccgaagcctgctgaagtttccagacatctgtatgaatctgttgtagttttttaa

SEQ ID NO: 299215 - DNA, 120 bp, Artificial Sequence
  ENSG00000132600_65 (sequence is synthesized)
tgttatatgctgaatataaaaccaagtaactcctgctggaaacatttacaatatcgattaacaaatactatcagtggctttgacatttttgtcagtttcttgatttttttccccgctttt

SEQ ID NO: 299216 - DNA, 120 bp, Artificial Sequence
  ENSG00000132600_66 (sequence is synthesized)
gtctccccttcccccctccacattttggggcattgtgctgttaatagattttttttctgttcgtttgtttatatacctcctgtttccttctgatgttaatagatttctgacagtcagact

SEQ ID NO: 299217 - DNA, 120 bp, Artificial Sequence
  ENSG00000132600_67 (sequence is synthesized)
agcaagcctgctctgtcctcctaccttccagtcgccctcttggtcccccttttggctgtacctaacagttggaaaaaggagaacatggtttgcagggctctggcatcacttagtagagga

SEQ ID NO: 299218 - DNA, 120 bp, Artificial Sequence
  ENSG00000132600_68 (sequence is synthesized)
tagaagagtgagtgtggagcagggacagtcgcttaataaagggcaaggggctgactcacaagacctgcccaactcagccagagctgttctgccaggggccagaaaggccatagggccctg

SEQ ID NO: 299219 - DNA, 88 bp, Artificial Sequence
  ENSG00000132600_69 (sequence is synthesized)
agggagtgacttgagtgactgagtggcctgttgcttccgtgttcctgttaacactcctggaccgagccctactgacacctgggccctg

SEQ ID NO: 299220 - DNA, 120 bp, Artificial Sequence
  ENSG00000132600_70 (sequence is synthesized)
gctatgccatcgaggtaagcttggaggctgaagcagctccactgtgaatgctaatcctccacgctgacttctgaccaaccccagcttcaggaatgcctctaaaatttccgctctcatgca

SEQ ID NO: 299221 - DNA, 120 bp, Artificial Sequence
  ENSG00000132600_71 (sequence is synthesized)
taccgtaaatcctgcccttcgtcaaattccctgtggtatgtaagccctgcgtctgagccataacagtgtgggggcccagtttctcactgcccgagacaaggcttctgtttgtatgtctct

SEQ ID NO: 299222 - DNA, 120 bp, Artificial Sequence
  ENSG00000132600_72 (sequence is synthesized)
ataaagtgtgtctttctgagaagctggatttgccagtctttcctcagcctctcagctcccgtggcctgttggggtaggtttgcatagagctgcccaccatggaacagtatgtatgtatag

SEQ ID NO: 299223 - DNA, 120 bp, Artificial Sequence
  ENSG00000132603_0 (sequence is synthesized)
gacttccgtttccagttaccaaggcacgaggatccggtgttccaacccagggggaaaaatgcggcctttgactgaagaggagacccgtgtcatgtttgagaagatagcgaaatacattgg

SEQ ID NO: 299224 - DNA, 120 bp, Artificial Sequence
  ENSG00000132603_1 (sequence is synthesized)
ggagaatcttcaactgctggtggaccggcccgatggcacctactgtttccgtctgcacaacgaccgggtgtactatgtgagtgagaagattatgaagctggccgccaatatttccgggga

SEQ ID NO: 299225 - DNA, 120 bp, Artificial Sequence
  ENSG00000132603_2 (sequence is synthesized)
caagctggtgtcgctggggacctgctttggaaaattcactaaaacccacaagtttcggttgcacgtcacagctctggattaccttgcaccttatgccaagtataaagtttggataaagcc

SEQ ID NO: 299226 - DNA, 120 bp, Artificial Sequence
  ENSG00000132603_3 (sequence is synthesized)
tggtgcagagcagtccttcctgtatgggaaccatgtgttgaaatctggtctgggtcgaatcactgaaaatacttctcagtaccagggcgtggtggtgtactccatggcagacatcccttt

SEQ ID NO: 299227 - DNA, 120 bp, Artificial Sequence
  ENSG00000132603_4 (sequence is synthesized)
gggttttggggtggcagccaaatctacacaagactgcagaaaagtagaccccatggcgattgtggtatttcatcaagcagacattggggaatatgtgcggcatgaagagacgttgactta

SEQ ID NO: 299228 - DNA, 120 bp, Artificial Sequence
  ENSG00000132603_5 (sequence is synthesized)
aaacgaagccattccaaggacagacggctgtatggaaaggccgagctttgtttcctgtgtttgtgtggactccaccatcatgttgaattttgtcaacactctggcctcttcagggacttc

SEQ ID NO: 299229 - DNA, 120 bp, Artificial Sequence
  ENSG00000132603_6 (sequence is synthesized)
ttatttactgtactctctatcactgacaaatgcaggctggattcttattatatacagagatggctcaaaaatggggtttcagatctttgtgacgaaatagaatactgtttcatatttgaa

SEQ ID NO: 299230 - DNA, 120 bp, Artificial Sequence
  ENSG00000132603_7 (sequence is synthesized)
tcagagggcttcttgttctgagaaataggttcaaaatcattggaaccaggaacaagaatagcttattgttatctgtgataacactgttttctaaacacaaggattttcttttttattaat

SEQ ID NO: 299231 - DNA, 120 bp, Artificial Sequence
  ENSG00000132603_8 (sequence is synthesized)
tgccataacagaataataaaccacatgtggggttttaaaaatgaaatttggctaataggagcaattcagctatttttctatacagtaattggtgtgtggtatagaagaaaaacgggttca

SEQ ID NO: 299232 - DNA, 120 bp, Artificial Sequence
  ENSG00000132603_9 (sequence is synthesized)
aaccccacttctgccacctaccagctatatggccttgaatgagtcattcagctttaataaggttcattttcttctgtttaaaaagacacaaaacttgaaaatcagctttggccatctacc

SEQ ID NO: 299233 - DNA, 86 bp, Artificial Sequence
  ENSG00000132603_10 (sequence is synthesized)
aaaagacacaaaacttgaaaatcagctttggccatctacctgagaattagaaagtctgatttttggaattagaaatcatgattgta

SEQ ID NO: 299234 - DNA, 81 bp, Artificial Sequence
  ENSG00000132603_11 (sequence is synthesized)
catctctactaaaaaaaaaaaaaaaattaggtgtggtgacacatggctgtggtcctggggaagcagagcttgcagtgagcc

SEQ ID NO: 299235 - DNA, 120 bp, Artificial Sequence
  ENSG00000132603_12 (sequence is synthesized)
tggtgccattgcactccagcctgggcgtgacagagtgagactccatctgattgtaaagcatctagtacagtgtacagtgccttggaaatgataggtatggaataaatggtaattattttt

SEQ ID NO: 299236 - DNA, 120 bp, Artificial Sequence
  ENSG00000132603_13 (sequence is synthesized)
gtacagtgtacagtgccttggaaatgataggtatggaataaatggtaattatttttatattatatatattatgtattcctgttattaagtgtagagttttatgagtataatttgatttta

SEQ ID NO: 299237 - DNA, 120 bp, Artificial Sequence
  ENSG00000132603_14 (sequence is synthesized)
aagctgttttctcagtatttttcttggatgggatgacgctaggctggaaagtttttttcatcactatgattttataaaacaattttttctatgaacctttacttacttgactggattgga

SEQ ID NO: 299238 - DNA, 120 bp, Artificial Sequence
  ENSG00000132603_15 (sequence is synthesized)
ctaaaagcactgatcagaggccacgacataaaaattcagtccctttgtccttccccgtgcctcccaaagttactttaagatccttagaatatttctttaaatattttatagacaaaaaat

SEQ ID NO: 299239 - DNA, 120 bp, Artificial Sequence
  ENSG00000132603_16 (sequence is synthesized)
ttaaagactatctgtattgcaaaattaaactatttctttaatgaatatattgcttattttaagttccaaaggtgaagtctttaagaataaaacattaccaactcctgcttttatatgtaa

SEQ ID NO: 299240 - DNA, 120 bp, Artificial Sequence
  ENSG00000132603_17 (sequence is synthesized)
gtgagccaccgcacccagcctttttttctttttttaagagagtttcactttgtcacccagtctggaatgcagtggcacaatcacagcccaccgcagcctcgacctcccaaactggagtgc

SEQ ID NO: 299241 - DNA, 120 bp, Artificial Sequence
  ENSG00000132603_18 (sequence is synthesized)
gcacaatcatggctcactgcagcctcaatctcccgggcccaactgacccccccacctcaacctcctgtgtacctgggactacaggcgcacgccaccacgaccagctaattttttatttta

SEQ ID NO: 299242 - DNA, 71 bp, Artificial Sequence
  ENSG00000132603_19 (sequence is synthesized)
cctcctgtgtacctgggactacaggcgcacgccaccacgaccagctaattttttattttgttcaagcctca

SEQ ID NO: 299243 - DNA, 120 bp, Artificial Sequence
  ENSG00000132603_20 (sequence is synthesized)
ccagccatccaaatggagagactttttgatatctgatgccctcaaatgcgaggatttccttgtcaccttcccgtcaatggaagttttgaagcagatgacctccggtccacgctttcgtat

SEQ ID NO: 299244 - DNA, 120 bp, Artificial Sequence
  ENSG00000132603_21 (sequence is synthesized)
aaaataagtatataaatgtgcacatatattcagctcacacctataatgttaactgtgtcagacccgataataagagctttgcatgaatcctttttctttgtgcccacaactgcccttcga

SEQ ID NO: 299245 - DNA, 120 bp, Artificial Sequence
  ENSG00000132603_22 (sequence is synthesized)
gggagggacgtgcttctgggtaaccagttctgaattcgaaacctcctagctgtgtccttggacgtcactaatctctgtcttgacttgctcatatgtaaaatggaaataacagggctgggc

SEQ ID NO: 299246 - DNA, 72 bp, Artificial Sequence
  ENSG00000132603_23 (sequence is synthesized)
acagggctgggcgcagtggattcatcaaaagatcgagaccatcccagccaacatgctgaaaccccgtctcta

SEQ ID NO: 299247 - DNA, 60 bp, Artificial Sequence
  ENSG00000132603_24 (sequence is synthesized)
gctgggcgtggtggcgcgcgcctatggttgcagcgagccgagatctcgccactgcactcc

SEQ ID NO: 299248 - DNA, 120 bp, Artificial Sequence
  ENSG00000132603_25 (sequence is synthesized)
gacagggcgagactccgtctcaaaaaagataaaaaaggaataacagtacctatctcgaaggctgttgtgaggtttaaatggattaataaagcgctcagcagagaacctggaacgtggtaa

SEQ ID NO: 299249 - DNA, 120 bp, Artificial Sequence
  ENSG00000132603_26 (sequence is synthesized)
acctggaacgtggtaaacgctttatgtgttagttatttctaccatcgtaaatgtcagcttttacagttataaaacccctttagcgccaggcgcgtcgcacctgcagctctgctggaagct

SEQ ID NO: 299250 - DNA, 120 bp, Artificial Sequence
  ENSG00000132603_27 (sequence is synthesized)
gggcaaacggtcgagcaggcggccgagcgacgcctccacgtcgccaaacaggcggtggatgcgctcggtgcactcggcgccgcggatgaaggtcttgtagttagcgaaggccaagtcgcg

SEQ ID NO: 299251 - DNA, 120 bp, Artificial Sequence
  ENSG00000132603_28 (sequence is synthesized)
cgtctgctgcagcagctgcgcccgctcctccgccaggcgctcgggctcgcgccgcagccgctccagccccgagccgctcaactcccggaggtagcggcccacatcgggccgctcgcgcca

SEQ ID NO: 299252 - DNA, 120 bp, Artificial Sequence
  ENSG00000132603_29 (sequence is synthesized)
ctgggcctcggggaagcggtcccggaacagcgacgccaggagcccttcatcctccacctcgccgagagccgctgctgtggccgtggctaccgatgggatagtcgccgcggtcgccatctt

SEQ ID NO: 299253 - DNA, 120 bp, Artificial Sequence
  ENSG00000132603_30 (sequence is synthesized)
cccagcaacaacgtcacttcccttccggaccacaaggggcgctgactccgaacttaggacaggaagaaacaggcacatttccggtctctatgctttctcatccggccggcttgctttccc

SEQ ID NO: 299254 - DNA, 120 bp, Artificial Sequence
  ENSG00000132603_31 (sequence is synthesized)
ccacagagtccctgacagtgtgcttggaggagtttcagcacatggagatgtgtagaggtcttgcagcttgagcatggtcagggctatgggataggaatgctatgtggctgcgtagggtta

SEQ ID NO: 299255 - DNA, 120 bp, Artificial Sequence
  ENSG00000132603_32 (sequence is synthesized)
gttttctccagcgaagtagaagagcctagggagacccagctagagatcagaaagcaaataagtggcagcaatgaagacaccggggtccagaaaaagagctgttaacctggccatggagga

SEQ ID NO: 299256 - DNA, 120 bp, Artificial Sequence
  ENSG00000132603_33 (sequence is synthesized)
tgatccttgtagagttgagaaaataactttttctatttttttctttttctttcttgctctgttttttcttttcatttctctttctctttcttcctgacacagtttcactctgtcgcccag

SEQ ID NO: 299257 - DNA, 78 bp, Artificial Sequence
  ENSG00000132603_34 (sequence is synthesized)
cctgacacagtctgcagcctccactttccagtttccagtgattcttgtgcctcagtagctgggattacaggcatgtgc

SEQ ID NO: 299258 - DNA, 120 bp, Artificial Sequence
  ENSG00000132603_35 (sequence is synthesized)
aacgaccgggtgtactatgtgaggtgaggcggggccgggcaggcagcatggacccaggggagaggggtcctgggtcccacgagcctccttcatccgcaaccttgctccccctttaccctt

SEQ ID NO: 299259 - DNA, 120 bp, Artificial Sequence
  ENSG00000132604_0 (sequence is synthesized)
agaagcccgcgggcggctcggaacgctgtttctatcatggccgcgggagccgggacggcgggccccgcttccggcccgggcgtcgtgcgtgacccagcggcgtcacagccgaggaagcgg

SEQ ID NO: 299260 - DNA, 120 bp, Artificial Sequence
  ENSG00000132604_1 (sequence is synthesized)
gtgacccagcggcgtcacagccgaggaagcggcccggccgggagggcggggagggcgcgcggcgatcggacacgatggcgggaggaggcgggagtagcgacggcagcgggcgggcagctg

SEQ ID NO: 299261 - DNA, 120 bp, Artificial Sequence
  ENSG00000132604_2 (sequence is synthesized)
cggcgggggcgccacgagccggggctggggggcccggcggagcgcggcgcgggggaggcacggctggaagaggcagtcaatcgctgggtgctcaagttctacttccacgaggcgctgcgg

SEQ ID NO: 299262 - DNA, 120 bp, Artificial Sequence
  ENSG00000132604_3 (sequence is synthesized)
gcctttcggggtagccggtacggggacttcagacagatccgggacatcatgcaggctttgcttgtcaggcccttggggaaggagcacaccgtgtcccgattgctgcgggttatgcagtgt

SEQ ID NO: 299263 - DNA, 120 bp, Artificial Sequence
  ENSG00000132604_4 (sequence is synthesized)
ctgtcgcggattgaagaaggggaaaatttagactgttcctttgatatggaggctgagctcacaccactggaatcagctatcaatgtgctggagatgattaaaacggaatttacactgaca

SEQ ID NO: 299264 - DNA, 120 bp, Artificial Sequence
  ENSG00000132604_5 (sequence is synthesized)
gaagcagtggtcgaatccagtagaaaactggtcaaggaagctgctgtcattatttgtatcaaaaacaaagaatttgaaaaggcttcaaaaattttgaaaaaacatatgtccaaggacccc

SEQ ID NO: 299265 - DNA, 120 bp, Artificial Sequence
  ENSG00000132604_6 (sequence is synthesized)
acaactcagaagctgagaaatgatctcctgaatattattcgagaaaagaacttggcccatcctgttatccagaacttttcatatgagaccttccagcagaagatgctgcgcttcctggag

SEQ ID NO: 299266 - DNA, 120 bp, Artificial Sequence
  ENSG00000132604_7 (sequence is synthesized)
agccacctggatgacgccgagccctacctcctcacgatggccaaaaaggctttgaaatctgagtccgctgcctcaagtacagggaaggaagataaacagccagcaccagggcctgtggaa

SEQ ID NO: 299267 - DNA, 120 bp, Artificial Sequence
  ENSG00000132604_8 (sequence is synthesized)
aagccacccagagaacccgcaaggcagctacggaatcctccaaccaccattggaatgatgactctgaaagcagctttcaagactctgtctggtgcacaggattctgaggcagcctttgca

SEQ ID NO: 299268 - DNA, 120 bp, Artificial Sequence
  ENSG00000132604_9 (sequence is synthesized)
aaactggaccagaaggatctggttcttcctactcaagctctcccagcatcaccagccctcaaaaacaagagacccagaaaagatgaaaacgaaagttcagccccggctgacggtgagggt

SEQ ID NO: 299269 - DNA, 120 bp, Artificial Sequence
  ENSG00000132604_10 (sequence is synthesized)
ggctcggaactgcagcccaagaacaagcgcatgacaataagcagattggtcttggaggaggacagccagagtactgagcccagcgcaggcctcaactcctcccaggaggccgcttcagcg

SEQ ID NO: 299270 - DNA, 120 bp, Artificial Sequence
  ENSG00000132604_11 (sequence is synthesized)
ccaccatccaagcccaccgttctcaaccaacccctccctggagagaagaatcccaaagtacccaaaggcaagtggaacagctctaatggggttgaagaaaaggagacttgggtggaagag

SEQ ID NO: 299271 - DNA, 120 bp, Artificial Sequence
  ENSG00000132604_12 (sequence is synthesized)
tggggaaggaaactgggctgccatttctaaaaattacccatttgttaaccgaacagctgtgatgattaaggatcgctggcggaccatgaaaagacttggcatgaactgaaacaggctttc

SEQ ID NO: 299272 - DNA, 120 bp, Artificial Sequence
  ENSG00000132604_13 (sequence is synthesized)
ggaccatgaaaagacttggcatgaactgaaacaggctttcatttccacagaattcacaggagcatggttcctaataatagcccctgatagtctgctctttctttctttttcttttttttt

SEQ ID NO: 299273 - DNA, 120 bp, Artificial Sequence
  ENSG00000132604_14 (sequence is synthesized)
gcctggcatctgctgtttctttcagaagctgggctgggatgagaattttgggcaacctccttcgacgtgggggaggtcccatttccacttcatcactgttggagatcatggagctaagaa

SEQ ID NO: 299274 - DNA, 120 bp, Artificial Sequence
  ENSG00000132604_15 (sequence is synthesized)
gcagagccaagtccacccatgtccttggcagagatgacaggcacacagcttgtgcagtgccagaatatcattagcgtttcccttctttagtggtttgcttaaatttaaatccctggtaat

SEQ ID NO: 299275 - DNA, 120 bp, Artificial Sequence
  ENSG00000132604_16 (sequence is synthesized)
ctgtagaaccttctcctaggaaatggtgaagtctattaggagccacttgtgactccatgacctgttaaaaccagcaatgtgagtattatttggagtaaatttgttccacgtcaagttctg

SEQ ID NO: 299276 - DNA, 120 bp, Artificial Sequence
  ENSG00000132604_17 (sequence is synthesized)
gccttctgatgcaaatgcaaaggaacttagtctgttatgaacccaggttgatgacagaccagtccttgtggaataagattccctttaaaaactctttagccagtcgtgacatcaacccta

SEQ ID NO: 299277 - DNA, 120 bp, Artificial Sequence
  ENSG00000132604_18 (sequence is synthesized)
gacctgtctgccttggcatttgctgtcaacatctgctgggctatgtaggcaggttaatcctccacttctcatgtggttgaaccagtgtgttttttggtaaaatggtgattgtagataaga

SEQ ID NO: 299278 - DNA, 120 bp, Artificial Sequence
  ENSG00000132604_19 (sequence is synthesized)
ttagttccctgatcccctgccccctgtcccctgcctcttttcccaattcccttccttatgctggacttttaaagcttaaaaaaaatccgattgaatataaatgcctaatttcattctttg

SEQ ID NO: 299279 - DNA, 120 bp, Artificial Sequence
  ENSG00000132604_20 (sequence is synthesized)
tgaaatggttgcttcctcctgattccctaattgtgctgtgttcgtgtcttgcactggaattcaacattcccttctccttttgtactgtgttgtgcttgctgtctctcccggacaccctta

SEQ ID NO: 299280 - DNA, 120 bp, Artificial Sequence
  ENSG00000132604_21 (sequence is synthesized)
aagactgtctttttagcaaaaaatttcagtaaagtgttttctgtaatctttttttaaaaggtgagaactaattattgtccatacttgtagcattcttcattaaagtcttgcttctctcaa

SEQ ID NO: 299281 - DNA, 120 bp, Artificial Sequence
  ENSG00000132604_22 (sequence is synthesized)
gtaagtaaatctaacttttctgcctttcttgtaatttccctccaaagctacttctatcactccactatctctatggattcccaaggagaacagcttcttctcctggggctgggaatacag

SEQ ID NO: 299282 - DNA, 120 bp, Artificial Sequence
  ENSG00000132604_23 (sequence is synthesized)
caaggaaggggacagattattatggtgtggccctgagactggggcttgtggaagaactgactgaagatgtttccttggccagggagagagagagagagctgtaaaacacccttgtgaaag

SEQ ID NO: 299283 - DNA, 120 bp, Artificial Sequence
  ENSG00000132604_24 (sequence is synthesized)
acctggatgacgccgagccctacctcctcacgattggatttgtaagtgaacttgtttgcatattgagtatattcttggtgaaagaagcagagaattaatgcaattctgtggcctcttctt

SEQ ID NO: 299284 - DNA, 120 bp, Artificial Sequence
  ENSG00000132604_25 (sequence is synthesized)
ggggttggagcgccggggaagggggtccgggggaccgggagtcgggactgggggtcgcccagccaacgatgtcttctctcccagctttgcttgtcaggcccttggggaaggagcacaccg

SEQ ID NO: 299285 - DNA, 120 bp, Artificial Sequence
  ENSG00000132604_26 (sequence is synthesized)
tattacttccgtgaatgaagtaactttcagctaagttactcaccaccaaggcttgctcagactgctagaacttgacgcaggagtggccagtgacgacgtagccatccctgccggttctga

SEQ ID NO: 299286 - DNA, 120 bp, Artificial Sequence
  ENSG00000132604_27 (sequence is synthesized)
agccccgcatgtgggcttccaagccttgcactagggcatgagtgggaatggaaaggtttcagagcctcctactcatcgctgctttcatttttagcaaacatctgagtgtcttgacttcta

SEQ ID NO: 299287 - DNA, 120 bp, Artificial Sequence
  ENSG00000132604_28 (sequence is synthesized)
aacattagtcttgtgtgttaaaagaaatttgtttgcattgggccacattatactttgacccttaaaaagagactgatgaatatgtataattttgcacccttctgagcatttgagacttgg

SEQ ID NO: 299288 - DNA, 120 bp, Artificial Sequence
  ENSG00000132604_29 (sequence is synthesized)
caagttcagtgaatacttactaatctcccatgtcctgctaggtactgtggggcagtggctagaatactttaattttgctccccattgtgattctcatcctggctttgagttttgcttccc

SEQ ID NO: 299289 - DNA, 120 bp, Artificial Sequence
  ENSG00000132604_30 (sequence is synthesized)
cccacagtggaccgtcatcccttcatcattgcttgtccaaatcccatttgtcctttaaagggaagaaaagccgttgttgatgaagtgctttctgggggcagagcactttcatgtatcatc

SEQ ID NO: 299290 - DNA, 120 bp, Artificial Sequence
  ENSG00000132604_31 (sequence is synthesized)
ttactgagtcactacaatcctcactctgtgaggtgatgatatattagccccattacacagaggagaagggctcagaaaagttcttagctcacctgaagtcacacagctaaaagtggcaaa

SEQ ID NO: 299291 - DNA, 120 bp, Artificial Sequence
  ENSG00000132604_32 (sequence is synthesized)
gatgggctttggatttttaatccaagtcagtcttgacagaaaagcccatggcctgtataccatatacaacaagttgcctctcttacaattctccttcctcaggctgggtgcgctggctca

SEQ ID NO: 299292 - DNA, 71 bp, Artificial Sequence
  ENSG00000132604_33 (sequence is synthesized)
acttgggaagctgaggcaggagaattactggaacccgggaggcggaggctgctgactccgtctcaaaaaaa

SEQ ID NO: 299293 - DNA, 120 bp, Artificial Sequence
  ENSG00000132604_34 (sequence is synthesized)
gtctcaaaaaaacaaaaacaaaaacaacttctccctcctccacagactcctccctggtcaccactagtgatccaccttatggatctcccaaggccacctctgcctctgctctgtgttgta

SEQ ID NO: 299294 - DNA, 120 bp, Artificial Sequence
  ENSG00000132604_35 (sequence is synthesized)
tgcctctgctctgtgttgtattatttggggacctgtggtctggcatgcattgtacttggtgccccaaagggctgtggcatctgataagtgatttatcctcaggcacagatttgcactatg

SEQ ID NO: 299295 - DNA, 120 bp, Artificial Sequence
  ENSG00000132604_36 (sequence is synthesized)
tcaccactacttgtatgtagaagtgagtcaccggctggcaaatgggcatagctgctgggcagtggatgcagctccatgcatgttattctcatttgatacaggatctcattggcttctcac

SEQ ID NO: 299296 - DNA, 120 bp, Artificial Sequence
  ENSG00000132604_37 (sequence is synthesized)
agcaatcctgtgcactataggtattgctcccgggaacagatgaggaaacaggagagtgcgagattacagtaattttgtaaatgggaggatttgtgaaggtttcagacatacaccctctct

SEQ ID NO: 299297 - DNA, 120 bp, Artificial Sequence
  ENSG00000132604_38 (sequence is synthesized)
ctctcatatgtcaaggatatgaagtctaatgaatcccctaaagcagcaggggttggcaagctgtggccctggggccaaatcagcctactgcctgtttttgtaaataaagttttattggaa

SEQ ID NO: 299298 - DNA, 120 bp, Artificial Sequence
  ENSG00000132604_39 (sequence is synthesized)
cggcggagcgcggcgcgggggaggcacggctggaagaggcagtcaatcgctgggtgctcaagttctacttccacgaggcgctgcgggcctttcggggtagccgctttgcttgtcaggccc

SEQ ID NO: 299299 - DNA, 120 bp, Artificial Sequence
  ENSG00000132604_40 (sequence is synthesized)
gtgcccttgaggatgtgcggggaatcagaatatctgaagtgaaaagagttgatgtgtgaaaaagacattgaattgtatgcactagctttcttaattaaatgccttaaaaatgcaaaagca

SEQ ID NO: 299300 - DNA, 80 bp, Artificial Sequence
  ENSG00000132612_0 (sequence is synthesized)
cgcgcaccgcgctcagcgcccaccgccgggcttcccgcgccggacccagtacctcggctccccggggccggaccgaggcc

SEQ ID NO: 299301 - DNA, 120 bp, Artificial Sequence
  ENSG00000132612_1 (sequence is synthesized)
gcaagcagcgccgcggggtgtggggcggacccaggagatgaaatgacaacgtcaaccctccagaaagccattgatctggtgacgaaagccacagaggaggacaaagccaagaactacgag

SEQ ID NO: 299302 - DNA, 120 bp, Artificial Sequence
  ENSG00000132612_2 (sequence is synthesized)
gaggcgctgcggctgtaccagcatgcggtggagtacttcctccacgctatcaagtatgaggcccacagcgacaaggccaaggagagcattcgagccaagtgcgtgcagtacctagaccgg

SEQ ID NO: 299303 - DNA, 120 bp, Artificial Sequence
  ENSG00000132612_3 (sequence is synthesized)
gccgagaagctgaaggattatttacgaagcaaagagaaacacggcaagaagccagtcaaagagaaccagagtgagggcaagggcagtgacagtgacagtgaaggggataatccggagaaa

SEQ ID NO: 299304 - DNA, 120 bp, Artificial Sequence
  ENSG00000132612_4 (sequence is synthesized)
aagaaactgcaagaacagctgatgggtgccgtcgtgatggagaagcccaacatacggtggaacgacgtggccgggctggagggggccaaggaggccctcaaagaagctgtcattttgcca

SEQ ID NO: 299305 - DNA, 120 bp, Artificial Sequence
  ENSG00000132612_5 (sequence is synthesized)
atcaaattcccacacttgttcacaggcaagcgcaccccctggcgggggattctgctgttcggaccccctggcacagggaaatcctacctggccaaagccgtggcaacagaggccaacaac

SEQ ID NO: 299306 - DNA, 120 bp, Artificial Sequence
  ENSG00000132612_6 (sequence is synthesized)
tccaccttcttctctgtgtcctcctcagatctgatgtccaagtggctgggggagagtgaaaagctggtcaagaacctgtttgagctggccaggcagcacaagccctccatcatcttcatc

SEQ ID NO: 299307 - DNA, 120 bp, Artificial Sequence
  ENSG00000132612_7 (sequence is synthesized)
gatgaggtggattccctctgcgggtcccgaaatgaaaatgagagtgaggccgcccggaggatcaaaacggagttcttggtccagatgcagggggtggggaataacaatgatgggactctg

SEQ ID NO: 299308 - DNA, 120 bp, Artificial Sequence
  ENSG00000132612_8 (sequence is synthesized)
gttcttggagccacaaacatcccatgggtgttggattcggccatcaggaggaggtttgaaaaacgaatttatatccccttgccggaggaagctgcccgcgcccagatgttccggttgcat

SEQ ID NO: 299309 - DNA, 120 bp, Artificial Sequence
  ENSG00000132612_9 (sequence is synthesized)
ctcgggagcactccccacaacctcacggatgcaaacatccacgagctggcccggaagacggaaggctactcgggcgcggacatcagcatcatcgtgcgggactctctcatgcagcccgtg

SEQ ID NO: 299310 - DNA, 120 bp, Artificial Sequence
  ENSG00000132612_10 (sequence is synthesized)
aggaaggtgcagtcggccacacacttcaaaaaggtctgtggcccctctcgcaccaaccccagcatgatgattgatgacctcctgactccatgctcaccaggggacccaggagccatggag

SEQ ID NO: 299311 - DNA, 120 bp, Artificial Sequence
  ENSG00000132612_11 (sequence is synthesized)
atgacttggatggatgtccctggggacaaactcttagagcctgtggtttgcatgtcggacatgctgcggtctctggccaccacccggcccacggtgaatgcagacgacctcctgaaagtg

SEQ ID NO: 299312 - DNA, 120 bp, Artificial Sequence
  ENSG00000132612_12 (sequence is synthesized)
aagaaattctcagaggactttgggcaagagagttaaaagctgcttcacttgggcaatggtgaaggtgggaggttgattggggcaaatccaggcactccccatgtcaacagccagacaggg

SEQ ID NO: 299313 - DNA, 120 bp, Artificial Sequence
  ENSG00000132612_13 (sequence is synthesized)
ctccagggcttgtcccagtcaatacagagttccctctgctgtctggccgtctgccagggagccagaaggaagggccttgcagccacagagacactccactgccctggggcacacagtgga

SEQ ID NO: 299314 - DNA, 120 bp, Artificial Sequence
  ENSG00000132612_14 (sequence is synthesized)
cactgctcttcctacttcctcctctcctggatgctcatcagctccttctgcctcccccccttttttttccatcttttgttcccctaaattaatgctgcttggattttcatcttatttata

SEQ ID NO: 299315 - DNA, 120 bp, Artificial Sequence
  ENSG00000132612_15 (sequence is synthesized)
aagataaaatcacctggaagtgtcaaggagtggggcggggtggcgggggagaagcagccgtgctgccaggtcacccagacctccagacagccggctagccccactgcccgttccttttac

SEQ ID NO: 299316 - DNA, 120 bp, Artificial Sequence
  ENSG00000132612_16 (sequence is synthesized)
gcccaagttttgctccttgagagcagattggctgatgcccctgcaaccccagcccaagctctgcctcaaagaccgagtgacataagccattcccaccctcctaggttcacatccagggct

SEQ ID NO: 299317 - DNA, 120 bp, Artificial Sequence
  ENSG00000132612_17 (sequence is synthesized)
gtcgtttagatcagggtaaggcagtcaggcgggtgttcaccactgccttttcttcctctgagcgtgagaacactgaacccagccactgcccctgggtccctgtcctggaaatggtctaat

SEQ ID NO: 299318 - DNA, 120 bp, Artificial Sequence
  ENSG00000132612_18 (sequence is synthesized)
aaatccttttcccttcttgagctacccaagtgatctcatctttccttgactcttaactgagactctgaagggccacccttgcttccaattaaaagaccctctggttttctgtctcctctc

SEQ ID NO: 299319 - DNA, 120 bp, Artificial Sequence
  ENSG00000132612_19 (sequence is synthesized)
ttttctaaagcagagcaggaaacagaacactgcagttcttaggcctgttctccagtcaggtgtgcaaggcctcctccccttaaggcctcagaagtttggctggggatgtttgtgggatcc

SEQ ID NO: 299320 - DNA, 120 bp, Artificial Sequence
  ENSG00000132612_20 (sequence is synthesized)
agacagttcttgccgttgttcggcctacagatcagagactgcaaagtgggagccctgcgtaccagacccgtcctgcagctgtgtttgtttggtttggtctgccgctaacatttaaaagtc

SEQ ID NO: 299321 - DNA, 74 bp, Artificial Sequence
  ENSG00000132612_21 (sequence is synthesized)
gccgctaacatttaaaagtcgagacgctaacatttaaaagtcgagagttgctgggcgcggtggctcacgcctgt

SEQ ID NO: 299322 - DNA, 120 bp, Artificial Sequence
  ENSG00000132612_22 (sequence is synthesized)
aaaaaaaagtcgagagttgacataaaaattcagaattctgacttctagaagattaaattaggtaatgttgggcctgcgtcctcatggggcagcctgtcagcggccactaagtagaggctg

SEQ ID NO: 299323 - DNA, 120 bp, Artificial Sequence
  ENSG00000132612_23 (sequence is synthesized)
ctctgtacagaaggggtcccccatccccactcatctgtgttgcctgcccagatagccccatggccatttcagtttgcgacccccaacagaccaaggacccagagctggcagccctggacc

SEQ ID NO: 299324 - DNA, 120 bp, Artificial Sequence
  ENSG00000132612_24 (sequence is synthesized)
cacgtccggcaggcagtgaagctgcagaggctgtcccacgtttaccccatgcatataaacagaccaaagtcaaagcacattcacacagaaagacctggcctagtaaatgaagcttatagc

SEQ ID NO: 299325 - DNA, 120 bp, Artificial Sequence
  ENSG00000132612_25 (sequence is synthesized)
ctgcaaagggctttgttccaaccttccctctccaaaacccagtactgctcctctacctttcaaacctggttgggccagaactgattacatggccaactcttggctcacactgggcttgca

SEQ ID NO: 299326 - DNA, 120 bp, Artificial Sequence
  ENSG00000132612_26 (sequence is synthesized)
ctgggccatttctttgctctggttcagagcctctgcagaagtgagctaactttggatcagtagctccaacacttggctccagtgctggcaggttacccctcaaccatagcagctgggatc

SEQ ID NO: 299327 - DNA, 120 bp, Artificial Sequence
  ENSG00000132612_27 (sequence is synthesized)
tttgtggcttgggggtgcttgtgtaagttcttggttatgtgccctcagccaccaggatatgaaccgtgtctgcagagcttcactttagtgagcttacaagtttttaaatttttacttcta

SEQ ID NO: 299328 - DNA, 120 bp, Artificial Sequence
  ENSG00000132612_28 (sequence is synthesized)
gttacatttacttgaatcagaacgttgtttcctcattcctactgcttaaacaccttgacaagtcctaggggttaacaaaggttagcatggctatggtccatccctgtgctctagttagag

SEQ ID NO: 299329 - DNA, 120 bp, Artificial Sequence
  ENSG00000132612_29 (sequence is synthesized)
cgtgaagacacctgactttccagttgtctctctccatgaccagcaacaggaaccactgacgctgaactttggacagtggcctcagactctggctgccagcacacaacctgccatcatcga

SEQ ID NO: 299330 - DNA, 120 bp, Artificial Sequence
  ENSG00000132612_30 (sequence is synthesized)
tgttaaacatgctgacatgtgcagaggagtttcctccctgaaatgctctgaaattcacttctctgcctggggattctgttataaaccttctgcctacattggctttcactgtggaagttg

SEQ ID NO: 299331 - DNA, 120 bp, Artificial Sequence
  ENSG00000132612_31 (sequence is synthesized)
atttctaaaactctgatgagctcacaacgttgacatgtatatgcgttttttgtgagtgcttcctgctcaaagtgggagagattttactggaaatgcaataaagtttgcattttattgcta

SEQ ID NO: 299332 - DNA, 120 bp, Artificial Sequence
  ENSG00000132612_32 (sequence is synthesized)
ccatcaggaggaggtgagtcttccccaggagaagccagggctggaggcttcctcccaccatggtcacggtccgcctgctgctggcagcccgggtgcagcctggccccttttccctggagt

SEQ ID NO: 299333 - DNA, 120 bp, Artificial Sequence
  ENSG00000132612_33 (sequence is synthesized)
cttcccgtctgcctgccaagcagagccctttgtgaggctggcttgttgaggatgtgccgccagcatcactggcccatgaaatgcgtccgtttcactcaaatcttcgtgcctccccttccg

SEQ ID NO: 299334 - DNA, 120 bp, Artificial Sequence
  ENSG00000132612_34 (sequence is synthesized)
tgaataccattccatcatccgctgtcaactcctgccgtgtgctgggctctctaggtttgaaaaacgaatttatatccccttgccggaggaagctgcccgcgcccagatgttccggttgca

SEQ ID NO: 299335 - DNA, 78 bp, Artificial Sequence
  ENSG00000132612_35 (sequence is synthesized)
gaggagaccaaaggcacttcttacatgctggtggcaagagaaaatgaagaaacaaaagtggaaacccctgataaaccc

SEQ ID NO: 299336 - DNA, 120 bp, Artificial Sequence
  ENSG00000132612_36 (sequence is synthesized)
gtgcgggactctctcatgcagcccgtgaggaaggtgcagtcggccacacacttcaaaaaggtgagtgcccgcggccactgctgagaaaaatctcatagtaagagcgggatgttcggtttt

SEQ ID NO: 299337 - DNA, 120 bp, Artificial Sequence
  ENSG00000132612_37 (sequence is synthesized)
ttttttcccagctcctggtcctgctccccggctgctcaggtgacacagtctctgaggcctcctggagagccgagggccagtgccatgggggctgcacccactgtcccctccctgcagctc

SEQ ID NO: 299338 - DNA, 120 bp, Artificial Sequence
  ENSG00000132612_38 (sequence is synthesized)
ttctggagtgtggccatctcagggtgtgtgaaagcagaggacagggccactttactgtcttaaccctgctgcggcctcctccgtcagcactgtgtgctcttgtgcggggtggacaccaaa

SEQ ID NO: 299339 - DNA, 120 bp, Artificial Sequence
  ENSG00000132612_39 (sequence is synthesized)
tcagtgtttggaaagtgttggatataaaatgaccaggaagacctgtctattcattcagcagatctctgctgagtatttgctgtgggtcctcctgtgtgcccggccctgtcctaagtgctg

SEQ ID NO: 299340 - DNA, 120 bp, Artificial Sequence
  ENSG00000132612_40 (sequence is synthesized)
ggaagatatgagtgaccaacagacaaaaatcctagaccttccgttgttggtggggagacagtcaacacagtcagtgagtgtctcagaggatggagatggagcagggttaggagagaggtg

SEQ ID NO: 299341 - DNA, 120 bp, Artificial Sequence
  ENSG00000132612_41 (sequence is synthesized)
tctcgggcatggagggaagggcagatggcactggggtgatgcctgagacaggaggtgaaggtgtgagggaatgagccttgtggacattgggggaatgttttgccaaggcagcggacttca

SEQ ID NO: 299342 - DNA, 81 bp, Artificial Sequence
  ENSG00000132612_42 (sequence is synthesized)
atacagttcaagttgaaatgtgggtgggggcacagctaaaccatatcacacttttaatgtcactgtattcctggtgagacg

SEQ ID NO: 299343 - DNA, 120 bp, Artificial Sequence
  ENSG00000132612_43 (sequence is synthesized)
taatgaggaagacatcaaggcattggggctacagattgccagagtcccatgcaaatcatgagtcgctcggaccacccagcccgagttctgaaggagcccgtcctcctcagatgctaggga

SEQ ID NO: 299344 - DNA, 120 bp, Artificial Sequence
  ENSG00000132612_44 (sequence is synthesized)
cccacagagcattctctttgggacttccttagagaccggaggggtcgagcccctctgacactgaggggcagctgccccagtcagatccatttggtttcaggtctgtggcccctctcgcac

SEQ ID NO: 299345 - DNA, 80 bp, Artificial Sequence
  ENSG00000132613_0 (sequence is synthesized)
cctggccccctcccttgcgctgctccccgcgctccgtgcgcctagccgccgccgcggcccggcccagccagagcatggag

SEQ ID NO: 299346 - DNA, 120 bp, Artificial Sequence
  ENSG00000132613_1 (sequence is synthesized)
cgcggcccggcccagccagagcatggagacggcggagaaggagtgcggcgccctgggcgggctcttccaggccatagtcaacgacatgaagagctcctaccctatctgggaggacttcaa

SEQ ID NO: 299347 - DNA, 120 bp, Artificial Sequence
  ENSG00000132613_2 (sequence is synthesized)
ctccaaggccacgaagctgcattcccagctgaggaccaccgtgctggctgctgtggccttcctggatgccttccagaaagtggctgacatggctaccaacacccgaggggccacgaggga

SEQ ID NO: 299348 - DNA, 120 bp, Artificial Sequence
  ENSG00000132613_3 (sequence is synthesized)
catcggctcggcgctcacacgcatgtgcatgcgccaccgcagcatcgagaccaagctgcggcagttcaccaacgcactgctggagagcctcatcaacccgctgcaggagcgcatcgagga

SEQ ID NO: 299349 - DNA, 120 bp, Artificial Sequence
  ENSG00000132613_4 (sequence is synthesized)
ctggaagaaggcggccaaccagctggacaaggaccacgcgaaagagtacaaacgagcccggcatgagatcaaaaagaagtcgtcggacacgctgaagctgcagaagaaggcgcgcaaaga

SEQ ID NO: 299350 - DNA, 120 bp, Artificial Sequence
  ENSG00000132613_5 (sequence is synthesized)
gctacttgggaaaggagacctgcagccccagctggacagtgccctgcaggacgtcaacgacatgtacctgctgctggaggagacggagaagcaggccgtgcgccgggcgctgatcgagga

SEQ ID NO: 299351 - DNA, 120 bp, Artificial Sequence
  ENSG00000132613_6 (sequence is synthesized)
gcggggccgcttctgcaccttcatcaccttcctgcagcctgtggtgaatggagagctgaccatgctgggagagatcacccacctgcagggcatcatcgacgacttggtggtgctgacagc

SEQ ID NO: 299352 - DNA, 120 bp, Artificial Sequence
  ENSG00000132613_7 (sequence is synthesized)
agaaccccacaaactgcctcccgccagcgagcaggtaatcaaagacctaaagggctcggactacagctggtcctaccagaccccaccctcatcacccagcagctccagctcccggaagtc

SEQ ID NO: 299353 - DNA, 120 bp, Artificial Sequence
  ENSG00000132613_8 (sequence is synthesized)
cagcatgtgcagtgcccccagcagcagtagcagtgccaagggtggcggagccccatggcctgggggtgcccaaacatactcacccagttccacctgtcgctaccgcagcctggcgcagcc

SEQ ID NO: 299354 - DNA, 120 bp, Artificial Sequence
  ENSG00000132613_9 (sequence is synthesized)
agccaccaccaccgctcgcctctccagcgtttcctcccatgactctggcttcgtctcccaggacgccacctactccaagcccccctcgcctatgccttcagacatcaccagccagaagtc

SEQ ID NO: 299355 - DNA, 120 bp, Artificial Sequence
  ENSG00000132613_10 (sequence is synthesized)
ctccagctctgcatcttccgaggcctcggaaacctgccagtccgttagcgagtgcagctcccccacctcggactggtccaaggtcggctcccatgagcagccctcaggcgccactctgca

SEQ ID NO: 299356 - DNA, 120 bp, Artificial Sequence
  ENSG00000132613_11 (sequence is synthesized)
gcggaggaaggaccgagtggagctcctgcgagacacagagccaggccctgccagtgggggcaccctgggccccagcggggaagaggcaccgcgaccccggatgtcccctgccaccatcgc

SEQ ID NO: 299357 - DNA, 120 bp, Artificial Sequence
  ENSG00000132613_12 (sequence is synthesized)
agccaagcacggtgaggaggtgtcccccgccgccagtgacctggccatggtgctgacgcggggcctgagcctggagcaccagaagagcagccgggactcgctgcagtactccagcggcta

SEQ ID NO: 299358 - DNA, 120 bp, Artificial Sequence
  ENSG00000132613_13 (sequence is synthesized)
cagcacgcagaccaccacgccctcctgctctgaggacaccatcccctcccaaggctccgactacgactgctactccgtgaatggggatgcggacagcgagggcccgcccgagtttgacaa

SEQ ID NO: 299359 - DNA, 120 bp, Artificial Sequence
  ENSG00000132613_14 (sequence is synthesized)
gtcatccaccatcccgcgcaacagcaacatcgcccagaactaccgccgcctgatccagaccaagcgcccagcctccactgctgggctgcccaccgcggggctgcccacggccactggcct

SEQ ID NO: 299360 - DNA, 120 bp, Artificial Sequence
  ENSG00000132613_15 (sequence is synthesized)
tcgggcgcaccccccggcgtggccaccatccgccgcacaccctccaccaagcccaccgtgcgccgcgccctgtccagcgctggccccatccccatccggccgcccatcgtccctgtgaag

SEQ ID NO: 299361 - DNA, 120 bp, Artificial Sequence
  ENSG00000132613_16 (sequence is synthesized)
gaagacgcccacggtgcctgactcccccggctacatggggcccacacgggcgggcagtgaggagtgcgtcttctataccgacgagaccgcctcacccctggcaccggacctcgccaaggc

SEQ ID NO: 299362 - DNA, 120 bp, Artificial Sequence
  ENSG00000132613_17 (sequence is synthesized)
ctccccaaagaggctcagcctgcccaacacagcctggggcagcccatccccagaggcagccgggtaccccggggcaggggccgaggacgagcagcagcagctggcggccaaccggcacag

SEQ ID NO: 299363 - DNA, 120 bp, Artificial Sequence
  ENSG00000132613_18 (sequence is synthesized)
cctggtggagaagctgggggagctggtggcgggtgcccacgcactgggtgagggccagttccccttccccactgctctgtcggccacccccacggaggagacgcccaccccacccccagc

SEQ ID NO: 299364 - DNA, 120 bp, Artificial Sequence
  ENSG00000132613_19 (sequence is synthesized)
tccgcaggaccgtcaccaacgacaggtcggcgccccgcatcttatgatggcgccaccctccccatcctctcaggccccagtgcgagcaggtggcctggtctgtgagccgcaggcactcag

SEQ ID NO: 299365 - DNA, 120 bp, Artificial Sequence
  ENSG00000132613_20 (sequence is synthesized)
agcaaaggcccagccaggagagaggacagagccagggcagaggccatgccactttatggaaagacacctcacttggattccagcatttaaacaggaagtgacttcttagcaagcctggcc

SEQ ID NO: 299366 - DNA, 120 bp, Artificial Sequence
  ENSG00000132613_21 (sequence is synthesized)
aggacggagcctgcaggcctgggcctggttcggggtctgttttatgctcttcggtccctcctcttcctcctctggggccctgcctcttccctacccataagcaccagagccagggccgct

SEQ ID NO: 299367 - DNA, 120 bp, Artificial Sequence
  ENSG00000132613_22 (sequence is synthesized)
gcccatgacagaggggccaggctggcctccctttcaccatcccggcctctcccagggctggtcctgcctcagctcctcctggaatgctggcccccctctcccctgcctgagccccctcct

SEQ ID NO: 299368 - DNA, 120 bp, Artificial Sequence
  ENSG00000132613_23 (sequence is synthesized)
cccctcttgccttctctctgcctctcccaggcccctctccctccaggaggcggggcggctgtggaggggccaggtgcacgctgggctggatgtctgctgggggctgggggccagggcggc

SEQ ID NO: 299369 - DNA, 120 bp, Artificial Sequence
  ENSG00000132613_24 (sequence is synthesized)
aggttggagttgggcggccaggccccccgtgtgggaagggagttccagggcccacgccaagtctcagggaggaaaccaggggctgcttgggggggggggtcttgggggccctgtggtggc

SEQ ID NO: 299370 - DNA, 120 bp, Artificial Sequence
  ENSG00000132613_25 (sequence is synthesized)
tcccacccctcgcctcccccaccccgtgaggctggctggagggggccagagcagctctttggaaactagggcagcagggttaggaggccggaggccctggggtcaccggccagccacaca

SEQ ID NO: 299371 - DNA, 120 bp, Artificial Sequence
  ENSG00000132613_26 (sequence is synthesized)
ggcaccgttttcagatgtccacttctcattgggtacatcaatcttttaactttgggggtcacagttttagccacctttcggggggtgactggagcagtaggaggtgtggggtcattttat

SEQ ID NO: 299372 - DNA, 120 bp, Artificial Sequence
  ENSG00000132613_27 (sequence is synthesized)
gaatataataaaatggagctgactgtggacgaggactaagtgtgggggagaggggacgatacagggtgtgtgtctgggagtgcctgggggacagggaccccccggtggtcctatggcagg

SEQ ID NO: 299373 - DNA, 120 bp, Artificial Sequence
  ENSG00000132613_28 (sequence is synthesized)
atgagaagggagggacttggctcccccagagcccggtggaagctactgttctctccagtgtctcgagcgtagccaaaataaggttgggaggctcccggcctgtctgctgtggtctgagct

SEQ ID NO: 299374 - DNA, 120 bp, Artificial Sequence
  ENSG00000132613_29 (sequence is synthesized)
ggctgcaagcccaggtgggggagcgagtctgggaagattggctttgactctctgttgccggaggagatgccatcccagcacggcccccactgtagtccaggctcgtggtggcagcggggg

SEQ ID NO: 299375 - DNA, 120 bp, Artificial Sequence
  ENSG00000132613_30 (sequence is synthesized)
caaggggaggggcaaggctgcccccaccccacgcaccaagtcacgccaagtctcagcaggtaaaagcacgtgagcctagggcgagcggagggagtcctggtggccccgcaggtcaggagg

SEQ ID NO: 299376 - DNA, 120 bp, Artificial Sequence
  ENSG00000132613_31 (sequence is synthesized)
gaaagcagggctcagagggcatcgtggccccagggcagggtcctacctgggggtcaggagcaccttggtcttgatgattgattgattgattgatagaatggagctgggtctgagcctccc

SEQ ID NO: 299377 - DNA, 120 bp, Artificial Sequence
  ENSG00000132613_32 (sequence is synthesized)
aggcttgagctcctgggagttcttgtgcggtgagctgggcagctcctgggtaggtccgggcaccaagcaggccctgatgtggacagagtcccatcagagggagctgatgaagaatggtcc

SEQ ID NO: 299378 - DNA, 120 bp, Artificial Sequence
  ENSG00000132613_33 (sequence is synthesized)
ctgtaagtaagtcactaggttcaacaactgcctggccgagcactcagcccgtggagctcaggccaacaccagagccccggttttaggggccaggagagcaggtgaccaattatttgggga

SEQ ID NO: 299379 - DNA, 120 bp, Artificial Sequence
  ENSG00000132613_34 (sequence is synthesized)
gtcttgggtagaatttccgccacacattctccccagggctgcaggggtcttccgaggcagggcggtggagcaggattcaggatgtggtgggaatagagtgaggggcagtgggtgggcaga

SEQ ID NO: 299380 - DNA, 120 bp, Artificial Sequence
  ENSG00000132613_35 (sequence is synthesized)
cctgggcgtcagaggtcctgatgggaaaggaggcaggggctacccagagaggggggctcgtgtggcacagcccccaccgactccgccgtccccctcccctgtgagccccgggggctgtac

SEQ ID NO: 299381 - DNA, 120 bp, Artificial Sequence
  ENSG00000132613_36 (sequence is synthesized)
atactctactccatccccttgtccatccctgagaccacccccgccgcccttgcgtcgacttagcaaccacctcataggcccacccacctcgggatccgagccaaccatcccacatcacaa

SEQ ID NO: 299382 - DNA, 120 bp, Artificial Sequence
  ENSG00000132613_37 (sequence is synthesized)
actttggtttgggggactttacgttcgtttaatttctcattttgtacggagaaatattcttttcaaaagcgtcttttgactgaagtaactttcctggtgctgttgttaactcgttccttt

SEQ ID NO: 299383 - DNA, 120 bp, Artificial Sequence
  ENSG00000132613_38 (sequence is synthesized)
ttttaatttattcccccaccccaggcagccctcctggttcctactcaccctccccccctcccccaccctccgtcccatctgaaccatttgtttcttttctttccgtcagattttggaaaa

SEQ ID NO: 299384 - DNA, 120 bp, Artificial Sequence
  ENSG00000132613_39 (sequence is synthesized)
attctcctctcctccccgccccctccacaccatcctccccgatttaaatatagtcactgctacaagtaacagatgcactgtgaagattccagtattaataaaggtgtactgtaattaaca

SEQ ID NO: 299385 - DNA, 120 bp, Artificial Sequence
  ENSG00000132613_40 (sequence is synthesized)
tgtgcagcctggcgcagccagccaccaccaccgctcgcctctccagcgtttcctcccatgactctggcttcgtctcccaggacgccacctactccaagcccccctcgcctatgccttcag

SEQ ID NO: 299386 - DNA, 120 bp, Artificial Sequence
  ENSG00000132622_0 (sequence is synthesized)
acgtcgagggctgcggccgccgcagcgggcacggccaacgagctgcgggcccgggatcgcggcggctggacggggctggagctgtcgggagggcggagctacagggcctgcaaggatgtt

SEQ ID NO: 299387 - DNA, 120 bp, Artificial Sequence
  ENSG00000132622_1 (sequence is synthesized)
tgcaaggatgttggctgtcccggagatgggcctgcaggggctgtacatcggctccagcccggagcggtccccagtgcctagcccacccggctccccgaggacccaggaaagctgcggcat

SEQ ID NO: 299388 - DNA, 120 bp, Artificial Sequence
  ENSG00000132622_2 (sequence is synthesized)
tgcccccctcacaccctcgcagtctccaaaacccgaggtccgagccccccagcaggcctccttctctgtggtggtggccattgacttcggcaccacgtctagtggctatgctttcagctt

SEQ ID NO: 299389 - DNA, 120 bp, Artificial Sequence
  ENSG00000132622_3 (sequence is synthesized)
tgccagtgaccctgaggccatccacatgatgaggaaatgggagggcggagacccgggcgtggcccaccagaagaccccgacctgcctgctgctgactccggagggcgccttccacagctt

SEQ ID NO: 299390 - DNA, 120 bp, Artificial Sequence
  ENSG00000132622_4 (sequence is synthesized)
tggctacaccgcccgcgattactaccatgacctggaccccgaagaggcgcgggactggctctacttcgagaagttcaagatgaagatccacagcgccacggatctcaccttgaagaccca

SEQ ID NO: 299391 - DNA, 120 bp, Artificial Sequence
  ENSG00000132622_5 (sequence is synthesized)
gctagaggcagtaaatggaaagacgatgcccgccctggaggtgttcgcccatgccctgcgcttcttcagggagcacgcccttcaggagctgagggagcagagcccatcgctgccagagaa

SEQ ID NO: 299392 - DNA, 120 bp, Artificial Sequence
  ENSG00000132622_6 (sequence is synthesized)
ggacactgtgcgctgggtgttgacggtgcctgccatctggaaacagccagccaagcagttcatgcgggaggctgcctacctggctggactagtgtcccgagagaatgcagagcagctact

SEQ ID NO: 299393 - DNA, 120 bp, Artificial Sequence
  ENSG00000132622_7 (sequence is synthesized)
catcgccctggagcccgaggccgcctcggtatactgccgcaagctgcgcctgcaccagctcctggacctgagtggccgggccccaggtggtgggcgcctgggtgagcgccgctccatcga

SEQ ID NO: 299394 - DNA, 120 bp, Artificial Sequence
  ENSG00000132622_8 (sequence is synthesized)
ctccagcttccgtcaggctcgggagcagctgcgaaggtcccgccacagccgcacgttcctggtggagtcaggcgtaggagagctgtgggcagagatgcaagcaggagaccgctacgtggt

SEQ ID NO: 299395 - DNA, 120 bp, Artificial Sequence
  ENSG00000132622_9 (sequence is synthesized)
ggccgactgcggcggaggcaccgtggacctgacggtgcaccagctggagcagccccatggcaccctcaaggagctctacaaggcatctgggggcccttatggcgcggtgggcgtggacct

SEQ ID NO: 299396 - DNA, 120 bp, Artificial Sequence
  ENSG00000132622_10 (sequence is synthesized)
ggccttcgagcagctgctgtgccgcatcttcggcgaggacttcatcgccaccttcaaaaggcaacggccggcagcctgggtagatctgaccatcgccttcgaggctcgcaagcgcactgc

SEQ ID NO: 299397 - DNA, 120 bp, Artificial Sequence
  ENSG00000132622_11 (sequence is synthesized)
tggcccacaccgtgcaggggcgctcaacatctcgctgcccttctccttcattgacttctaccgcaagcagcggggccacaacgtggagaccgctctgcgcaggagcagcgtgaacttcgt

SEQ ID NO: 299398 - DNA, 120 bp, Artificial Sequence
  ENSG00000132622_12 (sequence is synthesized)
gaagtggtcctcacaggggatgctccgaatgtcttgtgaagccatgaacgagctctttcagcccaccgtcagcgggatcatccagcacatagaggccctgctggcacggccggaggtgca

SEQ ID NO: 299399 - DNA, 120 bp, Artificial Sequence
  ENSG00000132622_13 (sequence is synthesized)
ctgttcctagtgggcggcttcgccgagtcagcggtgctgcagcacgcggtgcaggcggcgctgggcgcccgcggtctgcgtgtcgtggtcccgcacgacgtgggcctcaccatcctcaaa

SEQ ID NO: 299400 - DNA, 120 bp, Artificial Sequence
  ENSG00000132622_14 (sequence is synthesized)
ggcgcggtgctgttcggccaggcgccgggcgtggtgcgggtccgccgctcgccgctcacctatggcgtgggcgtgctcaaccgctttgtgcctgggcgccacccgcccgaaaagctgctg

SEQ ID NO: 299401 - DNA, 120 bp, Artificial Sequence
  ENSG00000132622_15 (sequence is synthesized)
gttcgcgacggccgccgctggtgcaccgacgtcttcgagcgcttcgtggccgccgagcagtcggtggccctgggcgaggaggtgcggcgcagctactgcccggcgcgtcccggccagcgg

SEQ ID NO: 299402 - DNA, 120 bp, Artificial Sequence
  ENSG00000132622_16 (sequence is synthesized)
cgcgtactcatcaacctgtactgctgcgcggcagaggatgcgcgcttcatcaccgaccccggcgtgcgcaaatgcggcgcgctcagcctcgagcttgagcccgccgactgcggccaggac

SEQ ID NO: 299403 - DNA, 120 bp, Artificial Sequence
  ENSG00000132622_17 (sequence is synthesized)
accgccggcgcgcctcccggccgccgcgagatccgcgccgccatgcagtttggcgacaccgaaattaaggtcaccgccgtcgacgtcagcaccaatcgctccgtgcgcgcgtccatcgac

SEQ ID NO: 299404 - DNA, 120 bp, Artificial Sequence
  ENSG00000132622_18 (sequence is synthesized)
tttctttccaactgagggcgcgccggcgcggtgccagcgccgtctgcccggccccgccctctttcggttcaggggcctgcggagcgggttggggcgggggaaacgatagttctgcagtct

SEQ ID NO: 299405 - DNA, 120 bp, Artificial Sequence
  ENSG00000132622_19 (sequence is synthesized)
gcgcctttccacgccctccagccccgggggagataaggtcatgggagagtgggtggggacacacccagagactggctttgggattgggcactggtccgctgactgccaggctgaagggac

SEQ ID NO: 299406 - DNA, 120 bp, Artificial Sequence
  ENSG00000132622_20 (sequence is synthesized)
ccgccaaggactgaacgggtaagagaagaggtttgcaagacagagcgcgcagcccggcaaggggcatgtgaccccgaaggaagaacgcaacagaagagtcctggtctgaacttggccgag

SEQ ID NO: 299407 - DNA, 120 bp, Artificial Sequence
  ENSG00000132622_21 (sequence is synthesized)
taggggtgggggtgggatggcaggaggagccgcaggaggaaggaggttgtgcagggtctggacctgcagggctgaagttcactcatcgaccgactcagccccaaccgggagccaggcaga

SEQ ID NO: 299408 - DNA, 120 bp, Artificial Sequence
  ENSG00000132622_22 (sequence is synthesized)
aaaaccctgtgccgtaggaaagtgactggaagtggactccagagggacaggtgtggtggcacagtcctggtgtggtgctgaccacccaaatatgactgtgaattgtggaaagggcagtag

SEQ ID NO: 299409 - DNA, 120 bp, Artificial Sequence
  ENSG00000132622_23 (sequence is synthesized)
atctctaatgtggaggtgggaacattattgtggtggaggcaattatgagggtagcatttctttcgagacaaaacacccgtctgggaaggccccaaggtcagcttatgaaggaccccactt

SEQ ID NO: 299410 - DNA, 120 bp, Artificial Sequence
  ENSG00000132622_24 (sequence is synthesized)
gcaccccaccccagccatggaagagcagctggagggtggatggggaggccagagggagcaatgaggggtggtcccagctctgctattgactcggtatgcctttaggacattctcttaccg

SEQ ID NO: 299411 - DNA, 120 bp, Artificial Sequence
  ENSG00000132622_25 (sequence is synthesized)
ctcatgggcctcagtttcctaaagtgtgaaatgtcaggcacttccctctaactggcatgcaacagccccacctgcctgagagccctgaggtgacaataaaacatttatgctcaaggggaa

SEQ ID NO: 299412 - DNA, 120 bp, Artificial Sequence
  ENSG00000132623_0 (sequence is synthesized)
ccccgccccctgcgctcacctgcccgcgcgctcgccttccggggacccggggcccatggacacatacacccagccctgctgtcccgcgcgccagctcaccagccctacccaagggacatc

SEQ ID NO: 299413 - DNA, 120 bp, Artificial Sequence
  ENSG00000132623_1 (sequence is synthesized)
attcacgcctgggcgcctccgccgggctccgggagcccaaggtcgcggctgggccagcgctgagcgtcagaggacgagagcaggggcctccccggtcgccccagcaggcccaggcacata

SEQ ID NO: 299414 - DNA, 120 bp, Artificial Sequence
  ENSG00000132623_2 (sequence is synthesized)
ggtgcccagagatccctggcttctgatcgcccggaagactaagagctttagttttggtccagaaagcattttcaaggagctggtcaagcatggctttagcagataagagacttgagaact

SEQ ID NO: 299415 - DNA, 120 bp, Artificial Sequence
  ENSG00000132623_3 (sequence is synthesized)
tacagatctacaaagttcttcaatgtgtgcggaacaaagacaagaagcagatagagaagctgaccaagcttggataccctgaactaatcaattatacagaacccattaatggacttagtg

SEQ ID NO: 299416 - DNA, 120 bp, Artificial Sequence
  ENSG00000132623_4 (sequence is synthesized)
ctttgcacttagcctcagtttccaatgatattgatatggtcagctttctccttgaccttggtgctcaccctgatgtgcaagaccgaatgggctgtactcccacaatgagggctgcagaac

SEQ ID NO: 299417 - DNA, 120 bp, Artificial Sequence
  ENSG00000132623_5 (sequence is synthesized)
tgggccatgaattgtcaatggaaatattagcaaaggcaaaggctgatatgactatagttgataatgaaggaaaaggtgttttgttttactgcattttaccgactaagcggcattatcgct

SEQ ID NO: 299418 - DNA, 120 bp, Artificial Sequence
  ENSG00000132623_6 (sequence is synthesized)
gtgctctgatcgcccttgaacatggtgcagatgtcaacaattctacctatgaaggaaagccaatattccttagagcttgtgaagatgcacatgatgttaaagatgtgtgcctgacatttt

SEQ ID NO: 299419 - DNA, 120 bp, Artificial Sequence
  ENSG00000132623_7 (sequence is synthesized)
tggaaaaaggagccaatcctaatgcaatcaactcatccacaggccgcacagctttaatggaagcgtcaagagaaggggtagtggaaatagttcgaggcatattggaaagaggaggtgaag

SEQ ID NO: 299420 - DNA, 120 bp, Artificial Sequence
  ENSG00000132623_8 (sequence is synthesized)
tgaatgcatttgacaacgacaggcatcacgctgctcattttgctgctaaaggaggctttttcgatatattgaagcttctttttgcctacaatggagacgtggggctgatttcgataaatg

SEQ ID NO: 299421 - DNA, 120 bp, Artificial Sequence
  ENSG00000132623_9 (sequence is synthesized)
ggaacacaccacttcattatgctgccatgggtggttttgcagactgctgtaaatatatagctcagcgaggatgtgacctgaaatggaagaatttagatcataaaacgcccagggctgtgg

SEQ ID NO: 299422 - DNA, 120 bp, Artificial Sequence
  ENSG00000132623_10 (sequence is synthesized)
ctaaggaaggcggcttcaaagcagcaagcaaagaaatacgccgagcagagagaatcgctaataaactagccaggccaggagccaaaaatccaaatccactgtgggcccttagactgcacg

SEQ ID NO: 299423 - DNA, 120 bp, Artificial Sequence
  ENSG00000132623_11 (sequence is synthesized)
attggtccgtagaacgtgaggctttcctccgggaagcctttgcggttttagacaggggtgatggaagcatcagcaagaacgacttcgtgatggtgttggaggaaaggcaggattatgcaa

SEQ ID NO: 299424 - DNA, 120 bp, Artificial Sequence
  ENSG00000132623_12 (sequence is synthesized)
gctcagaacagctggctgccatcgctcaccttcatgagaaaacccggggaggaggggtcaatattaatgaattctttaaaggaaccagatatttaaacaagtcttttgtcttaggatcgt

SEQ ID NO: 299425 - DNA, 120 bp, Artificial Sequence
  ENSG00000132623_13 (sequence is synthesized)
atggacctaagaaaaaggaaaaagggatgggcaaaaaaggaaagaaagggaaatttgtcttaccccttccaatctgtgtcattcctgagtacgcgtttccacgccggcaggatggtgggc

SEQ ID NO: 299426 - DNA, 120 bp, Artificial Sequence
  ENSG00000132623_14 (sequence is synthesized)
caccgtattacatgattgagacctacaagaatgtcactgatagcagccggtttaatagagatcatcccccagaacatcccattcaggatgactctgtttggtacattgatgattcagaga

SEQ ID NO: 299427 - DNA, 120 bp, Artificial Sequence
  ENSG00000132623_15 (sequence is synthesized)
aggtattttcaaacattaatattatcaccaaagcaggggatctggcttctctgaaaaaggcctttgaatcaggaatacctgtggatatgaaggataattattacaaaactccgctaatga

SEQ ID NO: 299428 - DNA, 120 bp, Artificial Sequence
  ENSG00000132623_16 (sequence is synthesized)
cggcgtgtgcaagtggaaacatagatgtggtcaagtttcttcttgaaaaaggagctaacgttaatgcaacagataactttctgtggactccacttcattttgcatgccatgcaggccaac

SEQ ID NO: 299429 - DNA, 120 bp, Artificial Sequence
  ENSG00000132623_17 (sequence is synthesized)
aagacattgttgagcttcttgttgaatctggagctttaatagatgcagcttcaatcaacaactcaactcctttaaatagagccattgaaagctgcagactggatacagtaaaatacctac

SEQ ID NO: 299430 - DNA, 120 bp, Artificial Sequence
  ENSG00000132623_18 (sequence is synthesized)
ttgatattggtgctaaattccagctggaaaatagaaaagggcatagtgccatggacgttgcaaaggcatatgctgattatagaataattgatctgattaaagaaaagctagataacttgc

SEQ ID NO: 299431 - DNA, 120 bp, Artificial Sequence
  ENSG00000132623_19 (sequence is synthesized)
cgaaaccagcagaaaatcaaaaactaaaaggcaagacacctcctatactgaagactgaaggccctgaaattaagaaagaagaggaactgctgtcatcaatttatggtgtaccaaccacat

SEQ ID NO: 299432 - DNA, 120 bp, Artificial Sequence
  ENSG00000132623_20 (sequence is synthesized)
cagagggaaagaaagtacagaagggtaatgtggttcatctgaattcattgattaccagtggttatactaagaaagtggatatcacatttattccacggaggatttggagtcctgaagcca

SEQ ID NO: 299433 - DNA, 120 bp, Artificial Sequence
  ENSG00000132623_21 (sequence is synthesized)
caacagcagagctgatcaggaagagggaactacggcgagagaggtttacacatgaggtggacttcgacgattttatgatgccttttcagaagaacatcacagagaaagctcgagcactgg

SEQ ID NO: 299434 - DNA, 120 bp, Artificial Sequence
  ENSG00000132623_22 (sequence is synthesized)
atagcagttatttcttggggtaaatgctttgaggcccagggaccaatctttggagaaagtagatatttccatcaaagccaaagcaatccatacaccaagaacttgttaccaagaatttct

SEQ ID NO: 299435 - DNA, 120 bp, Artificial Sequence
  ENSG00000132623_23 (sequence is synthesized)
ttttgctttaacaactataaatattcttagctgtctagagaaaagatgtatgttattttgaaatgaatggtatgtcattctggataaatccccaagcccctttatgaatgtagtgaaata

SEQ ID NO: 299436 - DNA, 120 bp, Artificial Sequence
  ENSG00000132623_24 (sequence is synthesized)
catggcatgtgggttataaacgttgctgtcaaaagatttaccaggtctacaccattatgcttattatttttttaattatcctttttatttattaaatagagacagagtctcactatattg

SEQ ID NO: 299437 - DNA, 120 bp, Artificial Sequence
  ENSG00000132623_25 (sequence is synthesized)
ctttttatttattaaatagagacagagtctcactatattgccccagctggtctcgaactcttgagctcaggcagtcctcccaacttggccgtcgaaagtgctgggattataggcatgagc

SEQ ID NO: 299438 - DNA, 120 bp, Artificial Sequence
  ENSG00000132623_26 (sequence is synthesized)
gaaattgatgaaacaatttaggttttggaaaaagaagtaatatttaatcttttaaggaaggagtttatttctcacatgccattataaactatgtgtattagataccttgggttgaataca

SEQ ID NO: 299439 - DNA, 120 bp, Artificial Sequence
  ENSG00000132623_27 (sequence is synthesized)
gtgtattagataccttgggttgaatacacttttaacagccctagatcgatagccctagccctagatagatagccctagccctagatagatagctattaggttggtgcaaaagtaattgtg

SEQ ID NO: 299440 - DNA, 120 bp, Artificial Sequence
  ENSG00000132623_28 (sequence is synthesized)
cataacctttaattgcagcaaaaaccgcaattacttttgctccaacctgacagctaggtatctagctagctagaaaggcagatagacagatatatagatgatagatagatagatgataga

SEQ ID NO: 299441 - DNA, 120 bp, Artificial Sequence
  ENSG00000132623_29 (sequence is synthesized)
agatagatagatagatagatagagatttattgcaaataattggtttacataattttgggccccagatggttaagtgctaaatttgtagggtaggctatcaggaagtgcaggctggaaaca

SEQ ID NO: 299442 - DNA, 120 bp, Artificial Sequence
  ENSG00000132623_30 (sequence is synthesized)
aggctggaaacatgcaggagctgtccctgaagtccacaagtggaatttcttcttcatcatggaaacctcagttttgttcatacacctaaatacttcagtatgtctttcctaaaataaaag

SEQ ID NO: 299443 - DNA, 120 bp, Artificial Sequence
  ENSG00000132623_31 (sequence is synthesized)
gcatccatttacctaaccagattacgattgtgaaaatttcaactgttgttaaagcgactgatgggatcagtttcacctagattatctaaagcagtctcctttacataaagtcaatgaatt

SEQ ID NO: 299444 - DNA, 120 bp, Artificial Sequence
  ENSG00000132623_32 (sequence is synthesized)
gtaaatattggttgcatgtacacaattccttcaccacaacacctaagattagtatttgattgagttactgggtgctacaacctagccaagttgagtcataaaactgaccatctctggagg

SEQ ID NO: 299445 - DNA, 120 bp, Artificial Sequence
  ENSG00000132623_33 (sequence is synthesized)
tgtactctgcagtaaaaagctagctgaggcattattcacaccaagaaatgcagtgggtaccgaacaggagctccaaaaatatccaacgtctcattgacagaaagaagccactttagaatc

SEQ ID NO: 299446 - DNA, 120 bp, Artificial Sequence
  ENSG00000132623_34 (sequence is synthesized)
tgccttaccagaaggcaccaattgcagattacagctctgtcagtcacgtatggattaaacccctttcctctaacctcctccctctctttccaaccttggagggaccttccacaggagcca

SEQ ID NO: 299447 - DNA, 120 bp, Artificial Sequence
  ENSG00000132623_35 (sequence is synthesized)
gttagggaggagaagggaagagagagaatgaagcaggtaaccaggcccacccctctggaggagacagacctgaacaggggttgcttacaagcattgcatttggatcccaagatttgctat

SEQ ID NO: 299448 - DNA, 120 bp, Artificial Sequence
  ENSG00000132623_36 (sequence is synthesized)
tacaactaaattttgtctgttttgtaaggttttggttggtttttttgttctctcttttctttttgttttgacataatttcatatttatggaaaagttgcaataatttgacaaagaattct

SEQ ID NO: 299449 - DNA, 120 bp, Artificial Sequence
  ENSG00000132623_37 (sequence is synthesized)
tatatgccctttacccagattacctaaatgttaaccacttaccacatttgctctatctctttctccctctacatatatgcatatgtatgtttaatttttgtccccgaactatctgtgtgt

SEQ ID NO: 299450 - DNA, 120 bp, Artificial Sequence
  ENSG00000132623_38 (sequence is synthesized)
ccgttgaagacatgatgaagacatgatgttcttcacatgatgttttcatatttgtgtgtcagttgaagacatgatgttttaaatatttcattgtgtatttcctaaaatcacgatgttctt

SEQ ID NO: 299451 - DNA, 120 bp, Artificial Sequence
  ENSG00000132623_39 (sequence is synthesized)
ttgcataacaatattaccattggcaaactaaggaaattaacacttaagtgaactatttaatctatagaccttattcagattttgctatttatcccaataatttcctttgtactcccaggt

SEQ ID NO: 299452 - DNA, 120 bp, Artificial Sequence
  ENSG00000132623_40 (sequence is synthesized)
catgaaatacattcgcttgccccatctctttagtctcttttagtttagaacaacctgtatttcttgtttgtttgtttgtttgtttgtttatgacagtatataagaagaacacaagccact

SEQ ID NO: 299453 - DNA, 120 bp, Artificial Sequence
  ENSG00000132623_41 (sequence is synthesized)
tttatcttgtaaaatgtctctcaactttggtttgtcttaaatgtcttcaagaatagattcaggtgatgcttttggggcagcagtgctacagatgtcattgcacccttctcagtacatcat

SEQ ID NO: 299454 - DNA, 120 bp, Artificial Sequence
  ENSG00000132623_42 (sequence is synthesized)
atcaggaggcacatgatgttgatacctgatataaactttaactgcatttgcagttgagagaaatgtaaataaaagtaaagctgcagtaataaatcataactgcataaaattaactgtagt

SEQ ID NO: 299455 - DNA, 120 bp, Artificial Sequence
  ENSG00000132623_43 (sequence is synthesized)
acatactgtacaactgtaataatttcatagccacctcctgttgctattgtgttgagttcaattgttgtcttttctcaagcttactttattgcacaaatacagtatttataacatacaaaa

SEQ ID NO: 299456 - DNA, 120 bp, Artificial Sequence
  ENSG00000132623_44 (sequence is synthesized)
caaacatgttggcaaaactgattattttcattgtggatctcacgcttgctttggccatttttgttatcttttatttaatggctgccactgtttttttcatctcggtcattttctatattt

SEQ ID NO: 299457 - DNA, 120 bp, Artificial Sequence
  ENSG00000132623_45 (sequence is synthesized)
tcaaaagggagatggaaaaaaaactttgacttcaacaagcgccgaatctgggcgctggattctagcaatgctactgaggagcctttggcaggtggcgcagagaaagtcagctccaagctg

SEQ ID NO: 299458 - DNA, 120 bp, Artificial Sequence
  ENSG00000132623_46 (sequence is synthesized)
cattgtccagctgtaggagaagggtctttcctgcccaaggacagtggtcctctcttctaaagagcaaggagctctctgaggtggaggaggcttgtgaagacttcccagaacactgcaccc

SEQ ID NO: 299459 - DNA, 120 bp, Artificial Sequence
  ENSG00000132623_47 (sequence is synthesized)
acctgaccaagaggtactttttaaggtgttttgttttactgcattttaccgactaagcggcattatcgctgtgctctgatcgcccttgaacatggtgcagatgtcaacaattctacctat

SEQ ID NO: 299460 - DNA, 120 bp, Artificial Sequence
  ENSG00000132631_0 (sequence is synthesized)
agatggcaaggtccaggggactagcacaggaagatgtggaagagaagtgaccatcaacccaagatcaaagcagaggatggacctctggtgggccagttcgaggttctgggttcagttcca

SEQ ID NO: 299461 - DNA, 120 bp, Artificial Sequence
  ENSG00000132631_1 (sequence is synthesized)
gaacctgccatgccacatcctctagagctgtcagaatttgagagcttcccagtgtttcaggacattaggcttcacatcagggaagtgggagctcaattggtcaagaaagtcaatgccgtc

SEQ ID NO: 299462 - DNA, 120 bp, Artificial Sequence
  ENSG00000132631_2 (sequence is synthesized)
tacaatcccggagtctgtctttatggagctggttttgggcaaaatgaacccgcagaaggctttccttgccggaaagttcaaagtgagtggcaaggttctgcttagctggaagctggaaag

SEQ ID NO: 299463 - DNA, 120 bp, Artificial Sequence
  ENSG00000132631_3 (sequence is synthesized)
ggttttcaaagactgggctaaattttaagcatgcaaaaataccaaggaagaacttctcttcgatgataatgtcgagtggaaatcatgcttaatctgaagattaaagtaaaaagtatccaa

SEQ ID NO: 299464 - DNA, 120 bp, Artificial Sequence
  ENSG00000132635_0 (sequence is synthesized)
accactgtgggcagcctcacttggctgccgccccgagaccccagcccgtacctgggcttcgcgcccgccaagtgggcccagccctggctcctgcgccctgtggcggccacctccatcgcc

SEQ ID NO: 299465 - DNA, 120 bp, Artificial Sequence
  ENSG00000132635_1 (sequence is synthesized)
ttgctttcccttcgggcactgggggtcgctcagggcgggacatgggtgaacggaagtggaagctgtgagcgtcgcagcccgaggcgccgaggcctgaggcgccgtcggggccacagcgac

SEQ ID NO: 299466 - DNA, 120 bp, Artificial Sequence
  ENSG00000132635_2 (sequence is synthesized)
gctcgcatggagagcgctgggcgctgggctgtgcaccgacggctaacctggacccacggtctctgcggggcgggagctttgcagaaccgactggccgactggggcgcgggaacatgaggc

SEQ ID NO: 299467 - DNA, 120 bp, Artificial Sequence
  ENSG00000132635_3 (sequence is synthesized)
ttggctaggagcccgctgcgggccaggcgcgcggtgcgcaggcatacccgggtcgcgggtgaacaccgcggagccccgggacttgcctgtcgttgctggtggcggcatggtcttctgtct

SEQ ID NO: 299468 - DNA, 120 bp, Artificial Sequence
  ENSG00000132635_4 (sequence is synthesized)
gtcgagcgaggagccgcgccgcccgctgcgaagcgacatggtccacttccaggcctcggaagtccagcagctgctacacaacaagttcgtggtcatcttgggggactccattcagagggc

SEQ ID NO: 299469 - DNA, 120 bp, Artificial Sequence
  ENSG00000132635_5 (sequence is synthesized)
tgtgtacaaggacctggtgctcttgctccagaaagactcactgctcacagctgcccagctgaaagccaagggggagctgagctttgaacaggaccagctggtggctgggggccagctggg

SEQ ID NO: 299470 - DNA, 120 bp, Artificial Sequence
  ENSG00000132635_6 (sequence is synthesized)
cgagctgcacaacgggacacagtatcgtgaggtccgccagttctgctcgggctctggccaccaccttgtgcgcttctacttcctcactcgtgtttactccgagtaccttgaggatgttct

SEQ ID NO: 299471 - DNA, 120 bp, Artificial Sequence
  ENSG00000132635_7 (sequence is synthesized)
ggaagagctgacatatggacctgccccggacctggtgatcatcaactcctgcctctgggatctctccagatatggtcgctgctcaatggagagctaccgggagaacctggagcgggtgtt

SEQ ID NO: 299472 - DNA, 120 bp, Artificial Sequence
  ENSG00000132635_8 (sequence is synthesized)
ccctcggggaacgtatcactgggggtttcctcctgccagagctccagcccctggcaggctccctgcggcgggatgtggttgaagggaacttctacagtgctacgctggccggggaccact

SEQ ID NO: 299473 - DNA, 120 bp, Artificial Sequence
  ENSG00000132635_9 (sequence is synthesized)
gctttgatgtcctagacctccactttcacttccggcatgcagtacagcaccgtcatcgggatggtgtccactgggaccagcatgcacaccgccacctctcacacctgcttctgacccatg

SEQ ID NO: 299474 - DNA, 120 bp, Artificial Sequence
  ENSG00000132635_10 (sequence is synthesized)
tggctgacgcctggggcgtggagctgcccaagcgtggctatccccctgacccgtggattgaggactgggcagagatgaatcatccattccagggaagccataggcagaccccagacttcg

SEQ ID NO: 299475 - DNA, 120 bp, Artificial Sequence
  ENSG00000132635_11 (sequence is synthesized)
gggagcacctggccttgctcccacccccaccttcttctttgcctcctcccatgccttttccctacccgcttcctcagccctcgccacctcccctcttcccacccctgccccaggataccc

SEQ ID NO: 299476 - DNA, 120 bp, Artificial Sequence
  ENSG00000132635_12 (sequence is synthesized)
cttttttcccaggccagcccttcccaccccatgaattcttcaactataatccagtggaggacttctcgatgccaccccacttaggatgtggccctggagtgaactttgtgcctggccctc

SEQ ID NO: 299477 - DNA, 120 bp, Artificial Sequence
  ENSG00000132635_13 (sequence is synthesized)
tgccacctccaatccctggccctaatccccatggtcagcactggggcccagtggtccaccgggggatgccacgctatgttcctaacagcccctaccatgtgcggagaatgggggggccct

SEQ ID NO: 299478 - DNA, 120 bp, Artificial Sequence
  ENSG00000132635_14 (sequence is synthesized)
gcaggcagcggctcagacactcagagagactgatccacacatacaaactggacagacggcctcctgcccattcggggacatggcctgggtagactggatcttgggctgggactggatgtg

SEQ ID NO: 299479 - DNA, 120 bp, Artificial Sequence
  ENSG00000132635_15 (sequence is synthesized)
ccaatggcccttcagggcctgcctggcacctcaggtactgggctagggtgtctgctatgcctggtattgttcttgtccattgctgtcaccaataaaggcatggaagaacagagtgacaaa

SEQ ID NO: 299480 - DNA, 120 bp, Artificial Sequence
  ENSG00000132635_16 (sequence is synthesized)
gatcccgcccccctcggagcgcccctgtggtctgacttcagcagcactttccggcaggagactgggcactcgctgtcacccgcgagctgcctccctcagcgagatctgagcatctttccg

SEQ ID NO: 299481 - DNA, 120 bp, Artificial Sequence
  ENSG00000132635_17 (sequence is synthesized)
gaggctaacagacctgggcttcggggtgaccactgtgcttgcctcagtttccttttctggagcaggggaaggcccggctccctgcccaaaggcggctgtgcgctaagtggcagacgctcg

SEQ ID NO: 299482 - DNA, 120 bp, Artificial Sequence
  ENSG00000132635_18 (sequence is synthesized)
gggagagccggcgcggggcggaccccagcgccagtagtgacaggggcgaacgccgccgggagactccagccggcgggcgagcaggcctgtcgttgctggtggcggcatggtcttctgtct

SEQ ID NO: 299483 - DNA, 120 bp, Artificial Sequence
  ENSG00000132639_0 (sequence is synthesized)
atctttgatgagggcagagctcacgttgcattgaagacgaaacctcggggaggtcaggcgctgtctttccttccctccctgctcggcggctccaccacagttgcaacctgcagaggcccg

SEQ ID NO: 299484 - DNA, 120 bp, Artificial Sequence
  ENSG00000132639_1 (sequence is synthesized)
gagaacacaaccctcccgagaagcccaggtccagagccaaacccgtcactgaccccccagcccaggcgcccagccactccccaccgctaccatggccgaagacgcagacatgcgcaatga

SEQ ID NO: 299485 - DNA, 120 bp, Artificial Sequence
  ENSG00000132639_2 (sequence is synthesized)
gctggaggagatgcagcgaagggctgaccagttggctgatgagtcgctggaaagcacccgtcgtatgctgcaactggttgaagagagtaaagatgctggtatcaggactttggttatgtt

SEQ ID NO: 299486 - DNA, 120 bp, Artificial Sequence
  ENSG00000132639_3 (sequence is synthesized)
ggatgaacaaggagaacaactggaacgcattgaggaagggatggaccaaatcaataaggacatgaaagaagcagaaaagaatttgacggacctaggaaaattctgcgggctttgtgtgtg

SEQ ID NO: 299487 - DNA, 120 bp, Artificial Sequence
  ENSG00000132639_4 (sequence is synthesized)
tccctgtaacaagcttaaatcaagtgatgcttacaaaaaagcctggggcaataatcaggacggagtggtggccagccagcctgctcgtgtagtggacgaacgggagcagatggccatcag

SEQ ID NO: 299488 - DNA, 120 bp, Artificial Sequence
  ENSG00000132639_5 (sequence is synthesized)
tggcggcttcatccgcagggtaacaaatgatgcccgagaaaatgaaatggatgaaaacctagagcaggtgagcggcatcatcgggaacctccgtcacatggccctggatatgggcaatga

SEQ ID NO: 299489 - DNA, 120 bp, Artificial Sequence
  ENSG00000132639_6 (sequence is synthesized)
gatcgatacacagaatcgccagatcgacaggatcatggagaaggctgattccaacaaaaccagaattgatgaggccaaccaacgtgcaacaaagatgctgggaagtggttaagtgtgccc

SEQ ID NO: 299490 - DNA, 120 bp, Artificial Sequence
  ENSG00000132639_7 (sequence is synthesized)
acccgtgttctcctccaaatgctgtcgggcaagatagctccttcatgcttttctcatggtattatctagtaggtctgcacacataacacacatcagtccacccccattgtgaatgttgtc

SEQ ID NO: 299491 - DNA, 120 bp, Artificial Sequence
  ENSG00000132639_8 (sequence is synthesized)
cagcttcccaacaatactttgtgtcttttgttctctcttggtctctttctttccaaaggttgtacatagtggtcatttggtggctctaactccttgaggtcttgagtttcatttttcatt

SEQ ID NO: 299492 - DNA, 120 bp, Artificial Sequence
  ENSG00000132639_9 (sequence is synthesized)
ttctctcctcggtggcatttgctgaataacaacaatttaggaatgctcaatgtgctgttgattctttcaatccacagtattgttcttgtaaaactgtgacattccacagagttactgcca

SEQ ID NO: 299493 - DNA, 120 bp, Artificial Sequence
  ENSG00000132639_10 (sequence is synthesized)
cggtcctttgagtgtcaggctctgaatctctcaaaatgtgccgtctttggttcctcatggctgttatctgtctttatgatttcatgattagacaatgtggaattacataacaggcattgc

SEQ ID NO: 299494 - DNA, 120 bp, Artificial Sequence
  ENSG00000132639_11 (sequence is synthesized)
actaaaagtgatgtgatttatgcatttatgcatgagaactaaatagatttttagattcctacttaaacaaaaactttccatgacagtagcatactgatgagacaacacacacacacacaa

SEQ ID NO: 299495 - DNA, 120 bp, Artificial Sequence
  ENSG00000132639_12 (sequence is synthesized)
aacaacagcaacaacaacagaacaacaacaaagcatgctcagtattgagacactgtcaagattaagttataccagcaaaagtgcagtagtgtcacttttttcctgtcaatatatagagac

SEQ ID NO: 299496 - DNA, 120 bp, Artificial Sequence
  ENSG00000132639_13 (sequence is synthesized)
ttctaaatcataatcatccttttttaaaaaaaagaattttaaaaaagatggatttgacacactcaccatttaatcatttccagcaaaatatatgtttggctgaaattatgtcaaatggat

SEQ ID NO: 299497 - DNA, 120 bp, Artificial Sequence
  ENSG00000132639_14 (sequence is synthesized)
gtaatatagggtttgtttgctgcttttgatggctatgttttggagagagcaatcttgctgtgaaacagtgtggatgtaaattttataaggctgactcttactaaccaccatttcccctgt

SEQ ID NO: 299498 - DNA, 120 bp, Artificial Sequence
  ENSG00000132639_15 (sequence is synthesized)
ggtttgttatcagtacaattctttgttgcttaatctagagctatgcacaccaaattgctgagatgtttagtagctgataaagaaaccttttaaaaaaataatataaatgaatgaaatata

SEQ ID NO: 299499 - DNA, 120 bp, Artificial Sequence
  ENSG00000132639_16 (sequence is synthesized)
aactgtgagataaatatcattatagcatgtaatattaaattcctcctgtctcctctgtcagtttgtgaagtgattgacattttgtagctagtttaaaattattaaaaattatagactcca

SEQ ID NO: 299500 - DNA, 120 bp, Artificial Sequence
  ENSG00000132639_17 (sequence is synthesized)
tgaacaaggagaacaactcgatcgtgtcgaagaaggcatgaaccatatcaaccaagacatgaaggaggctgagaaaaatttaaaagatttagggaaatgctgtggccttttcatatgtcc

SEQ ID NO: 299501 - DNA, 120 bp, Artificial Sequence
  ENSG00000132639_18 (sequence is synthesized)
gggtaaatacaagtattggtgcacttagggtgcggtattccgtgtgtgcacgtctggtgggggctttataaagtgttttcgaggtgagctgctggggaaaagggaaacgggagccctgca

SEQ ID NO: 299502 - DNA, 120 bp, Artificial Sequence
  ENSG00000132639_19 (sequence is synthesized)
gagctggaggagatgcagcgaagggctgaccagttggctgatgagtcgctggaaagcacccgtcgtatgctgcaactggttgaagaggtaagaagtgacagtattttaagataaaggaac

SEQ ID NO: 299503 - DNA, 120 bp, Artificial Sequence
  ENSG00000132639_20 (sequence is synthesized)
cagtgtggatgtagcctatcagaaaggcacagaatgagggagatgctgtatttaagttgccagatagccatgaagacaccttcaccctccttcccagcccaagccacctctgtagtctgg

SEQ ID NO: 299504 - DNA, 120 bp, Artificial Sequence
  ENSG00000132639_21 (sequence is synthesized)
tctgggaagcagagaataatagaatttccaagtctgtgctctcaagaaatcacagacgattgtatcactttaagcaaattagagcaattcttaatatacaaaggaattatctacataaaa

SEQ ID NO: 299505 - DNA, 120 bp, Artificial Sequence
  ENSG00000132639_22 (sequence is synthesized)
cttttactttttgtctctgtggacaaaggtttgtacatcaactctggatgtatggtgactgtttggaagtaccgatatattatctaattcaaatcactctagaggcaatgcaaagaccat

SEQ ID NO: 299506 - DNA, 120 bp, Artificial Sequence
  ENSG00000132639_23 (sequence is synthesized)
cactcttggccaaccaccaatcctttatgtccttcatggagctttggaaatgttagttccacacgtgttgggaaaaaaaaatattccacagggatctttgcatgatggtgtgtaaaaact

SEQ ID NO: 299507 - DNA, 120 bp, Artificial Sequence
  ENSG00000132639_24 (sequence is synthesized)
tggttgaggatgttttcttgatgacagtgtgttgctgtggtgtgatgtgcacactctacttggcagtcttgttttgtgtctgtctgccagtatgtttttctctgttttatgtctccaaat

SEQ ID NO: 299508 - DNA, 120 bp, Artificial Sequence
  ENSG00000132639_25 (sequence is synthesized)
ataatcacatcactaaaatagaattaaatgtcctccagctaccttaatccttgtccaaaatccaaactaaaccacaaaacaaaccaaaacaagaacaaccttgtgggcaaagattgcagt

SEQ ID NO: 299509 - DNA, 120 bp, Artificial Sequence
  ENSG00000132639_26 (sequence is synthesized)
ccattgcaatggattcgattggaagtgaaatgttgagtagctgaggcatggtggtggccaactgtttgggtctggattatgatatatcggtattatctaatgcctcgacttaaaactcat

SEQ ID NO: 299510 - DNA, 120 bp, Artificial Sequence
  ENSG00000132640_0 (sequence is synthesized)
attgcgcatgccccgtatccaaggccgcctccgggagcacctcccatgccgctccgctccctcccggtgaccgggcacgcgcgctcgctcccgcagagcgtgccctgcgtgcgggtgccc

SEQ ID NO: 299511 - DNA, 120 bp, Artificial Sequence
  ENSG00000132640_1 (sequence is synthesized)
agcccgccgggcgctggatctccgagtgccccggccggggcctgaggagcgggcacagggcaaggcggcggacggctgcgtcgcccgaggcgaggaggagcgctggcgagacggtaaaga

SEQ ID NO: 299512 - DNA, 120 bp, Artificial Sequence
  ENSG00000132640_2 (sequence is synthesized)
aagaacaggtccaagaaaagctcaaagaaagcaaataccagcagcagcagtagcaacagcagcaagttgccaccagtttgttatgaaataattaccttgaagactaaaaagaagaagatg

SEQ ID NO: 299513 - DNA, 120 bp, Artificial Sequence
  ENSG00000132640_3 (sequence is synthesized)
gctgctgatatattcccccgtaaaaagccagccaactccagcagcaccagcgtccagcagtaccaccagcagaatctcagtaacaacaaccttatcccggccccaaactggcagggtctt

SEQ ID NO: 299514 - DNA, 120 bp, Artificial Sequence
  ENSG00000132640_4 (sequence is synthesized)
tatcccaccattagagagagaaatgcgatgatgttcaataatgatttgatggcagatgtacattttgtggttgggccaccaggtgggactcaacggttgccaggacacaaatatgtttta

SEQ ID NO: 299515 - DNA, 120 bp, Artificial Sequence
  ENSG00000132640_5 (sequence is synthesized)
gctgttgggagctctgtgttccatgcgatgttttacggagaacttgcagaggacaaagatgaaatccgtataccagatgtcgaacctgctgcttttctcgctatgctgaaatatatctat

SEQ ID NO: 299516 - DNA, 120 bp, Artificial Sequence
  ENSG00000132640_6 (sequence is synthesized)
tgtgatgaaattgacttggctgctgacacagtgctggccacactttatgctgccaaaaagtacattgtccctcaccttgccagagcctgtgttaatttcctggagaccagcctgagtgcc

SEQ ID NO: 299517 - DNA, 120 bp, Artificial Sequence
  ENSG00000132640_7 (sequence is synthesized)
aagaatgcctgtgtgctcctctcccagagctgcctgttcgaggagccagacctgacccagcgttgctgggaggtgattgatgcccaggctgagttagctctcaagtctgagggattctgc

SEQ ID NO: 299518 - DNA, 120 bp, Artificial Sequence
  ENSG00000132640_8 (sequence is synthesized)
gatattgacttccagacactagaaagtattctccgtagggaaactctgaatgccaaagaaattgtggtttttgaggcagctctcaactgggctgaagtagaatgccaacgacaagatctg

SEQ ID NO: 299519 - DNA, 120 bp, Artificial Sequence
  ENSG00000132640_9 (sequence is synthesized)
gcgttgagcattgaaaataaacgcaaggttctaggaaaggcactttacttgatccgcatacccacaatggccctcgatgattttgcaaatggtgctgcacagtccggggtattaactctc

SEQ ID NO: 299520 - DNA, 120 bp, Artificial Sequence
  ENSG00000132640_10 (sequence is synthesized)
aatgagaccaacgacatcttcctctggtatactgcagccaaaaagcctgagcttcagtttgtgagtaaagcccgtaagggccttgtcccccagcgctgtcaccgtttccagtcgtgtgcc

SEQ ID NO: 299521 - DNA, 120 bp, Artificial Sequence
  ENSG00000132640_11 (sequence is synthesized)
tatcgaagcaaccaatggcgctatcgtggtcgctgtgacagcatccagtttgcagttgataaaagagtgttcattgctggctttgggctgtatggctccagctgtggttctgcagaatac

SEQ ID NO: 299522 - DNA, 120 bp, Artificial Sequence
  ENSG00000132640_12 (sequence is synthesized)
agtgccaagattgaacttaagcggcagggcgttgtcctggggcagaacttgagcaagtacttctcagatgggtccagcaatacctttcccgtatggtttgaatacccagtgcagatcgag

SEQ ID NO: 299523 - DNA, 120 bp, Artificial Sequence
  ENSG00000132640_13 (sequence is synthesized)
ccagacaccttctacacagccagtgtgatactggatggcaatgaactcagctactttggacaagaaggcatgacagaagttcagtgtggcaaagtgactgtccagtttcagtgctcctca

SEQ ID NO: 299524 - DNA, 120 bp, Artificial Sequence
  ENSG00000132640_14 (sequence is synthesized)
gatagcaccaatggcactggggtacagggagggcagatccctgaacttatattctatgcttgaaaactcacttcctgaagcagcttgagctccaaagtgcacatctggttccaacttgcc

SEQ ID NO: 299525 - DNA, 120 bp, Artificial Sequence
  ENSG00000132640_15 (sequence is synthesized)
tgatgcttagctcatctgcaaatatgtgatcagtgccggtaatttgtaatgaatgaagcggtaggcaggttctaatttcttttaaccttttaattatgtacaggcaaaaatgcagcattc

SEQ ID NO: 299526 - DNA, 120 bp, Artificial Sequence
  ENSG00000132640_16 (sequence is synthesized)
cgcttttaactatctgcttaaaagagctaacgttcttattaaggctttgtggtttttagagttgcatctatgaacctggggagattatgtgctttcccaagcgttccaccaccctctcag

SEQ ID NO: 299527 - DNA, 120 bp, Artificial Sequence
  ENSG00000132640_17 (sequence is synthesized)
ttttgtccctctgaagataattttggatcaccttgaatttccttttggacgttatttgatgaacagaaataaagtgataacaagagttatttttaaacagaactcctcttaccccccaaa

SEQ ID NO: 299528 - DNA, 120 bp, Artificial Sequence
  ENSG00000132640_18 (sequence is synthesized)
acagataaacctcagtgtacaattttgaaagaagttttgccttgtaatgagtaataatttagaaagtagacagtggttgtgtttggctctcgttttattccttttacatttgttgcttct

SEQ ID NO: 299529 - DNA, 120 bp, Artificial Sequence
  ENSG00000132640_19 (sequence is synthesized)
taaaaaattactaaattcataagatagttaggtattaaacacttcagaatatcaatgtaaaattggaaaataaggaactgggggcatttgtttaggccatgacttctacaagcagatttc

SEQ ID NO: 299530 - DNA, 120 bp, Artificial Sequence
  ENSG00000132640_20 (sequence is synthesized)
ttttcttttagtttagaagacaaaaaatttcaatacagatacttcttttagaagtaaatttttagattttattgtcagtagaaaaaagttaaactcctactaatttaaactaagacagtt

SEQ ID NO: 299531 - DNA, 120 bp, Artificial Sequence
  ENSG00000132640_21 (sequence is synthesized)
taaaaaggaagcctgaaaaagactcatactacaaataatttaattgatggcatataagaatatgcagtttgaaaaagccaaactcttctctccacttagcttttgatccccactgtttgc

SEQ ID NO: 299532 - DNA, 120 bp, Artificial Sequence
  ENSG00000132640_22 (sequence is synthesized)
ttatttgtataagtcatactgtgtagaatttctattttctttttccccattaaaagaggaccaaacaattctttatacaaatggagtagcaactagttttgtagcactacatttaatgta

SEQ ID NO: 299533 - DNA, 120 bp, Artificial Sequence
  ENSG00000132640_23 (sequence is synthesized)
atgagatacctttgttcatttttttaaatttgaaatatactttacctgatccactttgattgtatactatattctttgttaattttaattttgtcctgttcctagactgctagaatctgg

SEQ ID NO: 299534 - DNA, 120 bp, Artificial Sequence
  ENSG00000132640_24 (sequence is synthesized)
cccctggccatcttaaagtgccaacatatgcctgcagggtttataaaaaatggcctggagtgacacattttattatacctaatattcactgcatcagtatcacatctagctcccttactt

SEQ ID NO: 299535 - DNA, 120 bp, Artificial Sequence
  ENSG00000132640_25 (sequence is synthesized)
gtccacagataatgtaaacaaaggagggaaaaacttattaaattctccttcgctgctggcttgtgctggtttagtgcctgtgtccctggcagtgtccagtgtgttcacttccagttgaag

SEQ ID NO: 299536 - DNA, 120 bp, Artificial Sequence
  ENSG00000132640_26 (sequence is synthesized)
tatccatgtgtttctgggcagcttttctgctcagtgtgatcctgagatggcttccccgccgccacccagagtgtggtccttggccgcctcctgctcctgctctgcaagcctgaaactggc

SEQ ID NO: 299537 - DNA, 120 bp, Artificial Sequence
  ENSG00000132640_27 (sequence is synthesized)
ttgtctggagccaggagttagtcctggggtgtgtgtgtgcctgcgcacccatgcgcatgcaagtgtgtttgccagctcaggagctgtctcctctctacctggctagtaagaggtgggaca

SEQ ID NO: 299538 - DNA, 120 bp, Artificial Sequence
  ENSG00000132640_28 (sequence is synthesized)
gtaatggtcctcctgctggccccagcaaggcccatgagtgactgccctgacgtattcactgtgcctctgggccacttcttcccctgtagatgtgggcttgttgccttcagccggcttccc

SEQ ID NO: 299539 - DNA, 120 bp, Artificial Sequence
  ENSG00000132640_29 (sequence is synthesized)
tgagggaggagaacactggattattggaaatgttttaatcactcttgccattacctacatctattagcatagatgatgaaaagctgttactggtgattatagatgagtatttccaggaca

SEQ ID NO: 299540 - DNA, 120 bp, Artificial Sequence
  ENSG00000132640_30 (sequence is synthesized)
acgttctaaaagtacaattatttcttattggggagattacaggtagtttggcaaagcattgaagtacaaaggtacattttcaattaaaaagcacacttctacaaaagatttggtttttaa

SEQ ID NO: 299541 - DNA, 120 bp, Artificial Sequence
  ENSG00000132640_31 (sequence is synthesized)
attatggttacacatttcagtaactcatagctgctgtgcaaattggtagaccttataagaaggcacttgtttgtaagccagagaagaaactttaattgcatcctatcagattgttgaggt

SEQ ID NO: 299542 - DNA, 120 bp, Artificial Sequence
  ENSG00000132640_32 (sequence is synthesized)
gggtgtgatagtcttcaggtgcagtgcgttcattcactaacgctcactgtcagtgcccatgtttgctagctgcctccatgtgactagtgagctgctggtgaaagtcgtgtgaaatcctgt

SEQ ID NO: 299543 - DNA, 120 bp, Artificial Sequence
  ENSG00000132640_33 (sequence is synthesized)
acactgtgtatagaataatgtaattttatgttaattgttattactttaaaacatatctaccatctgattggctggtaccgagagctgtgggtaaaatttgaaaattgtatttagaataag

SEQ ID NO: 299544 - DNA, 120 bp, Artificial Sequence
  ENSG00000132640_34 (sequence is synthesized)
aaattttacattttaaaccctattgtcctttatgcattttcaatgaaatggaatgaaggctaatatgcttgctttatttacttttgtaatcttggattttgtagcttttaaaactagaaa

SEQ ID NO: 299545 - DNA, 120 bp, Artificial Sequence
  ENSG00000132640_35 (sequence is synthesized)
ccattgttctaacaaagcaggcaactttattctataaacacaactttattaagcagaatacactgtagatgcttttccccaacgtatctggctggcagtctttgtcgttgttcattctgg

SEQ ID NO: 299546 - DNA, 120 bp, Artificial Sequence
  ENSG00000132640_36 (sequence is synthesized)
ggataaaggggaactaggctagcagttctaatgtgacattctttaagcatatcttaaaatagtatttaagtaaatggtctaatttctacataattattgcactgaacttttttgtttatt

SEQ ID NO: 299547 - DNA, 120 bp, Artificial Sequence
  ENSG00000132640_37 (sequence is synthesized)
aaggtgtttaaataagctcagctaattcaagacactgtagccacttgtgcatcagtgtgcttgaatttagtagcttacagcattatttatgaaggaaaaaatacataaatatgaagtacc

SEQ ID NO: 299548 - DNA, 120 bp, Artificial Sequence
  ENSG00000132640_38 (sequence is synthesized)
tcatgttgaatgttattgtactgtatttttaatgtaacagtgcagatcttgttagacacatgaatgtgtataatcatgttaaatgcaaataaaactagttcatagatttgttttccttta

SEQ ID NO: 299549 - DNA, 120 bp, Artificial Sequence
  ENSG00000132640_39 (sequence is synthesized)
ctccgatccattcaccacacaacttcagccggctgaacagactcacgcagctccagcccatcttgctgacctaattcagaaaagaagtgctacagctctgtgcctgtcatctttgcagtg

SEQ ID NO: 299550 - DNA, 120 bp, Artificial Sequence
  ENSG00000132640_40 (sequence is synthesized)
cagcatggtcttatgcttccatggcaagctaccctgtgtaccttggctttttcaaagcagtagattttaggtacgctatgtttactaaacctgattgcctagtgttgtttttctgcattg

SEQ ID NO: 299551 - DNA, 120 bp, Artificial Sequence
  ENSG00000132640_41 (sequence is synthesized)
agtgcatgtttcactcgattagggagagagcgcaccctctccagagggctttggccacgcttaattttttctttgtttccttctatactgctttatatctcacacatcccctcttaactc

SEQ ID NO: 299552 - DNA, 120 bp, Artificial Sequence
  ENSG00000132640_42 (sequence is synthesized)
tccagacatgggaagttgttgtgacaggtcaggaaagtcgtatgtttacccttctcctagaaattagttatgtaagctattattgtatgtatttagtaatgaggggacatgtgcattaat

SEQ ID NO: 299553 - DNA, 120 bp, Artificial Sequence
  ENSG00000132640_43 (sequence is synthesized)
tttatttgtccttagctttattaaaagtttgtataacttttattttaaactttagttacttcccttatgtttgcaatgattatgaacagtttagttagaacctttatttgttgttttgcc

SEQ ID NO: 299554 - DNA, 120 bp, Artificial Sequence
  ENSG00000132640_44 (sequence is synthesized)
ttgaagttactggactgttgcttagcttgcaagtcttttgtgggttttgtatgttggggaaggggatgttaaaaatgcaggctgctgtgaattaatgagttgcctctgtttatagaaatg

SEQ ID NO: 299555 - DNA, 120 bp, Artificial Sequence
  ENSG00000132640_45 (sequence is synthesized)
tgatctaggaaacagttatttttatgagcaaataagagaaacaggaatcatgatggggatatatttaacagacccagtactggataaaacttaaagccagtttctattcaacatagtgaa

SEQ ID NO: 299556 - DNA, 120 bp, Artificial Sequence
  ENSG00000132640_46 (sequence is synthesized)
aaggtcaccttgcctggctgagaaaagcagcaaaatatcagctttgttggtttcagttaacctcttagcccgggctaatctcttttccttgatgttcaaaccaatttgggatatctaact

SEQ ID NO: 299557 - DNA, 120 bp, Artificial Sequence
  ENSG00000132640_47 (sequence is synthesized)
ggaggtggcggaggtccaggcagggggcgcggtcgggaagcctcggcgcctagcaggtggcgggggccgcgcccctctcccggggaggcgcgcggtgggaagcggagcaaacttccccta

SEQ ID NO: 299558 - DNA, 120 bp, Artificial Sequence
  ENSG00000132646_0 (sequence is synthesized)
attaaacggttgcaggcgtagcagagtggtcgttgtctttctaggtctcagccggtcgtcgcgacgttcgcccgctcgctctgaggctcctgaagccgaaaccagctagactttcctcct

SEQ ID NO: 299559 - DNA, 120 bp, Artificial Sequence
  ENSG00000132646_1 (sequence is synthesized)
tcccgcctgcctgtagcggcgttgttgccactccgccaccatgttcgaggcgcgcctggtccagggctccatcctcaagaaggtgttggaggcactcaaggacctcatcaacgaggcctg

SEQ ID NO: 299560 - DNA, 120 bp, Artificial Sequence
  ENSG00000132646_2 (sequence is synthesized)
ctgggatattagctccagcggtgtaaacctgcagagcatggactcgtcccacgtctctttggtgcagctcaccctgcggtctgagggcttcgacacctaccgctgcgaccgcaacctggc

SEQ ID NO: 299561 - DNA, 120 bp, Artificial Sequence
  ENSG00000132646_3 (sequence is synthesized)
catgggcgtgaacctcaccagtatgtccaaaatactaaaatgcgccggcaatgaagatatcattacactaagggccgaagataacgcggataccttggcgctagtatttgaagcaccaaa

SEQ ID NO: 299562 - DNA, 120 bp, Artificial Sequence
  ENSG00000132646_4 (sequence is synthesized)
ccaggagaaagtttcagactatgaaatgaagttgatggatttagatgttgaacaacttggaattccagaacaggagtacagctgtgtagtaaagatgccttctggtgaatttgcacgtat

SEQ ID NO: 299563 - DNA, 120 bp, Artificial Sequence
  ENSG00000132646_5 (sequence is synthesized)
ggagaacttggaaatggaaacattaaattgtcacagacaagtaatgtcgataaagaggaggaagctgttaccatagagatgaatgaaccagttcaactaacttttgcactgaggtacctg

SEQ ID NO: 299564 - DNA, 120 bp, Artificial Sequence
  ENSG00000132646_6 (sequence is synthesized)
aacttctttacaaaagccactccactctcttcaacggtgacactcagtatgtctgcagatgtaccccttgttgtagagtataaaattgcggatatgggacacttaaaatactacttggct

SEQ ID NO: 299565 - DNA, 120 bp, Artificial Sequence
  ENSG00000132646_7 (sequence is synthesized)
cccaagatcgaggatgaagaaggatcttaggcattcttaaaattcaagaaaataaaactaagctctttgagaactgcttctaagatgccagcatatactgaagtcttttctgtcaccaaa

SEQ ID NO: 299566 - DNA, 120 bp, Artificial Sequence
  ENSG00000132646_8 (sequence is synthesized)
tttgtacctctaagtacatatgtagatattgttttctgtaaataacctatttttttctctattctctgcaatttgtttaaagaataaagtccaaagtcagatctggtctagttaacctag

SEQ ID NO: 299567 - DNA, 120 bp, Artificial Sequence
  ENSG00000132646_9 (sequence is synthesized)
aagtatttttgtctcttagaaatacttgtgatttttataatacaaaagggtcttgactctaaatgcagttttaagaattgtttttgaatttaaataaagttacttgaatttcaaacatca

SEQ ID NO: 299568 - DNA, 120 bp, Artificial Sequence
  ENSG00000132646_10 (sequence is synthesized)
ccgcggatggccggagctggcgccctggttctggaggtaaccggttactgagggcgagaagcgccacccggaggctctagcctgacaaatgcttgctgacctgggccagagctcttccct

SEQ ID NO: 299569 - DNA, 120 bp, Artificial Sequence
  ENSG00000132661_0 (sequence is synthesized)
gcgtctgcgtggagaccggctggccgcgcgcgggaagccgcggaactgcgccggaaagtcccccggctctggggccccggtgacccagagtaagcctccaagaaggaggaggaggagaga

SEQ ID NO: 299570 - DNA, 120 bp, Artificial Sequence
  ENSG00000132661_1 (sequence is synthesized)
aaggcggctcttcccgtgcccctaccagaggcttcggtgggcccaccttgtgacctccgcggccggcccctcagtggaactgcgtcccacgcggggggcgtcccgaccgtgggggccgcg

SEQ ID NO: 299571 - DNA, 120 bp, Artificial Sequence
  ENSG00000132661_2 (sequence is synthesized)
gcccgcgctgaccctggacgtcgccgcgcagcccctggttccccaaggcagaggaaataccctggtggagccctccttccatagaaccagagatggcatctgtggatttcaagacctatg

SEQ ID NO: 299572 - DNA, 120 bp, Artificial Sequence
  ENSG00000132661_3 (sequence is synthesized)
tggatcaggcctgcagagctgctgaggagtttgtcaatgtctactacaccaccatggataagcggcggcgtttgctgtcccgcctgtacatgggcacagccaccctggtctggaatggca

SEQ ID NO: 299573 - DNA, 120 bp, Artificial Sequence
  ENSG00000132661_4 (sequence is synthesized)
ccacaccaagccagaccacggtccttgttgtcatctgtggatcagtgaagtttgaggggaacaaacaacgggacttcaaccagaacttcatcctgaccgcccaggcctcacccagcaaca

SEQ ID NO: 299574 - DNA, 120 bp, Artificial Sequence
  ENSG00000132661_5 (sequence is synthesized)
cagtgtggaagatcgcaagtgactgcttccgcttccaggactgggccagctagtgggggtggcagaggtctctttgcttcattcagccctagctctgtagagaaatgcaaacctcgactc

SEQ ID NO: 299575 - DNA, 120 bp, Artificial Sequence
  ENSG00000132661_6 (sequence is synthesized)
tcaaggatgtgaggaacacaagttcatttctgttgttgcggagacactgcagactccactgtgccgaggttgaactcttttttgttgctcaagttctaggagtccctttcctgaatatat

SEQ ID NO: 299576 - DNA, 120 bp, Artificial Sequence
  ENSG00000132661_7 (sequence is synthesized)
acttgtttgtcatagtttccttttcaaagtagtaaacttttctatttttctacttgcccagtagagactctgattctggaaattctgacaaataatttaataatacacatgttgcttctt

SEQ ID NO: 299577 - DNA, 120 bp, Artificial Sequence
  ENSG00000132664_0 (sequence is synthesized)
gaagaaggcccctcggcctcagcagagcgctatcctccactggttccccgggttccccggcttgctaccgggctgctccgtgcatctttccccccaggcgtcaggaactgcgccctcatg

SEQ ID NO: 299578 - DNA, 120 bp, Artificial Sequence
  ENSG00000132664_1 (sequence is synthesized)
gcggaggtgaaggtgaaggtgcagccgcctgacgcggatccggtcgaaatagaaaacaggattatagaattatgtcaccagttccctcatggaatcacagaccaagtaattcagaatgaa

SEQ ID NO: 299579 - DNA, 120 bp, Artificial Sequence
  ENSG00000132664_2 (sequence is synthesized)
atgcctcatatagaagcccagcagcgggcagtagccatcaataggttgttgtctatgggtcagttggatctcttaaggagcaatacgggccttttatatagaataaaggactctcagaat

SEQ ID NO: 299580 - DNA, 120 bp, Artificial Sequence
  ENSG00000132664_3 (sequence is synthesized)
gctggtaaaatgaagggatccgataaccaagaaaaactagtatatcaaatcatagaggatgcaggaaataaaggaatatggagcagagatatccgctataaaagtaatttgccattaaca

SEQ ID NO: 299581 - DNA, 120 bp, Artificial Sequence
  ENSG00000132664_4 (sequence is synthesized)
gaaatcaacaaaattctgaagaatctggaaagtaaaaagcttatcaaagctgttaagtctgtagcagcctcaaaaaagaaggtgtatatgctctataacctgcagccagaccggtctgtg

SEQ ID NO: 299582 - DNA, 120 bp, Artificial Sequence
  ENSG00000132664_5 (sequence is synthesized)
actggtggagcctggtacagtgaccaggattttgaatctgaatttgtagaggtgcttaaccaacagtgttttaaattcctacagtccaaggcagaaacagcacgagaaagcaaacagaac

SEQ ID NO: 299583 - DNA, 120 bp, Artificial Sequence
  ENSG00000132664_6 (sequence is synthesized)
ccaatgatacaaagaaatagttcatttgcctcatcacatgaagtgtggaaatatatctgcgaattgggaatcagtaaggtagagttatccatggaagacattgaaaccatcctgaataca

SEQ ID NO: 299584 - DNA, 120 bp, Artificial Sequence
  ENSG00000132664_7 (sequence is synthesized)
ctcatttatgatggaaaagtggagatgacgattattgctgcaaaagaaggcacagttggcagtgtagatggacacatgaaactgtacagggcagtcaatccaatcatccctcccacaggt

SEQ ID NO: 299585 - DNA, 120 bp, Artificial Sequence
  ENSG00000132664_8 (sequence is synthesized)
tatgaactttattgacattttgcaaatgaagttacttagggagcagataatttaattcatgatggaacacgaaatctccttgaaagcaaacttcacaataatggacgtagacttgctgct

SEQ ID NO: 299586 - DNA, 120 bp, Artificial Sequence
  ENSG00000132664_9 (sequence is synthesized)
tgctatgaaaacatattttttttatttatgaagactaaatttatattggtaaaatagccagtagaatatgaaagaaataaggttagtagtgaaattcattcttcaataaataaaacactt

SEQ ID NO: 299587 - DNA, 120 bp, Artificial Sequence
  ENSG00000132664_10 (sequence is synthesized)
actccggaggaccacatctttcaagacttctgatgggtcaaggaaaaagatgccaacatacccgtatttaccaagtactatgataatggctagagtataaaaatgttctttttaaagtta

SEQ ID NO: 299588 - DNA, 120 bp, Artificial Sequence
  ENSG00000132664_11 (sequence is synthesized)
tttattaagttcttcattggaagtttttttttatatctggttcactaccaccattttctgtttcctactttctcagtggtttcattgaaaagaaattagaaggggttaaaggcaggaata

SEQ ID NO: 299589 - DNA, 120 bp, Artificial Sequence
  ENSG00000132664_12 (sequence is synthesized)
gcaaagagtgcaaacttggggtatgactgggggagagtggaacatgccttttccgcacaatattaattcctttttgtatcagaaatgttcttttaggagattatgctaccatacttactt

SEQ ID NO: 299590 - DNA, 120 bp, Artificial Sequence
  ENSG00000132664_13 (sequence is synthesized)
caaacccaatgactactgtcaaggacatattttcagtacataaatactatcattttcattctaaagaatattttcactgttccttctttcttaaagtcttatgtttcactctttaactca

SEQ ID NO: 299591 - DNA, 120 bp, Artificial Sequence
  ENSG00000132664_14 (sequence is synthesized)
aatgtattctttgttagaatttaccctagattcttatttaatgtctgcagtagactgaatgtttgtgtgcccccagaattctaatgttgaaatctcatttccaatgtgatggtatttgga

SEQ ID NO: 299592 - DNA, 120 bp, Artificial Sequence
  ENSG00000132664_15 (sequence is synthesized)
ggtggggcttttggtaagtgataggtcaggagagtaacagcgctcatgaatgggattagtgcccttatataaagagacccagagagctccatcaccccttctgccatgtgaaagggagaa

SEQ ID NO: 299593 - DNA, 120 bp, Artificial Sequence
  ENSG00000132664_16 (sequence is synthesized)
agctccatcaccccttctgccatgtgaaagggagaagacaaacatccacgaaccaggaagtgggtcctcaccagaaaacaaatctgtaagcaccttgatcttggacttctcagcctccag

SEQ ID NO: 299594 - DNA, 120 bp, Artificial Sequence
  ENSG00000132664_17 (sequence is synthesized)
ctcatatagaagcccagcagcgggcagtagccatcaataggttgttgtctatggtaaggtgaatctaactattttgcataattactgatatgctgattatcactggtttttattatgtag

SEQ ID NO: 299595 - DNA, 120 bp, Artificial Sequence
  ENSG00000132664_18 (sequence is synthesized)
ttgtgatggttaatttcatgtcaacttgactaagatacaggattcctacatatctagttaaatattttattggagtgtctgtgtgggtgtttctgaaagaggttagcattttgaattggt

SEQ ID NO: 299596 - DNA, 120 bp, Artificial Sequence
  ENSG00000132664_19 (sequence is synthesized)
gaacggagtaaagtagatatgggtccagttgggtgagcatcatccaatccattcagggcctaaatagaacaaagtggcagaggaagattgaattcactctttgaattcaatcttgagctg

SEQ ID NO: 299597 - DNA, 120 bp, Artificial Sequence
  ENSG00000132664_20 (sequence is synthesized)
agtgtggaaatatatctgcgaattgggaatcagtaaggtttttgatgactgccacgaaggtggtgagatttcaccatctaactgtatttacatgacagagtggctcgaattttaatagag

SEQ ID NO: 299598 - DNA, 78 bp, Artificial Sequence
  ENSG00000132669_0 (sequence is synthesized)
ctttcagtggtgttgttgaaagggcttggcagctcccaaatgtttgcagtgtccttagtcctatgagggctgagcttt

SEQ ID NO: 299599 - DNA, 120 bp, Artificial Sequence
  ENSG00000132669_1 (sequence is synthesized)
tagctagtatctggaaacatctactggacatgttggactcattttctcaagaatccactttacccttcagggaagccaggaaaagaacaagcttccaaccggtacaagtctggaggaatt

SEQ ID NO: 299600 - DNA, 120 bp, Artificial Sequence
  ENSG00000132669_2 (sequence is synthesized)
tcacagcctctcaaactacggagtccccggcgtgcagtggagcctcgctgggggaaatgacagcttggaccatgggcgcccgcggtctggacaagcgaggaagtttctttaagctcattg

SEQ ID NO: 299601 - DNA, 120 bp, Artificial Sequence
  ENSG00000132669_3 (sequence is synthesized)
acacaattgcctcggagatcggagaactgaaacaggagatggtgcggacagatgtcaacctggaaaatggcctggaacccgctgaaacccacagcatggtaagacacaaggatggtggct

SEQ ID NO: 299602 - DNA, 120 bp, Artificial Sequence
  ENSG00000132669_4 (sequence is synthesized)
attccgaggaagaggacgtgaagacctgtgcccgggactcaggctatgacagcctctccaacaggctcagcatcttggaccggctcctccacacccaccccatatggctgcagctgagtc

SEQ ID NO: 299603 - DNA, 120 bp, Artificial Sequence
  ENSG00000132669_5 (sequence is synthesized)
tgagtgaggaggaggcagcagaggtcctgcaggcccagcctccggggatcttcctggttcataaatctaccaagatgcagaagaaagtcctctccctccgcctgccctgtgaatttgggg

SEQ ID NO: 299604 - DNA, 120 bp, Artificial Sequence
  ENSG00000132669_6 (sequence is synthesized)
ccccactcaaggaatttgccataaaggaaagcacatacaccttttccctggaaggctcaggaatcagtttcgcagatttattccggctcattgctttctactgcatcagcagggatgttc

SEQ ID NO: 299605 - DNA, 120 bp, Artificial Sequence
  ENSG00000132669_7 (sequence is synthesized)
taccatttaccttgaagttgccttatgccatttcaacagccaagtcggaggctcagcttgaagaactggcccagatgggactaaatttctggagctccccagctgacagcaaacccccga

SEQ ID NO: 299606 - DNA, 120 bp, Artificial Sequence
  ENSG00000132669_8 (sequence is synthesized)
accttccacctccccataggcctctttcctccgacggtgtctgtcctgcctccctgcgtcagctctgccttataaatggagtgcattctatcaaaaccaggacgccttcagagctggagt

SEQ ID NO: 299607 - DNA, 120 bp, Artificial Sequence
  ENSG00000132669_9 (sequence is synthesized)
gcagccagaccaacggggccctgtgctttattaatccccttttcttgaaagtgcacagccaggacctcagtggaggcctgaaacggccgagcacaaggactcccaacgcgaatggcacgg

SEQ ID NO: 299608 - DNA, 120 bp, Artificial Sequence
  ENSG00000132669_10 (sequence is synthesized)
agcggactcggtcccccccacccaggcccccgccacccgctattaatagtctccacacaagccctcggctggccaggactgaaacccagacgagcatgccagaaacagtcaaccataaca

SEQ ID NO: 299609 - DNA, 120 bp, Artificial Sequence
  ENSG00000132669_11 (sequence is synthesized)
aacatgggaacgtagctctgcctggaacgaaaccaactcccatccctccaccccggctgaagaagcaggcttcttttctggaagcagagggcggtgcaaagaccttgagcggcggccggc

SEQ ID NO: 299610 - DNA, 120 bp, Artificial Sequence
  ENSG00000132669_12 (sequence is synthesized)
cggagctggagctgggcacagctggcagcccaggtggggccccgcctgaggccgccccgggggattgcacaagggccccgccgcccagctctgaatcacggcccccgtgccatggaggcc

SEQ ID NO: 299611 - DNA, 120 bp, Artificial Sequence
  ENSG00000132669_13 (sequence is synthesized)
gccatggaggccggcagcggctgagcgacatgagcatttctacttcctcctccgactcgctggagttcgaccggagcatgcctctgtttggctacgaggcggacaccaacagcagcctgg

SEQ ID NO: 299612 - DNA, 120 bp, Artificial Sequence
  ENSG00000132669_14 (sequence is synthesized)
aggactacgagggggaaagtgaccaagagaccatggcgccccccatcaagtccaaaaagaaaaggagcagctccttcgtgctgcccaagctcgtcaagtcccagctgcagaaggtgagcg

SEQ ID NO: 299613 - DNA, 120 bp, Artificial Sequence
  ENSG00000132669_15 (sequence is synthesized)
gggtgttcagctccttcatgaccccggagaagcggatggtccgcaggatcgccgagctttcccgggacaaatgcacctacttcgggtgcttagtgcaggactacgtgagcttcctgcagg

SEQ ID NO: 299614 - DNA, 120 bp, Artificial Sequence
  ENSG00000132669_16 (sequence is synthesized)
agaacaaggagtgccacgtgtccagcaccgacatgctgcagaccatccggcagttcatgacccaggtcaagaactatttgtctcagagctcggagctggacccccccatcgagtcgctga

SEQ ID NO: 299615 - DNA, 120 bp, Artificial Sequence
  ENSG00000132669_17 (sequence is synthesized)
tccctgaagaccaaatagatgtggtgctggaaaaagccatgcacaagtgcatcttgaagcccctcaaggggcacgtggaggccatgctgaaggactttcacatggccgatggctcatgga

SEQ ID NO: 299616 - DNA, 120 bp, Artificial Sequence
  ENSG00000132669_18 (sequence is synthesized)
gacccctgattttgtggatgtggagaaaatcaaagtcaagttcatgaccatgcagaagatgtattcgccggaaaagaaggtcatgctgctgctgcgggtctgcaagctcatttacacggt

SEQ ID NO: 299617 - DNA, 120 bp, Artificial Sequence
  ENSG00000132669_19 (sequence is synthesized)
catggagaacaactcagggaggatgtatggcgctgatgacttcttgccagtcctgacctatgtcatagcccagtgtgacatgcttgaattggacactgaaatcgagtacatgatggagct

SEQ ID NO: 299618 - DNA, 120 bp, Artificial Sequence
  ENSG00000132669_20 (sequence is synthesized)
cctagacccatcgctgttacatggagaaggaggctattacttgacaagcgcatatggagcactttctctgataaagaatttccaagaagaacaagcagcgcgactgctcagctcagaaac

SEQ ID NO: 299619 - DNA, 120 bp, Artificial Sequence
  ENSG00000132669_21 (sequence is synthesized)
cagagacaccctgaggcagtggcacaaacggagaaccaccaaccggaccatcccctctgtggacgacttccagaattacctccgagttgcatttcaggaggtcaacagtggttgcacagg

SEQ ID NO: 299620 - DNA, 120 bp, Artificial Sequence
  ENSG00000132669_22 (sequence is synthesized)
aaagaccctccttgtgagaccttacatcaccactgaggatgtgtgtcagatctgcgctgagaagttcaaggtgggggaccctgaggagtacagcctctttctcttcgttgacgagacatg

SEQ ID NO: 299621 - DNA, 120 bp, Artificial Sequence
  ENSG00000132669_23 (sequence is synthesized)
gcagcagctggcagaggacacttaccctcaaaaaatcaaggcggagctgcacagccgaccacagccccacatcttccactttgtctacaaacgcatcaagaacgatccttatggcatcat

SEQ ID NO: 299622 - DNA, 120 bp, Artificial Sequence
  ENSG00000132669_24 (sequence is synthesized)
tttccagaacggggaagaagacctcaccacctcctagaagacaggcgggacttcccagtggtgcatccaaaggggagctggaagccttgccttcccgcttctacatgcttgagcttgaaa

SEQ ID NO: 299623 - DNA, 120 bp, Artificial Sequence
  ENSG00000132669_25 (sequence is synthesized)
agcagtcacctcctcggggacccctcagtgtagtgactaagccatccacaggccaactcggccaagggcaactttagccacgcaaggtagctgaggtttgtgaaacagtaggattctctt

SEQ ID NO: 299624 - DNA, 120 bp, Artificial Sequence
  ENSG00000132669_26 (sequence is synthesized)
ttggcaatggagaattgcatctgatggttcaagtgtcctgagattgtttgctacctacccccagtcaggttctaggttggcttacaggtatgtatatgtgcagaagaaacacttaagata

SEQ ID NO: 299625 - DNA, 120 bp, Artificial Sequence
  ENSG00000132669_27 (sequence is synthesized)
gatacaagttcttttgaattcaacagcagatgcttgcgatgcagtgcgtcaggtgattctcactcctgtggatggcttcatccctgccttccttcctttctttttccttttttttttttt

SEQ ID NO: 299626 - DNA, 120 bp, Artificial Sequence
  ENSG00000132669_28 (sequence is synthesized)
tttttttttacaaagagccttcatgtttttatatatttcatagaaatttttatagcagttgcaggtaaactgtcaggattggttttaaaatatttttgtaactttaaaatattctataat

SEQ ID NO: 299627 - DNA, 120 bp, Artificial Sequence
  ENSG00000132669_29 (sequence is synthesized)
tatgcatgtgattttaacatttaatattcaaaaataaatctcttgctggatttgagagtattgcatttttaaagtctctcttctgtaactggatgttttggcaactttgtggggagagac

SEQ ID NO: 299628 - DNA, 120 bp, Artificial Sequence
  ENSG00000132669_30 (sequence is synthesized)
tgctggatttcttaaagcaacgtattcctgacactggccacagaatgcctttggaaatcggatgtactgttctcttgttcacgtttagtggtgttttgctgttttgttttttaaacaaat

SEQ ID NO: 299629 - DNA, 120 bp, Artificial Sequence
  ENSG00000132669_31 (sequence is synthesized)
gatgctgagaataaggagagaaatgaatgtagagagaggtagagagagaaatatgaactctaacaaaggactgaggagtgcagtctgctggttcaggctcttcaaaagatgtagaaaaag

SEQ ID NO: 299630 - DNA, 120 bp, Artificial Sequence
  ENSG00000132669_32 (sequence is synthesized)
agatagaaggaaccacctatgcttaaaatactgtaaatatgcagtgaggtttggcaaaatctattccatgtgtgatttgcttgtagaaacaattttgaaagccccttgaggaaaataaaa

SEQ ID NO: 299631 - DNA, 120 bp, Artificial Sequence
  ENSG00000132669_33 (sequence is synthesized)
atcaagaagaacacttttctcccttttccatacaaattaaaacttaacagcatcaaattattgggaccagaaaccaagtaatgtataatgtggcttttgttgagttaaataagatgctat

SEQ ID NO: 299632 - DNA, 120 bp, Artificial Sequence
  ENSG00000132669_34 (sequence is synthesized)
ataatggagaagaatttgaaaatgcacaaaaaaatcaatctacattatcagaacctgcagtgaaattaaacttatgttaaataaaaccagtttgcaggtgcacaaactatgagggtcttg

SEQ ID NO: 299633 - DNA, 120 bp, Artificial Sequence
  ENSG00000132669_35 (sequence is synthesized)
tatccacgtaacacaggtagttacaaaaacatgttattgtactgtgtaaagatgcatagtcatctcatttggttggctttgtaccttgtaccttttttagccttggcttttgttgaacta

SEQ ID NO: 299634 - DNA, 120 bp, Artificial Sequence
  ENSG00000132669_36 (sequence is synthesized)
gaaccctcagcacatactgtgttgtacttttgtaaatgattttttaaatggaattttgcacataatacattgtaatactgtatgataatcatgtgtgaaaataatttttgaaatatcctt

SEQ ID NO: 299635 - DNA, 120 bp, Artificial Sequence
  ENSG00000132669_37 (sequence is synthesized)
cccttccctcccctcctcctctttcctctcctctcccctcccctcccctcctttctcccccttcctcctcttcctcctcctcctcttgctcctcccgggcggggaaacccagccccgcgc

SEQ ID NO: 299636 - DNA, 120 bp, Artificial Sequence
  ENSG00000132669_38 (sequence is synthesized)
gagagatggagacgagagatctggacttctgaacatctaccggaaaagataaaatgtgcaagcccttcagaacgctggggaggttgggctgaactgcagtgggagaggagaagagatgct

SEQ ID NO: 299637 - DNA, 120 bp, Artificial Sequence
  ENSG00000132669_39 (sequence is synthesized)
ggcgtgaagggctggggcagaagatcaggggaaaattgcggatgatctgaatgatagcagtgaccaccagcaacctacagagctgcccaaccaggaaattgtcagatggaagcaacgctt

SEQ ID NO: 299638 - DNA, 120 bp, Artificial Sequence
  ENSG00000132669_40 (sequence is synthesized)
ttgggcggaggggctcgttatgggaaaggggtgcgtgcgcgtttgtgctaaaacaagaaaggcaagaatctccgagaacaaaactctggtcctcgcctggccggggaccgcagaagacag

SEQ ID NO: 299639 - DNA, 120 bp, Artificial Sequence
  ENSG00000132669_41 (sequence is synthesized)
catcacgtctggaggaacacagcatctggctgccttcgtttgggatgctgacttggatcacctggacaaggattgattgctgattaccatggagaagcaggcaagggattatgaagagaa

SEQ ID NO: 299640 - DNA, 120 bp, Artificial Sequence
  ENSG00000132669_42 (sequence is synthesized)
agacaggagggatatcttaaaagctttcattgtggtctgatgggagcagatctggaccaaggcacatggggatcctaagaggactaattcatttggtgacacttctttttctttgaattt

SEQ ID NO: 299641 - DNA, 120 bp, Artificial Sequence
  ENSG00000132669_43 (sequence is synthesized)
attttgcaagagctgaacaacaacaaaaatgatactctcgccaggtaggtggctcacatctgtaatcttactttgggaggccaagacggggcttcactttgaagccaggagtttgagacc

SEQ ID NO: 299642 - DNA, 120 bp, Artificial Sequence
  ENSG00000132669_44 (sequence is synthesized)
gcacctcagagatgtcctactaaaatgagggagcagggttgaggtgagaaaaatcactgttgctagtaaatagcagtgcatcatgcactatgtggtttcagaatttcctcttcctcagac

SEQ ID NO: 299643 - DNA, 120 bp, Artificial Sequence
  ENSG00000132669_45 (sequence is synthesized)
tgccaacttaggtcacacattctagctgttctaggttggcttgttctaggtttggctgggagttagggcatgcattgccacgtgtcaaaatactcaacaaagatagatcagtgctagtga

SEQ ID NO: 299644 - DNA, 120 bp, Artificial Sequence
  ENSG00000132669_46 (sequence is synthesized)
ggattgtttcctatctccacttctgtggggtctctactctgaaggaggtagaaccaatgtacgcatcgcggcttctctaaggaatcataggcaggaactctgcctaacagggactatatt

SEQ ID NO: 299645 - DNA, 120 bp, Artificial Sequence
  ENSG00000132669_47 (sequence is synthesized)
tccagttaaaaatgctgaaatggatccccagtttatttcaatgatgtttatgaggaggacgctaagatttaggaattgtggactcttaagttatttcactggttcaataatggagttaga

SEQ ID NO: 299646 - DNA, 120 bp, Artificial Sequence
  ENSG00000132669_48 (sequence is synthesized)
agttatttcactggttcaataatggagttagatcattatgggggcagtgctcagggaaaagcccatgaacagggtgggtgatatggttaggcttcgtgtccccactcaaatctcatcttg

SEQ ID NO: 299647 - DNA, 120 bp, Artificial Sequence
  ENSG00000132669_49 (sequence is synthesized)
gatcatgggggcagtttcccccatgcctagtgatagtaactgagtgctcacgagatctgatggttttataagagttcagaagttcctcctttttcactcgtctctctcctgctgccttgt

SEQ ID NO: 299648 - DNA, 79 bp, Artificial Sequence
  ENSG00000132669_50 (sequence is synthesized)
ttccactatgattgtaagttgcctgaaacctcctcagccatgaggaactgtaagtcaattaaacctctttcctttataa

SEQ ID NO: 299649 - DNA, 120 bp, Artificial Sequence
  ENSG00000132669_51 (sequence is synthesized)
aacctaaaattgtctgtgccatatccacctactcccaatgatggaaacagtaatgcagcaagatccagcgtgtgcaaagtagaattcagtgtagccgtgtgagtctccagaaggcttaca

SEQ ID NO: 299650 - DNA, 120 bp, Artificial Sequence
  ENSG00000132669_52 (sequence is synthesized)
tggaccatgggcgcccgcggtctggacaagcgaggaagtttctttaaggtaaaaggaagccttgattgggatctcaactcgtcggcttgctgcctgagcctgggagctgcggtgctccat

SEQ ID NO: 299651 - DNA, 120 bp, Artificial Sequence
  ENSG00000132669_53 (sequence is synthesized)
ggagctgctgagggaagtctgctctctgagccagcaccggctaagggagcttgcccgagcccagctgctgattgttaccagggcttataacaggttgcggggtctgtgatttagtgcttt

SEQ ID NO: 299652 - DNA, 120 bp, Artificial Sequence
  ENSG00000132669_54 (sequence is synthesized)
catacaggcacaggactcgggcacggagaggggccgtgctgtgcaagacggctgaggctgtctttatttgagagctgctcagtttgtcctttttcagctgcagggttttatggtggaagc

SEQ ID NO: 299653 - DNA, 120 bp, Artificial Sequence
  ENSG00000132669_55 (sequence is synthesized)
tatggtggaagctgtactttgctttccagtgaatcaatgctgtcgtccatgtgttctctccttggcttgtttgtatgaatcactgaagggctccaaaacaaacaaacaaacaaacaaaca

SEQ ID NO: 299654 - DNA, 120 bp, Artificial Sequence
  ENSG00000132669_56 (sequence is synthesized)
cttcctggaccgcaccttagaatgatgaaatattattttctggtatattttatcaaacatccccaaaggcttcttatgataatgaggaagcatgattataactgtctaactcttctgtgt

SEQ ID NO: 299655 - DNA, 120 bp, Artificial Sequence
  ENSG00000132669_57 (sequence is synthesized)
tcatattgatgttaatgggactaaattaccttgctagcttaatgagataagattttaaatgggtgttttatgtactctgtgtgtgtgtatttaatgaagacttggtggtcgcttctgatt

SEQ ID NO: 299656 - DNA, 120 bp, Artificial Sequence
  ENSG00000132669_58 (sequence is synthesized)
gagtccccggcgtgcagtggagcctcgctgggggaaatgacagcttggaccatgggcgcccgcggtctggacaagcgaggaagtttctttaagagaataacagaagagctctctgacacc

SEQ ID NO: 299657 - DNA, 120 bp, Artificial Sequence
  ENSG00000132669_59 (sequence is synthesized)
gctgaaatctggctataccgaatagatgaaccagtgggtgatgattcacttgacctcagctgagttccctcaactattggtctcttcttggcatttgaaaaagtattcaattttcaaaaa

SEQ ID NO: 299658 - DNA, 120 bp, Artificial Sequence
  ENSG00000132669_60 (sequence is synthesized)
gggctgaagggagatgtaaggccttggtgggaaataaatggcactgtgttgttgacggaaaaagatcttggcaggactgttgttgtgagtgttctgtggcttagaaaggaatttcctaca

SEQ ID NO: 299659 - DNA, 120 bp, Artificial Sequence
  ENSG00000132669_61 (sequence is synthesized)
gaatgaaacagtcataaatgttggagtgaagcgactgacctccccggtccacaccccggcccagcgtcctgcatctgctggaggatggtggagaccatgtggaggatggggacttggcag

SEQ ID NO: 299660 - DNA, 120 bp, Artificial Sequence
  ENSG00000132669_62 (sequence is synthesized)
tggaggagaacatggaagcaggatatggcagtcccctagcgtcccagccacaagtcctctgaagagtgtggatgacgatggtgacttaggtgcatccttcgaatgtcctgagggggagac

SEQ ID NO: 299661 - DNA, 120 bp, Artificial Sequence
  ENSG00000132669_63 (sequence is synthesized)
tggagaagcagacacgcaattgtgggaagaaatcaaaggcataaagaactcacagcacaagtccaaagtctgatcagcgagcaggcctctctgcagggtgcaagggcacagctggagagg

SEQ ID NO: 299662 - DNA, 120 bp, Artificial Sequence
  ENSG00000132670_0 (sequence is synthesized)
ggagtatgagccacgctcaggggagcaggtaccccttctcctaaagatgaagaggagcaaactggcactaagcaaggccatcgagagcggggacactgacctggtgttcacggtgttgct

SEQ ID NO: 299663 - DNA, 120 bp, Artificial Sequence
  ENSG00000132670_1 (sequence is synthesized)
gcacctgaagaacgagctgaaccgaggagattttttcatgacccttcggaatcagcccatggccctcagtttgtaccgacagttctgtaagcatcaggagctagagacgctgaaggacct

SEQ ID NO: 299664 - DNA, 120 bp, Artificial Sequence
  ENSG00000132670_2 (sequence is synthesized)
ttacaatcaggatgacaatcaccaggaattgggcagcttccacatccgagccagctatgctgcagaagagcgtattgaggggcgagtagcagctctgcagacagccgccgatgccttcta

SEQ ID NO: 299665 - DNA, 120 bp, Artificial Sequence
  ENSG00000132670_3 (sequence is synthesized)
caaggccaagaatgagtttgcagccaaggctacagaggatcaaatgcggctcctacggctgcagcggcgcctagaagacgagctggggggccagttcctagacctgtctctacatgacac

SEQ ID NO: 299666 - DNA, 120 bp, Artificial Sequence
  ENSG00000132670_4 (sequence is synthesized)
agttaccaccctcattcttggcggtcacaacaagcgtgcagagcagctggcacgtgacttccgcatccctgacaagaggtgacacaactaaaaaaaaacaaaggtatttatggaattcca

SEQ ID NO: 299667 - DNA, 120 bp, Artificial Sequence
  ENSG00000132670_5 (sequence is synthesized)
ctgagtggtaatggatgatgcagttcaaataactaaggacacatgttcaaagagcataattaactttttaaaagaagctaataagcatggattcctggttcattcttgttctgctcggca

SEQ ID NO: 299668 - DNA, 120 bp, Artificial Sequence
  ENSG00000132670_6 (sequence is synthesized)
gtggtctgatatgtgtcagtgccaacaatgctaccacagttgcaccttctgtaggaattacaagattaattaactcatcaacggcagaaccagttaaagaagaggccaaaacttcaaatc

SEQ ID NO: 299669 - DNA, 120 bp, Artificial Sequence
  ENSG00000132670_7 (sequence is synthesized)
caacttcttcactaacttctctttctgtggcaccaacattcagcccaaatataactctgggacccacctatttaaccactgtcaattcttcagactctgacaatgggaccacaagaacag

SEQ ID NO: 299670 - DNA, 120 bp, Artificial Sequence
  ENSG00000132670_8 (sequence is synthesized)
caagcaccaattctataggcattacaatttcaccaaatggaacgtggcttccagataaccagttcacggatgccagaacagaaccctgggaggggaattccagcaccgcagcaaccactc

SEQ ID NO: 299671 - DNA, 120 bp, Artificial Sequence
  ENSG00000132670_9 (sequence is synthesized)
cagaaactttccctccttcaggtaattctgactcgaaggacagaagagatgagacaccaattattgcggtgatggtggccctgtcctctctgctagtgatcgtgtttattatcatagttt

SEQ ID NO: 299672 - DNA, 120 bp, Artificial Sequence
  ENSG00000132670_10 (sequence is synthesized)
tgtacatgttaaggtttaagaaatacaagcaagctgggagccattccaattctttccgcttatccaacggccgcactgaggatgtggagccccagagtgtgccacttctggccagatccc

SEQ ID NO: 299673 - DNA, 120 bp, Artificial Sequence
  ENSG00000132670_11 (sequence is synthesized)
caagcaccaacaggaaatacccacccctgcccgtggacaagctggaagaggaaattaaccggagaatggcagacgacaataagctcttcagggaggaattcaacgctctccctgcatgtc

SEQ ID NO: 299674 - DNA, 120 bp, Artificial Sequence
  ENSG00000132670_12 (sequence is synthesized)
ctatccaggccacctgtgaggctgcttccaaggaggaaaacaaggaaaaaaatcgatatgtaaacatcttgccttatgaccactctagagtccacctgacaccggttgaaggggttccag

SEQ ID NO: 299675 - DNA, 120 bp, Artificial Sequence
  ENSG00000132670_13 (sequence is synthesized)
attctgattacatcaatgcttcattcatcaacggctaccaagaaaagaacaaattcattgctgcacaaggaccaaaagaagaaacggtgaatgatttctggcggatgatctgggaacaaa

SEQ ID NO: 299676 - DNA, 120 bp, Artificial Sequence
  ENSG00000132670_14 (sequence is synthesized)
acacagccaccatcgtcatggttaccaacctgaaggagagaaaggagtgcaagtgcgcccagtactggccagaccaaggctgctggacctatgggaatattcgggtgtctgtagaggatg

SEQ ID NO: 299677 - DNA, 120 bp, Artificial Sequence
  ENSG00000132670_15 (sequence is synthesized)
gcatccagcaggtgggcgacatgaccaacagaaagccacagcgcctcatcactcagttccactttaccagctggccagactttggggtgccttttaccccgatcggcatgctcaagttcc

SEQ ID NO: 299678 - DNA, 120 bp, Artificial Sequence
  ENSG00000132670_16 (sequence is synthesized)
tcaagaaggtgaaggcctgtaaccctcagtatgcaggggccatcgtggtccactgcagtgcaggtgtagggcgtacaggtacctttgtcgtcattgatgccatgctggacatgatgcata

SEQ ID NO: 299679 - DNA, 120 bp, Artificial Sequence
  ENSG00000132670_17 (sequence is synthesized)
cagaacggaaggtggacgtgtatggctttgtgagccggatccgggcacagcgctgccagatggtgcaaaccgatatgcagtatgtcttcatataccaagcccttctggagcattatctct

SEQ ID NO: 299680 - DNA, 120 bp, Artificial Sequence
  ENSG00000132670_18 (sequence is synthesized)
atggagatacagaactggaagtgacctctctagaaacccacctgcagaaaatttacaacaaaatcccagggaccagcaacaatggattagaggaggagtttaagaagttaacatcaatca

SEQ ID NO: 299681 - DNA, 120 bp, Artificial Sequence
  ENSG00000132670_19 (sequence is synthesized)
aaatccagaatgacaagatgcggactggaaaccttccagccaacatgaagaagaaccgtgttttacagatcattccatatgaattcaacagagtgatcattccagttaagcggggcgaag

SEQ ID NO: 299682 - DNA, 120 bp, Artificial Sequence
  ENSG00000132670_20 (sequence is synthesized)
agaatacagactatgtgaacgcatcctttattgatggctaccggcagaaggactcctatatcgccagccagggccctcttctccacacaattgaggacttctggcgaatgatctgggagt

SEQ ID NO: 299683 - DNA, 120 bp, Artificial Sequence
  ENSG00000132670_21 (sequence is synthesized)
ggaaatcctgctctatcgtgatgctaacagaactggaggagagaggccaggagaagtgtgcccagtactggccatctgatggactggtgtcctatggagatattacagtggaactgaaga

SEQ ID NO: 299684 - DNA, 120 bp, Artificial Sequence
  ENSG00000132670_22 (sequence is synthesized)
aggaggaggaatgtgagagctacaccgtccgagacctcctggtcaccaacaccagggagaataagagccggcagatccggcagttccacttccatggctggcctgaagtgggcatcccca

SEQ ID NO: 299685 - DNA, 120 bp, Artificial Sequence
  ENSG00000132670_23 (sequence is synthesized)
gtgacggaaagggcatgatcagcatcatcgccgccgtgcagaagcagcagcagcagtcagggaaccaccccatcaccgtgcactgcagcgccggggcaggaaggacggggaccttctgtg

SEQ ID NO: 299686 - DNA, 120 bp, Artificial Sequence
  ENSG00000132670_24 (sequence is synthesized)
ccctgagcaccgtcctggagcgtgtgaaagcagaggggattttggatgtcttccagactgtcaagagcctgcggctacagaggccacacatggtccagacactggaacagtatgagttct

SEQ ID NO: 299687 - DNA, 120 bp, Artificial Sequence
  ENSG00000132670_25 (sequence is synthesized)
gctacaaggtggtgcaggagtatattgatgcattctcagattatgccaacttcaagtaagcggcaacaagggtccgtggaccaggaggattgcctttaatattttgtaatattctgtttt

SEQ ID NO: 299688 - DNA, 120 bp, Artificial Sequence
  ENSG00000132670_26 (sequence is synthesized)
gttaatataccccaaattgtgtatatatcttataactgttttagaaattggtacataggcttctattacctattaggtggaaattttatatgtaaatgtgttagcactgatagtcctttt

SEQ ID NO: 299689 - DNA, 120 bp, Artificial Sequence
  ENSG00000132670_27 (sequence is synthesized)
tccaatgttttattggggaattaaatagtgtgatgtttggattgatatcgtgaaatcctcagccgagaaattgggctggattgtgctttggttaatacatctttccctaaagaagataaa

SEQ ID NO: 299690 - DNA, 120 bp, Artificial Sequence
  ENSG00000132670_28 (sequence is synthesized)
cacaaaatccattccaggtagctcggcaccaactaagaaaaaaagcacaaagttctcagagctctcgaggaaagtggttgtccccgtaccaccatgcactgtaaatatccctcccctctc

SEQ ID NO: 299691 - DNA, 120 bp, Artificial Sequence
  ENSG00000132670_29 (sequence is synthesized)
tccctggtcccctcccccatccccaccactgatatcatggggagtaataggaccagagcggtatctctggcaccacactagggactatcaggtaataaaagctttgactccctgaggaaa

SEQ ID NO: 299692 - DNA, 120 bp, Artificial Sequence
  ENSG00000132670_30 (sequence is synthesized)
ctgcggcgagtgcggcgctgacagagacgcgcgcgcgcgcgatcgcgctcggaccccggccgctgccgccatcactgtcgcccgcccagtcgcccctcagccgcttcccctcgccatgga

SEQ ID NO: 299693 - DNA, 120 bp, Artificial Sequence
  ENSG00000132670_31 (sequence is synthesized)
gcgggccgggcggcggccctgagggctagtggcggcccgaaacgccgccgcggagccgaggcggagccgctgtcctcgtccccagcggtcccgcccaacgcccgactctgtgacacaact

SEQ ID NO: 299694 - DNA, 120 bp, Artificial Sequence
  ENSG00000132670_32 (sequence is synthesized)
gggctctcctcggctgttcatggccctcctgttgctgttctctctgagttatctgagagaggccacagtcccccagctcctcctgtccaccaaacacagcccttccagttcttaggtgat

SEQ ID NO: 299695 - DNA, 120 bp, Artificial Sequence
  ENSG00000132670_33 (sequence is synthesized)
ctccaggaccctcctttcattcccagcacatctttggtttagtggtcctggccagcctccctccctaggaaggtggccaggtcctcactgagtctccttaaggacaggggcacaggggag

SEQ ID NO: 299696 - DNA, 120 bp, Artificial Sequence
  ENSG00000132670_34 (sequence is synthesized)
actagagctggctcagctttgggctgaggccagtctgacctctccagtctgtggtgctttgctacaaaactgtctggattgtgtcaccctatctaggataaatctttatgtccacatata

SEQ ID NO: 299697 - DNA, 120 bp, Artificial Sequence
  ENSG00000132670_35 (sequence is synthesized)
tagacttcttcagaagcttgccagtttttcaagctgatttctctcactggcaactcttcagagtgctgttcctactccaccctcccctggtgataagcatggattcctggttcattcttg

SEQ ID NO: 299698 - DNA, 120 bp, Artificial Sequence
  ENSG00000132671_0 (sequence is synthesized)
gagctctctggcgcagcgctagctccgccgcgctcagctgccctgcgccggcacccctggtcatgagcgccccctcgacgctgccccccgggggcgaggaagggctggggacggcctggc

SEQ ID NO: 299699 - DNA, 120 bp, Artificial Sequence
  ENSG00000132671_1 (sequence is synthesized)
ggcgaggaagggctggggacggcctggccctctgcagccaatgccagtagcgctccggcggaggcggaggaggcggtggcggggcccggggacgcgcgggcggcgggcatggtcgctatc

SEQ ID NO: 299700 - DNA, 120 bp, Artificial Sequence
  ENSG00000132671_2 (sequence is synthesized)
tcgctatccagtgcatctacgcgctggtgtgcctggtggggctggtgggcaacgccctggtcatcttcgtgatccttcgctacgccaagatgaagacggctaccaacatctacctgctca

SEQ ID NO: 299701 - DNA, 120 bp, Artificial Sequence
  ENSG00000132671_3 (sequence is synthesized)
acctggccgtagccgacgagctcttcatgctgagcgtgcccttcgtggcctcgtcggccgccctgcgccactggcccttcggctccgtgctgtgccgcgcggtgctcagcgtcgacggcc

SEQ ID NO: 299702 - DNA, 120 bp, Artificial Sequence
  ENSG00000132671_4 (sequence is synthesized)
tcaacatgttcaccagcgtcttctgtctcaccgtgctcagcgtggaccgctacgtggccgtggtgcaccctctgcgcgcggcgacctaccggcggcccagcgtggccaagctcatcaacc

SEQ ID NO: 299703 - DNA, 120 bp, Artificial Sequence
  ENSG00000132671_5 (sequence is synthesized)
cacccggcctggtcggcagtcttcgtggtctacactttcctgctgggcttcctgctgcccgtgctggccattggcctgtgctacctgctcatcgtgggcaagatgcgcgccgtggccctg

SEQ ID NO: 299704 - DNA, 120 bp, Artificial Sequence
  ENSG00000132671_6 (sequence is synthesized)
cgcgctggctggcagcagcgcaggcgctcggagaagaaaatcaccaggctggtgctgatggtcgtggtcgtctttgtgctctgctggatgcctttctacgtggtgcagctgctgaacctc

SEQ ID NO: 299705 - DNA, 120 bp, Artificial Sequence
  ENSG00000132671_7 (sequence is synthesized)
ttcgtgaccagccttgatgccaccgtcaaccacgtgtcccttatccttagctatgccaacagctgcgccaaccccattctctatggcttcctctccgacaacttccgccgattcttccag

SEQ ID NO: 299706 - DNA, 120 bp, Artificial Sequence
  ENSG00000132671_8 (sequence is synthesized)
cgggttctctgcctgcgctgctgcctcctggaaggtgctggaggtgctgaggaggagcccctggactactatgccactgctctcaagagcaaaggtggggcagggtgcatgtgcccccca

SEQ ID NO: 299707 - DNA, 120 bp, Artificial Sequence
  ENSG00000132671_9 (sequence is synthesized)
ctcccctgccagcaggaagccctgcaaccagaacccggccgcaagcgcatccccctcaccaggaccaccaccttctgaggagcccttcccctacccaccctgcgtggccacctcccaagg

SEQ ID NO: 299708 - DNA, 120 bp, Artificial Sequence
  ENSG00000132671_10 (sequence is synthesized)
ggtgggcaccattcctacagccccgaagactgcatctcctgaatgctcacctaagctccaccacctgttccttccagcagcccatgtacctgccggagagtgtcagaactcttctgctgc

SEQ ID NO: 299709 - DNA, 120 bp, Artificial Sequence
  ENSG00000132676_0 (sequence is synthesized)
ccttttttgcagtctcaggacgggcgctttggagccggccccaggcagcgtgtgtcggtcgcctagtctggagaactagtcctcgactcacggtgagggaatggaccgacacgggtattg

SEQ ID NO: 299710 - DNA, 120 bp, Artificial Sequence
  ENSG00000132676_1 (sequence is synthesized)
taccgctgagggaaaggagcgggactccggacctccaggagtgcaaggatgatgctgaaaggaataacaaggcttatctctaggatccataagttggaccctgggcgttttttacacatg

SEQ ID NO: 299711 - DNA, 120 bp, Artificial Sequence
  ENSG00000132676_2 (sequence is synthesized)
gggacccaggctcgccaaagcattgctgctcacctagataaccaggttccagttgagagtccgagagctatttcccgcaccaatgagaatgacccggccaagcatggggatcagcacgag

SEQ ID NO: 299712 - DNA, 120 bp, Artificial Sequence
  ENSG00000132676_3 (sequence is synthesized)
ggtcagcactacaacatctccccccaggatttggagactgtatttccccatggccttcctcctcgctttgtgatgcaggtgaagacattcagtgaagcttgcctgatggtaaggaaacca

SEQ ID NO: 299713 - DNA, 120 bp, Artificial Sequence
  ENSG00000132676_4 (sequence is synthesized)
gccctagaacttctgcattacctgaaaaacaccagttttgcttatccagctatacgatatcttctgtatggagagaagggaacaggaaaaaccctaagtctttgccatgttattcatttc

SEQ ID NO: 299714 - DNA, 120 bp, Artificial Sequence
  ENSG00000132676_5 (sequence is synthesized)
tgtgcaaaacaggactggctgatactacatattccagatgctcatctttgggtgaaaaattgtcgggatcttctgcagtccagctacaacaaacagcgctttgatcaacctttagaggct

SEQ ID NO: 299715 - DNA, 120 bp, Artificial Sequence
  ENSG00000132676_6 (sequence is synthesized)
aagcactgagaaagggagtcctctgggagaagtggttgaacagggcataacacgggtgaggaacgccacagatgcagttggaattgtgctgaaagagctaaagaggcaaagttctttggg

SEQ ID NO: 299716 - DNA, 120 bp, Artificial Sequence
  ENSG00000132676_7 (sequence is synthesized)
tatgtttcacctcctagtggccgtggatggaatcaatgctctttggggaagaaccactctgaaaagagaagataaaagcccgattgcccccgaggaattagcacttgttcacaacttgag

SEQ ID NO: 299717 - DNA, 120 bp, Artificial Sequence
  ENSG00000132676_8 (sequence is synthesized)
gaaaatgatgaaaaatgattggcatggaggcgccattgtgtcggctttgagccagactgggtctctctttaagccccggaaagcctatctgccccaggagttgctgggaaaggaaggatt

SEQ ID NO: 299718 - DNA, 120 bp, Artificial Sequence
  ENSG00000132676_9 (sequence is synthesized)
tgatgccctggatccctttattcccatcctggtttccaactataacccaaaggaatttgaaagttgtattcagtattatttggaaaacaattggcttcaacatgagaaagctcctacaga

SEQ ID NO: 299719 - DNA, 120 bp, Artificial Sequence
  ENSG00000132676_10 (sequence is synthesized)
agaagggaaaaaagagctgctgttcctaagtaacgcgaacccctcgctgctggagcggcactgtgcctacctctaagccaagatcacagcatgtgaggaagacagtggacatctgcttta

SEQ ID NO: 299720 - DNA, 120 bp, Artificial Sequence
  ENSG00000132676_11 (sequence is synthesized)
tgctggacccagtaagatgaggaagtcgggcagtacacaggaagaggagccaggcccttgtacctatgggattggacaggactgcagttggctctggacctgcattaaaatgggtttcac

SEQ ID NO: 299721 - DNA, 120 bp, Artificial Sequence
  ENSG00000132676_12 (sequence is synthesized)
tgtgaatgcgtgacaataagatattcccttgttcctaaaactttatatcagtttattggatgtggtttttcacatttaagataattatggctcttttcctaaaaaataaaatatctttct

SEQ ID NO: 299722 - DNA, 120 bp, Artificial Sequence
  ENSG00000132676_13 (sequence is synthesized)
tgttgtgttagattaataatatggaaggagtctttagattggccaaattgcatttctctgatattcctcttgttgcaggtcagaagagatcaattctacagaaatttccagtggttctgt

SEQ ID NO: 299723 - DNA, 75 bp, Artificial Sequence
  ENSG00000132676_14 (sequence is synthesized)
cagaagagatcaattctacagaaatttccagtggttctgttgaggctttatggaattcagcatgtcaaaattcac

SEQ ID NO: 299724 - DNA, 120 bp, Artificial Sequence
  ENSG00000132676_15 (sequence is synthesized)
cagaggtccaggtccgggagatgacagtggctcccagaaagcccaggattcaatcgctgagagagtgcttaggcccgaatgccggcccaaatcgttctactcaccgtgtcggaggccgag

SEQ ID NO: 299725 - DNA, 68 bp, Artificial Sequence
  ENSG00000132676_16 (sequence is synthesized)
acaaaaattagccgggcacggtggcatttgggaggcggatgttgcagtgagccaaaattgcaccactg

SEQ ID NO: 299726 - DNA, 120 bp, Artificial Sequence
  ENSG00000132676_17 (sequence is synthesized)
gcgcgcctccgggggggattcctcccgggcgttgagttgccaacctgggacccgaggaagttcggcgtggtggtgtgctttttgttgttgttaaccctcctcggatttctcgaatttcac

SEQ ID NO: 299727 - DNA, 120 bp, Artificial Sequence
  ENSG00000132676_18 (sequence is synthesized)
accactgtccatatgcgatgatgtttgtttgcccttgacgcacttactcatggatggtacttcagcctcgttagacagcctggtgatggaggatgaagaaaccatgtgcttctcattcag

SEQ ID NO: 299728 - DNA, 120 bp, Artificial Sequence
  ENSG00000132676_19 (sequence is synthesized)
ttctggactcagtttcccttgtcttcagcaagttatttttgttagttccttatcaaaaagtgtacataaaaattaggcaactccaaacatgcctccagggttggtgtgtgaaataataag

SEQ ID NO: 299729 - DNA, 120 bp, Artificial Sequence
  ENSG00000132676_20 (sequence is synthesized)
gccagcggtctcaggacgggcgctttggagccggccccaggcagcgtgtgtcggtcgcctagtctggagaactagtcctcgactcacgagatgaagttttaccatgttggccaggctggt

SEQ ID NO: 299730 - DNA, 120 bp, Artificial Sequence
  ENSG00000132676_21 (sequence is synthesized)
aagaaaaatatttttattaatctatgtattttgacataatttcagacttagagaaaaatcatattcctgtatgcccttcccctggattcctaaaatattaacttgatcatcattgcttta

SEQ ID NO: 299731 - DNA, 120 bp, Artificial Sequence
  ENSG00000132676_22 (sequence is synthesized)
ggaattggagggagcccagaatacaagctgctgctagcaaaggggtggggctaaatgagaagaaaatttaaaaagatgaaatttaatctgaaaaacagaaattcatgtgttgattacctt

SEQ ID NO: 299732 - DNA, 120 bp, Artificial Sequence
  ENSG00000132676_23 (sequence is synthesized)
ttgtgactagtacaattactttaagctcatgtttaaacaatattgatgttttcctccttgtatagcccaagaagattccagtaatttcagcatcaaataactgttttaaatgaacttaaa

SEQ ID NO: 299733 - DNA, 120 bp, Artificial Sequence
  ENSG00000132676_24 (sequence is synthesized)
gagtagccagccaccatatgtggagtccatatgtggagtcctgtatcaggcaatgttgccagagaatgagaagtagagttacatagaagaaaaacaaataccttaccttcaaagtgctta

SEQ ID NO: 299734 - DNA, 120 bp, Artificial Sequence
  ENSG00000132676_25 (sequence is synthesized)
atatgagaaactaaagtcatttcccataacttaaaagaggcatagaatatttcgagttgaatacagtttctgcctggcttgttttcttctgcctcttttttttaaagctcatctttgggt

SEQ ID NO: 299735 - DNA, 120 bp, Artificial Sequence
  ENSG00000132676_26 (sequence is synthesized)
attgggtaagtgcatatgatacctcacacatttcagaaagaaatgtattatcattttaaacatgttctactatttcattgctaatactttacagtctctaattttatggacagtaagtta

SEQ ID NO: 299736 - DNA, 120 bp, Artificial Sequence
  ENSG00000132676_27 (sequence is synthesized)
agaggaagggaccggcaaagcgagtctggcttgccgtttgactggaattgccagggtggccggccgagtcccatgacaacctacctccctgggttcgtcgccgcggcgctgcggctcgcc

SEQ ID NO: 299737 - DNA, 120 bp, Artificial Sequence
  ENSG00000132676_28 (sequence is synthesized)
atactacatattccagatggtaagaacttcctgttgtttcttctgtctgttaggtttagttatcctgttactgtggtagccttgcagctttaattttcttttcttttcttttcttttttt

SEQ ID NO: 299738 - DNA, 120 bp, Artificial Sequence
  ENSG00000132676_29 (sequence is synthesized)
accagttttgcttatccagctatacgatatcttctgtagcagactgagctcatccatcatgatttcttcgtgatattactgccaagcagattataaggtgaagtcaatgtgacaaaagga

SEQ ID NO: 299739 - DNA, 120 bp, Artificial Sequence
  ENSG00000132676_30 (sequence is synthesized)
aattcggctaaaagcttcctgaagccttttgatgctaagcagtccttcttttgatatttaatacccatggacataaacttctgccttagaggtcgccatggagttttgttttgttttgtt

SEQ ID NO: 299740 - DNA, 120 bp, Artificial Sequence
  ENSG00000132677_0 (sequence is synthesized)
caaagcctgcgagcgccagccgagatcgcagcccaacccatggccgggtctcctagccgcgccgcgggccggcgactgcagcttcccctgctgtgcctcttcctccagggcgccactgcc

SEQ ID NO: 299741 - DNA, 120 bp, Artificial Sequence
  ENSG00000132677_1 (sequence is synthesized)
gtcctctttgctgtctttgtccgctacaaccacaaaaccgacgctgccctctggcaccggagcaaccacagtaacgcggacaatgaattttactttcgctacccaagcttccaggacgtg

SEQ ID NO: 299742 - DNA, 120 bp, Artificial Sequence
  ENSG00000132677_2 (sequence is synthesized)
catgccatggtcttcgtgggctttggcttcctcatggtcttcctgcagcgttacggcttcagcagcgtgggcttcaccttcctcctggccgcctttgccctgcagtggtccacactggtc

SEQ ID NO: 299743 - DNA, 120 bp, Artificial Sequence
  ENSG00000132677_3 (sequence is synthesized)
cagggctttctccactccttccacggtggccacatccatgttggcgtggagagcatgatcaatgctgacttttgtgcgggggccgtgctcatctcctttggtgccgtcctgggcaagacc

SEQ ID NO: 299744 - DNA, 120 bp, Artificial Sequence
  ENSG00000132677_4 (sequence is synthesized)
gggcctacccagctgctgctcatggccctgctggaggtggtgctgtttggcatcaatgagtttgtgctccttcatctcctgggggtgagagatgccggaggctccatgactatccacacc

SEQ ID NO: 299745 - DNA, 120 bp, Artificial Sequence
  ENSG00000132677_5 (sequence is synthesized)
tttggtgcctacttcgggctcgtcctttcgcgggttctgtacaggccccagctggagaagagcaagcaccgccagggctccgtctaccattcagacctcttcgccatgattgggaccatc

SEQ ID NO: 299746 - DNA, 120 bp, Artificial Sequence
  ENSG00000132677_6 (sequence is synthesized)
ttcctgtggatcttctggcctagcttcaatgctgcactcacagcgctgggggctgggcagcatcggacggccctcaacacatactactccctggctgccagcacccttggcacctttgcc

SEQ ID NO: 299747 - DNA, 120 bp, Artificial Sequence
  ENSG00000132677_7 (sequence is synthesized)
ctttggggctctggcagctggcttcttggctgggactgtctccacgctggggtacaagttcttcacgcccatccttgaatcaaaattcaaagtccaagacacatgtggagtccacaacct

SEQ ID NO: 299748 - DNA, 120 bp, Artificial Sequence
  ENSG00000132677_8 (sequence is synthesized)
ccatgggatgccgggggtcctgggggccctcctgggggtccttgtggctggacttgccacccatgaagcttacggagatggcctggagagtgtgtttccactcatagccgagggccagcg

SEQ ID NO: 299749 - DNA, 120 bp, Artificial Sequence
  ENSG00000132677_9 (sequence is synthesized)
cagtgccacgtcacaggccatgcaccagctcttcgggctgtttgtcacactgatgtttgcctctgtgggcgggggccttggagggctcctgctgaagctaccctttctggactccccccc

SEQ ID NO: 299750 - DNA, 120 bp, Artificial Sequence
  ENSG00000132677_10 (sequence is synthesized)
agactcccagcactacgaggaccaagttcactggcaggtgcctggcgagcatgaggataaagcccagagacctctgagggtggaggaggcagacactcaggcctaacccactgccagccc

SEQ ID NO: 299751 - DNA, 120 bp, Artificial Sequence
  ENSG00000132677_11 (sequence is synthesized)
ctgagaggacacgctccttttcgaagatgctgactggctgctactaggaagttctttttgagctcccattcctccagctgcaagaagggagccatgagccagaaggaggcccctttccac

SEQ ID NO: 299752 - DNA, 120 bp, Artificial Sequence
  ENSG00000132677_12 (sequence is synthesized)
aggcagcgtctccacagggagaggggcaacaggaggctgggaaatggtggggagtggggccgtaactgggtacaatagggggaacctcaccagatgcccaacccgactgccctaccagcc

SEQ ID NO: 299753 - DNA, 120 bp, Artificial Sequence
  ENSG00000132677_13 (sequence is synthesized)
tgcacatgggtagaagaggccaaattgaggcacccaagtgatccactggccccacgtcacacagttacagtgaagcccaagccaggcctggttgagggtgataaacgccactgtctctaa

SEQ ID NO: 299754 - DNA, 120 bp, Artificial Sequence
  ENSG00000132677_14 (sequence is synthesized)
aggtgtgagccactgcacctggccctattaccctactttctgtatgcagagctcatcagcaggctatccccacctcaccctgttctagacccaacaaaatgaagctcaaaatgctaagga

SEQ ID NO: 299755 - DNA, 120 bp, Artificial Sequence
  ENSG00000132677_15 (sequence is synthesized)
ctagacccaacaaaatgaagctcaaaatgctaaggatatagagagtgaggtggaaacttggacttgggtgtgaagcaccagagcccccacccaccctaggcagaaggggctacagctcct

SEQ ID NO: 299756 - DNA, 120 bp, Artificial Sequence
  ENSG00000132677_16 (sequence is synthesized)
ccctccccatatttcatccacagccctggctagaaaagaaggatagagagttgggagggaacagtccagagtctgacagaactaagctgttgcgtaagggtctgacctggctgcttgcca

SEQ ID NO: 299757 - DNA, 120 bp, Artificial Sequence
  ENSG00000132677_17 (sequence is synthesized)
tgaacccctgacttgcttctcctcgaagcctccttattacaaagctttccctggagtccagcctcttgcccctgtgctgcaatggtaggctctccttggacatacagcatttcatccctg

SEQ ID NO: 299758 - DNA, 120 bp, Artificial Sequence
  ENSG00000132677_18 (sequence is synthesized)
tattctgggagcaaaggaaattggagttaacaaaaccaacccagaaactgccttcctggtcctctatcaagtgcagcagaaggtcatggaacaaatgacttcaagagtgttacttgttac

SEQ ID NO: 299759 - DNA, 120 bp, Artificial Sequence
  ENSG00000132677_19 (sequence is synthesized)
tgaagggtcagtaagagataatgacctttaggatctatttttgcacatcaagggtgggcaaaagcaacccgcaaatggagtcttaaaaggtgcctaggtgtctgctggcctacaagggtg

SEQ ID NO: 299760 - DNA, 120 bp, Artificial Sequence
  ENSG00000132677_20 (sequence is synthesized)
ggaaggtgttccaggctgtgggcctggcttgagcagtggcctggaggtgagactcagcctggcatgcaccctcgagaccctcttggccacttcctgttccccagtgtgagttccagtgcc

SEQ ID NO: 299761 - DNA, 120 bp, Artificial Sequence
  ENSG00000132677_21 (sequence is synthesized)
ccatgaagcttacggagatgggtgagtttcctcccaacccgtactgcagtcgtcatccatctggaatgacctctgtcattctctttcactgtgtgtgaccaagaaaaaagaatgaattca

SEQ ID NO: 299762 - DNA, 120 bp, Artificial Sequence
  ENSG00000132680_0 (sequence is synthesized)
agtcggatagttggcgggtggttgagtagaagcggtcgccatgtccgcggggagcgcgacacatcctggagctggcgggcgccgcagcaaatgggaccaaccagctccagccccacttct

SEQ ID NO: 299763 - DNA, 120 bp, Artificial Sequence
  ENSG00000132680_1 (sequence is synthesized)
cttcctcccgccagcggccccaggtggggaggtcaccagcagtgggggaagtcctgggggcaccacagctgctccttcaggagccttggatgctgctgctgctgtggctgccaagattaa

SEQ ID NO: 299764 - DNA, 120 bp, Artificial Sequence
  ENSG00000132680_2 (sequence is synthesized)
tgccatgctcatggcaaaagggaagctgaaaccaactcagaatgcttctgagaagcttcaggctcctggcaaaggcctaactagcaataaaagcaaggatgacctggtggtagctgaagt

SEQ ID NO: 299765 - DNA, 120 bp, Artificial Sequence
  ENSG00000132680_3 (sequence is synthesized)
agaaattaatgatgtgcctctcacatgtaggaacttgctgactcgaggacagactcaagacgagatcagccgacttagtggggctgcagtatcaactcgagggaggttcatgacaactga

SEQ ID NO: 299766 - DNA, 120 bp, Artificial Sequence
  ENSG00000132680_4 (sequence is synthesized)
ggaaaaagccaaagtgggaccaggggatcgtccattatatcttcatgttcagggccagacacgggaattagtggacagagctgtaaaccggatcaaagaaattatcaccaatggagtggt

SEQ ID NO: 299767 - DNA, 120 bp, Artificial Sequence
  ENSG00000132680_5 (sequence is synthesized)
aaaagctgccacaggaacaagtccaacttttaatggtgcaacagtaactgtctatcaccagccagcacccatcgctcagttgtctccagctgttagccagaagcctcccttccagtcagg

SEQ ID NO: 299768 - DNA, 120 bp, Artificial Sequence
  ENSG00000132680_6 (sequence is synthesized)
gatgcattatgttcaagataaattatttgtgggtctagaacatgctgtacccacttttaatgtcaaggagaaggtggaaggtccaggctgctcctatttgcagcacattcagattgaaac

SEQ ID NO: 299769 - DNA, 120 bp, Artificial Sequence
  ENSG00000132680_7 (sequence is synthesized)
aggtgccaaagtcttcctgcggggcaaaggttcaggctgcattgagccagcatctggccgagaagcttttgaacctatgtatatttacatcagtcaccccaaaccagaaggcctggctgc

SEQ ID NO: 299770 - DNA, 120 bp, Artificial Sequence
  ENSG00000132680_8 (sequence is synthesized)
tgccaagaagctttgtgagaatcttttgcaaacagttcatgctgaatactctagatttgtgaatcagattaatactgctgtacctttaccaggctatacacaaccctctgctataagtag

SEQ ID NO: 299771 - DNA, 120 bp, Artificial Sequence
  ENSG00000132680_9 (sequence is synthesized)
tgtccctcctcaaccaccatattatccatccaatggctatcagtctggttaccctgttgttccccctcctcagcagccagttcaacctccctacggagtaccaagcatagtgccaccagc

SEQ ID NO: 299772 - DNA, 120 bp, Artificial Sequence
  ENSG00000132680_10 (sequence is synthesized)
tgtttcattagcacctggagtcttgccggcattacctactggagtcccacctgtgccaacacaatacccgataacacaagtgcagcctccagctagcactggacagagtccgatgggtgg

SEQ ID NO: 299773 - DNA, 120 bp, Artificial Sequence
  ENSG00000132680_11 (sequence is synthesized)
tccttttattcctgctgctcctgtcaaaactgccttgcctgctggcccccagccccagccccagccccagcccccactcccaagtcagccccaggcacagaagagacgattcacagagga

SEQ ID NO: 299774 - DNA, 120 bp, Artificial Sequence
  ENSG00000132680_12 (sequence is synthesized)
cagtcagaatgagattgaaggtgcaggatcgaagccagcaagttcctcaggcaaagagagagagagggacaggcagttgatgcctccaccagcctttccagtgactggaataaaaacaga

SEQ ID NO: 299775 - DNA, 120 bp, Artificial Sequence
  ENSG00000132680_13 (sequence is synthesized)
gtccgatgaaaggaatgggtctgggaccttaacagggagccatgattatccagccaagaagatgaaaactacagagaagggatttggcttggtggcttatgctgcagattcatctgatga

SEQ ID NO: 299776 - DNA, 120 bp, Artificial Sequence
  ENSG00000132680_14 (sequence is synthesized)
agaggaggaacatggaggtcataaaaatgcaagtagttttccacagggctggagtttgggataccaatatccttcatcacaaccacgagctaaacaacagatgccattctggatggctcc

SEQ ID NO: 299777 - DNA, 120 bp, Artificial Sequence
  ENSG00000132680_15 (sequence is synthesized)
ctaggaaacagtggaacagagttttgaccctcagtgactcttcttagcaataatgcatgcatttgatttaacaagactctggggcctgtgctgggaaccatctggacctttgcagaagtt

SEQ ID NO: 299778 - DNA, 120 bp, Artificial Sequence
  ENSG00000132680_16 (sequence is synthesized)
agagattcagtgcccccctttcttaaaggggttccttaacaaccacaaaaatccttatttctgcagtggcatagaatctgttaaaatttaattagaatcacaaatttatctcagaagctt

SEQ ID NO: 299779 - DNA, 120 bp, Artificial Sequence
  ENSG00000132680_17 (sequence is synthesized)
tttaacagttggtgaaatgtgcttgtccaacaaagcatcctaacagggtcgttcccatacacatttgacctggtcagccttttccaggtgaatagccccagttctgacataaagaaagtt

SEQ ID NO: 299780 - DNA, 120 bp, Artificial Sequence
  ENSG00000132680_18 (sequence is synthesized)
ttatttgtattttactactgtttggtcaattttgatatataactggttacaaacagagccttactatttattagtggggaaatgattttaagaccgtccttttcagtatttaattctgac

SEQ ID NO: 299781 - DNA, 120 bp, Artificial Sequence
  ENSG00000132680_19 (sequence is synthesized)
agatctgcatccctgttttgttttggattatttctgttttggaaaatgctgtctcatttaaaactgttggatatagctggatcctggataggaaaatgaaattattttttcattgtgttt

SEQ ID NO: 299782 - DNA, 120 bp, Artificial Sequence
  ENSG00000132680_20 (sequence is synthesized)
tttaattggggtgatccaaagctggcaccttcaggcacattggtctcatagccattactgtttttattgcccttctaagatcctgtcttcagctgggtcagagaaaacttcttgactaaa

SEQ ID NO: 299783 - DNA, 120 bp, Artificial Sequence
  ENSG00000132680_21 (sequence is synthesized)
actggtcagaactcatcacagaaatgaaatacagtggtctctctctcccagaactggttgcagctaaaacagagagatctgactgctggctataggattttggacttaatgactgaaatt

SEQ ID NO: 299784 - DNA, 120 bp, Artificial Sequence
  ENSG00000132680_22 (sequence is synthesized)
gcaaattgtcctttttcttggcattacagattttgccaaaataactttttgtatcaaatattgatgtgtgaaagtgaaggagctagtctgctgaaccaggaatagtttgagatattgaac

SEQ ID NO: 299785 - DNA, 120 bp, Artificial Sequence
  ENSG00000132680_23 (sequence is synthesized)
tgtcatttttgcacatttgaatactttgcaggctggctttgtataaacttatcctctggtttcctatatgttgtaaatatttagaccataatttcattataaataaatctataaatattc

SEQ ID NO: 299786 - DNA, 120 bp, Artificial Sequence
  ENSG00000132680_24 (sequence is synthesized)
aatgggtctgggaccttaacagggagccatggtgagtgtgatatagctgggggaacaggggagtggctaagactggtctaaagctattagttttctcagccgggcgcagtggctcacgcc

SEQ ID NO: 299787 - DNA, 85 bp, Artificial Sequence
  ENSG00000132680_25 (sequence is synthesized)
gtgagccaagatcagaccactgcctaaataaataaatacataaataaagctattaattttctaacctgatgttcattcaggtgtt

SEQ ID NO: 299788 - DNA, 120 bp, Artificial Sequence
  ENSG00000132680_26 (sequence is synthesized)
aaataaatacataaataaagctattaattttctaacctgatgttcattcaggtgtttaatccaacctctataatctgttggccagtgaaaatacttttgggctgggcacggtggctcacg

SEQ ID NO: 299789 - DNA, 89 bp, Artificial Sequence
  ENSG00000132680_27 (sequence is synthesized)
ctgggcactgagaaagagaaaatagtttctaaaaaattgtatacagacaaccttttatttccaacaaacgtgtgccgagagagagagag

SEQ ID NO: 299790 - DNA, 120 bp, Artificial Sequence
  ENSG00000132680_28 (sequence is synthesized)
accttttatttccaacaaacgtgtgccgagagagagagagagaaaatagttttaaaaaaattgtatacagacaaccttttgtttccaaccaacgtgtatctagaaaagagttagtcgact

SEQ ID NO: 299791 - DNA, 120 bp, Artificial Sequence
  ENSG00000132680_29 (sequence is synthesized)
tattttatacatagcatcagtgaatagtaatgagtggtaggtcatttcaaaatcctgttgcctatattatgtgaataccaggaggtcatctgatacggacttaataaaggttgattttgc

SEQ ID NO: 299792 - DNA, 120 bp, Artificial Sequence
  ENSG00000132680_30 (sequence is synthesized)
tttatattgggagctgagccacacctccccttataactctattggtcagtaatggtcagtttgtggctgttaggaaaatgttgccttttagcattccagaactctaaatcctgtagaggt

SEQ ID NO: 299793 - DNA, 120 bp, Artificial Sequence
  ENSG00000132680_31 (sequence is synthesized)
acatgggatattttattctttgcctgtactcataaaaatgaacagaagaaaatacgtttttttcttttcttaacttcttttcttttaactctttaaaaggtgaaatatcagccctcaaga

SEQ ID NO: 299794 - DNA, 120 bp, Artificial Sequence
  ENSG00000132680_32 (sequence is synthesized)
tctttttttgtgtttcttttttctttctctgttttcttacatggttctggtggattcacatttgctgatgctggtgctgtttttcgtgtgatcttcaacgtttttgggtgaccattgacc

SEQ ID NO: 299795 - DNA, 120 bp, Artificial Sequence
  ENSG00000132680_33 (sequence is synthesized)
cgtgtgatcttcaacgtttttgggtgaccattgaccctgtgacctcaaaatggtgtccaactaaccacttaaaattaacatcttttttttaattaacgaatttatggtattttttttttt

SEQ ID NO: 299796 - DNA, 120 bp, Artificial Sequence
  ENSG00000132680_34 (sequence is synthesized)
gcaaaagggaagctgaaaccaactcagaatgcttctgagaaggtatttgaagttgaagggtctccactaattgcgaatttaatagttgttttgctgggattacaagtatgagccaccagg

SEQ ID NO: 299797 - DNA, 120 bp, Artificial Sequence
  ENSG00000132680_35 (sequence is synthesized)
tatgaggaaaaattaaaagcatcttgacaaagatgtagtgctccttgtatattaagatttttaatactgatgttaatcgtttaagctctttttttttcttaaaataataatctttaggta

SEQ ID NO: 299798 - DNA, 120 bp, Artificial Sequence
  ENSG00000132680_36 (sequence is synthesized)
gttgacctcagcaggatacataaacactggatttagaatcataaaacctaaaaacccagaatccacagtttgaaacccagaatccacagttactggttacatggctttggcataatgaaa

SEQ ID NO: 299799 - DNA, 120 bp, Artificial Sequence
  ENSG00000132680_37 (sequence is synthesized)
ctcagctttctcgttggtaatatatacctgcattgtgtagtgcagtagtcactagcttcatgtggcaatttaaattaaaattaaggggctgggtgtggtgactcacacctgtagtcccag

SEQ ID NO: 299800 - DNA, 120 bp, Artificial Sequence
  ENSG00000132680_38 (sequence is synthesized)
ttcctaatggctttggtcctagaattatgtaatcagacccttgtaaatgcacagcttcggctgtcccatgttaatttgtttccccctctctttcaggttcatgctgaatactctagattt

SEQ ID NO: 299801 - DNA, 120 bp, Artificial Sequence
  ENSG00000132680_39 (sequence is synthesized)
tgcaacaacatattactgaatttaggaaaaactggggaaagaggggaagtagtggtattccagaaataaatcatgtgatgtggaatgtctttttcctgctgtcttctgtgttcctaccac

SEQ ID NO: 299802 - DNA, 120 bp, Artificial Sequence
  ENSG00000132680_40 (sequence is synthesized)
ataacacccctgtccaagtcctatagagaaaaaaaaaaatccctacttttgactacagttacacagcagatcccaaagagctttgtagtagtttaacgtactacaacttatcagaaagat

SEQ ID NO: 299803 - DNA, 120 bp, Artificial Sequence
  ENSG00000132680_41 (sequence is synthesized)
gaggcacttgacagttacattaaggagctaaagtcaatacggcagttgtagatttgctaatgccactgtatttttctgctcatagcatggacccattcatatgactaatttaggtacagg

SEQ ID NO: 299804 - DNA, 120 bp, Artificial Sequence
  ENSG00000132681_0 (sequence is synthesized)
agcaaccacagggcctgggactggggggttcccagatccttgaagctcactccgcctcctcactctcactgcatttcccaccttcctgtgggccttgcggcatcttcatcactgaggcac

SEQ ID NO: 299805 - DNA, 120 bp, Artificial Sequence
  ENSG00000132681_1 (sequence is synthesized)
ctggttacgcttcacctcttgtttcctgccctcactgcattccctcacctctacctttttatccttccaccctaggcttctctcctccctcttccctcactcctgactcttcctcttccc

SEQ ID NO: 299806 - DNA, 120 bp, Artificial Sequence
  ENSG00000132681_2 (sequence is synthesized)
agcggacggctggaggaccgctcagtctctcctctctcacttcccttcctctctctcaccttcaccacccaacacctccctccctgcctctttctttctgctccctcattctctccccac

SEQ ID NO: 299807 - DNA, 120 bp, Artificial Sequence
  ENSG00000132681_3 (sequence is synthesized)
cactctcttctcgtggcccccttgcccgcgcgccctcttcccttccccttgcctcactctctcagctttcttcccacagttgagctcgggcagctctttctggggatagctatggggctt

SEQ ID NO: 299808 - DNA, 120 bp, Artificial Sequence
  ENSG00000132681_4 (sequence is synthesized)
tgggggaagaaagggacagtggctccccatgaccagagtccaagacgaagacctaaaaaagggcttatcaagaaaaaaatggtgaagagggaaaaacagaagcgcaatatggaggaactg

SEQ ID NO: 299809 - DNA, 120 bp, Artificial Sequence
  ENSG00000132681_5 (sequence is synthesized)
aagaaggaagtggtcatggatgatcacaaattaaccttggaagagctgagcaccaagtactccgtggacctgacaaagggccatagccaccaaagggcaaaggaaatcctgactcgaggt

SEQ ID NO: 299810 - DNA, 120 bp, Artificial Sequence
  ENSG00000132681_6 (sequence is synthesized)
ggacccaatactgttaccccaccccccaccactccagaatgggtcaaattctgtaagcaactgttcggaggcttctccctcctactatggactggggccattctctgctttgtggcctac

SEQ ID NO: 299811 - DNA, 120 bp, Artificial Sequence
  ENSG00000132681_7 (sequence is synthesized)
agcatccagatatatttcaatgaggagcctaccaaagacaacctctacctgagcatcgtactgtccgtcgtggtcatcgtcactggctgcttctcctattatcaggaggccaagagctcc

SEQ ID NO: 299812 - DNA, 120 bp, Artificial Sequence
  ENSG00000132681_8 (sequence is synthesized)
aagatcatggagtcttttaagaacatggtgcctcagcaagctctggtaattcgaggaggagagaagatgcaaattaatgtacaagaggtggtgttgggagacctggtggaaatcaagggt

SEQ ID NO: 299813 - DNA, 120 bp, Artificial Sequence
  ENSG00000132681_9 (sequence is synthesized)
ggagaccgagtccctgctgacctccggcttatctctgcacaaggatgtaaggtggacaactcatccttgactggggagtcagaaccccagagccgctcccctgacttcacccatgagaac

SEQ ID NO: 299814 - DNA, 120 bp, Artificial Sequence
  ENSG00000132681_10 (sequence is synthesized)
cctctggagacccgaaacatctgcttcttttccaccaactgtgtggaaggaaccgcccggggtattgtgattgctacgggagactccacagtgatgggcagaattgcctccctgacgtca

SEQ ID NO: 299815 - DNA, 120 bp, Artificial Sequence
  ENSG00000132681_11 (sequence is synthesized)
ggcctggcggttggccagacacctatcgctgctgagatcgaacacttcatccatctgatcactgtggtggccgtcttccttggtgtcactttttttgcgctctcacttctcttgggctat

SEQ ID NO: 299816 - DNA, 120 bp, Artificial Sequence
  ENSG00000132681_12 (sequence is synthesized)
ggttggctggaggctatcatttttctcattggcatcattgtggccaatgtgcctgaggggctgttggccacagtcactgtgtgcctgaccctcacagccaagcgcatggcgcggaagaac

SEQ ID NO: 299817 - DNA, 120 bp, Artificial Sequence
  ENSG00000132681_13 (sequence is synthesized)
tgcctggtgaagaacctggaggcggtggagacgctgggctccacgtccaccatctgctcagacaagacgggcaccctcacccagaaccgcatgaccgtcgcccacatgtggtttgatatg

SEQ ID NO: 299818 - DNA, 120 bp, Artificial Sequence
  ENSG00000132681_14 (sequence is synthesized)
accgtgtatgaggccgacaccactgaagaacagactggaaaaacatttaccaagagctctgatacctggtttatgctggcccgaatcgctggcctctgcaaccgggctgactttaaggct

SEQ ID NO: 299819 - DNA, 120 bp, Artificial Sequence
  ENSG00000132681_15 (sequence is synthesized)
caaggtggcagagattccctttaattctaccaacaagtaccagatgtccatccaccttcgggaggacagctcccagacccacgtactgatgatgaagggtgctccggagaggatcttgga

SEQ ID NO: 299820 - DNA, 120 bp, Artificial Sequence
  ENSG00000132681_16 (sequence is synthesized)
gttttgttctacctttcttctgaatgggcaggagtactcaatgaacgatgaaatgaaggaagccttccaaaatgcctacttagaactgggaggtctgggggaacgtgtgctaggcttctg

SEQ ID NO: 299821 - DNA, 120 bp, Artificial Sequence
  ENSG00000132681_17 (sequence is synthesized)
cttcttgaatctgcctagcagcttctccaagggattcccatttaatacagatgaaataaatttccccatggacaacctttgttttgtgggcctcatatccatgattgaccctccccgagc

SEQ ID NO: 299822 - DNA, 120 bp, Artificial Sequence
  ENSG00000132681_18 (sequence is synthesized)
tgcagtgcctgatgctgtgagcaagtgtcgcagtgcaggaattaaggtgatcatggtaacaggagatcatcccattacagctaaggccattgccaagggtgtgggcatcatctcagaagg

SEQ ID NO: 299823 - DNA, 120 bp, Artificial Sequence
  ENSG00000132681_19 (sequence is synthesized)
cactgagacggcagaggaagtcgctgcccggcttaagatccctatcagcaaggtcgatgccagtgctgccaaagccattgtggtgcatggtgcagaactgaaggacatacagtccaagca

SEQ ID NO: 299824 - DNA, 120 bp, Artificial Sequence
  ENSG00000132681_20 (sequence is synthesized)
gcttgatcagatcctccagaaccaccctgagatcgtgtttgctcggacctcccctcagcagaagctcatcattgtcgagggatgtcagaggctgggagccgttgtggccgtgacaggtga

SEQ ID NO: 299825 - DNA, 120 bp, Artificial Sequence
  ENSG00000132681_21 (sequence is synthesized)
cggggtgaacgactcccctgcgctgaagaaggctgacattggcattgccatgggcatctctggctctgacgtctctaagcaggcagccgacatgatcctgctggatgacaactttgcctc

SEQ ID NO: 299826 - DNA, 120 bp, Artificial Sequence
  ENSG00000132681_22 (sequence is synthesized)
catcgtcacgggggtggaggagggccgcctgatctttgacaacctgaagaaatccatcatgtacaccctgaccagcaacatccccgagatcacgcccttcctgatgttcatcatcctcgg

SEQ ID NO: 299827 - DNA, 120 bp, Artificial Sequence
  ENSG00000132681_23 (sequence is synthesized)
tatacccctgcctctgggaaccataaccatcctctgcattgatctcggcactgacatggtccctgccatctccttggcttatgagtcagctgaaagcgacatcatgaagaggcttccaag

SEQ ID NO: 299828 - DNA, 120 bp, Artificial Sequence
  ENSG00000132681_24 (sequence is synthesized)
gaacccaaagacggataatctggtgaaccaccgtctcattggcatggcctatggacagattgggatgatccaggctctggctggattctttacctactttgtaatcctggctgagaatgg

SEQ ID NO: 299829 - DNA, 120 bp, Artificial Sequence
  ENSG00000132681_25 (sequence is synthesized)
ttttaggcctgttgatctgctgggcatccgcctccactgggaagataaatacttgaatgacctggaggacagctacggacagcagtggacctatgagcaacgaaaagttgtggagttcac

SEQ ID NO: 299830 - DNA, 120 bp, Artificial Sequence
  ENSG00000132681_26 (sequence is synthesized)
atgccaaacggccttttttgtcaccatcgtggttgtgcagtgggcggatctcatcatctccaagactcgccgcaactcacttttccagcagggcatgagaaacaaagtcttaatatttgg

SEQ ID NO: 299831 - DNA, 120 bp, Artificial Sequence
  ENSG00000132681_27 (sequence is synthesized)
gatcctggaggagacactcttggctgcatttctgtcctacactccaggcatggacgtggccctgcgaatgtacccactcaagataacctggtggctctgtgccattccctacagtattct

SEQ ID NO: 299832 - DNA, 120 bp, Artificial Sequence
  ENSG00000132681_28 (sequence is synthesized)
catcttcgtctatgatgaaatcagaaaactcctcatccgtcagcacccggatggctgggtggaaagggagacgtactactaaactcagcagatgaagagcttcatgtgacacaggggtgt

SEQ ID NO: 299833 - DNA, 120 bp, Artificial Sequence
  ENSG00000132681_29 (sequence is synthesized)
tgtgagagctgggatggggccagagattataagtttgacacaacatctgagacactaggatgaattatcttggatgagaaagatgggcaatcctgggctggcttgagggaatcatgggca

SEQ ID NO: 299834 - DNA, 120 bp, Artificial Sequence
  ENSG00000132681_30 (sequence is synthesized)
gaggatgaggtgggctgaagggaagcccagcctgcatctagctggagccccgcagggaggggcatggtcctgctgaatcccgtagccagtctagacagtaaatgtctggaaaagccctca

SEQ ID NO: 299835 - DNA, 120 bp, Artificial Sequence
  ENSG00000132681_31 (sequence is synthesized)
caccagcccagccagaagcaagtcccagcccccagccctcccctggcctaccttttggggcccttctctgaaccaggctcccctgtcctgcaactctgtcattcacagggatgatccagg

SEQ ID NO: 299836 - DNA, 120 bp, Artificial Sequence
  ENSG00000132681_32 (sequence is synthesized)
gcggagatgagagagaaaaaccccaaggtggcagagattccctttaattctaccaacaagtaccaggtacagaacccacaaagatgtccatccaccttcgggaggacagctcccagaccc

SEQ ID NO: 299837 - DNA, 81 bp, Artificial Sequence
  ENSG00000132681_33 (sequence is synthesized)
caggcatggacgtggccctgcgaatgtacccactcaaatggagttttgctcttactgcccaggctggagtgaaatggcgca

SEQ ID NO: 299838 - DNA, 120 bp, Artificial Sequence
  ENSG00000132681_34 (sequence is synthesized)
aggcatgagccaccacatccggccttcttccaacacatttctatgcatgtctctactctgctcacctttccatcccttgtaatgttttacacgatgttttatacaatgtaggcactcaat

SEQ ID NO: 299839 - DNA, 120 bp, Artificial Sequence
  ENSG00000132681_35 (sequence is synthesized)
taatgtttaataggagacattggcactggccttagacactcacaatccaaggtggaaatctcaactctactatgtattattctgtggccttggacaagtatggaaccattctgagcctca

SEQ ID NO: 299840 - DNA, 120 bp, Artificial Sequence
  ENSG00000132681_36 (sequence is synthesized)
gctacacctgcaaagtctcaataatacactccagggatagaccttgcagagtgttgtgagatttacacgtagaaatgggcataaagcaccaagcatgcttaggtcatggtagatgccttg

SEQ ID NO: 299841 - DNA, 120 bp, Artificial Sequence
  ENSG00000132681_37 (sequence is synthesized)
ttactagtagctttattcttgctgttattaatgccattatagacataataacaaatgtggttggtattatctgtgctttcaaacactctgtgtacacattaaccataaaacttagcacct

SEQ ID NO: 299842 - DNA, 120 bp, Artificial Sequence
  ENSG00000132681_38 (sequence is synthesized)
ctgtccatcacaagaggaaccccatggagagctccttttcatacatcagagatcaagaggaaatgcaaaacccacatttctctctccttgctgcgggttgtcccctcgggttcatttcat

SEQ ID NO: 299843 - DNA, 120 bp, Artificial Sequence
  ENSG00000132681_39 (sequence is synthesized)
gaatgtgccctttccctcccccaccacagccacaaggactcccatgcccaaccacactagctagcccctctcaggagacttctcacgcttttaggagacagaggcccagggactagaatg

SEQ ID NO: 299844 - DNA, 120 bp, Artificial Sequence
  ENSG00000132681_40 (sequence is synthesized)
ctagaatgactaacttatttttggattgtacttcacagttttcaaagtattttctacactatctcttataaaaacccaatgaagggccaggtgtgtggctcatgcctgtaatcccagcag

SEQ ID NO: 299845 - DNA, 86 bp, Artificial Sequence
  ENSG00000132681_41 (sequence is synthesized)
caggctgagcaaaaaatcagccaggcatagtggcggtgcctgtaatcccagcagtttccgaggccaaggttggtagatcacctgag

SEQ ID NO: 299846 - DNA, 78 bp, Artificial Sequence
  ENSG00000132681_42 (sequence is synthesized)
aaaacccccgtctctgctaaaaattcaaaaaatcagcccggcatagtggcggtgcctgtaatcccagctactcgggag

SEQ ID NO: 299847 - DNA, 120 bp, Artificial Sequence
  ENSG00000132681_43 (sequence is synthesized)
gagactccatcttcaaaaacaaaaacaaaacacaacaaaaaaccccatgaaggaggcaaggcagaggcttttatgttttgtcgaaggaactaagattttgcaaagttaaatggactgacc

SEQ ID NO: 299848 - DNA, 82 bp, Artificial Sequence
  ENSG00000132681_44 (sequence is synthesized)
tcgaaggaactaagattttgcaaagttaaatggactgacctgaggtcataatgcattcttgctagccccagaacacaggcgt

SEQ ID NO: 299849 - DNA, 78 bp, Artificial Sequence
  ENSG00000132681_45 (sequence is synthesized)
agagtgcaacagcgattctcctgccttagcctcccaagtggctgggattatgggcacatgccaccatgcccagctaat

SEQ ID NO: 299850 - DNA, 120 bp, Artificial Sequence
  ENSG00000132681_46 (sequence is synthesized)
tctttttctttcctgtctactctcttttctttctttgccagccccactatttctgctctctcgccatccagttggcaaggatgcaggggaaaagtgagagtgcctggttctgcccccagg

SEQ ID NO: 299851 - DNA, 120 bp, Artificial Sequence
  ENSG00000132681_47 (sequence is synthesized)
gagcttcaggctgagaagataatggagattcctgtgcaaataataccaggctgcagttttctggaaaaaggaggaggggctgggttcaacctggggcgagatgtgactggggaggggagg

SEQ ID NO: 299852 - DNA, 120 bp, Artificial Sequence
  ENSG00000132688_0 (sequence is synthesized)
agtcgctcaggctactcccaccccgccccgccccgtcattgtccccgtcggtctcttttctcttccgtcctaaaagctctgcgagccgctcccttctcccggtgccccgcgtctgtccat

SEQ ID NO: 299853 - DNA, 120 bp, Artificial Sequence
  ENSG00000132688_1 (sequence is synthesized)
cctcagtgggtcagacgagcaggatggagggctgcatgggggaggagtcgtttcagatgtgggagctcaatcggcgcctggaggcctacctggcccgggtcaaggcgctggaggagcaga

SEQ ID NO: 299854 - DNA, 120 bp, Artificial Sequence
  ENSG00000132688_2 (sequence is synthesized)
atgagctgctcagcgcggagctcggggggctccgggcacaatccgcggacacctcctggcgggcgcatgccgacgacgagctggcggccctgcgggccctcgttgaccaacgctggcggg

SEQ ID NO: 299855 - DNA, 120 bp, Artificial Sequence
  ENSG00000132688_3 (sequence is synthesized)
agaagcacgcggccgaggtggcgcgcgacaacctggctgaagagctggagggcgtggcaggccgatgccagcagctgcggctggcccgggagcggacgacggaggaggtagcccgcaacc

SEQ ID NO: 299856 - DNA, 120 bp, Artificial Sequence
  ENSG00000132688_4 (sequence is synthesized)
ggcgcgccgtcgaggcagagaaatgcgcccgggcctggctgagtagccaggtggcagagctggagcgcgagctagaggctctacgcgtggcgcacgaggaggagcgcgtcggcctgaacg

SEQ ID NO: 299857 - DNA, 120 bp, Artificial Sequence
  ENSG00000132688_5 (sequence is synthesized)
cgcgccgccccgcgggcctcccgcgccggccccggaggtagaggagctggcaaggcgactgggcgaggcgtggcgcggggcagtgcgcggctaccaggagcgcgtggcacacatggagac

SEQ ID NO: 299858 - DNA, 120 bp, Artificial Sequence
  ENSG00000132688_6 (sequence is synthesized)
accaggagcgcgtggcacacatggagacgtcgctgggccaggcccgcgagcggctgggccgggcggtgcagggtgcccgcgagggccgcctggagctgcagcagctccaggctgagcgcg

SEQ ID NO: 299859 - DNA, 120 bp, Artificial Sequence
  ENSG00000132688_7 (sequence is synthesized)
gaggcctcctggagcgcagggcagcgttggaacagaggttggagggccgctggcaggagcggctgcgggctactgaaaagttccagctggctgtggaggccctggagcaggagaaacagg

SEQ ID NO: 299860 - DNA, 120 bp, Artificial Sequence
  ENSG00000132688_8 (sequence is synthesized)
gcctacagagccagatcgctcaggtcctggaaggtcggcagcagctggcgcacctcaagatgtccctcagcctggaggtggccacgtacaggaccctcctggaggctgagaactcccggc

SEQ ID NO: 299861 - DNA, 120 bp, Artificial Sequence
  ENSG00000132688_9 (sequence is synthesized)
tgcaaacacctggcggtggctccaagacttccctcagctttcaggaccccaagctggagctgcaattccctaggaccccagagggccggcgtcttggatctttgctcccagtcctgagcc

SEQ ID NO: 299862 - DNA, 120 bp, Artificial Sequence
  ENSG00000132688_10 (sequence is synthesized)
caacttccctcccctcacccttgcctgctacccttgagacacctgtgccagcctttcttaagaaccaagaattcctccaggcccgtacccctaccttggccagcacccccatccccccca

SEQ ID NO: 299863 - DNA, 120 bp, Artificial Sequence
  ENSG00000132688_11 (sequence is synthesized)
cacctcaggcaccctctcctgctgtagatgcagagatcagagcccaggatgctcctctctctctgctccagacacagggtgggaggaaacaggctccagagcccctgcgggctgaagcca

SEQ ID NO: 299864 - DNA, 120 bp, Artificial Sequence
  ENSG00000132688_12 (sequence is synthesized)
gggtggccattcctgccagcgtcctgcctggaccagaggagcctgggggccagcggcaagaggccagtacaggccagtccccagaggaccatgcctccttggcaccacccctcagccctg

SEQ ID NO: 299865 - DNA, 120 bp, Artificial Sequence
  ENSG00000132688_13 (sequence is synthesized)
accactccagtttagaggctaaggatggagaatccggtgggtctagagtgttcagcatatgccgaggggaaggtgaagggcaaatctgggggttggtagagaaagaaacagccatagagg

SEQ ID NO: 299866 - DNA, 120 bp, Artificial Sequence
  ENSG00000132688_14 (sequence is synthesized)
gcaaagtggtaagcagcttgcagcaggaaatatgggaagaagaggatctaaacaggaaggaaatccaggactcccaggttcctttggaaaaagaaaccctgaagtctctgggagaggaga

SEQ ID NO: 299867 - DNA, 120 bp, Artificial Sequence
  ENSG00000132688_15 (sequence is synthesized)
ttcaagagtcactgaagactctggaaaaccagagccatgagacactagaaagggagaatcaagaatgtccgaggtctttagaagaagacttagaaacactaaaaagtctagaaaaggaaa

SEQ ID NO: 299868 - DNA, 120 bp, Artificial Sequence
  ENSG00000132688_16 (sequence is synthesized)
ataaagagctattaaaggatgtggaggtagtgagacctctagaaaaagaggctgtaggccaacttaagcctacaggaaaagaggacacacagacattgcaatccctgcaaaaggagaatc

SEQ ID NO: 299869 - DNA, 120 bp, Artificial Sequence
  ENSG00000132688_17 (sequence is synthesized)
aagaactaatgaaatctcttgaaggtaatctagagacatttttatttccaggaacggaaaatcaagaattagtaagttctctgcaagagaacttagagtcattgacagctctggaaaagg

SEQ ID NO: 299870 - DNA, 120 bp, Artificial Sequence
  ENSG00000132688_18 (sequence is synthesized)
agaatcaagagccactgagatctccagaagtaggggatgaggaggcactgagacctctgacaaaggagaatcaggaacccctgaggtctcttgaagatgagaacaaagaggcctttagat

SEQ ID NO: 299871 - DNA, 120 bp, Artificial Sequence
  ENSG00000132688_19 (sequence is synthesized)
ctctagaaaaagagaaccaggagccactgaagactctagaagaagaggaccagagtattgtgagacctctagaaacagagaatcacaaatcactgaggtctttagaagaacaggaccaag

SEQ ID NO: 299872 - DNA, 120 bp, Artificial Sequence
  ENSG00000132688_20 (sequence is synthesized)
agacattgagaactcttgaaaaagagactcaacagcgacggaggtctctaggggaacaggatcagatgacattaagacccccagaaaaagtggatctagaaccactgaagtctcttgacc

SEQ ID NO: 299873 - DNA, 120 bp, Artificial Sequence
  ENSG00000132688_21 (sequence is synthesized)
aggagatagctagacctcttgaaaatgagaatcaagagttcttaaagtcactcaaagaagagagcgtagaggcagtaaaatctttagaaacagagatcctagaatcactgaagtctgcgg

SEQ ID NO: 299874 - DNA, 120 bp, Artificial Sequence
  ENSG00000132688_22 (sequence is synthesized)
gacaagagaacctggaaacactgaaatctccagaaactcaagcaccactgtggactccagaagaaataaatcagggggcaatgaatcctctagaaaaggaaattcaagaaccactggagt

SEQ ID NO: 299875 - DNA, 120 bp, Artificial Sequence
  ENSG00000132688_23 (sequence is synthesized)
aggaatcattgagatctctgggagcatggaacctggagaatttgagatctccagaggaggtagacaaggaaagtcaaaggaatctggaagaggaagagaacctgggaaagggagagtacc

SEQ ID NO: 299876 - DNA, 120 bp, Artificial Sequence
  ENSG00000132688_24 (sequence is synthesized)
aagagtcactgaggtctctggaggaggagggacaggagctgccgcagtctgcagatgtgcagaggtgggaagatacggtggagaaggaccaagaactggctcaggaaagccctcctggga

SEQ ID NO: 299877 - DNA, 120 bp, Artificial Sequence
  ENSG00000132688_25 (sequence is synthesized)
tggctggagtggaaaatgaggatgaggcagagctgaatctgagggagcaggatggcttcactgggaaggaggaggtggtagagcagggagagctgaatgccacagaggaggtctggatcc

SEQ ID NO: 299878 - DNA, 120 bp, Artificial Sequence
  ENSG00000132688_26 (sequence is synthesized)
caggcgaggggcacccagagagccctgagcccaaagagcagagaggcctggttgagggagccagtgtgaagggaggggctgagggcctccaggaccctgaagggcaatcacaacaggtgg

SEQ ID NO: 299879 - DNA, 120 bp, Artificial Sequence
  ENSG00000132688_27 (sequence is synthesized)
gggccccaggcctccaggctccccaggggctgccagaggcgatagagcccctggtggaagatgatgtggccccagggggtgaccaagcctccccagaggtcatgttggggtcagagcctg

SEQ ID NO: 299880 - DNA, 120 bp, Artificial Sequence
  ENSG00000132688_28 (sequence is synthesized)
ccatgggtgagtctgctgcgggagctgagccaggcccggggcagggggtgggagggctgggggacccaggccatctgaccagggaagaggtgatggaaccacccctggaagaggagagtt

SEQ ID NO: 299881 - DNA, 120 bp, Artificial Sequence
  ENSG00000132688_29 (sequence is synthesized)
tggaggcaaagagggttcagggcttggaagggcctagaaaggacctagaggaggcaggtggtctggggacagagttctccgagctgcctgggaagagcagagacccttgggagcctccca

SEQ ID NO: 299882 - DNA, 120 bp, Artificial Sequence
  ENSG00000132688_30 (sequence is synthesized)
gggagggtagggaggagtcagaggctgaggcccccaggggagcagaggaggcgttccctgctgagaccctgggccacactggaagtgatgccccttcaccttggcctctggggtcagagg

SEQ ID NO: 299883 - DNA, 120 bp, Artificial Sequence
  ENSG00000132688_31 (sequence is synthesized)
aagctgaggaggatgtaccaccagtgctggtctcccccagcccaacgtacaccccgatcctggaagatgcccctgggcctcagcctcaggctgaagggagtcaggaggctagctgggggg

SEQ ID NO: 299884 - DNA, 120 bp, Artificial Sequence
  ENSG00000132688_32 (sequence is synthesized)
tgcaggggagggctgaagccctggggaaagtagagagcgagcaggaggagttgggttctggggagatccccgagggcccccaggaggaaggggaggagagcagagaagagagcgaggagg

SEQ ID NO: 299885 - DNA, 120 bp, Artificial Sequence
  ENSG00000132688_33 (sequence is synthesized)
atgagctcggggagacccttccagactccactcccctgggcttctacctcaggtcccccacctcccccaggtgggaccccactggagagcagaggccaccccctcaaggggagactggaa

SEQ ID NO: 299886 - DNA, 120 bp, Artificial Sequence
  ENSG00000132688_34 (sequence is synthesized)
aggagggctgggatcctgctgtcctggcttccgagggccttgaggccccaccctcagaaaaggaggagggggaggagggagaagaggagtgtggccgtgactctgacctgtcagaagaat

SEQ ID NO: 299887 - DNA, 120 bp, Artificial Sequence
  ENSG00000132688_35 (sequence is synthesized)
ttgaggacctggggactgaggcaccttttcttcctggggtccctggggaggtggcagaacctctgggccaggtgccccagctgctactggatcctgcagcctgggatcgagatggggagt

SEQ ID NO: 299888 - DNA, 120 bp, Artificial Sequence
  ENSG00000132688_36 (sequence is synthesized)
ccgatgggtttgcagatgaggaagaaagtggggaggagggagaggaggatcaggaggaggggagggagccaggggctgggcggtgggggccagggtcttctgttggcagcctccaggccc

SEQ ID NO: 299889 - DNA, 120 bp, Artificial Sequence
  ENSG00000132688_37 (sequence is synthesized)
tgagtagctcccagagaggggaattcctggagtctgattctgtgagtgtcagtgtcccctgggatgacagcttgaggggtgcagtggctggtgcccccaagactgccctggaaacggagt

SEQ ID NO: 299890 - DNA, 120 bp, Artificial Sequence
  ENSG00000132688_38 (sequence is synthesized)
cccaggacagtgctgagccttctggctcagaggaagagtctgaccctgtttccttggagagggaggacaaagtccctggccctctagagatccccagtgggatggaggatgcaggcccag

SEQ ID NO: 299891 - DNA, 120 bp, Artificial Sequence
  ENSG00000132688_39 (sequence is synthesized)
gggcagacatcattggtgttaatggccagggtcccaacttggaggggaagtcacagcatgtgaatgggggagtgatgaacgggctggagcagtctgaggaagtggggcaaggaatgccgc

SEQ ID NO: 299892 - DNA, 120 bp, Artificial Sequence
  ENSG00000132688_40 (sequence is synthesized)
tagtctctgagggagaccgagggagcccctttcaggaggaggaggggagtgctctgaagacctcttgggcaggggctcctgttcacctgggccagggtcagttcctgaagttcactcaga

SEQ ID NO: 299893 - DNA, 120 bp, Artificial Sequence
  ENSG00000132688_41 (sequence is synthesized)
gggaaggagatagagagtcctggtcctcaggggaggactaggaaaagaccatctgcccggcactggggacttaggggtgcggggaggggaaggacgcctccaagcccgctccctgctcag

SEQ ID NO: 299894 - DNA, 120 bp, Artificial Sequence
  ENSG00000132688_42 (sequence is synthesized)
gagcagcactcttaacttacgatctcttgacatatggtttctggctgagaggcctggcccgctaaggtgaaaaggggtgtggcaaaggagcctactccaagaatggaggctgtaggaata

SEQ ID NO: 299895 - DNA, 120 bp, Artificial Sequence
  ENSG00000132688_43 (sequence is synthesized)
taacctcccaccctgcaaagggaatctcttgcctgctccatctcataggctaagtcagctgaatcccgatagtactaggtccccttccctccgcatcccgtcagctggaaaaggcctgtg

SEQ ID NO: 299896 - DNA, 120 bp, Artificial Sequence
  ENSG00000132688_44 (sequence is synthesized)
gcccagaggcttctccaaagggagggtgacatgctggcttttgtgcccaagctcaccagccctgcgccacctcactgcagtagtgcaccatctcactgcagtagcacgccctcctgggcc

SEQ ID NO: 299897 - DNA, 120 bp, Artificial Sequence
  ENSG00000132688_45 (sequence is synthesized)
gtctggcctgtggctaatggaggtgacggcactcccatgtgctgactccccccatccctgccacgctgtggccctgcctggctagtccctgcctgaataaagtaatgcctccgcttcaaa

SEQ ID NO: 299898 - DNA, 120 bp, Artificial Sequence
  ENSG00000132692_0 (sequence is synthesized)
ctcttccgaatgtcctgcggccccagcctctcctcacgctcgcgcagtctccgccgcagtctcagctgcagctgcaggactgagccgtgcacccggaggagacccccggaggaggcgaca

SEQ ID NO: 299899 - DNA, 120 bp, Artificial Sequence
  ENSG00000132692_1 (sequence is synthesized)
aacttcgcagtgccgcgacccaaccccagccctgggtagcctgcagcatggcccagctgttcctgcccctgctggcagccctggtcctggcccaggctcctgcagctttagcagatgttc

SEQ ID NO: 299900 - DNA, 120 bp, Artificial Sequence
  ENSG00000132692_2 (sequence is synthesized)
tggaaggagacagctcagaggaccgcgcttttcgcgtgcgcatcgcgggcgacgcgccactgcagggcgtgctcggcggcgccctcaccatcccttgccacgtccactacctgcggccac

SEQ ID NO: 299901 - DNA, 120 bp, Artificial Sequence
  ENSG00000132692_3 (sequence is synthesized)
cgccgagccgccgggctgtgctgggctctccgcgggtcaagtggactttcctgtcccggggccgggaggcagaggtgctggtggcgcggggagtgcgcgtcaaggtgaacgaggcctacc

SEQ ID NO: 299902 - DNA, 120 bp, Artificial Sequence
  ENSG00000132692_4 (sequence is synthesized)
ggttccgcgtggcactgcctgcgtacccagcgtcgctcaccgacgtctccctggcgctgagcgagctgcgccccaacgactcaggtatctatcgctgtgaggtccagcacggcatcgatg

SEQ ID NO: 299903 - DNA, 120 bp, Artificial Sequence
  ENSG00000132692_5 (sequence is synthesized)
acagcagcgacgctgtggaggtcaaggtcaaaggggtcgtctttctctaccgagagggctctgcccgctatgctttctccttttctggggcccaggaggcctgtgcccgcattggagccc

SEQ ID NO: 299904 - DNA, 120 bp, Artificial Sequence
  ENSG00000132692_6 (sequence is synthesized)
acatcgccaccccggagcagctctatgccgcctaccttgggggctatgagcaatgtgatgctggctggctgtcggatcagaccgtgaggtatcccatccagaccccacgagaggcctgtt

SEQ ID NO: 299905 - DNA, 120 bp, Artificial Sequence
  ENSG00000132692_7 (sequence is synthesized)
acggagacatggatggcttccccggggtccggaactatggtgtggtggacccggatgacctctatgatgtgtactgttatgctgaagacctaaatggagaactgttcctgggtgaccctc

SEQ ID NO: 299906 - DNA, 120 bp, Artificial Sequence
  ENSG00000132692_8 (sequence is synthesized)
cagagaagctgacattggaggaagcacgggcgtactgccaggagcggggtgcagagattgccaccacgggccaactgtatgcagcctgggatggtggcctggaccactgcagcccagggt

SEQ ID NO: 299907 - DNA, 120 bp, Artificial Sequence
  ENSG00000132692_9 (sequence is synthesized)
ggctagctgatggcagtgtgcgctaccccatcgtcacacccagccagcgctgtggtgggggcttgcctggtgtcaagactctcttcctcttccccaaccagactggcttccccaataagc

SEQ ID NO: 299908 - DNA, 120 bp, Artificial Sequence
  ENSG00000132692_10 (sequence is synthesized)
acagccgcttcaacgtctactgcttccgagactcggcccagccttctgccatccctgaggcctccaacccagcctccaacccagcctctgatggactagaggctatcgtcacagtgacag

SEQ ID NO: 299909 - DNA, 120 bp, Artificial Sequence
  ENSG00000132692_11 (sequence is synthesized)
agaccctggaggaactgcagctgcctcaggaagccacagagagtgaatcccgtggggccatctactccatccccatcatggaggacggaggaggtggaagctccactccagaagacccag

SEQ ID NO: 299910 - DNA, 120 bp, Artificial Sequence
  ENSG00000132692_12 (sequence is synthesized)
cagaggcccctaggacgctcctagaatttgaaacacaatccatggtaccgcccacggggttctcagaagaggaaggtaaggcattggaggaagaagagaaatatgaagatgaagaagaga

SEQ ID NO: 299911 - DNA, 120 bp, Artificial Sequence
  ENSG00000132692_13 (sequence is synthesized)
gcgagctcagcagcccgggccctgaggcctctctccccactgagccagcagcccaggaggagtcactctcccaggcgccagcaagggcagtcctgcagcctggtgcatcaccacttcctg

SEQ ID NO: 299912 - DNA, 120 bp, Artificial Sequence
  ENSG00000132692_14 (sequence is synthesized)
atggagagtcagaagcttccaggcctccaagggtccatggaccacctactgagactctgcccactcccagggagaggaacctagcatccccatcaccttccactctggttgaggcaagag

SEQ ID NO: 299913 - DNA, 120 bp, Artificial Sequence
  ENSG00000132692_15 (sequence is synthesized)
aggtgggggaggcaactggtggtcctgagctatctggggtccctcgaggagagagcgaggagacaggaagctccgagggtgccccttccctgcttccagccacacgggcccctgagggta

SEQ ID NO: 299914 - DNA, 120 bp, Artificial Sequence
  ENSG00000132692_16 (sequence is synthesized)
ccagggagctggaggccccctctgaagataattctggaagaactgccccagcagggacctcagtgcaggcccagccagtgctgcccactgacagcgccagccgaggtggagtggccgtgg

SEQ ID NO: 299915 - DNA, 120 bp, Artificial Sequence
  ENSG00000132692_17 (sequence is synthesized)
tccccgcatcaggtgactgtgtccccagcccctgccacaatggtgggacatgcttggaggaggaggaaggggtccgctgcctatgtctgcctggctatgggggggacctgtgcgatgttg

SEQ ID NO: 299916 - DNA, 120 bp, Artificial Sequence
  ENSG00000132692_18 (sequence is synthesized)
gcctccgcttctgcaaccccggctgggacgccttccagggcgcctgctacaagcacttttccacacgaaggagctgggaggaggcagagacccagtgccggatgtacggcgcgcatctgg

SEQ ID NO: 299917 - DNA, 120 bp, Artificial Sequence
  ENSG00000132692_19 (sequence is synthesized)
ccagcatcagcacacccgaggaacaggacttcatcaacaaccggtaccgggagtaccagtggatcggactcaacgacaggaccatcgaaggcgacttcttgtggtcggatggcgtccccc

SEQ ID NO: 299918 - DNA, 120 bp, Artificial Sequence
  ENSG00000132692_20 (sequence is synthesized)
tgctctatgagaactggaaccctgggcagcctgacagctacttcctgtctggagagaactgcgtggtcatggtgtggcatgatcagggacaatggagtgacgtgccctgcaactaccacc

SEQ ID NO: 299919 - DNA, 120 bp, Artificial Sequence
  ENSG00000132692_21 (sequence is synthesized)
tgtcctacacctgcaagatggggctggtgtcctgtgggccgccaccggagctgcccctggctcaagtgttcggccgcccacggctgcgctatgaggtggacactgtgcttcgctaccggt

SEQ ID NO: 299920 - DNA, 120 bp, Artificial Sequence
  ENSG00000132692_22 (sequence is synthesized)
gccgggaaggactggcccagcgcaatctgccgctgatccgatgccaagagaacggtcgttgggaggccccccagatctcctgtgtgcccagaagacctgcccgagctctgcacccagagg

SEQ ID NO: 299921 - DNA, 120 bp, Artificial Sequence
  ENSG00000132692_23 (sequence is synthesized)
aggacccagaaggacgtcaggggaggctactgggacgctggaaggcgctgttgatccccccttccagccccatgccaggtccctagggggcaaggccttgaacactgccggccacagcac

SEQ ID NO: 299922 - DNA, 120 bp, Artificial Sequence
  ENSG00000132692_24 (sequence is synthesized)
tgccctgtcacccaaattttccctcacaccctgcgctcccgccaccacaggaagtgacaacatgacgaggggtggtactggagtccaggtgacagttcctgaaggggcttctgggaaata

SEQ ID NO: 299923 - DNA, 120 bp, Artificial Sequence
  ENSG00000132692_25 (sequence is synthesized)
cctaggaggctccagcccagcccaggccctctccccctaccctgggcaccagatcttccatcagggccggagtaaatccctaagtgcctcaactgccctctccctggcagccatcttgtc

SEQ ID NO: 299924 - DNA, 120 bp, Artificial Sequence
  ENSG00000132692_26 (sequence is synthesized)
ccctctattcctctagggagcactgtgcccactctttctgggttttccaagggaatgggcttgcaggatggagtgtctgtaaaatcaacaggaaataaaactgtgtatgagcccaggcaa

SEQ ID NO: 299925 - DNA, 120 bp, Artificial Sequence
  ENSG00000132692_27 (sequence is synthesized)
ctcttagaaaaggcaccagcgcccctgcccaagagcccctccaggctcctgctaccccctcattctctactagctcttttgcaccgccctcctgtcccccttagtcccgcccctctcggc

SEQ ID NO: 299926 - DNA, 120 bp, Artificial Sequence
  ENSG00000132692_28 (sequence is synthesized)
catcaacagtgggctgggagacagggcgggaggggcccctgccatatgctctcactctctctcactcgcctaaccgccttcctcattaacccatgcacttattccttggttttctcaagc

SEQ ID NO: 299927 - DNA, 120 bp, Artificial Sequence
  ENSG00000132692_29 (sequence is synthesized)
gtgcattccctcactcattcgttcactccccttctcattctctctcccttcccaccctacgcttaggcagtggccttcgggaacggagagtggaggttcgcgcagtagagtgcgcctgtg

SEQ ID NO: 299928 - DNA, 120 bp, Artificial Sequence
  ENSG00000132692_30 (sequence is synthesized)
tgggccgggccgccgtgcagggggccgcctccaatccctccaacctccctgctctccgacctccgtcggcctcctccaactccaactccaatcttgttgaaagttttgactctttttcca

SEQ ID NO: 299929 - DNA, 120 bp, Artificial Sequence
  ENSG00000132692_31 (sequence is synthesized)
aaactccccttttctagcctgggttgatatcttccttattctcccacccccattcccctgctttccatctggcccttgagcagaggctggggtagaagaacccgacaagggcgggtgctg

SEQ ID NO: 299930 - DNA, 120 bp, Artificial Sequence
  ENSG00000132692_32 (sequence is synthesized)
agcacggcatcgatgacagcagcgacgctgtggaggtcaaggtcaaaggtggaggacattctacccacaatctaacttaagtccctcatgctgtagagggtcgtctttctctaccgagag

SEQ ID NO: 299931 - DNA, 120 bp, Artificial Sequence
  ENSG00000132692_33 (sequence is synthesized)
cccaaactctcctgtcctttgccttcattctcttacccacctctacctatgggtctccaatctcggatatccaccttgtgggtatctcagctctccgcgtctttaccctgtgatcccagc

SEQ ID NO: 299932 - DNA, 120 bp, Artificial Sequence
  ENSG00000132692_34 (sequence is synthesized)
cccgccactgaccatctgtgacccttccctgccattgggccctccacctgtggctcacatctcgccagccccacagagcatcctcaggcctctccaagggtcctcatcacctattgcagc

SEQ ID NO: 299933 - DNA, 120 bp, Artificial Sequence
  ENSG00000132692_35 (sequence is synthesized)
cttcagggctcggcctattttccactactcccttcatccgcctgtgtgccgtcccctttagctgcctcctattgatctcagggaagcctgggagtcccttctcacccctcaacctccgga

SEQ ID NO: 299934 - DNA, 120 bp, Artificial Sequence
  ENSG00000132692_36 (sequence is synthesized)
gtccaggagaacccgtacccccacagagccttaagcaactacttctgtgaagtattttttgactgtttcatggaaaacaagccttggaaataaatctctattaaaccgctttgtaaccaa

SEQ ID NO: 299935 - DNA, 120 bp, Artificial Sequence
  ENSG00000132693_0 (sequence is synthesized)
aaggcaagagatctaggacttctagcccctgaactttcagccgaatacatcttttccaaaggagtgaattcaggcccttgtatcactggcagcaggacgtgaccatggagaagctgttgt

SEQ ID NO: 299936 - DNA, 120 bp, Artificial Sequence
  ENSG00000132693_1 (sequence is synthesized)
gtttcttggtcttgaccagcctctctcatgcttttggccagacagacatgtcgaggaaggcttttgtgtttcccaaagagtcggatacttcctatgtatccctcaaagcaccgttaacga

SEQ ID NO: 299937 - DNA, 120 bp, Artificial Sequence
  ENSG00000132693_2 (sequence is synthesized)
agcctctcaaagccttcactgtgtgcctccacttctacacggaactgtcctcgacccgtgggtacagtattttctcgtatgccaccaagagacaagacaatgagattctcatattttggt

SEQ ID NO: 299938 - DNA, 120 bp, Artificial Sequence
  ENSG00000132693_3 (sequence is synthesized)
ctaaggatataggatacagttttacagtgggtgggtctgaaatattattcgaggttcctgaagtcacagtagctccagtacacatttgtacaagctgggagtccgcctcagggatcgtgg

SEQ ID NO: 299939 - DNA, 120 bp, Artificial Sequence
  ENSG00000132693_4 (sequence is synthesized)
agttctgggtagatgggaagcccagggtgaggaagagtctgaagaagggatacactgtgggggcagaagcaagcatcatcttggggcaggagcaggattccttcggtgggaactttgaag

SEQ ID NO: 299940 - DNA, 120 bp, Artificial Sequence
  ENSG00000132693_5 (sequence is synthesized)
gaagccagtccctggtgggagacattggaaatgtgaacatgtgggactttgtgctgtcaccagatgagattaacaccatctatcttggcgggcccttcagtcctaatgtcctgaactggc

SEQ ID NO: 299941 - DNA, 120 bp, Artificial Sequence
  ENSG00000132693_6 (sequence is synthesized)
gggcactgaagtatgaagtgcaaggcgaagtgttcaccaaaccccagctgtggccctgaggcccagctgtgggtcctgaaggtacctcccggttttttacaccgcatgggccccacgtct

SEQ ID NO: 299942 - DNA, 120 bp, Artificial Sequence
  ENSG00000132693_7 (sequence is synthesized)
ctgtctctggtacctcccgcttttttacactgcatggttcccacgtctctgtctctgggcctttgttcccctatatgcattgcaggcctgctccaccctcctcagcgcctgagaatggag

SEQ ID NO: 299943 - DNA, 120 bp, Artificial Sequence
  ENSG00000132693_8 (sequence is synthesized)
tggacagatcttggagataatttcttacctcacatagatgagaaaactaacacccagaaaggagaaatgatgttataaaaaactcataaggcaagagctgagaaggaagcgctgatcttc

SEQ ID NO: 299944 - DNA, 120 bp, Artificial Sequence
  ENSG00000132693_9 (sequence is synthesized)
tatttaattccccacccatgacccccagaaagcaggagggcattgcccacattcacagggctcttcagtctcagaatcaggacactggccaggtgtctggtttgggtccagagtgctcat

SEQ ID NO: 299945 - DNA, 120 bp, Artificial Sequence
  ENSG00000132693_10 (sequence is synthesized)
catcatgtcatagaactgctgggcccaggtctcctgaaatgggaagcccagcaataccacgcagtccctccactttctcaaagcacactggaaaggccattagaattgccccagcagagc

SEQ ID NO: 299946 - DNA, 120 bp, Artificial Sequence
  ENSG00000132693_11 (sequence is synthesized)
agatctgctttttttccagagcaaaatgaagcactaggtataaatatgttgttactgccaagaacttaaatgactggtttttgtttgcttgcagtgctttcttaattttatggctcttct

SEQ ID NO: 299947 - DNA, 120 bp, Artificial Sequence
  ENSG00000132693_12 (sequence is synthesized)
gggaaactcctccccttttccacacgaaccttgtggggctgtgaattctttcttcatccccgcattcccaatatacccaggccacaagagtggacgtgaaccacagggtgtcctgtcaga

SEQ ID NO: 299948 - DNA, 120 bp, Artificial Sequence
  ENSG00000132693_13 (sequence is synthesized)
ggagcccatctcccatctccccagctccctatctggaggatagttggatagttacgtgttcctagcaggaccaactacagtcttcccaaggattgagttatggactttgggagtgagaca

SEQ ID NO: 299949 - DNA, 120 bp, Artificial Sequence
  ENSG00000132693_14 (sequence is synthesized)
tcttcttgctgctggatttccaagctgagaggacgtgaacctgggaccaccagtagccatcttgtttgccacatggagagagactgtgaggacagaagccaaactggaagtggaggagcc

SEQ ID NO: 299950 - DNA, 120 bp, Artificial Sequence
  ENSG00000132693_15 (sequence is synthesized)
aagggattgacaaacaacagagccttgaccacgtggagtctctgaatcagccttgtctggaaccagatctacacctggactgcccaggtctataagccaataaagcccctgtttacttga

SEQ ID NO: 299951 - DNA, 120 bp, Artificial Sequence
  ENSG00000132693_16 (sequence is synthesized)
aaggcaagagatctaggacttctagcccctgaactttcagccgaatacatcttttccaaaggagtgaattcaggcccttgtatcactggcaacaagacaatgagattctcatattttggt

SEQ ID NO: 299952 - DNA, 120 bp, Artificial Sequence
  ENSG00000132694_0 (sequence is synthesized)
agcgaaatctccgtttcatggaggctgaggcaagagaaaatttcggagcctggatgtggaggagcccaacagcagaactaactcaggaaattgtctttcagaaaaaggccgaacgtaggc

SEQ ID NO: 299953 - DNA, 120 bp, Artificial Sequence
  ENSG00000132694_1 (sequence is synthesized)
tgggtctgagaatcaggctggggtaggtggaggaacctgcaagtttaaaggaaaaagaaaaggagagaatattttcagagattatctctggtttgttatcattactaccatcttaaaggt

SEQ ID NO: 299954 - DNA, 120 bp, Artificial Sequence
  ENSG00000132694_2 (sequence is synthesized)
ctttgatttttattttatttttttttttggtgcaattggctcatttaagaatttcaaaacatttaatgtaaaagcttttttttttttaaggaagtccataaattttggttcccagggttg

SEQ ID NO: 299955 - DNA, 120 bp, Artificial Sequence
  ENSG00000132694_3 (sequence is synthesized)
cataaattttggttcccagggttgcactggacttggaaggagtgctgttgtgtacatactattgtatggttttatttattattttactgtacaaatcagccgaaagaatttttccaagtg

SEQ ID NO: 299956 - DNA, 120 bp, Artificial Sequence
  ENSG00000132694_4 (sequence is synthesized)
ccatttcggatttattaatccttttttttttcctttcctcaaagatatttgctgttgtcatattaagcattggagactagaaaattactttccccctttgagctagagggtctcttgcca

SEQ ID NO: 299957 - DNA, 120 bp, Artificial Sequence
  ENSG00000132694_5 (sequence is synthesized)
acagaaggacagctgagaaagctggatttaaaggatggttttatctgtactttgcagttaacagtgatattttgaaggcacatttttctgtgattcatttttttttggccatagtgctaa

SEQ ID NO: 299958 - DNA, 120 bp, Artificial Sequence
  ENSG00000132694_6 (sequence is synthesized)
tttctgtgattcatttttttttggccatagtgctaaccttgaagagattcgtggctgggtttttggtttctgagaaggtcgtagtttttcctcttttcctttttttttcttttttctttt

SEQ ID NO: 299959 - DNA, 120 bp, Artificial Sequence
  ENSG00000132694_7 (sequence is synthesized)
ggctgagaaaggaaatcatgttcactggtagaagtagagtggagcatcagttaccagggtcctgagagctggaggagaaaggattctatcttcaagttgggaggccctcctctcaccttg

SEQ ID NO: 299960 - DNA, 120 bp, Artificial Sequence
  ENSG00000132694_8 (sequence is synthesized)
ctcaaaaattgcaagcgattcaatcctgatcaagacaccaaagctacaggattctggaaccgtggagacaccgagaaaccatgagtgtaaggttaccccagagtatagacaggttaagta

SEQ ID NO: 299961 - DNA, 120 bp, Artificial Sequence
  ENSG00000132694_9 (sequence is synthesized)
gcctgtcttctctgggagattctgcaccagagcgcaagtccccttcccaccatcgccagccttcggatgcctctgagacaacaggtctcgttcaacgctgtgtcattatccaaaaggacc

SEQ ID NO: 299962 - DNA, 120 bp, Artificial Sequence
  ENSG00000132694_10 (sequence is synthesized)
agcatggcttcggcttcacagtcagtggggatcgcattgttctggtgcagtctgtgcggcctggaggtgcagccatgaaggccggtgtgaaagagggcgaccggatcatcaaagtcaacg

SEQ ID NO: 299963 - DNA, 120 bp, Artificial Sequence
  ENSG00000132694_11 (sequence is synthesized)
gcaccatggtgaccaatagctcacacctggaagtggtaaagctgatcaaatctggcgcctatgtcgcactcaccctcctgggctcttcaccttcatccatgggcatctctgggctccagc

SEQ ID NO: 299964 - DNA, 120 bp, Artificial Sequence
  ENSG00000132694_12 (sequence is synthesized)
aggacccatccccagcaggagctccccgaatcacgtcagtgatcccctcaccaccacctcctccacctctaccacctccacaacgcatcacaggacccaaacctctgcaggatcccgaag

SEQ ID NO: 299965 - DNA, 120 bp, Artificial Sequence
  ENSG00000132694_13 (sequence is synthesized)
ttcaaaaacatgccacccagatcctcaggaatatgctgaggcaggaagaaaaagaattacagcgtatctgtgaggtctatagccggaaccccgccagcctactggaagagcagatcgaag

SEQ ID NO: 299966 - DNA, 120 bp, Artificial Sequence
  ENSG00000132694_14 (sequence is synthesized)
gtgcccggcggcgagtcactcagttacagctgaagatccagcaggagactggtggctcagtggacatacttccactatatggtgacaccagccagagaccatcagaaggccggctctctc

SEQ ID NO: 299967 - DNA, 120 bp, Artificial Sequence
  ENSG00000132694_15 (sequence is synthesized)
tggattcccaggagggggacagtggcttggactctgggacagaacgctttccttccctcagtgagtcattgatgaatcggaactcggtactgtcagaccctgggctagacagtcctcgaa

SEQ ID NO: 299968 - DNA, 120 bp, Artificial Sequence
  ENSG00000132694_16 (sequence is synthesized)
cctcccctgtgatcatggccagggtggcccagcaccacaggcggcagggctcggatgcagcagtcccctcaaccggtgaccagggtgtagatcaaagcccaaagcctttaattattggcc

SEQ ID NO: 299969 - DNA, 120 bp, Artificial Sequence
  ENSG00000132694_17 (sequence is synthesized)
cagaggaagactatgacccgggttatttcaacaacgagagcgacatcatattccaggatctggagaaactgaagtctcggccagctcacctgggggtttttctacgttacatcttctctc

SEQ ID NO: 299970 - DNA, 120 bp, Artificial Sequence
  ENSG00000132694_18 (sequence is synthesized)
aggcggaccccagtccactgcttttttacctgtgtgcagaagtttatcagcaggcaagccccaaggattcccgaagcttggggaaagacatctggaatattttcctggagaaaaatgcgc

SEQ ID NO: 299971 - DNA, 120 bp, Artificial Sequence
  ENSG00000132694_19 (sequence is synthesized)
ctctgagagtgaagatccctgagatgctacaggctgaaattgactcgcgcctgcggaacagcgaagatgcccgtggtgttctctgtgaagctcaagaggcagccatgcctgagatccaag

SEQ ID NO: 299972 - DNA, 120 bp, Artificial Sequence
  ENSG00000132694_20 (sequence is synthesized)
agcagatccacgactacagaacgaagcgcacactggggctgggcagcctgtatggtgaaaatgacctgctggacctggatggggaccctctccgagagcgccaagtggctgagaagcagc

SEQ ID NO: 299973 - DNA, 120 bp, Artificial Sequence
  ENSG00000132694_21 (sequence is synthesized)
tggctgcccttggagatattttgtccaagtatgaggaagacaggagcgcccccatggacttcgccctcaatacctacatgagccatgctgggatccgtcttcgagaggcacgaccttcca

SEQ ID NO: 299974 - DNA, 120 bp, Artificial Sequence
  ENSG00000132694_22 (sequence is synthesized)
acacagctgaaaaggcccagtctgctcctgacaaggacaagtggctaccgttcttccctaagaccaagaagagcagcaattccaagaaagaaaaggatgccttggaggacaagaagcgaa

SEQ ID NO: 299975 - DNA, 120 bp, Artificial Sequence
  ENSG00000132694_23 (sequence is synthesized)
accctatcctcaaatacattgggaagcccaaaagctcttctcaaagcacatttcatattcccttgtcccctgtggaagtcaaaccaggcaatgtgaggaacatcattcagcactttgaga

SEQ ID NO: 299976 - DNA, 120 bp, Artificial Sequence
  ENSG00000132694_24 (sequence is synthesized)
acaaccagcagtatgatgccccagaacctgggacacaacgactctcgaccggaagctttcctgaggacctgctggagagtgacagttcacgctcagagattcgcctgggccgctctgaaa

SEQ ID NO: 299977 - DNA, 120 bp, Artificial Sequence
  ENSG00000132694_25 (sequence is synthesized)
gcctcaagggccgggaagagatgaaacggtctcgaaaggcagagaacgtgccccgctctcgcagtgatgttgacatggatgctgctgcggaggctactcgcctgcaccagtcagcctcgt

SEQ ID NO: 299978 - DNA, 120 bp, Artificial Sequence
  ENSG00000132694_26 (sequence is synthesized)
cctctacctccagcctctccaccaggtctcttgagaacccaacccctccattcactcccaaaatgggccgcaggagcattgagtcccccagtttggggttctgcacagataccctccttc

SEQ ID NO: 299979 - DNA, 120 bp, Artificial Sequence
  ENSG00000132694_27 (sequence is synthesized)
cccacctcctagaggatgatctgggccagctgtctgacctggagccagagccagatgcccaaaattggcagcatacagtgggcaaggatgtggtggctgggctaacccagcgggagattg

SEQ ID NO: 299980 - DNA, 120 bp, Artificial Sequence
  ENSG00000132694_28 (sequence is synthesized)
gcgcacactccgggtcctggacctgatcttctaccagcgaatgaagaaggagaacctgatgccccgggaggagctggcccggctcttcccgaacctgcctgaactcatagagattcacaa

SEQ ID NO: 299981 - DNA, 120 bp, Artificial Sequence
  ENSG00000132694_29 (sequence is synthesized)
ttcctggtgtgaagccatgaagaagctccgggaggaaggccccatcatcaaagagatcagtgacctcatgctggcccggtttgatggccctgcccgagaggaactccagcaagtggctgc

SEQ ID NO: 299982 - DNA, 120 bp, Artificial Sequence
  ENSG00000132694_30 (sequence is synthesized)
acagttctgttcctatcagtcaatagccctagagctaatcaagaccaagcaacgcaaggagagtcgattccagctcttcatgcaggaggctgagagccaccctcagtgtcggcggctgca

SEQ ID NO: 299983 - DNA, 120 bp, Artificial Sequence
  ENSG00000132694_31 (sequence is synthesized)
gctgagagacctcatcatctctgagatgcagcggctcaccaagtacccgctgctgctggagagcatcatcaagcacacagagggtggcacctctgagcatgagaagctgtgccgggcccg

SEQ ID NO: 299984 - DNA, 120 bp, Artificial Sequence
  ENSG00000132694_32 (sequence is synthesized)
ggaccagtgccgggagattctcaagtatgtgaatgaagcggtaaaacaaacagagaaccgccaccgtttagagggctaccagaaacgcctggatgccaccgccctggagagggccagcaa

SEQ ID NO: 299985 - DNA, 120 bp, Artificial Sequence
  ENSG00000132694_33 (sequence is synthesized)
ccccctggcagcagagttcaagagcctggatcttacaaccagaaaaatgatccatgagggacccctgacctggaggatcagcaaggataagaccttggacctccacgtgctgctgctgga

SEQ ID NO: 299986 - DNA, 120 bp, Artificial Sequence
  ENSG00000132694_34 (sequence is synthesized)
ggacctcctagtgctgctacagaaacaggatgagaagctattgctgaagtgccacagcaagactgctgtgggctcctcagacagcaagcagaccttcagccccgtgctcaagctcaatgc

SEQ ID NO: 299987 - DNA, 120 bp, Artificial Sequence
  ENSG00000132694_35 (sequence is synthesized)
tgtgctcatccgctctgtggccacagataaacgggccttcttcatcatctgcacctccaagctgggcccaccccagatctatgagctggttgcattgacgtcatcagacaagaacacatg

SEQ ID NO: 299988 - DNA, 120 bp, Artificial Sequence
  ENSG00000132694_36 (sequence is synthesized)
gatggagctcttagaagaggccgtgcggaatgccaccaggcaccccggagctgccccaatgcccgtccatcctccacccccaggtccccgggagccagcccagcagggccccacacccag

SEQ ID NO: 299989 - DNA, 120 bp, Artificial Sequence
  ENSG00000132694_37 (sequence is synthesized)
cagggtagaactggatgactcagacgtgttccatggtgaacctgaacctgaggagctgcctggaggcactgggtcccagcagagggtccaagggaagcaccaggtcctgctagaggaccc

SEQ ID NO: 299990 - DNA, 120 bp, Artificial Sequence
  ENSG00000132694_38 (sequence is synthesized)
tgagcaggagggcagtgcagaggaagaggaactgggtgtcctgccttgcccttccacatccctggatggagagaacaggggcatcaggacaaggaaccccatccacttggccttcccagg

SEQ ID NO: 299991 - DNA, 120 bp, Artificial Sequence
  ENSG00000132694_39 (sequence is synthesized)
ccctctgttcatggaagggctcgctgactccgctctggaagatgtggagaacctgcgacatctgatcctgtggagcctgctgccaggtcacaccatggaaactcaggctgcccaggagcc

SEQ ID NO: 299992 - DNA, 120 bp, Artificial Sequence
  ENSG00000132694_40 (sequence is synthesized)
cgaggacgacctgacacccacaccttctgtcatcagcgtcacctctcacccctgggacccaggctccccagggcaagcaccccctgggggtgaaggggacaacacccagcttgcagggct

SEQ ID NO: 299993 - DNA, 120 bp, Artificial Sequence
  ENSG00000132694_41 (sequence is synthesized)
ggagggggaacggccagagcaggaagacatgggtctctgttctctggaacacctacccccaaggaccagaaattctgggatatgggagtctccagaactggacaggaatctggctgaaga

SEQ ID NO: 299994 - DNA, 120 bp, Artificial Sequence
  ENSG00000132694_42 (sequence is synthesized)
tgcttcaagcacagaggcagcaggaggttacaaagttgtgagaaaagctgaggtggcaggcagcaaggttgtccctgcactaccagagagtggccagtcagagcctgggccacctgaagt

SEQ ID NO: 299995 - DNA, 120 bp, Artificial Sequence
  ENSG00000132694_43 (sequence is synthesized)
ggaaggcggaacaaaggctacggggaactgcttttatgtcagcatgccatcaggacccccggactcaagcaccgaccactcagaggcacccatgagcccccctcagcctgacagcctccc

SEQ ID NO: 299996 - DNA, 120 bp, Artificial Sequence
  ENSG00000132694_44 (sequence is synthesized)
tgcagggcagacagagcctcagcctcagctgcagggaggcaacgatgatccaagacgccccagccgctctcctccaagcctggccctcagggacgtgggcatgatcttccataccattga

SEQ ID NO: 299997 - DNA, 120 bp, Artificial Sequence
  ENSG00000132694_45 (sequence is synthesized)
gcagctcactctcaagctcaacaggctcaaggatatggagctggcccacagagagctgctcaagtcccttgggggagagtcatctggtggcaccacgcctgtgggcagtttccacacaga

SEQ ID NO: 299998 - DNA, 120 bp, Artificial Sequence
  ENSG00000132694_46 (sequence is synthesized)
agcagctagatggacagatggctccctctcacctcccgctaaggagcccctagcttctgactccaggaacagccatgaactggggccctgccctgaggatggctctgacgcccccctgga

SEQ ID NO: 299999 - DNA, 120 bp, Artificial Sequence
  ENSG00000132694_47 (sequence is synthesized)
agacagcacagcagacgcagccgcgtcaccaggaccataaccgtacaaaccaccaaatcctctgcgtccccactcctccttcagggactggcctgagaccggggcacagggtagggggga

SEQ ID NO: 300000 - DNA, 120 bp, Artificial Sequence
  ENSG00000132694_48 (sequence is synthesized)
tcccaacactcctccctgtggaggaggcagttagggaaactaggatccagccaaggcccggggggagacccgcatgttgcttggtctgctcaagtcggagtcaggtttcagtgtcttttc

SEQ ID NO: 300001 - DNA, 120 bp, Artificial Sequence
  ENSG00000132694_49 (sequence is synthesized)
cctcccttagcccaaccctccaaggcctcatgtctcctaagcatgctgactgcatccgaaaggcccccactcaccatggtctgccctcaccccacatatgtgtgtacacgcgcacgcctg

SEQ ID NO: 300002 - DNA, 120 bp, Artificial Sequence
  ENSG00000132694_50 (sequence is synthesized)
tatgtgcgctgccctcagacatgcaagtgaaaggaggaggcttctgtgtaaatgcactttcttcctcccctctttctccataagaccccaggcagaggtgggtgcctcccctcccctctt

SEQ ID NO: 300003 - DNA, 120 bp, Artificial Sequence
  ENSG00000132694_51 (sequence is synthesized)
tgtcactttggtttcctataaatatgtatgtatcgtatgtgcatctttgctattgtaaataactttgaccttttttgttcctgttcctgaagtgctggaggcagttatggaaggagctgc

SEQ ID NO: 300004 - DNA, 120 bp, Artificial Sequence
  ENSG00000132694_52 (sequence is synthesized)
ttagggaagaggggtttcacttgtatctccttagttaacaacccagttccaggatcgagcctaaagcgggagccaggcctgagtgttcctgtccctgtgagtgggaaggtcttctggctc

SEQ ID NO: 300005 - DNA, 120 bp, Artificial Sequence
  ENSG00000132694_53 (sequence is synthesized)
cccatcccacctggctccagagcctgccctccacagcttgctgccaagctactccctccctccctggacttctcatcttcacaagatggggatcatgggggtttcttaccccacctatgt

SEQ ID NO: 300006 - DNA, 120 bp, Artificial Sequence
  ENSG00000132694_54 (sequence is synthesized)
ccccctcttccccaccctgtccctgtagaaaaccagtgaagcaggtacggagctgaggactgggccccaggaggtggggacaggggtctgaatgccgagtccctgaattcacccaggacc

SEQ ID NO: 300007 - DNA, 120 bp, Artificial Sequence
  ENSG00000132694_55 (sequence is synthesized)
atccaaggggccaccgcagcattggccccatcaccacgtcctcacccaactctccctgatgaatagaatatacacactgtgctaggtgtatatatacatatatatatatataaatatata

SEQ ID NO: 300008 - DNA, 80 bp, Artificial Sequence
  ENSG00000132694_56 (sequence is synthesized)
tgactgttctgctgttaagataatgtatactcttttattttcttcctttcatggttaagattttttttttaagaaaagtt

SEQ ID NO: 300009 - DNA, 120 bp, Artificial Sequence
  ENSG00000132694_57 (sequence is synthesized)
cagtctctgttagtgctcctcactgatctcctgttcccagggaaaagagccactcttctcaggagcctcaggccgggaaagacagggcagctgaggtggcaggcagcaaggttgtccctg

SEQ ID NO: 300010 - DNA, 120 bp, Artificial Sequence
  ENSG00000132694_58 (sequence is synthesized)
gtctagcctcaggttatcactctccctgggatcctgggcatctttcactacccccaaatttcagacattggagtcaggacagagaggtgttaggaaccccaatctgatttgaacaggctt

SEQ ID NO: 300011 - DNA, 120 bp, Artificial Sequence
  ENSG00000132694_59 (sequence is synthesized)
tctagaggcataattgtggccatttaccacagtctctgtcccttgcatctgtagagctggttgtagtagaggcagggattcccaggagctatcagcgtcttcaaagcagtgatctgtctg

SEQ ID NO: 300012 - DNA, 120 bp, Artificial Sequence
  ENSG00000132694_60 (sequence is synthesized)
agacctgaagatgctcagtaaaagttacccttaccacttggggtcctcatgtgaggcaagggtggctcccctccacccacgcctgctggtttgaagcaagccagctgccatggatgaata

SEQ ID NO: 300013 - DNA, 120 bp, Artificial Sequence
  ENSG00000132694_61 (sequence is synthesized)
catggaagggctcgctgactccgctctggaagatggtgagtgcttcaaggccctgccgtcagcccctggtccccagtcgcacacccagtgtgaactggcaggcgcctgcaccctccacct

SEQ ID NO: 300014 - DNA, 120 bp, Artificial Sequence
  ENSG00000132694_62 (sequence is synthesized)
tcccgaaggctcttcctggtgtgcttgaggagagatggatgcggagacagatgtcattccccacccaacccccaccagctagttggccagagccctccagcttcacctgtgcctgaggtc

SEQ ID NO: 300015 - DNA, 120 bp, Artificial Sequence
  ENSG00000132694_63 (sequence is synthesized)
accaccttggggtcagtggggcagtacaacgatccttctggcgtggtgtgcagtcccatgctgggaagacatcaccctgtttcccctccagtggagaacctgcgacatctgatcctgtgg

SEQ ID NO: 300016 - DNA, 120 bp, Artificial Sequence
  ENSG00000132694_64 (sequence is synthesized)
ggagacaagcacccttgctaggtgagataagtcttccgaacagctgcttccttccctatactccccctgggtaccgtgtgagcagagacctacgctgggtcctggaagaaggagacaacg

SEQ ID NO: 300017 - DNA, 120 bp, Artificial Sequence
  ENSG00000132694_65 (sequence is synthesized)
ccgatatcaggcaggctttggagttggacattcgagattcagagcttagctctgccacttaatatctgtgtggctttagacaaaattctgaatcatctctgaactttgttttatagcaca

SEQ ID NO: 300018 - DNA, 120 bp, Artificial Sequence
  ENSG00000132694_66 (sequence is synthesized)
cgggaaagacagggcaggtgcatgcagcccctcacgccaggcaacagctccaagggcagtagaggtggcagctgggactggaaggggtggaggacaaagctgggaagacatttggcgagt

SEQ ID NO: 300019 - DNA, 120 bp, Artificial Sequence
  ENSG00000132694_67 (sequence is synthesized)
gagggatgtggggagtgaacaaggtggcagggagggcaccccgggttgggaaacaccatggacggccttgagacaagaaaagccaagacaagctcacagggaggccaatagatgagccca

SEQ ID NO: 300020 - DNA, 120 bp, Artificial Sequence
  ENSG00000132694_68 (sequence is synthesized)
gggaggaaggtccccaccccgggaagagtgggctggtctgagagggtggcaagaaaagtagaacaaagcctggggcacacatgggatggggttccacgctagtgggcctgccctcccctg

SEQ ID NO: 300021 - DNA, 120 bp, Artificial Sequence
  ENSG00000132694_69 (sequence is synthesized)
ggattccactctgcctcccttccagcagcatttttcattccatctgcccaagggccacctgtctcctgggtttctgggaactgaccttccttctctgtctctcggtgaattggtggaaag

SEQ ID NO: 300022 - DNA, 120 bp, Artificial Sequence
  ENSG00000132694_70 (sequence is synthesized)
ttctctgcactgcctgggatgtcatcgtgtatgatcttgtgttcaccttgttcttcccattttctcctccccctgtccccacctcctgccctctctccttcctgttctctctcccttccc

SEQ ID NO: 300023 - DNA, 120 bp, Artificial Sequence
  ENSG00000132694_71 (sequence is synthesized)
gctggcatcacaggcagtgggcctcgtgccagaccctcattctgacactgctttgtgaccttagcaagtcactgtgccttgtggtctttggtgtcttcgtcctttttctgttgtggggtg

SEQ ID NO: 300024 - DNA, 120 bp, Artificial Sequence
  ENSG00000132698_0 (sequence is synthesized)
ctcagcttccgtcctctctgcttccttacagcacccccacctgccagagctgatcctccctaggccctgcctaaccttgagttggcccccaatccctctggctgcagaagtccccttacc

SEQ ID NO: 300025 - DNA, 120 bp, Artificial Sequence
  ENSG00000132698_1 (sequence is synthesized)
cccaatgagaggaggggcaggaccagatcttttgagagctgagggttgagggcattgagccaacacacagatttgtcgcctctgtccccgaagacacctgcaccctccatgcggagccaa

SEQ ID NO: 300026 - DNA, 120 bp, Artificial Sequence
  ENSG00000132698_2 (sequence is synthesized)
gatggggaatggaactgaggaagattataactttgtcttcaaggtggtgctgatcggcgaatcaggtgtggggaagaccaatctactctcccgattcacgcgcaatgagttcagccacga

SEQ ID NO: 300027 - DNA, 120 bp, Artificial Sequence
  ENSG00000132698_3 (sequence is synthesized)
cagccgcaccaccatcggggttgagttctccacccgcactgtgatgttgggcaccgctgctgtcaaggctcagatctgggacacagctggcctggagcggtaccgagccatcacctcggc

SEQ ID NO: 300028 - DNA, 120 bp, Artificial Sequence
  ENSG00000132698_4 (sequence is synthesized)
gggccctcctggtgtttgacctaaccaagcaccagacctatgctgtggtggagcgatggctgaaggagctctatgaccatgctgaagccacgatcgtcgtcatgctcgtgggtaacaaaa

SEQ ID NO: 300029 - DNA, 120 bp, Artificial Sequence
  ENSG00000132698_5 (sequence is synthesized)
gtgacctcagccaggcccgggaagtgcccactgaggaggcccgaatgttcgctgaaaacaatggactgctcttcctggagacctcagccctggactctaccaatgttgagctagcctttg

SEQ ID NO: 300030 - DNA, 120 bp, Artificial Sequence
  ENSG00000132698_6 (sequence is synthesized)
agactgtcctgaaagaaatctttgcgaaggtgtccaagcagagacagaacagcatccggaccaatgccatcactctgggcagtgcccaggctggacaggagcctggccctggggagaaga

SEQ ID NO: 300031 - DNA, 120 bp, Artificial Sequence
  ENSG00000132698_7 (sequence is synthesized)
gggcctgttgcatcagcctctgaccttggccagcaccacctgcccccactggctttttggtgccccttgtccccacttcagccccaggacctttccttgccctttggttccagatatcag

SEQ ID NO: 300032 - DNA, 120 bp, Artificial Sequence
  ENSG00000132698_8 (sequence is synthesized)
actgttccctgttcacagcaccctcagggtcttaaggtcttcatgccctatcacaaatacctcttttatctgtccacccctcacagactaggaccctcaaataaagctgttttatatcaa

SEQ ID NO: 300033 - DNA, 120 bp, Artificial Sequence
  ENSG00000132698_9 (sequence is synthesized)
gaaaggttagagcctacctttattctgcacccctattccatccccgtggcttctacaggcagcagtaggaatgcagacactcagccctcaccccagctaatttctcagctcctctgtggg

SEQ ID NO: 300034 - DNA, 120 bp, Artificial Sequence
  ENSG00000132698_10 (sequence is synthesized)
tcctggcaccactgcctgtccccctcagtccctccccagtgcctcccactcagtctggagctcagggagggaacaggccacactccccatggggctgactcttggttccttctccaccca

SEQ ID NO: 300035 - DNA, 120 bp, Artificial Sequence
  ENSG00000132698_11 (sequence is synthesized)
agtaagtagaagggacccctatgtccacacttcatttccttcctgcaaaacctcctgcaagtgtggccaccccccatgctcagaaggggcatgcagtatgtatgggggggttggggagaa

SEQ ID NO: 300036 - DNA, 120 bp, Artificial Sequence
  ENSG00000132698_12 (sequence is synthesized)
cacttctggaggagaagtgggggaggaggaggcaagggggctcagcagtgggctctggggggtggggatggagatcacagaagataaaaggtactgtaaacagaaacagcacaagccagg

SEQ ID NO: 300037 - DNA, 120 bp, Artificial Sequence
  ENSG00000132702_0 (sequence is synthesized)
agacagacagggggttgtacagaagaggtccggtttcttgaagcagctggaagtcctggatagttcccacctgaaagtctgtttgcaaaggcaatgcgcactcaggcaccagagggcaga

SEQ ID NO: 300038 - DNA, 120 bp, Artificial Sequence
  ENSG00000132702_1 (sequence is synthesized)
ggggctcaagttccagggttttaaggtgcttggaactcccaggagcctggcaaaccttcatccagaacctcttcctcaagcaagacaaaaagctgctaagcactgctccctccgtctctg

SEQ ID NO: 300039 - DNA, 120 bp, Artificial Sequence
  ENSG00000132702_2 (sequence is synthesized)
tgaagagaccagcttctaacagacggtgccgggctgaccccccatcatgccaggctggctcaccctccccacactctgccgcttccttctttgggccttcaccatcttccacaaagccca

SEQ ID NO: 300040 - DNA, 120 bp, Artificial Sequence
  ENSG00000132702_3 (sequence is synthesized)
aggagacccagcatcccacccgggcccccactacctcctgccccccatccacgaggtcattcactctcatcgtggggccacggccacgctgccctgcgtcctgggcaccacgcctcccag

SEQ ID NO: 300041 - DNA, 120 bp, Artificial Sequence
  ENSG00000132702_4 (sequence is synthesized)
ctacaaggtgcgctggagcaaggtggagcctggggagctccgggaaacgctgatcctcatcaccaacggactgcacgcccgggggtatgggcccctgggagggcgcgccaggatgcggag

SEQ ID NO: 300042 - DNA, 120 bp, Artificial Sequence
  ENSG00000132702_5 (sequence is synthesized)
ggggcatcgactagacgcctccctggtcatcgcgggcgtgcgcctggaggacgagggccggtaccgctgcgagctcatcaacggcatcgaggacgagagcgtggcgctgaccttgagctt

SEQ ID NO: 300043 - DNA, 120 bp, Artificial Sequence
  ENSG00000132702_6 (sequence is synthesized)
acgcctggccacctactcccagctctaccaggcttggaccgagggtctggactggtgtaacgcgggctggctgctcgagggctccgtgcgctaccctgtgctcaccgcacgcgccccgtg

SEQ ID NO: 300044 - DNA, 120 bp, Artificial Sequence
  ENSG00000132702_7 (sequence is synthesized)
cggcggccgaggccggcccgggatccgcagctacggaccccgcgaccggatgcgcgaccgctacgacgccttctgcttcacctccgcgctggcgggccaagtgttcttcgtgcccgggcg

SEQ ID NO: 300045 - DNA, 120 bp, Artificial Sequence
  ENSG00000132702_8 (sequence is synthesized)
gctgacgctgtctgaagcccacgcggcgtgccggcgacgcggcgccgtggtggccaaggttgggcacctctacgccgcctggaagttttcggggctagaccagtgcgacggcggctggct

SEQ ID NO: 300046 - DNA, 120 bp, Artificial Sequence
  ENSG00000132702_9 (sequence is synthesized)
ggctgacggcagtgtgcgcttcccaatcaccacgccgaggccgcgctgcggggggctcccggatcccggagtgcgcagtttcggcttccccaggccccaacaggcagcctatgggaccta

SEQ ID NO: 300047 - DNA, 120 bp, Artificial Sequence
  ENSG00000132702_10 (sequence is synthesized)
ctgctacgccgagaattaggcgcccaccgtgtcccctccagcgcgcgcgaagaagcttgggagtcgtggcgggggtctctcgccacccctttccggagagcctcccctccctccagaccc

SEQ ID NO: 300048 - DNA, 120 bp, Artificial Sequence
  ENSG00000132702_11 (sequence is synthesized)
gctgcgggcctcggaccccggctggcccggcggcggggaggggaggcgggggcgcctccggcggcgagatgcagaggtgaccctcggacccgctgccgttcgcgaaccctagcagaggac

SEQ ID NO: 300049 - DNA, 120 bp, Artificial Sequence
  ENSG00000132702_12 (sequence is synthesized)
cggacccgctgccgttcgcgaaccctagcagaggactcagccaccgccggggggagggtgaggcggccgggggcattaactgacctctgagtacagcaataaaataacctggggatcttt

SEQ ID NO: 300050 - DNA, 120 bp, Artificial Sequence
  ENSG00000132702_13 (sequence is synthesized)
ctgaaagtcattgctgagaaggcaatggaggagagggttggggggctctggagaaagcatttggggagcagggtctgatgggcacttggggcagtgaggattgggggttcctgccactgt

SEQ ID NO: 300051 - DNA, 120 bp, Artificial Sequence
  ENSG00000132702_14 (sequence is synthesized)
atcgcgggcgtgcgcctggaggacgagggccggtaccgctgcgagctcatcaacggcatcgaggacgagagcgtggcgctgaccttgagcttggagggtgaggcccttccgctcccgccc

SEQ ID NO: 300052 - DNA, 120 bp, Artificial Sequence
  ENSG00000132702_15 (sequence is synthesized)
cattcctgtgtagcagcgggtccgcctcgcctgggtctcccagggctccttcccagtatctcctccgcacccctggggaccccagctccctctcccaggccgcgccgcccttcctccccc

SEQ ID NO: 300053 - DNA, 120 bp, Artificial Sequence
  ENSG00000132702_16 (sequence is synthesized)
tccgctcccatccgctggccctccccaggatccccgccaccccctaggtgtggtgtttccgtaccaacccagccggggccggtaccagttcaattactacgaggcgaagcaggcgtgcga

SEQ ID NO: 300054 - DNA, 120 bp, Artificial Sequence
  ENSG00000132702_17 (sequence is synthesized)
ccctctgcccagcatcccacccgggcccccactacctcctgccccccatccacgaggtcattcactctcatcgtggggccacggccacgctgccctgcgtcctgggcaccacgcctccca

SEQ ID NO: 300055 - DNA, 120 bp, Artificial Sequence
  ENSG00000132703_0 (sequence is synthesized)
gggcatgaatatcagacgctagggggacagccactgtgttgtctgctaccctcatcctggtcactgcttctgctataacagccctaggccaggaatatgaacaagccgctgctttggatc

SEQ ID NO: 300056 - DNA, 120 bp, Artificial Sequence
  ENSG00000132703_1 (sequence is synthesized)
tctgtcctcaccagcctcctggaagcctttgctcacacagacctcagtgggaaggtgtttgtatttcctagagaatctgttactgatcatgtaaacttgatcacaccgctggagaagcct

SEQ ID NO: 300057 - DNA, 120 bp, Artificial Sequence
  ENSG00000132703_2 (sequence is synthesized)
ctacagaactttaccttgtgttttcgagcctatagtgatctctctcgtgcctacagcctcttctcctacaatacccaaggcagggataatgagctactagtttataaagaaagagttgga

SEQ ID NO: 300058 - DNA, 120 bp, Artificial Sequence
  ENSG00000132703_3 (sequence is synthesized)
gggagtcctcatcaggtattgctgaattttggatcaatgggacacctttggtgaaaaagggtctgcgacagggttactttgtagaagctcagcccaagattgtcctggggcaggaacagg

SEQ ID NO: 300059 - DNA, 120 bp, Artificial Sequence
  ENSG00000132703_4 (sequence is synthesized)
attcctatgggggcaagtttgataggagccagtcctttgtgggagagattggggatttgtacatgtgggactctgtgctgcccccagaaaatatcctgtctgcctatcagggtacccctc

SEQ ID NO: 300060 - DNA, 120 bp, Artificial Sequence
  ENSG00000132703_5 (sequence is synthesized)
tccctgccaatatcctggactggcaggctctgaactatgaaatcagaggatatgtcatcatcaaacccttggtgtgggtctgaggtcttgactcaacgagagcacttgaaaatgaaatga

SEQ ID NO: 300061 - DNA, 120 bp, Artificial Sequence
  ENSG00000132703_6 (sequence is synthesized)
ctgtctaagagatctggtcaaagcaactggatactagatcttacatctgcagctctttcttctttgaatttcctatctgtatgtctgcctaattaaaaaaatatatattgtattatgcta

SEQ ID NO: 300062 - DNA, 120 bp, Artificial Sequence
  ENSG00000132704_0 (sequence is synthesized)
agagtctccagttggtgaccaagagtacatctcttttcaaatagctggattaggtcctcatgctgctgtggtcattgctggtcatctttgatgcagtcactgaacaggcagattcgctga

SEQ ID NO: 300063 - DNA, 120 bp, Artificial Sequence
  ENSG00000132704_1 (sequence is synthesized)
cccttgtggcgccctcttctgtcttcgaaggagacagcatcgttctgaaatgccagggagaacagaactggaaaattcagaagatggcttaccataaggataacaaagagttatctgttt

SEQ ID NO: 300064 - DNA, 120 bp, Artificial Sequence
  ENSG00000132704_2 (sequence is synthesized)
tcaaaaaattctcagatttccttatccaaagtgcagttttaagtgacagtggtaactatttctgtagtaccaaaggacaactctttctctgggataaaacttcaaatatagtaaagataa

SEQ ID NO: 300065 - DNA, 120 bp, Artificial Sequence
  ENSG00000132704_3 (sequence is synthesized)
aagtccaagagctctttcaacgtcctgtgctgactgccagctccttccagcccatcgaagggggtccagtgagcctgaaatgtgagacccggctctctccacagaggttggatgttcaac

SEQ ID NO: 300066 - DNA, 120 bp, Artificial Sequence
  ENSG00000132704_4 (sequence is synthesized)
tccagttctgcttcttcagagaaaaccaggtcctggggtcaggctggagcagctctccggagctccagatttctgccgtgtggagtgaagacacagggtcttactggtgcaaggcagaaa

SEQ ID NO: 300067 - DNA, 120 bp, Artificial Sequence
  ENSG00000132704_5 (sequence is synthesized)
cggtgactcacaggatcagaaaacagagcctccaatcccagattcacgtgcagagaatccccatctctaatgtaagcttggagatccgggcccccgggggacaggtgactgaaggacaaa

SEQ ID NO: 300068 - DNA, 120 bp, Artificial Sequence
  ENSG00000132704_6 (sequence is synthesized)
aactgatcctgctctgctcagtggctgggggtacaggaaatgtcacattctcctggtacagagaggccacaggaaccagtatgggaaagaaaacccagcgttccctgtcagcagagctgg

SEQ ID NO: 300069 - DNA, 120 bp, Artificial Sequence
  ENSG00000132704_7 (sequence is synthesized)
agatcccagctgtgaaagagagtgatgccggcaaatattactgtagagctgacaacggccatgtgcctatccagagcaaggtggtgaatatccctgtgagaattccagtgtctcgccctg

SEQ ID NO: 300070 - DNA, 120 bp, Artificial Sequence
  ENSG00000132704_8 (sequence is synthesized)
tcctcaccctcaggtctcctggggcccaggctgcagtgggggacctgctggagcttcactgtgaggccctgagaggctctcccccaatcttgtaccaattttatcatgaggatgtcaccc

SEQ ID NO: 300071 - DNA, 120 bp, Artificial Sequence
  ENSG00000132704_9 (sequence is synthesized)
ttgggaacagctcggccccctctggaggaggggcctccttcaacctctctttgactgcagaacattctggaaactactcctgtgaggccaacaacggcctgggggcccagtgcagtgagg

SEQ ID NO: 300072 - DNA, 120 bp, Artificial Sequence
  ENSG00000132704_10 (sequence is synthesized)
gactgtttggtgtccttggtttcactggtgttgctttgctgttgtatgccttgttccacaagatatcaggagaaagttctgccactaatgaacccagaggggcttccaggccaaatcctc

SEQ ID NO: 300073 - DNA, 120 bp, Artificial Sequence
  ENSG00000132704_11 (sequence is synthesized)
aagagttcacctattcaagcccaaccccagacatggaggagctgcagccagtgtatgtcaatgtgggctctgtagatgtggatgtggtttattctcaggtctggagcatgcagcagccag

SEQ ID NO: 300074 - DNA, 120 bp, Artificial Sequence
  ENSG00000132704_12 (sequence is synthesized)
aaagctcagcaaacatcaggacacttctggagaacaaggactcccaagtcatctactcttctgtgaagaaatcataacacttggaggaatcagaagggaagatcaacagcaaggatgggg

SEQ ID NO: 300075 - DNA, 120 bp, Artificial Sequence
  ENSG00000132704_13 (sequence is synthesized)
catcattaagacttgctataaaaccttatgaaaatgcttgaggcttatcacctgccacagccagaacgtgcctcaggaggcacctcctgtcatttttgtcctgatgatgtttcttctcca

SEQ ID NO: 300076 - DNA, 120 bp, Artificial Sequence
  ENSG00000132704_14 (sequence is synthesized)
atatcttcttttacctatcaatattcattgaactgctgctacatccagacactgtgcaaataaattatttctgctaccttctcttaagcaatcagtgtgtaaagatttgagggaagaatg

SEQ ID NO: 300077 - DNA, 120 bp, Artificial Sequence
  ENSG00000132704_15 (sequence is synthesized)
aataagagatacaaggtctcaccttcatctactgtgaagtgatgagaacaggacttgatagtggtgtattaacttatttatgtgctgctggatacagtttgctaatattttgttgagaat

SEQ ID NO: 300078 - DNA, 120 bp, Artificial Sequence
  ENSG00000132704_16 (sequence is synthesized)
ttttgcaaatatgttcattgggaatattggcctgaaattttcttttccactgtgtctctgccagaatgtttgtatcaggctgatgctggcttcatagaatgagttaggcaggagcccttc

SEQ ID NO: 300079 - DNA, 120 bp, Artificial Sequence
  ENSG00000132704_17 (sequence is synthesized)
ctccttgattttttggcatagtttcagcaggattggtaccagttattctttctgcatcttgtagaattcagctatgaatccatctggtctagggcttttgtgttggttggtaagtttttt

SEQ ID NO: 300080 - DNA, 120 bp, Artificial Sequence
  ENSG00000132704_18 (sequence is synthesized)
attactaattcaacttcagcgcttgatattggtctaggaggggtttctgtctcttcctggttcaatcttgggagattgtgtgtttccaggaatttagccgtttcctccagattttcttct

SEQ ID NO: 300081 - DNA, 120 bp, Artificial Sequence
  ENSG00000132704_19 (sequence is synthesized)
ttatgtgcatcgacttgagtgtaaacataacttatatgcactgggaaaccaaaaaatctgtgtgacttgctttattgcagcatttgttttattttggtagtctggaactgaacctgcaat

SEQ ID NO: 300082 - DNA, 120 bp, Artificial Sequence
  ENSG00000132704_20 (sequence is synthesized)
cctgcaatatcaccaaagtatgcatatagttgcaaaaatgtgatttttgacatagtaaatatgagtatttgcaataaactatgatattacttttgtaagtatatagaataaaatgtaaat

SEQ ID NO: 300083 - DNA, 120 bp, Artificial Sequence
  ENSG00000132704_21 (sequence is synthesized)
agacgggagtgcttgtggtttgatcatcaaaggagccatgatgggtgagaggtgtctagctctgaatgtcctgtttgctggggttgcttcttgccagaggcttttcagcaggaatcttag

SEQ ID NO: 300084 - DNA, 120 bp, Artificial Sequence
  ENSG00000132704_22 (sequence is synthesized)
gataggagtgttatagcttcagcttggactactagtctgtttctttgttcaactcctgtccttgaggaaagtgaaaattaagctagaaaaaccctccaggttgcggccgggcgcggtggc

SEQ ID NO: 300085 - DNA, 120 bp, Artificial Sequence
  ENSG00000132704_23 (sequence is synthesized)
gacagggcgagactccgtctcaaaaaaacaacaaaacataacaaaaacccctccagattgctcctggcttcctacttcataagaatcagaaatgcactaagccccttataatctttcttt

SEQ ID NO: 300086 - DNA, 120 bp, Artificial Sequence
  ENSG00000132704_24 (sequence is synthesized)
ctttttttgttgttagttaagtaatattcattgatcaagactccattgatcactgactgtatgccttggcatttagtagtgggtgggacacttcaaaaggcaaaccacctgctgtctaat

SEQ ID NO: 300087 - DNA, 120 bp, Artificial Sequence
  ENSG00000132704_25 (sequence is synthesized)
ggctctccaaatgtctccacatgatgagattgcaacacaaattgacttattagaaggcaatgtagcatcaggaaaagtagatgtgaatgaacagagtggtcagaggagaagttgtatttg

SEQ ID NO: 300088 - DNA, 120 bp, Artificial Sequence
  ENSG00000132704_26 (sequence is synthesized)
gttgaaccttgaaattaaaaatgatagaggaattattattgggaccgttgttaggaataatgacttttccactgcaagactgaagatatcagtgcccctctatattctgtgcaaaaggtg

SEQ ID NO: 300089 - DNA, 120 bp, Artificial Sequence
  ENSG00000132704_27 (sequence is synthesized)
tctttgactcatccaaaaaattgaacagtttcctgtctcatggagatctatcacaaagtctttaaatattactacccatgaaattggccagggttaggacattcaaatgtctttatccac

SEQ ID NO: 300090 - DNA, 120 bp, Artificial Sequence
  ENSG00000132704_28 (sequence is synthesized)
attcctgaaggataattgttatagattccctacctccataggaatgcttataatggattatctatacaatctccacattcccacattttgcattagagaatggaatcagtcaaaccctgt

SEQ ID NO: 300091 - DNA, 120 bp, Artificial Sequence
  ENSG00000132704_29 (sequence is synthesized)
cttccagaaattcccagaccaaggtcatgatacacatgtgtcctgaggaaatttcaggaggccccagggattagtgctgtggagaaccaaaagcaatttgaaaatgggttacgcttgcag

SEQ ID NO: 300092 - DNA, 120 bp, Artificial Sequence
  ENSG00000132704_30 (sequence is synthesized)
gttagactgctgacctgtttctttttgtggaaggaaatataaagagggctgtaatcgattatgaagcataagcattcttgcaatcctacgataggatgataaaacatctattacatgaaa

SEQ ID NO: 300093 - DNA, 120 bp, Artificial Sequence
  ENSG00000132704_31 (sequence is synthesized)
ctctgggccagggagtgtcatggatctaaaaggttcatagtggtaacagcctgcttcattttatgtcatctccttcaaagtgattagagtgtttctagcttgccgaaactgcacccaaag

SEQ ID NO: 300094 - DNA, 120 bp, Artificial Sequence
  ENSG00000132704_32 (sequence is synthesized)
ggagacatttggagccatgttattggtgatttactggtgtggaaaattacctggtgttgtagccaagtagccatttccattctaacccagtcctatagtcctgaactgggctgaataaac

SEQ ID NO: 300095 - DNA, 120 bp, Artificial Sequence
  ENSG00000132704_33 (sequence is synthesized)
aaacatacctaaatatatgtttagaaatgctcctatgtatcagttttcccaggaacaactataatattatagaaatcttaaaattatttcctaataaaaaattataggatacaaaagaaa

SEQ ID NO: 300096 - DNA, 120 bp, Artificial Sequence
  ENSG00000132704_34 (sequence is synthesized)
agaaatatgaagagggctggatgggcacaggaaaacaatcagatgagaacaacagatgaccgtgtctgcaggcagcacccagaactgatattcccctcaaacgtctaaatatattgttga

SEQ ID NO: 300097 - DNA, 120 bp, Artificial Sequence
  ENSG00000132704_35 (sequence is synthesized)
gaaaattatctctaactgttctagtgggaatgtgggaatggaaaatatgcaacagccatggggccaggccctttgctgagcctgcaggttgggagtttgtgaatctattgaggcatcaca

SEQ ID NO: 300098 - DNA, 120 bp, Artificial Sequence
  ENSG00000132704_36 (sequence is synthesized)
ttgtatctaccatttggattctccatattttgctatgacctttccactactgatatagattgaaattacaaaaaaagaagagagaaaagaaaactctccaaaagccaataatttcttttt

SEQ ID NO: 300099 - DNA, 120 bp, Artificial Sequence
  ENSG00000132704_37 (sequence is synthesized)
atgcttcataattctgcaaggctctgtgcaatgctcaatgtggtcatactgctaattatacaatatgtcactgttccctgtgcatagtcactggagattaaattatttacacattctttc

SEQ ID NO: 300100 - DNA, 120 bp, Artificial Sequence
  ENSG00000132716_0 (sequence is synthesized)
gcggtggtggtggcggccgctggccagtgtaagatggcggcggcgttggtggtggcagtggacggggcggctgggcctggaacagtcggagcagccgctagcagaaggatgacccaagac

SEQ ID NO: 300101 - DNA, 120 bp, Artificial Sequence
  ENSG00000132716_1 (sequence is synthesized)
gggaagcgggctgctgagcctcgccgattcccgtgcttgtaactgccccagccggacaccccccctcccttgacctacccgtccttcagtgaatctacagacctattttctcaggagctc

SEQ ID NO: 300102 - DNA, 120 bp, Artificial Sequence
  ENSG00000132716_2 (sequence is synthesized)
agcctggccttacttcagtgataaaaggaggaaaggctggctacagcaaacatcattcaagatgtccagcaaagggagcagcacagatggcagaacagacttagctaatggaagcctgtc

SEQ ID NO: 300103 - DNA, 120 bp, Artificial Sequence
  ENSG00000132716_3 (sequence is synthesized)
tagcagtccagaggagatgtctggagctgaagaggggagggagacatcctcaggcattgaagtggaggcctcagacctgagtttgagcttgactggggatgatggtggccccaaccgcac

SEQ ID NO: 300104 - DNA, 120 bp, Artificial Sequence
  ENSG00000132716_4 (sequence is synthesized)
cagcacagaaagtcgaggcacagacacagagagctcaggtgaagataaggactctgacagcatggaggacactggtcattactccattaatgatgaaaatcgagtccatgaccgctcaga

SEQ ID NO: 300105 - DNA, 120 bp, Artificial Sequence
  ENSG00000132716_5 (sequence is synthesized)
ggaagaggaagaggaggaagaagaggaggaagaagagcagcctcggcgccgtgtacagcgcaagcgggctaaccgtgaccaggactcatcagatgatgagcgggccctagaggactgggt

SEQ ID NO: 300106 - DNA, 120 bp, Artificial Sequence
  ENSG00000132716_6 (sequence is synthesized)
gtcctcagaaacatcagctctaccccgacctcgctggcaagccctccctgcccttcgggagcgggagctgggttcaagtgcccgctttgtctatgaggcctgtggggcaagagtctttgt

SEQ ID NO: 300107 - DNA, 120 bp, Artificial Sequence
  ENSG00000132716_7 (sequence is synthesized)
gcagcgtttccgcctgcagcatgggcttgagggccatactggttgtgtcaataccctgcactttaaccagcgcggcacctggctggccagtggcagcgatgacctgaaggtggtggtgtg

SEQ ID NO: 300108 - DNA, 120 bp, Artificial Sequence
  ENSG00000132716_8 (sequence is synthesized)
ggattgggtacggcggcagccagtactggactttgagagtggccacaaaagtaatgtgttccaggccaagtttcttcctaacagtggtgattctactctggccatgtgtgcccgtgacgg

SEQ ID NO: 300109 - DNA, 120 bp, Artificial Sequence
  ENSG00000132716_9 (sequence is synthesized)
gcaggttcgagtagcagaactgtctgccacacagtgttgcaagaatacaaaacgtgtggcccagcacaagggagcgtcccacaagttggcactggaaccagactctccctgtacgttctt

SEQ ID NO: 300110 - DNA, 120 bp, Artificial Sequence
  ENSG00000132716_10 (sequence is synthesized)
atctgcaggtgaagatgcagttgttttcaccattgacctgagacaagaccgcccagcgtcgaaactggtggtgacaaaagagaaagagaagaaagtggggctgtatacgatctatgtgaa

SEQ ID NO: 300111 - DNA, 120 bp, Artificial Sequence
  ENSG00000132716_11 (sequence is synthesized)
tcctgccaatacccaccagtttgcagtgggtggacgagatcagtttgtaaggatttatgaccagaggaaaattgatgagaatgagaacaatggagtactcaagaagttctgtcctcatca

SEQ ID NO: 300112 - DNA, 120 bp, Artificial Sequence
  ENSG00000132716_12 (sequence is synthesized)
cctggtgaacagtgagtccaaagcaaacatcacctgtcttgtgtacagccacgacggcacagagctcctggccagttacaatgatgaagacatttacctcttcaactcctctcacagtga

SEQ ID NO: 300113 - DNA, 120 bp, Artificial Sequence
  ENSG00000132716_13 (sequence is synthesized)
tggggcccagtatgttaagagatacaagggccacagaaataatgccacagtaaaaggcgtcaatttctatggccccaagagtgagtttgtggtgagcggtagtgactgtgggcacatctt

SEQ ID NO: 300114 - DNA, 120 bp, Artificial Sequence
  ENSG00000132716_14 (sequence is synthesized)
cctctgggagaaatcatcctgccagattattcagttcatggagggggacaagggaggcgtggtaaactgtcttgagccccaccctcacctgcctgtgctggcaaccagtggcctagacca

SEQ ID NO: 300115 - DNA, 120 bp, Artificial Sequence
  ENSG00000132716_15 (sequence is synthesized)
tgatgtgaagatctgggcacccacagctgaagcttccactgagctgacagggttaaaagatgtgattaagaagaacaagcgggagcgggatgaagatagcttgcaccaaactgacctgtt

SEQ ID NO: 300116 - DNA, 120 bp, Artificial Sequence
  ENSG00000132716_16 (sequence is synthesized)
gctgtggttccttatgcatcacctgagacagagacgccatcaccggcgctggcgagaacctggggttggggccacagacgcggactctgatgagtctcccagctcctcagacacatcgga

SEQ ID NO: 300117 - DNA, 120 bp, Artificial Sequence
  ENSG00000132716_17 (sequence is synthesized)
cgaggaggagggccctgaccgggtgcagtgcatgccatcttgaggcctcatacctaggtggggcaggctggggctgccaacctgatcctgcctgggcaaccctttcctgtcccaggccct

SEQ ID NO: 300118 - DNA, 120 bp, Artificial Sequence
  ENSG00000132716_18 (sequence is synthesized)
acattcagcagaaacgcactttggactttttgctttagataaaagaaagacatcccaggagaaggacaaaccagaggagtgaaccaacaaagagtacctaggaatgggagttgagccctg

SEQ ID NO: 300119 - DNA, 120 bp, Artificial Sequence
  ENSG00000132716_19 (sequence is synthesized)
gaatggggctctatggagaggtgcataggactcggcagaaatggcctctccccaaagcctctttttgagaggagagggaagcctattttgttaactggtttgggatagggaatggggttt

SEQ ID NO: 300120 - DNA, 120 bp, Artificial Sequence
  ENSG00000132716_20 (sequence is synthesized)
ctttttctttaatctcccttgtttcttgggctgggggaggggtggggggaacaactggctattcagtaccaaggggccagagtggagggtaggagtgccactctctctttggtttaggtt

SEQ ID NO: 300121 - DNA, 120 bp, Artificial Sequence
  ENSG00000132716_21 (sequence is synthesized)
tttgaccttttcttcctttgttttttaaaagtttatgacagttggctccccccccacccccagcaaccccatcccagaatcctattttcctgggaagtccttaaagcccctaaccatccc

SEQ ID NO: 300122 - DNA, 120 bp, Artificial Sequence
  ENSG00000132716_22 (sequence is synthesized)
acactcttcactttcctttccaccttattcattctctgtacttaccacagtattttgcacttgattacatatccttcactctcttctcttcatcccatcaccccctaaataggtcaggtg

SEQ ID NO: 300123 - DNA, 120 bp, Artificial Sequence
  ENSG00000132716_23 (sequence is synthesized)
agggaggctgggaagaggtgggaggaggggcagaagtgaaggaagaataggaaggatattacctcttctgttatttttttaagaaacattgtttggtggcagcaatctccctgtccctat

SEQ ID NO: 300124 - DNA, 120 bp, Artificial Sequence
  ENSG00000132716_24 (sequence is synthesized)
cactgttagaggcctaattttatatctataaatatattaaaaagcaagtcaaacttggatgtatcaaggtaaaattattgtcaaagtttaaatacctatatattctctgaatgcaataaa

SEQ ID NO: 300125 - DNA, 120 bp, Artificial Sequence
  ENSG00000132716_25 (sequence is synthesized)
gggacttaagagtgaacaagagtaatggtgtggaagtgacacctggggtcagtttacctctgtgtatggtcactagagattgggacttaccctttaggttttaggaggcttgagaatgga

SEQ ID NO: 300126 - DNA, 120 bp, Artificial Sequence
  ENSG00000132716_26 (sequence is synthesized)
aggatcctcatttctgcccttcctggttccctgctttggtgtaggggttgggaaaaacaggaaattcctctcagctctgcctcagatctcctacctctccttaagtcttgtagggggttc

SEQ ID NO: 300127 - DNA, 120 bp, Artificial Sequence
  ENSG00000132716_27 (sequence is synthesized)
caaggatggctcttctaaccagaggctggcctgtctttaaaacttaactactttagggtggtgccaccactgcagactattgtggtactttgtgacagaagacatgtacacacacaccac

SEQ ID NO: 300128 - DNA, 120 bp, Artificial Sequence
  ENSG00000132716_28 (sequence is synthesized)
acacatacatacacactctctcactctgtctctcttacctttagctgcttgatcattaagccatccaacttcatgccagttcccttctttatagaagagtgaagggaaagacttcctggg

SEQ ID NO: 300129 - DNA, 120 bp, Artificial Sequence
  ENSG00000132716_29 (sequence is synthesized)
tttgacttaaaccttgtccacctcttgatattttaggattgaggaataagtcattaatctaaggactgattacagtggctggagcttgggcacttgtcttatcactggtcactgagtctg

SEQ ID NO: 300130 - DNA, 120 bp, Artificial Sequence
  ENSG00000132716_30 (sequence is synthesized)
aaagtcccagctgaattcttgcccttaagtgcttttgctgctatttttttgcccccagttccacaagatccaaccaagaattctgtatcctgggacagtcagattcttctaaatcaggcc

SEQ ID NO: 300131 - DNA, 120 bp, Artificial Sequence
  ENSG00000132716_31 (sequence is synthesized)
aggaaggaggggaaaagagtgagagaatggtattcccagatacttcttcctcctgccccttttcccagcagctctgagaccagatgttggctgctgtacttactccctgaggtagggaat

SEQ ID NO: 300132 - DNA, 120 bp, Artificial Sequence
  ENSG00000132716_32 (sequence is synthesized)
gtgtggtgatcgagtggtctgtgttcctattgctggtggggtgatagggtgggctaaaaaccatgcactctggaatttgttgtattttctcccagtaaagcttttcttctcccgactgct

SEQ ID NO: 300133 - DNA, 120 bp, Artificial Sequence
  ENSG00000132716_33 (sequence is synthesized)
tgggcctgacccgtatcccaagctcttagcgctcaggtcttttccttccgccgacccgaagtcatcgctgggagtactggttgccctttcctcagtccttcagtgaatctacagacctat

SEQ ID NO: 300134 - DNA, 120 bp, Artificial Sequence
  ENSG00000132716_34 (sequence is synthesized)
ttattcataagctcagtcttagcttcagtcttttctgagcatttgtttatttgtaagatggaagtcaaagtaagtgggaagtctgtaggtcagctctattttccatgcctgcccttgact

SEQ ID NO: 300135 - DNA, 120 bp, Artificial Sequence
  ENSG00000132716_35 (sequence is synthesized)
tctcctcagctgttctctgcctgtgcaggtgaggcagcggaggtggttggtccagagagaactaaaagaagttgttttcttggactataggtccagctgcaaggcagggtgcctttccta

SEQ ID NO: 300136 - DNA, 120 bp, Artificial Sequence
  ENSG00000132716_36 (sequence is synthesized)
tgtgttcctcttttcactaaaagactcaaaatgctttagcagctagatctggaactaactcttctggatggggtaggaacttccctgcccttcccttagggaagctcatgtttccaagtc

SEQ ID NO: 300137 - DNA, 120 bp, Artificial Sequence
  ENSG00000132716_37 (sequence is synthesized)
agacagcagggggcattgggtgcctttcggacagaaggaagctgcctaagctagaaggcctgcctgctggagtttatttcttttgccttgttcagtgaatttacccagagggtggctgag

SEQ ID NO: 300138 - DNA, 120 bp, Artificial Sequence
  ENSG00000132716_38 (sequence is synthesized)
attgaggctttgggagccccaagaagctgcttggttttaatgtgctgccttatagctgagcctgttgtgctcagggcaagtagtaggatgttccccctgggatgtgcaaggttctctcaa

SEQ ID NO: 300139 - DNA, 120 bp, Artificial Sequence
  ENSG00000132716_39 (sequence is synthesized)
gcagacatgagcctccatcactcccaccactccctgcaactcagcctcctcttctcagcctgtgccttcctccagttctagtaaacactgccaaatgaatatagttctccgactcttctc

SEQ ID NO: 300140 - DNA, 120 bp, Artificial Sequence
  ENSG00000132716_40 (sequence is synthesized)
tgggggttcattggcagctgctgctttcttcattttttaaaatttatttgccacttggtgaaagccactgagatggttttttccagccttgggcaagttggagctttggaatctggagtg

SEQ ID NO: 300141 - DNA, 120 bp, Artificial Sequence
  ENSG00000132716_41 (sequence is synthesized)
tatctggggatgaagccacccccgacctatacataggaaatgattgatgtgcctggtcttatacccagtctgtgtctggtttctctaccctcagtgccctttggcttaggctcaggatgg

SEQ ID NO: 300142 - DNA, 120 bp, Artificial Sequence
  ENSG00000132716_42 (sequence is synthesized)
gtgggcctcccttccccagcagctgcctcagccctgatcaagggcagttatttggctcaaggtgagtagtggtttttaaaccctactcccacacactgctgagtctgtgttttcctttct

SEQ ID NO: 300143 - DNA, 120 bp, Artificial Sequence
  ENSG00000132716_43 (sequence is synthesized)
tcaccgggtaagctagggttggaaatgaattcccaagggagtgacccttttaagagggctaaaaagttccagagtagtgacttcaagcagtaatcaggtgatcttggtcggatttcctat

SEQ ID NO: 300144 - DNA, 120 bp, Artificial Sequence
  ENSG00000132716_44 (sequence is synthesized)
ccactgtcctctgtccccatcagatccctgatatagccttggaagagacatcagcagaaaagggtggtatctacttttgtccattgccgtccatgtgtaatgctatcttcataaaggcaa

SEQ ID NO: 300145 - DNA, 120 bp, Artificial Sequence
  ENSG00000132716_45 (sequence is synthesized)
aagctggagggtggaggagggaattgagaagaaataacaagtctcagtgtgacccttctatttttcctcttatgccaaaagaggcctagttcaggggttggcaaactggcagttggcctg

SEQ ID NO: 300146 - DNA, 120 bp, Artificial Sequence
  ENSG00000132716_46 (sequence is synthesized)
ctgctggtttttgtaaataaagtttcattggcttgcagccatacccattctgtgtattgtctgtggcggccttcacgctacaatgagttgaatagttgcaataaagaccatatagaccac

SEQ ID NO: 300147 - DNA, 120 bp, Artificial Sequence
  ENSG00000132716_47 (sequence is synthesized)
ttcaatcttccagagccaactgaaatgctctcttacatcaaaggaagttttttctctccctttcctttaactcctggaagaaattgggcttagccagctgtacaagagtaggaaagctaa

SEQ ID NO: 300148 - DNA, 120 bp, Artificial Sequence
  ENSG00000132716_48 (sequence is synthesized)
gtttccagctgtcatgtaagaaaagggggtaagttgaggtcatcatcgtattttttattctcaagtttacctctctcatttcttttgtgtgtcctttttttcatttttaacaccccaggc

SEQ ID NO: 300149 - DNA, 120 bp, Artificial Sequence
  ENSG00000132716_49 (sequence is synthesized)
gatgcagggctgaatgccctctcccaggccagcatttgtccattctccaaaagcattctgcaggccagtttgcttttagctcagccaatgccagggtttgatgattaacccatttgccca

SEQ ID NO: 300150 - DNA, 120 bp, Artificial Sequence
  ENSG00000132716_50 (sequence is synthesized)
ttagaacggtcccatttggtccctgttagttggaaagcatctggtggcttgaatttctgactcatgattgttactggagtctctgtaaacaaaccggcactagcgctatcacattctctc

SEQ ID NO: 300151 - DNA, 120 bp, Artificial Sequence
  ENSG00000132716_51 (sequence is synthesized)
cgggatttccccccctgctctgtggcttcttgttgagaggttgtttggttatggtttagcgttgaaaagattcaggttatccttttaaatgactttacgttttagtggagctgggagatt

SEQ ID NO: 300152 - DNA, 120 bp, Artificial Sequence
  ENSG00000132716_52 (sequence is synthesized)
acttgcctggcttctaatcttcatgttggttcattttatttccatatgtgtgtgggttatttgttcagtaattagaattagataaagtattctgcttttaagtagttttgagaaggccta

SEQ ID NO: 300153 - DNA, 120 bp, Artificial Sequence
  ENSG00000132716_53 (sequence is synthesized)
gtcgcaaacggggccggaaagcgtggcagcgcaggcgcaagcgcagagagcggaggcggtggtggtggcggccgctggccagttccttcagtgaatctacagacctattttctcaggagc

SEQ ID NO: 300154 - DNA, 120 bp, Artificial Sequence
  ENSG00000132716_54 (sequence is synthesized)
gaggcgtgggacaagggttgggggtggtatcagaggacagccccttagtctcccaagagcactttgatgcttgatcccattctctacattcccccagcccagtcatctaaggccagagct

SEQ ID NO: 300155 - DNA, 120 bp, Artificial Sequence
  ENSG00000132716_55 (sequence is synthesized)
cttttctctgctcaggcattattgacaggataagtcctggcattcagacaggtctggtgaagtgaccaggtactctggcccagaagttctctgtcggctccccccgcaggctccaattca

SEQ ID NO: 300156 - DNA, 120 bp, Artificial Sequence
  ENSG00000132716_56 (sequence is synthesized)
tccaggtgaggcaagggagcataatagcaactgagagaatcaggcatgagttagagaaatctgaactgcagcatggattgggagctgatagtgagttattgtaggaattacatatcggga

SEQ ID NO: 300157 - DNA, 120 bp, Artificial Sequence
  ENSG00000132716_57 (sequence is synthesized)
catggccctactttggctcccctaatgacctaaatacactgaaagactcttggcaaccctagattccttgagcatgtggactgttggaagcctcataggtagggtgcatgcagcttatta

SEQ ID NO: 300158 - DNA, 120 bp, Artificial Sequence
  ENSG00000132716_58 (sequence is synthesized)
aatgtgtgctggtaggaggcagtgtagtataagcacaggctcttgaaccaaactgcctgagttcaaatcctagcccttctgcttactagctcagtgatcttggccaagttattttacctt

SEQ ID NO: 300159 - DNA, 120 bp, Artificial Sequence
  ENSG00000132716_59 (sequence is synthesized)
tgtcttcagtttatctgtaaaatgggactaataacacatagggttatgaggattaagtaacaatagaagctaagcagttagaactgtgactggtacttaataaacatttgataaatgtta

SEQ ID NO: 300160 - DNA, 120 bp, Artificial Sequence
  ENSG00000132716_60 (sequence is synthesized)
gtcttttacttggctccctctgctctgttttttggtcctaattttccagcagtgggggttaccaggcactactttcaatgtagtagactcagcagttctatatcatgcaaattgtaaatg

SEQ ID NO: 300161 - DNA, 120 bp, Artificial Sequence
  ENSG00000132716_61 (sequence is synthesized)
tagagtagaatgtaattgtaacgtagaatgttagaaccaaagatcttagaagttattttctgccttgcccagatctcctgactgatttgaggatcttttctttgttcccattcagcttca

SEQ ID NO: 300162 - DNA, 120 bp, Artificial Sequence
  ENSG00000132718_0 (sequence is synthesized)
agcgcatccccggagcatcttaagagctgagcgcagctgacaactaggggccggaccgtcgcaggaggcgtccgctggataccttcccccttccctgacctagagctctacagctgctgc

SEQ ID NO: 300163 - DNA, 120 bp, Artificial Sequence
  ENSG00000132718_1 (sequence is synthesized)
ctcggtactgaccgagggttcccagagctgtctcaccattgcaaaaacgttatagcaacagcctctgattacgacatggctgagatcaccaatatccgacctagctttgatgtgtcaccg

SEQ ID NO: 300164 - DNA, 120 bp, Artificial Sequence
  ENSG00000132718_2 (sequence is synthesized)
gtggtggccggcctcatcggggcctctgtgctggtggtgtgtgtctcggtgaccgtctttgtctggtcatgctgccaccagcaggcagagaagaagcagaagaacccaccatacaagttt

SEQ ID NO: 300165 - DNA, 120 bp, Artificial Sequence
  ENSG00000132718_3 (sequence is synthesized)
attcacatgctcaaaggcatcagcatatacccagagaccctcagcaacaagaagaaaatcatcaaagtgcggagagacaaagatggtcctgggagggaaggtggacgtaggaacctgttg

SEQ ID NO: 300166 - DNA, 120 bp, Artificial Sequence
  ENSG00000132718_4 (sequence is synthesized)
gtggacgcagcagaggctggcctgctaagccgagacaaagatcccagggggcctagctctggatcttgtatagaccaattacccatcaaaatggactatggggaagaactaaggagccct

SEQ ID NO: 300167 - DNA, 120 bp, Artificial Sequence
  ENSG00000132718_5 (sequence is synthesized)
attacaagcctgacccctggggagagcaaaaccacctctccatcatctccagaggaggatgtcatgctaggatccctcaccttctcagtggactataacttcccgaaaaaagccctggtg

SEQ ID NO: 300168 - DNA, 120 bp, Artificial Sequence
  ENSG00000132718_6 (sequence is synthesized)
gtgacaatccaggaggcccatgggctgccagtgatggatgaccagacccagggatctgacccctacatcaaaatgaccatccttcctgacaaacggcatcgggtgaagaccagagtgctg

SEQ ID NO: 300169 - DNA, 120 bp, Artificial Sequence
  ENSG00000132718_7 (sequence is synthesized)
cggaagaccctggaccctgtgtttgacgagaccttcaccttctatggcatcccctacagccagctgcaggacctggtgctgcacttccttgtcctcagctttgaccgcttctctcgggat

SEQ ID NO: 300170 - DNA, 120 bp, Artificial Sequence
  ENSG00000132718_8 (sequence is synthesized)
gatgtcattggcgaggtcatggtgccactggcaggggtggaccccagcacaggcaaggtacaactgaccagggacatcatcaaaaggaatatccagaagtgcatcagcagaggggagctc

SEQ ID NO: 300171 - DNA, 120 bp, Artificial Sequence
  ENSG00000132718_9 (sequence is synthesized)
caggtgtctctgtcatatcagcctgtggcacagagaatgacagtggtggtcctcaaagccagacacttgccgaagatggatatcaccggtctctcaggtaatccttatgtcaaggtgaac

SEQ ID NO: 300172 - DNA, 120 bp, Artificial Sequence
  ENSG00000132718_10 (sequence is synthesized)
gtctactacggcagaaagcgcattgccaagaagaaaacccatgtgaagaagtgcactttgaaccccatcttcaatgaatctttcatctacgacatccccactgacctcctgcctgatatc

SEQ ID NO: 300173 - DNA, 120 bp, Artificial Sequence
  ENSG00000132718_11 (sequence is synthesized)
agcatcgagttcctcgttatcgacttcgatcgcaccaccaagaatgaggtggtggggaggctgatcctgggggcacacagtgtcacagccagtggtgctgaacactggagagaggtctgc

SEQ ID NO: 300174 - DNA, 120 bp, Artificial Sequence
  ENSG00000132718_12 (sequence is synthesized)
gagagcccccgcaagcctgtggccaagtggcacagtctgagcgagtactaatcctgttcttctctcctctaatccccgggggccaagctggggagggatgtggaggggaaaaagatgaca

SEQ ID NO: 300175 - DNA, 120 bp, Artificial Sequence
  ENSG00000132718_13 (sequence is synthesized)
gagaagtggactccaaacctcattttagttgtagaagaaaatttcttacaaaacaaattccacaaagaacaccctatatgaccacagctgcagatcagttcttagcaatgatgttttttt

SEQ ID NO: 300176 - DNA, 89 bp, Artificial Sequence
  ENSG00000132718_14 (sequence is synthesized)
accacagctgcagatcagttcttagcaatgatgtttttttttctgctttgcaaggcgctagaatcttttattttactttacccgggctg

SEQ ID NO: 300177 - DNA, 69 bp, Artificial Sequence
  ENSG00000132718_15 (sequence is synthesized)
tctggttttgttttgttttttttttttaatgggggacaaaagagagggaaagacccctataaatctata

SEQ ID NO: 300178 - DNA, 120 bp, Artificial Sequence
  ENSG00000132718_16 (sequence is synthesized)
tgggggacaaaagagagggaaagacccctataaatctatatataacaatgtaaccatatacttgcatgtctaatacaaactgaagaaattagcctaactgccaatatcaagttgcagatt

SEQ ID NO: 300179 - DNA, 120 bp, Artificial Sequence
  ENSG00000132718_17 (sequence is synthesized)
ttaatccatggaaattgtgttttgtgctgaattgtatttgctgattacctgaaattggcttctttttattgggcttctctggagaatttctcccactccccacctctgcagaagaaaatt

SEQ ID NO: 300180 - DNA, 120 bp, Artificial Sequence
  ENSG00000132718_18 (sequence is synthesized)
ttgctcttataaaacctcatgttttcatcattcccatcttttctttttattgcctcttatatctctgctctttgacctcaaggtctagaggtctgcagtaagccaagaaacaaaggtggg

SEQ ID NO: 300181 - DNA, 120 bp, Artificial Sequence
  ENSG00000132718_19 (sequence is synthesized)
gtggatgaggcaaggtttgcaggagaaagaggaattgagaaatggggtatttttgctatcagctcttctgctatgaagtagtaaaaggcagtctataattaactgacagacctaactgaa

SEQ ID NO: 300182 - DNA, 120 bp, Artificial Sequence
  ENSG00000132718_20 (sequence is synthesized)
atgcatccaagacatcagaacttggattttatcaaacttgatgacttctctaaaaggagctttggaaacttcaaattcagctataggatagtaccaatgaacacatccagctgatcccaa

SEQ ID NO: 300183 - DNA, 120 bp, Artificial Sequence
  ENSG00000132718_21 (sequence is synthesized)
aagctgttttcaggtataaggacaaggagaggagacaagtgacgacagccattcccctttgcagctatctactgtagtgacagccatttcttggttgatgggttggaagtcatcagaggt

SEQ ID NO: 300184 - DNA, 120 bp, Artificial Sequence
  ENSG00000132718_22 (sequence is synthesized)
ttgaagaattacactggcctttgtttttctggaaatgccgaccatggagatgctttagagtcttctcaaatagcttagatgttgtaatgaggttagctttgcttcataaaacaggggccc

SEQ ID NO: 300185 - DNA, 120 bp, Artificial Sequence
  ENSG00000132718_23 (sequence is synthesized)
tcagaagttctccttaaatttttcaataaaaatttagctcttaaaaaaataacagtgtgactgagtgaatgaagataagttggattctttcagagcattcttttcctcaaaacgagctgc

SEQ ID NO: 300186 - DNA, 120 bp, Artificial Sequence
  ENSG00000132718_24 (sequence is synthesized)
ataattcttggaatttatgtcttaccacatggtggagggatggaggaactacaggatgcaattcttcttctaccaatgggcaatagaggttgagagagattcagcatctttctgggatta

SEQ ID NO: 300187 - DNA, 120 bp, Artificial Sequence
  ENSG00000132718_25 (sequence is synthesized)
attagaattcaagtctctttactcctacagcagctgtgtctccaacgttgagactttgcagatggcacagactccatggataataggtaaacttggggccgggcgcagtggctcacgcct

SEQ ID NO: 300188 - DNA, 89 bp, Artificial Sequence
  ENSG00000132718_26 (sequence is synthesized)
tacatgacgaaactccatctctatcaaaaatacaaaaaattaactaggtgtggtgctgcacgcctgtggtcccagctattcaggaggct

SEQ ID NO: 300189 - DNA, 84 bp, Artificial Sequence
  ENSG00000132718_27 (sequence is synthesized)
tgggaggatcatttgagcccagaggtatgggctgggtaacagagtgagatcctgtctcaaaaattaattaattaattaattaaa

SEQ ID NO: 300190 - DNA, 120 bp, Artificial Sequence
  ENSG00000132718_28 (sequence is synthesized)
tgagatcctgtctcaaaaattaattaattaattaattaaaataaactaggtaaacttggataggcagtagatatttttgcccacctgaggaggaactcagtcaagctgttgcttaacagc

SEQ ID NO: 300191 - DNA, 120 bp, Artificial Sequence
  ENSG00000132718_29 (sequence is synthesized)
ttgatccagggcgtgaaaggttagttgagactgaagtgttcacttccatagaagaacatcacttttaaccttgctttggcgaagggagtcggaaagctgagtctctatggacgggggggt

SEQ ID NO: 300192 - DNA, 120 bp, Artificial Sequence
  ENSG00000132718_30 (sequence is synthesized)
gatcttgctttcagtgttccctcagcttttgtggatttaaaaccattctgctccccctaaaccttttgtttgatttcagcccatgttcttgacaatgcagagcaattctgagcagtcaca

SEQ ID NO: 300193 - DNA, 120 bp, Artificial Sequence
  ENSG00000132718_31 (sequence is synthesized)
aagcctactctctgttcttgtccctgccaacccccaccccccataatctgactcacaacttcaccatcagttggggtcataccactagtctctgtcctataccccatgaaatgtaaatac

SEQ ID NO: 300194 - DNA, 120 bp, Artificial Sequence
  ENSG00000132718_32 (sequence is synthesized)
tgtatcataagtagaagaaaataatttttgttttctaaaaatgcattttgagatagtttaatgtaaatctgacaggagcattctgaagccccattaggaaaaaatttaaatggttcctct

SEQ ID NO: 300195 - DNA, 120 bp, Artificial Sequence
  ENSG00000132718_33 (sequence is synthesized)
tcatcgccttaatgtctaaagatcagaaatcgctgagcaaacccgcttttgtttccttcccagaaacaatgcaaaacaacaggtggagatagtctggtctttgccctgctgtgtgtgcct

SEQ ID NO: 300196 - DNA, 120 bp, Artificial Sequence
  ENSG00000132718_34 (sequence is synthesized)
ctgtagctcctcctgacaaacgtctgggaaaacagcctcaccccactctcctctctcttccccatttccttgtagctttattccttgcatctttgggtctactgagcagtgggtgctgag

SEQ ID NO: 300197 - DNA, 120 bp, Artificial Sequence
  ENSG00000132718_35 (sequence is synthesized)
gtgacaggggaggaaccagttgttctgtagcctaggaactgcctcagtgtctttgccagaaaaaggcaaagaggcggacagtgcagggctcctccctcctacctcaggcctgatccatcg

SEQ ID NO: 300198 - DNA, 120 bp, Artificial Sequence
  ENSG00000132718_36 (sequence is synthesized)
tgcccttgactttgccgtctcaaagtttcttagctgactttggctttcacatttgttctttccagagctaactgataagagtggaggaggaatgccttctcctaagagtcagttgaaaga

SEQ ID NO: 300199 - DNA, 120 bp, Artificial Sequence
  ENSG00000132718_37 (sequence is synthesized)
aagacaagagagtcacatcttagcttttgcacaaggcattcgtggtcaggaataggttagggaatggtcacttctgattttccaacagttgctccttctctgaagagatcttgattcctt

SEQ ID NO: 300200 - DNA, 120 bp, Artificial Sequence
  ENSG00000132718_38 (sequence is synthesized)
tgggaagacaagaatttttcttaataacaaaggtccctttatgagttattccttctttcagttcatctcactggagcacagccaagatggacatgtttatggacagtgctctagatgtga

SEQ ID NO: 300201 - DNA, 120 bp, Artificial Sequence
  ENSG00000132718_39 (sequence is synthesized)
aaacagatagaactggtttgtgggacaggggcagcttgctcaggagagggaataacgcaggtcccttttcttggaaggcttgtactatggccatgacagtgacattgccctcaccatgat

SEQ ID NO: 300202 - DNA, 120 bp, Artificial Sequence
  ENSG00000132718_40 (sequence is synthesized)
ccctctccaaagtggttgtctttctttaccttgtgtcttctcttgtaaaaatgaaactcaaaaataaaataaatgtgtcaaattttgaaaaaaaaagaaaactgaaaaagctaacatgaa

SEQ ID NO: 300203 - DNA, 120 bp, Artificial Sequence
  ENSG00000132718_41 (sequence is synthesized)
ttgtgtgaaattgcataatgctgtaatgctaatctacaatatgtaatgctatcttgtatgttgaatttgttaatgcaccacacaagtgcaaaataaagactgattcacattacataggca

SEQ ID NO: 300204 - DNA, 120 bp, Artificial Sequence
  ENSG00000132740_0 (sequence is synthesized)
gcgaaccgcgtgcgtaacgcacgggcccggcggggaacaccggtccgctgtaacaccggcccggcgcagaagcgggacgtcggcttctaggggcccaggccggcggcggcgatggcctcg

SEQ ID NO: 300205 - DNA, 120 bp, Artificial Sequence
  ENSG00000132740_1 (sequence is synthesized)
gcagctgtggagagcttcgtgaccaagcaactggacctgctggagcttgagagagacgcggaggtggaggagcgcaggtcctggcaggagaacatctctctgaaagagctccagagccga

SEQ ID NO: 300206 - DNA, 120 bp, Artificial Sequence
  ENSG00000132740_2 (sequence is synthesized)
ggcgtgtgtttgctgaagctgcaggtatccagccagcgcactgggctgtacggacggctgctggtcacctttgagcccaggcgatacgggtccgcggcagctcttcccagtaacagcttt

SEQ ID NO: 300207 - DNA, 120 bp, Artificial Sequence
  ENSG00000132740_3 (sequence is synthesized)
acttctggtgatatcgtgggcctgtacgatgctgctaatgagggcagtcagctggccactgggatcttgacccgggtcacccagaagtcggtcacggtggcctttgatgagtcccacgat

SEQ ID NO: 300208 - DNA, 120 bp, Artificial Sequence
  ENSG00000132740_4 (sequence is synthesized)
ttccagttgagcttggaccgagagaattcctacagactgttaaaacttgccaatgatgtcacttacaggcgactgaaaaaagccctgattgctctaaagaagtatcattctggcccagcc

SEQ ID NO: 300209 - DNA, 120 bp, Artificial Sequence
  ENSG00000132740_5 (sequence is synthesized)
tcctcactcatagaagtgctctttggcagatctgctcccagtcctgccagtgaaatacacccgctgacattcttcaacacctgcctggacacctcccagaaagaagcggttttatttgcg

SEQ ID NO: 300210 - DNA, 120 bp, Artificial Sequence
  ENSG00000132740_6 (sequence is synthesized)
ctgtctcagaaagaacttgccatcatccatggacctcctggcactgggaaaaccacgactgtggttgagatcattcttcaagctgtgaaacaaggcttaaaggttctgtgctgcgccccc

SEQ ID NO: 300211 - DNA, 120 bp, Artificial Sequence
  ENSG00000132740_7 (sequence is synthesized)
tccaacatcgccgtggacaatctggtggagcgcctggctctgtgtaagcagcggattctgcgcctgggacaccctgcccgcctcctggagtccattcagcagcactccctggatgcggtt

SEQ ID NO: 300212 - DNA, 120 bp, Artificial Sequence
  ENSG00000132740_8 (sequence is synthesized)
ttagcgcggagcgacagtgcccagattgttgcagatatcaggaaggacatcgaccaggtctttgtgaaaaacaaaaagacccaggataagagagagaaaagtaattttcgaaatgaaatt

SEQ ID NO: 300213 - DNA, 120 bp, Artificial Sequence
  ENSG00000132740_9 (sequence is synthesized)
aagctgttaagaaaagaactgaaggagagggaagaagcagctatgctcgagagcctcacttcggcaaacgtggtccttgcaacaaacacaggtgcgtctgccgatggccccctgaagttg

SEQ ID NO: 300214 - DNA, 120 bp, Artificial Sequence
  ENSG00000132740_10 (sequence is synthesized)
ctgcccgagagctacttcgacgtggtggtcattgacgagtgtgcccaggccctcgaggcgagctgctggatccccctgctgaaggccagaaagtgcatcctggcgggcgatcacaagcag

SEQ ID NO: 300215 - DNA, 120 bp, Artificial Sequence
  ENSG00000132740_11 (sequence is synthesized)
ctgccccccaccacagtctctcacaaggctgcgctggcaggactgtcactcagcctgatggaacgcctggctgaggagtacggcgcgagggtggtgcggacactgacggtgcagtaccgc

SEQ ID NO: 300216 - DNA, 120 bp, Artificial Sequence
  ENSG00000132740_12 (sequence is synthesized)
atgcaccaggctatcatgcgctgggcctcagacaccatgtaccttgggcagctcacagcccactcttccgtggcaaggcacctcctgagggacctcccaggtgtggctgccacagaagag

SEQ ID NO: 300217 - DNA, 120 bp, Artificial Sequence
  ENSG00000132740_13 (sequence is synthesized)
acgggtgtgcccctgctcttggtggacaccgccggctgcgggctgtttgagctggaggaggaggacgaacagtcgaaagggaaccctggcgaagtccgcctcgtcagtttgcacatccag

SEQ ID NO: 300218 - DNA, 120 bp, Artificial Sequence
  ENSG00000132740_14 (sequence is synthesized)
gctctggtggacgctggtgttccagcccgtgacattgctgtggtctcgccatacaacctccaggtggacctgctcagacagagccttgtgcacaggcaccctgagcttgaaatcaagtct

SEQ ID NO: 300219 - DNA, 120 bp, Artificial Sequence
  ENSG00000132740_15 (sequence is synthesized)
gtcgatggcttccaaggccgagagaaggaggccgtgatactgtccttcgtcagatccaacaggaaaggtgaagttggttttcttgctgaggaccggaggatcaacgtggctgtcacccgt

SEQ ID NO: 300220 - DNA, 120 bp, Artificial Sequence
  ENSG00000132740_16 (sequence is synthesized)
cccgacgccacgtggcggtcatctgtgactcccgtactgtcaacaaccatgcatttttgaagaccctggtggagtatttcacacagcatggggaagtacgcacggcctttgagtatcttg

SEQ ID NO: 300221 - DNA, 120 bp, Artificial Sequence
  ENSG00000132740_17 (sequence is synthesized)
acgatattgtcccagaaaactattcccatgagaactcccagggttccagccacgctgccaccaagccccagggacctgctacgtccaccaggaccggaagccagcggcaggagggaggcc

SEQ ID NO: 300222 - DNA, 120 bp, Artificial Sequence
  ENSG00000132740_18 (sequence is synthesized)
aggaggctgcagcacctgccagacagggccggaagaagccggctgggaagtctctggcctctgaagctccatctcagcccagcctcaacggaggcagcccagagggagtggagagccaag

SEQ ID NO: 300223 - DNA, 120 bp, Artificial Sequence
  ENSG00000132740_19 (sequence is synthesized)
atggcgtggaccacttccgggccatgatagtggagttcatggccagcaagaagatgcagttggagtttcctccttccctcaattcccacgacaggctgcgggtccaccaaatagccgagg

SEQ ID NO: 300224 - DNA, 120 bp, Artificial Sequence
  ENSG00000132740_20 (sequence is synthesized)
agcacgggctgaggcacgacagttccggggaagggaagaggaggttcatcactgtgagcaagagggccccgcgaccccgagcagccctgggacccccagcagggaccggtggcccagccc

SEQ ID NO: 300225 - DNA, 120 bp, Artificial Sequence
  ENSG00000132740_21 (sequence is synthesized)
ctctccagccagtgccccctacccctgcgcagacagagcagcctcccagggagcagcgtggcccagaccagcctgatctgaggacgctgcacctggagagactgcagagggtcaggagcg

SEQ ID NO: 300226 - DNA, 120 bp, Artificial Sequence
  ENSG00000132740_22 (sequence is synthesized)
cgcaggggcagcccgccagcaaggagcagcaggcctcagggcagcagaaacttccagaaaagaaaaagaaaaaagccaaaggacatccggccacagatctgcccacggaggaggactttg

SEQ ID NO: 300227 - DNA, 120 bp, Artificial Sequence
  ENSG00000132740_23 (sequence is synthesized)
aggccctggtttctgccgccgttaaggctgataacacctgcggctttgccaagtgcacagccggcgtcacaaccctgggccagttctgccagctctgcagccgccgctactgcctcagcc

SEQ ID NO: 300228 - DNA, 120 bp, Artificial Sequence
  ENSG00000132740_24 (sequence is synthesized)
accacctgcccgagatccatggctgcggtgagagggctcgcgcccatgcccggcagagaatcagccgggaaggggtcctctatgccggcagcgggaccaagaacggatccctggacccag

SEQ ID NO: 300229 - DNA, 120 bp, Artificial Sequence
  ENSG00000132740_25 (sequence is synthesized)
ccaagagggcccagctgcagaggaggctggataagaagctgagtgagctcagcaaccagaggaccagccggaggaaggagagggggacgtgaccggccgcatccttgcacgccccgcgga

SEQ ID NO: 300230 - DNA, 120 bp, Artificial Sequence
  ENSG00000132740_26 (sequence is synthesized)
gctctctccatggtagcccagggcgctggcagaccatgctccgcctccaccagggccacagaggagcggaggggcctatgggggaggagcggagggccctgttggggaaggttgggtttt

SEQ ID NO: 300231 - DNA, 120 bp, Artificial Sequence
  ENSG00000132740_27 (sequence is synthesized)
tggaccccagggataagcttttccgatgtcacaatgtggaggaaagcacctgggggacaacagtgctcgtgcaggtggggcttgggaaatgcacgtcccttccccttactccccgccaaa

SEQ ID NO: 300232 - DNA, 120 bp, Artificial Sequence
  ENSG00000132740_28 (sequence is synthesized)
acccacatcccagcctctggatcctggggaaggttccagtccctggagaatacccagggcctcaaacttgaagtcactcctccaatgtctgggacttgccagctcagcccgttaggatga

SEQ ID NO: 300233 - DNA, 120 bp, Artificial Sequence
  ENSG00000132740_29 (sequence is synthesized)
gggtgctgagaggaaacaggaaacaagactgcgaatggcgctcaggcagggagcagggagtggcgtttggcttgcacgttcccatgtggccagatgctggggccactttccttctgtctg

SEQ ID NO: 300234 - DNA, 120 bp, Artificial Sequence
  ENSG00000132740_30 (sequence is synthesized)
ctggtgactgcagtgttccccctcctcctcaccacggggctcctgtgagtctggggggcacctctttctggcctgtgcacctctctctggcttataaaggtgcctggcctgtgccagccc

SEQ ID NO: 300235 - DNA, 120 bp, Artificial Sequence
  ENSG00000132740_31 (sequence is synthesized)
ctccttgttgcgcctcaccgtggggaccaggtgagccggctctcccacgtggttgtcccgggaaagctgccccacagcctcagcatcttcagcacttaccgatccagagcctcccggcct

SEQ ID NO: 300236 - DNA, 120 bp, Artificial Sequence
  ENSG00000132740_32 (sequence is synthesized)
tctccggtgtcctgtaccaactcttctatttaagagaacctcagatgatgtacctgagcctcagggttttgtttcagagggatataaattatttaaaaattaaatgaaaacgttgcacac

SEQ ID NO: 300237 - DNA, 71 bp, Artificial Sequence
  ENSG00000132740_33 (sequence is synthesized)
tctctcctgttgaatccttctagtgaatttcagttattgtacttttcaactccagaatttctgatcgccag

SEQ ID NO: 300238 - DNA, 120 bp, Artificial Sequence
  ENSG00000132740_34 (sequence is synthesized)
ctcatcacaggggcgtgggcagcccaggagttggcggggctgcgctggcaggactgtcactcagcctgatggaacgcctggctgaggagtacggcgcgagggtggtgcggacactgacgg

SEQ ID NO: 300239 - DNA, 120 bp, Artificial Sequence
  ENSG00000132740_35 (sequence is synthesized)
cttgcattgattcattgaattcctgaagcgaagctacaccagcacatgggtggctttgaaaggggcctcccagagcctggggctccagaggaattcactccccaaacctttgttgagcag

SEQ ID NO: 300240 - DNA, 120 bp, Artificial Sequence
  ENSG00000132740_36 (sequence is synthesized)
ctactgtatgccacgctttgtgctagaggacaggactgatgccacccctgcccccaggcactgacagggtagcagagggaagacacatgagctgctttttaattttttttagaattaata

SEQ ID NO: 300241 - DNA, 120 bp, Artificial Sequence
  ENSG00000132740_37 (sequence is synthesized)
ttttaattttttttagaattaatagagacggggtctcactctgtcactatgttgcccaggctagttttgaactcctggccgcaagcagtcctcctacctcagcctcccaaaatgctggga

SEQ ID NO: 300242 - DNA, 120 bp, Artificial Sequence
  ENSG00000132740_38 (sequence is synthesized)
agccatgaattgattttaaaaccttaaatgaggggccaggtgttgtctttccgtttgcctgagtgacgcgggtcttctccaggacatccggccacagatctgcccacggaggaggacttt

SEQ ID NO: 300243 - DNA, 120 bp, Artificial Sequence
  ENSG00000132740_39 (sequence is synthesized)
agctcccaggaagccacctgagtggaggatcagctggccatgatagacagaaacgtgcccgaaacacgtgttggtggtggatgcccacttggggcgaccttgtgctgctcacccgttctt

SEQ ID NO: 300244 - DNA, 120 bp, Artificial Sequence
  ENSG00000132740_40 (sequence is synthesized)
aatctctcccctcggtgaccttctctgactgaccctcgcatgcccccttataagacccttgggttatcacctgggtcatccagggtcgcctccccatcccaggatccttaacttcatctc

SEQ ID NO: 300245 - DNA, 120 bp, Artificial Sequence
  ENSG00000132740_41 (sequence is synthesized)
agctgcagcgtccctgttgtcctgtaagggaacattcacgggccttggcgattggatgtaggtgcctttggggctgtgattcagccaaacccgccccttggttacttctgggtcagaatc

SEQ ID NO: 300246 - DNA, 120 bp, Artificial Sequence
  ENSG00000132740_42 (sequence is synthesized)
caggggagagttgggtcctgaggtttggggcctgtcctcctcacttgctgtggttcacacctggactctggggctcaggcctgccttccccctttctccctcctgggcgcagggctgcgc

SEQ ID NO: 300247 - DNA, 120 bp, Artificial Sequence
  ENSG00000132740_43 (sequence is synthesized)
atacctccagctctttaaaaataaaaggcactttaattgcctaattccgggaggagctgagagcagttgttgatggccgtgaaaaaacggagccccacactgcaagaggctgagcagcat

SEQ ID NO: 300248 - DNA, 120 bp, Artificial Sequence
  ENSG00000132740_44 (sequence is synthesized)
ccagatgaaccctctgcatggtatcccttgactgcccttacacgaggcctgtgaacagggcctggcacgtgggctgtccttggacaagtccctgttcagaaagttgtccctgaggaatga

SEQ ID NO: 300249 - DNA, 120 bp, Artificial Sequence
  ENSG00000132740_45 (sequence is synthesized)
attgtcctcccctacctaagccttttcctcgtgggaggggtcggttctgttgggtggggcctcagtgctgcactgtggccccctgatgtgctccctctctgcctgtgtgccagggacctc

SEQ ID NO: 300250 - DNA, 120 bp, Artificial Sequence
  ENSG00000132740_46 (sequence is synthesized)
tggattaaaatgaccagttggagaataaagcgttgcaatgaagaactcttaatcagaagtccaacaattgatgtgatatcgtgggcctgtacgatgctgctaatgagggcagtcagctgg

SEQ ID NO: 300251 - DNA, 120 bp, Artificial Sequence
  ENSG00000132740_47 (sequence is synthesized)
acgttaatcacagaggtctggtaagtttccagagggaaggtctctgaagtggagctgggtactgccccagggttttggtggggttggtgagccgtagtggtgcagagggtgggctctggc

SEQ ID NO: 300252 - DNA, 120 bp, Artificial Sequence
  ENSG00000132740_48 (sequence is synthesized)
accaggtggcccgggcaggtcctggctctgcagctcacccgggcagctgtgggctggcagcctcctctgtctcacccttcttacatgtaatatgggagtcataacagtagccacctcatg

SEQ ID NO: 300253 - DNA, 120 bp, Artificial Sequence
  ENSG00000132740_49 (sequence is synthesized)
aggttgttataaggatgaagggagttaatccacatctggcacacccagcagtgcctggcgcctgggcagtgctcagccgctgcagccgttcttggtgggagtggacttgactgctcacag

SEQ ID NO: 300254 - DNA, 120 bp, Artificial Sequence
  ENSG00000132740_50 (sequence is synthesized)
ttggagcatgttggagtgtgttcgttccctgttatggctgtgacaaatgaccacaagcttagtggctgacaacaacagattttctgacctccagaaacgacaatctgggggtcagatgtc

SEQ ID NO: 300255 - DNA, 120 bp, Artificial Sequence
  ENSG00000132740_51 (sequence is synthesized)
caaaatcagactcaccggcttaaaatcaaggtgtgggtggggttgcttcttctggaggatccaggggaaaacccatctcctggtcttttccggctcctagaggccactgcttgacttgtt

SEQ ID NO: 300256 - DNA, 120 bp, Artificial Sequence
  ENSG00000132744_0 (sequence is synthesized)
actttcttccctgaaggagcagcacagaacaaaagctccaggcagctgcttccgctgtttcgggggtagggcggagtgacagccccacgggccacgcagcaagcagaagatccccgggag

SEQ ID NO: 300257 - DNA, 120 bp, Artificial Sequence
  ENSG00000132744_1 (sequence is synthesized)
tcaccctcaaccctctggggccacgtgggcccatgaataccagcctgtctgcgagttagacgccagtcctggtggcccgggaagcccagatccgcatcagcggttctgcaccccacacca

SEQ ID NO: 300258 - DNA, 120 bp, Artificial Sequence
  ENSG00000132744_2 (sequence is synthesized)
gcatgtgctcactgcctgtgccccgggagcccctgcgtcgcgtggctgtgactgggggcacgcatggcaacgagatgtcgggcgtctacctggcccggcactggctgcatgcccccgcag

SEQ ID NO: 300259 - DNA, 120 bp, Artificial Sequence
  ENSG00000132744_3 (sequence is synthesized)
agctgcagagagccagcttctccgctgtgcctgtgctggccaacccggcagccacatccggctgccgccgctacgtggaccatgacctcaaccgcaccttcaccagcagcttcctcaatt

SEQ ID NO: 300260 - DNA, 120 bp, Artificial Sequence
  ENSG00000132744_4 (sequence is synthesized)
ccaggcccaccccggacgacccatatgaggtgacaagagcccgagagctgaaccagctgctggggcccaaggcctcgggccaggcctttgactttgtccttgacctgcacaacaccacgg

SEQ ID NO: 300261 - DNA, 120 bp, Artificial Sequence
  ENSG00000132744_5 (sequence is synthesized)
tgcacctgtgccgccatctgcagctgcagtaccccgagctgtcctgccaggtcttcctgtaccagcggtctggggaggagagctacaacctggactctgtggccaaaaatggactgggtc

SEQ ID NO: 300262 - DNA, 120 bp, Artificial Sequence
  ENSG00000132744_6 (sequence is synthesized)
tggagctgggcccccagccacagggtgtgctgcgggctgacattttctcaaggatgaggaccctggtggccacagttctggacttcatcgaactcttcaaccagggtacggcctttcctg

SEQ ID NO: 300263 - DNA, 120 bp, Artificial Sequence
  ENSG00000132744_7 (sequence is synthesized)
cctttgagatggaagcctatagacccgtgggcgtcgtggacttcccccgcaccgaggccgggcacctggcaggcactgtgcatcctcagctgcaggaccgagacttccagccactgcagc

SEQ ID NO: 300264 - DNA, 120 bp, Artificial Sequence
  ENSG00000132744_8 (sequence is synthesized)
ctggtgctcccatcttccagatgttcagtggggaggacctgctctatgagggagagtccacggtgtaccccgtgttcattaacgaggctgcctactatgagaagggcgttgcctttgtcc

SEQ ID NO: 300265 - DNA, 120 bp, Artificial Sequence
  ENSG00000132744_9 (sequence is synthesized)
agactgagaagttcacattcaccgtgcctgccatgcccgcgctgacccctgccccgagcccagcttcctaacccaagacacacctccccaacctcagtcttcccatctgaacgatgggtc

SEQ ID NO: 300266 - DNA, 120 bp, Artificial Sequence
  ENSG00000132744_10 (sequence is synthesized)
ctgaggcacagctctgagcacagaggtcccttctgccacctaccatgcaccatgttccttgccaggcctccccaacccctggcctcaatttccctttctataaaatggaagatgtccaga

SEQ ID NO: 300267 - DNA, 120 bp, Artificial Sequence
  ENSG00000132746_0 (sequence is synthesized)
accccattgattaccccattgccaggcgtgggcacgggagttggtttgggagctgccagtctcctgggaggatcgcagtcagcagagcagggctgaggcctgggggtaggagcagagcct

SEQ ID NO: 300268 - DNA, 120 bp, Artificial Sequence
  ENSG00000132746_1 (sequence is synthesized)
gcgcatctggaggcagcatgtccaagaaagggagtggaggtgcagcgaaggacccaggggcagagcccacgctgggatggaccccttcgaggacacgctgcggcggctgcgtgaggcctt

SEQ ID NO: 300269 - DNA, 120 bp, Artificial Sequence
  ENSG00000132746_2 (sequence is synthesized)
caactgagggcgcacgcggccggccgagttccgggctgcgcagctccagggcctgggccacttccttcaagaaaacaagcagcttctgcgcgacgtgctggcccaggacctgcataagcc

SEQ ID NO: 300270 - DNA, 120 bp, Artificial Sequence
  ENSG00000132746_3 (sequence is synthesized)
agctttcgaggcagacatatctgagctcatcctttgccagaacgaggttgactacgctctcaagaacctgcaggcctggatgaaggatgaaccacggtccacgaacctgttcatgaagct

SEQ ID NO: 300271 - DNA, 120 bp, Artificial Sequence
  ENSG00000132746_4 (sequence is synthesized)
ggactcggtcttcatctggaaggaaccctttggcctggtcctcatcatcgcaccctggaactacccactgaacctgaccctggtgctcctggtgggcgccctcgccgcagggagttgcgt

SEQ ID NO: 300272 - DNA, 120 bp, Artificial Sequence
  ENSG00000132746_5 (sequence is synthesized)
ggtgctgaagccgtcagaaatcagccagggcacagagaaggtcctggctgaggtgctgccccagtacctggaccagagctgctttgccgtggtgctgggcggaccccaggagacagggca

SEQ ID NO: 300273 - DNA, 120 bp, Artificial Sequence
  ENSG00000132746_6 (sequence is synthesized)
gctgctagagcacaagttggactacatcttcttcacagggagccctcgtgtgggcaagattgtcatgactgctgccaccaagcacctgacgcctgtcaccctggagctggggggcaagaa

SEQ ID NO: 300274 - DNA, 120 bp, Artificial Sequence
  ENSG00000132746_7 (sequence is synthesized)
cccctgctacgtggacgacaactgcgacccccagaccgtggccaaccgcgtggcctggttctgctacttcaatgccggccagacctgcgtggcccctgactacgtcctgtgcagccccga

SEQ ID NO: 300275 - DNA, 120 bp, Artificial Sequence
  ENSG00000132746_8 (sequence is synthesized)
gatgcaggagaggctgctgcccgccctgcagagcaccatcacccgtttctatggcgacgacccccagagctccccaaacctgggccacatcatcaaccagaaacagttccagcggctgcg

SEQ ID NO: 300276 - DNA, 120 bp, Artificial Sequence
  ENSG00000132746_9 (sequence is synthesized)
ggcattgctgggctgcagccgcgtggccattgggggccagagcaacgagagcgatcgctacatcgcccccacggtgctggtggacgtgcaggagacggagcctgtgatgcaggaggagat

SEQ ID NO: 300277 - DNA, 120 bp, Artificial Sequence
  ENSG00000132746_10 (sequence is synthesized)
cttcgggcccatcctgcccatcgtgaacgtgcagagcgtggacgaggccatcaagttcatcaaccggcaggagaagcccctggccctgtacgccttctccaacagcagccaggttgtgaa

SEQ ID NO: 300278 - DNA, 120 bp, Artificial Sequence
  ENSG00000132746_11 (sequence is synthesized)
ggagcggaccagcagcggcagctttggaggcaatgagggcttcacctacatatctctgctgtccgtgccattcgggggagtcggccacagtgggatgggccggtaccacggcaagttcac

SEQ ID NO: 300279 - DNA, 120 bp, Artificial Sequence
  ENSG00000132746_12 (sequence is synthesized)
cttcgacaccttctcccaccaccgcacctgcctgctcgccccctccggcctggagaaattaaaggagatccactacccaccctataccgactggaaccagcagctgttacgctggggcat

SEQ ID NO: 300280 - DNA, 120 bp, Artificial Sequence
  ENSG00000132746_13 (sequence is synthesized)
gggctcccagagctgcaccctcctgtgagcgtcccacccgcctccaacgggtcacacagagaaacctgagtctagccatgaggggcttatgctcccaactcacattgttcctccagaccg

SEQ ID NO: 300281 - DNA, 120 bp, Artificial Sequence
  ENSG00000132746_14 (sequence is synthesized)
caggttcccccagcctcaggttgctggagctgtcacatgactgcatcctgcctgccagggctgcaaagcaaggtcttgcttctatctgggggacgctgctcgagagaggccaagaggccg

SEQ ID NO: 300282 - DNA, 120 bp, Artificial Sequence
  ENSG00000132746_15 (sequence is synthesized)
cagaacatgccaggtgtcctcactcaccccaccctccccaattccagccctttgccctctcggtcagggttggccagacccagtcacaggggcagtgtcaccctggaaaatacagtgccc

SEQ ID NO: 300283 - DNA, 120 bp, Artificial Sequence
  ENSG00000132746_16 (sequence is synthesized)
tgccttcttaggggcatcagccctgaacggttgagagcgtggagccctccaggcctttgctctcccctctaggcacacgcgcacttccatctctgccccatcccaactgcaccagcactg

SEQ ID NO: 300284 - DNA, 120 bp, Artificial Sequence
  ENSG00000132746_17 (sequence is synthesized)
cctcccccagggatcctctcacatcccacactggtctctgcaccacccctctggttcacaccgcaccctgcactcacccacagcagctccatccactgggaaaactggggtttgcatcac

SEQ ID NO: 300285 - DNA, 120 bp, Artificial Sequence
  ENSG00000132746_18 (sequence is synthesized)
tccactgcacagtgttagtgggacctgggggcaagtcccttgacttctctgagcctcagtttccttatgtgaaagttgctggaaccaaaatggagtcacttatgccaaactctaataaaa

SEQ ID NO: 300286 - DNA, 120 bp, Artificial Sequence
  ENSG00000132746_19 (sequence is synthesized)
tggagtcggggggccacatagaagccctcacacacacatgcccgtaacaggatttatcacaagacacgcctgcatgtagaccagacacagggcgtatggaaagcacgtcctcaagactgt

SEQ ID NO: 300287 - DNA, 120 bp, Artificial Sequence
  ENSG00000132746_20 (sequence is synthesized)
agtattccagatgagctgcagatgcttacctaccacggccgtctccaccagaaaaccatcgccaactcctgcgatcagcttgtgacttacaaaccttgtttaaaagctgcttacatggac

SEQ ID NO: 300288 - DNA, 120 bp, Artificial Sequence
  ENSG00000132746_21 (sequence is synthesized)
ttctgtcctttaaaagcttccccttggctgtggccctctgtgtatgcctgggatccttccaagcactcatagcccagataggaatcctctgctcctcccaaataaattcatctgttctgg

SEQ ID NO: 300289 - DNA, 120 bp, Artificial Sequence
  ENSG00000132746_22 (sequence is synthesized)
tgaggagggcaaatcaagtcgtctctgggagcctcggtttccctgtccttccaactggatgctgctggctccgtgattatttcaccgagcaccagatgtgcacatgtgaggacaggcgac

SEQ ID NO: 300290 - DNA, 120 bp, Artificial Sequence
  ENSG00000132746_23 (sequence is synthesized)
gactgcccagaaagggcaggggttcctctgccccacctgcctcacctgggaaagctgtgaccacgctgaggccaggttcctgggatgaacatcaggacacctgtgtgccatagctcatcc

SEQ ID NO: 300291 - DNA, 120 bp, Artificial Sequence
  ENSG00000132746_24 (sequence is synthesized)
cagactggcacctttcctttcacagcccttcccagcaaggctttagagcagcagatgcctcaagggtgactatatctaggccacctggtaccactgcatccggcgcaaggatgcctggca

SEQ ID NO: 300292 - DNA, 80 bp, Artificial Sequence
  ENSG00000132749_0 (sequence is synthesized)
acccttcccccttctccaaccgccaacggccgcctgcgcctgaggcccggcccacgccccatcccgctcgctccacgctg

SEQ ID NO: 300293 - DNA, 120 bp, Artificial Sequence
  ENSG00000132749_1 (sequence is synthesized)
ccgccccgccgccctgcgccatggaggagggccctctgccgggcgggctgcccagccccgaggatgcgatggtgacggagctcttaagccccgagggtccgttcgcttcggagaacatcg

SEQ ID NO: 300294 - DNA, 120 bp, Artificial Sequence
  ENSG00000132749_2 (sequence is synthesized)
gcctgaaggcccccgtgaagtacgaggaggacgagttccacgtcttcaaagaagcgtacctgggcccggcggaccccaaggaacccgtcctgcacgcgttcaaccccgcgctgggcgccg

SEQ ID NO: 300295 - DNA, 120 bp, Artificial Sequence
  ENSG00000132749_3 (sequence is synthesized)
actgcaagggccaggtcaaggcgaagctcgcggggggcgacagcgacggcggggagctcctcggggagtaccccgggatcccagagctcagcgcgctggaggacgtcgcgctcctgcagg

SEQ ID NO: 300296 - DNA, 120 bp, Artificial Sequence
  ENSG00000132749_4 (sequence is synthesized)
ccccgcagccgcccgcctgcaacgtgcacttcctgtcctcgctgctacccgcgcaccgcagcccggcggtgttgcccctgggcgcctgggtcctggaaggagcctcccacccgggcgtcc

SEQ ID NO: 300297 - DNA, 120 bp, Artificial Sequence
  ENSG00000132749_5 (sequence is synthesized)
gcatgatcccagttgaaatcaaggaagcaggtggtactactacaagtaataatccggaagaagcaactttgcagaatcttcttgctcaggaatcctgttgcaagttcccatcgtcccagg

SEQ ID NO: 300298 - DNA, 120 bp, Artificial Sequence
  ENSG00000132749_6 (sequence is synthesized)
aactagaggatgcctcctgctgttctcttaagaaagattccaacccaatggtgatatgccaattgaaagggggcacacaaatgctatgtatagacaattctagaacaagagaactaaaag

SEQ ID NO: 300299 - DNA, 120 bp, Artificial Sequence
  ENSG00000132749_7 (sequence is synthesized)
cactccatttggttcctcagtatcaagatcaaaataattatctacagtcagatgtccctaaaccaatgactgctttagtagggagatttttgccagcatcaacaaaattaaatctcatta

SEQ ID NO: 300300 - DNA, 120 bp, Artificial Sequence
  ENSG00000132749_8 (sequence is synthesized)
cacaacaacttgagggagccttaccatcggtagtcaacgggtctgctttcccctcgggatcaactcttccaggaccaccaaaaataactttggctgggtactgtgactgctttgccagtg

SEQ ID NO: 300301 - DNA, 120 bp, Artificial Sequence
  ENSG00000132749_9 (sequence is synthesized)
gggacttttgcaacaactgcaattgtaataattgttgcaacaacttgcatcatgatattgaacggtttaaagccattaaggcatgtcttggtagaaatccagaagctttccagccaaaaa

SEQ ID NO: 300302 - DNA, 120 bp, Artificial Sequence
  ENSG00000132749_10 (sequence is synthesized)
tgggcaatgtcaagccccagcacaacaaagggtgcaactgcaggaggtcaggctgcctgaagaattactgcgagtgctatgaggcccaaattatgtgttcttctatttgcaaatgcattg

SEQ ID NO: 300303 - DNA, 120 bp, Artificial Sequence
  ENSG00000132749_11 (sequence is synthesized)
gttgcaaaaattatgaagaaagcccagaacgaaagacactaatgagcatgccaaactacatgcagactggaggtttggaaggcagccattacctgccaccaacgaaattttcaggacttc

SEQ ID NO: 300304 - DNA, 120 bp, Artificial Sequence
  ENSG00000132749_12 (sequence is synthesized)
caagattcagtcacgataggcggccttcctcatgcatctcctgggaggtggtggaggccacatgcgcctgcctgcttgctcagggagaagaggccgagaaagaacactgctccaagtgcc

SEQ ID NO: 300305 - DNA, 120 bp, Artificial Sequence
  ENSG00000132749_13 (sequence is synthesized)
tggcagagcagatgatcctggaggaatttggaaggtgcttatcacagattctccacactgagtttaaatctaagggattgaaaatggagtagagtataaagtgtgaatgcatgttgattt

SEQ ID NO: 300306 - DNA, 120 bp, Artificial Sequence
  ENSG00000132749_14 (sequence is synthesized)
tgtcttagtctagaaatctctagtttagaaaggatgtttaggggaacatgaggctggctctgcagcaacaaccaggctcccctgcatccctgggcccagggagtttactcagagctctct

SEQ ID NO: 300307 - DNA, 120 bp, Artificial Sequence
  ENSG00000132749_15 (sequence is synthesized)
gaagatgtggcaacccatgcccccttttctgaggaggtgcatggcctgagcattgtttgtctggcccagaggagagagcttgggttcccatagtcctgggagagtgtctgcagggcggcg

SEQ ID NO: 300308 - DNA, 120 bp, Artificial Sequence
  ENSG00000132749_16 (sequence is synthesized)
gagggcagagcagggcaggggagggcacagcaggccctgcgaagggcagagcggggcaggggagggcagagcaggccctgcggagagctcactctggtcgactcttcctctcagagaatg

SEQ ID NO: 300309 - DNA, 120 bp, Artificial Sequence
  ENSG00000132749_17 (sequence is synthesized)
ttgctctggaggctgctctgcatgaaaaccctaatggtttcttgtttgtttttcaaattatttagaaataagttctccggatgggctgttgtgataccacttaaaatctctagagaacta

SEQ ID NO: 300310 - DNA, 120 bp, Artificial Sequence
  ENSG00000132749_18 (sequence is synthesized)
ctgaacacctaaagattttctgtagcgtagatatttccccagaggcacgcgaactgtcagtctttcctaaggcccccgggagacgcaggcaatggggcctcgcaggccaggcttgcacca

SEQ ID NO: 300311 - DNA, 120 bp, Artificial Sequence
  ENSG00000132749_19 (sequence is synthesized)
gcatgtcttgagttagaggacttaaaattatccagtttcttctgtgtttctacttgaattgtggaaaagctctattatccaattaacttctccataattattgttgtaatattattattg

SEQ ID NO: 300312 - DNA, 120 bp, Artificial Sequence
  ENSG00000132749_20 (sequence is synthesized)
tttgtaaaacatggttcacataactagcttgtggaaaccagcaggtaaaatgaattcttaagttgacgcttttggttctgttgtaaagcaaagatgaataaaaatttccaatgtcttcaa

SEQ ID NO: 300313 - DNA, 120 bp, Artificial Sequence
  ENSG00000132749_21 (sequence is synthesized)
gggtaaggattagaagcaatacattgtcactctaatgtaataatttaagagactcttggatacgttcacgattttcttctatactataaaatgagcttcactgcacaccttcatgacttc

SEQ ID NO: 300314 - DNA, 120 bp, Artificial Sequence
  ENSG00000132749_22 (sequence is synthesized)
tgagaaatgtttttaccatcagcaatgccactaacggtgttgctgtctgtgtctggtttcactggggctgcaaaggctgctggaaagtctggcccataacctgcatctgtccctgtcctc

SEQ ID NO: 300315 - DNA, 120 bp, Artificial Sequence
  ENSG00000132749_23 (sequence is synthesized)
gttgccatttatagctctttgtcttcattccatgttgattcaaactgtactggcctctcttttttgctgtcgtccgtggaaataatggtgtggcagccatgcagcatgaacggggggctg

SEQ ID NO: 300316 - DNA, 120 bp, Artificial Sequence
  ENSG00000132749_24 (sequence is synthesized)
cagagtgccctccagctgcctccgcccgctgccttccatgctgagttggctcgagctctatggcaggtgctaatgcatgatctgtcttcacatctccaggtggacataggctgcacttat

SEQ ID NO: 300317 - DNA, 120 bp, Artificial Sequence
  ENSG00000132749_25 (sequence is synthesized)
ctgggacctcatcttgctatttcttgcctgtcttgtgtttataatcttgctatttcttgcctgtcttgtgtttataattgttgctaattaaactaatcagctggttgaaattatcaggtt

SEQ ID NO: 300318 - DNA, 120 bp, Artificial Sequence
  ENSG00000132749_26 (sequence is synthesized)
aacatttatgtattaacagtggtttgggcaaccctctccattcgttgagccctgtagttgattatggagatcagcatattcctgcctccaagaggtgtttgtttgtttgtttgttttttc

SEQ ID NO: 300319 - DNA, 71 bp, Artificial Sequence
  ENSG00000132749_27 (sequence is synthesized)
ccgagtagctgggaccacaggcgcataccactataccaggctaatttttgtaatactgacctcagatgatc

SEQ ID NO: 300320 - DNA, 120 bp, Artificial Sequence
  ENSG00000132749_28 (sequence is synthesized)
ccaaagtgctgggattacaggcgtgcccggcctgcctgcaggagttctttgggcccacagtctaaggcaaacacataccctgggcctgagagacagcagtcaaacaccttacaggataca

SEQ ID NO: 300321 - DNA, 120 bp, Artificial Sequence
  ENSG00000132749_29 (sequence is synthesized)
caaacaccttacaggatacagcccgcagcctccagtgctttccaggctcctgcagagttctgccatcgggcatggcttcgtgatggccttggtaagtgtgaggagagtggtttggggctg

SEQ ID NO: 300322 - DNA, 120 bp, Artificial Sequence
  ENSG00000132749_30 (sequence is synthesized)
gaatgaaaggccgtgaatctggaaacacactggaaccgatcaacgctatcagccctcatggtcgctgaagggcgttggttgctcctgggcaccgctgcttcagtttctgcagtggctctt

SEQ ID NO: 300323 - DNA, 120 bp, Artificial Sequence
  ENSG00000132749_31 (sequence is synthesized)
tcagctgttgtaattctgtgcctaggctgttgacaacttttgctgagttggacagaataagactgtgggccatgctgcttgcttcactctctgggtgtgatggatcggtgagggtgcagt

SEQ ID NO: 300324 - DNA, 120 bp, Artificial Sequence
  ENSG00000132749_32 (sequence is synthesized)
tgctatgattgtaattggtcatctcatcatggctgttaacatttctggaccaaacaaaaatgacttcagctacttccagattctgctgatacattacacaggatgatctaaaaggctaca

SEQ ID NO: 300325 - DNA, 120 bp, Artificial Sequence
  ENSG00000132749_33 (sequence is synthesized)
gttctgaagatactcatctttcttgtaatctgggggcatctggtcaatagtattgcctctgtgctgtattgtgtctagaacattcaaggacatttgatacttctcatactttaattgcgt

SEQ ID NO: 300326 - DNA, 120 bp, Artificial Sequence
  ENSG00000132749_34 (sequence is synthesized)
gctctcccagttgcagcaccctctgaggcttctatgtgttgcagccgatgggcatttgcacagagcagcagtcatgacagcgttttcagggcagctatttctccttttcccccttttcct

SEQ ID NO: 300327 - DNA, 120 bp, Artificial Sequence
  ENSG00000132749_35 (sequence is synthesized)
ctcccccggcttcccattctcctcctcctccttcctcttctcgtcccctcctcctcctctttgttctcctccccctgctcttcttcctctctccttttcctccttctgtgtctatactag

SEQ ID NO: 300328 - DNA, 120 bp, Artificial Sequence
  ENSG00000132749_36 (sequence is synthesized)
attattttcaatcagtcacatgtttttctttattttgaatgttacaaaatatttctctattgtaaacggtgtgccaggaaaaacatgagatgtgtatttgtattttttatgcacataatt

SEQ ID NO: 300329 - DNA, 120 bp, Artificial Sequence
  ENSG00000132749_37 (sequence is synthesized)
acttaatccaatgcctctccacttaattgggcctgatgatttttatctcgacatctgcaatactgatgatatactggaatctctaccaatttatttttggtggtaagaaagcagtcagag

SEQ ID NO: 300330 - DNA, 120 bp, Artificial Sequence
  ENSG00000132749_38 (sequence is synthesized)
aacgttttgctggttatttcattccgtgtgagttcccaaccaagactgtcagcccagtgtggttcagccatatctaacctatagaggccatagaagcagttcagcttaggctggaggcca

SEQ ID NO: 300331 - DNA, 120 bp, Artificial Sequence
  ENSG00000132749_39 (sequence is synthesized)
gcaggctgagtgtgcgagctgacccgatggtcatttgttagggttggggggtgaactggctaacttattaactagcttatcatattaataaaaactctttaatacaaatccttgtcctga

SEQ ID NO: 300332 - DNA, 120 bp, Artificial Sequence
  ENSG00000132749_40 (sequence is synthesized)
cactctgtagctttaataatcctattaccaatctggtaataaatgtgaattctgacacattgttgatgctactggttttagtaacataatgaacatcataataaagaatattcaagagtc

SEQ ID NO: 300333 - DNA, 120 bp, Artificial Sequence
  ENSG00000132749_41 (sequence is synthesized)
aggtacaaagttaattaataaaaaaaactatgtcatatatgtaagttggtaaatgaatatgtttggctttgtatataaagtgaaatggcaaccaggatattaaataggaaatttggcaaa

SEQ ID NO: 300334 - DNA, 120 bp, Artificial Sequence
  ENSG00000132749_42 (sequence is synthesized)
ctttgaacagcttgagggagccttaccatcggtagtcaacgggtctgctttcccctcgggatcaactcttccaggaccaccaaaaataactttggctgggctggaatacaatggcatgat

SEQ ID NO: 300335 - DNA, 120 bp, Artificial Sequence
  ENSG00000132749_43 (sequence is synthesized)
gggagccttaccatcggtagtcaacgggtctgctttcccctcgggatcaactcttccaggaccaccaaaaataactttggctggagtaactcttagttcatgggacacaaagtctaaaaa

SEQ ID NO: 300336 - DNA, 120 bp, Artificial Sequence
  ENSG00000132749_44 (sequence is synthesized)
tgtaactgtaccaaatcccagtgtctgaaattagctcctgctgaagtcactgagagccccagtgatgggacagtgatgtgggggtgcaccagtgggtagaaatccagaagtccgtgaaac

SEQ ID NO: 300337 - DNA, 120 bp, Artificial Sequence
  ENSG00000132749_45 (sequence is synthesized)
ttagttcacacaaccaaagtggaaaaacaaattgatttttaaaaagtaattgcagacagtctagggttgactgtctgaaaatgtttgagctctcattggtttagtctacgaggccatata

SEQ ID NO: 300338 - DNA, 120 bp, Artificial Sequence
  ENSG00000132749_46 (sequence is synthesized)
cttctctgaacattggaaacgccatgacatgactgatggggaagctaaagacgcagctctgggtaaggaggaggaaggacagtgggagaaagcctggaccctgtgacgctgtcaagccag

SEQ ID NO: 300339 - DNA, 120 bp, Artificial Sequence
  ENSG00000132763_0 (sequence is synthesized)
attccccagcaagctcagcgtgtaacgtgcgctatggagccgaaagtcgcagagctgaagcagaagatcgaggacacgctatgtccttttggcttcgaggtttaccccttccaggtggca

SEQ ID NO: 300340 - DNA, 120 bp, Artificial Sequence
  ENSG00000132763_1 (sequence is synthesized)
tggtacaatgaactcttgcctccagccttccacctaccgctgccaggacctaccctggccttcctggtactcagcacgcctgccatgtttgaccgggccctcaagcccttcttgcagagc

SEQ ID NO: 300341 - DNA, 120 bp, Artificial Sequence
  ENSG00000132763_2 (sequence is synthesized)
tgccacctccgaatgctgactgacccagtggaccagtgtgtggcctaccatctgggccgtgttagagagagcctcccagagctgcagatagaaatcattgctgactacgaggtgcacccc

SEQ ID NO: 300342 - DNA, 120 bp, Artificial Sequence
  ENSG00000132763_3 (sequence is synthesized)
aaccgacgccccaagatcctggcccagacagcagcccatgtagctggggctgcttactactaccaacgacaagatgtggaggctgacccatgggggaaccagcgcatatcaggtgtgtgc

SEQ ID NO: 300343 - DNA, 120 bp, Artificial Sequence
  ENSG00000132763_4 (sequence is synthesized)
atacacccccgatttgggggctggtttgccatccgaggggtagtgctgctgccagggatagaggtgccagatctgccacccagaaaacctcatgactgtgtacctacaagagctgaccgt

SEQ ID NO: 300344 - DNA, 120 bp, Artificial Sequence
  ENSG00000132763_5 (sequence is synthesized)
atcgccctactcgaaggcttcaatttccactggcgtgattggacttaccgggatgctgtgacaccccaggagcgctactcagaagagcagaaggcctacttctccactccacctgcccaa

SEQ ID NO: 300345 - DNA, 120 bp, Artificial Sequence
  ENSG00000132763_6 (sequence is synthesized)
cgattggccctattgggcttggctcagccctcagagaagcctagttctccctccccggaccttccctttaccacacccgcccccaagaagcctgggaatcccagcagagcccggagctgg

SEQ ID NO: 300346 - DNA, 120 bp, Artificial Sequence
  ENSG00000132763_7 (sequence is synthesized)
ctcagccccagggtctcaccacctgcatcccctggcccttgattttctcccatgtggaccctgatttatggtggtacttgctaggacttaattggctttggcaaagcaaaaggttttgag

SEQ ID NO: 300347 - DNA, 120 bp, Artificial Sequence
  ENSG00000132763_8 (sequence is synthesized)
tacaagattactatttttgataatatagtagagatcttccatgaagataacaaggctcaaggaagttaggtttggccaagataaaggccagggaaccagaattcccatctgccttcaaat

SEQ ID NO: 300348 - DNA, 120 bp, Artificial Sequence
  ENSG00000132763_9 (sequence is synthesized)
ttggcctcccaaagtcctgggattacaggaatgagccaccgcacccagccaagactctatctgttcccatttctaagcagttccccaagatgttgttacagggcctaaggggcaaatatc

SEQ ID NO: 300349 - DNA, 70 bp, Artificial Sequence
  ENSG00000132763_10 (sequence is synthesized)
ctaagcagttccccaagatgttgttacagggcctaaggggcaaatatcctctaaagagtacctaccagca

SEQ ID NO: 300350 - DNA, 72 bp, Artificial Sequence
  ENSG00000132763_11 (sequence is synthesized)
tgaaaccccgtctctactaaaaatgcaaagttagccgggcatggtagtttgaaccagggaggcagagattgc

SEQ ID NO: 300351 - DNA, 79 bp, Artificial Sequence
  ENSG00000132763_12 (sequence is synthesized)
acctacctcaggtagggactgaataaacacgtgtaaggcactttggaaaaatacctggcatatatagtaagcagtatgt

SEQ ID NO: 300352 - DNA, 120 bp, Artificial Sequence
  ENSG00000132763_13 (sequence is synthesized)
actttggaaaaatacctggcatatatagtaagcagtatgttggccattaccaaaggccctgggaattctgtactgctgctcatgggtgtagtcggttctagaggggtgggcaggtgggag

SEQ ID NO: 300353 - DNA, 120 bp, Artificial Sequence
  ENSG00000132763_14 (sequence is synthesized)
tagctgaggaagacaagtggctggaatggtatcacatgatacacagaagtatcctcagttctgaatctaccttggcctcaagggcccaggagaataacttttcccagctgacagcctctc

SEQ ID NO: 300354 - DNA, 120 bp, Artificial Sequence
  ENSG00000132763_15 (sequence is synthesized)
tgaggacaatgacatatgaatgaggatcaaaacgagctttggccaggcactgtggcgctcacctgtaatcccaccattttgggaggctgaggcggaggaccgcctgaggcaaggaattca

SEQ ID NO: 300355 - DNA, 120 bp, Artificial Sequence
  ENSG00000132763_16 (sequence is synthesized)
gaaccactctgggcaacataatgacactaaaaaagactatctctaatcaaggctagaaccaagggaaggctaagaattgcccagtactgtgcaactacgaaagccctacccaaggccacc

SEQ ID NO: 300356 - DNA, 120 bp, Artificial Sequence
  ENSG00000132763_17 (sequence is synthesized)
agccttgtcttcctctttcctctgtcagttcaaaaagaacagaaacctccagctcttttacatagcaggtaccaggcatttatcagaagaggccaagcttctggttcccatgcagccctt

SEQ ID NO: 300357 - DNA, 120 bp, Artificial Sequence
  ENSG00000132763_18 (sequence is synthesized)
tgaatagtgtgtctaaacaaaaataggtgtccaagtagtcacactgagactttaactggtaacccagcctgtggcgtcagtcgcagtgctctggccaacactatagcagggcttattctt

SEQ ID NO: 300358 - DNA, 120 bp, Artificial Sequence
  ENSG00000132763_19 (sequence is synthesized)
gtgtagtgaaacaaaatgtaacaccttgggttcattcagttccattccctatatctacctgtgtcaatataattccctgatttggaggcagctctcctcattttccccaaaacagggaaa

SEQ ID NO: 300359 - DNA, 120 bp, Artificial Sequence
  ENSG00000132763_20 (sequence is synthesized)
gcaaggagtaaattcctcttaaaatcaaaagctaataatatgcttcctaaaataaagactcatcaaggtctcagttcaagtttaatacaaactacaaaagattaatgggttgctctacta

SEQ ID NO: 300360 - DNA, 120 bp, Artificial Sequence
  ENSG00000132763_21 (sequence is synthesized)
atacatcatacaaaccagtagcctgcccacaacgccaactcaggccattcctaccaaaggaagaaaggctggtctctccaccccctgtaggaaaggcctgccttgtaagacaccacaatt

SEQ ID NO: 300361 - DNA, 120 bp, Artificial Sequence
  ENSG00000132763_22 (sequence is synthesized)
cggctgaatctgaagtcttgtgttttactaatggaaaaaaaaaatacagaagaggttttgttctcatggctgcccaccgcagcctggcactaaaacagcccagcgctcacttctgcttgg

SEQ ID NO: 300362 - DNA, 120 bp, Artificial Sequence
  ENSG00000132763_23 (sequence is synthesized)
agaaatattctttgctcttttggacatcaggcttgatggtatcactgccaggtttccagccagctgggcacactgcaagagaaaggcaccactaattaataaccttctcaatggtatgca

SEQ ID NO: 300363 - DNA, 120 bp, Artificial Sequence
  ENSG00000132763_24 (sequence is synthesized)
ccaccattctcctatggacaaaaccagttctgcacctgaacactcagataccaggaaacctacccctgcaatcagtcttagatcattcacccttttagtatgagctaaccattttacaaa

SEQ ID NO: 300364 - DNA, 120 bp, Artificial Sequence
  ENSG00000132763_25 (sequence is synthesized)
catataatcatcaccacagccttaagatactatcatgcctaatttattcatgtagcacttgaaatttaaattttccacaaaaaaaggcaaagtttaaataatttgccaacactctctaat

SEQ ID NO: 300365 - DNA, 120 bp, Artificial Sequence
  ENSG00000132763_26 (sequence is synthesized)
ccttaaggggaaaaaaaagctaaataaacgacacacataggactatgtaaacccttaacactaaactgtttctgacagcccttcagagctctgaagacagcaaactcagtctgccttctc

SEQ ID NO: 300366 - DNA, 120 bp, Artificial Sequence
  ENSG00000132763_27 (sequence is synthesized)
agcattcttctaactctaccaaactggatagcctgaaccttataaaggatcaagaacttaacagaagcccccgcttgtttcattaagtaactgccatctaccccttggtaagcaaaaggc

SEQ ID NO: 300367 - DNA, 120 bp, Artificial Sequence
  ENSG00000132763_28 (sequence is synthesized)
agagtttgaaatttttcatagatttatacagaaagcacagccttcaaccttttcctgacaatgcctaagaatgtgcctcaggctagcctgaagaaaatgaggcaaggggactaatctctt

SEQ ID NO: 300368 - DNA, 69 bp, Artificial Sequence
  ENSG00000132763_29 (sequence is synthesized)
ggtggcgcaatctccacctccgtctcactgcaacctcggtctcccgggttcaagcgattctcctgcatc

SEQ ID NO: 300369 - DNA, 63 bp, Artificial Sequence
  ENSG00000132763_30 (sequence is synthesized)
gcaagctccaaaaatagtggggcgtggtggtggacccctgtagtcctagctactcaggaggct

SEQ ID NO: 300370 - DNA, 66 bp, Artificial Sequence
  ENSG00000132763_31 (sequence is synthesized)
aaacaagactctgtctcaaaaaaaaaaagtgtttggcattcattggctcttaaatggtacctattt

SEQ ID NO: 300371 - DNA, 120 bp, Artificial Sequence
  ENSG00000132763_32 (sequence is synthesized)
aagtgtttggcattcattggctcttaaatggtacctatttaagaggctgtacatgttccagtgggatgggaagcagcagagaccaacagagtctgaagaagcaagcttctgagttatgaa

SEQ ID NO: 300372 - DNA, 120 bp, Artificial Sequence
  ENSG00000132763_33 (sequence is synthesized)
agcctgggttcaggagactaacctatatgtaggttcctaggaaagtccagttaaagggcctactttgccactgctgcctccttcttaatgctgaacctcatctcccacaagggggcagtc

SEQ ID NO: 300373 - DNA, 120 bp, Artificial Sequence
  ENSG00000132763_34 (sequence is synthesized)
tcagcaggtgtcagctgagccatgtgtcatctgtccaggctaactgcccacacatccttctgcaaagggtacctcttggttatcagtgctcactgatccctatataatcagactctaatc

SEQ ID NO: 300374 - DNA, 120 bp, Artificial Sequence
  ENSG00000132763_35 (sequence is synthesized)
cctgtaaaaagattacttggtgctagccaagctagcacctttgggtcttcccaaacatacaccactaatccagactctaataacttcatttcctttaaattacaagatcagagctgaaat

SEQ ID NO: 300375 - DNA, 80 bp, Artificial Sequence
  ENSG00000132763_36 (sequence is synthesized)
taacttcatttcctttaaattacaagatcagagctgaaataggccttagaaagctagtctgggctgggcgcaatggctca

SEQ ID NO: 300376 - DNA, 120 bp, Artificial Sequence
  ENSG00000132763_37 (sequence is synthesized)
aaaataaataaataaataaaaatatgaactatatggattaacctcttctctcaataaagttatttaaaaaatggcatgctttatctctagaggtgattcccaaccattttgttttgccct

SEQ ID NO: 300377 - DNA, 120 bp, Artificial Sequence
  ENSG00000132763_38 (sequence is synthesized)
aatacatctgtgagatcatcctacattcagtaagttagatctttgggagtgactgattctaaatgagcaggacagaagagaggagtatgtatactttgaataaaaagcctttatattctc

SEQ ID NO: 300378 - DNA, 120 bp, Artificial Sequence
  ENSG00000132768_0 (sequence is synthesized)
agtagttaggatggctgaaggggatactcaccggctgaaggccgactgtgattccccctacccccacaaggcgattttgaccccctgagggctgctctagaggactcaggccccgaagct

SEQ ID NO: 300379 - DNA, 120 bp, Artificial Sequence
  ENSG00000132768_1 (sequence is synthesized)
gtcccagggaggtccccgctgcatcccaccacccaagctgtgcctcatggagtcgatgtttagcagccctgccgaggcggcgctgcagcgagagaccggggtgccaggactgcttactcc

SEQ ID NO: 300380 - DNA, 120 bp, Artificial Sequence
  ENSG00000132768_2 (sequence is synthesized)
tcttccggacctggacggagtgtacgagctggagcgagtcgctggatttgtccgcgacctggggtgtgaacgagttgccttgcagttccctgaccagctattgggagatgctgtggctgt

SEQ ID NO: 300381 - DNA, 120 bp, Artificial Sequence
  ENSG00000132768_3 (sequence is synthesized)
ggctgcacgactggaggagacgacagggtcaaagatgttcattctgggtgacacagcctacggcagctgctgcgtggatgtgctgggtgctgagcaagctggagctcaggctctcataca

SEQ ID NO: 300382 - DNA, 120 bp, Artificial Sequence
  ENSG00000132768_4 (sequence is synthesized)
ttttggccctgcctgcttaagccctccagcccgcccactgcccgttgccttcgtgcttcgtcaacgttctgtggccttggagctctgtgtcaaggcctttgaggcccagaacccagaccc

SEQ ID NO: 300383 - DNA, 120 bp, Artificial Sequence
  ENSG00000132768_5 (sequence is synthesized)
caaagcgcctgtggtgctgctgagtgagccggcctgtgcccatgccctggaggctttggctactctcctgcgcccacggtacctggacctgctagtctccagcccagcttttccccaacc

SEQ ID NO: 300384 - DNA, 120 bp, Artificial Sequence
  ENSG00000132768_6 (sequence is synthesized)
agtgggttccctgagtccagagcctatgcccctagagcgttttgggcgccgcttcccccttgccccagggaggcgtctagaagagtatggtgccttctatgtagggggctctaaggccag

SEQ ID NO: 300385 - DNA, 120 bp, Artificial Sequence
  ENSG00000132768_7 (sequence is synthesized)
ccctgacccagaccttgacccagacctgagtcggctgctcttggggtgggcaccaggtcaacccttctcctcctgctgtccagatacagggaagactcaggatgagggtgcccgggctgg

SEQ ID NO: 300386 - DNA, 120 bp, Artificial Sequence
  ENSG00000132768_8 (sequence is synthesized)
acggctaagggcacgaagacgatatctggtagagagggccagagatgcccgcgtggtagggctgctggcaggcacactgggtgtagcccaacaccgtgaggcactggcccacttgcggaa

SEQ ID NO: 300387 - DNA, 120 bp, Artificial Sequence
  ENSG00000132768_9 (sequence is synthesized)
cctgactcaggctgctggcaagcgtagctatgtgttggccctggggcggcccacccctgccaagcttgccaacttccctgaggtggatgtctttgtgctattagcctgtcctctgggtgc

SEQ ID NO: 300388 - DNA, 120 bp, Artificial Sequence
  ENSG00000132768_10 (sequence is synthesized)
ctgcaaccctgcctggccacctccaggcctggctccccacctcacacattatgcggacttattgcctggctctcccttccacgtggctctcccaccacctgagtcagagctgtgggaaac

SEQ ID NO: 300389 - DNA, 120 bp, Artificial Sequence
  ENSG00000132768_11 (sequence is synthesized)
cccagacgtgtcactcattactggagatctccgacccccacctgcctggaagtcatcaaatgatcatggaagcttggctctgaccccacggccccagctggagctggctgagagcagtcc

SEQ ID NO: 300390 - DNA, 120 bp, Artificial Sequence
  ENSG00000132768_12 (sequence is synthesized)
tgcagcctcattccttagttcccggagctggcaagggctggagccccgcctgggtcagacgccagtgacagaagctgtgagtggaagacgagggattgccatcgcctatgaggatgaggg

SEQ ID NO: 300391 - DNA, 120 bp, Artificial Sequence
  ENSG00000132768_13 (sequence is synthesized)
aagcggctgataccatgtggggctggagacatagatggacttatgaatggctgctaggacctttagtgctccctgcaccaacctcccatccccctgccaagatccttgaaggaccctgga

SEQ ID NO: 300392 - DNA, 120 bp, Artificial Sequence
  ENSG00000132768_14 (sequence is synthesized)
aggagggagagcaggcagcccttcacaggataggatccgtctctgtcctgtcctggcactggcacaagctcagcacatgcccagtaatgcgtgttgtttggctgatggaataaagggctt

SEQ ID NO: 300393 - DNA, 120 bp, Artificial Sequence
  ENSG00000132768_15 (sequence is synthesized)
agggacttccctgaggcctctggacccatctgtcttcctgagggcagcccaggacctttggccaatcccagttcccaggctgcagttgagggtctgtccttgtcaaaaggcaggtgctag

SEQ ID NO: 300394 - DNA, 120 bp, Artificial Sequence
  ENSG00000132768_16 (sequence is synthesized)
acagtctagaccagggtttctcaaactcgtacttgacatttggggccagataattctttgttgtggggctgtctggtgtatggtagggtgctcagcagcatccctggcctctgcccacta

SEQ ID NO: 300395 - DNA, 120 bp, Artificial Sequence
  ENSG00000132768_17 (sequence is synthesized)
gacatcagaagcactcccccagttgtgacaaccaaaaatatctccagaccttggcaaatgttatctgtgggggaaaattgccctcaattgagaaccactggtctagctagacctgcactg

SEQ ID NO: 300396 - DNA, 120 bp, Artificial Sequence
  ENSG00000132768_18 (sequence is synthesized)
tccagtacagtagccactaaatacatgtggctaaacttaaatttaagttaattaagattaaaagctcagtttctcagtcacattagtcattcaagtgttcagacagccacatgaggggac

SEQ ID NO: 300397 - DNA, 120 bp, Artificial Sequence
  ENSG00000132768_19 (sequence is synthesized)
agtgcagctacaggatatgccatcatggcagaaagttctattggttggacagcgttggtctatactgactcttatttctcagggagatcacagcaacctaaataaaccagataccttttc

SEQ ID NO: 300398 - DNA, 120 bp, Artificial Sequence
  ENSG00000132768_20 (sequence is synthesized)
gttttacgtctatgacagtgattgccttcaatggtggtgtttctccttgatgataatggtaatgactccccttctgatgctagctcctttcattgacaatgtcttcctttaatgaaacca

SEQ ID NO: 300399 - DNA, 120 bp, Artificial Sequence
  ENSG00000132768_21 (sequence is synthesized)
ttttattcactgaccacatttcccagtgatgacagcaactcgcctccagaagagaacccatttctctgatgctatcttccctgcagctgctgcgtggatgtgctgggtgctgagcaagct

SEQ ID NO: 300400 - DNA, 120 bp, Artificial Sequence
  ENSG00000132768_22 (sequence is synthesized)
gagtccagagcctatgcccctagagcgttttgggcgccgcttcccccttgccccagggaggcgtctagaagagctctcccttccacgtggctctcccaccacctgagtcagagctgtggg

SEQ ID NO: 300401 - DNA, 120 bp, Artificial Sequence
  ENSG00000132768_23 (sequence is synthesized)
gcctgtggtgctgctgagtgagccggcctgtgcccatgccctgggtaaggggttttgcctgtgtatgcacaaagggtgagccaactgctttatgccttaatttccccatttccatatacc

SEQ ID NO: 300402 - DNA, 120 bp, Artificial Sequence
  ENSG00000132768_24 (sequence is synthesized)
atccatagaactcttgatatgggcttggccccagcctactgggtcatatttagtctcctggggatgagggagctcctgctttgccaggctccaacctcaacactacctccttctcttcca

SEQ ID NO: 300403 - DNA, 120 bp, Artificial Sequence
  ENSG00000132773_0 (sequence is synthesized)
ccccgactgcctgaaccgcgccaggagacggaccgcaagtccagcgtacccacagacgactcaggcgggagacgagcggtgtcatggccgccgacagtgacgatggcgcagtttcagctc

SEQ ID NO: 300404 - DNA, 120 bp, Artificial Sequence
  ENSG00000132773_1 (sequence is synthesized)
ccgcagcttccgacggtggtgtcagcaaaagcacaacatctggggaggagctagtagtccaggttcccgtagtggatgtgcaaagcaacaacttcaaggagatgtggccatccctcctgc

SEQ ID NO: 300405 - DNA, 120 bp, Artificial Sequence
  ENSG00000132773_2 (sequence is synthesized)
tagccataaagacagctaatttcgtggctgtggacacggagctgagtgggcttggggacaggaagagtttgctgaaccagtgcattgaggaacgttacaaggccgtgtgtcatgctgcca

SEQ ID NO: 300406 - DNA, 120 bp, Artificial Sequence
  ENSG00000132773_3 (sequence is synthesized)
ggacccgttctatcctttccctgggcctcgcctgcttcaagcggcagccagacaagggtgaacattcctatctggctcaagtgttcaatctcactctgctgtgcatggaggagtatgtca

SEQ ID NO: 300407 - DNA, 120 bp, Artificial Sequence
  ENSG00000132773_4 (sequence is synthesized)
tagaaccaaagtctgtgcagttcctgatacagcatggcttcaacttcaaccagcagtatgcccaaggcatcccctaccataagggcaatgacaagggtgatgagagccagagccagtcag

SEQ ID NO: 300408 - DNA, 120 bp, Artificial Sequence
  ENSG00000132773_5 (sequence is synthesized)
tacggaccctattcctggagctaatccgagcccgccggcccctggtgctacacaatggccttatagacttggtgttcctgtaccagaacttctatgcacacctccctgagagtctgggaa

SEQ ID NO: 300409 - DNA, 120 bp, Artificial Sequence
  ENSG00000132773_6 (sequence is synthesized)
ccttcaccgctgacctgtgtgagatgttcccagcaggcatttatgacaccaaatatgctgctgagtttcatgcccgtttcgtggcctcctacttagaatatgccttccggaaatgtgaac

SEQ ID NO: 300410 - DNA, 120 bp, Artificial Sequence
  ENSG00000132773_7 (sequence is synthesized)
attaccgctgctgcctgcccccagcaacccaccgtcctcatcccaccagcatctgtgacaacttctcggcttatggctggtgccccctgggaccacagtgtcctcagtctcacgatattg

SEQ ID NO: 300411 - DNA, 120 bp, Artificial Sequence
  ENSG00000132773_8 (sequence is synthesized)
accttatcattgacactgatgaggctgcggcagaggacaagcggcgacggcgacgacgtagggaaaaacggaagagggctttattgaacctaccggggacacagacctctggggaagcta

SEQ ID NO: 300412 - DNA, 120 bp, Artificial Sequence
  ENSG00000132773_9 (sequence is synthesized)
aggatggtcctcccaagaagcaggtctgtggggatagcatcaagcctgaagaaaccgagcaggaggtggctgccgatgaaactaggaacctgcctcactccaagcaaggcaacaaaaatg

SEQ ID NO: 300413 - DNA, 120 bp, Artificial Sequence
  ENSG00000132773_10 (sequence is synthesized)
acttagagatggggattaaggcagcaaggcctgaaatagctgatagagctacctcagaagtgccagggagccaagccagtcctaacccagtgcctggggatggattgcaccgggctggtt

SEQ ID NO: 300414 - DNA, 120 bp, Artificial Sequence
  ENSG00000132773_11 (sequence is synthesized)
ttgatgcctttatgacaggttatgtgatggcctatgtggaagtgagccagggaccgcagccctgcagctctggaccctggctccctgaatgccacaataaggtatatttgagtggcaaag

SEQ ID NO: 300415 - DNA, 120 bp, Artificial Sequence
  ENSG00000132773_12 (sequence is synthesized)
ctgtacccctcacagtggccaagagccagttctctcgttcctccaaagcccacaatcagaagatgaagctcacttggggcagtagctgatgcaacttccaccttgctctcaggtggaaca

SEQ ID NO: 300416 - DNA, 120 bp, Artificial Sequence
  ENSG00000132773_13 (sequence is synthesized)
gaggtattttgggtctctctagcctgaaatgtcatcctcaactgctactgagtttaggggagggggaatgtcttgacagacatcactgcattgccctggaccgcctcctttatcccagtg

SEQ ID NO: 300417 - DNA, 120 bp, Artificial Sequence
  ENSG00000132773_14 (sequence is synthesized)
tttgaggtacaagtaagaaggctgaccagcacctgtaacactgactttatttttaagtctgaaaatgtcttgggaaagttttacaaaaaaaaaaatcaacagaagcaagttatgaaaata

SEQ ID NO: 300418 - DNA, 120 bp, Artificial Sequence
  ENSG00000132773_15 (sequence is synthesized)
acagacgactcaggcgggagacgagcggtgtcatggccgccgacagtgacgatggcgcagtttcagctcccgcagcttccgacggtgagcggcttcccagaggtagccttcaaagcctct

SEQ ID NO: 300419 - DNA, 120 bp, Artificial Sequence
  ENSG00000132773_16 (sequence is synthesized)
gcgctctgggagaggggaaggcctcgggctcatagttctagaggctcctcaagcttcagaggactgctccttccgcctgaactagccacgaggagactacaagttccgttgtacaccgcg

SEQ ID NO: 300420 - DNA, 120 bp, Artificial Sequence
  ENSG00000132773_17 (sequence is synthesized)
tatgctagtggaccattaccctcttgcgctgttgcagtgaacgggaaaatgggaagcagcgggcagctggcagcccacaccttaccctggagttctgcaactatccttccagcatgaggg

SEQ ID NO: 300421 - DNA, 120 bp, Artificial Sequence
  ENSG00000132780_0 (sequence is synthesized)
tgagtgagtctctggcgtcccaaattgcctgtttttctcgcaggctctattccgttcgctggttcgccacctcaggggaacgatggccatggagtccacagccactgccgccgtcgccgc

SEQ ID NO: 300422 - DNA, 120 bp, Artificial Sequence
  ENSG00000132780_1 (sequence is synthesized)
ggagctggtttctgccgacaaaattgaagatgttcctgctccttctacatctgcagataaagtggagagtctggatgtggatagtgaagctaagaaactattgggtttaggacagaaaca

SEQ ID NO: 300423 - DNA, 120 bp, Artificial Sequence
  ENSG00000132780_2 (sequence is synthesized)
tctggtgatgggggatattccagcagctgtcaatgcattccaggaagcagctagtcttttaggtaagaagtatggagagacagctaatgagtgtggagaagccttctttttctatgggaa

SEQ ID NO: 300424 - DNA, 120 bp, Artificial Sequence
  ENSG00000132780_3 (sequence is synthesized)
atcacttctggagttggcaagaatggagaatggtgtgttgggaaacgccttggaaggtgtgcatgtggaagaggaagaaggagaaaaaacagaagatgaatctctggtagaaaataatga

SEQ ID NO: 300425 - DNA, 120 bp, Artificial Sequence
  ENSG00000132780_4 (sequence is synthesized)
taacatagatgaaactgaaggctcagaagaggatgataaagaaaatgataagaccgaagaaatgccaaatgattcagtccttgaaaacaagtctcttcaagaaaatgaggaggaggagat

SEQ ID NO: 300426 - DNA, 120 bp, Artificial Sequence
  ENSG00000132780_5 (sequence is synthesized)
tgggaacctagagcttgcctgggatatgctggatttagcaaagatcatttttaaaaggcaagaaacaaaagaagcacagctttatgctgcccaggcacatcttaaactcggagaagttag

SEQ ID NO: 300427 - DNA, 120 bp, Artificial Sequence
  ENSG00000132780_6 (sequence is synthesized)
agacccactaccagctgggcttggcttatgggtacaactctcagtatgatgaggcagtggcacagttcagcaaatctattgaagtcattgagaacagaatggctgtactaaacgagcagg

SEQ ID NO: 300428 - DNA, 120 bp, Artificial Sequence
  ENSG00000132780_7 (sequence is synthesized)
tgaaggaggctgaaggatcgtctgctgaatacaagaaagaaattgaggaactaaaggaactgctacccgaaattagagagaagatagaagatgcaaaggagtctcagcgtagtgggaatg

SEQ ID NO: 300429 - DNA, 120 bp, Artificial Sequence
  ENSG00000132780_8 (sequence is synthesized)
tagctgaactggctctgaaagctactctggtggagagttctacttcaggtttcactcctggtggaggaggctcttcagtctccatgattgccagtagaaagccaacagacggtgcttcct

SEQ ID NO: 300430 - DNA, 120 bp, Artificial Sequence
  ENSG00000132780_9 (sequence is synthesized)
catcaaattgtgtgactgatatttcccaccttgtcagaaagaagaggaaaccagaggaagagagtccccggaaagatgatgcaaagaaagccaaacaagagccggaggtgaacggaggca

SEQ ID NO: 300431 - DNA, 120 bp, Artificial Sequence
  ENSG00000132780_10 (sequence is synthesized)
gtggggatgctgtccccagtggaaatgaagtttcggaaaacatggaggaggaggctgagaatcaggctgaaagccgggcagcagtggaggggacagtggaggctggagctacagttgaaa

SEQ ID NO: 300432 - DNA, 120 bp, Artificial Sequence
  ENSG00000132780_11 (sequence is synthesized)
gcactgcatgttaagagggggcacagccctcctcccaagggaaagtgtttttgtatataatgtattttttcacttttggaggattctttttgtataacttcaataaagattgtaagcaaa

SEQ ID NO: 300433 - DNA, 120 bp, Artificial Sequence
  ENSG00000132780_12 (sequence is synthesized)
ggcaaagcctgaaactgataaagaacaggacagtgaaatggagaagggtggaagagaagatatggatataagtaaatctgcagaggagccacaggaaaaagttgacttgactctagattg

SEQ ID NO: 300434 - DNA, 120 bp, Artificial Sequence
  ENSG00000132780_13 (sequence is synthesized)
gttaactgaaacctctgaagaggcaaaaggaggagcagcaccagaaggaccgaatgaagctgaggtcacttctgggaagccagaacaggaagtaccagatgctgaggaagaaaaatcagt

SEQ ID NO: 300435 - DNA, 120 bp, Artificial Sequence
  ENSG00000132780_14 (sequence is synthesized)
ttctggaactgatgtccaagaagagtgcagagaaaaaggaggtcaggagaagcagggagaggtaattgtgagcatagaggagaagccaaaagaagtttcagaagagcagcctgtggtgac

SEQ ID NO: 300436 - DNA, 120 bp, Artificial Sequence
  ENSG00000132780_15 (sequence is synthesized)
tctagaaaagcagggcactgcagtggaggtagaagcagagtctttagacccgacagtcaagccagtggatgtgggtggggacgagccagaggagaaggtagttacctctgaaaacgaggc

SEQ ID NO: 300437 - DNA, 120 bp, Artificial Sequence
  ENSG00000132780_16 (sequence is synthesized)
aggaaaggcggttcttgaacaactggtaggtcaagaagtaccacctgctgaagagtcaccagaggtgacaacagaggctgcagaggcctcagctgtagaggctggatcagaagtctctga

SEQ ID NO: 300438 - DNA, 120 bp, Artificial Sequence
  ENSG00000132780_17 (sequence is synthesized)
aaagcctgggcaggaggctccagttctccctaaggatggtgcagtcaatggaccgtcagttgtaggagatcagactcctattgaaccacagacttctatagaaagactgacagaaacaaa

SEQ ID NO: 300439 - DNA, 120 bp, Artificial Sequence
  ENSG00000132780_18 (sequence is synthesized)
agatggctcaggactagaggagaaggtcagggcaaagctggttcctagtcaggaggagactaagctgtctgtagaagagtctgaggcagctggagatggggttgataccaaggtagccca

SEQ ID NO: 300440 - DNA, 120 bp, Artificial Sequence
  ENSG00000132780_19 (sequence is synthesized)
cttggagcactgctggttttatatattagccaaaggttttgttctggccttctgtactgatctgtgttcctgatcctaattcctatctgtctaacgtggaggtgatcaagtgtggctgta

SEQ ID NO: 300441 - DNA, 120 bp, Artificial Sequence
  ENSG00000132780_20 (sequence is synthesized)
ggcctttgttttccaatggtgctatattctgttttcaaacacttcactgaacccagctgtcttgcaaactttcagtggtgctgtccctggatgggggctacaaaaacaagaattggtgaa

SEQ ID NO: 300442 - DNA, 120 bp, Artificial Sequence
  ENSG00000132780_21 (sequence is synthesized)
gatcttgctcttcagtgctgaaaatggatgatggactttggctgtgagccaggcctaggatggttcttgtcctatatccacctagtcttcacctggggctataattctgtcctggaaaaa

SEQ ID NO: 300443 - DNA, 120 bp, Artificial Sequence
  ENSG00000132780_22 (sequence is synthesized)
gaactctgaaaacctgggtcaggggaatgattcctaaggaaaacggtctgcatttgagctctggtttgaaagtagccaaggggactgatggtggacactccagatgtggttggaagcata

SEQ ID NO: 300444 - DNA, 120 bp, Artificial Sequence
  ENSG00000132780_23 (sequence is synthesized)
tgtggggaggctggctggttgagttttgttattttctgtatagaaaggttgagatatatcaacacttggaattgttacccatctgcagaattgacttctcaaataaagatgctaaaaatc

SEQ ID NO: 300445 - DNA, 120 bp, Artificial Sequence
  ENSG00000132780_24 (sequence is synthesized)
ttagattttcagagacccatcttcaatactttgaactcattctggtaaacttccttctacctatgtgcaggtccctgtactccagccaacacaggctcagtaactggaaatgaattggct

SEQ ID NO: 300446 - DNA, 120 bp, Artificial Sequence
  ENSG00000132780_25 (sequence is synthesized)
aaaatggtagcaccattgggtttcttaatggagctttaggagttctttatggaaaaaagcacagaactaaattcctcaaaaaacaaacaaacaaaaccacacacacaaaaaaacaaaact

SEQ ID NO: 300447 - DNA, 120 bp, Artificial Sequence
  ENSG00000132780_26 (sequence is synthesized)
cccatgtcttgatcttaatgattgtgagcaaggatggtaaaaagctctgctggctgacccctaagaccttgaatggtaagctacaatacagatatcacagtcccttacagattgttcgaa

SEQ ID NO: 300448 - DNA, 120 bp, Artificial Sequence
  ENSG00000132780_27 (sequence is synthesized)
aactcgttggatcataattaacattgttagaactctcatacattacatctgatcctaaaacaatactatgtgataggtagtattgcccaagttacagtgatgaggttgaggtttaaaggt

SEQ ID NO: 300449 - DNA, 120 bp, Artificial Sequence
  ENSG00000132780_28 (sequence is synthesized)
tacatgacttgtttagggtcataatactgaatctgaacccagatctgccttgaatatattattcttcccaagttaccacacattgaagaagacagtgttcatccttttcctacacccact

SEQ ID NO: 300450 - DNA, 86 bp, Artificial Sequence
  ENSG00000132780_29 (sequence is synthesized)
cattgaagaagacagtgttcatccttttcctacacccactgcttagaaattttgtcgtgggctgggcgcagtagcttcacacctgt

SEQ ID NO: 300451 - DNA, 120 bp, Artificial Sequence
  ENSG00000132780_30 (sequence is synthesized)
agtgagctgagatcatgccgctgtgctccagcctgggcaacacagcgagtctctgtcttccaaaagaaaaaaaaaatctgtcacttatttaaaaagttaactatattttaaaagccccag

SEQ ID NO: 300452 - DNA, 120 bp, Artificial Sequence
  ENSG00000132780_31 (sequence is synthesized)
gcttttcatatgctgcattttttggtgttgtatatcagatactgttctgcttgtaaagacaatacagttttccatattttacaaaagaagaaatgggagaaaggggtttaagtaacttgc

SEQ ID NO: 300453 - DNA, 120 bp, Artificial Sequence
  ENSG00000132780_32 (sequence is synthesized)
cctagtcacacagtaaggagaagcctgctacccaaacttctggcttgagtactcaaccacttactttctgtgctttatttccctttacgtggcagcaccattctgcagaaaacttccaag

SEQ ID NO: 300454 - DNA, 120 bp, Artificial Sequence
  ENSG00000132780_33 (sequence is synthesized)
cagtttttttcacttaaaaattaaaaccctgtttactgccacctcttgactctttgccatgtgttgggctgtacatttgcttctaataaagataattggtctgttctttttctctttgaa

SEQ ID NO: 300455 - DNA, 120 bp, Artificial Sequence
  ENSG00000132780_34 (sequence is synthesized)
ctctcaggcagctgagactatgggtgtgtatcaccatgcccagctggggtgcagtggtgcggtctcgctcactgcaacctgcatctcccaggttcaagcgattctcctacgtcagcctcc

SEQ ID NO: 300456 - DNA, 85 bp, Artificial Sequence
  ENSG00000132780_35 (sequence is synthesized)
caggttcaagcgattctcctacgtccccaggcccgactaatttttttgtatttttactagagatgggatttcaccatgctggcca

SEQ ID NO: 300457 - DNA, 120 bp, Artificial Sequence
  ENSG00000132780_36 (sequence is synthesized)
cttctcatatccacatttccaagtgggtccgggcttagttccccaaagttagaccagatggatggtcttattaactctgcccatcctctagcagaatatgcagaaaagctgaagtagatt

SEQ ID NO: 300458 - DNA, 120 bp, Artificial Sequence
  ENSG00000132780_37 (sequence is synthesized)
tacatatgtaggataattgatagaaaagtaaatacttcatcttcccaatttgtaggaaaaattaaattgatattgttatcttctattcttacctggtatctcttcctactcataccagaa

SEQ ID NO: 300459 - DNA, 120 bp, Artificial Sequence
  ENSG00000132780_38 (sequence is synthesized)
tactagaagacaacctctaatttgaaacaaaatatcttaattacttggaagttttacatcaaatttttaaattaaaattcctataattgcttcagaagaatattactggttcctcttgag

SEQ ID NO: 300460 - DNA, 120 bp, Artificial Sequence
  ENSG00000132780_39 (sequence is synthesized)
aattgcttcagaagaatattactggttcctcttgaggaatctgtaccatcttcaaggaatggtggggagctaggttaaggagaaagccatcgccattacttttttttttttttttttttt

SEQ ID NO: 300461 - DNA, 120 bp, Artificial Sequence
  ENSG00000132780_40 (sequence is synthesized)
ccgcgcctggcagccattgccattactttaaaacctttcccaacttgtgcccaggtatcaatggcaatgccctgatgtcctcagtaaatttgttaaagtatctttttttttttttttttt

SEQ ID NO: 300462 - DNA, 120 bp, Artificial Sequence
  ENSG00000132780_41 (sequence is synthesized)
ggattacaggcgtgagtcaccgcgcctgaccctgttaaagtattttctaagcttctttgaaaacggaatctctttgtggttgctgctgataaaactcctttgacctgacgattgctctaa

SEQ ID NO: 300463 - DNA, 120 bp, Artificial Sequence
  ENSG00000132780_42 (sequence is synthesized)
aactcctttgacctgacgattgctctaagtcctaattgccatatttatattcccatagtaagagtgtttggagatagtgtttgagcttttttgctggtgttaaaaatgcataatgaaaga

SEQ ID NO: 300464 - DNA, 120 bp, Artificial Sequence
  ENSG00000132780_43 (sequence is synthesized)
ttttaatcacttaacattgttgatttgtctaatcacagtagcgctattgattaggagcctgacctttagatggttgacttgtgagtgtattcaatatggtgaaatatggtgttgatatat

SEQ ID NO: 300465 - DNA, 120 bp, Artificial Sequence
  ENSG00000132780_44 (sequence is synthesized)
ggctgcagattttagaggtgtcattagcaaaggtataggagtaaaataggggttatagtattccttactcaaattctgtatgtgctagagctggctggagtctgtggcatgctcattggt

SEQ ID NO: 300466 - DNA, 120 bp, Artificial Sequence
  ENSG00000132780_45 (sequence is synthesized)
gtaagtcggtaaggactatgctttttgctccacatctctgttgtgggaaagctagtctcttgagcattcttgatcagaatggactggaataatttaactttcgtactttcccaggctatt

SEQ ID NO: 300467 - DNA, 120 bp, Artificial Sequence
  ENSG00000132780_46 (sequence is synthesized)
agtattatctaatgagtggcttaaagataccagaaacactgactgaggtctccacctgcttctggctgaatgaatgggagcttctagccattgaataagaggcagtagccaatgtttctt

SEQ ID NO: 300468 - DNA, 120 bp, Artificial Sequence
  ENSG00000132780_47 (sequence is synthesized)
attctgaatggtccaggttgacttttataagagaaacactcagccttttaattgctgaaggtctgacccatagactaagattgcacattcttagtctaggttacacttgaactagactgc

SEQ ID NO: 300469 - DNA, 120 bp, Artificial Sequence
  ENSG00000132780_48 (sequence is synthesized)
acccactgacgatatattcagttcaggtgttaactcacttggattagcatctggcctgtcctatctgaatataggttgagacgtgtattggaatctctgactagtcagaatacgttctta

SEQ ID NO: 300470 - DNA, 120 bp, Artificial Sequence
  ENSG00000132780_49 (sequence is synthesized)
atctccctgtgcttccggtagaggggcctgaagtgatatggtgggacagattaatacattctgagagtacaggttggcatctgcctgtggctagggagagagacccttagagctgtgaat

SEQ ID NO: 300471 - DNA, 120 bp, Artificial Sequence
  ENSG00000132780_50 (sequence is synthesized)
cctgatgttcaggatctttgcaccacaagggttaaggaaatgttttgcagttgtctttttaaaaacattaagcacatttgtgaagccttcacaattatatctttagaggaaaccagagga

SEQ ID NO: 300472 - DNA, 120 bp, Artificial Sequence
  ENSG00000132780_51 (sequence is synthesized)
ctacatctgcagataaagtggagagcaaccattaatctgctttctgtcactgaagatgggttgcattttgtagaatattatctaaatagaatcatacatctggatgtggatagtgaagct

SEQ ID NO: 300473 - DNA, 120 bp, Artificial Sequence
  ENSG00000132780_52 (sequence is synthesized)
tttatgttgaatgctgtccatttacttgctcttctttttctctttgttagaaaactatgtgcaagctgtggaggagttccagtcctgccttaacctgcaggaacagtacctggaagccca

SEQ ID NO: 300474 - DNA, 120 bp, Artificial Sequence
  ENSG00000132780_53 (sequence is synthesized)
gttccgttaacattttgataatagcatgtttggtaccatttatgttaatgttctatttgccaggaacttttcatcatgacttggtttccagggagttggtgggctcatctaattattcct

SEQ ID NO: 300475 - DNA, 120 bp, Artificial Sequence
  ENSG00000132780_54 (sequence is synthesized)
atcaagtaatgcagtggttaagaggaaataccctggagccccagactatctgggttttaattccatacttacgtgtggccatgggcctttctctccctcagttgaccgatttgtaaaatg

SEQ ID NO: 300476 - DNA, 120 bp, Artificial Sequence
  ENSG00000132780_55 (sequence is synthesized)
caacagtgcgagactccgtctcaaaaacaaaagaatgagcagtagcagaattgaagatgttcctgctccttctacatctgcagataaagtggagagtctggatgtggatagtgaagctaa

SEQ ID NO: 300477 - DNA, 120 bp, Artificial Sequence
  ENSG00000132781_0 (sequence is synthesized)
ggagcctctagaactatgagcccgaggccttcccctctcccagagcgcagaggctttgaaggctacctctgggaagccgctcaccgtcggaagctgcgggagctgaaactgcgccatcgt

SEQ ID NO: 300478 - DNA, 120 bp, Artificial Sequence
  ENSG00000132781_1 (sequence is synthesized)
cactgtcggcggccatgacaccgctcgtctcccgcctgagtcgtctgtgggccatcatgaggaagccacgagcagccgtgggaagtggtcacaggaagcaggcagccagccaggaaggga

SEQ ID NO: 300479 - DNA, 120 bp, Artificial Sequence
  ENSG00000132781_2 (sequence is synthesized)
ggcagaagcatgctaagaacaacagtcaggccaagccttctgcctgtgatgggatgattgctgagtgtcctggggccccagcaggcctggccaggcagccggaagaggtggtattgcagg

SEQ ID NO: 300480 - DNA, 120 bp, Artificial Sequence
  ENSG00000132781_3 (sequence is synthesized)
cctctgtctcctcataccatctattcagagacgtagctgaagtcacagccttccgagggagcctgctaagctggtacgaccaagagaaacgggacctaccatggagaagacgggcagaag

SEQ ID NO: 300481 - DNA, 120 bp, Artificial Sequence
  ENSG00000132781_4 (sequence is synthesized)
atgagatggacctggacaggcgggcatatgctgtgtgggtctcagaggtcatgctgcagcagacccaggttgccactgtgatcaactactataccggatggatgcagaagtggcctacac

SEQ ID NO: 300482 - DNA, 120 bp, Artificial Sequence
  ENSG00000132781_5 (sequence is synthesized)
tgcaggacctggccagtgcttccctggaggaggtgaatcaactctgggctggcctgggctactattctcgtggccggcggctgcaggagggagctcggaaggtggtagaggagctagggg

SEQ ID NO: 300483 - DNA, 120 bp, Artificial Sequence
  ENSG00000132781_6 (sequence is synthesized)
gccacatgccacgtacagcagagaccctgcagcagctcctgcctggcgtggggcgctacacagctggggccattgcctctatcgcctttggccaggcaaccggtgtggtggatggcaacg

SEQ ID NO: 300484 - DNA, 120 bp, Artificial Sequence
  ENSG00000132781_7 (sequence is synthesized)
atcccagcagcacccttgtttcccagcagctctggggtctagcccagcagctggtggacccagcccggccaggagatttcaaccaagcagccatggagctaggggccacagtgtgtaccc

SEQ ID NO: 300485 - DNA, 120 bp, Artificial Sequence
  ENSG00000132781_8 (sequence is synthesized)
cacagcgcccactgtgcagccagtgccctgtggagagcctgtgccgggcacgccagagagtggagcaggaacagctcttagcctcagggagcctgtcgggcagtcctgacgtggaggagt

SEQ ID NO: 300486 - DNA, 120 bp, Artificial Sequence
  ENSG00000132781_9 (sequence is synthesized)
gtgctcccaacactggacagtgccacctgtgcctgcctccctcggagccctgggaccagaccctgggagtggtcaacttccccagaaaggccagccgcaagccccccagggaggagagct

SEQ ID NO: 300487 - DNA, 120 bp, Artificial Sequence
  ENSG00000132781_10 (sequence is synthesized)
ctgccacctgtgttctggaacagcctggggcccttggggcccaaattctgctggtgcagaggcccaactcaggtctgctggcaggactgtgggagttcccgtccgtgacctgggagccct

SEQ ID NO: 300488 - DNA, 120 bp, Artificial Sequence
  ENSG00000132781_11 (sequence is synthesized)
cagagcagcttcagcgcaaggccctgctgcaggaactacagcgttgggctgggcccctcccagccacgcacctccggcaccttggggaggttgtccacaccttctctcacatcaagctga

SEQ ID NO: 300489 - DNA, 120 bp, Artificial Sequence
  ENSG00000132781_12 (sequence is synthesized)
catatcaagtatatgggctggccttggaagggcagaccccagtgaccaccgtaccaccaggtgctcgctggctgacgcaggaggaatttcacaccgcagctgtttccaccgccatgaaaa

SEQ ID NO: 300490 - DNA, 120 bp, Artificial Sequence
  ENSG00000132781_13 (sequence is synthesized)
aggttttccgtgtgtatcagggccaacagccagggacctgtatgggttccaaaaggtcccaggtgtcctctccgtgcagtcggaaaaagccccgcatgggccagcaagtcctggataatt

SEQ ID NO: 300491 - DNA, 120 bp, Artificial Sequence
  ENSG00000132781_14 (sequence is synthesized)
tctttcggtctcacatctccactgatgcacacagcctcaacagtgcagcccagtgacacctctgaaagcccccattccctgagaatcctgttgttagtaaagtgcttatttttgtagtta

SEQ ID NO: 300492 - DNA, 120 bp, Artificial Sequence
  ENSG00000132781_15 (sequence is synthesized)
cgctaattgcctattggcctgtgctgccggctcgcagcccgggtggacccgagccacgccccctggagtgcgccggaaagccgggcgcgctagagctcgcgggaggccatcatgaggaag

SEQ ID NO: 300493 - DNA, 120 bp, Artificial Sequence
  ENSG00000132781_16 (sequence is synthesized)
ctccgtgttctgctgtcttcatcagcgtgggccgcgggtatctattgtgtacagtttacctggcactgactttggacacacaccaatcaacaagagaatcagtccttgcactcaagtcgt

SEQ ID NO: 300494 - DNA, 120 bp, Artificial Sequence
  ENSG00000132781_17 (sequence is synthesized)
ctctcctgctctcgcggcgggaacgcggggcctccgtgttctgctgtcttcatcagcgtgggccgcgggtagcgggtagtggggtggctgggtttgggctttccagagaaggtgacgctg

SEQ ID NO: 300495 - DNA, 120 bp, Artificial Sequence
  ENSG00000132781_18 (sequence is synthesized)
cctgagctgagcttaaagcacgcccaggagttagactaggagagggtcgtgtgggggaaagaagggcgttctgggcatcggtaaattcccagagaggatggagagctcagtgatctccag

SEQ ID NO: 300496 - DNA, 120 bp, Artificial Sequence
  ENSG00000132781_19 (sequence is synthesized)
tagggggccacatgccacgtacagcagagaccctgcagcagctcctgcctggcgtggggcgctacacagctggggccattgcctctatcgcctttggccaggtgatctcacagcccaccc

SEQ ID NO: 300497 - DNA, 120 bp, Artificial Sequence
  ENSG00000132781_20 (sequence is synthesized)
ccactttgtgcgtgcccagcctccttcctcccagcccaggctaactctttggcccctctgtgccaggcaaccggtgtggtggatggcaacgtagcacgggtgctgtgccgtgtccgagcc

SEQ ID NO: 300498 - DNA, 120 bp, Artificial Sequence
  ENSG00000132781_21 (sequence is synthesized)
attggtgctgatcccagcagcacccttgtttcccagcagctctggtaggatgttggggtaacaagggtgcttcaggggtgtctgcaaaggagctctgcttcacagcagtgttcccttctt

SEQ ID NO: 300499 - DNA, 120 bp, Artificial Sequence
  ENSG00000132781_22 (sequence is synthesized)
aacccttcctggcccagtcagaagccccattccagttcttcctctaacctgagtaagattctgcagaacccggccaaagcccactctctaggttggcccctaaagccctcttggcttgag

SEQ ID NO: 300500 - DNA, 64 bp, Artificial Sequence
  ENSG00000132781_23 (sequence is synthesized)
accgccatgaaaaaggttttccgtgtgtatcagggccaacagccagggacctgtatgtagagac

SEQ ID NO: 300501 - DNA, 120 bp, Artificial Sequence
  ENSG00000132781_24 (sequence is synthesized)
tgctggtcagtacatctcctgagagcagggccactttgcctcgaggcccttgggtctgggggctgtgggccaggtaggggcaggtcagcagtgtcctcatgccaacccctttcccccagt

SEQ ID NO: 300502 - DNA, 120 bp, Artificial Sequence
  ENSG00000132781_25 (sequence is synthesized)
gcttccctggaggtgagagccaccctagggtaggggaaataggaacaatagagggactgacgggtgatctctttgacctctgatcctacccacaggaggtgaatcaactctgggctggcc

SEQ ID NO: 300503 - DNA, 120 bp, Artificial Sequence
  ENSG00000132781_26 (sequence is synthesized)
gcctgagtcgtctgtgggtacgctggacttgcggtccgtctcctggcgcggttcaggcagtcggggatggggcggggtctcgccgtcgggtcgccgatgggtcgaacttccgttcagacg

SEQ ID NO: 300504 - DNA, 87 bp, Artificial Sequence
  ENSG00000132781_27 (sequence is synthesized)
ggttgtggcccaaggctcattggccatgaaaggcagattcaggctgggaagggattgtgatacgtatcaagacattaagagacttac

SEQ ID NO: 300505 - DNA, 88 bp, Artificial Sequence
  ENSG00000132781_28 (sequence is synthesized)
tgagcccaggagtttgagaccagcttgggtaacatggcgaaatcccctctctatgctcgcgtggtggtgagcggacaggatcgcttga

SEQ ID NO: 300506 - DNA, 120 bp, Artificial Sequence
  ENSG00000132781_29 (sequence is synthesized)
ccaagccttctgcctgtgatggaggtgaatcaactctgggctggcctgggctactattctcgtggccggcggctgcaggagggagctcggaaggtctgctggcaggactgtgggagttcc

SEQ ID NO: 300507 - DNA, 120 bp, Artificial Sequence
  ENSG00000132781_30 (sequence is synthesized)
tggggagaggaagcctgagtcttctactggcttgtatgagcctgggtaaattacttcccacctcgctttcacaatctgtagaggagaaagttggactagacgacctttgattcttttttc

SEQ ID NO: 300508 - DNA, 120 bp, Artificial Sequence
  ENSG00000132781_31 (sequence is synthesized)
ccatgtcctgcaggaaacattttgtagggcttgaggatctcagctcccttaatatcccacagggatccatactactgttctcatggtgccccagcgccacaagcaacagctcccagtaag

SEQ ID NO: 300509 - DNA, 120 bp, Artificial Sequence
  ENSG00000132781_32 (sequence is synthesized)
ccccagagcctggcagtgccccacaccagagctcccaatacgtcctaccttcctttggatcacaacgctcaatccactccactgaactgaatcacaactattactactaaccgttatgag

SEQ ID NO: 300510 - DNA, 120 bp, Artificial Sequence
  ENSG00000132781_33 (sequence is synthesized)
ctccagactacatctcccgccatgcctccatcagccccatgctcccaacgctccaggcttttgcagccggagccgcggtgtacaacggaacttgtagtctcctcgtggctagttcaggcg

SEQ ID NO: 300511 - DNA, 120 bp, Artificial Sequence
  ENSG00000132781_34 (sequence is synthesized)
agggaagggtcatgggtcagaccccagatgagagcctctactttggggtgggtgtagagaaggcttcctctaccaccttcacccttgaccttgtctctttctgcctgcctgtggctatag

SEQ ID NO: 300512 - DNA, 85 bp, Artificial Sequence
  ENSG00000132781_35 (sequence is synthesized)
caaagtacattctcaagggtggagattaccaagtacattgatcagttagcgtggggcagaaacaaatcacagtggtggaatgtga

SEQ ID NO: 300513 - DNA, 90 bp, Artificial Sequence
  ENSG00000132781_36 (sequence is synthesized)
tcttaagggtgggggggagattaccaagtacattgatcagttagcgtggggcagaaacaaatcacagtggtggaatgtgagatcttcagt

SEQ ID NO: 300514 - DNA, 89 bp, Artificial Sequence
  ENSG00000132781_37 (sequence is synthesized)
tagcttgggctcagaggcctgacaaggggtagaagagaaattctgtttttctgaagcctaatctcgaactcctgggctcaagtaatcct

SEQ ID NO: 300515 - DNA, 120 bp, Artificial Sequence
  ENSG00000132781_38 (sequence is synthesized)
aaagtgctgggattacaggcctgagccagcatgtccagctctatttgtttttaaataaaccgaactttggccagaaggagattctgttgaagggcaataaaggattactagagagaatgg

SEQ ID NO: 300516 - DNA, 120 bp, Artificial Sequence
  ENSG00000132781_39 (sequence is synthesized)
ggcaataaaggattactagagagaatggaatggggacagaggttgacttgttaatagttctctttggaatttgagtgatcctgaggtacacaatacctgtgaaagggtttgttcaggtgt

SEQ ID NO: 300517 - DNA, 120 bp, Artificial Sequence
  ENSG00000132781_40 (sequence is synthesized)
ggttacatgttagtcttattgggaggggaagaaaaaacaagtattctttttagtgagtttggactttaggcagataaagagttccagagaacaactttatcctggctttgggagagtctg

SEQ ID NO: 300518 - DNA, 120 bp, Artificial Sequence
  ENSG00000132781_41 (sequence is synthesized)
cctggctttgggagagtctggggtggaaggatcagagagaccttgcggcttcttgagttcagcatgtcagagggccatattttggggtattggtttcttttcttttctttttttttgaga

SEQ ID NO: 300519 - DNA, 65 bp, Artificial Sequence
  ENSG00000132781_42 (sequence is synthesized)
tgctctgtctttgttgcccaggcgcacgtctggctaatttttttggatttttagtagagatgggg

SEQ ID NO: 300520 - DNA, 79 bp, Artificial Sequence
  ENSG00000132781_43 (sequence is synthesized)
ctgccttagcctcccggggtattagtttctgagttccaacagttagacgggattggaggagcaggaccctgaagaggag

SEQ ID NO: 300521 - DNA, 120 bp, Artificial Sequence
  ENSG00000132781_44 (sequence is synthesized)
ggacctgatttggacatttcagtcaagacttgaaaaatgataaggtgttaggtaaaagcataaaagagtccaaacagaggaaatggattgtgtgaggccccaaggtgggcagacacactt

SEQ ID NO: 300522 - DNA, 120 bp, Artificial Sequence
  ENSG00000132781_45 (sequence is synthesized)
cccggatcactggacctgcaaggctgtagtaagaggactgccttctaagagcaagggtgtggcagccaaatccctccaatggcctataaggccatcatgaggaagccacgagcagccgtg

SEQ ID NO: 300523 - DNA, 120 bp, Artificial Sequence
  ENSG00000132792_0 (sequence is synthesized)
gcactttacggcagtgtggctggagccgcggctgacgggcccgcggtctgggcgtgagtgcagggaagtggagtatttgctgggccgggtaccatggacgtgggcgaacttctgagctac

SEQ ID NO: 300524 - DNA, 120 bp, Artificial Sequence
  ENSG00000132792_1 (sequence is synthesized)
cagcccaataggggcacaaaacgtccccgggatgatgaagaggaggagcagaagatgcgtcggaaacaaactggtactcgagaacgcggccgctatcgggaagaagaaatgactgtggtg

SEQ ID NO: 300525 - DNA, 120 bp, Artificial Sequence
  ENSG00000132792_2 (sequence is synthesized)
gaggaagcggatgatgacaaaaaaaggctgctgcagattattgacagagatggggaagaggaagaggaagaggaggagccattggatgaaagctcagtgaagaaaatgatcctcacattt

SEQ ID NO: 300526 - DNA, 120 bp, Artificial Sequence
  ENSG00000132792_3 (sequence is synthesized)
gaaaagagatcatataaaaaccaagaattgcggattaagtttccagacaatccagagaagttcatggaatccgagctggacctaaatgacatcattcaggagatgcacgtggtggccacc

SEQ ID NO: 300527 - DNA, 120 bp, Artificial Sequence
  ENSG00000132792_4 (sequence is synthesized)
atgccagacctgtaccaccttctggtggagctgaatgctgtacagtcgcttctcggcttgctcggacacgataatacagatgtgtccatagctgtggtcgatttgcttcaggaattaaca

SEQ ID NO: 300528 - DNA, 120 bp, Artificial Sequence
  ENSG00000132792_5 (sequence is synthesized)
gatatagacaccctccatgagagtgaagagggagcagaagtgctcatcgatgctctggtggatgggcaggtggtagcactgctggtacagaatctggagcgcctggatgagtctgtgaaa

SEQ ID NO: 300529 - DNA, 120 bp, Artificial Sequence
  ENSG00000132792_6 (sequence is synthesized)
gaggaggcagatggcgtccacaacactctggctattgtggaaaacatggctgagttccggcctgagatgtgtacagagggtgcccagcagggtcttctacagtggctgttgaagaggctg

SEQ ID NO: 300530 - DNA, 120 bp, Artificial Sequence
  ENSG00000132792_7 (sequence is synthesized)
cttggggagctggatggaatcgatgtgcttcttcagcagttatccgtgtttaaaagacacaatcccagcacggctgaggagcaggagatgatggagaatctgtttgattccctctgctcc

SEQ ID NO: 300531 - DNA, 120 bp, Artificial Sequence
  ENSG00000132792_8 (sequence is synthesized)
tgtctaatgcttagttccaatcgtgagcgcttcctgaagggcgagggtcttcagctgatgaatctcatgctcagggaaaagaagatctcccggagcagtgccctgaaagtgctggaccat

SEQ ID NO: 300532 - DNA, 120 bp, Artificial Sequence
  ENSG00000132792_9 (sequence is synthesized)
gccatgattggccccgaaggcacagacaactgccataagtttgttgacattcttggcttacgaaccatctttcccctctttatgaaatctcccaggaagatcaagaaagtgggaaccact

SEQ ID NO: 300533 - DNA, 120 bp, Artificial Sequence
  ENSG00000132792_10 (sequence is synthesized)
gagaaggaacatgaagagcatgtctgttcgatcctggcttccctcctgcggaacctgagagggcagcagcggacccggcttctgaataaattcactgaaaatgacagtgagaaggttgac

SEQ ID NO: 300534 - DNA, 120 bp, Artificial Sequence
  ENSG00000132792_11 (sequence is synthesized)
agactaatggagttgcattttaaatatctgggtgcaatgcaggtggcggacaagaagattgaaggggaaaaacacgacatggtccggcgaggagagatcatcgacaatgacaccgaggag

SEQ ID NO: 300535 - DNA, 120 bp, Artificial Sequence
  ENSG00000132792_12 (sequence is synthesized)
gagttctacctccggcgcctggatgcggggctctttgttctccagcacatctgctacatcatggccgagatctgcaatgccaatgtcccccagattcgccagagggttcaccagatccta

SEQ ID NO: 300536 - DNA, 120 bp, Artificial Sequence
  ENSG00000132792_13 (sequence is synthesized)
aacatgcgaggaagctccatcaaaattgtcaggcatatcatcaaggagtatgcagagaacatcggggacggccggagcccggagttccgggagaacgagcaaaagcgcatcctgggcttg

SEQ ID NO: 300537 - DNA, 120 bp, Artificial Sequence
  ENSG00000132792_14 (sequence is synthesized)
ctggagaacttctagaggcaccttggccctgcgcatcatggactctctcagcttccctcccaggatcagtttctacacaactctgtgtggcttttggacaaattaaagctagttttggta

SEQ ID NO: 300538 - DNA, 120 bp, Artificial Sequence
  ENSG00000132792_15 (sequence is synthesized)
cgtgaaaaatttgtcctggggaaggaagcaagaccccttaacatttttctcatttctcctatttccccataggcaaagatgccttttgatgccaacaaactgtattgcagtgaagtgctg

SEQ ID NO: 300539 - DNA, 120 bp, Artificial Sequence
  ENSG00000132792_16 (sequence is synthesized)
aaatttttcttcaggaaacggttgttaacaatttactgttgtacagctgtaactgcccaaaacaccttagcatgaataaacaatttcatggcagtcatgacttaaatttttaatcttttt

SEQ ID NO: 300540 - DNA, 120 bp, Artificial Sequence
  ENSG00000132792_17 (sequence is synthesized)
taactcttcatttatcaaccaagaccatatatggctggttatgttcccagcaagcacaggtcatctttgcttcatcctcctctgtgaaaacataaactgtagggattttaattcaatcag

SEQ ID NO: 300541 - DNA, 120 bp, Artificial Sequence
  ENSG00000132792_18 (sequence is synthesized)
agcctggtttgttgtaaccttaagaggcagaggatgtgagaaaacagcttgtgcctcatcctttcaaccgtgagaagcagcttcagagtttattctggcgctctgcatcactgctgctgg

SEQ ID NO: 300542 - DNA, 120 bp, Artificial Sequence
  ENSG00000132792_19 (sequence is synthesized)
tgagggcttgtcagcgcttctgtgcctcatctgcccccttgagaggctggagcccagctatcggttggctgcagaatggattctgatctgtgaagagcatatcttgggggtggggagcac

SEQ ID NO: 300543 - DNA, 120 bp, Artificial Sequence
  ENSG00000132792_20 (sequence is synthesized)
acacctcacatggttttggagggttactctaaatgcagtcggaggcagcagaaggtggaatccagcagctgctgccttttcaaaataatgctttttaaacactttttcctttaaagtaat

SEQ ID NO: 300544 - DNA, 120 bp, Artificial Sequence
  ENSG00000132792_21 (sequence is synthesized)
tcattaaacgtgtttagagctcctttcttgtgaaccttttagagtgtttctatggaaaaataaaaccaaaggtacatttaaagatattttcttaaggtattgctaaaaaatccatttttg

SEQ ID NO: 300545 - DNA, 120 bp, Artificial Sequence
  ENSG00000132792_22 (sequence is synthesized)
tggactgctttaagccagatttactcagttggcccaaaggaacaaggaggaataaaagggaaaaaaacaaaccacaacaacgatcacatggcaccaaattgataaatattctgtttttgt

SEQ ID NO: 300546 - DNA, 120 bp, Artificial Sequence
  ENSG00000132792_23 (sequence is synthesized)
atgtcttttgccatgttcttaatttgagtggtcagttgagtcccttctaaagtttttttggtagatcactgttatttactgggttcttcctttgtatgctaagtgtgttggatgctaata

SEQ ID NO: 300547 - DNA, 120 bp, Artificial Sequence
  ENSG00000132792_24 (sequence is synthesized)
aaaaataataactccagtttaaagcaaaaactctcaaattaccaccctcccccaccatggtgtgtgtggaaagtgccttgggaacagtatgctcaggaaacaccactgattggagccctg

SEQ ID NO: 300548 - DNA, 120 bp, Artificial Sequence
  ENSG00000132792_25 (sequence is synthesized)
agaaggtgtgggtcatctctggcttgggggtgtggggagtggagatgggtaagcttttgacagacatggagattagcatgcatttcaggtttatttttgtagtctctccctttgcagtgg

SEQ ID NO: 300549 - DNA, 120 bp, Artificial Sequence
  ENSG00000132792_26 (sequence is synthesized)
aaattgccattcctcctactccggatggaagctgatgtggtcttgctggctgcccatgtagtcactacaaatttatcaagaaaaccaggagaacttacagagttgtcaagtgagttttgt

SEQ ID NO: 300550 - DNA, 120 bp, Artificial Sequence
  ENSG00000132792_27 (sequence is synthesized)
gaagaattactgtgggaattcggaaaatacggaggagacaggttttttagaccaacagggatcaactgaacttgagtagtctgggtctgagaatactaaagtggaacaaactgactgaga

SEQ ID NO: 300551 - DNA, 120 bp, Artificial Sequence
  ENSG00000132792_28 (sequence is synthesized)
gggaagagtgctgtggtgagtgagggattttgccatggagaaggagaaggacccatagcagtttgtcaggttcatggaatccgagctggacctaaatgacatcattcaggagatgcacgt

SEQ ID NO: 300552 - DNA, 120 bp, Artificial Sequence
  ENSG00000132793_0 (sequence is synthesized)
agtccaggagctccagtgggcagctccccagcaccagccatgaactacgtggggcagctggcggagacggtgtttgggacggtgaaggagctgtaccggggcctgaacccagccacactg

SEQ ID NO: 300553 - DNA, 120 bp, Artificial Sequence
  ENSG00000132793_1 (sequence is synthesized)
agcggcggcattgacgtgctggtggtgaagcaggtggacggctcgttccggtgctcacccttccacgtgcgttttggcaagctgggcgtcctgcggtcgcgggagaaggtggtagacatt

SEQ ID NO: 300554 - DNA, 120 bp, Artificial Sequence
  ENSG00000132793_2 (sequence is synthesized)
gagctcaatggggagcctgtggacttgcacatgaagcttggggacagcggggaggccttctttgttcaggagctggagagcgatgatgaacatgtgcctcccggcctgtgcacctcaccc

SEQ ID NO: 300555 - DNA, 120 bp, Artificial Sequence
  ENSG00000132793_3 (sequence is synthesized)
atcccttgggggggtctgtctggcttcccctcggactcccagctgggcactgccagtgagcctgagggcctcgtcatggcaggcacggcctccactgggcggaggaagaggcgtcgcagg

SEQ ID NO: 300556 - DNA, 120 bp, Artificial Sequence
  ENSG00000132793_4 (sequence is synthesized)
aggaaacccaagcagaaagaggatgcagtggcaactgattctagtccagaggaactggaggcaggcgctgagagtgagctatccctgccggaaaagctgaggccagagcccccaggcagt

SEQ ID NO: 300557 - DNA, 120 bp, Artificial Sequence
  ENSG00000132793_5 (sequence is synthesized)
gtccagttggaagagaagtcttcactgcagcccaaagacatctacccctactcggatggcgagtggcccccccaggccagcctctcagcaggtgagctaacatcccctaagagcgactcg

SEQ ID NO: 300558 - DNA, 120 bp, Artificial Sequence
  ENSG00000132793_6 (sequence is synthesized)
gagctggaggtgcggaccccggagcccagtcccctaagagccgagtcccacatgcagtgggcctgggggaggctgcctaaggtggccagagctgagcggcccgagtcctcagtggtcctt

SEQ ID NO: 300559 - DNA, 120 bp, Artificial Sequence
  ENSG00000132793_7 (sequence is synthesized)
gaaggcagagctggggcaacctctcctcctcggggaggacccagcactccctctacctctgtggctggcggcgtggaccctttgggactcccaatccagcaaacagaggctggtgccgac

SEQ ID NO: 300560 - DNA, 120 bp, Artificial Sequence
  ENSG00000132793_8 (sequence is synthesized)
cttcagcctgacacagaggatcccactctagtgggtccccctctccacaccccagagacagaggaaagcaagactcagagctctggggacatgggcctccctcctgcctccaagtcatgg

SEQ ID NO: 300561 - DNA, 120 bp, Artificial Sequence
  ENSG00000132793_9 (sequence is synthesized)
agctgggccactctggaggttccagttcccaccgggcagccagagagggtctccagggggaaaggctccccaaagagaagccagcacctgggccccagtgacatctacctggatgacttg

SEQ ID NO: 300562 - DNA, 120 bp, Artificial Sequence
  ENSG00000132793_10 (sequence is synthesized)
ccctccctggactctgagaatgcagcgctttacttcccccaaagtgactctgggctgggggccagaagatggagtgaacccagcagtcagaagtccctgagggaccccaaccctgaacat

SEQ ID NO: 300563 - DNA, 120 bp, Artificial Sequence
  ENSG00000132793_11 (sequence is synthesized)
gaacctgaacccactctggacacagtggatacaatagcactgtccctctgtggtggactggctgacagccgggacatctccctagagaaattcaaccagcacagcgtctcttaccaggac

SEQ ID NO: 300564 - DNA, 120 bp, Artificial Sequence
  ENSG00000132793_12 (sequence is synthesized)
ctcaccaaaaaccccggacttttggatgacccaaacctagtggtgaaaatcaatggaaagcattataactgggctgtggctgcccccatgatcctctccctgcaagccttccagaaaaac

SEQ ID NO: 300565 - DNA, 120 bp, Artificial Sequence
  ENSG00000132793_13 (sequence is synthesized)
ttgcccaagagcaccatggacaagctggagagggagaagatgccccggaagggtgggcgatggtggttttcctggcgacgcagggacttcctggccgaggagcgcagtgcccagaaggag

SEQ ID NO: 300566 - DNA, 120 bp, Artificial Sequence
  ENSG00000132793_14 (sequence is synthesized)
aagactgcagccaaggagcagcagggggagaagacagaagtcctgagcagtgatgacgatgccccagacagccctgtgatcctggagatcccctccttgccaccctccactccaccctcc

SEQ ID NO: 300567 - DNA, 120 bp, Artificial Sequence
  ENSG00000132793_15 (sequence is synthesized)
actcctacctacaagaagtccctccgcctctcctccgatcagatccggcgcctgaacctgcaagaaggtgccaatgatgtggtcttcagcgtgaccactcagtaccagggcacctgccgc

SEQ ID NO: 300568 - DNA, 120 bp, Artificial Sequence
  ENSG00000132793_16 (sequence is synthesized)
tgcaaggccaccatctacctgtggaaatgggacgacaaggtggtcatctctgacatcgacggcaccatcaccaagtcagatgctctgggccatatcctgccccagctggggaaagactgg

SEQ ID NO: 300569 - DNA, 120 bp, Artificial Sequence
  ENSG00000132793_17 (sequence is synthesized)
agttcctgtactgctcggcgcgggccattggcatggcggacctcaccaaggggtacctgcagtgggtgagcgaggggggctgtagcctccccaagggccccatccttctgtctcccagca

SEQ ID NO: 300570 - DNA, 120 bp, Artificial Sequence
  ENSG00000132793_18 (sequence is synthesized)
gcctcttctctgccctccacagagaggtgatcgagaagaaaccagaggtgttcaaggtcgcctgcctgagtgacatccagcagctgtttctgccccacggacagcccttctatgctgcct

SEQ ID NO: 300571 - DNA, 120 bp, Artificial Sequence
  ENSG00000132793_19 (sequence is synthesized)
ttgggaataggcccaatgatgtctttgcctaccggcaggtgggcctgcctgagtcacgcatcttcacagtcaacccccggggagagctcatccaggagctcataaagaaccacaaatcca

SEQ ID NO: 300572 - DNA, 120 bp, Artificial Sequence
  ENSG00000132793_20 (sequence is synthesized)
cgtatgagcggcttggtgaagtggtcgagctcctcttcccacctgtggcccgtggccccagcacagacctggccaaccctgaatacagtaacttctgctactggcgggagccactgcctg

SEQ ID NO: 300573 - DNA, 120 bp, Artificial Sequence
  ENSG00000132793_21 (sequence is synthesized)
ctgtggaccttgataccctggactgaacctgccctggctggctcctcctccctggcccggcccaggactggctaggtgtcctggggtataggagggtgggaattggagtgtcatggggca

SEQ ID NO: 300574 - DNA, 120 bp, Artificial Sequence
  ENSG00000132793_22 (sequence is synthesized)
aacccactgaaggggaaggaggaggctgcaggttggttggcagctagagagactcccccatcttccccgtcatatttttgccagctaagctgcagctgctccaggcgtcagtgtggcact

SEQ ID NO: 300575 - DNA, 76 bp, Artificial Sequence
  ENSG00000132793_23 (sequence is synthesized)
ccagctaagctgcagctgctccaggcgtcagtgtggcactgtcctggggcaattagcttgtcatctgggcccttgc

SEQ ID NO: 300576 - DNA, 120 bp, Artificial Sequence
  ENSG00000132793_24 (sequence is synthesized)
gcagggttttctatgcccttgatatctgtctccctgtcaacctgggaccttgctgtaagtcttgataggacagggagaagagggaggccctaccgaggctcgaggcttcagtgaagggtg

SEQ ID NO: 300577 - DNA, 120 bp, Artificial Sequence
  ENSG00000132793_25 (sequence is synthesized)
acagcagtgggagtgtggtacagcctctggaaggacacagtgttctccccgccccttgtctgggagccaggactgtaccctccgaagccagacatcactgccaacatatcccccttgctg

SEQ ID NO: 300578 - DNA, 120 bp, Artificial Sequence
  ENSG00000132793_26 (sequence is synthesized)
gtgccctggcatctcagcacatgacacacacccacacctgcaggctgtggttccggcttggcctgctccccgtccggctgctgccgctgcctctctccagacctcgcttaaggacagtcc

SEQ ID NO: 300579 - DNA, 120 bp, Artificial Sequence
  ENSG00000132793_27 (sequence is synthesized)
caaactcagctggggcaggtgttggcctgaaagtcctcccccagcctctgctggccagcttggtgctcacagctgctgggtaagctcttgcctaaggagctgtgggaagcagggctgatg

SEQ ID NO: 300580 - DNA, 120 bp, Artificial Sequence
  ENSG00000132793_28 (sequence is synthesized)
ccccagcaacctctcctcccactgtctttgaagaaagtagctttagaccggctaaaagctttaatccagagcctgccctactctgatagtaccagagtggagggcagaataccaaatgtc

SEQ ID NO: 300581 - DNA, 120 bp, Artificial Sequence
  ENSG00000132793_29 (sequence is synthesized)
caggaaccaaaggcagggctgtggggacctgaagagcagcacagtggggcccgtgctgctgtgggggaaactgaggctgggagcctcagcagagaccggtgtcaagagtctctgggaact

SEQ ID NO: 300582 - DNA, 120 bp, Artificial Sequence
  ENSG00000132793_30 (sequence is synthesized)
gcataggcctgaggaacatgcattttcaagttgtccattgatggtttcgtacctgaatttctcaccttttgtgaacatcttgggagggtgggggttttgcaggggtgttaaaagcaaggc

SEQ ID NO: 300583 - DNA, 120 bp, Artificial Sequence
  ENSG00000132793_31 (sequence is synthesized)
ttggagcccctttcctccagctggtggctccttctcagggcctggcctcattcaggccactttgtagagaaatgccctgacctcgcaggaaggatttccccacccccaagtggaaggaag

SEQ ID NO: 300584 - DNA, 120 bp, Artificial Sequence
  ENSG00000132793_32 (sequence is synthesized)
atttggagtggggggtctctaaacagattgcctggattccgttctttcctggggttctacagctgcctaagccctcaccttgggggaggatcaaagggaataaagagaactcttggctga

SEQ ID NO: 300585 - DNA, 120 bp, Artificial Sequence
  ENSG00000132793_33 (sequence is synthesized)
agcctccccaagggccccatccttctgtctcccagcagcctcttctctgccctccacaggtaaccacccctacacatacaagcccgtggccccctggtggggaaaggcaggcccactgcc

SEQ ID NO: 300586 - DNA, 120 bp, Artificial Sequence
  ENSG00000132793_34 (sequence is synthesized)
aggccagccttagcaggctggcattaagctctcaggtggcaaggagggtggggtcagaccccccatcacctgagcctgccatcccctctggcttcttccctactttggcccccttccctg

SEQ ID NO: 300587 - DNA, 120 bp, Artificial Sequence
  ENSG00000132801_0 (sequence is synthesized)
gtcagatagcaaatacacccccttcctcttgtaacccggtcaggcctagggttcctccctgagttccagaataggccacccagttggggcggacccttaaggcattctgggcccacgcct

SEQ ID NO: 300588 - DNA, 120 bp, Artificial Sequence
  ENSG00000132801_1 (sequence is synthesized)
gcctataaaccctcatagtgtgacctttgacccctggtgtgatcttgggcccgggctgggaccagcccctagtgtgggttgtgggggcggccatggagctgggcagctgcttcaagacct

SEQ ID NO: 300589 - DNA, 120 bp, Artificial Sequence
  ENSG00000132801_2 (sequence is synthesized)
atgaggacttcaaggagtgcttcagcgcctacaaaagggagaacaggtgctccttcattctcagggactgcgtctccgtccgcttccacaacctcaaccatggcacctccatccgcgaag

SEQ ID NO: 300590 - DNA, 120 bp, Artificial Sequence
  ENSG00000132801_3 (sequence is synthesized)
acatcctgtatgtgcaggtgaaatttgtctgcattcggacccaatcaaacaggaagagaacgcgggaggcagacatgtgcccagcgtacttgctcctaaggtacaacgagagactagata

SEQ ID NO: 300591 - DNA, 120 bp, Artificial Sequence
  ENSG00000132801_4 (sequence is synthesized)
gactatttatcagtgaactaaacacacagcacatacatggtgactctaaagtggctagtcctggaggagacaccactggcaaatctcaaaagacaatgtgcctgcagagactccagcctg

SEQ ID NO: 300592 - DNA, 120 bp, Artificial Sequence
  ENSG00000132801_5 (sequence is synthesized)
tgcagcccacaaccaaaaaagaccttgacactgccgagaagtccctggttgagccatcgttttgcctagataaggtacaagtgtcctcaaagccagagcaggaaggcatcactccttctg

SEQ ID NO: 300593 - DNA, 120 bp, Artificial Sequence
  ENSG00000132801_6 (sequence is synthesized)
acctggccaagatagcaaaagtgatgaagaactttcttaaggtagatgagggttccatggcttccttcagtgtgggtgacagccagcacctggaccggctcagcttccagagcagtaaga

SEQ ID NO: 300594 - DNA, 120 bp, Artificial Sequence
  ENSG00000132801_7 (sequence is synthesized)
tgaccgacctgttcatccgcttcccagagaatctcttgctacaccgggtggagaacacccagggccacatcctctatgctttcttggtggagaacaaggaacgagaaagtcgagtggtgc

SEQ ID NO: 300595 - DNA, 120 bp, Artificial Sequence
  ENSG00000132801_8 (sequence is synthesized)
actttgctgtgctcaaggcggagacagtcacctctgtggccaagatgctgagcatcttcacagagttcaactccgattggcccaaggtcaaggtggtctttgtggacccttcattccatt

SEQ ID NO: 300596 - DNA, 120 bp, Artificial Sequence
  ENSG00000132801_9 (sequence is synthesized)
accgggctatcctgcaggagatctttcctgctgcccgcatcctcctttccatctaccacacaacccgactcttggagaagaagttgcatcgtagttcagcaaatccatcctttaaaaggc

SEQ ID NO: 300597 - DNA, 120 bp, Artificial Sequence
  ENSG00000132801_10 (sequence is synthesized)
tcatgaaggaagccctgcgggaggccgtgtttgtcacttctgaagccagcctgaaaaatctctgccagatgtcccaggccgtactggatgaggatctcttcaacttcctgcaggcccact

SEQ ID NO: 300598 - DNA, 120 bp, Artificial Sequence
  ENSG00000132801_11 (sequence is synthesized)
gctgtggtacatgcatgttaggaagggcctgcttgcgtgtaacacctacatggacagcctagacattgtcaccagcaaggtgtcaagcctctttcgggaacagcagtcgctgctggactg

SEQ ID NO: 300599 - DNA, 120 bp, Artificial Sequence
  ENSG00000132801_12 (sequence is synthesized)
catcctctgctttgtggattacatagacttctttaataccaaaggcttgaagaacttgcccacacctcctcccaaattaaagagagctcggccggcaagcatgccactgaagtccaagaa

SEQ ID NO: 300600 - DNA, 120 bp, Artificial Sequence
  ENSG00000132801_13 (sequence is synthesized)
ggcttttggaatctgtggagagagccttaccagcctccctgcagaagagaccaagccagacgcacagcaggtacaggtacagcagcagtcacaagtgccgccctcgcaggttggcatgct

SEQ ID NO: 300601 - DNA, 120 bp, Artificial Sequence
  ENSG00000132801_14 (sequence is synthesized)
ggacaccttgcaccagagtggctctgaactagcctacaagctgtgccacaatgagtgggaggtggtacagaactccacccacctggtggacatggctggctcttcagtggacgttcagct

SEQ ID NO: 300602 - DNA, 120 bp, Artificial Sequence
  ENSG00000132801_15 (sequence is synthesized)
gctagaggactctcaccaggttagcaaagatggctgtagctgcagctgttcctttcaacaatggtaccacctgccatgccgacacattttggctctgctgcacaccagccagcagccggt

SEQ ID NO: 300603 - DNA, 120 bp, Artificial Sequence
  ENSG00000132801_16 (sequence is synthesized)
tggtgaagccatggtgtgccgccggtggcagaagaagtaccagtacctccttgggcccaatggggagctccaggatcgtggtatggtcccaaacacaggccagcctgagaagcaaggacg

SEQ ID NO: 300604 - DNA, 120 bp, Artificial Sequence
  ENSG00000132801_17 (sequence is synthesized)
gaacgacatgattcaggacctaagcagggagttagcaaacctgctcatgcagaccgaggggccagagctggaggaacgctactccaccctgcgcaagattgtggatatctgggctggccc

SEQ ID NO: 300605 - DNA, 120 bp, Artificial Sequence
  ENSG00000132801_18 (sequence is synthesized)
ctcccagccatctgagctctttcagcagccaggagactttaaggacgtgggccgcctccctttcctctggggaaagcaagaagaaggggagggattccctcctgctacagctgtgatgca

SEQ ID NO: 300606 - DNA, 120 bp, Artificial Sequence
  ENSG00000132801_19 (sequence is synthesized)
ttattgaagcactttagctgaagcattggaccacaaacacttctccttggaagtgtgagagtttaaagtgggcaggacatactagggtttagcattttagccaatgtcttcctaggtggg

SEQ ID NO: 300607 - DNA, 120 bp, Artificial Sequence
  ENSG00000132801_20 (sequence is synthesized)
gctaggaatattgttacagtagagaggaagggaactccactgtgtgacagtcctttcaatctgccccttttcagccctacttttggcattccttgggagcctcagttgttgttcaaggcc

SEQ ID NO: 300608 - DNA, 120 bp, Artificial Sequence
  ENSG00000132801_21 (sequence is synthesized)
aaagttatctccgtgctgcaaggtcaccctcttcctcccccagcccctgagatcagatcttatttgctctgcaaagatgaatccctgcctcaggttagggtgagacaaaatcggtctggt

SEQ ID NO: 300609 - DNA, 120 bp, Artificial Sequence
  ENSG00000132801_22 (sequence is synthesized)
aaaagggcctgttttcagggacaaagggaatgaggatgatctttggctgttgctgctctttatgaagaatcttatttgtaactttttattcatattaaagttgtttttaataaaattaaa

SEQ ID NO: 300610 - DNA, 80 bp, Artificial Sequence
  ENSG00000132819_0 (sequence is synthesized)
gcagagtccccgcagcgccggtcgggagcgcagcgcggcgcacgtcggcgcgcacggcgggacgggcgccggagtggtcg

SEQ ID NO: 300611 - DNA, 120 bp, Artificial Sequence
  ENSG00000132819_1 (sequence is synthesized)
gccgcccccggcgccatgcacggctcgcagaaggacaccacgttcaccaagatcttcgtgggcggcctgccgtaccacactaccgacgcctcgctcaggaagtacttcgagggcttcggc

SEQ ID NO: 300612 - DNA, 120 bp, Artificial Sequence
  ENSG00000132819_2 (sequence is synthesized)
gacatcgaggaggccgtggtcatcaccgaccgccagacgggcaagtcccgcggctacggcttcgtgaccatggccgaccgggcggcagctgagagggcttgcaaagacccgaaccccatc

SEQ ID NO: 300613 - DNA, 120 bp, Artificial Sequence
  ENSG00000132819_3 (sequence is synthesized)
atcgacggccgcaaggccaacgtgaacctggcatatctgggcgccaagccgcggagcctccagacgggctttgccattggggtgcagcagctgcaccccaccttgatccagcggacttac

SEQ ID NO: 300614 - DNA, 120 bp, Artificial Sequence
  ENSG00000132819_4 (sequence is synthesized)
gggctgaccccgcactacatctacccaccagccatcgtgcagcccagcgtggtgatcccagccgcccctgtcccgtcgctgtcctcgccctacattgagtacacgccggccagcccggcc

SEQ ID NO: 300615 - DNA, 120 bp, Artificial Sequence
  ENSG00000132819_5 (sequence is synthesized)
tacgcccagtacccaccggccacctatgaccagtacccatacgccgcctcgcctgccacggctgccagcttcgtgggctacagctaccctgccgccgtgccccaggccctctcagccgca

SEQ ID NO: 300616 - DNA, 120 bp, Artificial Sequence
  ENSG00000132819_6 (sequence is synthesized)
gcacccgcgggcaccactttcgtgcagtaccaggcgccgcagctgcagcctgacaggatgcagtgaggggcgttcctgccccgaggactgtggcattgtcaccttcacagcagacagagc

SEQ ID NO: 300617 - DNA, 120 bp, Artificial Sequence
  ENSG00000132819_7 (sequence is synthesized)
tgccaggccatgatgggctggcgacagcccggctgagcttcagtgaggtgccaccagcacccgtgcctccgaagaccgctcgggcattccgcctgcgccctgggacagcggagagacggc

SEQ ID NO: 300618 - DNA, 120 bp, Artificial Sequence
  ENSG00000132819_8 (sequence is synthesized)
ccttctcctgcctctccacactccaggttccctcaggcttgtgtccccactgctgcatcgtggcggggtgtcacagaccctctgcagcccctggctgccctggactgtgcagagatgcct

SEQ ID NO: 300619 - DNA, 120 bp, Artificial Sequence
  ENSG00000132819_9 (sequence is synthesized)
gactccagggaaacctgaaagcaagaagttaatggactgtttattgtaacttgatcctcccgagctgtgagcgcagtctgaggtgtgaggacacggcctcctgttggagtcccattttct

SEQ ID NO: 300620 - DNA, 120 bp, Artificial Sequence
  ENSG00000132819_10 (sequence is synthesized)
ccatcagggcacgtgggcggcttcctcaagcccggaggagctcccaggcgcacaggggccgccggtaacaggggccgccggccaaaggcccctttccagtcatagcactgaagttgcaac

SEQ ID NO: 300621 - DNA, 120 bp, Artificial Sequence
  ENSG00000132819_11 (sequence is synthesized)
ttttttcttgtaattgttttgctactaagataatttcagaagttcagtctattttttcagcggatactgccgccaccaagaatccaaaacctatttttgacttggagagacttgcttttg

SEQ ID NO: 300622 - DNA, 120 bp, Artificial Sequence
  ENSG00000132819_12 (sequence is synthesized)
ttggttccgcccgtggagacgacgatagtgtttctgtataataaagtgtctgccggctcgcgggccaggatcctctcggtgggatgggcaccacagacaggaggcccctcaggcccgtgc

SEQ ID NO: 300623 - DNA, 120 bp, Artificial Sequence
  ENSG00000132819_13 (sequence is synthesized)
gggccactgtctgctgccgcctgccggggtggcagagtgagttgtctcaggaccccgtcactgcgacgttgacactcctctcccttcccttcctccccaactccccaaacactgtggaag

SEQ ID NO: 300624 - DNA, 120 bp, Artificial Sequence
  ENSG00000132819_14 (sequence is synthesized)
gggagaaggaagtgatccacagcattcaggccacttggggtctagaccatggtggtgccagcctggggggggcagtggccctcagctctgcccgctggagcggttgagtgcagaagggtg

SEQ ID NO: 300625 - DNA, 120 bp, Artificial Sequence
  ENSG00000132819_15 (sequence is synthesized)
cgcctcttccctctacccccgcaccacctgctgtgtgccagcctgagacggttcctgcctgtcttgggggttggtggagggtggaggcagttctgccagccgtggcagggctgctatggg

SEQ ID NO: 300626 - DNA, 120 bp, Artificial Sequence
  ENSG00000132819_16 (sequence is synthesized)
gcatccagggctgtgggggtctggaggaggggacatgaggtgagaggtatcctggccgagggcggggggcagcggggggtctccctccggacctacctcagggagctgagcgtgcaggcg

SEQ ID NO: 300627 - DNA, 120 bp, Artificial Sequence
  ENSG00000132819_17 (sequence is synthesized)
ctccagggcaggcctgggacagagtcaaggctcagagaataaaggtagctaatctcatcataatatttttattagaatgttctgatgataaaaataaaacttgttttctttaaagaaaaa

SEQ ID NO: 300628 - DNA, 120 bp, Artificial Sequence
  ENSG00000132819_18 (sequence is synthesized)
ataaacatcagcttaagtaaaaacgtcttgaagacactttcctgcttaccttccaagcatagcgtcgcaaactccttctcagaggaaagtctcggccctcactggtgggcaagtccaggc

SEQ ID NO: 300629 - DNA, 120 bp, Artificial Sequence
  ENSG00000132819_19 (sequence is synthesized)
ggccccccaagctcccttcggggttcatttttgccctatccccgcaggggattatttttgtccttgaaggccacatttcccaggccttgaactttgacgggaggagctggaatccaggag

SEQ ID NO: 300630 - DNA, 80 bp, Artificial Sequence
  ENSG00000132821_0 (sequence is synthesized)
gcgagggctgggagctgggccgggtccggggacagcgggcgaggggcagctgccggagccgggcagccaggccgctcagg

SEQ ID NO: 300631 - DNA, 120 bp, Artificial Sequence
  ENSG00000132821_1 (sequence is synthesized)
gggacagctggcgccggttctgcggtctccggggcccagatgtgaggcggcggcgcccccggcccgagagcgcacgatgggggccccgctcgccgtagcgctgggcgccctccactacct

SEQ ID NO: 300632 - DNA, 120 bp, Artificial Sequence
  ENSG00000132821_2 (sequence is synthesized)
ccgtagcgctgggcgccctccactacctggcacttttcctgcaactcggcggcgccacgcggcccgccggccacgcgccctgggacaaccacgtctccggccacgccctgttcacagaga

SEQ ID NO: 300633 - DNA, 120 bp, Artificial Sequence
  ENSG00000132821_3 (sequence is synthesized)
caccccatgacatgacagcacggacgggcgaggacgtggagatggcctgctccttccgcggcagcggctccccctcctactcgctggagatccagtggtggtatgtacggagccaccggg

SEQ ID NO: 300634 - DNA, 120 bp, Artificial Sequence
  ENSG00000132821_4 (sequence is synthesized)
actggaccgacaagcaggcgtgggcctcgaaccagctaaaagcatctcagcaggaagacgcagggaaggaggcaaccaaaataagtgtggtcaaggtggtgggcagcaacatctcccaca

SEQ ID NO: 300635 - DNA, 120 bp, Artificial Sequence
  ENSG00000132821_5 (sequence is synthesized)
agctgcgcctgtcccgggtgaagcccacggacgaaggcacctacgagtgccgcgtcatcgacttcagcgacggcaaggcccggcaccacaaggtcaaggcctacctgcgggtgcagccag

SEQ ID NO: 300636 - DNA, 120 bp, Artificial Sequence
  ENSG00000132821_6 (sequence is synthesized)
gggagaactccgtcctgcatctgcccgaagcccctcccgccgcgcccgccccgccgccccccaagccaggcaaggagctgaggaagcgctcggtggaccaggaggcctgcagcctctaga

SEQ ID NO: 300637 - DNA, 120 bp, Artificial Sequence
  ENSG00000132821_7 (sequence is synthesized)
ctgatgcccctgcccccgcccatccgcccccacgctgtacagagtgcatgaggagccgccggaccaccggggaccgactgcctgcgtccagccgcgccccatccccgaggccgcctgtgg

SEQ ID NO: 300638 - DNA, 120 bp, Artificial Sequence
  ENSG00000132821_8 (sequence is synthesized)
ctttccaccaccccttgctcagcatgtaagccccacccacccctgccctttcagacccctgcggtgacctggctcggagaaggtggccctgggcaccaaggggccaaccgccctgaacac

SEQ ID NO: 300639 - DNA, 120 bp, Artificial Sequence
  ENSG00000132821_9 (sequence is synthesized)
tggggcagggaccatgctggggcccggggccacccccttcctgtcaccagcttctgtggagtccagtgttttgctttgcttgcttgtcccccatcctgtcctgagccggggccccccagc

SEQ ID NO: 300640 - DNA, 120 bp, Artificial Sequence
  ENSG00000132821_10 (sequence is synthesized)
ctcgcctccctcctcctaccatccctcacttggacctgggggtgtggacagtgacccctccctgaatatggacttgaatcttctgagcagaactagggcctctcccctggtgaagaccca

SEQ ID NO: 300641 - DNA, 120 bp, Artificial Sequence
  ENSG00000132821_11 (sequence is synthesized)
gggaacccaggagggcccttctggggcagtggctctgcagggtcactcatggaggcctaggggaacagcgagatgccccaccacctcctggcgagtccttcctgttcagctccctgtgcg

SEQ ID NO: 300642 - DNA, 120 bp, Artificial Sequence
  ENSG00000132821_12 (sequence is synthesized)
accctccagggatgcaggggatccaggattctctgccctgtcacacggcgagtcagaagggaggggcctttccctcggacccatggccccaggcagagttttgcaccagcaggacccctt

SEQ ID NO: 300643 - DNA, 120 bp, Artificial Sequence
  ENSG00000132821_13 (sequence is synthesized)
tgagggccttcaaggctctcccaggagtccccctctgccggccccccaatgccccagctccctcttgggtcctgtgccaagtccgccccagggcctggggctgttgggagccaagggccc

SEQ ID NO: 300644 - DNA, 120 bp, Artificial Sequence
  ENSG00000132821_14 (sequence is synthesized)
cctggtactcagttccctcacgattcccgatcacgggcacacctgccccctggttatttgtaaatatttctattggacccaattctcctcggaattggctggcacctctggctgccgcag

SEQ ID NO: 300645 - DNA, 120 bp, Artificial Sequence
  ENSG00000132821_15 (sequence is synthesized)
ctcagtgatgacgtgggggaggtgggagaggccgagggctttgcctaggggtgggttgccctgtatacatgatccagtctgtgactaccagccaacctgaataaagcggttttaaaaaaa

SEQ ID NO: 300646 - DNA, 120 bp, Artificial Sequence
  ENSG00000132823_0 (sequence is synthesized)
agtcgggtgccgagatttgggagagacgctctgaactgactgccccgcatcaccggagcgtcccagctgcgaggagtgtaaacaggaacatcgataagtagtgtaaaaacttgcacaatg

SEQ ID NO: 300647 - DNA, 120 bp, Artificial Sequence
  ENSG00000132823_1 (sequence is synthesized)
aaatccgaagccaaggatggagaggaggagagtctacagactgctttcaaaaaattaagagtggatgcatcagggtctgtagcatctctgtctgttggagaaggcacaggtgtcagagca

SEQ ID NO: 300648 - DNA, 120 bp, Artificial Sequence
  ENSG00000132823_2 (sequence is synthesized)
ccagtcagaacagcaacagatgataccaaacctaaaaccacatgtgcatctaaagacagttggcacgggtctacaaggaagtcttcacgaggagcagtgagaactcagcgtcgtcgacgt

SEQ ID NO: 300649 - DNA, 120 bp, Artificial Sequence
  ENSG00000132823_3 (sequence is synthesized)
tctaagtctcctgtccttcatcctccaaagtttatacattgcagtacaatagcgtcttcttccagcagtcaactcaagcacaaaagccagactgactcacctgatggcagcagtgggctg

SEQ ID NO: 300650 - DNA, 120 bp, Artificial Sequence
  ENSG00000132823_4 (sequence is synthesized)
ggaatttcatcccctaaagagttcagtgcaggagaaagctctacttctctcgatgctaatcacacaggggcagtcgttgagcctttgagaacttctgttccaaggctcccatcagagagt

SEQ ID NO: 300651 - DNA, 120 bp, Artificial Sequence
  ENSG00000132823_5 (sequence is synthesized)
aagaaggaagactcctctgacgctacccaagtcccccaagcaagtctcaaagccagtgatctctctgactttcaatcagtttccaagctaaaccagggcaagccatgcacatgcataggc

SEQ ID NO: 300652 - DNA, 120 bp, Artificial Sequence
  ENSG00000132823_6 (sequence is synthesized)
aaggaatgccagtgtaagagatggcatgatatggaagtgtattccttttcaggcctgcagagtgtccctcccttggctccagaacgaagatccacacttgaggactactctcagtcgctg

SEQ ID NO: 300653 - DNA, 120 bp, Artificial Sequence
  ENSG00000132823_7 (sequence is synthesized)
cacgccagaactctgtctggctctccccgatcctgttctgagcaagctcgagtcttcgtggatgatgtgaccattgaggacctgtcaggctacatggagtattacttgtatattcccaag

SEQ ID NO: 300654 - DNA, 120 bp, Artificial Sequence
  ENSG00000132823_8 (sequence is synthesized)
tgaaggcttgtcaaagagatttagttaatggcagaccttgtggccactttgtgtgagaagacatctctttctgctcactgtgcttgcaataaaaacttttcttggcatctcagttaatct

SEQ ID NO: 300655 - DNA, 120 bp, Artificial Sequence
  ENSG00000132823_9 (sequence is synthesized)
tcattctttcaacttactctcttgagttcttacatacacttcaaggcgagcagatcaaagaaaaatcccccttatttagaaatgttcctgggggatgaagaaaccataattacttgagac

SEQ ID NO: 300656 - DNA, 120 bp, Artificial Sequence
  ENSG00000132823_10 (sequence is synthesized)
tggcagcagtgggtatatggtaaaagcctttgtaaaacagtgcatttttcagatttgtttaaggtttgctagccaaggaaagtaaaatgtgattttgtaactgcactaaacatttgtcat

SEQ ID NO: 300657 - DNA, 120 bp, Artificial Sequence
  ENSG00000132823_11 (sequence is synthesized)
gctgtagttgccagcccagaatattagaagttacaagactgatttaaaccgtctctgatttaatgcaagatatattgtgtctataaaggtttctcttgttattgttaagccagagatcta

SEQ ID NO: 300658 - DNA, 120 bp, Artificial Sequence
  ENSG00000132823_12 (sequence is synthesized)
aggtttagattcaatttgaataaactagctggcctgccctctattgtttgagagagttattaaccatcactaaataagcccctgctggtgctattcatcctaagacatgttacatgcagt

SEQ ID NO: 300659 - DNA, 120 bp, Artificial Sequence
  ENSG00000132823_13 (sequence is synthesized)
ttcaagtaagcagcttggaatgggctgcttcagttggagggagggggtgtaatatttgaaacgagtgtgtgtcttcaccatctccagcattttaaatatatggcggtttttttttttttt

SEQ ID NO: 300660 - DNA, 120 bp, Artificial Sequence
  ENSG00000132823_14 (sequence is synthesized)
ttttgttatcagttgtaatacaggtctcatacctcagtttcagatgttatagatggttacctctttgagctgccctgtcaccccagcaaccctaaaagagaattttgtacattctgtatc

SEQ ID NO: 300661 - DNA, 120 bp, Artificial Sequence
  ENSG00000132823_15 (sequence is synthesized)
ccacagatttggtcagccatttcaaaattccctccagtttggtaaaaaaaaaatctgtcttcggtttcagctggatgatgaatccttgtttttcaggtggctccaaaaagaatgttgcat

SEQ ID NO: 300662 - DNA, 120 bp, Artificial Sequence
  ENSG00000132823_16 (sequence is synthesized)
gtgttcagaccatcctgagcagagccaccaaatttagtgacagtgtctagccatgttagcaataatgttaacagaagcttttgtttaaattacaaaatacatttatactatttactaaaa

SEQ ID NO: 300663 - DNA, 120 bp, Artificial Sequence
  ENSG00000132823_17 (sequence is synthesized)
gaaagaactttgtgctttggctgcagcgctgcgagtataaagggatgagtgggttgcacggagaggctatgaagaaaaacacaaatggaagtatcaaccttactggtttctagaccaact

SEQ ID NO: 300664 - DNA, 120 bp, Artificial Sequence
  ENSG00000132824_0 (sequence is synthesized)
catccgtgcgtctgtggaaggctgcgtttccggcctgagaaaccgtcatgtttctggggagtcacctcagctggcagttaccaccgtgttagaaagcagcctcaggaccggccacctcca

SEQ ID NO: 300665 - DNA, 120 bp, Artificial Sequence
  ENSG00000132824_1 (sequence is synthesized)
tcactggcgtcaccatgggggctgtgctgggtgtcttctccctcgccagctgggttccatgcctctgcagcggtgcctcatgtttgctgtgtagttgctgtcctaacagtaagaattcca

SEQ ID NO: 300666 - DNA, 120 bp, Artificial Sequence
  ENSG00000132824_2 (sequence is synthesized)
cggtgactcgcctcatttatgctttcattctcctcctgagcactgtcgtatcctatatcatgcagagaaaagagatggaaacttacttgaagaagattcctggattttgtgaagggggat

SEQ ID NO: 300667 - DNA, 120 bp, Artificial Sequence
  ENSG00000132824_3 (sequence is synthesized)
ttaaaatccatgaggctgatataaatgcagataaagattgtgatgtgctggttggttataaagctgtgtatcggatcagctttgccatggccatctttttctttgtcttttctctgctca

SEQ ID NO: 300668 - DNA, 120 bp, Artificial Sequence
  ENSG00000132824_4 (sequence is synthesized)
tgttcaaagtaaaaacaagtaaagatctccgagcggcagtacacaatgggttttggttcttcaaaattgctgcccttattggaatcatggttggctctttctacatccctgggggctatt

SEQ ID NO: 300669 - DNA, 120 bp, Artificial Sequence
  ENSG00000132824_5 (sequence is synthesized)
tcagctcagtctggtttgttgttggcatgataggggccgccctcttcatcctcattcagctggtgctgctggtagattttgctcattcttggaatgaatcatgggtaaatcgaatggaag

SEQ ID NO: 300670 - DNA, 120 bp, Artificial Sequence
  ENSG00000132824_6 (sequence is synthesized)
aaggaaacccaaggttgtggtatgctgctttactgtctttcacaagcgccttttatatcctgtcaatcatctgtgtcgggctgctctatacatattacaccaaaccagatggctgcacag

SEQ ID NO: 300671 - DNA, 120 bp, Artificial Sequence
  ENSG00000132824_7 (sequence is synthesized)
ttctattatatcgatccacccaaaaattcaggaacaccagcctcgctccggcctcttgcagtcctccctcatcaccctctacactatgtacctcacctggtcagccatgtccaatgaacc

SEQ ID NO: 300672 - DNA, 120 bp, Artificial Sequence
  ENSG00000132824_8 (sequence is synthesized)
tgatcgttcctgcaatcccaacctgatgagctttattacacgcataactgcaccaaccctggctcctggaaattcaactgctgtggtccctacccctactccaccatcaaagagtgggtc

SEQ ID NO: 300673 - DNA, 120 bp, Artificial Sequence
  ENSG00000132824_9 (sequence is synthesized)
tttactggattcagataattttattggactgtttgtctttgttctctgcctcttgtattctagcatccgcacttccactaatagccaagtagacaagctgaccctgtcagggagtgacag

SEQ ID NO: 300674 - DNA, 120 bp, Artificial Sequence
  ENSG00000132824_10 (sequence is synthesized)
cgtcatccttggtgatacaactaccagtggtgccagtgatgaagaagatggacagcctcggcgggctgtggacaacgagaaagagggagtgcagtatagctactccttattccacctcat

SEQ ID NO: 300675 - DNA, 120 bp, Artificial Sequence
  ENSG00000132824_11 (sequence is synthesized)
gctctgcttggcttccttgtacatcatgatgaccctgaccagctggtacagccctgatgcaaagtttcagagcatgaccagcaagtggccagctgtgtgggtcaagatcagctccagctg

SEQ ID NO: 300676 - DNA, 120 bp, Artificial Sequence
  ENSG00000132824_12 (sequence is synthesized)
ggtctgcctcctgctttacgtctggacccttgtggctccacttgtcctcaccagtcgggacttcagctgaacctctgagtgccaaggacaccactggaactcacaaaggcacccaactca

SEQ ID NO: 300677 - DNA, 120 bp, Artificial Sequence
  ENSG00000132824_13 (sequence is synthesized)
gtgatgtcctaattactgctggatgactcaagccacaccatgcctatgttctcaggtgaagaagaataatagaaaccacatagatgggtaggtgtaccaagcattaaacagacagtatcc

SEQ ID NO: 300678 - DNA, 120 bp, Artificial Sequence
  ENSG00000132824_14 (sequence is synthesized)
gtgagattgaataatgcttgatgcagaatcgaaacttctcatttatctgtatattatgtttacttctaaggatatagcacaaagggaacattttttgtttaaagtgaactacagctgtgc

SEQ ID NO: 300679 - DNA, 120 bp, Artificial Sequence
  ENSG00000132824_15 (sequence is synthesized)
tgtgaagagagttctttataaagcctgtaggttcttttaactttggtttaaaatgtaagataggaaaatgttggatatttgaggccatgcttaatatatttatattgcagtatcctttaa

SEQ ID NO: 300680 - DNA, 120 bp, Artificial Sequence
  ENSG00000132824_16 (sequence is synthesized)
aagcaaaaaaaaaaaaatgcatttatattacagttttcctctatgaaagtccttacttatatgatacaagcactgtgttttgtgcttaaactcttcagcggggtagcatcaaagttcttg

SEQ ID NO: 300681 - DNA, 120 bp, Artificial Sequence
  ENSG00000132824_17 (sequence is synthesized)
gggaaggatcgtatatgtgggtcccttccctagaagaatggttgctgatatggctactgcttctacatcttgagttttttaatttactttttttacactgtagcattgagactgcttgat

SEQ ID NO: 300682 - DNA, 120 bp, Artificial Sequence
  ENSG00000132824_18 (sequence is synthesized)
ggaaaacactgcagctttagtctgtgttactatcttgttatgagtatgtaaaagtaaaatgcatgtgaatttatcatatttgcactatgaaggtatttggttaaaatacaaagactttta

SEQ ID NO: 300683 - DNA, 120 bp, Artificial Sequence
  ENSG00000132824_19 (sequence is synthesized)
agattttaaggccctttcttccaacagcttttatagttagcagccattctttattttctggatagccaggttttatcacgcttctagtcaggatgctcctattccttctaaaaattacgg

SEQ ID NO: 300684 - DNA, 120 bp, Artificial Sequence
  ENSG00000132824_20 (sequence is synthesized)
tctgactagtgagcaaagtcttgaatttattcaaaagtcctaaataccttctctaggtaagacacttggtagatgagagacggaaggcattgtcaagaaccattttcatgagaggtggtg

SEQ ID NO: 300685 - DNA, 120 bp, Artificial Sequence
  ENSG00000132824_21 (sequence is synthesized)
tgcaaaaaggtagaataaaagagttctttcaacaaagatttactgtctattctgtactagaccctgtaggttttggggtacagtgttaaacatgatagaggctctgccgtcttggacttt

SEQ ID NO: 300686 - DNA, 120 bp, Artificial Sequence
  ENSG00000132824_22 (sequence is synthesized)
aatagcttagagaagagagcaaatgagctgacaggtggttataatgtgaattagtgctgtggtttaggaattggagagaactcaaaggagaggtatttggtgtaatggtaggctttctgg

SEQ ID NO: 300687 - DNA, 120 bp, Artificial Sequence
  ENSG00000132824_23 (sequence is synthesized)
agaaaatgatatttaagccaagaactcttagaagttagctaagagagagatgggaaaatgagacgacattgctggagtagataaaactgcatgttaaaggcaggaagatggggaaaaaaa

SEQ ID NO: 300688 - DNA, 120 bp, Artificial Sequence
  ENSG00000132824_24 (sequence is synthesized)
gttcagtaaagctggaatggggaaatgtagtcagggactgaattttaaagggctttatcaacctcagtaaagagtttggaccttatgttgagggtggctgaaaacatattcatagtgtca

SEQ ID NO: 300689 - DNA, 120 bp, Artificial Sequence
  ENSG00000132824_25 (sequence is synthesized)
tgaacaaattttatcttcagtcacttgggctgatatatagagaatggatttagagagatgagaccaggtgcagtccatatgagatgtgaaatagagaagtggaatcgtagggacggggag

SEQ ID NO: 300690 - DNA, 89 bp, Artificial Sequence
  ENSG00000132824_26 (sequence is synthesized)
gagatgtgaaatagagaagtggaatcgtagggacggggagaaattgacaggtgagggctacttagcaattagaagagacggagtcttgc

SEQ ID NO: 300691 - DNA, 120 bp, Artificial Sequence
  ENSG00000132824_27 (sequence is synthesized)
tctcctgacctcgtgatccacctgccgcggcctcccaaagttctaggattactggcatgagccaccgtgcctggccagcaattagaattttaacactggcagttatgaataatatgaagg

SEQ ID NO: 300692 - DNA, 120 bp, Artificial Sequence
  ENSG00000132824_28 (sequence is synthesized)
tttaacactggcagttatgaataatatgaaggagaggtagatttctgagtgattctggtttaaccagctgggtggatggtggttccacgtattcaggtggcaaacaggaaaaacatgtgt

SEQ ID NO: 300693 - DNA, 120 bp, Artificial Sequence
  ENSG00000132824_29 (sequence is synthesized)
tcgaagaagaatggaggtaggtggtctcttaagaatggttaagaggcttgggagtcagactgcttgggtttgcatcccagctttgccgttttctggctatcaaacttgtcagctattatt

SEQ ID NO: 300694 - DNA, 120 bp, Artificial Sequence
  ENSG00000132824_30 (sequence is synthesized)
tgttgagtacgtactatttgatttatgaccacaggcagctgagcctcagtgttggtgcctagtgtacaagattgttaaagaataaagttattttgcaaagtgtaacccatttttagcact

SEQ ID NO: 300695 - DNA, 120 bp, Artificial Sequence
  ENSG00000132824_31 (sequence is synthesized)
gacatagcactgacagtagctgctgatctcattatgggctaaaataagacaatattcaaaggtcagagatatctagccagaatctgatggaggctggatttcagattttgttacagaatt

SEQ ID NO: 300696 - DNA, 120 bp, Artificial Sequence
  ENSG00000132824_32 (sequence is synthesized)
agacagaggaacacagaggggacaggctcagttagggtggaggtgtggggtagggaagcaggacttgatataaattattggaatcattgtcttttaaaccagtggtttatgtcagggtat

SEQ ID NO: 300697 - DNA, 120 bp, Artificial Sequence
  ENSG00000132824_33 (sequence is synthesized)
agcgtttcaagggatttgagggtcagatggggaaatgtagccccttattttgccagtgtgaagcagataccctgcttttctttacagtagcggagtcagcttaagagctttaaaggtcct

SEQ ID NO: 300698 - DNA, 120 bp, Artificial Sequence
  ENSG00000132824_34 (sequence is synthesized)
aaacttcaaaaacattacagtgccccatcctccgccttaatgtaattcaaaatacaaacaatactaaactgtaaaataaatgtaacaaagtccaataaagtttttatttttttctcatga

SEQ ID NO: 300699 - DNA, 89 bp, Artificial Sequence
  ENSG00000132824_35 (sequence is synthesized)
cccagagtgcttggattacaggttccatgcctctgcagcggtgcctcatgtttgctgtgtagttgctgtcctaacagtaagaattccac

SEQ ID NO: 300700 - DNA, 120 bp, Artificial Sequence
  ENSG00000132825_0 (sequence is synthesized)
agccttgtaagtaacgccgcggaccgggaaagtgggaggggccgctcccggaacgcagccttcttgtaagaacctccaaggaagcaagaagaaaaaagaggcgctaccctgcgctcccgg

SEQ ID NO: 300701 - DNA, 120 bp, Artificial Sequence
  ENSG00000132825_1 (sequence is synthesized)
gaggcctctgaaagcttccactagagaaaaactccccactcttacaatttctttaaccgcaagaagcggaggacctggacaaggactcgaggagcaaggtggcgaaccaagggtagggcg

SEQ ID NO: 300702 - DNA, 120 bp, Artificial Sequence
  ENSG00000132825_2 (sequence is synthesized)
caccgggcccgagaggtcccccgcaggttgcagatacggtggactctctgcggcttctgagcacggagggagctgtcgcggggtcgggaggtcgtctctcatccctgcctcatcttccga

SEQ ID NO: 300703 - DNA, 120 bp, Artificial Sequence
  ENSG00000132825_3 (sequence is synthesized)
cggccggcggggccatgtccagaggcccgagctccgcggtcctgcctagcgccctgggatcccggaagctcggcccccggagcctcagctgcctgtcggacctggacggcggcgtggccc

SEQ ID NO: 300704 - DNA, 80 bp, Artificial Sequence
  ENSG00000132825_4 (sequence is synthesized)
cgcgccgccgccaacgccagcgccgtcgggctgcgacccccgcctgcggcccatcatcctgcggcgggcgcgctcactgc

SEQ ID NO: 300705 - DNA, 120 bp, Artificial Sequence
  ENSG00000132825_5 (sequence is synthesized)
ctcccccgagcgccgccagaaggccgcgggcgcgccgggcgctgcgtgtcggccgggctgcagccagaagctccgcgtgcgcttcgccgacgccctgggcttggagctggcacaggtcaa

SEQ ID NO: 300706 - DNA, 120 bp, Artificial Sequence
  ENSG00000132825_6 (sequence is synthesized)
tcaaggtgttcaacgcgggagacgacccgtccgtgccgctgcacgtgctgtcgcggctcgcaatcaactcggacctgtgctgcagcagccaggacctggagttcaccctgcattgcctgg

SEQ ID NO: 300707 - DNA, 120 bp, Artificial Sequence
  ENSG00000132825_7 (sequence is synthesized)
tgcccgatttcccgccgcccgtcgaggccgccgactttggcgagcgcctgcagcggcagctcgtgtgcctggagcgtgtcacttgctcggaccttggcatcagcggtacggtgcgcgtgt

SEQ ID NO: 300708 - DNA, 120 bp, Artificial Sequence
  ENSG00000132825_8 (sequence is synthesized)
gcaacgtggccttcgagaagcaggtggctgtgcgctacactttctcgggctggcgcagtacccacgaggcggtggcgcggtggcgcgggcccgcaggccccgagggcacggaggacgttt

SEQ ID NO: 300709 - DNA, 120 bp, Artificial Sequence
  ENSG00000132825_9 (sequence is synthesized)
tcaccttcggctttccagtaccgcccttcctgctggagctcggctcccgcgtgcacttcgcggtgcgctaccaagtggcgggtgccgagtactgggacaacaacgaccaccgagactaca

SEQ ID NO: 300710 - DNA, 120 bp, Artificial Sequence
  ENSG00000132825_10 (sequence is synthesized)
gcctcacatgtcgcaaccacgcgctgcacatgcctcgcggggagtgcgaagagagctggatccacttcatctgagccgcgcggggaccggccacctggagcctccacacctaagctgcgc

SEQ ID NO: 300711 - DNA, 120 bp, Artificial Sequence
  ENSG00000132825_11 (sequence is synthesized)
ctcctgtcatttccctgctgggctctcacatctatctggttgttcttcaccaccctccaagtcctctgacctaattttctgctgcaaggtcccctggcagtggcccatcctgtcttctac

SEQ ID NO: 300712 - DNA, 120 bp, Artificial Sequence
  ENSG00000132825_12 (sequence is synthesized)
ttgaaacgtctgagtcacttggtctaaaaagtagcctcaggtggccagaaggccgagttgtgtaatgagttggggcagggtggtggggtaggtgcatgggagggtgggccctctggggag

SEQ ID NO: 300713 - DNA, 120 bp, Artificial Sequence
  ENSG00000132825_13 (sequence is synthesized)
gcccaagcagcttgttttgcaaaggcccaagtcctcctgctaggaaaagcttttgcatgtgtcctgaatgtgtctctgtaaacatagctgttatttattattgtgatgttgggaccttta

SEQ ID NO: 300714 - DNA, 120 bp, Artificial Sequence
  ENSG00000132825_14 (sequence is synthesized)
gcccatagcggatgcctcctcaggaatattctcgatttaataagctaaaaaaaaaaagttctgtgtttgtgcccacagtaaacagaatgtacagtgtgacccacatcgtggtccctccag

SEQ ID NO: 300715 - DNA, 120 bp, Artificial Sequence
  ENSG00000132825_15 (sequence is synthesized)
ttgccaacggctgtagccttctaacagtgggaaactattaataggcaagaaatttctgctttatcagtcatcacacaaccattcctgggcattgagactgtcctggttaggctgtgtgtc

SEQ ID NO: 300716 - DNA, 120 bp, Artificial Sequence
  ENSG00000132825_16 (sequence is synthesized)
tcctacattaacagctggggaggagggaaaagcttcagacttttaaactagcaaaacagttatttctctgcattcacaattctgatttcatgtatttctctgtacatgtttgatcattat

SEQ ID NO: 300717 - DNA, 120 bp, Artificial Sequence
  ENSG00000132825_17 (sequence is synthesized)
caggccattctgtttaagtttgaaactaagcattttaagaagtcttgcctcagttatttcagttttcaggtgactagagaatttcaggcaacagtgccctttgcaattacctttttgatg

SEQ ID NO: 300718 - DNA, 120 bp, Artificial Sequence
  ENSG00000132825_18 (sequence is synthesized)
attaaggtgactatttttatttcttgttaagcatcagaagatgtcagcattcatcttttgggagtccagttacaaggtggaactagaaggtgttttcagcaatagccagagcactggagg

SEQ ID NO: 300719 - DNA, 120 bp, Artificial Sequence
  ENSG00000132825_19 (sequence is synthesized)
aaaaataattgacaaatatttatacttttaaattgttttgaactgtatttacatacatcatgttttatcaggtacccaccaactttatactttctgccttcagatagagtttctaacatt

SEQ ID NO: 300720 - DNA, 120 bp, Artificial Sequence
  ENSG00000132825_20 (sequence is synthesized)
ttctagtttgtcagttttaaaatataaaattcttttatgtttttaaaccgtcaaccaagaagtcaagaccactgtcccctgctgagttaggcaatcacttaaaactccaaagaactccag

SEQ ID NO: 300721 - DNA, 120 bp, Artificial Sequence
  ENSG00000132825_21 (sequence is synthesized)
gctgaggagttcttttggtgctgaacagtggtctgacaacaggtgctagaattaaggtgtgggaaaaaaaaaaaaacagccaggaaggacaagatctccaatttgtgaagcttatgatac

SEQ ID NO: 300722 - DNA, 120 bp, Artificial Sequence
  ENSG00000132825_22 (sequence is synthesized)
agctgaaaccagtctgatcaattttatgctacctgtcaccaagaaattaactctaaatttttgaatgcttgttggcatctgtcaaatcaatactgaaaggatgcatttcggcttttaacc

SEQ ID NO: 300723 - DNA, 120 bp, Artificial Sequence
  ENSG00000132825_23 (sequence is synthesized)
agtttggttctgatcattgcaacctctgtgcttttataattcaaagaacaaggatagctttcttcggtatcttttaatataagaacactgaattttggcttgaaatattgtgactaaatt

SEQ ID NO: 300724 - DNA, 120 bp, Artificial Sequence
  ENSG00000132825_24 (sequence is synthesized)
gcacaatctctggctattagcactgttcactacattaacatgcaagagagagagaagccttgttacatttcctgctatttaacaaactgtccaattaggtcagcaagcctgttagggcct

SEQ ID NO: 300725 - DNA, 120 bp, Artificial Sequence
  ENSG00000132825_25 (sequence is synthesized)
tcactgctacgcccctggccccaaaacagagagcaagacagttgtccagagaatttagatatgagttaagagctgccagatttattttaaggcatgtagagaatctcataatctatgtga

SEQ ID NO: 300726 - DNA, 120 bp, Artificial Sequence
  ENSG00000132825_26 (sequence is synthesized)
aagtcacttgccaaaaaggttttggttatgaaagtgaatgttatatatttaatattaagtgaacctcccgtgccttttaaaaaataccaacattatgaaatttaaaagcttaaatatatt

SEQ ID NO: 300727 - DNA, 120 bp, Artificial Sequence
  ENSG00000132825_27 (sequence is synthesized)
tgcctagttgataaagaggctgtggaacaactgaaggagaactttcagaccctaaaacagttatattacttagatgttaaaattttctagtgggctgtgcaattgctgggttgtcccccc

SEQ ID NO: 300728 - DNA, 120 bp, Artificial Sequence
  ENSG00000132825_28 (sequence is synthesized)
aaacatattttaatatgttatttaaaatgattttacccaagcctaagtattaaagtatatgtgcaaaaacagttgtgagccattctattatgcttcagtatgtttttcttgtggcctaat

SEQ ID NO: 300729 - DNA, 120 bp, Artificial Sequence
  ENSG00000132825_29 (sequence is synthesized)
tacagaagaccaagctttagaaacttcttgtctaaatcatttcacatgcaagtcttatcctttctacaacactgataaacgtagagccttggcaaaaataaattttgtcattgtgcctca

SEQ ID NO: 300730 - DNA, 120 bp, Artificial Sequence
  ENSG00000132837_0 (sequence is synthesized)
ctcggcctcggcctagtcatgctccgtcccggcgcgcagctgctgcggggcctcctgctgcggagctgcccgctgcagggctcccccgggcgcccgcgctctgtctgcggccgggaagga

SEQ ID NO: 300731 - DNA, 120 bp, Artificial Sequence
  ENSG00000132837_1 (sequence is synthesized)
cccgggcgcccgcgctctgtctgcggccgggaaggagaggaaaaaccacccttatctgcagaaacacaatggaaagacagagcagaaacagtgataattggaggtggctgtgttggtgtg

SEQ ID NO: 300732 - DNA, 120 bp, Artificial Sequence
  ENSG00000132837_2 (sequence is synthesized)
agtctggcttatcacctggccaaagcagggatgaaagatgtggtcctgctggagaaatcagagctcacggctggatctacctggcacgcagcaggtttaacaacttactttcatcctgga

SEQ ID NO: 300733 - DNA, 120 bp, Artificial Sequence
  ENSG00000132837_3 (sequence is synthesized)
ataaacttgaagaaaatacattatgatagcatcaaactttatgagaaactggaagaagaaactggtcaggtggtgggattccatcagccaggtagtatcagacttgctaccacccctgta

SEQ ID NO: 300734 - DNA, 120 bp, Artificial Sequence
  ENSG00000132837_4 (sequence is synthesized)
agggtagatgaatttaaatatcaaatgactcggactggctggcatgcaacagaacagtatctcattgaacctgaaaaaattcaagagatgttccctttactcaacatgaataaggtttta

SEQ ID NO: 300735 - DNA, 120 bp, Artificial Sequence
  ENSG00000132837_5 (sequence is synthesized)
gctggattgtataatcctggagatggtcacattgatccttattctctaactatggcactggctgctggggctaggaaatgtggtgcccttttaaaatatcctgcaccagtaacttctctg

SEQ ID NO: 300736 - DNA, 120 bp, Artificial Sequence
  ENSG00000132837_6 (sequence is synthesized)
aaagccaggtcagatggaacatgggacgttgaaacaccacaggggtctatgagagcaaatagaattgtgaatgctgcaggattttgggctcgtgaagtaggtaaaatgattggactagaa

SEQ ID NO: 300737 - DNA, 120 bp, Artificial Sequence
  ENSG00000132837_7 (sequence is synthesized)
catcctctcattccggttcaacatcaatatgttgttacatcgactatatctgaagtgaaagctttgaaacgagaactgcctgtgctccgtgacctggaaggatcatattatctccgacag

SEQ ID NO: 300738 - DNA, 120 bp, Artificial Sequence
  ENSG00000132837_8 (sequence is synthesized)
gaaagggatgggcttttgtttggtccatatgaaagtcaagagaaaatgaaagttcaggactcctgggtcaccaatggagttcctccaggttttggaaaggaactctttgagtctgatcta

SEQ ID NO: 300739 - DNA, 120 bp, Artificial Sequence
  ENSG00000132837_9 (sequence is synthesized)
gatcgaatcatggaacacatcaaagctgccatggaaatggttcctgtcttgaaaaaggctgacatcatcaatgttgtcaatggtcctatcacgtattctcctgacattctgcctatggtg

SEQ ID NO: 300740 - DNA, 120 bp, Artificial Sequence
  ENSG00000132837_10 (sequence is synthesized)
gggccccatcagggggtcagaaactactgggtggctataggctttggatatggcataatccacgctggtggggtagggaaatatctcagtgactggatcctgcatggagaacctcctttt

SEQ ID NO: 300741 - DNA, 120 bp, Artificial Sequence
  ENSG00000132837_11 (sequence is synthesized)
gatctgatagaattggatcctaatcgctatggcaaatggacaacaacccagtacactgaggccaaagcaagagaatcatatggattcaacaatattgttggttatcctaaagaagaacgg

SEQ ID NO: 300742 - DNA, 120 bp, Artificial Sequence
  ENSG00000132837_12 (sequence is synthesized)
tttgctgggaggccgactcaacgagtcagtgggctctatcaaaggctggagtctaagtgttccatggggttccatgctggctgggagcagccgcactggttctacaaaccaggccaggac

SEQ ID NO: 300743 - DNA, 120 bp, Artificial Sequence
  ENSG00000132837_13 (sequence is synthesized)
ggagtataaacaggttatgcaaagagtagcggtaactgacctatcaccatttggcaagtttaacatcaaaggccaagattccattagactactggaccatctctttgcaaatgtcattcc

SEQ ID NO: 300744 - DNA, 120 bp, Artificial Sequence
  ENSG00000132837_14 (sequence is synthesized)
aaaggtgggttttacaaatataagtcacatgttaacacccaagggtcgagtgtatgctgagctgactgtttctcaccaatctcctggggagtttcttttaattactggctctggatcaga

SEQ ID NO: 300745 - DNA, 120 bp, Artificial Sequence
  ENSG00000132837_15 (sequence is synthesized)
acttcatgatcttagatggattgaagaagaagcagtcaaaggtggatatgatgttgaaattaaaaacataactgatgagcttggagttcttggagttgctgggccacaggcaagaaaggt

SEQ ID NO: 300746 - DNA, 120 bp, Artificial Sequence
  ENSG00000132837_16 (sequence is synthesized)
ccttcagaaactgacctctgaagatcttagtgatgatgttttcaagtttcttcaaaccaagtccttaaaggtttccaacattcctgtcactgctattaggatatcttatactggtgagct

SEQ ID NO: 300747 - DNA, 120 bp, Artificial Sequence
  ENSG00000132837_17 (sequence is synthesized)
gggttgggagctgtatcacagaagagaagattctgtggcgctgtatgacgctatcatgaatgcaggccaggaggagggaatcgacaattttggaacctatgccatgaatgccttacgcct

SEQ ID NO: 300748 - DNA, 120 bp, Artificial Sequence
  ENSG00000132837_18 (sequence is synthesized)
ggagaaagccttcagagcctgggggttagagatgaactgtgatacaaatcctttggaagctggactggaatattttgtgaagttaaataagccagcagacttcataggaaagcaagcact

SEQ ID NO: 300749 - DNA, 120 bp, Artificial Sequence
  ENSG00000132837_19 (sequence is synthesized)
gaaacagattaaagccaaggggctgaaacgaagactggtctgcctcaccttggcaacggatgatgttgatccagagggaaatgaaagcatctggtacaatggcaaggtggttggcaacac

SEQ ID NO: 300750 - DNA, 120 bp, Artificial Sequence
  ENSG00000132837_20 (sequence is synthesized)
gacatctggaagctatagctacagcatccagaagagtctggctttcgcatatgtccctgtacaactaagtgaagtgggacagcaagtggaagttgaactattaggcaaaaattacccagc

SEQ ID NO: 300751 - DNA, 120 bp, Artificial Sequence
  ENSG00000132837_21 (sequence is synthesized)
agtcatcatacaagaacctttggtattgaccgaaccaaccagaaaccggcttcagaaaaaaggtggaaaggacaaaacttgaaaaaagaccttcagcagtcaactgaattagagttgcta

SEQ ID NO: 300752 - DNA, 120 bp, Artificial Sequence
  ENSG00000132837_22 (sequence is synthesized)
atgactgtccttgaaattattataactggctcccaggggaatagaggaaaccaggaattcatttcaaaatcatcaaagtctaaatttagaatcttaatgaaacctttctgttaagtgttt

SEQ ID NO: 300753 - DNA, 120 bp, Artificial Sequence
  ENSG00000132837_23 (sequence is synthesized)
tctaagcaagacagaataatagataaatgatttacattgttcttttaaatgaagaaatttgaaatgaatgtttttttatttaccccacattacccaatcagtaaaacatttaggtgtttg

SEQ ID NO: 300754 - DNA, 120 bp, Artificial Sequence
  ENSG00000132837_24 (sequence is synthesized)
ctaatatacacaatcattactataacctaattaagggacattttataattttagtaacaaatgcattcggttcttgacagctgaaaacaaattaataaattatcttttacataaaaacat

SEQ ID NO: 300755 - DNA, 120 bp, Artificial Sequence
  ENSG00000132837_25 (sequence is synthesized)
gtacaatattgtttatggatttacttctttgagaaatctttccttagatgaataaatgaaagttttaatttttcatgatatatctgtgatgaaaatagtaaaacttaacattgacatata

SEQ ID NO: 300756 - DNA, 120 bp, Artificial Sequence
  ENSG00000132837_26 (sequence is synthesized)
agcccgcgagcggccgcgctcccgactctccttccttccgcgcagcctccagttccccggggctggagccggctgtcggctggttgccggctccgagggcgatgagagtggcaggtgtgc

SEQ ID NO: 300757 - DNA, 120 bp, Artificial Sequence
  ENSG00000132837_27 (sequence is synthesized)
cctgctgcacaggtggcctccgaacccgggaaaagaggaactaaggcggaggaactgagacgtttcgaattccagatggagtctggctctgccgcccaggctgaagtgtggtgcaatccc

SEQ ID NO: 300758 - DNA, 120 bp, Artificial Sequence
  ENSG00000132837_28 (sequence is synthesized)
acaggctggagtgcaatggcatgagcacagcccactgaagcctcaacctcccgggtcaagcaatcctcccacctcagccttcctagtagctgggactgtaggtgtgcaccaccacgcctg

SEQ ID NO: 300759 - DNA, 87 bp, Artificial Sequence
  ENSG00000132837_29 (sequence is synthesized)
gctaatcaggctgttttcttctattctatggttctcataatactactttgtaacaagccattctaagatttaaagtgatgcaaaaac

SEQ ID NO: 300760 - DNA, 120 bp, Artificial Sequence
  ENSG00000132837_30 (sequence is synthesized)
tatcaaggtttcaactgcccacacagcttcttcaacgtgttcaaaatactggaatcagttaagctaaggtatgaaggtgtctgactcactcctcctgctaccaaagcatctccttcatca

SEQ ID NO: 300761 - DNA, 120 bp, Artificial Sequence
  ENSG00000132837_31 (sequence is synthesized)
gccacttgtcgggcgatgtcgcaagcagcttcattgacttcctgcccctaaaatgggtgagtatatgagacatctaaattttcatgtgaaattgaaataaaattattattcaaacattca

SEQ ID NO: 300762 - DNA, 120 bp, Artificial Sequence
  ENSG00000132837_32 (sequence is synthesized)
gggccatcaggccttattagggtgaatcgtgttcttgtcaaaacctgtcagcaagtagggaaaagaacaatggagtactgaagaactctttcatcacaaagggagacggcgcagtggccc

SEQ ID NO: 300763 - DNA, 120 bp, Artificial Sequence
  ENSG00000132837_33 (sequence is synthesized)
tacgatcctcctgccttggccactcaaagtacatccttaacacccctctatggctgtacattcaggcaggtttaacaacttactttcatcctggaataaacttgaagaaaatacattatg

SEQ ID NO: 300764 - DNA, 120 bp, Artificial Sequence
  ENSG00000132837_34 (sequence is synthesized)
accgctgattagacaccttgctaacccatagatctaaatgttaaagatatactcctgatggctctcagatctcatgaacctggaaacaaataatatttcaggaactaaagctgtagggat

SEQ ID NO: 300765 - DNA, 120 bp, Artificial Sequence
  ENSG00000132837_35 (sequence is synthesized)
acgttcttagccgtaattgtgaagataacccttccgcaagtggagggctctccagccgcatacaacactgccatcttgtgggaagtgctccgtagagccacttcaggaagccttgaccaa

SEQ ID NO: 300766 - DNA, 120 bp, Artificial Sequence
  ENSG00000132837_36 (sequence is synthesized)
agctgcggtaaaaataattgaatctgtacttttaaaatcttcttaactaaaaacgcttcacctgaaacgactcatatcattgttctcaatggtatttttggtatgttccaaaggaagtaa

SEQ ID NO: 300767 - DNA, 120 bp, Artificial Sequence
  ENSG00000132837_37 (sequence is synthesized)
cttttgggaggaaaatcagtagcctttgtttagttggagatggaagaaatgcattaatcaagagcaaaaggaaaatcagctgcctttggatggagtcataggcattcctggaattttcat

SEQ ID NO: 300768 - DNA, 120 bp, Artificial Sequence
  ENSG00000132837_38 (sequence is synthesized)
ggtggaaatattgaatttttgtccatttctggagaacctccacgaagattcacagagactcaagtattaaacgtaatgtgttgaagcacatcagaagaatttgttttctataatatgttt

SEQ ID NO: 300769 - DNA, 120 bp, Artificial Sequence
  ENSG00000132837_39 (sequence is synthesized)
ctccctctttttctcactctctccttctccctctctttccctttttctctctccttcccctctctccccgtgtagagcttctaactagtagaaacagaataaaatgtaatctctattaaa

SEQ ID NO: 300770 - DNA, 120 bp, Artificial Sequence
  ENSG00000132840_0 (sequence is synthesized)
acagagccgcggcaccatggcacctgctggacgcccgggggccaagaaggggattttggagcgcctggagagtggggaggttgtgattggagatggcagctttctcattactctggagaa

SEQ ID NO: 300771 - DNA, 120 bp, Artificial Sequence
  ENSG00000132840_1 (sequence is synthesized)
gagaggctatgtgaaggctgggctctggactccagaggcagtgatagaacacccagacgcagttcgtcaacttcacatggaattcttgagagcaggatcaaatgtcatgcagacttttac

SEQ ID NO: 300772 - DNA, 120 bp, Artificial Sequence
  ENSG00000132840_2 (sequence is synthesized)
cttttctgccagtgaggacaatatggaaagcaagtgggaagatgtaaatgctgctgcctgtgacctcgccagggaagtggctggcaaaggtgatgctttggtagcaggggggatctgcca

SEQ ID NO: 300773 - DNA, 120 bp, Artificial Sequence
  ENSG00000132840_3 (sequence is synthesized)
gacatcaatatacaaataccagaaggatgaagctagaattaaaaaactttttcgacaacagctagaagtttttgcctggaaaaatgtggacttcttgattgcagagtattttgagcacgt

SEQ ID NO: 300774 - DNA, 120 bp, Artificial Sequence
  ENSG00000132840_4 (sequence is synthesized)
tgaagaagctgtgtgggctgtggaagtcttaaaagaatcagatagacccgtggcagttaccatgtgcataggcccagagggagacatgcatgatataacccccggagaatgtgctgtgag

SEQ ID NO: 300775 - DNA, 120 bp, Artificial Sequence
  ENSG00000132840_5 (sequence is synthesized)
gctggtgaaggcaggggcttccatcgttggcgtgaactgccgctttgggcccgacaccagcttgaagacgatggagctcatgaaggagggtcttgagtgggcagggctgaaagcgcacct

SEQ ID NO: 300776 - DNA, 120 bp, Artificial Sequence
  ENSG00000132840_6 (sequence is synthesized)
catggtgcagcctctggggttccacgcgcctgactgtggcaaagaggggtttgtggatctcccagaatatccctttggactggagtccagagttgccaccagatgggatattcaaaaata

SEQ ID NO: 300777 - DNA, 120 bp, Artificial Sequence
  ENSG00000132840_7 (sequence is synthesized)
cgccagagaggcctacaacctgggggtcaggtacattggcgggtgctgtggatttgagccctaccacatcagggcaattgcagaggagctggccccagaaaggggctttttgccaccagc

SEQ ID NO: 300778 - DNA, 120 bp, Artificial Sequence
  ENSG00000132840_8 (sequence is synthesized)
ttcagaaaaacacggcagctggggaagtggtttggacatgcacaccaaaccctggattagagcaagggctcgaagggagtattgggagaatctgctgccagcttcaggcagacctttctg

SEQ ID NO: 300779 - DNA, 120 bp, Artificial Sequence
  ENSG00000132840_9 (sequence is synthesized)
tccttcgctgtcaaagccagacttctaaggagtagtgaaagaaaaccctgaaataatcgaacaggaaaaagttgccctcaagcctgacctggaaccgttcctcaccttcatcctcaccat

SEQ ID NO: 300780 - DNA, 120 bp, Artificial Sequence
  ENSG00000132840_10 (sequence is synthesized)
tgctgtggttaagcactgcaacagactctaccagagatgcaaagagaagcgagagaggcaccttgttctccaagaacttactgtccaatcatgctgtggtgcattcctttgaagatcatg

SEQ ID NO: 300781 - DNA, 120 bp, Artificial Sequence
  ENSG00000132840_11 (sequence is synthesized)
aagaatagccaaacttgtctttgagggtgaatttgacactttaaaataatcagaagtcactgagacccaaagctagtgaataattcaagtgactaagctagatacttgaggatgatagag

SEQ ID NO: 300782 - DNA, 120 bp, Artificial Sequence
  ENSG00000132840_12 (sequence is synthesized)
caacactaaactaaagcaatgagtctgctttttttaatgatttatacaatgactccaaaggcaatcccaaagaaaagatgtaaagaatgttttgagcaatggtagcattattgaaataaa

SEQ ID NO: 300783 - DNA, 120 bp, Artificial Sequence
  ENSG00000132840_13 (sequence is synthesized)
ggtagcattattgaaataaatgtttaactatccaaagtgattactttcaaagatgatttttacttaaagatattaggtctggccaggcgaagtgactcacacctgcaatcccagcacttt

SEQ ID NO: 300784 - DNA, 120 bp, Artificial Sequence
  ENSG00000132840_14 (sequence is synthesized)
attaggtcctagaatttttaaaatgtgtcttcataatcataggtagctaggttataaactatttaaagacaagatcacgtgataagcttataatcttctcataattccccttacttagca

SEQ ID NO: 300785 - DNA, 120 bp, Artificial Sequence
  ENSG00000132840_15 (sequence is synthesized)
ttgtgttagacatactaataggtgcacagtgaaatacttattgttgattgtttaaaaataaagttttagaaaaccttttcaaaagtcagagtttaggccaggggcacaggctgacaccta

SEQ ID NO: 300786 - DNA, 120 bp, Artificial Sequence
  ENSG00000132840_16 (sequence is synthesized)
ataattcaaatctattttggtcttatatcttcttatgtttgtgttatttcatgtgtgccagtttctctttttttcacaacaatttatcaatttgtggcaataaaaatgatttacctttta

SEQ ID NO: 300787 - DNA, 120 bp, Artificial Sequence
  ENSG00000132840_17 (sequence is synthesized)
agagccgcggcaccatggcacctgctggacgcccgggggccaagaaggggattttggagcgcctggagagtggggaggttgtgattggagatggcagtgatagaacacccagacgcagtt

SEQ ID NO: 300788 - DNA, 120 bp, Artificial Sequence
  ENSG00000132840_18 (sequence is synthesized)
ctataacacatgataagctactcattgtttcagagattaccccagttttataagagatgaatctaaaatttattagcaaaacttttcctccttcaaaattacaaaattatgattttaaat

SEQ ID NO: 300789 - DNA, 120 bp, Artificial Sequence
  ENSG00000132840_19 (sequence is synthesized)
actcaattactttgaaaacctctgggtgtgttttcttcttttttactaataggcatcatctcactgaatcaatgaaccctgaatgaaaaactatatgttattgttataggaatgaaaatg

SEQ ID NO: 300790 - DNA, 120 bp, Artificial Sequence
  ENSG00000132840_20 (sequence is synthesized)
acagagccgcggcaccatggcacctgctggacgcccgggggccaagaagtgtctttggggcctctactgttacaacaccaagattatcacacactaatccatgtgaatgtgtacctggga

SEQ ID NO: 300791 - DNA, 120 bp, Artificial Sequence
  ENSG00000132840_21 (sequence is synthesized)
tgtgaaggctgggctctggactccagaggcagtgatagaacacccagacgcaggttggtgtccacatccccaagagtgtctacctgagtggtattttatttaaatctgattgagagaaga

SEQ ID NO: 300792 - DNA, 120 bp, Artificial Sequence
  ENSG00000132840_22 (sequence is synthesized)
atgacctctctctctctcatacacacacctacccacatcacacacccacccatccacacgcccacacacactcccacacacacacatccatgcactcacaccccaaccccacatccacac

SEQ ID NO: 300793 - DNA, 120 bp, Artificial Sequence
  ENSG00000132840_23 (sequence is synthesized)
acaccccacatccacacccacatacaccacaaacacacatacacacccacacaacacactctcacacacacacacactctcatacacacacacatctgcatcttaatgtacaggcagtgc

SEQ ID NO: 300794 - DNA, 120 bp, Artificial Sequence
  ENSG00000132840_24 (sequence is synthesized)
taaaatagacatcttaatatttgttccatgaatatttaccttgtagatatacagagtttccttaaaacagcaaaactgttcctgcttctgattcaccctgctgacaatgtgcatggttaa

SEQ ID NO: 300795 - DNA, 120 bp, Artificial Sequence
  ENSG00000132842_0 (sequence is synthesized)
actgcgcatgcgcagggggtggactgccaggtcggctcagggagccgtgacgagtccggaagcgcctgcgcgcgctcctccgtacgagaactagttttgttccgtgccctctggactgga

SEQ ID NO: 300796 - DNA, 120 bp, Artificial Sequence
  ENSG00000132842_1 (sequence is synthesized)
accttttggagagaacccccggcaggaccaaccccgcacccgccagcaccgcggcaatgtccagcaatagttttccttacaatgagcagtccggaggaggggaggcgacggagctgggtc

SEQ ID NO: 300797 - DNA, 120 bp, Artificial Sequence
  ENSG00000132842_2 (sequence is synthesized)
aggaggcgacctcaaccatttccccctcgggggccttcggcctctttagcagcgatttgaagaagaatgaagatctaaagcaaatgttagagagcaacaaagattctgctaaactggatg

SEQ ID NO: 300798 - DNA, 120 bp, Artificial Sequence
  ENSG00000132842_3 (sequence is synthesized)
ctatgaagcggattgttgggatgattgcaaaagggaaaaatgcatctgaactgtttcctgctgttgtgaagaatgtggccagtaaaaatattgagatcaagaagttggtatatgtttacc

SEQ ID NO: 300799 - DNA, 120 bp, Artificial Sequence
  ENSG00000132842_4 (sequence is synthesized)
tggttcgatatgctgaagaacagcaggatcttgcactcctgtccataagcacttttcagcgagctctgaaggacccaaaccaactaattcgtgcaagcgctttgagagttctgtcaagta

SEQ ID NO: 300800 - DNA, 120 bp, Artificial Sequence
  ENSG00000132842_5 (sequence is synthesized)
ttagagtgccaattattgtacctatcatgatgcttgctattaaggaagcttctgctgacttatcaccatatgttaggaagaatgcagcccatgcaatacaaaaattatacagccttgatc

SEQ ID NO: 300801 - DNA, 120 bp, Artificial Sequence
  ENSG00000132842_6 (sequence is synthesized)
cagagcagaaggaaatgttaattgaagtaattgaaaaacttctgaaagataaaagcacattggtagctggcagtgttgtgatggcttttgaagaagtatgcccggacagaatagatctga

SEQ ID NO: 300802 - DNA, 120 bp, Artificial Sequence
  ENSG00000132842_7 (sequence is synthesized)
ttcataaaaattaccgcaagctatgtaacttactagtggatgttgaagagtgggggcaggttgtcataatccacatgctaactcgatatgctcggacacagtttgtcagcccttggaaag

SEQ ID NO: 300803 - DNA, 120 bp, Artificial Sequence
  ENSG00000132842_8 (sequence is synthesized)
agggtgatgaattagaagacaatggaaagaatttctacgaatctgatgatgatcagaaggaaaagactgacaaaaagaagaagccgtatactatggatccagatcatagactcttaatta

SEQ ID NO: 300804 - DNA, 120 bp, Artificial Sequence
  ENSG00000132842_9 (sequence is synthesized)
gaaatacaaagcctttgcttcagagcaggaatgctgcggtggttatggcagttgctcagctgtattggcacatatcaccaaaatctgaagctggcataatttctaaatcactagtgcgtt

SEQ ID NO: 300805 - DNA, 120 bp, Artificial Sequence
  ENSG00000132842_10 (sequence is synthesized)
tacttcgtagcaatagggaggtgcagtatattgtcctacaaaatatagcaactatgtcaattcaaagaaaggggatgtttgaaccttatctgaagagtttctatgttaggtcaactgatc

SEQ ID NO: 300806 - DNA, 120 bp, Artificial Sequence
  ENSG00000132842_11 (sequence is synthesized)
caactatgatcaagacactgaagcttgaaattttgacaaacttggcaaatgaagccaacatatcaactcttcttcgagaatttcagacctatgtgaaaagccaggataaacaatttgcag

SEQ ID NO: 300807 - DNA, 120 bp, Artificial Sequence
  ENSG00000132842_12 (sequence is synthesized)
cagccactattcagactataggcagatgtgcaaccaacatcttggaagtcactgacacgtgcctcaatggcttggtctgtctgctgtccaacagggatgaaatagttgttgctgaaagtg

SEQ ID NO: 300808 - DNA, 120 bp, Artificial Sequence
  ENSG00000132842_13 (sequence is synthesized)
tggttgttataaagaaattactgcaaatgcaacctgcacaacatggtgaaattattaaacatatggccaaactcctggacagtatcactgttcctgttgctagagcaagtattctttggc

SEQ ID NO: 300809 - DNA, 120 bp, Artificial Sequence
  ENSG00000132842_14 (sequence is synthesized)
taattggagaaaactgtgaacgagttcctaaaattgcccctgatgttttgaggaagatggctaaaagcttcactagtgaagatgatctggtaaaactgcagatattaaatctgggagcaa

SEQ ID NO: 300810 - DNA, 120 bp, Artificial Sequence
  ENSG00000132842_15 (sequence is synthesized)
aattgtatttaaccaactccaaacagacaaaattgcttacccagtacatattaaatctcggcaagtatgatcaaaactacgacatcagagaccgtacaagatttattaggcagcttattg

SEQ ID NO: 300811 - DNA, 120 bp, Artificial Sequence
  ENSG00000132842_16 (sequence is synthesized)
ttccgaatgtaaagagtggagctttaagtaaatatgccaaaaaaatattcctagcacaaaagcctgcaccactgcttgagtctccttttaaagatagagatcatttccagcttggcacct

SEQ ID NO: 300812 - DNA, 120 bp, Artificial Sequence
  ENSG00000132842_17 (sequence is synthesized)
tatctcatactctcaacattaaagctactgggtacctggaattatctaattggccagaggtggcgcccgacccatcagttcgaaatgtagaagtaatagagttggcaaaagaatggaccc

SEQ ID NO: 300813 - DNA, 120 bp, Artificial Sequence
  ENSG00000132842_18 (sequence is synthesized)
cagcaggaaaagcaaagcaagagaattctgctaagaagttttattctgaatctgaggaagaggaggactcttctgatagtagcagtgacagtgagagtgaatctggaagtgaaagtggag

SEQ ID NO: 300814 - DNA, 120 bp, Artificial Sequence
  ENSG00000132842_19 (sequence is synthesized)
aacaaggcgaaagtggggaggaaggagacagcaatgaggacagcagtgaggactcctccagtgagcaggacagtgagagtggacgggagtcaggcctagaaaacaaaagaacagccaaga

SEQ ID NO: 300815 - DNA, 120 bp, Artificial Sequence
  ENSG00000132842_20 (sequence is synthesized)
ggaactcaaaagccaaaggaaaaagtgattctgaagatggggagaaggaaaatgaaaaatctaaaacttcagattcttcaaatgacgaatctagttcaatagaagacagttcttccgatt

SEQ ID NO: 300816 - DNA, 120 bp, Artificial Sequence
  ENSG00000132842_21 (sequence is synthesized)
ctgaatcagagtcagaacctgaaagtgaatctgaatccagaagagtcactaaggagaaagaaaagaaaacaaagcaagatagaactcctcttaccaaagatgtttcacttctagatctgg

SEQ ID NO: 300817 - DNA, 120 bp, Artificial Sequence
  ENSG00000132842_22 (sequence is synthesized)
atgattttaacccagtatccactccagttgcacttcccacaccagctctttctccaagtttgatggctgatcttgaaggtttacacttgtcaacttcctcttcagtcatcagtgtcagta

SEQ ID NO: 300818 - DNA, 120 bp, Artificial Sequence
  ENSG00000132842_23 (sequence is synthesized)
ctcctgcatttgtaccaacgaaaactcacgtgctgcttcatcgaatgagtggaaaaggactagctgcccattatttctttccaagacagccttgcatttttggtgataagatggtctcta

SEQ ID NO: 300819 - DNA, 120 bp, Artificial Sequence
  ENSG00000132842_24 (sequence is synthesized)
tgaaaatgcatgtttttaatccaatagactctcttgagcctgagggatccattacagtttcaatgggtattgacttttgtgattctactcagactgccagtttccagttgtgtaccaagg

SEQ ID NO: 300820 - DNA, 120 bp, Artificial Sequence
  ENSG00000132842_25 (sequence is synthesized)
atgattgcttcaatgttaatattcagccacctgttggagaactgcttttacctgtggccatgtcagagaaagattttaagaaagagcaaggagtgctaacaggaatgaatgaaacttctg

SEQ ID NO: 300821 - DNA, 120 bp, Artificial Sequence
  ENSG00000132842_26 (sequence is synthesized)
ctgtaatcattgctgcaccacagaatttcactccctctgtgatctttcagaaggttgtaaatgtagccaatgtaggtgcagtcccttctggccaggataatatacacaggtttgcagcta

SEQ ID NO: 300822 - DNA, 120 bp, Artificial Sequence
  ENSG00000132842_27 (sequence is synthesized)
aaactgtgcacagtgggtcattgatgctagtcacagtggaactgaaggaaggctctacagcccagcttatcataaacactgagaaaactgtgattggctctgttctgctgcgggaactga

SEQ ID NO: 300823 - DNA, 120 bp, Artificial Sequence
  ENSG00000132842_28 (sequence is synthesized)
agcctgtcctgtctcaggggtaacctgcttacatctggactttagaatctggcacacaacaaaagtgcctggcatccactactgctgcctttcatttataataatagcccttccatctgg

SEQ ID NO: 300824 - DNA, 120 bp, Artificial Sequence
  ENSG00000132842_29 (sequence is synthesized)
cagtgggggtagaatacactcttgacattcttgtctcctgctttagaatgctagtgtgtatctatcatgtatgcaatactttccccctttttgctttgctaaccaaagagcatatatttt

SEQ ID NO: 300825 - DNA, 120 bp, Artificial Sequence
  ENSG00000132842_30 (sequence is synthesized)
actgtcagttgtctcaactcttgaatccatgtggcgttttctctgtcctgctgcttcttttggcctcctcgttttccttctctttttcgacaatggtagacatgaatgagatatttaaag

SEQ ID NO: 300826 - DNA, 120 bp, Artificial Sequence
  ENSG00000132842_31 (sequence is synthesized)
ttcattggaaatcttcttccctacagcagtaagcaaaaattagcaaagagatagtctaaatggcctctcagcttggtatgtgaaaatgagatcacatactttttaaatccaaatacaaaa

SEQ ID NO: 300827 - DNA, 120 bp, Artificial Sequence
  ENSG00000132842_32 (sequence is synthesized)
gcatagtctctgcaagattttgttctttgaatttcttgatattgtaattgattattgataactgtcatcatgaaattatctctcaataataagataaataaactagcatatgaatcatat

SEQ ID NO: 300828 - DNA, 120 bp, Artificial Sequence
  ENSG00000132842_33 (sequence is synthesized)
ttgtctttgcatttttaatgagaaactattaataatcctgaagttcatatgctaaagttttcttattttaaagcaagtattttgagtgttacattatgcagagaagcaatgtggtttagt

SEQ ID NO: 300829 - DNA, 120 bp, Artificial Sequence
  ENSG00000132842_34 (sequence is synthesized)
tagcgaaagaaaaaccacttccaaaccaagtaaattttctacttatagtttactccaaggaaaaaaaattggtgtatttaataacaaaaacaaaaatcttcatattgcaaaataaacatc

SEQ ID NO: 300830 - DNA, 120 bp, Artificial Sequence
  ENSG00000132842_35 (sequence is synthesized)
ttctaggtagttttgatctattagtagatatctgattatgtggcctgctgaataaattctttgaatctcatttttccttatgcccaactttggaaactaactagcataaacttatagaaa

SEQ ID NO: 300831 - DNA, 120 bp, Artificial Sequence
  ENSG00000132842_36 (sequence is synthesized)
tgtttaaaactagttatatgatcaacctattagcatcttttcctagagtatttgttttatttgctaccttaagttactgttttcaaggttgttctataatcagagaacttttctaatact

SEQ ID NO: 300832 - DNA, 120 bp, Artificial Sequence
  ENSG00000132842_37 (sequence is synthesized)
ttcgtacctttttaaaaccagctgaaattttacttcctttttgaagcaaggtaatggactttcaggtagtataagctactcagttctttttgtatagagccacatacataatgattttta

SEQ ID NO: 300833 - DNA, 120 bp, Artificial Sequence
  ENSG00000132842_38 (sequence is synthesized)
aaaagtaaaaaggaagtgactgtacattgcttgaagcattataggaaggctgaaaagaaaagaatggaattttcttggaacatacatattgaaaagaacaaaacagagtcgaaaaattat

SEQ ID NO: 300834 - DNA, 120 bp, Artificial Sequence
  ENSG00000132842_39 (sequence is synthesized)
ttaaattttcaagctggtgggatgacaagagtaaacaaaattgttaaattttcctgctccagaaagaaatatagccctgaatctccgggaagagaatgtacagaagtgcaatgtacagaa

SEQ ID NO: 300835 - DNA, 120 bp, Artificial Sequence
  ENSG00000132842_40 (sequence is synthesized)
gccacgtgtacattttgtgccaattccgtaccatgtgtacattctgtaccattctgtaccaatgtatggaagccacgagttccacttccctctggagcctgggcgctgtggtaacacacc

SEQ ID NO: 300836 - DNA, 120 bp, Artificial Sequence
  ENSG00000132842_41 (sequence is synthesized)
caaaagcccctttgtaatcgcaggtcgttggcatttccatattagccttattgctcagagcttcataactttgaattttaagtcaataactttttgaaatgtcagacagaatttgacagg

SEQ ID NO: 300837 - DNA, 120 bp, Artificial Sequence
  ENSG00000132842_42 (sequence is synthesized)
tttaatacctgttttctgaggaagaaaaaaaaattatatccatgctgtcttcaggcagagggaaagtgcatgttgtgattgagaaaggtcttatttttccttaaattaggacactcatct

SEQ ID NO: 300838 - DNA, 120 bp, Artificial Sequence
  ENSG00000132842_43 (sequence is synthesized)
ttaaaagatagttcacacatttgtatttttttaaactaaggaaatttaattagggctttacttttgactaagttatttttggctgctaacttttaaaattatggtaaatcaataatataa

SEQ ID NO: 300839 - DNA, 120 bp, Artificial Sequence
  ENSG00000132842_44 (sequence is synthesized)
tgtagtatgaatcagtgaacagtatgtatcgattgtaatgtgcgctaccagttgaaaccattttaacactagtagcttaatatcattaaaatgtttttcacgtaaaacagaaaaacgacc

SEQ ID NO: 300840 - DNA, 120 bp, Artificial Sequence
  ENSG00000132842_45 (sequence is synthesized)
aaagccccaagttaaaggtttggttttttttcttttgtggtgtggtgattcagagttccttgcctcatatttcctttaactttgtcataatccatgattatctttaaattgttccattga

SEQ ID NO: 300841 - DNA, 120 bp, Artificial Sequence
  ENSG00000132842_46 (sequence is synthesized)
gtcgagttagtcaatgttgaattcttaattctagctatattttttcattttaatgttcacttaatgggacattttatgtacaccaatcttgaagaatggctctcatagtatatttcagac

SEQ ID NO: 300842 - DNA, 120 bp, Artificial Sequence
  ENSG00000132842_47 (sequence is synthesized)
taagcctcatttttgatatcacaatacatttgctttatttattatgagagtttttttattctaaagagactgtaacaatgcatttctcaaattaaaatactgtatacttgtccttctcga

SEQ ID NO: 300843 - DNA, 120 bp, Artificial Sequence
  ENSG00000132842_48 (sequence is synthesized)
cggctgagtgaagcaggaccacaacactcactccccaaaagctaacaaaatgatcaaacaagtagcgctaaaaagaatgacaaccagaagttcaccagcaacaataaaatatggacagga

SEQ ID NO: 300844 - DNA, 120 bp, Artificial Sequence
  ENSG00000132842_49 (sequence is synthesized)
ggctgaagtgggaggatccaccaggaggtggaggttgcagtgagctcatatcacaccaccgcactccagcctggacgacagagtgttacaccatctcaaaacaaacaaaaaaaggcagat

SEQ ID NO: 300845 - DNA, 120 bp, Artificial Sequence
  ENSG00000132842_50 (sequence is synthesized)
agagatgatgagaaaaagtccaagattgaagaagatgtgggtgggttcagatgaagaggaggacaatggtaaggataagaaaaagaaaaccaacaagatcaaggagaaatcattgattgg

SEQ ID NO: 300846 - DNA, 120 bp, Artificial Sequence
  ENSG00000132842_51 (sequence is synthesized)
gaagaactaaacaagatcaagaacatttggatcagaaactctgatgacattcacccaggaggagtatagagaattctacaagagcttcaccagtgactaggaagaccatttggcagtcaa

SEQ ID NO: 300847 - DNA, 120 bp, Artificial Sequence
  ENSG00000132842_52 (sequence is synthesized)
cttttttattaaaatgtaaatacttgaagtggattcttagttttgaacagattcttctctaagaacaagcccaatttagctaagaccttttaattttttaaataatttactcaaaccatt

SEQ ID NO: 300848 - DNA, 120 bp, Artificial Sequence
  ENSG00000132842_53 (sequence is synthesized)
atcttctcaatttttttcccttgttgtccacacttaattatcatctgtatgtttttctctggtattgttatatatctgtaacatacaaaggttcttcaccacattgacgcagtacatata

SEQ ID NO: 300849 - DNA, 120 bp, Artificial Sequence
  ENSG00000132842_54 (sequence is synthesized)
cctgaactgtgccacaaaaagttgtctacattaacagactttcatttccgtaatcgttttattcctaccacactattttttcatagactattaaaaattcatgactgtttttatttaaaa

SEQ ID NO: 300850 - DNA, 120 bp, Artificial Sequence
  ENSG00000132842_55 (sequence is synthesized)
ataaaccccagattgagtatactttaaagagactgaaattgatatttcatatgtgtgattctaagtttttatcctatcatacttaaaattagatttaagtgattttttactgaattttta

SEQ ID NO: 300851 - DNA, 120 bp, Artificial Sequence
  ENSG00000132842_56 (sequence is synthesized)
cacattttcctatacaatgaggattttaaaaaacttcgaaacaattgcattttgttttagttttataattatcttgtaaattacatcctaaagtagtgtttcttttgttgaaaaaaagtt

SEQ ID NO: 300852 - DNA, 120 bp, Artificial Sequence
  ENSG00000132846_0 (sequence is synthesized)
acacgtgacggcccccctttccccgcagacgtgtgaatgcagcgctgtgtctttaaggggcacgcgcggaggttttccgtccgggacaaaatgtcagcgaggcgcctggagggggatcta

SEQ ID NO: 300853 - DNA, 120 bp, Artificial Sequence
  ENSG00000132846_1 (sequence is synthesized)
ccatctcggactcccgacccgccgccggctccggccgcgtttcccgggtaaagggcactgctgatggttcttcagaactcaggaatcgtgttgcatgcattgtttctacccacctgagat

SEQ ID NO: 300854 - DNA, 120 bp, Artificial Sequence
  ENSG00000132846_2 (sequence is synthesized)
ggttggaaaccctgaggcaatgacagggaccccagaatccttgggaaattacccactgtctaatttaaagcgtgcgggcgccgcagaatgaggagtggcgagccggcctgcaccatggac

SEQ ID NO: 300855 - DNA, 120 bp, Artificial Sequence
  ENSG00000132846_3 (sequence is synthesized)
ccgcagaatgaggagtggcgagccggcctgcaccatggaccaggcccgcgggctggacgacgcggcggcgcggggcggtcagtgtccgggactggggccggcgccgacgccgacgcctcc

SEQ ID NO: 300856 - DNA, 120 bp, Artificial Sequence
  ENSG00000132846_4 (sequence is synthesized)
ctacttccacctggcgccggggcgccccgggcatccgtcgggccactgggccacctgccgtctgtgcggggagcaggtgggccgcggcccgggcttccacgcggggacctcggcgttgtg

SEQ ID NO: 300857 - DNA, 80 bp, Artificial Sequence
  ENSG00000132846_5 (sequence is synthesized)
cacctgaggagcgcgcaccggcgggagctggagagcagcggcgccgggagctccccacctgccgcgccctgcccgccgcc

SEQ ID NO: 300858 - DNA, 80 bp, Artificial Sequence
  ENSG00000132846_6 (sequence is synthesized)
ctgctggaacagatgggcgcgctggccgtgcgcggcagccggcgggagcgggagctggagcggcgcgagctggccgtgga

SEQ ID NO: 300859 - DNA, 80 bp, Artificial Sequence
  ENSG00000132846_7 (sequence is synthesized)
caggaggaagagcgcgccgcggcccaggcgcgccgggaactgcaggccgagcgggaggcgctgcaggcgcggctgcggga

SEQ ID NO: 300860 - DNA, 120 bp, Artificial Sequence
  ENSG00000132846_8 (sequence is synthesized)
gcgccgccgccgctcaaggacgaccccgagggtgacagggacggctgcgtcatcacaaaggtcctcctgtaggggtgtggccacttccccaccccaggacagcgcttctccgtccaatgc

SEQ ID NO: 300861 - DNA, 120 bp, Artificial Sequence
  ENSG00000132846_9 (sequence is synthesized)
caatgccttcagaccccgctgggaccgaagccgtaaccgaagccaggcccgcagccgctactcactcggaagctccagctaactgtaggatcttccacaccctaaggcttcagcttgaga

SEQ ID NO: 300862 - DNA, 120 bp, Artificial Sequence
  ENSG00000132846_10 (sequence is synthesized)
agcacttcgaagccagagcagaaccaaaactcacttccatggggtcaccgggggtgcctgggcggcctttcgtgggcatgcacgcaaggaattggggtggcacacgggacacccgagagc

SEQ ID NO: 300863 - DNA, 120 bp, Artificial Sequence
  ENSG00000132846_11 (sequence is synthesized)
tccaggagccccgtgaacccagaccacccagtgccatggccacttagggctgggaacccgaacctggtgactttgaaaggatagagcttcattccataccaaagacttatcacaccatgt

SEQ ID NO: 300864 - DNA, 120 bp, Artificial Sequence
  ENSG00000132846_12 (sequence is synthesized)
gcctatacacccagcagcccaaggtggagggtgcgtggaaatgagaaagctttttacccaaaaaaaaaaaaaaaagagttcctaatgcataatctgcccaacaccaagttctgaagggtg

SEQ ID NO: 300865 - DNA, 120 bp, Artificial Sequence
  ENSG00000132846_13 (sequence is synthesized)
ggtgagggacgtcccctctagtttccatgactgctgtagacccgcatcatctctagccctcatcggggcagtcccagagcccgcttttttactgcccatattattcaaccaataccaggt

SEQ ID NO: 300866 - DNA, 120 bp, Artificial Sequence
  ENSG00000132846_14 (sequence is synthesized)
gcactctgtctcccctcggccatccttcccttgcttcagacctaatgacaagtgtggcacatatgtccactttcaggcctcacatctgccaccttagcaagacatcacctcatccccttg

SEQ ID NO: 300867 - DNA, 120 bp, Artificial Sequence
  ENSG00000132846_15 (sequence is synthesized)
tcactaggaagagggcttcttccccacatgtcgtcatagtgctcacctctgggctgaaggggaaagcatccctccgcttaaggccacatctacctgtcattttccatcccattcctctcc

SEQ ID NO: 300868 - DNA, 120 bp, Artificial Sequence
  ENSG00000132846_16 (sequence is synthesized)
cacgtttactgggtctttcctcctgtagtattccccctttcgctgtctcagtccctccctttcccccaggctcttcttcctcagcaatgtgcagtctccctttcttactgaaaagaaaga

SEQ ID NO: 300869 - DNA, 120 bp, Artificial Sequence
  ENSG00000132846_17 (sequence is synthesized)
cttaacccagaagggccaacaagtcctggctgcctatccttcctccccagtttttactccctcactctgggtcagttttcttttctttttttctttatgtgtgtatatattatatatata

SEQ ID NO: 300870 - DNA, 120 bp, Artificial Sequence
  ENSG00000132846_18 (sequence is synthesized)
ttctagggtgcatgtcagttttctatgcttcaccagactatttccaagctgccacaatctcccagtgaccaaatatgatgatctatttgcagccttcattttgcttaatctctcccttga

SEQ ID NO: 300871 - DNA, 120 bp, Artificial Sequence
  ENSG00000132846_19 (sequence is synthesized)
aattgctctcttggtaggtggatcctgtttttccttcaaagaattccttttcctgttgcatactggttcccagtttttccataggcctcttttttttcttatttttttatattgaaaaat

SEQ ID NO: 300872 - DNA, 120 bp, Artificial Sequence
  ENSG00000132846_20 (sequence is synthesized)
tccacacatccagaaaaagttgaaaggctagcacaatgaatactcagatacatactctccacttggattgaatagttgttaacattttgccagatttactattctctccaccccatgcat

SEQ ID NO: 300873 - DNA, 120 bp, Artificial Sequence
  ENSG00000132846_21 (sequence is synthesized)
gtgtacatagaatgacatttcgacccctgagtattaccacatagatttcctgagcacaaagacaccgttctacatgattacattaagatgatcatgcctaaaaatataaacagtaacttc

SEQ ID NO: 300874 - DNA, 120 bp, Artificial Sequence
  ENSG00000132846_22 (sequence is synthesized)
tttatagcctctaatacagagcccttaatcagtattcaacaattgtctccagaatgtttgtctttaaaaacaacgacaacaaccaggtcccatcaaggttcatacattcttttggtttca

SEQ ID NO: 300875 - DNA, 120 bp, Artificial Sequence
  ENSG00000132846_23 (sequence is synthesized)
actctagtcactttcagtctacaacaaccccaacatattttcccatgatactttttgaagcatccaggccagctgtcttagcaaatgtcctctattctggaagtgtctgattgcttcctt

SEQ ID NO: 300876 - DNA, 120 bp, Artificial Sequence
  ENSG00000132846_24 (sequence is synthesized)
actccactcgtggctcatatccctgcagagttgtaatctcctctgggccagggactcctgaatatctccaggccgagtgttctccccgggcctggagaaaaccttcatgcccaatccctt

SEQ ID NO: 300877 - DNA, 120 bp, Artificial Sequence
  ENSG00000132846_25 (sequence is synthesized)
gctgcatgtctccacccctccttgcacatcctgcctctatgagtggacgaggcaaatctactcaaccccacatcccacccctcacctgataactaacatttactgggcactaacaatgta

SEQ ID NO: 300878 - DNA, 120 bp, Artificial Sequence
  ENSG00000132846_26 (sequence is synthesized)
tcaggcacatactacacacttaacatgcattgctttcacataccagctccatggtaacattgcgctggctttacagctaaagaaactgagctagaaaggggttaagtatcctgtacaaga

SEQ ID NO: 300879 - DNA, 120 bp, Artificial Sequence
  ENSG00000132846_27 (sequence is synthesized)
tcacagctggccagcaatagaggtgggatcccactgcagacagtctcccccacagatgccatgctcccactgtaccaccatgtactgcttcctgagatctctgcttccttcagtcgaccc

SEQ ID NO: 300880 - DNA, 120 bp, Artificial Sequence
  ENSG00000132846_28 (sequence is synthesized)
agctgacacctgtttccttcctaactccaactaattaattccagttaatggaattgactggaattagtgacattaatatttactgagcattccccatgtgtcatcagagctgtgctaaat

SEQ ID NO: 300881 - DNA, 120 bp, Artificial Sequence
  ENSG00000132846_29 (sequence is synthesized)
gctttacaagaataattacctgccataaagcaaccctatgacataggtgctactatgcccattttgtagatgagacaggttcaggggagttagtatcaccttcaagtcatacagtggcta

SEQ ID NO: 300882 - DNA, 120 bp, Artificial Sequence
  ENSG00000132846_30 (sequence is synthesized)
agaatctgtggtctcgctgaatgctgggcgcctgctctgctaagtctatttctacaaaacattgcactgccttcctgttgcctgccaagctcagggcccatttatcatgcatcttcccat

SEQ ID NO: 300883 - DNA, 120 bp, Artificial Sequence
  ENSG00000132846_31 (sequence is synthesized)
ccttgtctcccccaactgtcccttacctgagtcacaatttcgccaaagccaaagggattgtcctaagccaatgttgatttatcactcttcctgctcaaaagcccccaagatcacctatca

SEQ ID NO: 300884 - DNA, 120 bp, Artificial Sequence
  ENSG00000132846_32 (sequence is synthesized)
atcacctacttgagtgcaagctttgactctgtcacctgacattcaagtccccctctgcccccatgccagtcttatcccctcccctacatatgccctatcctgcagccaaattggactctg

SEQ ID NO: 300885 - DNA, 120 bp, Artificial Sequence
  ENSG00000132846_33 (sequence is synthesized)
ttcttcctgacaagacctggtattggcatctctatgcctcagtttgccttccctccactttaaaaagcctcttcagtctcgatacaaaaaacatcccacacatgttctaaaaccatgctt

SEQ ID NO: 300886 - DNA, 120 bp, Artificial Sequence
  ENSG00000132846_34 (sequence is synthesized)
tccttgatttctcctcatgtcaagacatttcttacttctctagtctcctagcattttgtgcctcacaaccctcaggacaggccagctagtgtatggctgtgggtttttatctcacctccc

SEQ ID NO: 300887 - DNA, 120 bp, Artificial Sequence
  ENSG00000132846_35 (sequence is synthesized)
ctgcctgaccctgagcccttgtggggagtatactcaccctactcctacagtgccttgcattccgtagctgctcagtacattaacccattcaatgtctttaagatttttacaagttagttt

SEQ ID NO: 300888 - DNA, 120 bp, Artificial Sequence
  ENSG00000132846_36 (sequence is synthesized)
tcctgtaattactaatcatttatctttaattctgagtaaaattcacaacaacaaataaaaggaaatagtagtaattttttaagctgtttagtcaataaagatttaatgcgtcagttattg

SEQ ID NO: 300889 - DNA, 120 bp, Artificial Sequence
  ENSG00000132846_37 (sequence is synthesized)
gactgtttggtttgaagccaatcaaccattctggtatgtaaatctacttttttattatacaagtaacacaaaatgtattgcctcagtcaaggaagaagaacagaaaaaaacaacacccca

SEQ ID NO: 300890 - DNA, 120 bp, Artificial Sequence
  ENSG00000132846_38 (sequence is synthesized)
aaatcctgtcacctctgtaaaactgctattaattaacattttaatatattttcttttgtcttttgcaatttttatattactctaagttattttcaagtattggaacttaacttcttcata

SEQ ID NO: 300891 - DNA, 120 bp, Artificial Sequence
  ENSG00000132846_39 (sequence is synthesized)
tggatttataaattgggctagatgatctgaatttcctttttagaaggaaaaaaaaagacttccacaaatgttactcttctatctcaccaattgtaagaaccattaaaacataggaaagga

SEQ ID NO: 300892 - DNA, 120 bp, Artificial Sequence
  ENSG00000132846_40 (sequence is synthesized)
tttagaatcttaactactccctcaaagatggctagtgcgagcctgaatgtcctgttcaggagacagagaacaattaacctgagtgctgagttaagggaagaggtttttactttctgcttt

SEQ ID NO: 300893 - DNA, 120 bp, Artificial Sequence
  ENSG00000132846_41 (sequence is synthesized)
atacacttctgcattgttgtaattttttacacaaagtatgaattacttttatgataaaaaaattttgtttgtagacaacattcctctccttcagcattcagcatccttagttaaaataaa

SEQ ID NO: 300894 - DNA, 120 bp, Artificial Sequence
  ENSG00000132846_42 (sequence is synthesized)
atctccaacgaaagcatggatataatccccatttccagaaaatcccagaaagaaatgcagcccttgttcagtccaactccatcatttgatagattaggaaaataggttctagagagtgac

SEQ ID NO: 300895 - DNA, 120 bp, Artificial Sequence
  ENSG00000132846_43 (sequence is synthesized)
ttgtccactgtcaggagatggtgactgtggcgcgtcatctgactccagcctacttaatgcatttcagtctctttggccttaagggctcctgctgctcacctgaaatcattcccaaggaac

SEQ ID NO: 300896 - DNA, 120 bp, Artificial Sequence
  ENSG00000132846_44 (sequence is synthesized)
ccacaagagcaggttccctgggaggattcctgagaacacctacacacaagcctcagagatctgccaagacattctctttctgataaatactattaaatatttttctatcaaatagttgcc

SEQ ID NO: 300897 - DNA, 120 bp, Artificial Sequence
  ENSG00000132846_45 (sequence is synthesized)
aaatgacctgctccagtcaaaactcaatctgacttgtgactacaaagtaatctgaggaatcccaaaggtatataaaaatctatccatctaagtcatctctcttcaaagtagaagacctgg

SEQ ID NO: 300898 - DNA, 120 bp, Artificial Sequence
  ENSG00000132846_46 (sequence is synthesized)
aagactatacagttattcccaaaatgcttcaacatttctggaactcctcttttagagtggccatgagtccctagcacattctttaaaacatccttgagttggcaaatactcctctttcca

SEQ ID NO: 300899 - DNA, 120 bp, Artificial Sequence
  ENSG00000132846_47 (sequence is synthesized)
ggataaatttgattttttaaaagaactgccaattattcagtctggtgaatatggtagatgattaaccagattaacatttctggttaataaggtgagattataataaaacaatgataatta

SEQ ID NO: 300900 - DNA, 120 bp, Artificial Sequence
  ENSG00000132846_48 (sequence is synthesized)
ttttagtgtggctcataaattggtcttgatagtggtatattaaggttaagtaaaggcagcatggtcaccatacagattaaagcccattttagttggtttatgatgtgaatgaattcaggt

SEQ ID NO: 300901 - DNA, 120 bp, Artificial Sequence
  ENSG00000132846_49 (sequence is synthesized)
agcactgggagtcattatatgtttaaatagtattaaaggtttctttttataaaaatcttaattatgacattctctgaaatctggtttcacagtattaaaatgaggctttaaggaaaaaca

SEQ ID NO: 300902 - DNA, 120 bp, Artificial Sequence
  ENSG00000132846_50 (sequence is synthesized)
cgcctggagggggatctaccatctcggactcccgacccgccgccggctccggccgcgtttcccgggtaaagggcgtgcgggcgccgcagaatgaggagtggcgagccggcctgcaccatg

SEQ ID NO: 300903 - DNA, 120 bp, Artificial Sequence
  ENSG00000132846_51 (sequence is synthesized)
acaaaatgtcagcgaggcgcctggagggggatctaccatctcggactcccgacccgccgccggctccggccgcgtttcccgggtaaagggtttttcccagttgtgtttaacaagaaagat

SEQ ID NO: 300904 - DNA, 120 bp, Artificial Sequence
  ENSG00000132846_52 (sequence is synthesized)
ctgggtctcaccttgcccttgattttctccctaagttctcagaagagctcaagaagtctgtcatgtgttttcttctcattgtttttcaactttcaaagcaaatttatctagaatcacaca

SEQ ID NO: 300905 - DNA, 120 bp, Artificial Sequence
  ENSG00000132846_53 (sequence is synthesized)
tttggtcctttgtgaacttatttcctaactaataaacttcacctttttctgtattcccttttctttaataggttattgcagtagtgaattagtttcctaataaaaaagactgtgcaatga

SEQ ID NO: 300906 - DNA, 120 bp, Artificial Sequence
  ENSG00000132849_0 (sequence is synthesized)
ccgggcggggagagtcggggcgaggggagggcctgccaggtgaggcgcggtcaccctgggcctctcacttccgcccaggtgaggcagggccgacaccgagcccgcccgacccgggctccc

SEQ ID NO: 300907 - DNA, 120 bp, Artificial Sequence
  ENSG00000132849_1 (sequence is synthesized)
gggctcccacctgctcctccagcgcaccaggtgtctttaagagtgattgaagagaataattcaaaatgcctgaaaatcctgctacagataaactgcaggtgctgcaggtacttgatcgcc

SEQ ID NO: 300908 - DNA, 120 bp, Artificial Sequence
  ENSG00000132849_2 (sequence is synthesized)
tgaaaatgaaattgcaggagaagggtgacacgtcgcagaatgagaagttatctatgttttatgagacactaaagagtcctctcttcaaccagatactcacacttcagcagtccatcaagc

SEQ ID NO: 300909 - DNA, 120 bp, Artificial Sequence
  ENSG00000132849_3 (sequence is synthesized)
aactgaagggtcaactcaaccatataccctcagattgttcagccaactttgatttttctaggaaaggtttgttagtgttcacagatggttccatcactaatggaaatgtccacaggccct

SEQ ID NO: 300910 - DNA, 120 bp, Artificial Sequence
  ENSG00000132849_4 (sequence is synthesized)
ctaataactcgactgtatctgggttatttccgtggaccccgaagttgggaaatgaagactttaactcagtcattcaacagatggctcagggccggcaaattgaatatatagatatagaac

SEQ ID NO: 300911 - DNA, 120 bp, Artificial Sequence
  ENSG00000132849_5 (sequence is synthesized)
ggccttcaactggaggccttggattcagtgtggtggccctcagaagtcaaaatctcggaaaagttgatatcttcgtgaaggatgtccagccagggagtgtagcagacagggatcaaagat

SEQ ID NO: 300912 - DNA, 120 bp, Artificial Sequence
  ENSG00000132849_6 (sequence is synthesized)
taaaggaaaatgatcaaatattggccattaatcacacgccattggatcagaacatttcccatcagcaagcaattgcattattacaacaaaccactggatctttgagactgattgtggcca

SEQ ID NO: 300913 - DNA, 120 bp, Artificial Sequence
  ENSG00000132849_7 (sequence is synthesized)
gggaaccagtccacacaaaaagcagtacttctagcagcctaaatgatacaactctgcctgaaacagtttgttggggccatgttgaagaggttgagctcattaatgatggctctggactag

SEQ ID NO: 300914 - DNA, 120 bp, Artificial Sequence
  ENSG00000132849_8 (sequence is synthesized)
gttttggaatagttggaggaaaaacaagtggcgtggttgtgaggactatagttcctggaggattagcagatcgagatggaagactccagacaggggaccacatcttgaagattggtggca

SEQ ID NO: 300915 - DNA, 120 bp, Artificial Sequence
  ENSG00000132849_9 (sequence is synthesized)
caaacgtgcagggaatgaccagtgagcaagttgcacaagttctaaggaactgtgggaattcagtcaggatgctcgttgctagagatccagctggtgacatttcagtcaccccccctgccc

SEQ ID NO: 300916 - DNA, 120 bp, Artificial Sequence
  ENSG00000132849_10 (sequence is synthesized)
ctgcagccttacctgttgccctgcctactgtagccagcaagggccctggttctgacagttctctttttgaaacttataatgttgagcttgtgagaaaagatgggcagagtcttggaatta

SEQ ID NO: 300917 - DNA, 120 bp, Artificial Sequence
  ENSG00000132849_11 (sequence is synthesized)
gaattgttggctatgttggaacatctcatacaggggaagcttcagggatttatgtgaaaagtataatacctggcagtgctgcgtaccacaatggccacattcaagtgaatgacaaaatag

SEQ ID NO: 300918 - DNA, 120 bp, Artificial Sequence
  ENSG00000132849_12 (sequence is synthesized)
ttgctgtcgatggcgtgaacattcagggttttgccaaccatgatgttgttgaagtattacgaaatgcagggcaggtggtacacctaaccctagttcgaaggaagacatcctcatctactt

SEQ ID NO: 300919 - DNA, 120 bp, Artificial Sequence
  ENSG00000132849_13 (sequence is synthesized)
ctccacttgaaccaccttcagacagaggaactgttgtagaaccactgaaaccaccagctctctttctaactggagcagtggaaactgaaactaatgtggatggtgaagatgaggaaatta

SEQ ID NO: 300920 - DNA, 120 bp, Artificial Sequence
  ENSG00000132849_14 (sequence is synthesized)
aagaaagaattgatactttaaaaaatgacaacatacaagccttagaaaaattggaaaaagtcccagactctccagaaaatgagctgaaatccagatgggaaaacctgttgggtcctgatt

SEQ ID NO: 300921 - DNA, 120 bp, Artificial Sequence
  ENSG00000132849_15 (sequence is synthesized)
atgaagtaatggttgctactttggacacacagattgcagatgatgctgagttacagaaatattcaaagctgctgcctattcacactctgaggcttggtgtggaagtggattcctttgatg

SEQ ID NO: 300922 - DNA, 120 bp, Artificial Sequence
  ENSG00000132849_16 (sequence is synthesized)
ggcaccattatatttcttcaattgtttctggtggtcctgttgatacattgggtctcctacagccagaagatgagctgcttgaggtcaatggcatgcagctttatggaaaatctcgccgag

SEQ ID NO: 300923 - DNA, 120 bp, Artificial Sequence
  ENSG00000132849_17 (sequence is synthesized)
aagcagtctcctttcttaaagaagtgccacccccttttactttggtttgctgtcggaggttgtttgatgatgaagcttctgtagatgaaccaaggcgcactgaaacctctcttcctgaga

SEQ ID NO: 300924 - DNA, 120 bp, Artificial Sequence
  ENSG00000132849_18 (sequence is synthesized)
cagaggttgaccacaatatggatgtcaatactgaagaagatgatgatggggaattagcactgtggtcccctgaagtcaagattgttgaactagtaaaagattgtaaaggtttgggattca

SEQ ID NO: 300925 - DNA, 120 bp, Artificial Sequence
  ENSG00000132849_19 (sequence is synthesized)
gcattttggattaccaggaccctttagatcctacaagatcagtgattgtgatccgctccctggtagcagatggtgtagcagaaagaagtgggggactattacctggagaccgcctggtct

SEQ ID NO: 300926 - DNA, 120 bp, Artificial Sequence
  ENSG00000132849_20 (sequence is synthesized)
cagtcaatgaatactgtttggacaacacctcacttgctgaagctgtggaaatattgaaagctgtgccaccaggcctagtacaccttggcatctgtaagcctttggtggaagataatgaag

SEQ ID NO: 300927 - DNA, 120 bp, Artificial Sequence
  ENSG00000132849_21 (sequence is synthesized)
aagaaagttgttatattttacattcaagcagtaatgaagacaagactgaattttcaggaacaattcatgatataaattcatctttaatactcgaagcacccaagggatttagagatgaac

SEQ ID NO: 300928 - DNA, 120 bp, Artificial Sequence
  ENSG00000132849_22 (sequence is synthesized)
catattttaaagaagaacttgtggatgaaccatttctagatctgggaaagtctttccattcccaacaaaaagagatagagcaaagcaaggaggcctgggagatgcatgaatttctgactc

SEQ ID NO: 300929 - DNA, 120 bp, Artificial Sequence
  ENSG00000132849_23 (sequence is synthesized)
ctagattgcaggaaatggatgaagaaagagaaattcttgttgatgaagaatatgagttatatcaagatccctcaccatccatggagttgtatcccttgtcgcacattcaagaggccactc

SEQ ID NO: 300930 - DNA, 120 bp, Artificial Sequence
  ENSG00000132849_24 (sequence is synthesized)
ctgtgccctctgtgaatgaacttcactttggtacacagtggttgcatgataatgaaccatccgagtctcaagaggcaagaaccgggaggactgtctattcccaggaggcacagccgtatg

SEQ ID NO: 300931 - DNA, 120 bp, Artificial Sequence
  ENSG00000132849_25 (sequence is synthesized)
gctattgccctgaaaatgtgatgaaagaaaattttgtcatggagtccctaccatctgtaccatcaactgaaggaaacagtcaacaaggcagatttgacgacctggaaaatcttaattcat

SEQ ID NO: 300932 - DNA, 120 bp, Artificial Sequence
  ENSG00000132849_26 (sequence is synthesized)
tagcaaaaactagtctggatttaggcatgatcccgaatgatgtccaaggtcctagcttgctcattgaccttcctgttgtggctcaaaggagggagcaagaagatttgcctttatatcaac

SEQ ID NO: 300933 - DNA, 120 bp, Artificial Sequence
  ENSG00000132849_27 (sequence is synthesized)
accaagcgacacgagttatttccaaggcctcagcatacacaggaatgttgtcttctagatatgccactgatacatgtgagttacctgagagagaagaaggcgaaggagaagaaactccaa

SEQ ID NO: 300934 - DNA, 120 bp, Artificial Sequence
  ENSG00000132849_28 (sequence is synthesized)
attttagccactggggtccaccgagaattgttgagatttttagagaacccaatgtgtctcttgggatcagtattgttggtggacaaactgttataaaacgtctaaagaatggagaggagc

SEQ ID NO: 300935 - DNA, 120 bp, Artificial Sequence
  ENSG00000132849_29 (sequence is synthesized)
ttaaaggtatattcatcaaacaagttttagaagacagtccagcagggaagacgaacgcacttaaaactggagataaaatacttgaggtgtctggagtagatttgcagaatgcctcacaca

SEQ ID NO: 300936 - DNA, 120 bp, Artificial Sequence
  ENSG00000132849_30 (sequence is synthesized)
gcgaagcagttgaggccattaagaatgcaggaaaccctgtggtgttcattgttcagagtttgtcatccactccacgagtcattcctaacgtacataacaaggccaacaaaatcaccggta

SEQ ID NO: 300937 - DNA, 120 bp, Artificial Sequence
  ENSG00000132849_31 (sequence is synthesized)
accagaaccaggacacccaagaaaagaaagaaaagaggcaaggaactgctccaccgccaatgaaacttcctcctccttataaagctctgactgatgacagtgatgaaaatgaagaagaag

SEQ ID NO: 300938 - DNA, 120 bp, Artificial Sequence
  ENSG00000132849_32 (sequence is synthesized)
atgcctttaccgaccaaaaaatcagacaaagatatgcagatctgcctggagaactgcacattattgaacttgaaaaagataagaatggacttggactcagccttgctggtaataaagacc

SEQ ID NO: 300939 - DNA, 120 bp, Artificial Sequence
  ENSG00000132849_33 (sequence is synthesized)
gatcacgcatgagcatatttgtggtgggaattaacccggaaggacctgctgccgcagatggacgaatgcgtattggagatgaactcttagagataaacaatcagattctgtatggaagaa

SEQ ID NO: 300940 - DNA, 120 bp, Artificial Sequence
  ENSG00000132849_34 (sequence is synthesized)
gtcaccaaaatgcatctgccattattaagactgccccatcaaaggtcaagctggttttcatcagaaacgaggatgcagtcaatcagatggccgttactccctttccagtgccatcaagtt

SEQ ID NO: 300941 - DNA, 120 bp, Artificial Sequence
  ENSG00000132849_35 (sequence is synthesized)
ctccatcttctattgaggatcagagcggcaccgaacctattagtagtgaggaagatggcagcgtcgaagttggtattaaacaattgcctgaaagtgaaagcttcaaactggctgtcagcc

SEQ ID NO: 300942 - DNA, 120 bp, Artificial Sequence
  ENSG00000132849_36 (sequence is synthesized)
cagacttcacaggctatggtggtttccaggctcctctgtcagtggaccccgcaacgtgtcccattgtccctggacaggaaatgattatagaaatatccaagggacgttcagggcttggtc

SEQ ID NO: 300943 - DNA, 120 bp, Artificial Sequence
  ENSG00000132849_37 (sequence is synthesized)
tcagcattgtgggaggaaaagacacacccttgaatgctatagttatccatgaagtctatgaagaaggggcagcagccagagatggaagactttgggctggtgaccagatattagaggtta

SEQ ID NO: 300944 - DNA, 120 bp, Artificial Sequence
  ENSG00000132849_38 (sequence is synthesized)
atggggttgacctgaggaactccagccacgaagaagccatcacagccctgaggcagaccccccagaaggtgcggctggtggtgtatagagatgaggcacactaccgggatgaggagaact

SEQ ID NO: 300945 - DNA, 120 bp, Artificial Sequence
  ENSG00000132849_39 (sequence is synthesized)
tggagattttccctgtggatctgcagaagaaagctggccggggcctgggcctgagcatcgttgggaaacgaaatggaagcggagtgtttatttctgacatcgtgaaaggcggagccgcag

SEQ ID NO: 300946 - DNA, 120 bp, Artificial Sequence
  ENSG00000132849_40 (sequence is synthesized)
acctggatgggagattgattcagggagatcagatcttatctgtgaatggggaggacatgagaaatgcctcacaggagacagtggccaccatcctcaagtgtgcacagggacttgtgcagc

SEQ ID NO: 300947 - DNA, 120 bp, Artificial Sequence
  ENSG00000132849_41 (sequence is synthesized)
tagagattggaagactccgagctggttcctggacctccgcaaggacgacatcacagaacagtcagggtagtcagcagagtgcacacagcagctgtcatccctccttcgctcctgtcatca

SEQ ID NO: 300948 - DNA, 120 bp, Artificial Sequence
  ENSG00000132849_42 (sequence is synthesized)
ctggcctgcaaaacctggttggcacaaaaagagtttcagatccttcccagaaaaattcaggcacagatatggaaccaaggactgttgagataaacagggagctcagtgatgcccttggaa

SEQ ID NO: 300949 - DNA, 120 bp, Artificial Sequence
  ENSG00000132849_43 (sequence is synthesized)
tcagtattgctggaggaagaggaagtcccttaggagatatccccgtatttattgccatgattcaggctagcggagtggccgcacggacacagaagcttaaagttggagatcggattgtca

SEQ ID NO: 300950 - DNA, 120 bp, Artificial Sequence
  ENSG00000132849_44 (sequence is synthesized)
gcattaacgggcaacctttggatgggctgtctcacgcggatgtggttaatctgctgaagaacgcctacgggcgcattatcctgcaggttgtagcagataccaatataagcgccatagcag

SEQ ID NO: 300951 - DNA, 120 bp, Artificial Sequence
  ENSG00000132849_45 (sequence is synthesized)
ctcagcttgaaaacatgtctacaggctaccaccttggttcgcccactgctgaacaccatccagaagacacagaaacacctccacctaagattattactttggagaaaggctctgaaggct

SEQ ID NO: 300952 - DNA, 120 bp, Artificial Sequence
  ENSG00000132849_46 (sequence is synthesized)
tggggtttagtattgtagggggttatggaagtccccatggagacctgccaatttatgtcaagactgtatttgcaaagggagcagctgcagatgacggccgattaaaacgaggggatcaga

SEQ ID NO: 300953 - DNA, 120 bp, Artificial Sequence
  ENSG00000132849_47 (sequence is synthesized)
ttttagctgttaatggcgagaccctggaaggtgttactcatgagcaagcagtcgccattctaaaacaccagagagggactgtaaccttaactgtgctgtcatgagcctcgggcctgatca

SEQ ID NO: 300954 - DNA, 120 bp, Artificial Sequence
  ENSG00000132849_48 (sequence is synthesized)
caagatagatgttgttgtttagaatatccacaggcagatgaagttctgagtgggtatgaaaagcaccctcaactaaaatgcaccttcattcttatttcttgccctctctgctcaggagaa

SEQ ID NO: 300955 - DNA, 120 bp, Artificial Sequence
  ENSG00000132849_49 (sequence is synthesized)
atggctgaggtttcatgtgaatttcccaaatcaacaatcatctcctaatgtttcccagttcctgtcacctgttggcgaggttgatttctaaaacttaaatgagtctacctgttttgcatt

SEQ ID NO: 300956 - DNA, 73 bp, Artificial Sequence
  ENSG00000132849_50 (sequence is synthesized)
tgggtttatttttgtttttttagtagagatggagcttccccatgtgggccaggctggtcttgaacttctgacc

SEQ ID NO: 300957 - DNA, 76 bp, Artificial Sequence
  ENSG00000132849_51 (sequence is synthesized)
agcccagtattctgattttaaccaactggttctgattatatttaccaaaactggagttaacttctctttccttata

SEQ ID NO: 300958 - DNA, 120 bp, Artificial Sequence
  ENSG00000132849_52 (sequence is synthesized)
tatatttaccaaaactggagttaacttctctttccttatactcttctctccctatcccctactcacaccgaggcttaacagcaacctcagatctcatccaatggacagaaacaaatgtta

SEQ ID NO: 300959 - DNA, 120 bp, Artificial Sequence
  ENSG00000132849_53 (sequence is synthesized)
agcaacttgtcatctcactcatgatttacttatgctaattgtctcttcaagtaagcaagaaaacattagcagtgtaattaatttaccagtgatccccaagatgaaataccagattctcct

SEQ ID NO: 300960 - DNA, 120 bp, Artificial Sequence
  ENSG00000132849_54 (sequence is synthesized)
atgggaaattactgtgctgtcttctgtatgacttatggtcaaataagtctcaaattcatttctctggatagatctttatatgctagtcattggtgattttgatgagtcaatttacagact

SEQ ID NO: 300961 - DNA, 120 bp, Artificial Sequence
  ENSG00000132849_55 (sequence is synthesized)
gtaatcttctaaaaattctgaaagactaattgttttctgtgccatataaatgcataccactgagcaaatgaaccttattctcagcaggaacaactagcatacatgttctgaattctaaca

SEQ ID NO: 300962 - DNA, 120 bp, Artificial Sequence
  ENSG00000132849_56 (sequence is synthesized)
gtgctaaattacattcaagtccaggaagatcacctggaattaatggcatttcagttggcaggcatcattcccacccctcggtcttaggaaaaggaggtagaagccccagaaccacacggc

SEQ ID NO: 300963 - DNA, 120 bp, Artificial Sequence
  ENSG00000132849_57 (sequence is synthesized)
agagatcagcaagttttgtctcaagtcagacaaggtctaggtggccttggccttatgcaaagtgggtgacatatttgattatatttccctttacctccatagtagtcaggccagcagcat

SEQ ID NO: 300964 - DNA, 120 bp, Artificial Sequence
  ENSG00000132849_58 (sequence is synthesized)
ggactgcaagaacctaagggagcaacatacttagctgcaaagtgagcaaatgaattgagcctaggaatatgtgatgaaaatgcatggctgatgtttcctgatctccaaggagactcccat

SEQ ID NO: 300965 - DNA, 120 bp, Artificial Sequence
  ENSG00000132849_59 (sequence is synthesized)
ttgctgaagttttgcatgctaagaaatcaactacagcagaaaatacaagaatacctttaagttgattattggcaatcttattcatatattagcaagaaaaagggagagatgcttactggt

SEQ ID NO: 300966 - DNA, 72 bp, Artificial Sequence
  ENSG00000132849_60 (sequence is synthesized)
ttcatatattagcaagaaaaagggagagatgcttactggtggatgctatagagtcctctgtttttaaaagta

SEQ ID NO: 300967 - DNA, 78 bp, Artificial Sequence
  ENSG00000132849_61 (sequence is synthesized)
gaaaaaaaaccatgaaggatgagtactagagtcagtaatagaagtagttcagcattatttaactacaacacaatgctg

SEQ ID NO: 300968 - DNA, 120 bp, Artificial Sequence
  ENSG00000132849_62 (sequence is synthesized)
tagaagtagttcagcattatttaactacaacacaatgctgcaaatatttcacagtaattatcaaaatttaatgggctctaatttaaaatgttatttaataagtatagattttaattgaga

SEQ ID NO: 300969 - DNA, 120 bp, Artificial Sequence
  ENSG00000132849_63 (sequence is synthesized)
attatctttgagtagatgtaatcacaaagtgcattaactcttgttggaatattttatggctattccaaagtatagagtgcctaaattttgtgttgaaaatgtctttcatgacggtattaa

SEQ ID NO: 300970 - DNA, 120 bp, Artificial Sequence
  ENSG00000132849_64 (sequence is synthesized)
gttttctgaaattacacatggcttttaaaatttctaatgtatccaagatgtgcaatgttgttaggatctcattcttcagtgcatgaaaagctactaccctcagaacattttgtgttaatt

SEQ ID NO: 300971 - DNA, 120 bp, Artificial Sequence
  ENSG00000132849_65 (sequence is synthesized)
gtacctgcaagaacacctcaggcaagccaagaagaaatgaaacccaaataaaacttgaaaatgcaccttaaaaatatatatacatataatagttttgaaatgggattctgctttattttg

SEQ ID NO: 300972 - DNA, 120 bp, Artificial Sequence
  ENSG00000132849_66 (sequence is synthesized)
atggaatggccattaaatacacattttgagataatacattgttgtggtgtttctttatacattatccttttaggtcgtgctagtaaaagtatattgatgaaggaattatgatgctttata

SEQ ID NO: 300973 - DNA, 120 bp, Artificial Sequence
  ENSG00000132849_67 (sequence is synthesized)
cttcttactgcactaaattgatagaactagtacttgtcataatcggttctgtctccgctcacatgactaatacgtaattgcctttccaaaaagatatttttgcctcagaacttactgaca

SEQ ID NO: 300974 - DNA, 120 bp, Artificial Sequence
  ENSG00000132849_68 (sequence is synthesized)
agctgagaggctatgaagatggaaatttgtgaaagaagtagtgctcttatatttggcctcatcatttgggccatttcagtatagtaatgatatcactaatcggaattagcatgagaggga

SEQ ID NO: 300975 - DNA, 120 bp, Artificial Sequence
  ENSG00000132849_69 (sequence is synthesized)
agtaagccaggaagaataaaactgctgaatgtttgtatgtgtaagatatttccaaagattctaaataaatgtagttgcctacagagcaaatggagttttattatatatgaaaaagtgtac

SEQ ID NO: 300976 - DNA, 120 bp, Artificial Sequence
  ENSG00000132849_70 (sequence is synthesized)
aaagctggccggggcctgggcctgagcatcgttgggaaacggtaaagacgtgctgtgggagttgggatctgcctttttcatccagagctctgatgcctgtgaacactgaaagagaaagcc

SEQ ID NO: 300977 - DNA, 120 bp, Artificial Sequence
  ENSG00000132849_71 (sequence is synthesized)
taatgtaaagtagtgatgggatttctaaaaataagatatttatgaaaatttgacaacatgggtcatatttctgagcaaggtcttaccagaaaaattgtcatatcaagatagaactccaag

SEQ ID NO: 300978 - DNA, 120 bp, Artificial Sequence
  ENSG00000132849_72 (sequence is synthesized)
tccaatcaatccagactgatatatttctgtacagagtaagaacaactagcaaggttctttcacttggaattactaagatcggagttttgcagaggttgattaaagcaaccatacccaaga

SEQ ID NO: 300979 - DNA, 120 bp, Artificial Sequence
  ENSG00000132849_73 (sequence is synthesized)
aatagctagcatcaagaatgagatttatccaatgttgggtcaagaacattgcttcgacatggaaattaacatggaacattgcttttcgtgatactgttaatttcatactatgttgaaact

SEQ ID NO: 300980 - DNA, 120 bp, Artificial Sequence
  ENSG00000132849_74 (sequence is synthesized)
agttgagtagacatagttaagagataaacataattcttcacgatagtagttttctattaagaaaaatgtcctgctgggcacagtggcatgtacctgttgtctcagctatgtgggaagatc

SEQ ID NO: 300981 - DNA, 120 bp, Artificial Sequence
  ENSG00000132849_75 (sequence is synthesized)
acttgaggccaggagttcaaggctatagtgtgctatgatcatgcctgtgaatagccactgcacttgagcctcttgggaaacataacaagaccccatctgtaaattaaaaaaaaaaaaaag

SEQ ID NO: 300982 - DNA, 120 bp, Artificial Sequence
  ENSG00000132849_76 (sequence is synthesized)
gtcacagtcagcagcgtgaagcatccaagggtctgatgtgggaaaccagggattttgcttctccggcatagttttccaggcagctttcacctgctgacagaggtgactgtttagcttgag

SEQ ID NO: 300983 - DNA, 120 bp, Artificial Sequence
  ENSG00000132849_77 (sequence is synthesized)
gactagcttgaaattagcttaattgattgcttttcctgatataaatagattgacaggttgcccttaaagagaacaaaatctgagagagagagagagagagagagagaaaaataggcccaa

SEQ ID NO: 300984 - DNA, 120 bp, Artificial Sequence
  ENSG00000132849_78 (sequence is synthesized)
ggtcgtcagaagagagaggagtctgtggtgaggatttgagctgcgtccagcattggatatttgtcaggaatgcagataccctgaagggaacacaacaatggtccaagggggtttcccaga

SEQ ID NO: 300985 - DNA, 120 bp, Artificial Sequence
  ENSG00000132849_79 (sequence is synthesized)
aagctttcagttttatgtttgtatacatgaatttcaccgtcatatttttattcattatgatgctttgaatttatgtctgcttaataattaatctgcttcagaattacctgaaagaataaa

SEQ ID NO: 300986 - DNA, 120 bp, Artificial Sequence
  ENSG00000132849_80 (sequence is synthesized)
actgccacagctggccaggtgcaacaggaagaccatcgccatcaactctttcttccaaaccttggttgcttctccccacttaaaacctgtttctgcaaagaagtcacttccaggattact

SEQ ID NO: 300987 - DNA, 120 bp, Artificial Sequence
  ENSG00000132849_81 (sequence is synthesized)
tttcttttcttgttcttttataatatagcaccacgaatgggacccacattgggtcgtaacactgactagcataatcattacataaataaagtcaaagatgaccttatgtaaccaatatta

SEQ ID NO: 300988 - DNA, 120 bp, Artificial Sequence
  ENSG00000132849_82 (sequence is synthesized)
ggggtgatcagacccaacaccaggtcatggggacgacgaagtccggcggagtcaaaggaatgattaaaaagacagtttgagagaagtgggcccagggggccatcgtgtgaggctgcgaag

SEQ ID NO: 300989 - DNA, 120 bp, Artificial Sequence
  ENSG00000132849_83 (sequence is synthesized)
ggcccagggggccatcgtgtgaggctgcgaaggccccaagctctgggagcccacgctatttattggtgctcaaagaaacaggtggtgaggatgtggggtttgaaaagaaacagtgtatca

SEQ ID NO: 300990 - DNA, 74 bp, Artificial Sequence
  ENSG00000132849_84 (sequence is synthesized)
cacctcggcttcctgagctgctgggaccacaggcatgtaccaccatgcctggctagttttgttttttttttaaa

SEQ ID NO: 300991 - DNA, 89 bp, Artificial Sequence
  ENSG00000132849_85 (sequence is synthesized)
taggagccactgtgcccagcgaagagcattatattttaatagatttgcctttactattatatcaccaataaactttatttttcataaaa

SEQ ID NO: 300992 - DNA, 120 bp, Artificial Sequence
  ENSG00000132849_86 (sequence is synthesized)
tccccatttaataaatggttgtttggaaataatatctaatgtacagcatattcacagcaccaagtttagtgaactttcatgtgtttgaaataaaaatgaaaggtgggatggaaattcatt

SEQ ID NO: 300993 - DNA, 120 bp, Artificial Sequence
  ENSG00000132849_87 (sequence is synthesized)
gaaaatggttttgattttatgtggagcaagaacagctgaaatgattctatggtctccaccttggtgattgaaaccatatacaaaagcacacataatggagaaagcaatggaggaaatgtc

SEQ ID NO: 300994 - DNA, 120 bp, Artificial Sequence
  ENSG00000132849_88 (sequence is synthesized)
taaatgggattgggttgaggtagtaagagaatagtgtgggtgatttttgttttctttcctggcctcctcacgattttctgttagatggttatggtgacatcagtaattggcacactaatg

SEQ ID NO: 300995 - DNA, 120 bp, Artificial Sequence
  ENSG00000132849_89 (sequence is synthesized)
gataagtatgcatttagggggtcaagtcagtgtctgcacacaggtgacccctgggtctttctttcagggtagtcagcagagtgcacacagcagctgtcatccctccttcgctcctgtcat

SEQ ID NO: 300996 - DNA, 120 bp, Artificial Sequence
  ENSG00000132849_90 (sequence is synthesized)
aacgagagaactggttgaaagactaacaatatgtgttggggtgggagaggaagttgcagccctgggcaccttgtttaaagttggaattccagtagccatcagagacccaggctgagggca

SEQ ID NO: 300997 - DNA, 120 bp, Artificial Sequence
  ENSG00000132849_91 (sequence is synthesized)
agatgcattagataaacttgatacctttagaaattcattaggtccccaggcacataaaaatattattatttgtatcaaagcttctccataaaagaagaaattgcagcccctttgcaaacc

SEQ ID NO: 300998 - DNA, 120 bp, Artificial Sequence
  ENSG00000132849_92 (sequence is synthesized)
ctcctttacccttttaagcacctcattccacccaaaatcagctctcaactgagagacatttgaccttagagtcttccctcaatcaaaagaatcaccatttttatgatttctcccccttgt

SEQ ID NO: 300999 - DNA, 80 bp, Artificial Sequence
  ENSG00000132854_0 (sequence is synthesized)
cccctagcgaaggcggggactcgggcgctgttggcagctggcgacgcggggcgaagccgcggctggcggcgcctggccag

SEQ ID NO: 301000 - DNA, 120 bp, Artificial Sequence
  ENSG00000132854_1 (sequence is synthesized)
cgagaccgtcggccagagggcgcctggagggtgtgcgcgccgcggacgaccagggtgcgccagccccggggtgcgcgcctgggacgcggacagtgcacccggaggttgcgtgcgctccga

SEQ ID NO: 301001 - DNA, 120 bp, Artificial Sequence
  ENSG00000132854_2 (sequence is synthesized)
cgtgcgctccgaagccggggtgtgcgcctagctgccccggccccgtgcaccgcgggccgcctcgcgcaggacttccgcagctcgccaagaaccttcaacaagttttacagactcattgga

SEQ ID NO: 301002 - DNA, 120 bp, Artificial Sequence
  ENSG00000132854_3 (sequence is synthesized)
tgaagagtgcctgagacactgagggtcagcgctccaaagatggagaagacagatgccaaagaccagtcctctcagggggatgaagagaaagaccctccgaagagccacccttattctgtg

SEQ ID NO: 301003 - DNA, 120 bp, Artificial Sequence
  ENSG00000132854_4 (sequence is synthesized)
gagaccccatatggctttcatttagacctggacttcctcaagtatgtggatgacatcgagaagggaaacactatcaaaagaattcctatccacagaagggccaagcaggccaaatttagc

SEQ ID NO: 301004 - DNA, 120 bp, Artificial Sequence
  ENSG00000132854_5 (sequence is synthesized)
actctgccccgaaacttcagccttcctgacagtggggctcgcccccctgcagccccgcccctccaaaactggtctcccgtggtgccaagggaggcatcacttgggacacaggagcaaaac

SEQ ID NO: 301005 - DNA, 120 bp, Artificial Sequence
  ENSG00000132854_6 (sequence is synthesized)
cagtcaccaccgcttggtaatgccccccaggcctcaacaagcaggagtgaggtgagctaccacaggaaggctctgttggcagaggccaccagacagttggaagctgctgagccagaggat

SEQ ID NO: 301006 - DNA, 120 bp, Artificial Sequence
  ENSG00000132854_7 (sequence is synthesized)
gccgagctcacttttgggagtggacggccccagctcttgagagcatccagcatgcctgccacgctgctgcacagcagggcttctgaggagccaggcctgagcctggggccccctgcccct

SEQ ID NO: 301007 - DNA, 120 bp, Artificial Sequence
  ENSG00000132854_8 (sequence is synthesized)
cctgccctccctccccttcagggtgaaggcagtgtctgtgatggcacctttgaacctgcagaaggattggcaggtttccacagctccagcccacgagcatcaactcggattccagagctg

SEQ ID NO: 301008 - DNA, 120 bp, Artificial Sequence
  ENSG00000132854_9 (sequence is synthesized)
gtccaggagggagctgagcctccagagggtgtggtgaaggttccaaatcacctccctctcccaggccctcctttctcattccagaatgtgcttgtagttctagaggacaaggaagatgaa

SEQ ID NO: 301009 - DNA, 120 bp, Artificial Sequence
  ENSG00000132854_10 (sequence is synthesized)
cacaatgccagagaagcagaggtgttgttcacccctggctcccctacgccaagcccgccacctctgccatcacccatccctgagaatgagctcctcctggaagaaatcgagctcaacatc

SEQ ID NO: 301010 - DNA, 120 bp, Artificial Sequence
  ENSG00000132854_11 (sequence is synthesized)
agcgagattccacccccgccacctgtagaggtggacatgagaagcattggcatcagggtaactgaggaaagcctgggccttgccagggtggatccaggcagcatctccagcctgaaacag

SEQ ID NO: 301011 - DNA, 120 bp, Artificial Sequence
  ENSG00000132854_12 (sequence is synthesized)
caggtctcggccctggagggagagttgtctggaagaaccgaggaactggcacaggtcagaactgctctccagcagcaggaagaggaaatcaaagctagggagcaaagaattcgagagctg

SEQ ID NO: 301012 - DNA, 120 bp, Artificial Sequence
  ENSG00000132854_13 (sequence is synthesized)
gagttcactgtagcccaactggaaggacagtttcaccaagagaacgccaaagacactcagggccagacggacgtgatggtgaacactgaccctgtccatggactcttgaccagggagtcg

SEQ ID NO: 301013 - DNA, 120 bp, Artificial Sequence
  ENSG00000132854_14 (sequence is synthesized)
tgtgataagggcattgaagtcaaccttctaggcagcatggagtctgaaagctgggggcaccgaggagaggagaatggcctcctatgggggccagatggtcataaacaagggaatcagagc

SEQ ID NO: 301014 - DNA, 120 bp, Artificial Sequence
  ENSG00000132854_15 (sequence is synthesized)
ccagcagaacgtgtgcttctgccccagctgtcactgccacagggacccgagcaggtccttacctcctctgtacatagcttcctctccactgaactcaggattgaagaagcaggcactgaa

SEQ ID NO: 301015 - DNA, 120 bp, Artificial Sequence
  ENSG00000132854_16 (sequence is synthesized)
caggaaggaggccctcagggaggaaccaggggagcaggaggctttctgtggggcagcgacagaaagactcccccagcagggagggaggagaccagttccaatctcccagggaaggagcac

SEQ ID NO: 301016 - DNA, 120 bp, Artificial Sequence
  ENSG00000132854_17 (sequence is synthesized)
ccgggaaggccaccaagctcgccaacggatgccactattgggcagtatgtgaagaagatccaggagctcctgcaggagcagtggaactgcctggagcatgggtacccggagctggccagc

SEQ ID NO: 301017 - DNA, 120 bp, Artificial Sequence
  ENSG00000132854_18 (sequence is synthesized)
gccatcaagcagccagcctccaagctcagcagcatccagagccagctgctgagctccctcaacctgctgctgtcggcctactcggcccaggctcacccacccaaggagccaccggcctcc

SEQ ID NO: 301018 - DNA, 120 bp, Artificial Sequence
  ENSG00000132854_19 (sequence is synthesized)
tcctcctccccgccagtggagatctccccatcgaccagccttaaatccataatgaaaaagaaagactatggcttccgtgcaggaggtaatgggaccaaaaagaaccttcagtttgttggg

SEQ ID NO: 301019 - DNA, 120 bp, Artificial Sequence
  ENSG00000132854_20 (sequence is synthesized)
gttaacggtgggtatgagaccacctcaagtgaggagaccagcggtgaggacagcaccccagaggacttgtctgacagcgaggcagagaagaagtgtgacggcccagatcacaagcatgtc

SEQ ID NO: 301020 - DNA, 120 bp, Artificial Sequence
  ENSG00000132854_21 (sequence is synthesized)
aaagatgcccatctcacctgcgaggctgggcagggcatccctgagggcacctgccatgctgcccaggaaagtgggcctggggaagaagtcccccactccaaggccgagagatataaaccc

SEQ ID NO: 301021 - DNA, 120 bp, Artificial Sequence
  ENSG00000132854_22 (sequence is synthesized)
agtcaagagtggttccgcgtctccagccggaagtcgtctagccccgccgtggtggcctcctacctccacgaggtccagcctcactccccacacttcctgaaactgcttgtcaacttggcc

SEQ ID NO: 301022 - DNA, 120 bp, Artificial Sequence
  ENSG00000132854_23 (sequence is synthesized)
gatcacaacgggaacacggcccttcactacagcgtgtcccactccaacttctccatcgtgaagctgctgctggagacaggcgtctgcaatgtggaccatcagaacaaagctggctacact

SEQ ID NO: 301023 - DNA, 120 bp, Artificial Sequence
  ENSG00000132854_24 (sequence is synthesized)
gccgtaatgatcactcccttggcttccgcagagaccaatgaagacatggctgttgtctggaagctcttaagagaaggaaatgtgaacattcaagctactcagggaggccagactgcgctg

SEQ ID NO: 301024 - DNA, 120 bp, Artificial Sequence
  ENSG00000132854_25 (sequence is synthesized)
atgctgggagtcagccacgacagggaggacatggttcaagcgctgcttagctgccaggcagatgtcaatctgcaggaccacgatggatcctcggccctcatggtggcctgtcaccatggc

SEQ ID NO: 301025 - DNA, 120 bp, Artificial Sequence
  ENSG00000132854_26 (sequence is synthesized)
aacgtggacctggtgcggctgctcctggcacacccagcctgcgacagcagcctgactgacaaggctggccgcacagctttgtccatcgctctgaagtcacccacccatatggaaattgct

SEQ ID NO: 301026 - DNA, 120 bp, Artificial Sequence
  ENSG00000132854_27 (sequence is synthesized)
gggcttctgagagcccacgcggagcagggcaggtccctggggctgtaggggctgcagaagaactggccgtggggaacaaaagccttcttctctggactcctccctcgcccttgaagaggg

SEQ ID NO: 301027 - DNA, 120 bp, Artificial Sequence
  ENSG00000132854_28 (sequence is synthesized)
cagaggtcacaggccagagagccacccttctagagaagaaactatgtcaaatatgcacatacattcctgttgtataattctgctcattaggatgctttgtagtttttgccttaggccaag

SEQ ID NO: 301028 - DNA, 120 bp, Artificial Sequence
  ENSG00000132854_29 (sequence is synthesized)
cctgaaaactacacgggcttcagagcagggttcaaggtgcaaggtgaggggtacgtcggtgtcatccaaacatccaaaacatcttcagccttgaattcctcatgactctaccctctgtaa

SEQ ID NO: 301029 - DNA, 120 bp, Artificial Sequence
  ENSG00000132854_30 (sequence is synthesized)
cattgtgtagcaagcaggcaggcaggagcacattagcacattagaaaagcaatactttttacatggaattttacagtgcactatctttctgttttttaagcaagtgtatacaaatatgtc

SEQ ID NO: 301030 - DNA, 120 bp, Artificial Sequence
  ENSG00000132854_31 (sequence is synthesized)
ccattgatatgcatgtctatagatgggaggggatttaagccaaccccctggcaagcattctgtaggggaccctagaagaatcaccgtgcagactggtgaaactgaacaagcaccatttgg

SEQ ID NO: 301031 - DNA, 120 bp, Artificial Sequence
  ENSG00000132854_32 (sequence is synthesized)
gagctttgtttcgatggggttgacagagaaatcttaaaatctgacagggtagaagaagcactttggcatcaatgccatatgtacagtcttgactatttctgagtcatctagtggctccaa

SEQ ID NO: 301032 - DNA, 120 bp, Artificial Sequence
  ENSG00000132854_33 (sequence is synthesized)
tttgctccagggaaattggaattaattaagaaatttattatctagtaagttgctatgtaataaagaaaaaaaagaaattcaatccaatgacacacaccacatgtatttgggcagagtcag

SEQ ID NO: 301033 - DNA, 120 bp, Artificial Sequence
  ENSG00000132854_34 (sequence is synthesized)
attctctcagctattttgagtctgtggaagaaacaaaaaaaagcttcctcctgaggatgggttattgtcatcaagaagccacctgcatagccgtatccattacctcatggtaattcccgg

SEQ ID NO: 301034 - DNA, 120 bp, Artificial Sequence
  ENSG00000132854_35 (sequence is synthesized)
tgctttcccctcatatcccctagaagcaaatatctgttctgaggttttttgggacttctggctgcaataggagcaagggacccaggcagggcagagcaataccttccgaagcttccatat

SEQ ID NO: 301035 - DNA, 120 bp, Artificial Sequence
  ENSG00000132854_36 (sequence is synthesized)
tccctggggccagcacatgcaaggtttatatggtcagtagctcacgtgaagtcatctgaatctttcttaaatctgctctcttaaaatctcttatgcaaaaaaaaaaaaaaaaagcccctt

SEQ ID NO: 301036 - DNA, 120 bp, Artificial Sequence
  ENSG00000132854_37 (sequence is synthesized)
atataaaaagaagtaatgtcaaagtttgatgagctttacattggaaactcaaaagcttgcactctcattttggctcagatgccaatttgctgggtgcccctgtggtgagtcatgaaacct

SEQ ID NO: 301037 - DNA, 120 bp, Artificial Sequence
  ENSG00000132854_38 (sequence is synthesized)
ccttgggccgcaatttcatcatctctaaaaacagaaattgtcatacaacctacctcctgggaggtgctgcacaagaagcagctgatggaagtttcaaaatccaatttgtggccgagcgcg

SEQ ID NO: 301038 - DNA, 120 bp, Artificial Sequence
  ENSG00000132854_39 (sequence is synthesized)
ctcaaaaaaaaaaaaaaaaaaaatccaatttgtaacccattaaggccatctacagcaatggtacagcaaacttcttttgccattgtgattcataagagaggctcagagtcccagaacaca

SEQ ID NO: 301039 - DNA, 120 bp, Artificial Sequence
  ENSG00000132854_40 (sequence is synthesized)
taagagaggctcagagtcccagaacacaatgacatgtgttgatgcaactcagaggtggagagaatggagcaaataatgagaaaaaaaatgctttaaatgagtttattttgacctcaaaat

SEQ ID NO: 301040 - DNA, 120 bp, Artificial Sequence
  ENSG00000132854_41 (sequence is synthesized)
acattgtaagagcaacatcctacgttaataaatgttctagcccggtgcttcgcgaacatttatgtgcatacaaatcacctgggatcttgttagaaggcagtaggtctggggtggggcctg

SEQ ID NO: 301041 - DNA, 120 bp, Artificial Sequence
  ENSG00000132854_42 (sequence is synthesized)
agattctgcatttctaaccaggtcctgggagatgctgatgctatcgagccacaaccacactttgagtagcaagcctctggcctatccttattgtttgttatattaaaatgctgcctctca

SEQ ID NO: 301042 - DNA, 120 bp, Artificial Sequence
  ENSG00000132854_43 (sequence is synthesized)
ggcaagctggagggagctgcagggacagaggccaaagctgtctttccttgtgtaagggaggaactcttgctggccggggaacctcttggaattggtcttttttggggtttcagaggcaaa

SEQ ID NO: 301043 - DNA, 120 bp, Artificial Sequence
  ENSG00000132854_44 (sequence is synthesized)
aaaaaagattttagtacttccaggaacccagtggaataaaaactgatgtgtgtgacagtggaggctcgggacctctactcttgcctttgctctaaggttgggtctgactatgggcccact

SEQ ID NO: 301044 - DNA, 120 bp, Artificial Sequence
  ENSG00000132854_45 (sequence is synthesized)
gcctacagctgtatggatagcacagggcacaaagatgccagccagggagggcaaatgagagttgaaagccagcccacactccatttgccaagccttgcgctgcagcaccacatccaccca

SEQ ID NO: 301045 - DNA, 120 bp, Artificial Sequence
  ENSG00000132854_46 (sequence is synthesized)
gagggggctgttctcatttgcattgtgcaaaggcagtgtctggggccaagaatggccctgctgcgtggactccagacctcttcctgggcttttgcattcctgtgttcctctctggttctt

SEQ ID NO: 301046 - DNA, 120 bp, Artificial Sequence
  ENSG00000132854_47 (sequence is synthesized)
gcatagtagaggttttctctggcctggttttggaggagcattatattgatatctggtatagttcactgaatattttctctgcgtgcatgtgtgtgtgtacgtgcatgtgtgtgtgtacag

SEQ ID NO: 301047 - DNA, 120 bp, Artificial Sequence
  ENSG00000132854_48 (sequence is synthesized)
gggcaggagattaagtgctgctcacatatggaaatgggcccttcggctgagcagcacttcctgttgtaacagatcaaaccctcttcactgtcgggtaaagtggaaccacgttttgctttg

SEQ ID NO: 301048 - DNA, 120 bp, Artificial Sequence
  ENSG00000132854_49 (sequence is synthesized)
cagggcagcatgcgagtctgcttcctgccacaaatcacaatttgactgctttctcattgtttcagtgctagttctagccttccccgttgggagccgcctcctgtcctgttgagcacattg

SEQ ID NO: 301049 - DNA, 120 bp, Artificial Sequence
  ENSG00000132854_50 (sequence is synthesized)
caagatctgtgtccttgctcgtgtatctactgtgagcacggtgtcatcaccacccccacaaccctagtgtcagtatgcacttgtgagccaggaaggaccactgaggtgcccttgagcaga

SEQ ID NO: 301050 - DNA, 120 bp, Artificial Sequence
  ENSG00000132854_51 (sequence is synthesized)
agtgggtgctagaccatgagtccagaggcctacgttctgctcctacactcccattcactgagcaagtctgggcctcagatttcccagctgtaagacagggacaacaatggcacctacgcc

SEQ ID NO: 301051 - DNA, 120 bp, Artificial Sequence
  ENSG00000132854_52 (sequence is synthesized)
acatggttcttcatccacacttagaggggcattgttaacagagacagttctcccaacattgagcagaaagcaaggctcctccaagaggtccccaaaacattgatttacatgatctggttc

SEQ ID NO: 301052 - DNA, 120 bp, Artificial Sequence
  ENSG00000132854_53 (sequence is synthesized)
cctgtccctccttacctctccacacacctgcaacccttgtcccctcaaagcaatatcctggttttgctacattcccatgcatccccaagatcattctaacctgtgatgttgtgtctgcct

SEQ ID NO: 301053 - DNA, 120 bp, Artificial Sequence
  ENSG00000132855_0 (sequence is synthesized)
agaagaaaacagttccacgttgcttgaaattgaaaatcaagataaaaatgttcacaattaagctccttctttttattgttcctctagttatttcctccagaattgatcaagacaattcat

SEQ ID NO: 301054 - DNA, 120 bp, Artificial Sequence
  ENSG00000132855_1 (sequence is synthesized)
catttgattctctatctccagagccaaaatcaagatttgctatgttagacgatgtaaaaattttagccaatggcctccttcagttgggacatggtcttaaagactttgtccataagacga

SEQ ID NO: 301055 - DNA, 120 bp, Artificial Sequence
  ENSG00000132855_2 (sequence is synthesized)
agggccaaattaatgacatatttcaaaaactcaacatatttgatcagtctttttatgatctatcgctgcaaaccagtgaaatcaaagaagaagaaaaggaactgagaagaactacatata

SEQ ID NO: 301056 - DNA, 120 bp, Artificial Sequence
  ENSG00000132855_3 (sequence is synthesized)
aactacaagtcaaaaatgaagaggtaaagaatatgtcacttgaactcaactcaaaacttgaaagcctcctagaagaaaaaattctacttcaacaaaaagtgaaatatttagaagagcaac

SEQ ID NO: 301057 - DNA, 120 bp, Artificial Sequence
  ENSG00000132855_4 (sequence is synthesized)
taactaacttaattcaaaatcaacctgaaactccagaacacccagaagtaacttcacttaaaacttttgtagaaaaacaagataatagcatcaaagaccttctccagaccgtggaagacc

SEQ ID NO: 301058 - DNA, 120 bp, Artificial Sequence
  ENSG00000132855_5 (sequence is synthesized)
aatataaacaattaaaccaacagcatagtcaaataaaagaaatagaaaatcagctcagaaggactagtattcaagaacccacagaaatttctctatcttccaagccaagagcaccaagaa

SEQ ID NO: 301059 - DNA, 120 bp, Artificial Sequence
  ENSG00000132855_6 (sequence is synthesized)
ctactccctttcttcagttgaatgaaataagaaatgtaaaacatgatggcattcctgctgaatgtaccaccatttataacagaggtgaacatacaagtggcatgtatgccatcagaccca

SEQ ID NO: 301060 - DNA, 120 bp, Artificial Sequence
  ENSG00000132855_7 (sequence is synthesized)
gcaactctcaagtttttcatgtctactgtgatgttatatcaggtagtccatggacattaattcaacatcgaatagatggatcacaaaacttcaatgaaacgtgggagaactacaaatatg

SEQ ID NO: 301061 - DNA, 120 bp, Artificial Sequence
  ENSG00000132855_8 (sequence is synthesized)
gttttgggaggcttgatggagaattttggttgggcctagagaagatatactccatagtgaagcaatctaattatgttttacgaattgagttggaagactggaaagacaacaaacattata

SEQ ID NO: 301062 - DNA, 120 bp, Artificial Sequence
  ENSG00000132855_9 (sequence is synthesized)
ttgaatattctttttacttgggaaatcacgaaaccaactatacgctacatctagttgcgattactggcaatgtccccaatgcaatcccggaaaacaaagatttggtgttttctacttggg

SEQ ID NO: 301063 - DNA, 120 bp, Artificial Sequence
  ENSG00000132855_10 (sequence is synthesized)
atcacaaagcaaaaggacacttcaactgtccagagggttattcaggaggctggtggtggcatgatgagtgtggagaaaacaacctaaatggtaaatataacaaaccaagagcaaaatcta

SEQ ID NO: 301064 - DNA, 120 bp, Artificial Sequence
  ENSG00000132855_11 (sequence is synthesized)
agccagagaggagaagaggattatcttggaagtctcaaaatggaaggttatactctataaaatcaaccaaaatgttgatccatccaacagattcagaaagctttgaatgaactgaggcaa

SEQ ID NO: 301065 - DNA, 120 bp, Artificial Sequence
  ENSG00000132855_12 (sequence is synthesized)
tggtctaataatctggtattaaatccttaagagaaagcttgagaaatagattttttttatcttaaagtcactgtctatttaagattaaacatacaatcacataaccttaaagaataccgt

SEQ ID NO: 301066 - DNA, 120 bp, Artificial Sequence
  ENSG00000132855_13 (sequence is synthesized)
ttacatttctcaatcaaaattcttataatactatttgttttaaattttgtgatgtgggaatcaattttagatggtcacaatctagattataatcaataggtgaacttattaaataacttt

SEQ ID NO: 301067 - DNA, 120 bp, Artificial Sequence
  ENSG00000132855_14 (sequence is synthesized)
tctaaataaaaaatttagagacttttattttaaaaggcatcatatgagctaatatcacaactttcccagtttaaaaaactagtactcttgttaaaactctaaacttgactaaatacagag

SEQ ID NO: 301068 - DNA, 120 bp, Artificial Sequence
  ENSG00000132855_15 (sequence is synthesized)
gactggtaattgtacagttcttaaatgttgtagtattaatttcaaaactaaaaatcgtcagcacagagtatgtgtaaaaatctgtaatacaaatttttaaactgatgcttcattttgcta

SEQ ID NO: 301069 - DNA, 120 bp, Artificial Sequence
  ENSG00000132855_16 (sequence is synthesized)
caaaataatttggagtaaatgtttgatatgatttatttatgaaacctaatgaagcagaattaaatactgtattaaaataagttcgctgtctttaaacaaatggagatgactactaagtca

SEQ ID NO: 301070 - DNA, 120 bp, Artificial Sequence
  ENSG00000132855_17 (sequence is synthesized)
tggagatgactactaagtcacattgactttaacatgaggtatcactataccttatttgttaaaatatatactgtatacattttatatattttaacacttaatactatgaaaacaaataat

SEQ ID NO: 301071 - DNA, 120 bp, Artificial Sequence
  ENSG00000132855_18 (sequence is synthesized)
ttacagtaagaatgaacatatttgtggcatcgagttaaagtttatatttcccctaaatatgctgtgattctaatacattcgtgtaggttttcaagtagaaataaacctcgtaacaagtta

SEQ ID NO: 301072 - DNA, 120 bp, Artificial Sequence
  ENSG00000132855_19 (sequence is synthesized)
ctgaacgtttaaacagcctgacaagcatgtatatatgtttaaaattcaataaacaaagacccagtccctaaattatagaaatttaaattattcttgcatgtttatcgacatcacaacaga

SEQ ID NO: 301073 - DNA, 120 bp, Artificial Sequence
  ENSG00000132855_20 (sequence is synthesized)
tccctaaatccctaaatccctaaagattagatacaaattttttaccacagtatcacttgtcagaatttatttttaaatatgattttttaaaactgccagtaagaaattttaaattaaacc

SEQ ID NO: 301074 - DNA, 120 bp, Artificial Sequence
  ENSG00000132855_21 (sequence is synthesized)
catttgttaaaggatatagtgcccaagttatatggtgacctacctttgtcaatacttagcattatgtatttcaaattatccaatatacatgtcatatatatttttatatgtcacatatat

SEQ ID NO: 301075 - DNA, 120 bp, Artificial Sequence
  ENSG00000132855_22 (sequence is synthesized)
aaaagatatgtatgatctatgtgaatcctaagtaaatattttgttccagaaaagtacaaaataataaaggtaaaaataatctataattttcaggaccacagactaagctgtcgaaattaa

SEQ ID NO: 301076 - DNA, 120 bp, Artificial Sequence
  ENSG00000132855_23 (sequence is synthesized)
cgctgatttttttagggccagaataccaaaatggctcctctcttcccccaaaattggacaatttcaaatgcaaaataattcattatttaatatatgagttgcttcctctatttggtttcc

SEQ ID NO: 301077 - DNA, 120 bp, Artificial Sequence
  ENSG00000132855_24 (sequence is synthesized)
ctattatctgcaatgacaacttttaaaaatccgaatcccaaataagcgttttctctctagacgaaaacctcttaactataatgaaagtgttcattctagttcaatcaggtattttacctc

SEQ ID NO: 301078 - DNA, 120 bp, Artificial Sequence
  ENSG00000132855_25 (sequence is synthesized)
taatcttcctcagattttctattttttggtagtgtatagattatttatacagattatttaaaattgggacttatacagattatttaaaactgggatacatgcatctaaaacactgtaata

SEQ ID NO: 301079 - DNA, 120 bp, Artificial Sequence
  ENSG00000132855_26 (sequence is synthesized)
tttataagaaaggaagataaacttacggggaaatacagtaacagtaactacatacgagtctgtacccattaaattgcatatctatctcctttaggaggctggtggtggcatgatgagtgt

SEQ ID NO: 301080 - DNA, 120 bp, Artificial Sequence
  ENSG00000132872_0 (sequence is synthesized)
agaagagccaaaacaggaaccgaggtggcaaatcactgtgcgagggcgagtggacctccctctttgcctcctccctgttccaggagctggtgccctgggctctgcgctgttgttttcagc

SEQ ID NO: 301081 - DNA, 120 bp, Artificial Sequence
  ENSG00000132872_1 (sequence is synthesized)
gctccgaaagccggcgcttgagatccaggcaagtgaatccagccaggcagttttcccttcagcacctcggacagaacacgcagtaaaaaatggctccgatcaccaccagccgggaagaat

SEQ ID NO: 301082 - DNA, 120 bp, Artificial Sequence
  ENSG00000132872_2 (sequence is synthesized)
ttgatgaaatccccacagtggtggggatcttcagtgcatttggcctggtcttcacagtctctctctttgcatggatctgctgtcagagaaaatcatccaagtctaacaagactcctccat

SEQ ID NO: 301083 - DNA, 120 bp, Artificial Sequence
  ENSG00000132872_3 (sequence is synthesized)
acaagtttgtgcatgtgcttaagggagttgatatttaccctgaaaacctaaatagcaaaaagaagtttggagcagatgataaaaatgaagtaaagaataagccagctgtgccaaagaatt

SEQ ID NO: 301084 - DNA, 120 bp, Artificial Sequence
  ENSG00000132872_4 (sequence is synthesized)
cattgcatctggatcttgaaaagagagatctcaatggcaattttcccaaaaccaacctcaaacctggcagtccttctgatctggagaatgcaaccccgaagctctttttagaaggggaaa

SEQ ID NO: 301085 - DNA, 120 bp, Artificial Sequence
  ENSG00000132872_5 (sequence is synthesized)
aagagtcagtttcccctgagagtttaaagtccagcacttcccttacttcagaagagaaacaagagaagctgggaactctcttcttctccttagaatacaacttcgagagaaaagcatttg

SEQ ID NO: 301086 - DNA, 120 bp, Artificial Sequence
  ENSG00000132872_6 (sequence is synthesized)
tggtcaatatcaaggaagcccgtggcttgccagccatggatgagcagtcgatgacctctgacccatatatcaaaatgacgatcctcccagagaagaagcataaagtgaaaactagagtgc

SEQ ID NO: 301087 - DNA, 120 bp, Artificial Sequence
  ENSG00000132872_7 (sequence is synthesized)
tgagaaaaaccttggatccagcttttgatgagacctttacattctatgggataccctacacccaaatccaagaattggccttgcacttcacaattttgagttttgacaggttttcaagag

SEQ ID NO: 301088 - DNA, 120 bp, Artificial Sequence
  ENSG00000132872_8 (sequence is synthesized)
atgatatcattggggaagttctaattcctctctcgggaattgaattatctgaaggaaaaatgttaatgaatagagagatcatcaagagaaatgttaggaagtcttcaggacggggtgagt

SEQ ID NO: 301089 - DNA, 120 bp, Artificial Sequence
  ENSG00000132872_9 (sequence is synthesized)
tactgatctctctctgctatcagtccaccacaaacactctaactgtggttgtcttaaaagctcgacatctgcctaaatctgatgtgtccggactttcagatccctatgtcaaagtgaacc

SEQ ID NO: 301090 - DNA, 120 bp, Artificial Sequence
  ENSG00000132872_10 (sequence is synthesized)
tgtaccatgccaaaaagagaatctccaagaagaagactcatgtgaagaaatgcacccccaatgcagtgttcaatgagctgtttgtctttgatattccttgtgagggccttgaagatataa

SEQ ID NO: 301091 - DNA, 120 bp, Artificial Sequence
  ENSG00000132872_11 (sequence is synthesized)
gtgttgaatttttggttttggattctgaaagggggtcccgaaatgaggtaatcgggcagttagtcttgggtgcagcagcagaaggaactggtggagagcactggaaagagatctgtgact

SEQ ID NO: 301092 - DNA, 120 bp, Artificial Sequence
  ENSG00000132872_12 (sequence is synthesized)
accccaggagacaaattgccaagtggcacgtgctctgtgatggttagcatcctagccgtgagttggaacttaaaggtttttactaggcaaggagaaattttctttctttctatattggat

SEQ ID NO: 301093 - DNA, 120 bp, Artificial Sequence
  ENSG00000132872_13 (sequence is synthesized)
tgcaagcttgggaaatcaagctacctttttgttgttgttgttgttgctagaaatggattgaattagtagaccagaaagtaacttcaaatgtgtattatgataatttccctatttattaga

SEQ ID NO: 301094 - DNA, 120 bp, Artificial Sequence
  ENSG00000132872_14 (sequence is synthesized)
agagttggataaattttcataagatattcaatatctccttcagattaccagtgatataactaggaatagtcagacattttatgaatactgtgccagaatcccaaattataaatgtgacaa

SEQ ID NO: 301095 - DNA, 120 bp, Artificial Sequence
  ENSG00000132872_15 (sequence is synthesized)
tctcattggaacatgtcacaaaaagttaatgtgattaagatttaaaaacgaaaagtatgccttgccttgtgaaaatttatccatttatcttcaggttggggaaatcaatttttctttaaa

SEQ ID NO: 301096 - DNA, 120 bp, Artificial Sequence
  ENSG00000132872_16 (sequence is synthesized)
tttggtttgtaattatttgatgcaattttatcataagagtaactcagattcatttcaaaaggacagtgaacaagctgagaaattattttatcaaagggctgagttgagaacactgtggct

SEQ ID NO: 301097 - DNA, 120 bp, Artificial Sequence
  ENSG00000132872_17 (sequence is synthesized)
gaaatataatttttctcccccctaaggttacatgtgagtcaaaattttgtaaaatataacctcacataagaaccatggccttggattattcactgcctgtcacaagcctcagtgtggcct

SEQ ID NO: 301098 - DNA, 120 bp, Artificial Sequence
  ENSG00000132872_18 (sequence is synthesized)
gagaaatccctatgtacctttgtgaaattgttgaattagttagtgaataaagaaataaacttcaactagaaatccagttagaagtgcaattttcttataggaaataggtatagtgtgcaa

SEQ ID NO: 301099 - DNA, 120 bp, Artificial Sequence
  ENSG00000132872_19 (sequence is synthesized)
gtgtacttttaaggccatcgtttgtacccagagtcggcatggccacctaagtcttcatttaatttattgtcccccagaaaagattaagatgctacttgaaaagactgtgaagatttttta

SEQ ID NO: 301100 - DNA, 120 bp, Artificial Sequence
  ENSG00000132872_20 (sequence is synthesized)
cattgccagataaaaagtgttacttaaccaacaaacaaatgtaagactacaaaatcgttcaagagcaattctaatataatttacatatgttcacgcaaaatatgcttaggctgtcaaatt

SEQ ID NO: 301101 - DNA, 120 bp, Artificial Sequence
  ENSG00000132872_21 (sequence is synthesized)
agcacaacaaagaatgtgtttcactatcttttctaggctaatttgtcttgagctgttgtctatagagcagtttacagacttgtgtcttgtatcattttccagtgccagggttctgaaatt

SEQ ID NO: 301102 - DNA, 120 bp, Artificial Sequence
  ENSG00000132872_22 (sequence is synthesized)
cattcagaacctgttagattaaagctgcaccctgtgattatttgaaaagaattagcttgagagtaatgtcactatatttgagttcttagagaagtatgagtggaacttgagtacagttga

SEQ ID NO: 301103 - DNA, 120 bp, Artificial Sequence
  ENSG00000132872_23 (sequence is synthesized)
attattaaatatgcaagttagaaattaagtctactgaaaaatttacattttgagtcaggttttgtgtcagtactttagcagtttttgagaatgtgtttgatatcacagtgtttgtaaatt

SEQ ID NO: 301104 - DNA, 120 bp, Artificial Sequence
  ENSG00000132872_24 (sequence is synthesized)
ctatgaaaaatgcattttccaaacaacttatacatgctttttatgactatgcctaatgtaaagaaaatgtattacattctgtatgtacaaagattaaaaatcaacctcttttttgtgctt

SEQ ID NO: 301105 - DNA, 120 bp, Artificial Sequence
  ENSG00000132872_25 (sequence is synthesized)
taaaatgactttgggattaaaaaagcatatttcccaatcattgtcttcattccactacaaagtcacctcacagcatcttgctccactcggcatctctgtgaaagcaacatgaaatgaact

SEQ ID NO: 301106 - DNA, 120 bp, Artificial Sequence
  ENSG00000132872_26 (sequence is synthesized)
gtagtaggtgtgtagtttggggaagtcaaatggccattttatgtatgtgcatttggtatcatgggccgtggaacagaatatatgttggacctctgaaaagttgtaaggggccaattctaa

SEQ ID NO: 301107 - DNA, 120 bp, Artificial Sequence
  ENSG00000132872_27 (sequence is synthesized)
gtattcttcacggcagccagaagttaatggtggtagcagctgaggtatggttgttggacgaggccgatttttttttttttaacatggaacaatgaaaccaacaacaaacatttttaaaat

SEQ ID NO: 301108 - DNA, 120 bp, Artificial Sequence
  ENSG00000132872_28 (sequence is synthesized)
taaaatggataatttgtaaatagtttttagcttttaaaatttaaagtgtttttgagtgtgaaaagttgagtaaaactatttgcaactggttttcagaaaagagaaaagaaacaacaaagg

SEQ ID NO: 301109 - DNA, 120 bp, Artificial Sequence
  ENSG00000132872_29 (sequence is synthesized)
aattgaaacaggcagggagatcttaatacctaatttcatcatttctgaaaatgtactgttttagaatgtattacaatatcaatgtgaatatcttgaatcctgttacaaatcctgcactgt

SEQ ID NO: 301110 - DNA, 120 bp, Artificial Sequence
  ENSG00000132872_30 (sequence is synthesized)
attaaacatgtaaattaattgtttgtctgattagccaatctcaccacccaaatggggaggtatacatgtttgaagaactgtgtaactcagtaattgatttgttctgatgttgtaactcaa

SEQ ID NO: 301111 - DNA, 120 bp, Artificial Sequence
  ENSG00000132872_31 (sequence is synthesized)
tagaagtgttttggaaggaagcatggtgtgtgagacagtgtctgttcttttgtgccagctctgtatgatgtttgtaagaccatgtttgtaagacatgaataaattgctgcttttgcccaa

SEQ ID NO: 301112 - DNA, 120 bp, Artificial Sequence
  ENSG00000132872_32 (sequence is synthesized)
aaaccaaaagccaaaaataatcctgtgtaggatataatttaaatatcctttaaacatttctaagtaatgggtgtggccaatttattgccaattttaacttcctgtagtaccaaacaagac

SEQ ID NO: 301113 - DNA, 120 bp, Artificial Sequence
  ENSG00000132872_33 (sequence is synthesized)
cacaagatggcaggcagtggtttttcaagcagcgatggtactgctcaaaagcttttagttactcttcaattccttagaatattaaaataaaaataagtaagattatatttaaatgacgat

SEQ ID NO: 301114 - DNA, 63 bp, Artificial Sequence
  ENSG00000132874_0 (sequence is synthesized)
ttttttttttttttttgagacacagtttgctctgtcacccaggctggagtacatctcagcctc

SEQ ID NO: 301115 - DNA, 120 bp, Artificial Sequence
  ENSG00000132874_1 (sequence is synthesized)
tctcaaagtgctgggattacaggcgtgggccgccgcacccggccatttgcttttgattttactggctcataggtggaagggacttgccttgcctcagatgaaactttggactttgacttt

SEQ ID NO: 301116 - DNA, 120 bp, Artificial Sequence
  ENSG00000132874_2 (sequence is synthesized)
gactttgactttcaagttaatactggaataagttaagactttgggggactgttgctaaggcacaattttgttttgaaatgtataaagaacataatatctgggaggggccaggggcagaat

SEQ ID NO: 301117 - DNA, 120 bp, Artificial Sequence
  ENSG00000132874_3 (sequence is synthesized)
gatatggtttggctctgtgtccacacctgaatatcatctcaaattgtaatcccagtaatccccatatgttgagggcaggacccagggcaaggtgactggatcatgggagcggtttccccc

SEQ ID NO: 301118 - DNA, 120 bp, Artificial Sequence
  ENSG00000132874_4 (sequence is synthesized)
ctcacaagatctgatggttttataagtgtttggcaagttcctgctccacaccatctctctcttctgccgccatttgagaaggtccaagtttgcttccccttcgccttccaccatgactgt

SEQ ID NO: 301119 - DNA, 120 bp, Artificial Sequence
  ENSG00000132874_5 (sequence is synthesized)
ctgtaagtttcctgaggcctccccagcaatgtggaagttccatcgatagaagagtggctgtgacccgaaggaatgtctgacccccacagcagtcctctcctgccagagccactttccagc

SEQ ID NO: 301120 - DNA, 120 bp, Artificial Sequence
  ENSG00000132874_6 (sequence is synthesized)
ctcctgccagagccactttccagcagatacaaactctacgaggcagagtttaccagcccgagctggccctcgacatccccggatactcacccagctctgcccctcctggaaatgcctgaa

SEQ ID NO: 301121 - DNA, 120 bp, Artificial Sequence
  ENSG00000132874_7 (sequence is synthesized)
gaaaaggatctccggtcttccaatgaagacagtcacattgtgaagatcgaaaagctcaatgaaaggagtaaaaggaaagacgacggggtggcccatcgggactcagcaggccaaaggtgc

SEQ ID NO: 301122 - DNA, 120 bp, Artificial Sequence
  ENSG00000132874_8 (sequence is synthesized)
atctgcctctccaaagcagtgggctacctcacgggcgacatgaaggagtacaggatctggctgaaagacaagcaccttgccctccagttcatagactgggtcctgagagggaccgctcag

SEQ ID NO: 301123 - DNA, 120 bp, Artificial Sequence
  ENSG00000132874_9 (sequence is synthesized)
gtgatgttcatcaacaatcctctcagcggcctcatcatcttcatagggctgctgatccagaatccctggtggacaatcactgggggcctggggacagtggtctcgaccttaacagctctc

SEQ ID NO: 301124 - DNA, 120 bp, Artificial Sequence
  ENSG00000132874_10 (sequence is synthesized)
gccttgggccaagacaggtctgccattgcctcaggactccatgggtacaacgggatgctggtgggactgctgatggccgtgttctcggagaagttagactactactggtggcttctgttt

SEQ ID NO: 301125 - DNA, 120 bp, Artificial Sequence
  ENSG00000132874_11 (sequence is synthesized)
cctgtgaccttcacagccatgtcctgcccagttctttctagtgccttgaattccatcttcagcaagtgggacctcccggtcttcactctgcccttcaacattgcagtcaccttgtacctt

SEQ ID NO: 301126 - DNA, 120 bp, Artificial Sequence
  ENSG00000132874_12 (sequence is synthesized)
gcagccacaggccactacaacctcttcttccccacaacactggtagagcctgtgtcttcagtgcccaatatcacctggacagagatggaaatgcccctgctgttacaagccatccctgtt

SEQ ID NO: 301127 - DNA, 120 bp, Artificial Sequence
  ENSG00000132874_13 (sequence is synthesized)
ggggtcggccaggtgtatggctgtgacaatccctggacaggcggcgtgttcctggtggctctgttcatctcctcgccactcatctgcttgcatgcagccattggctcaatcgtggggctg

SEQ ID NO: 301128 - DNA, 120 bp, Artificial Sequence
  ENSG00000132874_14 (sequence is synthesized)
ctagcagccctgtcagtggccacacccttcgagaccatctacacaggcctctggagctacaactgcgtcctctcctgcatcgccatcggaggcatgttctatgccctcacctggcagact

SEQ ID NO: 301129 - DNA, 120 bp, Artificial Sequence
  ENSG00000132874_15 (sequence is synthesized)
cacctgctggccctcatctgtgccctgttctgtgcatacatggaagcagccatctccaacatcatgtcagtggtgggcgtgccaccaggcacctgggccttctgccttgccaccatcatc

SEQ ID NO: 301130 - DNA, 120 bp, Artificial Sequence
  ENSG00000132874_16 (sequence is synthesized)
ttcctgctcctgacgacaaacaacccagccatcttcagactcccactcagcaaagtcacctaccccgaggccaaccgcatctactacctgacagtgaaaagcggtgaagaagagaaggcc

SEQ ID NO: 301131 - DNA, 120 bp, Artificial Sequence
  ENSG00000132874_17 (sequence is synthesized)
cccagcggaggcggtggggagcatccacccacagcaggcccaaaggtggaggagggctcggaggctgtgctctccaagcacaggagtgtatttcacatcgagtggtcatccattcggagg

SEQ ID NO: 301132 - DNA, 120 bp, Artificial Sequence
  ENSG00000132874_18 (sequence is synthesized)
taccggaagcccacagtcgagctgcttgatctggacaccatggaggagagctctgagataaaagtggaaacaaacatttccaagacatcctggattcggagttccatggctgccagtggg

SEQ ID NO: 301133 - DNA, 120 bp, Artificial Sequence
  ENSG00000132874_19 (sequence is synthesized)
aaaagggtcagcaaagccctcagctacatcacaggagagatgaaggagtgtggagagggacttaaagacaagtccccagtgttccagttctttgactgggtcctccgaggcacatctcaa

SEQ ID NO: 301134 - DNA, 120 bp, Artificial Sequence
  ENSG00000132874_20 (sequence is synthesized)
gtgatgtttgtgaacaaccccctcagcggcatcctcatcatcctcggcctcttcatccagaacccctggtgggcgatctcaggctgcctgggtaccatcatgtccaccttgacagccctc

SEQ ID NO: 301135 - DNA, 120 bp, Artificial Sequence
  ENSG00000132874_21 (sequence is synthesized)
atcctgagtcaggacaagtcggccatcgctgcaggatttcacggctacaatggggtgctggtggggctgctgatggccgtgttctcagacaaaggtgactactactggtggctgttgcta

SEQ ID NO: 301136 - DNA, 120 bp, Artificial Sequence
  ENSG00000132874_22 (sequence is synthesized)
cccgtcatcatcatgtccatgtcttgccccatcctctccagtgccctgggtaccatcttcagcaagtgggacctcccagtcttcacactgcccttcaatatcactgtgactttgtacctg

SEQ ID NO: 301137 - DNA, 120 bp, Artificial Sequence
  ENSG00000132874_23 (sequence is synthesized)
gcagccacgggccactacaaccttttcttccccacaacgctgctgcagcctgcatccgccatgcccaacatcacctggtcagaggtccaagtgcccttgcttttgagagccatccccgtt

SEQ ID NO: 301138 - DNA, 120 bp, Artificial Sequence
  ENSG00000132874_24 (sequence is synthesized)
ggaattggccaagtgtacggctgtgataacccctggactggaggcatcttcctcatagctctgttcatatcctcacctctcatttgcttgcatgcagcaattggatccaccatggggatg

SEQ ID NO: 301139 - DNA, 120 bp, Artificial Sequence
  ENSG00000132874_25 (sequence is synthesized)
ctagcagcactcactattgcgacgccctttgactccatctacttcggcctgtgtggcttcaacagcaccctcgcatgcatagcgataggaggcatgttctacgtcatcacctggcagacg

SEQ ID NO: 301140 - DNA, 120 bp, Artificial Sequence
  ENSG00000132874_26 (sequence is synthesized)
cacctcctcgccatcgcctgcgcactgtttgctgcctacctgggtgctgccctggctaacatgttatctgtgtttggattgccgccctgcacttggcccttctgtctctcagctctcacc

SEQ ID NO: 301141 - DNA, 120 bp, Artificial Sequence
  ENSG00000132874_27 (sequence is synthesized)
ttcctgctcctgacgaccaataaccccgccatctacaagctcccgctcagcaaagtcacctacccagaggccaaccgcatctactacctgtcccaggagagaaacagaagggcatcaatc

SEQ ID NO: 301142 - DNA, 120 bp, Artificial Sequence
  ENSG00000132874_28 (sequence is synthesized)
ataacaaagtatcaggcctacgatgtctcctaagtttccctgtctaaaacacatcagtgtaaattcaggcttcagcacgccgtccagatccccaggataagagaccacttagccttccct

SEQ ID NO: 301143 - DNA, 120 bp, Artificial Sequence
  ENSG00000132874_29 (sequence is synthesized)
ttggtctgttctgtgactctctccccaaacacaaagaagcgtgtatgtagtcaccattccagaacctctcttttctaagatgcacaacacttatcaaagatatgtttagtttagacttta

SEQ ID NO: 301144 - DNA, 120 bp, Artificial Sequence
  ENSG00000132874_30 (sequence is synthesized)
gtttagactttatacccttagctttcccataagagctccctttgtggggaacttgccctcttctgcgaaataagcctcatccttaaagagaagtcaccggccgggcacggtggctcacgc

SEQ ID NO: 301145 - DNA, 120 bp, Artificial Sequence
  ENSG00000132874_31 (sequence is synthesized)
ctgtctcaaaaaaaaaaaaaaggggaagtcaccaagaaagggatagaggtcagtgacatggtcatcacacaactcggtcatttaatatggcaaaacacaataccaagaactgtgcattag

SEQ ID NO: 301146 - DNA, 120 bp, Artificial Sequence
  ENSG00000132874_32 (sequence is synthesized)
cccggaaggcaagagggttggttctgccccagctctgctgctaatgagcccctaccaggttgagcaagtctttccccactctccacctccatttcttaatcagtttcatgacagggaagg

SEQ ID NO: 301147 - DNA, 120 bp, Artificial Sequence
  ENSG00000132874_33 (sequence is synthesized)
atttgaaagtcctttccacctcagaagtgttgattattctctctctcctataatctgatgaaatcagcatgacaacaagtaatttaagtaaaggacagaagggttacccaagaagaggca

SEQ ID NO: 301148 - DNA, 120 bp, Artificial Sequence
  ENSG00000132874_34 (sequence is synthesized)
ggaaaatgttaacgttctataaagttttattcttgagtcataggaaaatgctctccagacgtggggttaggaacctaaattcactgaaaatgccaatgtgctttcctttacattacagaa

SEQ ID NO: 301149 - DNA, 120 bp, Artificial Sequence
  ENSG00000132874_35 (sequence is synthesized)
atatttctggaagtgtcagatgaaaactgatctttatcaacactcaaatcatattataaacaaatgtgtttccctttgtaatattcataatcatactgtcattaaactgtttaagtttgc

SEQ ID NO: 301150 - DNA, 120 bp, Artificial Sequence
  ENSG00000132874_36 (sequence is synthesized)
gtaagctgcctccatcatcctaaaaaacgaccatgctgaaagagctcctctgtatttcttggcagaccctttccagttttcatcctgggtgtttctgaacaggaacatatctcattgaag

SEQ ID NO: 301151 - DNA, 120 bp, Artificial Sequence
  ENSG00000132874_37 (sequence is synthesized)
tatttgcacctctacctacagacaaggaaaaggcttggagcacctccattcattgtgccaacaggacctgaatgaccgattgtttcttgcttactacttgtggtcaactaagtagagatt

SEQ ID NO: 301152 - DNA, 120 bp, Artificial Sequence
  ENSG00000132874_38 (sequence is synthesized)
atctctctcttctgccgccatttgagaaggtccaagtttgcttccccttcgccttccaccatgacttccatcgatagaagagtggctgtgacccgaaggaatgtctgacccccacagcag

SEQ ID NO: 301153 - DNA, 120 bp, Artificial Sequence
  ENSG00000132874_39 (sequence is synthesized)
ccatgttcggggaagaaacgctctttgcctgacctgatgtcctctccctgtgttctctgctctggttcaatcagttgcagcactcaccttctttgcctctccttgcacctgtgtagaacc

SEQ ID NO: 301154 - DNA, 120 bp, Artificial Sequence
  ENSG00000132874_40 (sequence is synthesized)
aagcacacctgtaactttctttccctgaagctgattttcattctctgccagaatctccataactatctattgtgcgacattaagggatgttggtattacagtaaaatttccggagttagc

SEQ ID NO: 301155 - DNA, 120 bp, Artificial Sequence
  ENSG00000132879_0 (sequence is synthesized)
gctttccaggcaagcgcaggtccaggcggtgcagcttgggcggcccaacggatcgtgccgcggcggccgagcgcagctacaggagggtgtccagaagccacaagccatggctgtggggaa

SEQ ID NO: 301156 - DNA, 120 bp, Artificial Sequence
  ENSG00000132879_1 (sequence is synthesized)
catcaacgagctgcccgagaacatcctgctggagctgttcacgcacgtgcccgcccgccagctgctgctgaactgccgcctggtctgcagcctctggcgggacctcatcgacctcgtgac

SEQ ID NO: 301157 - DNA, 120 bp, Artificial Sequence
  ENSG00000132879_2 (sequence is synthesized)
cctctggaaacgcaagtgcctgcgagagggcttcatcactgaggactgggaccagcccgtggccgactggaagatcttctacttcttacggagcctgcacaggaacctcctgcacaaccc

SEQ ID NO: 301158 - DNA, 120 bp, Artificial Sequence
  ENSG00000132879_3 (sequence is synthesized)
gtgcgctgaagaggggttcgagttctggagcctggatgtgaatggaggcgatgagtggaaggtggaggatctctctcgagaccagaggaaggaattccccaatgaccaggtcaagaaata

SEQ ID NO: 301159 - DNA, 120 bp, Artificial Sequence
  ENSG00000132879_4 (sequence is synthesized)
cttcgttacttcatattacacctgcctcaagtcccaggtggtggacctcaaggccgaagggtattgggaggagctgatggataccacacggccggacatcgaggtcaaggactggttcgc

SEQ ID NO: 301160 - DNA, 120 bp, Artificial Sequence
  ENSG00000132879_5 (sequence is synthesized)
agccaggccagattgcgggtccaagtaccagctgtgcgttcagctcctgtcgtccgcgcacgcgcctctggggaccttccagccagacccggcgaccatccagcagaagagcgatgccaa

SEQ ID NO: 301161 - DNA, 120 bp, Artificial Sequence
  ENSG00000132879_6 (sequence is synthesized)
gtggagggaggtctcccacacattctccaactacccgcccggcgtccgctacatctggtttcagcacggcggcgtggacactcattactgggccggctggtacggcccgagggtcaccaa

SEQ ID NO: 301162 - DNA, 120 bp, Artificial Sequence
  ENSG00000132879_7 (sequence is synthesized)
cagcagcatcaccatcgggcccccgctgccctgacaccccctgagcccccatctgctgaaccctgactggtaaacaactgctgtcagaaaagggctgggcttgggaaggggaggtggagg

SEQ ID NO: 301163 - DNA, 120 bp, Artificial Sequence
  ENSG00000132879_8 (sequence is synthesized)
ccaggtgtccccagacctctaacccttgcccctagcagcctcttctttgtggagcctctcagtgtgggcagccctcgcatgctggggtcgggccagctctccccgaaaggtcttgacctg

SEQ ID NO: 301164 - DNA, 120 bp, Artificial Sequence
  ENSG00000132879_9 (sequence is synthesized)
aatgatggccggggaagcctgcgtgtgcccctttcagagacggagcacctgagatgtgggaggtgcagcatgttcccctgggcccctcagaaagtcgagcttggaggccagcctggatct

SEQ ID NO: 301165 - DNA, 120 bp, Artificial Sequence
  ENSG00000132879_10 (sequence is synthesized)
gtctctcccttcccctcctgggaccattctacctgtgttctttgaccctcggagcagggacaggcaagacaactggcaagcttgcagctgccctgatggtgcaggtgcagggaggtgacc

SEQ ID NO: 301166 - DNA, 120 bp, Artificial Sequence
  ENSG00000132879_11 (sequence is synthesized)
atgtaactctgaccaatctgggaagtggagggtgggctcatgggccgtgctctgcccctgtctgctgctcccagtctctcgctctgcctgcctgctcagaagaggtggctttggcccaga

SEQ ID NO: 301167 - DNA, 120 bp, Artificial Sequence
  ENSG00000132879_12 (sequence is synthesized)
aggtcgggtgtggactgtcctcactgtcagtggagccccagaagctagatgggtaccaggtggggttaggttcccagaggactgagggaatcctgtacaggatgtcccagggtagatggg

SEQ ID NO: 301168 - DNA, 120 bp, Artificial Sequence
  ENSG00000132879_13 (sequence is synthesized)
gagcaggattgggacctgctctgacagctggacacatgagccctggatgagtatggtagggggtttgaagaatcccctgtccacctcccaaatccaggcccggccccctctggcttggag

SEQ ID NO: 301169 - DNA, 120 bp, Artificial Sequence
  ENSG00000132879_14 (sequence is synthesized)
agcattccaagcccccaccccacccctagaactgccattcccaagacctctgtctcccagccaaccacccttggaacttgcctcttgtcctgctggaaagatagcagtgttctcctgact

SEQ ID NO: 301170 - DNA, 120 bp, Artificial Sequence
  ENSG00000132879_15 (sequence is synthesized)
tcgccctactgcatgcagccaaataaaaggtgtgcccagtctaacctgtgccctgtggtttctggaaggaaaggcagactttaggtggtcctgcctggacctgcagatggtacaatggca

SEQ ID NO: 301171 - DNA, 120 bp, Artificial Sequence
  ENSG00000132879_16 (sequence is synthesized)
tggcttctgtctaaggtacagaggggttggcatttcaggaaccaggccatcacagaaacaggttcatgggcagacccctcagtgagctgcaggtatctcacctggcagccgtccagtact

SEQ ID NO: 301172 - DNA, 120 bp, Artificial Sequence
  ENSG00000132879_17 (sequence is synthesized)
gctggcttcctctggaggcccagccacaggctggggttggggtgtgtggacatctctgggcagctcttgagtccaccttgtgccagatcagcagtgccacccaggctctgcctcctggtg

SEQ ID NO: 301173 - DNA, 120 bp, Artificial Sequence
  ENSG00000132879_18 (sequence is synthesized)
ttactctttgccaacagctttacggacattggatgaagccgaagcatttagaatggtgcctggcacacagttggtgcgtgatatggttaagctttgtgtccccacccacatctcatcttg

SEQ ID NO: 301174 - DNA, 120 bp, Artificial Sequence
  ENSG00000132879_19 (sequence is synthesized)
aagctttgtgtccccacccacatctcatcttgaatggtaatcctgggtgtttagggagagacctggtgggaagtgattggattatgggagcggttttcccccatgctgttctcatgatag

SEQ ID NO: 301175 - DNA, 120 bp, Artificial Sequence
  ENSG00000132879_20 (sequence is synthesized)
tggttttacaagtgacggtttccccggctccctcctgccgccatgtgaagaaggtcgttgcttccccttcaccttccaccaccatgattgtaagttccttttttcttttcttttcttttt

SEQ ID NO: 301176 - DNA, 69 bp, Artificial Sequence
  ENSG00000132879_21 (sequence is synthesized)
ttgtttcttgaggcttccccagccatatggaactataagtcaattaaacctctttccttttataaatca

SEQ ID NO: 301177 - DNA, 120 bp, Artificial Sequence
  ENSG00000132879_22 (sequence is synthesized)
gcgggccggggcggggcctcgctttccaggcaagcgcaggtccaggcggtgcagcttgggcggcccaacggatcgtgccgcggcggccgagcgcaggcaggagatcatgtcctctgagat

SEQ ID NO: 301178 - DNA, 120 bp, Artificial Sequence
  ENSG00000132879_23 (sequence is synthesized)
cttgagaaggtggctggagccctttggacctccgcgggaggcagtgataattagcctcctcctcccatcatgttctgaggatgggagagaggatggtgacggcaccggaggcctggggtg

SEQ ID NO: 301179 - DNA, 120 bp, Artificial Sequence
  ENSG00000132879_24 (sequence is synthesized)
ctctgcccggctgcgcattatatccccattaaagactggcctactgaaaaaggctggccctggaatcaaagaagatccgggcttcttccccctctgcccttatttttgaccttgggcagt

SEQ ID NO: 301180 - DNA, 120 bp, Artificial Sequence
  ENSG00000132879_25 (sequence is synthesized)
gccttccacctctattgtgagaggccagagaaaaaaatcagagctcaccttttattaaagtacctgatgtgtcccaagctccttggaccgccccagtgacccctggagctacaggagggt

SEQ ID NO: 301181 - DNA, 80 bp, Artificial Sequence
  ENSG00000132879_26 (sequence is synthesized)
agcgctgcgggctgcgcgagtcccggggcggcgagtcccggcgctgtccgcgtctgtgtcggtcccggcgaccgcgcctc

SEQ ID NO: 301182 - DNA, 120 bp, Artificial Sequence
  ENSG00000132879_27 (sequence is synthesized)
ccccgcgcccggccgccccgcagtcccagcagtctgctcgaggcccggggctgcgggttcctcagcggaccgaggaggctgggaaagctacaggagggtgtccagaagccacaagccatg

SEQ ID NO: 301183 - DNA, 120 bp, Artificial Sequence
  ENSG00000132879_28 (sequence is synthesized)
catctcatcttgaatgtgacggtttccccggctccctcctgccgccatgtgaagaaggtcgttgcttccccttcaccttccaccaccatgatttagagatggagtttcaccatgttggcc

SEQ ID NO: 301184 - DNA, 120 bp, Artificial Sequence
  ENSG00000132881_0 (sequence is synthesized)
agctgccagcacgcgcagaaggcggacgcaggcggggcggaagtgggcccggcgggctggggcggcgggagtgcgggtgggcgtttaaaggggccttcggcacccaggtcggttcgccgc

SEQ ID NO: 301185 - DNA, 120 bp, Artificial Sequence
  ENSG00000132881_1 (sequence is synthesized)
cgggactgctgacggggagggctaggtagccctgggagtcgggatctagaaggtagaggagaagcggggctgtctgacccccggaggtgacaaggggagaggggctgtgtgaataccctc

SEQ ID NO: 301186 - DNA, 120 bp, Artificial Sequence
  ENSG00000132881_2 (sequence is synthesized)
catgggcagtaatgggatgactatccccagggagcattgcgaaggagagaggcggctgagggactgcactttctggggccccccgggagagtcagagggcagttaagagggatcacaggc

SEQ ID NO: 301187 - DNA, 120 bp, Artificial Sequence
  ENSG00000132881_3 (sequence is synthesized)
ccggcttggtactgtcactccccttcccactccctgctctcagcattctgtcacctccctaccccgtcgcggtgcccagccatggccagacctcccgtgcccggttcggtggttgtccca

SEQ ID NO: 301188 - DNA, 120 bp, Artificial Sequence
  ENSG00000132881_4 (sequence is synthesized)
aactggcacgagagtgccgagggcaaggagtacctggcttgcattctgcgcaagaaccgccggcgggtgtttgggctgcttgagcggccagtgctgctgccgcctgtgtccattgacact

SEQ ID NO: 301189 - DNA, 120 bp, Artificial Sequence
  ENSG00000132881_5 (sequence is synthesized)
gccagctacaagatctttgtgtccgggaagagtggtgtgggcaagacggcgctggtggccaagctggctggcctggaggtgcctgtggtgcaccacgagaccaccggcatccagaccacc

SEQ ID NO: 301190 - DNA, 120 bp, Artificial Sequence
  ENSG00000132881_6 (sequence is synthesized)
agccaagctgcaggccagcagccgtgtcgtcatgtttcgttttgagttctgggactgtggagagtctgcactcaaaaagttcgatcatatgctgctggcttgcatggagaacacagatgc

SEQ ID NO: 301191 - DNA, 120 bp, Artificial Sequence
  ENSG00000132881_7 (sequence is synthesized)
cttcctcttcctcttctccttcactgaccgtgcctcctttgaagacctccctggacagctggcccgcatagcaggtgaggcccctggtgtcgtcaggatggtcatcggctccaaatttga

SEQ ID NO: 301192 - DNA, 120 bp, Artificial Sequence
  ENSG00000132881_8 (sequence is synthesized)
ccagtacatgcacacggacgtgcccgagcgggacctcacagccttccggcaggcctgggagctgcccctgctacgggtgaagagtgtgccggggcggcggctggctgatgggcgcacact

SEQ ID NO: 301193 - DNA, 120 bp, Artificial Sequence
  ENSG00000132881_9 (sequence is synthesized)
ggacgggcgggctgggctggccgacgttgcccacatactcaatggccttgctgagcagctgtggcaccaggaccaggtggcggctggcctgcttcccaaccccccagagagtgctcctga

SEQ ID NO: 301194 - DNA, 120 bp, Artificial Sequence
  ENSG00000132881_10 (sequence is synthesized)
atgagtcacgagtggttgcctgtgatcccacccccaaccctcaggtctcgacatagggctggaggctggggcaggaacatggatcctatctggaggactggccagcatggcctgatcagg

SEQ ID NO: 301195 - DNA, 120 bp, Artificial Sequence
  ENSG00000132881_11 (sequence is synthesized)
gaggatgtggccagagaaggcccacccgcgagcagcgctttccttgcagaattcatggcagggaggtggggaccaaggccctgagctcgaacatctcccgtggcctttccccctttggca

SEQ ID NO: 301196 - DNA, 120 bp, Artificial Sequence
  ENSG00000132881_12 (sequence is synthesized)
gcaccgatggaggatgactgggagagggggtgcctctcaagttacttcaatcaagaacctgtattggttgaggtgacaccatctgttgtaacagataaaccccgaaatcccagtgctgaa

SEQ ID NO: 301197 - DNA, 120 bp, Artificial Sequence
  ENSG00000132906_0 (sequence is synthesized)
agttggctactcgccatggacgaagcggatcggcggctcctgcggcggtgccggctgcggctggtggaagagctgcaggtggaccagctctgggacgccctgctgagccgcgagctgttc

SEQ ID NO: 301198 - DNA, 120 bp, Artificial Sequence
  ENSG00000132906_1 (sequence is synthesized)
aggccccatatgatcgaggacatccagcgggcaggctctggatctcggcgggatcaggccaggcagctgatcatagatctggagactcgagggagtcaggctcttcctttgttcatctcc

SEQ ID NO: 301199 - DNA, 120 bp, Artificial Sequence
  ENSG00000132906_2 (sequence is synthesized)
tgcttagaggacacaggccaggacatgctggcttcgtttctgcgaactaacaggcaagcagcaaagttgtcgaagccaaccctagaaaaccttaccccagtggtgctcagaccagagatt

SEQ ID NO: 301200 - DNA, 120 bp, Artificial Sequence
  ENSG00000132906_3 (sequence is synthesized)
cgcaaaccagaggttctcagaccggaaacacccagaccagtggacattggttctggaggatttggtgatgtcggtgctcttgagagtttgaggggaaatgcagatttggcttacatcctg

SEQ ID NO: 301201 - DNA, 120 bp, Artificial Sequence
  ENSG00000132906_4 (sequence is synthesized)
agcatggagccctgtggccactgcctcattatcaacaatgtgaacttctgccgtgagtccgggctccgcacccgcactggctccaacatcgactgtgagaagttgcggcgtcgcttctcc

SEQ ID NO: 301202 - DNA, 120 bp, Artificial Sequence
  ENSG00000132906_5 (sequence is synthesized)
tcgctgcatttcatggtggaggtgaagggcgacctgactgccaagaaaatggtgctggctttgctggagctggcgcagcaggaccacggtgctctggactgctgcgtggtggtcattctc

SEQ ID NO: 301203 - DNA, 120 bp, Artificial Sequence
  ENSG00000132906_6 (sequence is synthesized)
tctcacggctgtcaggccagccacctgcagttcccaggggctgtctacggcacagatggatgccctgtgtcggtcgagaagattgtgaacatcttcaatgggaccagctgccccagcctg

SEQ ID NO: 301204 - DNA, 120 bp, Artificial Sequence
  ENSG00000132906_7 (sequence is synthesized)
ggagggaagcccaagctctttttcatccaggcctgtggtggggagcagaaagaccatgggtttgaggtggcctccacttcccctgaagacgagtcccctggcagtaaccccgagccagat

SEQ ID NO: 301205 - DNA, 120 bp, Artificial Sequence
  ENSG00000132906_8 (sequence is synthesized)
gccaccccgttccaggaaggtttgaggaccttcgaccagctggacgccatatctagtttgcccacacccagtgacatctttgtgtcctactctactttcccaggttttgtttcctggagg

SEQ ID NO: 301206 - DNA, 120 bp, Artificial Sequence
  ENSG00000132906_9 (sequence is synthesized)
gaccccaagagtggctcctggtacgttgagaccctggacgacatctttgagcagtgggctcactctgaagacctgcagtccctcctgcttagggtcgctaatgctgtttcggtgaaaggg

SEQ ID NO: 301207 - DNA, 120 bp, Artificial Sequence
  ENSG00000132906_10 (sequence is synthesized)
atttataaacagatgcctggttgctttaatttcctccggaaaaaacttttctttaaaacatcataaggccagggcccctcaccctgccttatcttgcaccccaaagctttcctgccccag

SEQ ID NO: 301208 - DNA, 120 bp, Artificial Sequence
  ENSG00000132906_11 (sequence is synthesized)
cagccggcacagggtctgctctttctctgccagtgacagacaggctcttagcagcttccagattgacgacaagtgctgaacagtggaggaagagggacagatgaatgccgtggattgcac

SEQ ID NO: 301209 - DNA, 120 bp, Artificial Sequence
  ENSG00000132906_12 (sequence is synthesized)
gtggcctcttgagcagtggctggtccagggctagtgacttgtgtcccatgatccctgtgttgtctctagagcagggattaacctctgcactactgacatgtggggccaggtcaccctttg

SEQ ID NO: 301210 - DNA, 120 bp, Artificial Sequence
  ENSG00000132906_13 (sequence is synthesized)
ctgtgaggctgtcctgtacattgtgggatgttcagcactgtcccttgcctcaatgccagtaacgcgtcttcctgagtggtgccaaacaaaaaggttctcaggtgttgccaaatatgtcct

SEQ ID NO: 301211 - DNA, 120 bp, Artificial Sequence
  ENSG00000132906_14 (sequence is synthesized)
ggggtataaaactttcctcgcctgacaaccactggtctgtagggatttttggctacacacaaaccagtatcgctcatagatcagcaaaccggggcctactagagtctgaacagctgtaat

SEQ ID NO: 301212 - DNA, 120 bp, Artificial Sequence
  ENSG00000132906_15 (sequence is synthesized)
ctatgaattctaagtgaaattttaaaaattgttaatttttcctatattgcattaattttaaaaaataaatctgaggcaaatatggactctcttttgcctatttcttccctcattttgctc

SEQ ID NO: 301213 - DNA, 120 bp, Artificial Sequence
  ENSG00000132906_16 (sequence is synthesized)
tttgcctatttcttccctcattttgctccaactctttcttcttccttacaaaagagacttttgcttttttcgaaacatttccccatgtttttctggggtctcgctatgttgcccaggctg

SEQ ID NO: 301214 - DNA, 120 bp, Artificial Sequence
  ENSG00000132906_17 (sequence is synthesized)
tcccaagtagctcttactacaggcgtgcaccattgcacccagccccatttattcatgtcttatttcacttgatccttatcccatcccaggaaggcaacaagggtgagaaccctgtgctca

SEQ ID NO: 301215 - DNA, 120 bp, Artificial Sequence
  ENSG00000132906_18 (sequence is synthesized)
gggaggttaggtctcttgtccaagggaaaacgattatccagagaagagacctggccagaacctgggtcccctgagtcctagccatgcttcccatgtgccttacttgctgaagcacccccg

SEQ ID NO: 301216 - DNA, 120 bp, Artificial Sequence
  ENSG00000132906_19 (sequence is synthesized)
gactgcagtgtgaacgtgctgtgcaatagtgacacgctgggcttccccacaaggctccaccctgaggtcttttaagctgtccttatgccagcctatttcttgttttttgggccttttttt

SEQ ID NO: 301217 - DNA, 120 bp, Artificial Sequence
  ENSG00000132906_20 (sequence is synthesized)
tggagtgcaatgacgcaatcttggcttattgcagtctcgacctcctgggctcaagagatccttccacctcagccacctgagtagcttggactacaggtgtgcaccacctctcccagttaa

SEQ ID NO: 301218 - DNA, 83 bp, Artificial Sequence
  ENSG00000132906_21 (sequence is synthesized)
gctcaagagatccttccacctcagccacctgagtagcttggactacaggtgtgcaccacctctatgccatgttactcaggctg

SEQ ID NO: 301219 - DNA, 120 bp, Artificial Sequence
  ENSG00000132906_22 (sequence is synthesized)
ctcccaaagtgcaggggttacaggcttgagccattgcgcctgacctatttctggttcttagggccctggatgttaggatggatttctgaattaataataataataaaaccctcatcaaga

SEQ ID NO: 301220 - DNA, 120 bp, Artificial Sequence
  ENSG00000132906_23 (sequence is synthesized)
ttggccctgggggcggggcgaggcgcagaggtgcgtcctgagggcggggcggtgacgcaagagcgactcctgggggcggggcgaggccttggagatgcgtccggaggcggtggggagcga

SEQ ID NO: 301221 - DNA, 120 bp, Artificial Sequence
  ENSG00000132906_24 (sequence is synthesized)
tgctgaggggcagcgtgtcctcctggggctggggatttggggtgagcagggcaggcccaaaccaagggtaaaaggtagtagactcctgcctctgagccttggagtcggcacttttgtgtc

SEQ ID NO: 301222 - DNA, 120 bp, Artificial Sequence
  ENSG00000132906_25 (sequence is synthesized)
tctttatgagaggcatcctgcctgtggtgacgtttgccctttattcaaagagttgccttccctgtctcctccaaggtccccaggttgacacctcccgctcctccactgatggagctggtc

SEQ ID NO: 301223 - DNA, 120 bp, Artificial Sequence
  ENSG00000132906_26 (sequence is synthesized)
ctcagtgccagcgcaggatggctctgtccagaccctgaaggcgggtcatgggcccctccctatatcctgtgggcatcatgtagtcttctactcttgaccctcaagaattgtgaacccctc

SEQ ID NO: 301224 - DNA, 120 bp, Artificial Sequence
  ENSG00000132906_27 (sequence is synthesized)
cttgtacatcgccttctcaggaggccccagtgaggaaacagatagggaagggtggcctgataggcccagtcctactccatagaaacccgactcagagcagttgcttcctctgagggtcct

SEQ ID NO: 301225 - DNA, 120 bp, Artificial Sequence
  ENSG00000132906_28 (sequence is synthesized)
gtggccttgtggctgccttgggaggcagcatgtatgggccccagctgctctgctcaggtattcatgccacgagaaggggctgcgaggctggggccactcctggctccttgcaaatatttc

SEQ ID NO: 301226 - DNA, 120 bp, Artificial Sequence
  ENSG00000132906_29 (sequence is synthesized)
agtctgatttgaactttatgaatttggaaattttgaattttgagttttttaaaggtaaagttgaggtgcgtattctttaagccctcctgctcaaagaggctgcagtttgagctgttttta

SEQ ID NO: 301227 - DNA, 120 bp, Artificial Sequence
  ENSG00000132906_30 (sequence is synthesized)
tagttatttgcaatcacctgcaggacacacacacaagaaaattgtcaggttcacgtaaccacagagctgtgcgtggcagtttcctgtctctgtcctcctgggctaagctactcaagtgag

SEQ ID NO: 301228 - DNA, 120 bp, Artificial Sequence
  ENSG00000132906_31 (sequence is synthesized)
tcacaggcagcccacactacagtagctcctgcctgaggagttcagatgatgtttcggagaaaaagatgcaatcacagcttttcattgacctgttagggtcttcctgtaaagggggtctta

SEQ ID NO: 301229 - DNA, 120 bp, Artificial Sequence
  ENSG00000132906_32 (sequence is synthesized)
gccaggagtcctgtgtgggcttcaggtcagggggccttcgaaccccctaaaaattatatgccaaatgtgcggatggcatatttttagatttcatttgtttctcatcaaaactgctgtttg

SEQ ID NO: 301230 - DNA, 120 bp, Artificial Sequence
  ENSG00000132906_33 (sequence is synthesized)
gtttctcatcaaaactgctgtttgcaaggcagttatgcactgtggttggggctataactgtttccagaggctgttgatcagtatctgttaaactttttttttttttttttgagacagtct

SEQ ID NO: 301231 - DNA, 120 bp, Artificial Sequence
  ENSG00000132906_34 (sequence is synthesized)
aattgaccctggggacagggcgaggcgcggaggcgtcctgaaggcgaggcggtgacgcaagagcgaatccttggggcggggcgaggcgttggagatgcgtcctgcgggcgggacggtaac

SEQ ID NO: 301232 - DNA, 120 bp, Artificial Sequence
  ENSG00000132906_35 (sequence is synthesized)
agcaacagttgctaggatggggacgcactctctggtccctattctctttaaccctattcgtagaaccttagagcgtcagattggaagtgaccttagggattctttaactctccaactcct

SEQ ID NO: 301233 - DNA, 120 bp, Artificial Sequence
  ENSG00000132906_36 (sequence is synthesized)
gcaatattgatagggagaccgaggtccagagaggggcagagatttgcccaaggcctagaatccagcattccttttatttttgtttacttatcttttttttttttgagagaatccaggact

SEQ ID NO: 301234 - DNA, 120 bp, Artificial Sequence
  ENSG00000132906_37 (sequence is synthesized)
tttaatcccgtttaccgaaaaccgagctccacccaagaatgtaccagtctgtgccttaagcacggggaaagggcggtgggggtggagagagggataaggcacagggtcttgctctgtcac

SEQ ID NO: 301235 - DNA, 86 bp, Artificial Sequence
  ENSG00000132906_38 (sequence is synthesized)
tctcctgggctcgagccatcctcttgggggcaggctctggatctcggcgggatcaggccaggcagctgatcatagatctggagact

SEQ ID NO: 301236 - DNA, 79 bp, Artificial Sequence
  ENSG00000132911_0 (sequence is synthesized)
aacctggagggtgaaacactcactctctcccagccttccttacgaagcctgtgactttcgtgactgctttcggctcagc

SEQ ID NO: 301237 - DNA, 120 bp, Artificial Sequence
  ENSG00000132911_1 (sequence is synthesized)
ttgaaacagagcctcgtaccaggggaggctcaggccttggattttaatgtcagggatggaaaaacttcagaatgcttcctggatctaccagcagaaactagaagatccattccagaaaca

SEQ ID NO: 301238 - DNA, 120 bp, Artificial Sequence
  ENSG00000132911_2 (sequence is synthesized)
cctgaacagcaccgaggagtatctggccttcctctgcggacctcggcgcagccacttcttcctccccgtgtctgtggtgtatgtgccaatttttgtggtgggggtcattggcaatgtcct

SEQ ID NO: 301239 - DNA, 120 bp, Artificial Sequence
  ENSG00000132911_3 (sequence is synthesized)
ggtgtgcctggtgattctgcagcaccaggctatgaagacgcccaccaactactacctcttcagcctggcggtctctgacctcctggtcctgctccttggaatgcccctggaggtctatga

SEQ ID NO: 301240 - DNA, 120 bp, Artificial Sequence
  ENSG00000132911_4 (sequence is synthesized)
gatgtggcgcaactaccctttcttgttcgggcccgtgggctgctacttcaagacggccctctttgagaccgtgtgcttcgcctccatcctcagcatcaccaccgtcagcgtggagcgcta

SEQ ID NO: 301241 - DNA, 120 bp, Artificial Sequence
  ENSG00000132911_5 (sequence is synthesized)
cgtggccatcctacacccgttccgcgccaaactgcagagcacccggcgccgggccctcaggatcctcggcatcgtctggggcttctccgtgctcttctccctgcccaacaccagcatcca

SEQ ID NO: 301242 - DNA, 120 bp, Artificial Sequence
  ENSG00000132911_6 (sequence is synthesized)
tggcatcaagttccactacttccccaatgggtccctggtcccaggttcggccacctgtacggtcatcaagcccatgtggatctacaatttcatcatccaggtcacctccttcctattcta

SEQ ID NO: 301243 - DNA, 120 bp, Artificial Sequence
  ENSG00000132911_7 (sequence is synthesized)
cctcctccccatgactgtcatcagtgtcctctactacctcatggcactcagactaaagaaagacaaatctcttgaggcagatgaagggaatgcaaatattcaaagaccctgcagaaaatc

SEQ ID NO: 301244 - DNA, 120 bp, Artificial Sequence
  ENSG00000132911_8 (sequence is synthesized)
gtttgctatctgttgggccccgttccacattgaccgactcttcttcagctttgtggaggagtggagtgaatccctggctgctgtgttcaacctcgtccatgtggtgtcaggtgtcttctt

SEQ ID NO: 301245 - DNA, 120 bp, Artificial Sequence
  ENSG00000132911_9 (sequence is synthesized)
ctacctgagctcagctgtcaaccccattatctataacctactgtctcgccgcttccaggcagcattccagaatgtgatctcttctttccacaaacagtggcactcccagcatgacccaca

SEQ ID NO: 301246 - DNA, 120 bp, Artificial Sequence
  ENSG00000132911_10 (sequence is synthesized)
gttgccacctgcccagcggaacatcttcctgacagaatgccactttgtggagctgaccgaagatataggtccccaattcccatgtcagtcatccatgcacaactctcacctcccagcagc

SEQ ID NO: 301247 - DNA, 120 bp, Artificial Sequence
  ENSG00000132911_11 (sequence is synthesized)
cctctctagtgaacagatgtcaagaacaaactatcaaagcttccactttaacaaaacctgaattctttcagagctgactctcctctatgcctcaaaacttcagagaggaacatcccataa

SEQ ID NO: 301248 - DNA, 120 bp, Artificial Sequence
  ENSG00000132911_12 (sequence is synthesized)
tgtatgccttctcatatgatattagagaggtagaatggctcttacaactcatgtacccattgctagtttttttttttttaataaacgtgaaaactgagagttagatctggtttcaaaacc

SEQ ID NO: 301249 - DNA, 120 bp, Artificial Sequence
  ENSG00000132911_13 (sequence is synthesized)
caagactgcctgatttttagttatctttccactatcctaactgcctcatgccccttcactagttcatgccaagaacgtgactggaaaggcatggcacctataccttgattaatttccatt

SEQ ID NO: 301250 - DNA, 120 bp, Artificial Sequence
  ENSG00000132911_14 (sequence is synthesized)
aatggaaatggttcgtcctgagtcatctacgttccgagtcaggctgtcactcctactaccaatggccactgtgagccacagaaggaagacatgtacgtgctgttctactttatatgatgt

SEQ ID NO: 301251 - DNA, 120 bp, Artificial Sequence
  ENSG00000132911_15 (sequence is synthesized)
gagaagccaacatcagtgtcccttggcagcagtctacaggcataacttgttttattgtgctgaattttattgtgcttctcaaatattgcacttttaaaaaaattgaaagtttgtggcaat

SEQ ID NO: 301252 - DNA, 120 bp, Artificial Sequence
  ENSG00000132911_16 (sequence is synthesized)
gctgttgagcaaatctgctggcatctttcttcccaaaggcatgtgctcacttcatgtctctgtatcaattgtcataattttcgcaataaacttgattattattatatgtgcttatggtga

SEQ ID NO: 301253 - DNA, 120 bp, Artificial Sequence
  ENSG00000132911_17 (sequence is synthesized)
attggtgcatatatcaataattaatttccttttattgctgagtagtatttactatatggatgtaccacattttgtttatcctttcaactgttgctggacatttgggttgtttccagtttt

SEQ ID NO: 301254 - DNA, 120 bp, Artificial Sequence
  ENSG00000132911_18 (sequence is synthesized)
cttaaagatgacagaccaaacatcaacttcacagatgatgacacagaaggtgaatctactgaaaagagctaaagaaagacaaatctcttgaggcagatgaagggaatgcaaatattcaaa

SEQ ID NO: 301255 - DNA, 120 bp, Artificial Sequence
  ENSG00000132912_0 (sequence is synthesized)
gtgggaaacctaacgtcaaagtctacgtaggaagtcgtagggaaggcagcgaggaagacgctggctctcgggtcacgtgatgcgccgggagcgtcatcgcctcctccctccccaagatgg

SEQ ID NO: 301256 - DNA, 120 bp, Artificial Sequence
  ENSG00000132912_1 (sequence is synthesized)
cgtccttgctgcagtcggaccgggttctctatctagtccagggagaaaagaaggttcgggccccgctctcgcaactctacttctgccgctattgtagcgaactgcggtcgctggaatgtg

SEQ ID NO: 301257 - DNA, 120 bp, Artificial Sequence
  ENSG00000132912_2 (sequence is synthesized)
tgtctcacgaggtggactcccattattgtcccagttgtttagaaaatatgccatcggctgaagccaaactaaaaaagaatagatgtgccaattgttttgactgtcctggctgcatgcaca

SEQ ID NO: 301258 - DNA, 120 bp, Artificial Sequence
  ENSG00000132912_3 (sequence is synthesized)
ccctctctactcgggccacgagcatctccacacagcttccagatgacccagccaagaccaccatgaagaaagcctattacctggcatgtggattttgtcgctggacgtctagagatgtgg

SEQ ID NO: 301259 - DNA, 120 bp, Artificial Sequence
  ENSG00000132912_4 (sequence is synthesized)
gcatggcagacaaatctgtagctagtggcggttggcaggaacctgaaaatcctcacacacaacggatgaacaaattgattgaatattaccagcagcttgctcagaaagagaaggttgagc

SEQ ID NO: 301260 - DNA, 120 bp, Artificial Sequence
  ENSG00000132912_5 (sequence is synthesized)
gagatcgcaagaaactggcacgacgtagaaactatatgcctctggctttttcggacaaatatggtcttggaaccaggcttcagcgaccacgagctggtgcatccatcagtacccttgccg

SEQ ID NO: 301261 - DNA, 120 bp, Artificial Sequence
  ENSG00000132912_6 (sequence is synthesized)
gactttcccttaaagaaggagaggatcagaaagagataaagattgagccagctcaggctgtggatgaagtggaacctctacctgaagactattatacaagaccagtaaatttaacagagg

SEQ ID NO: 301262 - DNA, 120 bp, Artificial Sequence
  ENSG00000132912_7 (sequence is synthesized)
taacaacccttcagcagcgtctgttacagcctgacttccagccagtctgtgcttcacagctctatcctcgccacaaacatcttctgatcaaacggtccctgcgctgccgtaaatgtgaac

SEQ ID NO: 301263 - DNA, 120 bp, Artificial Sequence
  ENSG00000132912_8 (sequence is synthesized)
ataatttgagcaagccagaatttaacccaacgtcaatcaaattcaaaatccagctggtcgctgtcaattatattccagaagtgagaatcatgtcaattcccaaccttcgctacatgaagg

SEQ ID NO: 301264 - DNA, 120 bp, Artificial Sequence
  ENSG00000132912_9 (sequence is synthesized)
agagccaggtcctcctgactcttacaaatccagttgagaacctcacccatgtgactctcttcgagtgtgaggagggggaccctgatgatatcaacagcactgctaaggtggtggtgcctc

SEQ ID NO: 301265 - DNA, 120 bp, Artificial Sequence
  ENSG00000132912_10 (sequence is synthesized)
ccaaagagctcgttttagctggcaaggatgcagcagcagagtacgatgagttggcagaacctcaagactttcaggacgatcctgacattatagccttcagaaaggccaacaaagtgggta

SEQ ID NO: 301266 - DNA, 120 bp, Artificial Sequence
  ENSG00000132912_11 (sequence is synthesized)
ttttcatcaaagttacaccacagcgtgaggagggtgaagtgaccgtgtgcttcaagatgaagcatgattttaaaaacctggcagcccccattcgccccattgaagaaagtgaccagggaa

SEQ ID NO: 301267 - DNA, 120 bp, Artificial Sequence
  ENSG00000132912_12 (sequence is synthesized)
cagaagtcatctggctcacccagcatgtggaacttagcttgggcccacttcttccttaaaaggttccactggagggcagatcccaaaggacagtatcaccgtaaacctgcgttaaaatgt

SEQ ID NO: 301268 - DNA, 120 bp, Artificial Sequence
  ENSG00000132912_13 (sequence is synthesized)
ggaagctgctgcttcattaggccttgtttataacgatgtacccatgcactacggaattctattgctaagaaagtgggagcataggcaaggcattgggaacacagggtagctgctgttgct

SEQ ID NO: 301269 - DNA, 120 bp, Artificial Sequence
  ENSG00000132912_14 (sequence is synthesized)
cttgctctcacccctgttgacaccagtaagtctgtgtctccctcactgaaccctgcacgttgagtaacagcagcataattccatcctaggaaaggggatgggtgttccttggaatggcat

SEQ ID NO: 301270 - DNA, 120 bp, Artificial Sequence
  ENSG00000132912_15 (sequence is synthesized)
tgtatttaccacctgagaaactctgtactgtctcttgatctgatctcactaaggatcacaatgtcacagatgaaacttaaatgataacccaaaggtagacctgctgttaatgatccagca

SEQ ID NO: 301271 - DNA, 120 bp, Artificial Sequence
  ENSG00000132912_16 (sequence is synthesized)
ttggtcacaatgtaccaactgctttctgcattccgttaaatatcatctaacagtctaaaacatatcccttcattgccataatggctgccattttgccatagatttccatataactgaaaa

SEQ ID NO: 301272 - DNA, 120 bp, Artificial Sequence
  ENSG00000132912_17 (sequence is synthesized)
gtcactttatctttagtatcatgatgattggaaaaacctgtgaagttgttaaggcactctcatttgccctctttttctaagtgaatacaggacacgtattagttgttcttaatttttttc

SEQ ID NO: 301273 - DNA, 120 bp, Artificial Sequence
  ENSG00000132912_18 (sequence is synthesized)
ccagtaaaatatggatcttttaagaagaatttgagaagcaaacaattacatgtcatgtcaagggggtagcagattccattcgttttcaatattgccacaatacccagggattaatgctgc

SEQ ID NO: 301274 - DNA, 120 bp, Artificial Sequence
  ENSG00000132912_19 (sequence is synthesized)
cacaggggggcaatctttatttgtcttacttcctaccccttccctgttctgcctctttaactcagttaagttgttctgtttgggacctggaaaagaacccaaagaaaacctgagtggaca

SEQ ID NO: 301275 - DNA, 120 bp, Artificial Sequence
  ENSG00000132912_20 (sequence is synthesized)
ggttcatttctggaatgcagaaaacattttaaaggctagatttttagaatattctcaactagcattctttccattgatttgaaggggaaattaactattataatctcttgaatccaaaac

SEQ ID NO: 301276 - DNA, 120 bp, Artificial Sequence
  ENSG00000132912_21 (sequence is synthesized)
tggatattaagaactttcccccttactaagtttaagacttttgtcatgtggtgagtcaaataagaccattttgattgtaaaccataaaatagttcagcaagtagcccacagttctggcct

SEQ ID NO: 301277 - DNA, 120 bp, Artificial Sequence
  ENSG00000132912_22 (sequence is synthesized)
aacagcagacttgctgttttcacttggtatcctggagttgggttgctaaccttaatttctatgatgttttctaaaatgaaacttgataaagtagaccaccagctgcaccgtgttttctgt

SEQ ID NO: 301278 - DNA, 120 bp, Artificial Sequence
  ENSG00000132912_23 (sequence is synthesized)
aaaagtattgttagtaagtggccaagagacttgaggaaaatacagattttttgtttaccttggtcttgttttaagtcttaaaaaattaaagataacattataatgtagaatacagatggg

SEQ ID NO: 301279 - DNA, 120 bp, Artificial Sequence
  ENSG00000132912_24 (sequence is synthesized)
acatagtccttgtaagcttcccttgaaaatgttttaaatatttaggaagcttttaaaagacactaaattgtactctaaaagacactaaattgtactaattgtacaaaggtcaagccaatt

SEQ ID NO: 301280 - DNA, 120 bp, Artificial Sequence
  ENSG00000132912_25 (sequence is synthesized)
ttatgaaacagtcctacagagtaatatatgtgatgcagtgtaagaaggaaaatactcatctctaacattatggtaataacatttagcctcttaggagttggagcagggggatgggtaatt

SEQ ID NO: 301281 - DNA, 120 bp, Artificial Sequence
  ENSG00000132912_26 (sequence is synthesized)
acagatttgcagactatagaaagagtttcatttttttgtgaccccacagagtctcaaatttttatttcactacctgctagagcctactgtgaaatcactgctccatatttgccagtggag

SEQ ID NO: 301282 - DNA, 120 bp, Artificial Sequence
  ENSG00000132912_27 (sequence is synthesized)
gaaatgggcatagagtagagaatagcttcatatgtttacacgtttgcatagactacacacatgtcatgcgtttatggcaggtagctggtatttattccccaaagtaataatgttgaagta

SEQ ID NO: 301283 - DNA, 120 bp, Artificial Sequence
  ENSG00000132912_28 (sequence is synthesized)
tgggtctcatcattcccatacacagaaacacaaaacactttgatcataaacttttttcttcagaagccaaactaacttgcagaataatagagccactggtttaatgtttcctcaagatag

SEQ ID NO: 301284 - DNA, 120 bp, Artificial Sequence
  ENSG00000132912_29 (sequence is synthesized)
gttttagtgtaagctagtattctgtgtgttcgtagaaatgattcaatacctgcagctggtgaattaggaattgtatttgttgccttttttatattagatgaggtgcaaaaattttaatgc

SEQ ID NO: 301285 - DNA, 120 bp, Artificial Sequence
  ENSG00000132912_30 (sequence is synthesized)
tagtcagtatgcaccaccacaggaaagttagatcccattagcacttgaaactacagctttggaaacttaggctaagttaatttggatttgttacttgattcacctactgaccttttcttt

SEQ ID NO: 301286 - DNA, 120 bp, Artificial Sequence
  ENSG00000132912_31 (sequence is synthesized)
tgtttgaagtgcttatcagcataatgagctaagtgtcatgcatatttgtgaagaaacaccctttttggtcccttttgggacagagaggtactccttgatctttatgaatgacaggttact

SEQ ID NO: 301287 - DNA, 120 bp, Artificial Sequence
  ENSG00000132912_32 (sequence is synthesized)
gttttgccttattgcttaacttaatgtagtgaaataaagcagacaaagcttgagcgtgtcttttgtttgctctcatgtagatactaagtagcatggctcagagccaaaagacaagcgtga

SEQ ID NO: 301288 - DNA, 120 bp, Artificial Sequence
  ENSG00000132912_33 (sequence is synthesized)
agttaagagagttggctaagagagttggtggggcatgctcccttccattccttaaatgaagtaatctaaaatctcttagcaggttagttcaccataatatataagtagatgttgctttga

SEQ ID NO: 301289 - DNA, 120 bp, Artificial Sequence
  ENSG00000132912_34 (sequence is synthesized)
gcttcttatatacatattcacagaaccattatataaatgttgttagacctctaccagtttttatcctgggtcattgcttctaaagatatcctttacaatatacacagtggtctgactcca

SEQ ID NO: 301290 - DNA, 120 bp, Artificial Sequence
  ENSG00000132912_35 (sequence is synthesized)
ttattgcgaggatggagggaggcgcaggcgttctcattcatagttctcccatcctgaaagttctgttcctcttttgtccagaaactgggccctcgtcagactgccttgccctgttcctga

SEQ ID NO: 301291 - DNA, 120 bp, Artificial Sequence
  ENSG00000132912_36 (sequence is synthesized)
aggaggagcagcctcgggtgggactgagcggatcttctggttctagagcggcctctgattggacaaacttgacttagggaccgtgtctgtctgcgatggggcttggtaattgggtggact

SEQ ID NO: 301292 - DNA, 120 bp, Artificial Sequence
  ENSG00000132912_37 (sequence is synthesized)
cctacagggctcttcccgctgttgcttcttctatttttatatttcactcggctctctaaattttgtttcagcactaggtaaggttaaatttttctcccatgatctggatttttaggttct

SEQ ID NO: 301293 - DNA, 120 bp, Artificial Sequence
  ENSG00000132912_38 (sequence is synthesized)
tttgaaggtggattttccccctcttacacatgggcactcacagattttctgctgtctcatggattttgcagcagcaagccacttcttttaaagggtctgtgaattctttcagttttccta

SEQ ID NO: 301294 - DNA, 120 bp, Artificial Sequence
  ENSG00000132912_39 (sequence is synthesized)
gtatgttcctgcagtagttcttggaataaaaattcacagtatgaacaaattgattgaatattaccagcagcttgctcagaaagagaaggttgagcgagatcgcaagaaactggcacgacg

SEQ ID NO: 301295 - DNA, 120 bp, Artificial Sequence
  ENSG00000132912_40 (sequence is synthesized)
ctggtttgaactttttatgattaatatgtattgcttttataattaaaatgtattttaaaaattaaaaagtgtgatggagttggggaataaaatacagtataaaatgctatgttcttagaa

SEQ ID NO: 301296 - DNA, 120 bp, Artificial Sequence
  ENSG00000132912_41 (sequence is synthesized)
ataagtggtcctgtggccatgcagaaaaaaaataagagcagttgtgaggggaaataagtaatgaagttagagagcaaaaaatttccaagcctcttcattgcccatttcttcccatccttg

SEQ ID NO: 301297 - DNA, 120 bp, Artificial Sequence
  ENSG00000132912_42 (sequence is synthesized)
agaaaaagggcaaacttgcccatcttaataatttgtcttctctattcattatgtgtctagtcagtgtagttgattaatttgatatgttttctgttagcttttttgtgtactgagtctgtg

SEQ ID NO: 301298 - DNA, 120 bp, Artificial Sequence
  ENSG00000132912_43 (sequence is synthesized)
acttggaaaggaggagcagcctcgggtgggactgagcggatcttctggttctagagcggcctctgattggacaaacttgacttagggaccgtgtctgtctgcgatggggcttggtaaaga

SEQ ID NO: 301299 - DNA, 120 bp, Artificial Sequence
  ENSG00000132912_44 (sequence is synthesized)
gaagattctcatacttagaaaagacctacgctatacagatattctatgacagaggaatacttcaattattgatatcatagactgaggataatcaggtggatccgtgagaaattactcttt

SEQ ID NO: 301300 - DNA, 120 bp, Artificial Sequence
  ENSG00000132912_45 (sequence is synthesized)
ctgattggacaaacttgacttagggaccgtgtctgtctgcgatggggcttggtaattgggtggactacggagaaaggtaaagaaacagatacagagtgttcgctgtggactcccattatt

SEQ ID NO: 301301 - DNA, 120 bp, Artificial Sequence
  ENSG00000132912_46 (sequence is synthesized)
gagctagaggacaatgctgtccttccctggcacaagtgggcgtccgaagttggatttttcaaaaagaagaccccggccagtaaaaagtcaccaaataacaaaaccccaaaacttctgcag

SEQ ID NO: 301302 - DNA, 120 bp, Artificial Sequence
  ENSG00000132912_47 (sequence is synthesized)
actccacatagttcttgcctgagccgtagcttagatacttttagattactagcagaagctcacatttggttcatttttactgtattaatatagtttcaatctccatgtttagtgctgtta

SEQ ID NO: 301303 - DNA, 120 bp, Artificial Sequence
  ENSG00000132912_48 (sequence is synthesized)
ttattttaagaatagaataatgatgtggggctacaaattgctttctttaaaagaagcctttagattagctttttttttgcttatttccctgagcttctcatgctatcctacccaaaattc

SEQ ID NO: 301304 - DNA, 120 bp, Artificial Sequence
  ENSG00000132915_0 (sequence is synthesized)
agtatgttttgcagacaagacccagagaagtccagactggacttgttgcagactgcaaaactgccattggaaggcctccgtcccagtccttctacagagtagccagtgggattcccagcc

SEQ ID NO: 301305 - DNA, 120 bp, Artificial Sequence
  ENSG00000132915_1 (sequence is synthesized)
atgggcgaggtgacagcagaggaggtggagaagttcctggactcgaatattggctttgccaaacagtactacaacctccactaccgggccaagctcatctccgacctccttggggccaag

SEQ ID NO: 301306 - DNA, 120 bp, Artificial Sequence
  ENSG00000132915_2 (sequence is synthesized)
gaggctgccgtggacttcagcaactaccactccccgagcagcatggaggagagcgaaatcatctttgatctcctgcgggactttcaggagaatttacagacagagaaatgcatcttcaat

SEQ ID NO: 301307 - DNA, 120 bp, Artificial Sequence
  ENSG00000132915_3 (sequence is synthesized)
gtcatgaagaagctgtgcttcctcctgcaggcagaccgcatgagcctgttcatgtaccggacccgcaatggcatcgcagagctggccaccaggcttttcaatgtccacaaggatgctgtc

SEQ ID NO: 301308 - DNA, 120 bp, Artificial Sequence
  ENSG00000132915_4 (sequence is synthesized)
ctcgaggactgcctggtgatgcccgaccaagagatcgtcttccctttggacatgggcatcgtgggccatgtcgcacactctaagaagattgctaacgtccccaacacagaggaggatgag

SEQ ID NO: 301309 - DNA, 120 bp, Artificial Sequence
  ENSG00000132915_5 (sequence is synthesized)
catttctgtgactttgtggacatcctcacagagtacaagaccaagaacatcttggcttcccccataatgaatgggaaggatgtggtggccataatcatggctgtgaataaagtggatgga

SEQ ID NO: 301310 - DNA, 120 bp, Artificial Sequence
  ENSG00000132915_6 (sequence is synthesized)
tcccacttcaccaagagagatgaagagattcttctcaagtacctcaattttgcaaatctaatcatgaaggtgtaccacctgagttacctgcacaactgtgaaactcgacgtggccagata

SEQ ID NO: 301311 - DNA, 120 bp, Artificial Sequence
  ENSG00000132915_7 (sequence is synthesized)
ctgctgtggtctgggagcaaagtctttgaagaacttacggacatcgaacgacagttccacaaagccctgtacacagtccgtgctttcctcaactgtgacagatactctgtgggtctctta

SEQ ID NO: 301312 - DNA, 120 bp, Artificial Sequence
  ENSG00000132915_8 (sequence is synthesized)
gacatgaccaagcagaaggaattttttgatgtgtggccggttctgatgggtgaagttccaccttactctggtcccaggactccggatggaagagaaattaacttttacaaggtcattgac

SEQ ID NO: 301313 - DNA, 120 bp, Artificial Sequence
  ENSG00000132915_9 (sequence is synthesized)
tacatcctgcatggcaaagaggacatcaaagtcatcccgaatccacctcctgaccattgggctttagtaagcggtctcccagcttatgttgcccagaatggcctgatttgcaacatcatg

SEQ ID NO: 301314 - DNA, 120 bp, Artificial Sequence
  ENSG00000132915_10 (sequence is synthesized)
aatgcgcctgcggaggacttttttgcatttcagaaagaacctctggatgagtctggatggatgattaaaaatgtgctttcaatgccgattgtgaacaagaaggaagaaattgttggagtg

SEQ ID NO: 301315 - DNA, 120 bp, Artificial Sequence
  ENSG00000132915_11 (sequence is synthesized)
gccacattttacaatcgtaaagatgggaagccctttgatgaaatggatgagacgctcatggagtctttgactcaatttctgggctggtctgtcttaaatcctgacacctatgagtcaatg

SEQ ID NO: 301316 - DNA, 120 bp, Artificial Sequence
  ENSG00000132915_12 (sequence is synthesized)
aataaacttgaaaataggaaggatattttccaggacatagtaaaatatcatgtgaagtgtgacaatgaagaaattcagaaaatcttgaaaaccagagaggtgtatgggaaggagccatgg

SEQ ID NO: 301317 - DNA, 120 bp, Artificial Sequence
  ENSG00000132915_13 (sequence is synthesized)
gagtgtgaggaagaggagctggctgagatcctgcaagcggagctgccagatgcagataaatacgaaattaataaatttcacttcagtgacttacccctaacagaactggagctggtaaaa

SEQ ID NO: 301318 - DNA, 120 bp, Artificial Sequence
  ENSG00000132915_14 (sequence is synthesized)
tgtggaatacagatgtattatgagctcaaagtggtggataaatttcacattccacaagaggccctggtgcggttcatgtactccctgagtaagggctaccgcaagatcacctaccacaac

SEQ ID NO: 301319 - DNA, 120 bp, Artificial Sequence
  ENSG00000132915_15 (sequence is synthesized)
tggcggcacggcttcaacgtggggcagaccatgttctccctgctggtgacgggaaagctgaagcgctacttcacggacctagaggccttggccatggtcactgctgctttctgccatgac

SEQ ID NO: 301320 - DNA, 120 bp, Artificial Sequence
  ENSG00000132915_16 (sequence is synthesized)
attgaccacagaggcaccaataacctctaccagatgaaatcccagaacccactggccaagctccatgggtcctctatcttggaaagacaccacttggagtttggcaaaacactgctcaga

SEQ ID NO: 301321 - DNA, 120 bp, Artificial Sequence
  ENSG00000132915_17 (sequence is synthesized)
gacgagagcctgaatatctttcaaaacctcaatcgtcgacagcatgagcatgccatccacatgatggacattgcaatcattgccacagacctcgccctgtatttcaagaagaggacgatg

SEQ ID NO: 301322 - DNA, 120 bp, Artificial Sequence
  ENSG00000132915_18 (sequence is synthesized)
ttccaaaagatcgtggatcagtctaagacatatgagagtgaacaggagtggacacagtacatgatgctggagcagacacggaaggaaatcgttatggccatgatgatgaccgcctgtgat

SEQ ID NO: 301323 - DNA, 120 bp, Artificial Sequence
  ENSG00000132915_19 (sequence is synthesized)
ctctcagccatcaccaaaccctgggaggtgcagagccaggtagctctgctggtggctgctgaattctgggaacaaggtgacctggagcgcacggtgctgcaacagaatcccattcccatg

SEQ ID NO: 301324 - DNA, 120 bp, Artificial Sequence
  ENSG00000132915_20 (sequence is synthesized)
atggacagaaacaaagcagatgaactccctaagcttcaagtcggcttcattgactttgtttgcaccttcgtctacaaggaattctcccgtttccacgaggagatcaccccaatgttggac

SEQ ID NO: 301325 - DNA, 120 bp, Artificial Sequence
  ENSG00000132915_21 (sequence is synthesized)
gggatcaccaacaatcgcaaggagtggaaggcgcttgctgatgagtacgatgccaagatgaaggtgcaggaggagaagaagcagaaacagcagtcggccaagtcagcagccgcaggaaat

SEQ ID NO: 301326 - DNA, 120 bp, Artificial Sequence
  ENSG00000132915_22 (sequence is synthesized)
cagccggggggaaaccccagcccagggggtgcaactacatccaagtcctgctgcatccagtaacaccactggggatgtgctggctggacggcaccaccctttcctgggaagagatgactc

SEQ ID NO: 301327 - DNA, 120 bp, Artificial Sequence
  ENSG00000132915_23 (sequence is synthesized)
agagatgactcaagccagtggaagaccacacaccttgagaagtagaagagtcataggatttgaaagctgttagagaatttagcttccaggactgttcaatcttttggcttccctgggcca

SEQ ID NO: 301328 - DNA, 120 bp, Artificial Sequence
  ENSG00000132915_24 (sequence is synthesized)
cattggaagaattgtcttgggtcacacataaaatacagtaacactaatgatagctgttgaacttaaaaaaaaaaatcgccaaaaaaaaaaatttcataatgttttaagaaagtttatgaa

SEQ ID NO: 301329 - DNA, 120 bp, Artificial Sequence
  ENSG00000132915_25 (sequence is synthesized)
ttcaaagccgtcctgggctgcatgtggcccacgggccgtgggttgaacaagcttggcttataccttatccagtggcttttaaacattcttttagtcttgagaactgcctattgagctaaa

SEQ ID NO: 301330 - DNA, 120 bp, Artificial Sequence
  ENSG00000132915_26 (sequence is synthesized)
accaatattctagctttcatagacatcagttaaacatttaattacatttaattaatgccagattcactggcttgcttagaatcatttttgttcttatactttcagttaatgtattgtaaa

SEQ ID NO: 301331 - DNA, 120 bp, Artificial Sequence
  ENSG00000132915_27 (sequence is synthesized)
aattttcaatcattttcaaaagtagagaattgtacgttgaatccccacatacccatcacccagattccaatatcaagattttgctacatgcatttcgtctgtcctttttacattttcttt

SEQ ID NO: 301332 - DNA, 77 bp, Artificial Sequence
  ENSG00000132915_28 (sequence is synthesized)
ttgctacatgcatttcgtctgtcctttttacattttcttttcaattttttttcttacctgaagtgtttaaaggcaaa

SEQ ID NO: 301333 - DNA, 79 bp, Artificial Sequence
  ENSG00000132915_29 (sequence is synthesized)
gagcaaactcacctgtagtctcagctacctgggaggcagaggtgagaggatctcttgaacccaggaggcggaagttgca

SEQ ID NO: 301334 - DNA, 120 bp, Artificial Sequence
  ENSG00000132915_30 (sequence is synthesized)
gctgagatcatgctactgcactccagcttgggcgaccgagcgagactctgactcaaacaaaagcaaaagaaaaggcaaatcccaaacatatcatttcacacctctactatctcatcttta

SEQ ID NO: 301335 - DNA, 120 bp, Artificial Sequence
  ENSG00000132915_31 (sequence is synthesized)
tactatctcatctttaaagaaataagtatgttttctaacataaccacatcactggcccatgcaaccaatgcctgcctaatacccagctgtgatctatgctttgatgggctgcacagaccc

SEQ ID NO: 301336 - DNA, 120 bp, Artificial Sequence
  ENSG00000132915_32 (sequence is synthesized)
caagcttcagcaaaggacttgggaccccaccagctttgagtgctgttgacagacccttagtatcaaccccatcaggtgttactgcagccttccccagggtggcctacacccaatgactga

SEQ ID NO: 301337 - DNA, 120 bp, Artificial Sequence
  ENSG00000132915_33 (sequence is synthesized)
tccatgccaggtggagaggcctggccatcttggctgagcatgggataactgtgcagggctgttccagctccacgactcctcgtggggtccactaaggctgtcgctgggctcacatcccaa

SEQ ID NO: 301338 - DNA, 120 bp, Artificial Sequence
  ENSG00000132915_34 (sequence is synthesized)
ctcgacttctccctctgcccactcctatttccttcccttccccaagcatcggtccccagggcactgcttaataagcatcctgcagactaagtccattttagagtctgctttctgggacac

SEQ ID NO: 301339 - DNA, 120 bp, Artificial Sequence
  ENSG00000132915_35 (sequence is synthesized)
ccaacttgtgatgccagcccttaatcaaccttccttcattctcatgaacgttttcaatggttggcttgcctgaatctgatccaaacaaattcacatattgaatttagttgtttctttttg

SEQ ID NO: 301340 - DNA, 120 bp, Artificial Sequence
  ENSG00000132915_36 (sequence is synthesized)
ttggtttttagaaaaaagaagatgtactttttattcttggatttttcattgatttcacagagtataaattaagtcagattattctcaattccagaacttctgtttcttaaattagcaggc

SEQ ID NO: 301341 - DNA, 64 bp, Artificial Sequence
  ENSG00000132915_37 (sequence is synthesized)
attctcaattccagaacttctgtttcttaaattagcaggcattctgttggtttaaaaagataga

SEQ ID NO: 301342 - DNA, 120 bp, Artificial Sequence
  ENSG00000132915_38 (sequence is synthesized)
gtcgcccaggctggagtgcagtggtatgaccatagctcactggagccccagctgcccgggctcaagcaatcctccatctcagcttaccaagcagcggtgaccacaggcatgcaccaccat

SEQ ID NO: 301343 - DNA, 89 bp, Artificial Sequence
  ENSG00000132915_39 (sequence is synthesized)
atgcaccaccatgcccagctaattttttaaaacctatctttgtagacatggggtctcattctgttgcccaggctggcctcaaactcctg

SEQ ID NO: 301344 - DNA, 120 bp, Artificial Sequence
  ENSG00000132915_40 (sequence is synthesized)
aggcgtgagccactgcacctggccaggacttatttcttttaaaccgaatctaagtatgttctggcaagtatgcaatacctagcggaatgcactggcctgatcagcattcataccatagta

SEQ ID NO: 301345 - DNA, 120 bp, Artificial Sequence
  ENSG00000132915_41 (sequence is synthesized)
gaatgcactggcctgatcagcattcataccatagtaactgatgttgaaaacagcacaaataaaccagaagttgaaaatggcaataacatgctaaaaatttgcaagtcaatttgttacact

SEQ ID NO: 301346 - DNA, 120 bp, Artificial Sequence
  ENSG00000132915_42 (sequence is synthesized)
tgtccaaatcttgattttttttccttctctatcgttccccccccaccaccagctttatggaggtataattagcaaataaaaagtatacatatttaaggtatacactgtgatgttttgata

SEQ ID NO: 301347 - DNA, 120 bp, Artificial Sequence
  ENSG00000132915_43 (sequence is synthesized)
tacattgtgaaatggttaccataattaagctaattaatatatccatcacctcacatagccatggttaagtttctgaagtctcttttaatctacaaagtactccttccttttttccattgt

SEQ ID NO: 301348 - DNA, 120 bp, Artificial Sequence
  ENSG00000132915_44 (sequence is synthesized)
catcaccttgcagaaacagagtcagttttcccacattctgtatttatctgtttgtttctttgtggccgcatgtaacacattcctctgtctcattctaataaatggacattagctctagaa

SEQ ID NO: 301349 - DNA, 120 bp, Artificial Sequence
  ENSG00000132915_45 (sequence is synthesized)
ttgttgatttggaattgcaagtggggtgggagcaggggtaggggattgggctggggctctgactctgcgtgtgtgagggtctgtctgttgcaggtagctctgctggtggctgctgaattc

SEQ ID NO: 301350 - DNA, 120 bp, Artificial Sequence
  ENSG00000132915_46 (sequence is synthesized)
tgggaacaaggtgacctggagcgcacggtgctgcaacagaatcccattgtgagtagacaggggatgtcagcctgatgttaggtgtgtgtgctccatcctgacctagatatgacctcgcca

SEQ ID NO: 301351 - DNA, 120 bp, Artificial Sequence
  ENSG00000132915_47 (sequence is synthesized)
tgatggagagatgtgtgactttaccataaagatgaccttttcctaatgcagtggttctaaaaatgtggtctccaggccactgtcaacctcattacttgagaacatgttaggtatgtatat

SEQ ID NO: 301352 - DNA, 120 bp, Artificial Sequence
  ENSG00000132915_48 (sequence is synthesized)
tcacaagcctcaccctaggtctacccaaccagaagctctgggggtgggcccctgcaatgaatgctctaactagtaagccctcctaaattttgggaaatgtgtccttagctcactcaaccc

SEQ ID NO: 301353 - DNA, 120 bp, Artificial Sequence
  ENSG00000132915_49 (sequence is synthesized)
tagaggttggcaagtggactccaacacttagattgccctttcaatttcaaaggtctagaagtccatccacctcccctgaccctaatctaacagcacagagtgagcaagttgtgcacctgt

SEQ ID NO: 301354 - DNA, 120 bp, Artificial Sequence
  ENSG00000132915_50 (sequence is synthesized)
caacattgaaagttaacttggctgagacagtcagccagcttcccatggagatgcgcagttggggagatcggaagagcagcccgaagtttccctgaagtccctgaaggcaaagctgggaag

SEQ ID NO: 301355 - DNA, 120 bp, Artificial Sequence
  ENSG00000132915_51 (sequence is synthesized)
taaagcagggtttggaaaggatgggtaaaagagagagacattgtggggacaaaccgttgacacctggataggctaaacctgtgagagtgtgctaaggatgcagaggtcaccacggcaggc

SEQ ID NO: 301356 - DNA, 120 bp, Artificial Sequence
  ENSG00000132915_52 (sequence is synthesized)
ttaggcaggagccgagagagagtagaaggctgggaggagcaggtcctgtcatgaagaaacacgtgaagggccccatgggctttgtcgttctcactctctctttgtaatattttcaaatat

SEQ ID NO: 301357 - DNA, 120 bp, Artificial Sequence
  ENSG00000132915_53 (sequence is synthesized)
attgagaatagtcagtgaactctagtgcccatcagctacagccaacaattagcagcagtctgccattcttgttttatcaattccttccagtgcatttttttgcttttggttgcagtattt

SEQ ID NO: 301358 - DNA, 120 bp, Artificial Sequence
  ENSG00000132915_54 (sequence is synthesized)
tccataaatactttagtacgtatctctatgagacaagagcttcatatggacaaaatcataaacacaaccataataccattaacacactcacaaaagtcatatacttcagtatcatctaat

SEQ ID NO: 301359 - DNA, 120 bp, Artificial Sequence
  ENSG00000132915_55 (sequence is synthesized)
ccccaatttctgttcatttttcttgattaagaaagagaattcagttgatttgttcaaatcaggatctaatcaaggagcatactgcctctggttttaatgtctcttaagtctcttttaatc

SEQ ID NO: 301360 - DNA, 120 bp, Artificial Sequence
  ENSG00000132915_56 (sequence is synthesized)
tgtagcaggccctgccatccctcccaccctctggcctttttctggtatgccatttatttgctgaagacagtgtgtctttttttttgtgcagtttcccacattctggatttggttggttac

SEQ ID NO: 301361 - DNA, 120 bp, Artificial Sequence
  ENSG00000132915_57 (sequence is synthesized)
accctcatggtgttctttaacatgtttctctattctcctatttcctgcaaaatgctcatcaggtctggaaacatgatgagtttacagtttgattttagtaagaatgcttcatagataggg

SEQ ID NO: 301362 - DNA, 120 bp, Artificial Sequence
  ENSG00000132915_58 (sequence is synthesized)
gagatcctggtgagctgaaccggggcagcacgagccccgatgtataacaagtgcaaagtgctcctgagcatgcaggggtttctccttgcaaagcatgttccccatcactctgttctgatc

SEQ ID NO: 301363 - DNA, 120 bp, Artificial Sequence
  ENSG00000132915_59 (sequence is synthesized)
cttccagcagacccaggatggggacagggctggacaggaggtgggcacccagaaacacttcatgtttcctaatcacctgactctattccttatacagcaagcggagctgccagatgcaga

SEQ ID NO: 301364 - DNA, 80 bp, Artificial Sequence
  ENSG00000132932_0 (sequence is synthesized)
cccgggccagcggggcccgccgcggtggcgttcgcggatgctgccgcattggccgctgcggcacggacggcgcagcctcg

SEQ ID NO: 301365 - DNA, 120 bp, Artificial Sequence
  ENSG00000132932_1 (sequence is synthesized)
cccacccatggtcctcgggcggcggcccctgcgcccagccctgcgcgtagcctccgtctctcgcccggggccgccgagcccccgacacgggcgagatgctgaacggcgcaggcctggaca

SEQ ID NO: 301366 - DNA, 120 bp, Artificial Sequence
  ENSG00000132932_2 (sequence is synthesized)
tgctgaacggcgcaggcctggacaaagctcttaagatgtccctgccgcggaggtcgaggatccgctcgtccgtgggacctgttcgttcttctttgggctataagaaggcagaggatgaga

SEQ ID NO: 301367 - DNA, 120 bp, Artificial Sequence
  ENSG00000132932_3 (sequence is synthesized)
tgtcccgggccacgtctgttggagaccagctggaggcacccgcccgcaccatttacctcaaccaaccgcatctcaacaaattccgcgacaaccagatcagtacggccaagtacagcgtgt

SEQ ID NO: 301368 - DNA, 120 bp, Artificial Sequence
  ENSG00000132932_4 (sequence is synthesized)
tgacatttctacctcgattcttgtatgagcagattagaagagctgctaatgccttctttctcttcattgccttattacagcaaattccagatgtatctccaacaggaagatataccaccc

SEQ ID NO: 301369 - DNA, 120 bp, Artificial Sequence
  ENSG00000132932_5 (sequence is synthesized)
tggtgccattgatcattattttaacaattgcaggcatcaaagagattgtagaagattttaagcgacacaaggcagacaatgcagttaacaaaaagaaaacaatagtgttaagaaatggta

SEQ ID NO: 301370 - DNA, 120 bp, Artificial Sequence
  ENSG00000132932_6 (sequence is synthesized)
tgtggcataccattatgtggaaagaggtggcagtgggagacattgtgaaggtcgtcaatgggcagtatcttccagcagatgtggtcctgctgtcatccagtgaacctcaggcaatgtgtt

SEQ ID NO: 301371 - DNA, 120 bp, Artificial Sequence
  ENSG00000132932_7 (sequence is synthesized)
atgttgaaacagctaatctggatggggagacgaaccttaaaatacgtcagggtttgagtcacactgctgacatgcaaacacgtgaagttctgatgaagttatctggaactatagagtgtg

SEQ ID NO: 301372 - DNA, 120 bp, Artificial Sequence
  ENSG00000132932_8 (sequence is synthesized)
aagggcccaaccgccacctctatgacttcactggaaacttgaacttagatgggaaaagccttgttgcccttgggcctgaccagatcttattaagaggtacacagcttagaaatactcagt

SEQ ID NO: 301373 - DNA, 120 bp, Artificial Sequence
  ENSG00000132932_9 (sequence is synthesized)
gggtctttggcatagttgtttatactggacacgacaccaaactcatgcagaattcaaccaaagcgcctctcaagagatcaaatgttgagaaggtgactaacgtgcagatcctggtgttgt

SEQ ID NO: 301374 - DNA, 120 bp, Artificial Sequence
  ENSG00000132932_10 (sequence is synthesized)
ttggcatcctcttggtcatggccttggtgagctcggcgggggccctgtactggaacaggtctcatggtgaaaagaactggtacatcaagaagatggacaccacctcagataattttggat

SEQ ID NO: 301375 - DNA, 120 bp, Artificial Sequence
  ENSG00000132932_11 (sequence is synthesized)
acaacctactgacgttcatcatcttatacaacaatcttattcccatcagtctgttggtgactcttgaggttgtgaagtatactcaagcccttttcataaactgggacacagatatgtatt

SEQ ID NO: 301376 - DNA, 120 bp, Artificial Sequence
  ENSG00000132932_12 (sequence is synthesized)
atataggaaatgacactcctgccatggccaggacatcaaaccttaatgaagagcttgggcaggtgaaatatctcttttctgacaagactggaacgcttacatgcaatatcatgaacttta

SEQ ID NO: 301377 - DNA, 120 bp, Artificial Sequence
  ENSG00000132932_13 (sequence is synthesized)
agaagtgcagcattgccggagtaacctatggtcacttcccagaattggcaagagagccgtcttcagatgacttctgtcggatgcctcctccctgtagtgattcctgtgactttgatgacc

SEQ ID NO: 301378 - DNA, 120 bp, Artificial Sequence
  ENSG00000132932_14 (sequence is synthesized)
ccaggctgttgaagaacattgaggatcgccatcccacagccccttgcattcaggagttcctcacccttctggccgtgtgccacacggttgttcctgagaaggatggagataacatcatct

SEQ ID NO: 301379 - DNA, 120 bp, Artificial Sequence
  ENSG00000132932_15 (sequence is synthesized)
accaggcctcttccccagatgaagctgctttggtgaaaggagctaaaaagctgggctttgtcttcacagccagaacaccattctcagtcatcatagaagcgatgggacaggaacaaacat

SEQ ID NO: 301380 - DNA, 120 bp, Artificial Sequence
  ENSG00000132932_16 (sequence is synthesized)
tcggaatccttaatgtcctggaattttctagtgacagaaaaagaatgtctgtaattgttcgaactccttcaggacgacttcggctttactgtaaaggggctgataatgtgatttttgaga

SEQ ID NO: 301381 - DNA, 120 bp, Artificial Sequence
  ENSG00000132932_17 (sequence is synthesized)
gactttcaaaagactcaaaatatatggaggaaacattatgccatctggaatactttgccacggaaggcttgcggactctctgtgtggcttatgctgatctctctgagaatgagtatgagg

SEQ ID NO: 301382 - DNA, 120 bp, Artificial Sequence
  ENSG00000132932_18 (sequence is synthesized)
agtggctgaaagtctatcaggaagccagcaccatattgaaggacagagctcaacggttggaagagtgttacgagatcattgagaagaatttgctgctacttggagccacagccatagaag

SEQ ID NO: 301383 - DNA, 120 bp, Artificial Sequence
  ENSG00000132932_19 (sequence is synthesized)
atcgccttcaagcaggagttccagaaaccatcgcaacactgttgaaggcagaaattaaaatatgggtgttgacaggagacaaacaagaaactgcgattaatatagggtattcctgccgat

SEQ ID NO: 301384 - DNA, 120 bp, Artificial Sequence
  ENSG00000132932_20 (sequence is synthesized)
tggtatcgcagaatatggcccttatcctattgaaggaggactctttggatgccacaagggcagccattactcagcactgcactgaccttgggaatttgctgggcaaggaaaatgacgtgg

SEQ ID NO: 301385 - DNA, 120 bp, Artificial Sequence
  ENSG00000132932_21 (sequence is synthesized)
ccctgatcatcgatggccacaccctgaagtacgcgctctccttcgaagtccggaggagtttcctggatttggcactctcgtgcaaagcggtcatatgctgcagagtgtctcctctgcaga

SEQ ID NO: 301386 - DNA, 120 bp, Artificial Sequence
  ENSG00000132932_22 (sequence is synthesized)
agtctgagatagtggatgtggtgaagaagcgggtgaaggccatcaccctcgccatcggagacggcgccaacgatgtcgggatgatccagacagcccacgtgggtgtgggaatcagtggga

SEQ ID NO: 301387 - DNA, 120 bp, Artificial Sequence
  ENSG00000132932_23 (sequence is synthesized)
atgaaggcatgcaggccaccaacaactcggattacgccatcgcacagttttcctacttagagaagcttctgttggttcatggagcctggagctacaaccgggtgaccaagtgcatcttgt

SEQ ID NO: 301388 - DNA, 120 bp, Artificial Sequence
  ENSG00000132932_24 (sequence is synthesized)
actgcttctataagaacgtggtcctgtatattattgagctttggttcgcctttgttaatggattttctgggcagattttatttgaacgttggtgcatcggcctgtacaatgtgattttca

SEQ ID NO: 301389 - DNA, 120 bp, Artificial Sequence
  ENSG00000132932_25 (sequence is synthesized)
ccgctttgccgcccttcactctgggaatctttgagaggtcttgcactcaggagagcatgctcaggtttccccagctctacaaaatcacccagaatggcgaaggcttcaacacaaaggttt

SEQ ID NO: 301390 - DNA, 120 bp, Artificial Sequence
  ENSG00000132932_26 (sequence is synthesized)
tctggggtcactgcatcaacgccttggtccactccctcatcctcttctggtttcccatgaaagctctggagcatgatactgtgttgacaagtggtcatgctaccgactatttatttgttg

SEQ ID NO: 301391 - DNA, 120 bp, Artificial Sequence
  ENSG00000132932_27 (sequence is synthesized)
gaaatattgtttacacatatgttgttgttactgtttgtctgaaagctggtttggagaccacagcttggactaaattcagtcatctggctgtctggggaagcatgctgacctggctggtgt

SEQ ID NO: 301392 - DNA, 120 bp, Artificial Sequence
  ENSG00000132932_28 (sequence is synthesized)
tttttggcatctactcgaccatctggcccaccattcccattgctccagatatgagaggacaggcaactatggtcctgagctccgcacacttctggttgggattatttctggttcctactg

SEQ ID NO: 301393 - DNA, 120 bp, Artificial Sequence
  ENSG00000132932_29 (sequence is synthesized)
cctgtttgattgaagatgtggcatggagagcagccaagcacacctgcaaaaagacattgctggaggaggtgcaggagctggaaaccaagtctcgagtcctgggaaaagcggtgctgcggg

SEQ ID NO: 301394 - DNA, 120 bp, Artificial Sequence
  ENSG00000132932_30 (sequence is synthesized)
atagcaatggaaagaggctgaacgagcgcgaccgcctgatcaagaggctgggccggaagacgcccccgacgctgttccggggcagctccctgcagcagggcgtcccgcatgggtatgctt

SEQ ID NO: 301395 - DNA, 120 bp, Artificial Sequence
  ENSG00000132932_31 (sequence is synthesized)
tttctcaagaagaacacggagctgttagtcaggaagaagtcatccgtgcttatgacaccaccaaaaagaaatccaggaagaaataagacatgaattttcctgactgatcttaggaaagag

SEQ ID NO: 301396 - DNA, 120 bp, Artificial Sequence
  ENSG00000132932_32 (sequence is synthesized)
attcagtttgttgcacccagtgttaacacatctttgtcagagaagactggcgtcagcagccaaaacaccaggaaacacatttctgtggccttagccaagcagtttgttagttacatattc

SEQ ID NO: 301397 - DNA, 120 bp, Artificial Sequence
  ENSG00000132932_33 (sequence is synthesized)
cctcgcaaacctggagtgcagaccacaggggaagctatctttgccctcccaactcgtctgcagtgcttagcctaacttttgtttatgtcgttatgaagcattcaactgtgctctgtgagg

SEQ ID NO: 301398 - DNA, 120 bp, Artificial Sequence
  ENSG00000132932_34 (sequence is synthesized)
tgtgaaattaaaaacattatgtttcaccaatatttaaacatcagtactagttgtcctgggagaaagggaaaggagttttatgttgcgtgagaggcccatcctgtgtaattggagcagggc

SEQ ID NO: 301399 - DNA, 120 bp, Artificial Sequence
  ENSG00000132932_35 (sequence is synthesized)
acacttgcttcctgttgagttaactcagaggttaagtccaacgggccacatgcagacttcactgtaggcaggttgctctcctgctttgattcctgttttgtgtgtaaaattggcataaac

SEQ ID NO: 301400 - DNA, 120 bp, Artificial Sequence
  ENSG00000132932_36 (sequence is synthesized)
ttcttgattgcagtgaaatcacaaaattctctatcggggtggtcaacctgagaacatttatttgaacctcttagccacatttccagcagggcaaaccaactgatgccctggaagagtctt

SEQ ID NO: 301401 - DNA, 120 bp, Artificial Sequence
  ENSG00000132932_37 (sequence is synthesized)
ccgcaccctctccaggtgcactcggcccagtcctgccgccgtgtccaggcgcccctcacccccacacctgctgcatggctggccacaccactcagtgcatggcggccgatgggcagccaa

SEQ ID NO: 301402 - DNA, 120 bp, Artificial Sequence
  ENSG00000132932_38 (sequence is synthesized)
cccaaacccgcgcctttccttgttccactgcagactcagatacagatgcgaaaaattccttcttccaccgcccttctcgttctgtaaagaaagaaaagaaacatagcctttctgcatata

SEQ ID NO: 301403 - DNA, 120 bp, Artificial Sequence
  ENSG00000132932_39 (sequence is synthesized)
ttctaaacgtctctctgcctctgtctgacatggggccaccccacaggtcagagtggtggtagaaccccttcaggactcccagccgtggtcaggctctgaatactcccttcccaacatcca

SEQ ID NO: 301404 - DNA, 120 bp, Artificial Sequence
  ENSG00000132932_40 (sequence is synthesized)
gttgggaaatgaatgaatttataacatgcctgcacagcgaaggaacacacctgtcgctcttagctctagagtcagaggatgagtaaacccagatgcaagagtataggacattgagtgggg

SEQ ID NO: 301405 - DNA, 120 bp, Artificial Sequence
  ENSG00000132932_41 (sequence is synthesized)
agaacaagacgaccacagaagtcctcagaaggagaaggaaggacacggagacactgagaggaggacacagaggaatcgccaccagatctttgcagtagaaactctgaaataggccttgag

SEQ ID NO: 301406 - DNA, 120 bp, Artificial Sequence
  ENSG00000132932_42 (sequence is synthesized)
acccagacaattgtcatgatcagcccagtgtgtatgagagcttaaacaagaccttcacacacagttctaattgaaaagaattccaaacatttcagggaaacacctttttaaaaaatatac

SEQ ID NO: 301407 - DNA, 120 bp, Artificial Sequence
  ENSG00000132932_43 (sequence is synthesized)
tgacatggtttcctttctgtatcccatcagtgttagacacaggtacctatcagaatacggcatatcctgaattatctaagacaaggaagtgaagagcggaatcactgactttcccaactg

SEQ ID NO: 301408 - DNA, 120 bp, Artificial Sequence
  ENSG00000132932_44 (sequence is synthesized)
cagagtcccacacttaaatctcaacagaacctagatgtcttcaggcatgaatgtgagcacctggagcccttactaaacaacctgcctggagccctgttctctgctctggttgccaaacca

SEQ ID NO: 301409 - DNA, 120 bp, Artificial Sequence
  ENSG00000132932_45 (sequence is synthesized)
gatttttggatggcctaaatacttgtgggcaactgttactggtgaaaaatgggagtggagagcatgttttggattttcactgtggggaaatgaatgaatttatcacatgactgtgcagcg

SEQ ID NO: 301410 - DNA, 120 bp, Artificial Sequence
  ENSG00000132932_46 (sequence is synthesized)
aaggagcacacctgtcactcttagctctagagtcggaggatgagtcaaccctgtaggaatgattgtgctaaattaggaaataacactttagtgcactttgcttcctaacccttttttgtc

SEQ ID NO: 301411 - DNA, 120 bp, Artificial Sequence
  ENSG00000132932_47 (sequence is synthesized)
agaaatctacaacctactgggcatggaaatgatttaaaatatgatctgcattgactaagaaaactcatcctcacttatgaggtgaccaggatgcagagagggcctgaggggcagcagaac

SEQ ID NO: 301412 - DNA, 120 bp, Artificial Sequence
  ENSG00000132932_48 (sequence is synthesized)
aatgcaattcacaggtgaggctccaaaaagggccatttctttctccccaaggtgcatagaacatttttaaatatcagagtacccagcaagacggaaggactgtcatgcaggaactctaac

SEQ ID NO: 301413 - DNA, 120 bp, Artificial Sequence
  ENSG00000132932_49 (sequence is synthesized)
acaaaatgtgcctatgactaacacgacaaaccaaggtgtatggtttctttgcacacccagaaaggtgatggccaagatacagaggagaaacgaaaactggaattgaatgtgcattaggca

SEQ ID NO: 301414 - DNA, 120 bp, Artificial Sequence
  ENSG00000132932_50 (sequence is synthesized)
tcttaactattcatattttgtctcatttgggaactaagcctatttggaaagagtggattagaaattgaattctttgtcaaacagttagctctgtcttgaacttgaagccttccaaatcag

SEQ ID NO: 301415 - DNA, 120 bp, Artificial Sequence
  ENSG00000132932_51 (sequence is synthesized)
aattatgtatttaagtgtgtgtttgtgtttgtttggggtttttgtttcttacattagagttcatattttctgggatttaaggatacaggtgtattttcctattctcttgagaagtagact

SEQ ID NO: 301416 - DNA, 120 bp, Artificial Sequence
  ENSG00000132932_52 (sequence is synthesized)
aaacaatatttgcagtgatgacagacgcacacagaagaaaacattagaagagatgcctttctatcctctcatgtggttgagcattcttacagccaaatgactaaattggctgtaaattgg

SEQ ID NO: 301417 - DNA, 120 bp, Artificial Sequence
  ENSG00000132932_53 (sequence is synthesized)
tttctaggaggagcagctgtcactacgtgtgatgtataatatttagccagggccaactcaggggctgtgtcatttgtcctatctttaaattgaggtcagagtgtcacacacaacccctcc

SEQ ID NO: 301418 - DNA, 120 bp, Artificial Sequence
  ENSG00000132932_54 (sequence is synthesized)
cctggggcagggtggactggactaggttgcatacgctggctgtcagctcagcaaaaatgccacatggggcttgtcactccgccagacactcactgactcacgggctggcaggtcacgctc

SEQ ID NO: 301419 - DNA, 120 bp, Artificial Sequence
  ENSG00000132932_55 (sequence is synthesized)
ggttagcgctccagggcctgactctggattgagctaaactggcagaatccactcaggccaacccttggtctactgctgtgtacagacagcccagtcctgtgttgagtctctcttctcctg

SEQ ID NO: 301420 - DNA, 120 bp, Artificial Sequence
  ENSG00000132932_56 (sequence is synthesized)
gatgaccctgcaaaaggaagagaccagttgtactgtgggcttagttctgggtttccactgcacactgacacgtgccagcaagggtagctgtggaaaacacgtatcaggagagcagagtag

SEQ ID NO: 301421 - DNA, 120 bp, Artificial Sequence
  ENSG00000132932_57 (sequence is synthesized)
tctggatgaatactctgtgctgatcagaacgggctcggtcataatttaggagtggagctgatgtgtctgtcctgcctcagtgcagaatattccaggcttcttgaccagggttatgttcac

SEQ ID NO: 301422 - DNA, 120 bp, Artificial Sequence
  ENSG00000132932_58 (sequence is synthesized)
ccatctcccaacacacacatgcacacatgaaaacaaaaacatggtaactcttttggttcggcacaccatacaaaacgtgctttggggcgaggagtgctgtttcttttaacacttgtagag

SEQ ID NO: 301423 - DNA, 120 bp, Artificial Sequence
  ENSG00000132932_59 (sequence is synthesized)
gaatatcctgagaagtgaacctgggctttgggagagctcagctgagaattctgttgacattttctttcccttgacaaggcttcaggttcgtctcactatagggagctggctgtgaaaatc

SEQ ID NO: 301424 - DNA, 120 bp, Artificial Sequence
  ENSG00000132932_60 (sequence is synthesized)
agtaataacttgtcaagaagcagtgaaaaatgcgggggggtggaaagagcctaggtaactaatgtcttataatgcatatgtatgtaaatattacaggatttaaggttgaattttttaaaa

SEQ ID NO: 301425 - DNA, 120 bp, Artificial Sequence
  ENSG00000132932_61 (sequence is synthesized)
agaaagttatagtctgtaatttccatttgttataataatgacctttaatcttgtcatttggaaccataaagcatttttatcaggtacctctgttccaagggatttatgtcttagaccata

SEQ ID NO: 301426 - DNA, 120 bp, Artificial Sequence
  ENSG00000132932_62 (sequence is synthesized)
gctgaattgaatgtttgcaaaacactgctataggataaggtggtctttagttttgaacgtgtgaaaggactgcacacttttcagccagggtttgagttactgcccagggtcatcgtctca

SEQ ID NO: 301427 - DNA, 120 bp, Artificial Sequence
  ENSG00000132932_63 (sequence is synthesized)
aagtaattcaaggagtgatttaacatcagcatttgaaatgtagtcttcatctcctgggatccataaaaaaatgtgaacagggaaatggtggctaagcagagcctgaaataataacttggc

SEQ ID NO: 301428 - DNA, 120 bp, Artificial Sequence
  ENSG00000132932_64 (sequence is synthesized)
aaagaaatgagtttatcaggtcgagtcaaaacatggcatcccctgttacactcaagaaatgttttcttcatgtaaatgtttatacgggcatatataatcacaatgggaacagttaaaacc

SEQ ID NO: 301429 - DNA, 120 bp, Artificial Sequence
  ENSG00000132932_65 (sequence is synthesized)
ccctcccttcaaaaaaagaaaatctatatcagttgggtttggttttggttcttcattggctcaaggcagttaactgtctcagtatagccttcggggagatttaacctcattctagccatt

SEQ ID NO: 301430 - DNA, 120 bp, Artificial Sequence
  ENSG00000132932_66 (sequence is synthesized)
tttccatcctgaaggccaagaaggactattagaagggtttttgaggggtttcggaggtgagggcccaagacccccataatgacatcattaggcattcttgaaaggtgttaacagaccagc

SEQ ID NO: 301431 - DNA, 120 bp, Artificial Sequence
  ENSG00000132932_67 (sequence is synthesized)
acgctcgatgtgttgtacccttcatttatttttttttctcagcatcccaagttgtccatcagtacattccccttcaccttacctgatcttcatttaatgcccagtctgtaactaatgttc

SEQ ID NO: 301432 - DNA, 120 bp, Artificial Sequence
  ENSG00000132932_68 (sequence is synthesized)
tgtttaaagctctcttaatttgttggctatgagtgatttgtgaatctgggatgtaaccctgagtgaggagaaaagggcattgagccagcataaatctgaatgggcagaagccacaaacaa

SEQ ID NO: 301433 - DNA, 120 bp, Artificial Sequence
  ENSG00000132932_69 (sequence is synthesized)
atgggagcagaaaagaagggcgagctcccccgcgccgcaccccgtgtataatccagtgttaacctctgaggaacacctcggctctcccaactgaggagagacaaaagagggattcttttt

SEQ ID NO: 301434 - DNA, 120 bp, Artificial Sequence
  ENSG00000132932_70 (sequence is synthesized)
acacccaggctggcgcattttcaagtgacaatctcgggctctagttgcctttgagatatccactctgctctttctcccaggcctcagaccaagaaaaacatgctctcaagattagcccat

SEQ ID NO: 301435 - DNA, 120 bp, Artificial Sequence
  ENSG00000132932_71 (sequence is synthesized)
aggcagttcttgtgacctggctgaagaaagaaaggagacctgtttgttttaaaagtcgggcgcaaagtgtcaggtggctttgatttatgacagaaagaggaagaagaaagttggagtaat

SEQ ID NO: 301436 - DNA, 120 bp, Artificial Sequence
  ENSG00000132932_72 (sequence is synthesized)
agcactatccaaataaccctgcccaggaaacttgggggtcaagagagcttatcaagagccttttataggtaagctcttccgtgtgaaagagaaaaggccggaaagagggagagagcccag

SEQ ID NO: 301437 - DNA, 120 bp, Artificial Sequence
  ENSG00000132932_73 (sequence is synthesized)
agagcaggctgcgaactcacttccaatgggattggagtctgttgtattcttaagagatagcctgatatgtggtttataggtgaatcaataaacaccaacaacaacaaaaaaaaaaaaaaa

SEQ ID NO: 301438 - DNA, 120 bp, Artificial Sequence
  ENSG00000132932_74 (sequence is synthesized)
aaaaaaggaagaaaagaaaaaaaggaaaccagccctgtcatggaatttctctccttccctgcacagtaaagacttttgggttttcatggataaaatcaatgtcagtactgaaactcctac

SEQ ID NO: 301439 - DNA, 120 bp, Artificial Sequence
  ENSG00000132932_75 (sequence is synthesized)
tctcccctcccgccccactctcccccgttgcccgagatggccaagttcaggcctgtgcaatgccgcttccctctgagcctccctctcaagggccacgcaggcagctgcagcagggccagc

SEQ ID NO: 301440 - DNA, 120 bp, Artificial Sequence
  ENSG00000132932_76 (sequence is synthesized)
tgcaggatggggctgccggtcactgaattgtcgttcaaatgcatcatctttgtggcgtctttctcatgcgagcaaagccacgtgctctcctgtctgctgtcacatctgtgcctggattgc

SEQ ID NO: 301441 - DNA, 120 bp, Artificial Sequence
  ENSG00000132932_77 (sequence is synthesized)
ttaaatattgtttgtgatggggaggttttaatctggtgatgcagagggaagcagggctgtgggggcacgtttaattggctcccagcagcgtggggggtgcttctatggtgtgtggggttt

SEQ ID NO: 301442 - DNA, 120 bp, Artificial Sequence
  ENSG00000132932_78 (sequence is synthesized)
tttgttgcctccctctagaagtgttaccgttttcacgtcctattaatgtcctctggttgttaaattacagcagcacattacagtgcactgggttccctcctggagtgaatacaaacggag

SEQ ID NO: 301443 - DNA, 120 bp, Artificial Sequence
  ENSG00000132932_79 (sequence is synthesized)
ggcatctacttgtatttttagaagttttgggagaatttagtgatttgtggctttgatcaatcctgttgactggtgtatgtctgcgcaaacctgtttcaaataaatcttttgttaaagtaa

SEQ ID NO: 301444 - DNA, 120 bp, Artificial Sequence
  ENSG00000132932_80 (sequence is synthesized)
cttggttcagttcatttctgactctcacaggtgttctttccaaagctggcccgggactggtgttttgggtccctgtgacgttttggggttttgactgttcatcccacactcttcttgagc

SEQ ID NO: 301445 - DNA, 120 bp, Artificial Sequence
  ENSG00000132932_81 (sequence is synthesized)
ctgtcctctgttgatgtttgaatggagatctgagcacagctaatacctctcccattgccttcccctacccactgctttttcctgactcctccttggtggccatgcccacagccccttgca

SEQ ID NO: 301446 - DNA, 120 bp, Artificial Sequence
  ENSG00000132932_82 (sequence is synthesized)
ataactcttttcatcttcccaaaccaaaattctgtgcccctttgaacaactactctccattcccacacctacctcatcccctggcagtcattctgctttgtgtctctatgaatttcacag

SEQ ID NO: 301447 - DNA, 120 bp, Artificial Sequence
  ENSG00000132932_83 (sequence is synthesized)
ccctccgtgctgcacggcgggtccctgtgccccggagccccactcctcctcggctgctccacacactggaaactgcatctgacagaaagattaaacgtctgcattttatcacctttgttg

SEQ ID NO: 301448 - DNA, 120 bp, Artificial Sequence
  ENSG00000132932_84 (sequence is synthesized)
agcacagactaccaggggagaggactttgacctcttgagaacactcagaaatctttaaagtgactgtctcgtcaggaaaagagtcatgaaagaatcatcagtgaccccctgtgaggacgt

SEQ ID NO: 301449 - DNA, 120 bp, Artificial Sequence
  ENSG00000132938_0 (sequence is synthesized)
agatctgatcgctgctgccctgctctcctcctcctctcattcctctgcctcctggattcctgaagtttaggagaaataaggtagccaagggaaccacatggaagttgtgacagctcccag

SEQ ID NO: 301450 - DNA, 120 bp, Artificial Sequence
  ENSG00000132938_1 (sequence is synthesized)
cggcgcgcccctttcgtgtgtgccggtacctcggcttaggagttgcccgctgacaccttgaatgaaggaggtccccttgccagccagcctgccgggatgggccattgctgctgcaagcct

SEQ ID NO: 301451 - DNA, 120 bp, Artificial Sequence
  ENSG00000132938_2 (sequence is synthesized)
tataactgccttcagtgcctggacaagacgaatgaaagtgcccttgtgaaagaaaaagagctgtcaatcgaacttgcaaacatcagggatgaagttgccttccatacagcaaagtgcgag

SEQ ID NO: 301452 - DNA, 120 bp, Artificial Sequence
  ENSG00000132938_3 (sequence is synthesized)
aaactacaaaaggagaaggaggagctggagaggcggttcgaggacgaggtgaagaggctgggctggcagcagcaggccgagctccaggagctggaggagcggctgcagctgcaattcgag

SEQ ID NO: 301453 - DNA, 120 bp, Artificial Sequence
  ENSG00000132938_4 (sequence is synthesized)
gcggaaatggcgcgcctgcaggaggagcacggtgaccagctgctgagcatccggtgtcaacaccaggagcaggtggaagatctcaccgccagccatgatgctgctctcctagagatggaa

SEQ ID NO: 301454 - DNA, 120 bp, Artificial Sequence
  ENSG00000132938_5 (sequence is synthesized)
aataaccacacagttgccatcacaatcctgcaggatgaccacgaccacaaagtccaagaattgatgtccactcatgagcttgaaaagaaagaattggaagaaaattttgaaaaactgcgg

SEQ ID NO: 301455 - DNA, 120 bp, Artificial Sequence
  ENSG00000132938_6 (sequence is synthesized)
ctgtcattgcaggaccaggtggacacgctgaccttccagagccagtctctgcgggacagagcccgccgcttcgaagaggccttgaggaagaacacagaggagcagctggagattgcattg

SEQ ID NO: 301456 - DNA, 120 bp, Artificial Sequence
  ENSG00000132938_7 (sequence is synthesized)
agaaaagaacattatcctagaagaaaagatccaggttctccaacagcagaacgaagacctcaaagcaaggattgaccaaaacacagttgtcaccagacagctgtcggaggaaaatgctaa

SEQ ID NO: 301457 - DNA, 120 bp, Artificial Sequence
  ENSG00000132938_8 (sequence is synthesized)
cctccaggaatatgttgagaaggaaacccaggagaagaagagattgagccgaaccaatgaagagctgctttggaagctccaaactggggacccgaccagtccgattaaactctcgcccac

SEQ ID NO: 301458 - DNA, 120 bp, Artificial Sequence
  ENSG00000132938_9 (sequence is synthesized)
atctcccgtttaccgcggctcctcctcggggccctcctctccggccagagtcagcacaacacccagatgacgccactacacggcctgcgggagctccggcttctcgtcctccggtctcca

SEQ ID NO: 301459 - DNA, 120 bp, Artificial Sequence
  ENSG00000132938_10 (sequence is synthesized)
ccctgagggagcaccgacccggtgccgccggagctggccctgtgcgcatgctcagtagctgcgaatgcatcctaggcgcgtcctcctctgatccccgtgtaagactgccctggtgtcggc

SEQ ID NO: 301460 - DNA, 120 bp, Artificial Sequence
  ENSG00000132938_11 (sequence is synthesized)
acttaggaatgtgtaaatggtaaagtctgatgtgcaaacgttttaccatagttagagccaaaagaaagacacttgcaattgttcttgagcaatgaactttcactgcagaatttcaggtta

SEQ ID NO: 301461 - DNA, 120 bp, Artificial Sequence
  ENSG00000132938_12 (sequence is synthesized)
gttacaaaaagctcagttttcaatatacattgaataatcattgtgtactgcaccgatatgtgtgtatatttagatatacgtatatacacatgctgcggttctgaatttcattttttataa

SEQ ID NO: 301462 - DNA, 120 bp, Artificial Sequence
  ENSG00000132938_13 (sequence is synthesized)
catgaagtgctgacatattttagtgaaggtcagcagttttctaacttgtgcctaagaattattgggaaatgaaaatgcatttctatctagcttcccaggaatatttctacccaaaataga

SEQ ID NO: 301463 - DNA, 120 bp, Artificial Sequence
  ENSG00000132938_14 (sequence is synthesized)
agcgagcgccggcggctccaggtgcgggggcgcccctcgcgctccacctgcgccgccgccgccggctctcagggcaagtttatctccccccttctgcggaaacccttgaccgcttagcgg

SEQ ID NO: 301464 - DNA, 120 bp, Artificial Sequence
  ENSG00000132938_15 (sequence is synthesized)
agtacagacctgtcggtaaatagaaaactcgagctggagaggaggaggaagcagcgtggcggaacccggcccgagatgagcgtctccgtgagggcagtggtggcctcttggacattacat

SEQ ID NO: 301465 - DNA, 120 bp, Artificial Sequence
  ENSG00000132938_16 (sequence is synthesized)
ctttcttggctctttttgacccaggtttccacagctggattgtttactagggccaattgtcaccaatggcagtaaaactcattttctggggaatagggtctcatggactgattggctctc

SEQ ID NO: 301466 - DNA, 120 bp, Artificial Sequence
  ENSG00000132938_17 (sequence is synthesized)
attcagcaggaacctaacagataagtcttcctgctgtatatcaagacaatgcttggttttcaagctgttctgagaatgattaaagcagtgtcgcaaggtgacattgtcaggggagaacaa

SEQ ID NO: 301467 - DNA, 120 bp, Artificial Sequence
  ENSG00000132938_18 (sequence is synthesized)
gcagcttgagaatttcctcttaatctgattgcagcttgaaggcagcccatttccattaagtaggactgcatggcaagcagccccaccaaagggttgacaatgagcgtcccagtggctcct

SEQ ID NO: 301468 - DNA, 120 bp, Artificial Sequence
  ENSG00000132938_19 (sequence is synthesized)
aagaaatcatgttacactcagttgcgggacaacagaaatgcagcaagaaataataatgaaagcatcttaagtctgggagatacgaatgccaatcaaatcatgttggaggtcagctcctct

SEQ ID NO: 301469 - DNA, 120 bp, Artificial Sequence
  ENSG00000132938_20 (sequence is synthesized)
catgacgagtccaagacatgtgacctgggagatgaaattggaaatacaaattcaagtgagccagaaaaccgtacccatttccataaggaatttcaccaacttcagggctttgggaaaggc

SEQ ID NO: 301470 - DNA, 120 bp, Artificial Sequence
  ENSG00000132938_21 (sequence is synthesized)
tctcaggctggctctgccagcctgaaagattttagactttcttcaaccattcagagggaactcaatgaagagcacacagtggagagaggcacagatagcctgcagaccacgcggagtatt

SEQ ID NO: 301471 - DNA, 120 bp, Artificial Sequence
  ENSG00000132938_22 (sequence is synthesized)
cagggaccaagtctgtcgagttggaggaatgtgatgagtgaggccagtctagacgttttggctaaaagggatgctgaaattccccggcatgttcccaaggataaactggcaaagaccctt

SEQ ID NO: 301472 - DNA, 120 bp, Artificial Sequence
  ENSG00000132938_23 (sequence is synthesized)
gacaatgaggaactgaggaggcattctttggaaagagcaagcagctctgtagctgcagtcgggagcctgactccgcagcatccacagcctctatccctcgactcccgggaagcacggggt

SEQ ID NO: 301473 - DNA, 120 bp, Artificial Sequence
  ENSG00000132938_24 (sequence is synthesized)
cagatacctgggggtggggaggggccacagaagacattgccagaccacgctgtcccggcagctttccctgcaactgacagtacctcagagggaaagagtgtgcgtcatcctaaaccatct

SEQ ID NO: 301474 - DNA, 120 bp, Artificial Sequence
  ENSG00000132938_25 (sequence is synthesized)
acctcagaaagcaagcagagcactccctcagagacccaaacagtgggggcacatgtactgcaggtgtgcagtgagcacacatcacattccgcccatccagagcctgctctgaatttgact

SEQ ID NO: 301475 - DNA, 120 bp, Artificial Sequence
  ENSG00000132938_26 (sequence is synthesized)
ttggcatcgaaggaaatcccaagtaaactggaagcacaattaggtcagggaaagggagaggccaagctggatctgaaatatgttcctcccaggagagttgaacaggagggaaaggcagcc

SEQ ID NO: 301476 - DNA, 120 bp, Artificial Sequence
  ENSG00000132938_27 (sequence is synthesized)
caggaagggtatctgggatgccacaaggaagagaatctgtcagccttggagggaagggatccatgtggggaagcacacccggaagccaccgatgcacttggccatctgctgaacagtgac

SEQ ID NO: 301477 - DNA, 120 bp, Artificial Sequence
  ENSG00000132938_28 (sequence is synthesized)
ctccaccaccttggggtgggaagaggcaactgtgaagagaagagaggagtcaacccaggggagcaggattctctccacaccacccccaaacagggctctgcttccttaggaggggctgat

SEQ ID NO: 301478 - DNA, 120 bp, Artificial Sequence
  ENSG00000132938_29 (sequence is synthesized)
aatcagcccactggcaaaatttcaccatgtgcaggtgagaagttgggtgaaaggacatccagcagcttttcaccaggtgacagtcatgtggcttttattcctaataatctgactgacagc

SEQ ID NO: 301479 - DNA, 120 bp, Artificial Sequence
  ENSG00000132938_30 (sequence is synthesized)
aagcccttggatgtcattgaggaggaaaggcggttgggcagtgggaataaggacagtgttatggttttggtgttcaatccttctgttggagagaacaagacggaggtgcctgagcccctg

SEQ ID NO: 301480 - DNA, 120 bp, Artificial Sequence
  ENSG00000132938_31 (sequence is synthesized)
gaccctcaaagtggccgctcagaagcacgggaaagcaaagaggtcaccacatctgttgctgaaaacaggaaccttctagagaatgcagataagattgaaagcacctcagcaagagcagat

SEQ ID NO: 301481 - DNA, 120 bp, Artificial Sequence
  ENSG00000132938_32 (sequence is synthesized)
tcagttctcaatattccagcacccctccacccagagacaactgtgaacatgacctaccagcctacaacacccagtagcagttttcaggatgttagcgtgttcggtatggatgcggggtcc

SEQ ID NO: 301482 - DNA, 120 bp, Artificial Sequence
  ENSG00000132938_33 (sequence is synthesized)
cccttggtagttccaccccctactgatagtgcacgcttgttgaacacgtcccccaaagtgcctgacaagaacacttgccccagtgggatccccaagcctgtcttcacacattccaaggac

SEQ ID NO: 301483 - DNA, 120 bp, Artificial Sequence
  ENSG00000132938_34 (sequence is synthesized)
acaccttcctcgcaggagggaatggagaactatcaggttgaaaaaacagaggagaggacagaaactaagcccatcattatgcccaagcccaagcatgtgaggcccaagatcatcacctac

SEQ ID NO: 301484 - DNA, 120 bp, Artificial Sequence
  ENSG00000132938_35 (sequence is synthesized)
atcaggaggaatccccaggccctgggccaggtggacgcctcgctggttccagtggggcttccatatgccccgcccacatgtaccatgcctcttccccacgaagagaaggcagcaggtggt

SEQ ID NO: 301485 - DNA, 120 bp, Artificial Sequence
  ENSG00000132938_36 (sequence is synthesized)
gacctgaagccatctgccaacctctatgagaaattcaagccagacctgcagaagccaagggtcttcagttccggattgatggtgtctggaatcaagcccccgggacatcctttcagtcaa

SEQ ID NO: 301486 - DNA, 120 bp, Artificial Sequence
  ENSG00000132938_37 (sequence is synthesized)
atgagtgaaaagtttttgcaggaggttacagaccaccctggaaaagaagagttttgttctcctccctatgctcattatgaagtccctccaactttctatcggtcagccatgctccttaag

SEQ ID NO: 301487 - DNA, 120 bp, Artificial Sequence
  ENSG00000132938_38 (sequence is synthesized)
ccccagctaggattgggtgcaatgtcccgtttaccatctgcaaagagcaggattctgattgcaagtcagaggtcttcagcgagcgccatccacccaccaggacccataacaacagccacc

SEQ ID NO: 301488 - DNA, 120 bp, Artificial Sequence
  ENSG00000132938_39 (sequence is synthesized)
agtctctacagttccgatccttcagcagatttaaagaaagcttccagttcaaatgctgcaaaatccaatctcccgaaatctggtctccgtcctcccggatactcacgtctcccggcagcc

SEQ ID NO: 301489 - DNA, 120 bp, Artificial Sequence
  ENSG00000132938_40 (sequence is synthesized)
aaactggcggcatttggctttgtccggagctccagcgtctcctcagtctccagcacccagtccggggacagtgcacagccagagcagggccggccagccacccgttcaacctttgggaat

SEQ ID NO: 301490 - DNA, 120 bp, Artificial Sequence
  ENSG00000132938_41 (sequence is synthesized)
gaagaacagccagttctgaaggcatctctgccttctaaggacacacccaagggggccggccgggtggcccctccagcatcctccagtgtgacagcaccccgcaggagtttacttccagcg

SEQ ID NO: 301491 - DNA, 120 bp, Artificial Sequence
  ENSG00000132938_42 (sequence is synthesized)
ccaaaatccacttccacacccgctggaacaaagaaagatgctcagaaagatcaagatacgaataaacctgctgtttcatctcctaagagagtagcagcttcaaccaccaagcttcattca

SEQ ID NO: 301492 - DNA, 120 bp, Artificial Sequence
  ENSG00000132938_43 (sequence is synthesized)
ccaggatacccaaagcagaggactgcggcagctcgaaatgggtttccgcccaagccggacccgcaggcccgtgaggctgagcggcagctggtgctgcggctgaaggagcggtgtgagcag

SEQ ID NO: 301493 - DNA, 120 bp, Artificial Sequence
  ENSG00000132938_44 (sequence is synthesized)
aagtggtactctctttaacacgaacaccagctatttgtgaacggtaactgcctttggaacaatcagcttctcagtcaacatgatgtgagatcactattattccattcgcaagttttaatt

SEQ ID NO: 301494 - DNA, 120 bp, Artificial Sequence
  ENSG00000132938_45 (sequence is synthesized)
attgatactcctgtcatgagcggataagggagagcagtgggaaaccctaagggggtttagcagttttgcagatgttacccatgacagtgactcatctctgatagtcttgtaaacacaagt

SEQ ID NO: 301495 - DNA, 120 bp, Artificial Sequence
  ENSG00000132938_46 (sequence is synthesized)
tttgcttttttcctaaatggcatctcagactcggtcattaagctattgttgcaccctccggaaaacatggcagagcatgacctttgagtaagagtgaggatgaccttgcagatgactgtg

SEQ ID NO: 301496 - DNA, 120 bp, Artificial Sequence
  ENSG00000132938_47 (sequence is synthesized)
cccattcgcgctccatcctcatgaaggaaattgctgccaaggtctgtattttgaccaggcacagagggggaacatcactccagctttccatgtggttcactctgatgcgatgctgtaaat

SEQ ID NO: 301497 - DNA, 120 bp, Artificial Sequence
  ENSG00000132938_48 (sequence is synthesized)
gatcaactctttgaaataggaccctcaggcccccatttcctagcagccccccttcagtttggttctacaactcaaccccttcactgcacattgagatggctcaggggttctagcaggggc

SEQ ID NO: 301498 - DNA, 120 bp, Artificial Sequence
  ENSG00000132938_49 (sequence is synthesized)
ttccagaaaaaaaaaacaccatttctgtcccgggggaccagttctgagctgtgctagatcatcacacgaccacccagaaacccacttgcacttcctgctggatgatcaggcaacgctgct

SEQ ID NO: 301499 - DNA, 120 bp, Artificial Sequence
  ENSG00000132938_50 (sequence is synthesized)
gctgaccgtgctcccatcttagacccagaaggttctcccaaacagaggagcccagtgaaacagccagccagggggcaccagctcctggactggcatctgtctctaaaatggtagaattag

SEQ ID NO: 301500 - DNA, 120 bp, Artificial Sequence
  ENSG00000132938_51 (sequence is synthesized)
gatatgaacagtactcatgtagtggtgtggaagattaggagcatgatacacaaaaggaagaagtagttttaacagatatggtgatgatgatgatgcccttgtttcctgtatgtgacaaag

SEQ ID NO: 301501 - DNA, 120 bp, Artificial Sequence
  ENSG00000132938_52 (sequence is synthesized)
accctgcactttctccctgagacccccccaaaattgtcctgagcacaggcctgtctttgagcgtgcccaaggcgagaagaaccatgagggggtcctgcaggggccggagccatggaacgg

SEQ ID NO: 301502 - DNA, 120 bp, Artificial Sequence
  ENSG00000132938_53 (sequence is synthesized)
ggaagaaaacagcccgcggacggggtcggcttgtccagggcacgcctgctcggcacacgtgttgccaacgtgaaggcagacatggtccctggccctaggatgagtccacgctgggcttcc

SEQ ID NO: 301503 - DNA, 120 bp, Artificial Sequence
  ENSG00000132938_54 (sequence is synthesized)
gggcctcaggtgcatctccagccaacctccaagggtcttgctccttctggggacgtacacagtaaatccacatggaaacaccaccatttctctttgctttagtggctctgcatgatactg

SEQ ID NO: 301504 - DNA, 120 bp, Artificial Sequence
  ENSG00000132938_55 (sequence is synthesized)
tgatattgagttgggcattccattagagtagatcttgccacattgactaaatacacaagtatttattctagtagcaggcacaacctgcaaacacaaattcagttacagcttagctgtccg

SEQ ID NO: 301505 - DNA, 120 bp, Artificial Sequence
  ENSG00000132938_56 (sequence is synthesized)
aattaggaaccgcttacatagccgcacctgctaaatgcagttacacagcaatactgacttccgtgtgatgctagaacgtggtacagtgtattaggctgctgtggtcagagttgtagcatc

SEQ ID NO: 301506 - DNA, 120 bp, Artificial Sequence
  ENSG00000132938_57 (sequence is synthesized)
gttagcactaagtaattcctcattaggtggacttcggtgagagctttgccctaacctgccctgaccttgggtacttgagctaatttccacgtggccctggcttcgtggtttgtttgtttt

SEQ ID NO: 301507 - DNA, 120 bp, Artificial Sequence
  ENSG00000132938_58 (sequence is synthesized)
ttttcttttgttacggacacccatcatgtatggctcctcatctgagccatcaccgctcccgaaacacatggggcggcagctgctgtgcctccttctcaattcttccacccccccacacca

SEQ ID NO: 301508 - DNA, 120 bp, Artificial Sequence
  ENSG00000132938_59 (sequence is synthesized)
tcagaattcggatttctctccacgtggcgtctgcctctgtccccttccaggctggagcgacgtttccacgttcggatgctgcagcctctgcacctgcctcagacagacccaccagatacc

SEQ ID NO: 301509 - DNA, 120 bp, Artificial Sequence
  ENSG00000132938_60 (sequence is synthesized)
acctgtctcttcgtggcatttgggagatgcgtgggcggcctgccccccgaccgccgcccctgcccaccacatgctgggacaaggttctggctggatgtcagaatggatgggggtgggggc

SEQ ID NO: 301510 - DNA, 120 bp, Artificial Sequence
  ENSG00000132938_61 (sequence is synthesized)
agccctggccgtgattagttgaatgaatggggtcacaacatcccttttcctgcccctacagtttgtgttgcatatttgtgtttaaagcctattaaaataaacttgagggactttctgcga

SEQ ID NO: 301511 - DNA, 120 bp, Artificial Sequence
  ENSG00000132938_62 (sequence is synthesized)
cttcctccatcttcccttggatctgtatcttggagtttctgggcctccaggctggtaggtcagcaggttcttcttctactgcagcattgctgtctcatctgctgcaggctgtgcatctct

SEQ ID NO: 301512 - DNA, 120 bp, Artificial Sequence
  ENSG00000132938_63 (sequence is synthesized)
aggagcagctggaggtcgtttctggattccaggcttccagccccgcaggaaccccgccccagcaaggccgagggactccctcagcagtctcgtcccaagacaaggcctctctgtgaatcc

SEQ ID NO: 301513 - DNA, 120 bp, Artificial Sequence
  ENSG00000132938_64 (sequence is synthesized)
ttatttttgccaaattccacagcattccccagctggagtcgtggggctcctatgataagcatggtctggaaacccccctccgctggcctgaccaccccttccagcccattctcccgcaac

SEQ ID NO: 301514 - DNA, 120 bp, Artificial Sequence
  ENSG00000132938_65 (sequence is synthesized)
tttttaagctgacatggggcagccttggctgcagcatgcgttcagttgaggggaattttttccagaaaagctggcaaaactccttccctctaacatggggttgccaaataaaatacagga

SEQ ID NO: 301515 - DNA, 120 bp, Artificial Sequence
  ENSG00000132950_0 (sequence is synthesized)
gcctcctcaccagcgcgaaaagccgggactggacctcgcggagttgtgcttgtcgccgaagcggggtgggcttgttcgttccgcgcagccgcagccagaaccgggtgacgcttatccccg

SEQ ID NO: 301516 - DNA, 120 bp, Artificial Sequence
  ENSG00000132950_1 (sequence is synthesized)
ctgtctttccagtccagggccgctgagagtgggggtggctgggagcagcgcagcctccggaggaggaggcggaggccgaggaccaggaatcaccttcaagcctatgtcgtgaggctttgg

SEQ ID NO: 301517 - DNA, 120 bp, Artificial Sequence
  ENSG00000132950_2 (sequence is synthesized)
cagaaattaagaaggaaatatctccattgttcattggcatggaaaaatgttcagtgggaggattagagttgactgaacagactcctgctttattagggaatatggccatggcaactagtc

SEQ ID NO: 301518 - DNA, 120 bp, Artificial Sequence
  ENSG00000132950_3 (sequence is synthesized)
tcatggacataggggattcatttggtcatccagcttgtcctttagtcagtagatctaggaactcaccagtggaagatgatgatgatgatgatgatgttgtgtttattgaatctatacaac

SEQ ID NO: 301519 - DNA, 120 bp, Artificial Sequence
  ENSG00000132950_4 (sequence is synthesized)
ctccttcaatttctgctccagcaatagctgatcaaagaaacttcatatttgcatcatcaaaaaatgaaaagcctcaaggaaattattctgtaattcctccttcttcaagagatttggcat

SEQ ID NO: 301520 - DNA, 120 bp, Artificial Sequence
  ENSG00000132950_5 (sequence is synthesized)
ctcagaaaggaaatataagtgagacaattgttattgatgatgaagaggacatagaaacaaatggaggagcagagaaaaagtcttcctgttttatcgaatggggacttcctggaactaaaa

SEQ ID NO: 301521 - DNA, 120 bp, Artificial Sequence
  ENSG00000132950_6 (sequence is synthesized)
acaaaaccaacgatttggatttctccacttccagtctttcaagaagtaagaccaagactggagtaagaccttttaaccctggtagaatgaatgtggcaggagacttatttcagaatggag

SEQ ID NO: 301522 - DNA, 120 bp, Artificial Sequence
  ENSG00000132950_7 (sequence is synthesized)
aatttgcaactcatcatagtcctgattcttggatctcccagtcagcttcatttcccagtaatcagaaacagccaggggtggattctttatcaccagtggccttacttcgtaagcagaatt

SEQ ID NO: 301523 - DNA, 120 bp, Artificial Sequence
  ENSG00000132950_8 (sequence is synthesized)
tccagcctacagcccaacaacaacttactaaaccagctaaaatcacttgtgcaaattgcaaaaagcctttacagaagggacagacagcttatcaacgaaaaggatcagctcacctctttt

SEQ ID NO: 301524 - DNA, 120 bp, Artificial Sequence
  ENSG00000132950_9 (sequence is synthesized)
gctctaccacctgcctttcttccttctctcataaacgtactcaaaacacacgaagcataatatgtaaaaaagatgcatctacaaagaaggctaatgtcattcttccagtagaatcaagca

SEQ ID NO: 301525 - DNA, 120 bp, Artificial Sequence
  ENSG00000132950_10 (sequence is synthesized)
aatccttccaagaattttatagtacatcttgtttgtctccctgtgaaaacaactggaatcttaaaaaaggagtttttaataagtcaagatgtacaatttgtagtaaattagcagagattc

SEQ ID NO: 301526 - DNA, 120 bp, Artificial Sequence
  ENSG00000132950_11 (sequence is synthesized)
gccatgaagtcagcgtaaataatgtaacacataaactgtgcagtaaccattgctttaataagtacagattggccaatggtctaataatgaactgctgtgaacactgtggagagtacatgc

SEQ ID NO: 301527 - DNA, 120 bp, Artificial Sequence
  ENSG00000132950_12 (sequence is synthesized)
ctagtaagagtactggaaacaacatcctggtgattggaggtcagcagaagagattttgctgccaaagttgtattaacgaatataaacagatgatggaaacaaaatcaaaaaaattaacag

SEQ ID NO: 301528 - DNA, 120 bp, Artificial Sequence
  ENSG00000132950_13 (sequence is synthesized)
gaaacaattatatggatcgtcaaatacacttttgaaaaaaatagagggaatcccagaaaaaaaggaaaagacttcacagctacagctttcagtagaatgtggcacggatacattactgat

SEQ ID NO: 301529 - DNA, 120 bp, Artificial Sequence
  ENSG00000132950_14 (sequence is synthesized)
ccaagagaatgtgaatttacctccttcttccacgtcaaccatagctgatacatttcaagagcaactggaagagaaaaattttgaagactccattgtaccagttgtgctttccgcagatcc

SEQ ID NO: 301530 - DNA, 120 bp, Artificial Sequence
  ENSG00000132950_15 (sequence is synthesized)
aggtacgtggccccgaattttgaatattaaacaacgggacactcttgttgaaaatgttccgcctcaagtaagaaattttaactttccaaaagataatacagggaggaagttttcagaaac

SEQ ID NO: 301531 - DNA, 120 bp, Artificial Sequence
  ENSG00000132950_16 (sequence is synthesized)
ttattatacacggattcttccaaatggtgaaaaaaccactagatcctggttactttattcaacctcaaaagattctgtgttttgtctatattgcaaactctttggggaaggaaaaaatca

SEQ ID NO: 301532 - DNA, 120 bp, Artificial Sequence
  ENSG00000132950_17 (sequence is synthesized)
actgaaaaatgaaaatgggtgcaaagattggcaacatttatcacatattcttagtaaacatgaagaaagtgaaatgcacgtcaacaatagtgttaagtactcaaaattaaaatctgatct

SEQ ID NO: 301533 - DNA, 120 bp, Artificial Sequence
  ENSG00000132950_18 (sequence is synthesized)
gaaaaaaaataaagctattgatgctgcagaacacagattatatgaaaatgagaaaaatgatggtgtgctgttgttgtacacgtaatatacctgagttgttttttggcatgatgatcagaa

SEQ ID NO: 301534 - DNA, 120 bp, Artificial Sequence
  ENSG00000132950_19 (sequence is synthesized)
tcttacattactcagaaaacatctgtcctgcaatagtcagtactattgtgttgtaagtctcctctacagagtaacttgcagcagttccttagcaataagtatgatagcaaataaatagca

SEQ ID NO: 301535 - DNA, 120 bp, Artificial Sequence
  ENSG00000132950_20 (sequence is synthesized)
aagaatgtttccattctaaatctaaaactaattagattcaatcatcattaggcaatgacttcattaggcaatgaagattaacaataggtaattgttaatcttcaaaatctatcaatttac

SEQ ID NO: 301536 - DNA, 120 bp, Artificial Sequence
  ENSG00000132950_21 (sequence is synthesized)
tgttaatcttcaaaatctatcaatttacacctatttaaaaattggcatttaatgactgccatttgatgggtttggttaatattctgttcttggccgggcgcaatggctcacgcctgtaat

SEQ ID NO: 301537 - DNA, 79 bp, Artificial Sequence
  ENSG00000132950_22 (sequence is synthesized)
agcaacagagcgagagtcagtctcaaaagaaagaaaaatattatgttctaattaccttgaaagaggaaagaaaggcttg

SEQ ID NO: 301538 - DNA, 120 bp, Artificial Sequence
  ENSG00000132950_23 (sequence is synthesized)
attatgttctaattaccttgaaagaggaaagaaaggcttgaattgatcaataccagtttgaataagatacttatgtgaacaagcattctcaacattattattaaagtaaaactactcagt

SEQ ID NO: 301539 - DNA, 120 bp, Artificial Sequence
  ENSG00000132950_24 (sequence is synthesized)
ttacagaatgggatctgaaactacagctttttgctattaaaccaaatacttgtgatctactttgtttgagcaaaacagcattatttgttatgttaatgatggttaatttccattttattg

SEQ ID NO: 301540 - DNA, 120 bp, Artificial Sequence
  ENSG00000132950_25 (sequence is synthesized)
tctccacttccagtctttcaagaagtaaggtaaatgcaggaatgggtaatagtggtatcactacagaattgactctgaaatacattattactaatgttacaaccttagaaacaggtataa

SEQ ID NO: 301541 - DNA, 120 bp, Artificial Sequence
  ENSG00000132950_26 (sequence is synthesized)
gctctgtgaatgctgggcaagatgtgaacataattattacatataaaacatcactatagaataccaacttgggagatgtcgctaaaggacttcagtcaagtaattttggtgttaatatac

SEQ ID NO: 301542 - DNA, 120 bp, Artificial Sequence
  ENSG00000132950_27 (sequence is synthesized)
actctttcatctacataatgcacgtgttctggatgtataacatgaagctgaaaggaagaataaggatatgttagaactatcttatgggatattttataaataaaattccatttgcatagc

SEQ ID NO: 301543 - DNA, 120 bp, Artificial Sequence
  ENSG00000132952_0 (sequence is synthesized)
gccttcctagtggagacgcgagtgggggaggagcagtccgaggggaacgtgggttgaacgttgcaactagggtggagatcaagctggaacaggagttccgatcgacccggtaccaagaag

SEQ ID NO: 301544 - DNA, 120 bp, Artificial Sequence
  ENSG00000132952_1 (sequence is synthesized)
gggagtgcccgcggcagggttcattgaaaaaatccttagtgatattgacatgtctcaagtgacataaattagccaatgactcggaatgatggattctccgaagattggaaatggtttgcc

SEQ ID NO: 301545 - DNA, 120 bp, Artificial Sequence
  ENSG00000132952_2 (sequence is synthesized)
agtgattggaccagggactgatatagggatatcttcactccacatggtggggtatttgggaaaaaattttgattcagctaaagttccatcagatgagtattgccctgcttgtagagagaa

SEQ ID NO: 301546 - DNA, 120 bp, Artificial Sequence
  ENSG00000132952_3 (sequence is synthesized)
gggaaagttaaaagccttaaagacttaccgaattagttttcaagaatctatctttttgtgtgaggatctgcagtgcatctatcctttgggctctaaatcacttaataacctaatttctcc

SEQ ID NO: 301547 - DNA, 120 bp, Artificial Sequence
  ENSG00000132952_4 (sequence is synthesized)
tgatttggaagaatgtcacactccacataagcctcagaaaaggaagagcttagaaagcagctataaggattcacttcttttagcaaattccaaaaagactagaaattatattgctattga

SEQ ID NO: 301548 - DNA, 120 bp, Artificial Sequence
  ENSG00000132952_5 (sequence is synthesized)
cggtggaaaagttttgaacagcaaacataatggagaagtatatgacgaaacctcgtcaaacttacctgatagtagtggtcaacagaatccaattaggacagctgattccttggagcggaa

SEQ ID NO: 301549 - DNA, 120 bp, Artificial Sequence
  ENSG00000132952_6 (sequence is synthesized)
tgagattttggaagctgatactgttgacatggctactacaaaagatcctgctacagttgatgtctctggaactggcagaccttcccctcaaaatgaaggatgtacatctaaactggaaat

SEQ ID NO: 301550 - DNA, 120 bp, Artificial Sequence
  ENSG00000132952_7 (sequence is synthesized)
gccactggagagcaaatgtacatcatttccccaggctttatgtgtccagtggaaaaatgcttatgctctctgttggttagactgtatcctgtcagctttggtgcactcggaagagttaaa

SEQ ID NO: 301551 - DNA, 120 bp, Artificial Sequence
  ENSG00000132952_8 (sequence is synthesized)
gaacaccgtgactggactgtgctcgaaggaggaatctatattctggcggttgcttacaaaatataatcaagcaaatacacttctatataccagtcaattgagtggtgttaaagatggaga

SEQ ID NO: 301552 - DNA, 120 bp, Artificial Sequence
  ENSG00000132952_9 (sequence is synthesized)
ttgtaaaaaacttacctcagaaatatttgcagagatagagacctgtctgaatgaagttagagatgaaatttttattagccttcagccccagcttagatgcacattaggtgatatggaaag

SEQ ID NO: 301553 - DNA, 120 bp, Artificial Sequence
  ENSG00000132952_10 (sequence is synthesized)
ccctgtgtttgcatttcccctgctcttaaaactagaaacccacattgaaaagctcttcctatattctttttcttgggactttgaatgttcgcagtgtggacaccaatatcaaaacaggca

SEQ ID NO: 301554 - DNA, 120 bp, Artificial Sequence
  ENSG00000132952_11 (sequence is synthesized)
tatgaagagtctggtcacctttacaaatgtcatccctgagtggcacccacttaatgctgcccattttggtccatgtaacaattgcaacagtaaatcacaaataagaaaaatggtattaga

SEQ ID NO: 301555 - DNA, 120 bp, Artificial Sequence
  ENSG00000132952_12 (sequence is synthesized)
aaaagtatctcccatattcatgttgcactttgtagaaggcttaccacagaatgacttgcagcactatgcatttcattttgaaggctgtctttatcagataacttctgtaattcagtatcg

SEQ ID NO: 301556 - DNA, 120 bp, Artificial Sequence
  ENSG00000132952_13 (sequence is synthesized)
agcaaataatcattttataacatggattttagatgctgatggaagttggctggaatgtgatgacttaaaaggcccatgttctgaaaggcacaagaaatttgaagttcctgcttcagagat

SEQ ID NO: 301557 - DNA, 120 bp, Artificial Sequence
  ENSG00000132952_14 (sequence is synthesized)
acatattgttatttgggaaagaaaaatatcccaagtgacagataaagaagctgcctgccttccacttaaaaagactaatgaccaacacgctctcagtaatgagaaaccagtatctttaac

SEQ ID NO: 301558 - DNA, 120 bp, Artificial Sequence
  ENSG00000132952_15 (sequence is synthesized)
atcgtgttctgtgggtgatgctgcctcagctgaaacagcctcagtaactcaccctaaagatatatcagttgcccctcgtactctttcacaggacacagctgtaactcatggagatcattt

SEQ ID NO: 301559 - DNA, 120 bp, Artificial Sequence
  ENSG00000132952_16 (sequence is synthesized)
actttcaggtccaaaaggtttggttgacaatattttacctctgacacttgaagaaactatccagaaaacagcctcagtttcacagttaaattctgaagctttcctgttagaaaataaacc

SEQ ID NO: 301560 - DNA, 120 bp, Artificial Sequence
  ENSG00000132952_17 (sequence is synthesized)
tgtagcagaaaatacaggaattctcaaaaccaatactttgctatcacaagaatcactaatggcttcttcagtatcagctccatgtaatgaaaagcttattcaagaccaatttgtggacat

SEQ ID NO: 301561 - DNA, 120 bp, Artificial Sequence
  ENSG00000132952_18 (sequence is synthesized)
aagttttccatcccaagttgtaaatacaaacatgcagtcagtacagctgaatacagaagatactgtaaatactaaatctgtgaataatactgatgctactggtcttatacagggagtgaa

SEQ ID NO: 301562 - DNA, 120 bp, Artificial Sequence
  ENSG00000132952_19 (sequence is synthesized)
gtcagtagaaattgagaaggacgctcagttaaaacaattccttacaccaaaaactgaacaattaaaaccagaacgtgtcacatctcaggtatctaatttgaagaaaaaagaaactacagc

SEQ ID NO: 301563 - DNA, 120 bp, Artificial Sequence
  ENSG00000132952_20 (sequence is synthesized)
ataagcaggggtgcttcttttatgccactctgtgtttcagctcataatagaaacactataactgatttacaaccttcagttaaaggggtaaataattttggtggctttaaaactaaaggt

SEQ ID NO: 301564 - DNA, 120 bp, Artificial Sequence
  ENSG00000132952_21 (sequence is synthesized)
ataaaccagaaggccagccacgtatccaagaaagctcgtaagagtgcaagtaagcctcctcccatcagtaagccaccagcaggccctccatcgtctaatggcacagctgcccacccacat

SEQ ID NO: 301565 - DNA, 120 bp, Artificial Sequence
  ENSG00000132952_22 (sequence is synthesized)
gctcatgctgcttcagaagttttggaaaagtctggaagcacctcatgtggagctcaactcaaccacagttcttatgggaatggtatttcttcagcaaaccatgaagacttggtggaaggt

SEQ ID NO: 301566 - DNA, 120 bp, Artificial Sequence
  ENSG00000132952_23 (sequence is synthesized)
cagattcataaacttcgtctaaaacttcgtaaaaagctaaaggcagaaaagaagaaattagctgctcttatgtcttccccgcaaagcagaacagttcgaagtgaaaatctagaacaggtg

SEQ ID NO: 301567 - DNA, 120 bp, Artificial Sequence
  ENSG00000132952_24 (sequence is synthesized)
ccccaggatgggtctccaaatgattgtgaatcaatagaggacttgttaaatgagctaccatatccaattgatattgccagtgagtctgcatgcaccactgttcctggtgtttccctgtac

SEQ ID NO: 301568 - DNA, 120 bp, Artificial Sequence
  ENSG00000132952_25 (sequence is synthesized)
agtagtcaaactcatgaagaaattttagcggaattattgtctcctacacctgtttcaacagagctgtcagaaaatggggaaggtgactttaggtatttgggaatgggagatagtcatatc

SEQ ID NO: 301569 - DNA, 120 bp, Artificial Sequence
  ENSG00000132952_26 (sequence is synthesized)
ccaccaccagtaccaagtgaattcaatgatgtttcccagaacacacatctgagacaggaccataattattgtagccccaccaagaaaaatccatgtgaagttcagccagactctctgaca

SEQ ID NO: 301570 - DNA, 120 bp, Artificial Sequence
  ENSG00000132952_27 (sequence is synthesized)
aataatgcctgcgttagaacattaaacttggagagtccgatgaagactgatattttcgatgagtttttttcctcctcagcattaaatgctttagcaaatgacacattagacctacctcat

SEQ ID NO: 301571 - DNA, 120 bp, Artificial Sequence
  ENSG00000132952_28 (sequence is synthesized)
ttcgatgaatatctgtttgagaattattgaattaatgcttgttaacttttttcatataatatttattattattagaagaacttacaatgtgttcaggtagtgtttatacactggacttgt

SEQ ID NO: 301572 - DNA, 120 bp, Artificial Sequence
  ENSG00000132952_29 (sequence is synthesized)
gtaattacttgtgtaataaccatgaacaaaatgcaaggtttaacctttggttctgcccatgaagcatgtaatctttcttacacattaaaatcactgaatgtgttctcctttttggtttca

SEQ ID NO: 301573 - DNA, 120 bp, Artificial Sequence
  ENSG00000132952_30 (sequence is synthesized)
ttttgttcttgtgagagtatgaggatttcaaaatgttaaagatgaaaagtggcgtctagtttctgacagtttgtacagttggatgcattacatttttagatttgaagttttggttatgtt

SEQ ID NO: 301574 - DNA, 120 bp, Artificial Sequence
  ENSG00000132952_31 (sequence is synthesized)
agtgttatgagtgatctttgtggtggttttcttcccctggaaacctgttgctcgtggcgctttgcccacggtgcccgagttcttgtcctgtgtccagatatgcagacaaatgaagggtga

SEQ ID NO: 301575 - DNA, 120 bp, Artificial Sequence
  ENSG00000132952_32 (sequence is synthesized)
agaagaagaagaggagctttatttagtgttagaacagctcagaaggagacccacagtgagcagctcccctgtgtcggcgggcaggtcgtccctcaagtgttcagctctcagcagagaaaa

SEQ ID NO: 301576 - DNA, 120 bp, Artificial Sequence
  ENSG00000132952_33 (sequence is synthesized)
ggccctggagagggtgactcctctcagctctcagcagagaagcagccctggagaaggtagcttctgttcgcaggcagattgtccagaggtcctgctgctctcagacggggccctggagag

SEQ ID NO: 301577 - DNA, 120 bp, Artificial Sequence
  ENSG00000132952_34 (sequence is synthesized)
gatagcttctatccataggcaggttgttctgccgtctctacaggtctctgaagctcttagcagagagggtagctcctccctgttgctggtcgtcccaccctctgctcagttctggctgag

SEQ ID NO: 301578 - DNA, 120 bp, Artificial Sequence
  ENSG00000132952_35 (sequence is synthesized)
cctggggcattttacgggcctcgggggaggaagtgcatacttactggcctggaaaaggcaccagttcccactcctacaggtgggactggcagcctggccctcagccttcaggccctccct

SEQ ID NO: 301579 - DNA, 120 bp, Artificial Sequence
  ENSG00000132952_36 (sequence is synthesized)
gttcatggcttccaggcttacccccctgctttgatctgagagctggtgccaatagcagggagaagccaagctgcagaggcaagcacttccgagcctgcaaaagcaggcccccaaaagtgc

SEQ ID NO: 301580 - DNA, 120 bp, Artificial Sequence
  ENSG00000132952_37 (sequence is synthesized)
agggatgcctgagtctgcacccgcacccaggagggtggagatcttgcctgctccaaggctgcagccggaatgatagcaggctgactggagcacctgccaccatcattagttcaagagttt

SEQ ID NO: 301581 - DNA, 120 bp, Artificial Sequence
  ENSG00000132952_38 (sequence is synthesized)
atgcagatttaagttgtatacggtatatgaatgtgtgacagttttccttatggttgtgtggccttctgtaagagcctacgcctgtttgttacaccggtagagtgctgtggaatgtaaact

SEQ ID NO: 301582 - DNA, 120 bp, Artificial Sequence
  ENSG00000132952_39 (sequence is synthesized)
ttccctatgtcacttatctcctttatctctccatacagaggagggcaagaaaccttgttacttgaactttagtaatgttaagtgatcaataaatctataaataaatgatagcagaaaaaa

SEQ ID NO: 301583 - DNA, 120 bp, Artificial Sequence
  ENSG00000132952_40 (sequence is synthesized)
cccaaacccagccactcacacatggcgggctcagcagccaccggccccgcccctcctcgtcgccgcagtcgcaactgcgtctgcggccacagggcggacagccacgcctctgcggagggc

SEQ ID NO: 301584 - DNA, 120 bp, Artificial Sequence
  ENSG00000132953_0 (sequence is synthesized)
cgcggcggcgattggccggccgcggcgcccgctcccagaatgcagcgcatggcgcgtcattgaagagagaccatgatggcggcggcgctggggcccccagaagtgatcgctcagctggag

SEQ ID NO: 301585 - DNA, 120 bp, Artificial Sequence
  ENSG00000132953_1 (sequence is synthesized)
aacgcggctaaagttctgatggcaccaccttccatggtcaataatgaacaacgccagcatgcagagcacatattcttatcatttaggaaatcaaaatcaccatttgcagtttgcaagcat

SEQ ID NO: 301586 - DNA, 120 bp, Artificial Sequence
  ENSG00000132953_2 (sequence is synthesized)
attttggaaactagtaaagtggactatgtcctctttcaagctgccacagccataatggaagcagttgtccgagagtggattctcttggaaaaaggtagcatcgagtctctgcgaacattc

SEQ ID NO: 301587 - DNA, 120 bp, Artificial Sequence
  ENSG00000132953_3 (sequence is synthesized)
cttttaacctatgtcttacaaaggcccaaccttcaaaagtatgttcgggaacagattctactagcagtagcagtaattgtaaaaagaggatcattagataaatcaattgactgcaaaagc

SEQ ID NO: 301588 - DNA, 120 bp, Artificial Sequence
  ENSG00000132953_4 (sequence is synthesized)
atttttcatgaagtcagccagttgattagtagtggcaatcccactgtgcaaactctggcctgttctattctgactgcgctattgagtgaattttcaagttcaagtaaaactagcaacatt

SEQ ID NO: 301589 - DNA, 120 bp, Artificial Sequence
  ENSG00000132953_5 (sequence is synthesized)
ggattgagcatggaattccatggtaactgcaaaagagtttttcaggaagaagaccttcgtcagatcttcatgttaactgttgaagttctgcaggagttcagcaggcgggaaaacctcaat

SEQ ID NO: 301590 - DNA, 120 bp, Artificial Sequence
  ENSG00000132953_6 (sequence is synthesized)
gctcagatgtcttcagtatttcagcgttaccttgcactcgccaatcaagtcttgagctggaactttcttcctccaaatttgggcagacattatatagctatgtttgaatcctcgcaaaat

SEQ ID NO: 301591 - DNA, 120 bp, Artificial Sequence
  ENSG00000132953_7 (sequence is synthesized)
gtgctgttgaagccaacagagtcctggcgggagactcttctggacagcagagttatggagcttttcttcacagtacatcgaaaaatcagagaagattcagatatggcacaagattctctg

SEQ ID NO: 301592 - DNA, 120 bp, Artificial Sequence
  ENSG00000132953_8 (sequence is synthesized)
cagtgccttgcccagttagcttctcttcatggacccatcttcccagatgaaggatcacaagttgattatctagcacacttcattgagggattactgaatactatcaatggaattgaaata

SEQ ID NO: 301593 - DNA, 120 bp, Artificial Sequence
  ENSG00000132953_9 (sequence is synthesized)
gaagattctgaagctgtggggatctccagcattatcagcaacctgataaccgtgttcccacgaaatgttttaactgccattccaagtgaacttttctcctcctttgttaactgcctcaca

SEQ ID NO: 301594 - DNA, 120 bp, Artificial Sequence
  ENSG00000132953_10 (sequence is synthesized)
cacctcacttgttcttttgggcgaagtgctgcattggaagaagtgcttgataaagatgacatggtatacatggaagcatatgataaattgttggagtcctggttaactttggttcaagat

SEQ ID NO: 301595 - DNA, 120 bp, Artificial Sequence
  ENSG00000132953_11 (sequence is synthesized)
gacaaacatttccataaaggcttttttacccaacatgcagttcaagttttcaattcctatattcagtgccacctagctgctccagatggcacaagaaatttgactgccaatggtgtggcc

SEQ ID NO: 301596 - DNA, 120 bp, Artificial Sequence
  ENSG00000132953_12 (sequence is synthesized)
tctcgtgaggaggaagaaataagtgaacttcaagaggatgatcgagaccagttttctgatcaactggccagtgtaggaatgctaggaagaattgctgcagaacactgtatacctcttctg

SEQ ID NO: 301597 - DNA, 120 bp, Artificial Sequence
  ENSG00000132953_13 (sequence is synthesized)
acaagtttattagaagaaagagtaacaagactccatggtcagttacaacgacatcagcaacagttacttgcttcaccgggttcaagcactgttgacaacaaaatgcttgatgatctctat

SEQ ID NO: 301598 - DNA, 120 bp, Artificial Sequence
  ENSG00000132953_14 (sequence is synthesized)
gaagatattcactggcttattttagttacaggctacctcttagctgatgatactcagggagagactccgctaatacctccagaaataatggaatattccattaagcattcatctgaagtt

SEQ ID NO: 301599 - DNA, 120 bp, Artificial Sequence
  ENSG00000132953_15 (sequence is synthesized)
gacattaatacaacacttcaaattttgggatctccaggagaaaaggcttcttccatcccagggtacaacagaacagattctgtgattaggctgttgtctgccattctcagagtttcagaa

SEQ ID NO: 301600 - DNA, 120 bp, Artificial Sequence
  ENSG00000132953_16 (sequence is synthesized)
gttgaatctcgagcaataagagcagatctcactcatctactaagtccccagatgggcaaagatattgtttggtttttaaaacgctgggcaaagacttatctcctggtggatgaaaaactg

SEQ ID NO: 301601 - DNA, 120 bp, Artificial Sequence
  ENSG00000132953_17 (sequence is synthesized)
tatgatcagataagtctgccattcagtacagcgttcggagcagatacagagggttctcagtggataattggctacctcttacaaaaagtcatcagtaacctctcagtctggagtagtgag

SEQ ID NO: 301602 - DNA, 120 bp, Artificial Sequence
  ENSG00000132953_18 (sequence is synthesized)
caggaccttgcaaatgacactgtgcagctccttgtcactttggtggaaagaagagaaagggcaaacttagtaattcaatgtgagaactggtggaatttagctaagcagtttgcaagccga

SEQ ID NO: 301603 - DNA, 120 bp, Artificial Sequence
  ENSG00000132953_19 (sequence is synthesized)
agcccacctcttaatttcttgtcaagtcctgtgcagaggacattgatgaaggctctagtcttaggaggttttgcacatatggacacagaaaccaaacagcagtattggacagaggttctt

SEQ ID NO: 301604 - DNA, 120 bp, Artificial Sequence
  ENSG00000132953_20 (sequence is synthesized)
cagccacttcagcagcgattcttaagagtgataaaccaagaaaacttccagcagatgtgtcagcaagaggaagtcaagcaggaaatcactgccacactagaggccctgtgtggcattgct

SEQ ID NO: 301605 - DNA, 120 bp, Artificial Sequence
  ENSG00000132953_21 (sequence is synthesized)
gaggctacccagattgacaacgtagcaatcctgtttaattttttaatggacttccttaccaattgcattggattgatggaagtttacaagaataccccagagactgtcaatctcattata

SEQ ID NO: 301606 - DNA, 120 bp, Artificial Sequence
  ENSG00000132953_22 (sequence is synthesized)
gaagtttttgttgaagttgcacataaacagatatgctatcttggagagtccaaagctatgaacttatatgaagcctgccttactttgttgcaagtgtattctaagaataatttagggcgg

SEQ ID NO: 301607 - DNA, 120 bp, Artificial Sequence
  ENSG00000132953_23 (sequence is synthesized)
caaagaatagatgttacagcagaagaagagcaataccaagacctgcttctcattatggaacttcttactaacctgctgtcaaaagaattcatagatttcagtgatacagatgaagtgttt

SEQ ID NO: 301608 - DNA, 120 bp, Artificial Sequence
  ENSG00000132953_24 (sequence is synthesized)
agaggacatgagccaggtcaagcagcaaacagatctgtgtcagcagcggatgttgtgttgtatggagtaaacctaattctgcccttgatgtcacaggatctcttgaagtttccaaccctt

SEQ ID NO: 301609 - DNA, 120 bp, Artificial Sequence
  ENSG00000132953_25 (sequence is synthesized)
tgtaatcagtactacaaattaatcacatttatctgtgagatttttcctgaaaaaataccacagcttcctgaggatctgtttaaaagtctgatgtactccctagaattaggaatgacatca

SEQ ID NO: 301610 - DNA, 120 bp, Artificial Sequence
  ENSG00000132953_26 (sequence is synthesized)
atgagttcggaggtttgccagctttgcctggaggccttgacaccgttagctgaacagtgtgcaaaagcacaagaaacagactcaccactttttctagcaacacggcactttcttaagctg

SEQ ID NO: 301611 - DNA, 120 bp, Artificial Sequence
  ENSG00000132953_27 (sequence is synthesized)
gtttttgatatgctggttttgcaaaagcacaacacagagatgaccactgcggctggcgaagctttctacacgttggtgtgtttgcaccaggctgaatattctgaactggtcgaaacatta

SEQ ID NO: 301612 - DNA, 120 bp, Artificial Sequence
  ENSG00000132953_28 (sequence is synthesized)
ctatcaagtcagcaagacccagttatttaccagagattagcagatgccttcaacaagctcactgcaagcagcactcctcctacgctggatcggaagcagaagatggccttcttaaagagt

SEQ ID NO: 301613 - DNA, 120 bp, Artificial Sequence
  ENSG00000132953_29 (sequence is synthesized)
ttagaagaatttatggcaaatgttggtggtctcctttgtgtaaaataaacaacagaactttatgcttaatttagatcctttctgcaaagtgcactgaattgctgaaagttgacttgagtc

SEQ ID NO: 301614 - DNA, 120 bp, Artificial Sequence
  ENSG00000132953_30 (sequence is synthesized)
ttgtcctattcctcagttcatttggccattttggattttggagagcctgaaactttgatatgtatgtaatacagtgaaacaggagaggtcaacttggcatcagcttctgctgttaagtgt

SEQ ID NO: 301615 - DNA, 120 bp, Artificial Sequence
  ENSG00000132953_31 (sequence is synthesized)
tagccacaatctgtcatatatatgtcttttagattctgaatggtgatttaaaattttcaaaatgaaattccatatatgtgcaaacagatatgggcaccacgaaatacatatgcagtgcct

SEQ ID NO: 301616 - DNA, 120 bp, Artificial Sequence
  ENSG00000132953_32 (sequence is synthesized)
tttttccttttaacataggtggctagccaaagtttagaatttttgtcattaaatatgaaatggatatatgctaggcagtgtttctcaaaatctccatagatcgcctgcatcacttgagga

SEQ ID NO: 301617 - DNA, 120 bp, Artificial Sequence
  ENSG00000132953_33 (sequence is synthesized)
gctggtgaaaaggcagattcttaggcccaactgtagaccttcagagtcagaatgtctggttgttgggcccaggagtcttcatgttaataagcttctccctttcgtcaccccaaaagtttt

SEQ ID NO: 301618 - DNA, 120 bp, Artificial Sequence
  ENSG00000132953_34 (sequence is synthesized)
gaatcaatgaaagagacattgaaaactcttaagaggttttgtgctttctagcttttcctccctttgatgattgggttttataattcagcaggaaggggaaacatcaccaggggtttgttg

SEQ ID NO: 301619 - DNA, 120 bp, Artificial Sequence
  ENSG00000132953_35 (sequence is synthesized)
gctttttcttagcttgctttcttgcttgcttgctttcttgcttttcttgctttctgtctctctctttcttttctctctctctctcacatcaacccagtgctgcaggttttgtgtaataca

SEQ ID NO: 301620 - DNA, 120 bp, Artificial Sequence
  ENSG00000132953_36 (sequence is synthesized)
agtcactaatcatactctgatgcctgaacttgaggaggaaaatacatgtatatttttgttccgtaaaaataaccttaggaactgtagccatttcattgccttaattttaagaggaaaata

SEQ ID NO: 301621 - DNA, 120 bp, Artificial Sequence
  ENSG00000132953_37 (sequence is synthesized)
caaaaacagctgatttgttttagtaagaaaccacgtcttgatgcttcagagttggtttagggtgttagctgctatgaacctgttgcccctttcgatcgtgtatttatgtaggtttatcag

SEQ ID NO: 301622 - DNA, 120 bp, Artificial Sequence
  ENSG00000132953_38 (sequence is synthesized)
tgaaatgaaaggcttgtttccgtctagtctaactttttgagtgtgtttctatccagccacatagcccatatctactctaaatggcttgcttaagcaataattattttaaaggatgtgaat

SEQ ID NO: 301623 - DNA, 120 bp, Artificial Sequence
  ENSG00000132953_39 (sequence is synthesized)
cactgattcacacagactattgcacgttggggcattaggggcaataattcttatccagacatgggagccagtgaatttaatttcagagattaaaaattcactttagatcctctagtttga

SEQ ID NO: 301624 - DNA, 120 bp, Artificial Sequence
  ENSG00000132953_40 (sequence is synthesized)
tctcttaatcaggatttttatacagctgccaggctcccctaattcagtgtgccagcttacaatgtggaaatgaaagctaatttatacacagcaggcatatgaaactccactcattgcagt

SEQ ID NO: 301625 - DNA, 120 bp, Artificial Sequence
  ENSG00000132953_41 (sequence is synthesized)
tatctattaaaccattctgcaaatacggtttttctacctgattgcatatagcatatgtgtcattacatgtgatgctgtgcaaaactttgtataattctgtgttattaacagttaacaaaa

SEQ ID NO: 301626 - DNA, 120 bp, Artificial Sequence
  ENSG00000132953_42 (sequence is synthesized)
ctggagcatctgaattacatccaacctgtgcatgtgatgttaggtagatgtgaatgcagggccttgggccataacttacatttctctcaatttgattagctttgagtcacaattaagggg

SEQ ID NO: 301627 - DNA, 120 bp, Artificial Sequence
  ENSG00000132953_43 (sequence is synthesized)
aagcaaaaacatcttgaaaagactgctaggaaggaaattaatatcagtcatccagaagtacacgtttctgtattttaaaaaatactttgatgcatttatttttaggtgttttttttttcc

SEQ ID NO: 301628 - DNA, 120 bp, Artificial Sequence
  ENSG00000132953_44 (sequence is synthesized)
ccttaaaaaacttgaagtgatatgcagcagtaatctatttgttttgcattgttcttggtgttttgtgtttcccagatccctcaagctttctcagctgttgtgaattatgtgtatctgtgt

SEQ ID NO: 301629 - DNA, 120 bp, Artificial Sequence
  ENSG00000132953_45 (sequence is synthesized)
gtgtgctaagtacagtctctttaccaaagggcactgaaacacacaattgactggacaggtccacgcgccatgacaaaactataatcaagttattaaaactaaagaggagtgggaaaggaa

SEQ ID NO: 301630 - DNA, 120 bp, Artificial Sequence
  ENSG00000132953_46 (sequence is synthesized)
tgccttggtaagtaaaaaggcatctatatttaataacttttatccagatggcaacatatttgcaaaatttgcccagatcctattacaatactaaaaatagaaaatttcacctccatattc

SEQ ID NO: 301631 - DNA, 120 bp, Artificial Sequence
  ENSG00000132953_47 (sequence is synthesized)
ctgaggtgtaatttcattagactagttttagtttaaaaagaccttcttcagattggaccaaataatacttataagatcagcagaatgttgaatattagctcactggggtggggagaagcc

SEQ ID NO: 301632 - DNA, 120 bp, Artificial Sequence
  ENSG00000132953_48 (sequence is synthesized)
actaccattttttaggtgatggggatgccactgagttgcaacggctagaccttttcagggtggttgtgtccatgtttgcctgattggatgcttattcactttgtgttttcttttgtttta

SEQ ID NO: 301633 - DNA, 120 bp, Artificial Sequence
  ENSG00000132953_49 (sequence is synthesized)
ttttgtccaattttgtctttagctgtgtttattaacttctccggtcttgttttgttttaatgctcttggcccagtgggtgtcaagaacactggcttaattcaagtcagttgatttttttt

SEQ ID NO: 301634 - DNA, 120 bp, Artificial Sequence
  ENSG00000132953_50 (sequence is synthesized)
ctattaaaactgttgttaaaatattttttaaaacaaaaacattatttgtgccctcttttatatatgtcaaagggacactgtcaagtatttcatttttagatttttgttttataaaatttc

SEQ ID NO: 301635 - DNA, 120 bp, Artificial Sequence
  ENSG00000132953_51 (sequence is synthesized)
tgttgttcatatagtatcctttaacctctagttttccatacatcctttgtttgtttctcattttattttccttgacccatttatttcccaaggcacaatcactaaagactttgtactttc

SEQ ID NO: 301636 - DNA, 120 bp, Artificial Sequence
  ENSG00000132953_52 (sequence is synthesized)
acagtctgttaatgtggtagcacctgtaactgtgttcttgttctgttaaaaggattgatttgcttttatagtccttgtgctggatgagtggctgcctcagtagcaaaactacctgacagt

SEQ ID NO: 301637 - DNA, 120 bp, Artificial Sequence
  ENSG00000132953_53 (sequence is synthesized)
atttgacagtgtcctttccagcaccattatttgggtctttcagggtggccatctctgttagaagacagtagcatgttaacatcactgcattgagtttttgtctggtgtaaagtatgactt

SEQ ID NO: 301638 - DNA, 120 bp, Artificial Sequence
  ENSG00000132953_54 (sequence is synthesized)
ttaatgtaaacaaactgcaggtttttttcaaactaattttaagaatttagtcttatttcgttgtaaactgtgtatctaattatattacattactctgttcagatgggatggttactacca

SEQ ID NO: 301639 - DNA, 120 bp, Artificial Sequence
  ENSG00000132953_55 (sequence is synthesized)
cttgtccatgattttcatttgaaaagcaagtatctatatcatttccccccagtcagcattatttaacactccccttaactgtctttgaactttctcttttaacaaaaatgtcaagtcttt

SEQ ID NO: 301640 - DNA, 120 bp, Artificial Sequence
  ENSG00000132953_56 (sequence is synthesized)
atagttgtaatatcaccatgtttcccatttctgttaatacttctatgaacccctaaagtattgaagggaactagctgtcagtttcaaggattacaagtttgagtctcctagtattcaaca

SEQ ID NO: 301641 - DNA, 120 bp, Artificial Sequence
  ENSG00000132953_57 (sequence is synthesized)
tcattctgaaccctgaaataatatttttctctgttaaacaatttttatctgtttgccacctctgttgttagaggtggttgtcaattgaccttactaagttagctgtctttgatgaggaat

SEQ ID NO: 301642 - DNA, 120 bp, Artificial Sequence
  ENSG00000132953_58 (sequence is synthesized)
tattgttattggttcctgaataaaacattaaccttttaagtcagaaggaacctcggtacttcttaaggtttgtttgtgttttctaaaaccagagaataaggaactgatttggctatgagg

SEQ ID NO: 301643 - DNA, 120 bp, Artificial Sequence
  ENSG00000132953_59 (sequence is synthesized)
tttaacattataattttctgtaagctttcccacaaaaaaacattgttgatttgaggatataataatgttttaatctttttaaaatataagtggttattctctgacttggtaactatgttc

SEQ ID NO: 301644 - DNA, 120 bp, Artificial Sequence
  ENSG00000132953_60 (sequence is synthesized)
tgaaaacactgcatttaagaatttttaaaaattggttttctaaaattaaaatgtccaaattaggcatattgctgagctcaaattgatgtgaaatgccatggttccagttgaattttaagc

SEQ ID NO: 301645 - DNA, 120 bp, Artificial Sequence
  ENSG00000132953_61 (sequence is synthesized)
atattttcatttagatataaaatatatgaagtatgctttgttgattatagtgagaacccatgacatagttaaccaaagaatatgtttggttcaaataaaaatagaagcttaatactgggc

SEQ ID NO: 301646 - DNA, 120 bp, Artificial Sequence
  ENSG00000132953_62 (sequence is synthesized)
attcatactttttaaagagaatgaatgaagaaatcggtttcctgctgtagttctctatgggtaagtcttagtaaagacgagaatgctgaagtcggccgtggcgattccctcctaggaact

SEQ ID NO: 301647 - DNA, 120 bp, Artificial Sequence
  ENSG00000132953_63 (sequence is synthesized)
gggaggtgtggcttgcccattacccgcttgaagctcacatctttaccctcctctcccactgtggtttgatcttcacctattcccaggccctcccagcaattggagaggtgtctttttttt

SEQ ID NO: 301648 - DNA, 120 bp, Artificial Sequence
  ENSG00000132953_64 (sequence is synthesized)
tggttttggttttttttctccccgtctgcattcttaggcctcttagctattaggaactgtcagatacatactagtagctaattttcctagcctgaaattatatactgcatctgcactatg

SEQ ID NO: 301649 - DNA, 120 bp, Artificial Sequence
  ENSG00000132953_65 (sequence is synthesized)
tacctactagggatctgacctcaagtgttttctgagcccaggcttcctggtgtggtgtcttttaccacataaaattattacaaattgcaaatgttggtattgtgatttgattatctgtac

SEQ ID NO: 301650 - DNA, 120 bp, Artificial Sequence
  ENSG00000132953_66 (sequence is synthesized)
aaagaaagaagctctatgcagtgagtttgtggtttaatggtcacaaaaatgttagcactgctaccactcagcacgtgtaaaattttttaaatttataaatattaaaattttaaacttaca

SEQ ID NO: 301651 - DNA, 120 bp, Artificial Sequence
  ENSG00000132953_67 (sequence is synthesized)
ctaagacttttcagttttatttaaagacccagggatgagtgtactgtttaaatatttacctctattaacataactaatgaaggtataaaattgcatttagtttttcagaagatgctgcaa

SEQ ID NO: 301652 - DNA, 120 bp, Artificial Sequence
  ENSG00000132953_68 (sequence is synthesized)
tatgattttaggaaataaggctatgtattgagccagttataggctgaatatcaggttgataaaattttatttgtatttttaaaattcataaatgggagttaaaatgtgtcttttcactaa

SEQ ID NO: 301653 - DNA, 120 bp, Artificial Sequence
  ENSG00000132953_69 (sequence is synthesized)
atatttttattacatttttgttttgaccatgtgtgatttgttcatgggtatttagctagactcttttatgaaatgcattgaaatggtgctagtttgtttaccattataggaagattgaca

SEQ ID NO: 301654 - DNA, 120 bp, Artificial Sequence
  ENSG00000132953_70 (sequence is synthesized)
ctggggacattacacggtcctaaaataattttaaatttaaaaaaatgaagacatctgtacagataaaaatcaagatttgcatcaccttctgggagaacccgtggtactcacagaatatcc

SEQ ID NO: 301655 - DNA, 120 bp, Artificial Sequence
  ENSG00000132953_71 (sequence is synthesized)
agtattagaaatataaaaattttgtctatattttataatatttatctcagcccacagtcttagaaacagtttcacagttactagttaagtcattatctttggtgcatatttagtaaatac

SEQ ID NO: 301656 - DNA, 120 bp, Artificial Sequence
  ENSG00000132953_72 (sequence is synthesized)
ttttagcaagtcattctttttggcctttcagggaaagtggtgaattaccatattactgtgtgctagatagatccaccctttgcccagtgttaaatcttgtaaacatatgaagtgaaaagt

SEQ ID NO: 301657 - DNA, 120 bp, Artificial Sequence
  ENSG00000132953_73 (sequence is synthesized)
taatttttaaagaaaatgcatctttaaaatgttcatttttaacctgaatttgctttgaatattctttgatttgtaatgttgttatttagcttatattgagatttattccactccaaaggt

SEQ ID NO: 301658 - DNA, 120 bp, Artificial Sequence
  ENSG00000132953_74 (sequence is synthesized)
ggataaagaaaagttgtttaagaaaaccaattagagtgtattttgaatttttgtttctttcattaccaagtgtggggccatacacacaggctaatcatctgtcatttgagacccacagat

SEQ ID NO: 301659 - DNA, 120 bp, Artificial Sequence
  ENSG00000132953_75 (sequence is synthesized)
gatttcaaaggtcccaaataaatacacatctataactgttttttaaaagacatctttaatggtgctctccaaaaatacaattcggttgcttatgagtgatgcctttgacaggctgattag

SEQ ID NO: 301660 - DNA, 120 bp, Artificial Sequence
  ENSG00000132953_76 (sequence is synthesized)
attataaaacagttttgtttttttaaacatagggtctcagattgagtcttgtgcattctatgtaatctcaaatggcagttcagtttgactttcttttaaaactaagtggaaatggtatat

SEQ ID NO: 301661 - DNA, 120 bp, Artificial Sequence
  ENSG00000132953_77 (sequence is synthesized)
ttggtgaaactaatgaaagaatcttttgctgggaaattccatacagcacccccagcagcatcctgtctcagtctggcgtataattcaacctcctactgagtgtccctgtaaattattttt

SEQ ID NO: 301662 - DNA, 120 bp, Artificial Sequence
  ENSG00000132953_78 (sequence is synthesized)
aatatatagcatgagagtgaactgaggtaagtcattgatgtttcccagagatgatgaatgaacaaaagcaaataggatctgctaaacatttttattcccacagtagtgagcagttttgtt

SEQ ID NO: 301663 - DNA, 120 bp, Artificial Sequence
  ENSG00000132953_79 (sequence is synthesized)
cttgttttgataatgttcatttctgcctaatcttaggcttcaaatacacctttaagaaagcccaagatgtattgagtagtagaacttcttatttgtacacctgtttataactgcactgcc

SEQ ID NO: 301664 - DNA, 120 bp, Artificial Sequence
  ENSG00000132953_80 (sequence is synthesized)
ctggatgttatggttatttctaaggactgacctggtaaagctacttgaactggtagactgcagggtagaggcagacctagattcaatgtctaactaagctgcttagggcttacattaatt

SEQ ID NO: 301665 - DNA, 120 bp, Artificial Sequence
  ENSG00000132953_81 (sequence is synthesized)
tccacaggtctgttatccatatcatgagtttataagtgttcctcccaaagaaaaaatttaaaagtgatggatgaaatataatagtagatgctcaataaattccattgtatttaaagatta

SEQ ID NO: 301666 - DNA, 80 bp, Artificial Sequence
  ENSG00000132953_82 (sequence is synthesized)
accacgcatgcgcggggctgggagcttagcggggcgcgcggctgcagcagtctgggcagaccgcctcggcctcgcccggt

SEQ ID NO: 301667 - DNA, 120 bp, Artificial Sequence
  ENSG00000132953_83 (sequence is synthesized)
aacattagctattttaaattcctttttaaaaacctggtttgtgtagttacaattatttaaattaataatcattctactggagtagctttaaagatattctgtaaagccagacgggaaact

SEQ ID NO: 301668 - DNA, 120 bp, Artificial Sequence
  ENSG00000132958_0 (sequence is synthesized)
agtccacccacaaatgaattatcaggagtgaacccagaggcacgtatgaatgaaagtccacagacaaacgaatttaaaggaacaaccgaggaggcacctgcgaaagaaagcccacacaca

SEQ ID NO: 301669 - DNA, 120 bp, Artificial Sequence
  ENSG00000132958_1 (sequence is synthesized)
agtgaatttaaaggagcagccctggtgtcacctatcagtaaaagaatatttggagttttcctggtcttactggatgtcactctcctccttgccgacctaattttcactgacagcaaactt

SEQ ID NO: 301670 - DNA, 120 bp, Artificial Sequence
  ENSG00000132958_2 (sequence is synthesized)
tatattcctttggagtatcgttctatttctctagctattggcttattttttctcatggatgttcttcttcgagtatttgtagaaggatggacacatttagttcgacttctacgacttatt

SEQ ID NO: 301671 - DNA, 120 bp, Artificial Sequence
  ENSG00000132958_3 (sequence is synthesized)
attctgataagaatttttcatctgcttcatcaaaaaagacaacttgaaaagctgatgagaaggctggtttcagaaaacaaaaggcgatacacaagggatggatttgacctagacctcact

SEQ ID NO: 301672 - DNA, 120 bp, Artificial Sequence
  ENSG00000132958_4 (sequence is synthesized)
tacgttacagaacgtattattgctatgtcatttccatcttctggaaggcagtctttctatagaaatccaattgaggaagttgtgcggtttctagataagaaacatcgaaaccactatcga

SEQ ID NO: 301673 - DNA, 120 bp, Artificial Sequence
  ENSG00000132958_5 (sequence is synthesized)
gtctacaatctatgcagtgaaagagcttatgatcctaagcacttccataatagggtcagtagaatcatgattgatgatcataatgtccccactctacatgagatggtggttttcaccaag

SEQ ID NO: 301674 - DNA, 120 bp, Artificial Sequence
  ENSG00000132958_6 (sequence is synthesized)
agtaaatgagtggatggctcaagatcttgaaaacatcgtagcgattcactgtaaaggaggcaaaggaagaaccgggactatggtttgtgccctccttattgcctccgaaatatttttaac

SEQ ID NO: 301675 - DNA, 120 bp, Artificial Sequence
  ENSG00000132958_7 (sequence is synthesized)
tgccgaggaaagcctatattattttggagaaaggcgaaccaataaaacccacagcaataaatttcagggagtagaaactccttctcagaatagatatgttggatattttgcacaagtgaa

SEQ ID NO: 301676 - DNA, 120 bp, Artificial Sequence
  ENSG00000132958_8 (sequence is synthesized)
acatctctacaactggaatctccctccaagacggatactctttataaaaagattcattatttattcgattcgtggtgatgtatgtgatctaaaagtccaagtagtaatggagaaaaaggt

SEQ ID NO: 301677 - DNA, 120 bp, Artificial Sequence
  ENSG00000132958_9 (sequence is synthesized)
tgtcttttccagtacttcattaggaaattgttcgatattgcatgacattgaaacagacaaaatattaattaatgtatatgacggtccacctctgtatgatgatgtgaaagtgcagttttt

SEQ ID NO: 301678 - DNA, 120 bp, Artificial Sequence
  ENSG00000132958_10 (sequence is synthesized)
ctcttcgaatcttcctaaatactatgacaattgtccatttttcttctggttcaacacgtcttttattcaaaataacaggctttgtctaccaagaaatgaattggataatccacataaaca

SEQ ID NO: 301679 - DNA, 120 bp, Artificial Sequence
  ENSG00000132958_11 (sequence is synthesized)
aaaagcatggaaaatttatccaccagaatttgctgtggagatactttttggcgagaaatgacttccaatgatgttgtagctggatccgactaagtatagctcccccttccccttctggga

SEQ ID NO: 301680 - DNA, 120 bp, Artificial Sequence
  ENSG00000132958_12 (sequence is synthesized)
aagaattatgttctttccaacccctgccacatgttcatgtgtcctaagtcttccttgatgatgcatctatatttatatatgtttatatatgttcttcataaatctattaaatatatatag

SEQ ID NO: 301681 - DNA, 120 bp, Artificial Sequence
  ENSG00000132958_13 (sequence is synthesized)
atgatcgaagcagtacaaatcaggggagaacgtgcccaagacctggagaactgataataaattgtggtttatccttgcaatggaacactatatggaagtgaaaatgattgaaatagagct

SEQ ID NO: 301682 - DNA, 120 bp, Artificial Sequence
  ENSG00000132958_14 (sequence is synthesized)
tgaatttaaaggagcagccctggtgtcacctatcagtaaaagtatgttagaacgactttccaagtttgaagttgaagatgctgaaaatgttgcttcatatgacagcaagattaagaaaat

SEQ ID NO: 301683 - DNA, 120 bp, Artificial Sequence
  ENSG00000132958_15 (sequence is synthesized)
agaccaaattggataaaagaggacgaagtcatgaaagggatgcttcttcctcttagtatatttgtcactctaagttggtggtatccaatcccttaggaacgaacctctgaggttttccat

SEQ ID NO: 301684 - DNA, 120 bp, Artificial Sequence
  ENSG00000132963_0 (sequence is synthesized)
ggcggggtcgactgacggtaacggggcagagaggctgttcgcagagctgcggaagatgaatgccagaggacttggatctgagctaaaggacagtattccagttactgaactttcagcaag

SEQ ID NO: 301685 - DNA, 120 bp, Artificial Sequence
  ENSG00000132963_1 (sequence is synthesized)
tggaccttttgaaagtcatgatcttcttcggaaaggtttttcttgtgtgaaaaatgaacttttgcctagtcatccccttgaattatcagaaaaaaatttccagctcaaccaagataaaat

SEQ ID NO: 301686 - DNA, 120 bp, Artificial Sequence
  ENSG00000132963_2 (sequence is synthesized)
gaatttttccacactgagaaacattcagggtctatttgctccgctaaaattacagatggaattcaaggcagtgcagcaggttcagcgtcttccatttctttcaagctcaaatctttcact

SEQ ID NO: 301687 - DNA, 120 bp, Artificial Sequence
  ENSG00000132963_3 (sequence is synthesized)
ggatgttttgaggggtaatgatgagactattggatttgaggatattcttaatgatccatcacaaagcgaagtcatgggagagccacacttgatggtggaatataaacttggtttactgta

SEQ ID NO: 301688 - DNA, 120 bp, Artificial Sequence
  ENSG00000132963_4 (sequence is synthesized)
atagtgtgctgttcatggaaaccgagggctgcatcttgtttatagtcatctttgtactgtaatttgatgtacacaacattaaaagtactgacacctgagaatttctgctcaagtagtatc

SEQ ID NO: 301689 - DNA, 120 bp, Artificial Sequence
  ENSG00000132963_5 (sequence is synthesized)
ggaggggtctttggtttacagccatgtgacaattaaaagcactaaagggagatcatgttaaagctcttaatttatattaaaacagtagcctttgtctttaaaaaagttgttgctcatgaa

SEQ ID NO: 301690 - DNA, 120 bp, Artificial Sequence
  ENSG00000132963_6 (sequence is synthesized)
tattataaaatgatctacaggtttcaattcaacctgtttctaggtttttttgtaaatttagttttgattaagcattataagcatttgagtctataaactttatagtagcatctttcagaa

SEQ ID NO: 301691 - DNA, 120 bp, Artificial Sequence
  ENSG00000132963_7 (sequence is synthesized)
taaacatttttaattgatttcagtggcaactctcaaattgattacaatatgagatatatcagtgtcgtccattaacactcataagaataatatttactgtgtcagtgctattttaggatt

SEQ ID NO: 301692 - DNA, 120 bp, Artificial Sequence
  ENSG00000132963_8 (sequence is synthesized)
atagttattgtttgattatttcaggttgaaaagtagaagttccaaggttttgattttggtctggtctttaagtgaaaaattaaagcaaccagtagatgtaggttaaacttttacttcata

SEQ ID NO: 301693 - DNA, 120 bp, Artificial Sequence
  ENSG00000132963_9 (sequence is synthesized)
gacttaatatgtaattaatatattgccaagcaacactgttaaagaaaagtaaaactcattttttcttgttcttaatttatatattacaagatactgtaaggtattctttatgaagttgat

SEQ ID NO: 301694 - DNA, 120 bp, Artificial Sequence
  ENSG00000132963_10 (sequence is synthesized)
actgtaaggtattctttatgaagttgatatataaaaatttacatttttagaacattagtgaatggatcatcttttacaattaaaagtatattttgattatcagtttcttaggaacatctt

SEQ ID NO: 301695 - DNA, 120 bp, Artificial Sequence
  ENSG00000132963_11 (sequence is synthesized)
gccagccctcggaaacggaagtgagcggcggggtcgactgacggtaacggggcagagaggctgttcgcagagctgcggaagatgttgtggtatttgagaagaacactgagtcaccattgc

SEQ ID NO: 301696 - DNA, 120 bp, Artificial Sequence
  ENSG00000132964_0 (sequence is synthesized)
gaggaggtaccggctgttgtgcggctctgcccttctgtttgagtgtatgggagagtgagtgagtgagtgagtgtgagcgtgtgtgtgagagcgtgaggcgtgagtgcgcgtgtgagagga

SEQ ID NO: 301697 - DNA, 120 bp, Artificial Sequence
  ENSG00000132964_1 (sequence is synthesized)
cgctcccgccgcagcaggagcagaacgcgcggccggagagagcggcggagccggcgcccagggagcccgcggggacaagggcagagacaccgctccccacccccagccctcgtccctcgg

SEQ ID NO: 301698 - DNA, 120 bp, Artificial Sequence
  ENSG00000132964_2 (sequence is synthesized)
ccacccccagccctcgtccctcggctctccttcgccgggggatcctccccgttcctccacccccggccggcctctgccccgccgtccccctggatgtccctggcgctttcgcggggcctc

SEQ ID NO: 301699 - DNA, 120 bp, Artificial Sequence
  ENSG00000132964_3 (sequence is synthesized)
gctttcgcggggcctcctcctgctcttgccgcatcagtcgggctggtgctgcggccggcgggcgtagagcgggcgggttcccgggggctgcggctgcccgtgcttccccggtccccaccc

SEQ ID NO: 301700 - DNA, 120 bp, Artificial Sequence
  ENSG00000132964_4 (sequence is synthesized)
cgacccagctctccggcctcagaggctgtgacaatggactatgactttaaagtgaagctgagcagcgagcgggagcgggtcgaggacctgtttgaatacgagggctgcaaagttggccga

SEQ ID NO: 301701 - DNA, 120 bp, Artificial Sequence
  ENSG00000132964_5 (sequence is synthesized)
ggcacttatggtcacgtctacaaagccaagaggaaagatgggaaggatgataaagactatgctttaaaacaaatagaaggaactgggatctctatgtcggcatgtagagaaatagcatta

SEQ ID NO: 301702 - DNA, 120 bp, Artificial Sequence
  ENSG00000132964_6 (sequence is synthesized)
cttcgagagcttaagcatccaaacgtcatttctcttcaaaaggtgtttctgtctcatgctgataggaaggtgtggcttctgtttgactatgctgaacatgacctctggcatataatcaag

SEQ ID NO: 301703 - DNA, 120 bp, Artificial Sequence
  ENSG00000132964_7 (sequence is synthesized)
tttcacagagcttctaaagcaaacaagaagccagttcagttacctcggggaatggtgaagtcactattatatcagatcctagatggtattcactacctgcatgctaactgggtgttgcac

SEQ ID NO: 301704 - DNA, 120 bp, Artificial Sequence
  ENSG00000132964_8 (sequence is synthesized)
agagatttgaaacctgctaatattttagttatgggtgaaggtcctgagcgaggaagagtaaaaattgctgacatgggctttgcccgattatttaattcacctttgaagcctttagcagat

SEQ ID NO: 301705 - DNA, 120 bp, Artificial Sequence
  ENSG00000132964_9 (sequence is synthesized)
ttggatccagtggttgttacattctggtaccgagcccctgaactacttcttggagcaaggcattataccaaagctattgatatttgggctatagggtgtatatttgcagaactactaacg

SEQ ID NO: 301706 - DNA, 120 bp, Artificial Sequence
  ENSG00000132964_10 (sequence is synthesized)
tcagaaccaatatttcactgtcgacaagaggacatcaaaactagtaatccttatcaccatgaccagctggacagaatattcaatgtaatgggatttcctgcagataaagattgggaagat

SEQ ID NO: 301707 - DNA, 120 bp, Artificial Sequence
  ENSG00000132964_11 (sequence is synthesized)
ataaaaaagatgcctgaacattcaacattaatgaaagatttcagaagaaatacgtataccaactgcagccttatcaagtatatggaaaaacataaagttaaaccagatagtaaagcattc

SEQ ID NO: 301708 - DNA, 120 bp, Artificial Sequence
  ENSG00000132964_12 (sequence is synthesized)
ggacccctatttcttagaagacccacttcctacatcagacgtttttgccggttgtcaaatcccttacccaaaacgagaatttttaacggaagaagaacctgatgacaaaggagacaaaaa

SEQ ID NO: 301709 - DNA, 120 bp, Artificial Sequence
  ENSG00000132964_13 (sequence is synthesized)
gaaccagcagcagcagcagggcaataaccacactaatggaactggccacccagggaatcaagacagcagtcacacacagggacccccgttgaagaaagtgagagttgttcctcctaccac

SEQ ID NO: 301710 - DNA, 120 bp, Artificial Sequence
  ENSG00000132964_14 (sequence is synthesized)
tacctcaggtggacttatcatgacctcagactatcagcgttccaatccacatgctgcctatcccaaccctggaccaagcacatcacagccgcagagcagcatgggatactcagctacctc

SEQ ID NO: 301711 - DNA, 120 bp, Artificial Sequence
  ENSG00000132964_15 (sequence is synthesized)
ccagcagcctccacagtactcacatcagacacatcggtactgagctgcatcggaatcttgtccatgcactgttgcgaatgctgcagggctgactgtgcagctctctgcgggaacctggta

SEQ ID NO: 301712 - DNA, 120 bp, Artificial Sequence
  ENSG00000132964_16 (sequence is synthesized)
tgggccatgagaatgtactgtacaaccacatcttcaaaatgtccagtagccaagttccaccacttttcacagattggggtagtggcttccaagttgtacctattttggagttagacttga

SEQ ID NO: 301713 - DNA, 120 bp, Artificial Sequence
  ENSG00000132964_17 (sequence is synthesized)
aaagaaagtgctagcacagtttgtgttgtggatttgctacttccatagtttacttgacatggttcagactgaccaatgcatttttttcagtgacagtctgtagcagttgaagctgtgaat

SEQ ID NO: 301714 - DNA, 120 bp, Artificial Sequence
  ENSG00000132964_18 (sequence is synthesized)
gtgctaggggcaagcatttgtctttgtatgtggtgaattttttcagtgtaacaacattatctgaccaatagtacacacacagacacaaagtttaactggtacttgaaacatacagtatat

SEQ ID NO: 301715 - DNA, 120 bp, Artificial Sequence
  ENSG00000132964_19 (sequence is synthesized)
gttaacgaaataaccaagactcgaaatgagattattttggtacacctttctttttagtgtcttatcagtgggctgattcattttctacattaatcagtgttttctgaccaagaatattgc

SEQ ID NO: 301716 - DNA, 120 bp, Artificial Sequence
  ENSG00000132964_20 (sequence is synthesized)
ttggatttttttgaaagtacaaaaagccacatagtttttccagaaaggtttcaaaactcccaaagattaacttccaacttataagtttgtttttattttcaatctatgacttgactggta

SEQ ID NO: 301717 - DNA, 120 bp, Artificial Sequence
  ENSG00000132964_21 (sequence is synthesized)
ttaaagctgctatttgatagtaattaaatatgttgtcattgatataaacctgtttggttcagcaaacaaactaaaatgattgtcatagacagtgttttatttttcctgttggtgttgctg

SEQ ID NO: 301718 - DNA, 120 bp, Artificial Sequence
  ENSG00000132964_22 (sequence is synthesized)
atttgtgagcatgctttaagatgaaaaaagcatgaatgataacttccttaaaaaggtgcggcatccaattcaaatattttcgtcctgattttaaagctggttggtgtagtgctattaaaa

SEQ ID NO: 301719 - DNA, 120 bp, Artificial Sequence
  ENSG00000132964_23 (sequence is synthesized)
tttcgttcagttaattttccttttgaaaacttgttcgcacgttgtttagggtgcccttacttcagcaaaggagaaggagtaggagagccttagaatttttgaggaaaaaaaaacctataa

SEQ ID NO: 301720 - DNA, 120 bp, Artificial Sequence
  ENSG00000132964_24 (sequence is synthesized)
catacaatgtactgtatcaaactattttacatgaatgacacaagtattctgaataaaaaataattgaacattgttaaaaacaaggtgttatgtaataaatttatttttcataaatcaaaa

SEQ ID NO: 301721 - DNA, 120 bp, Artificial Sequence
  ENSG00000132964_25 (sequence is synthesized)
atatgaatcactgcatgtgttagtgtattatatgtgtaacaacagcttttttatcttaatagaaaaagaatagaaaatacacaaattttggtcctgttctaaattggataaagccattta

SEQ ID NO: 301722 - DNA, 120 bp, Artificial Sequence
  ENSG00000132964_26 (sequence is synthesized)
gataatgggggtggggatccatttgtttagtcagagaacataagcaagagtaaaacaagtgagattatgaaactggaatgactaaagtgtgaattactacattaaatttaacaactagga

SEQ ID NO: 301723 - DNA, 120 bp, Artificial Sequence
  ENSG00000132964_27 (sequence is synthesized)
gttttgttgttaatttgggggaataaatattttccaaattgtgatgttattcaccaaaaaatatatatcgtcttcacatatgtgctgaaagataactgtgagaagcaataccgtcatgtt

SEQ ID NO: 301724 - DNA, 120 bp, Artificial Sequence
  ENSG00000132965_0 (sequence is synthesized)
aatgatgaaagagtgcaagctctcacttccccttcctgtacagggcaggttgtgcagctggaggcagagcagtcctctctggggagcctgaagcaaacatggatcaagaaactgtaggca

SEQ ID NO: 301725 - DNA, 120 bp, Artificial Sequence
  ENSG00000132965_1 (sequence is synthesized)
atgttgtcctgttggccatcgtcaccctcatcagcgtggtccagaatggattctttgcccataaagtggagcacgaaagcaggacccagaatgggaggagcttccagaggaccggaacac

SEQ ID NO: 301726 - DNA, 120 bp, Artificial Sequence
  ENSG00000132965_2 (sequence is synthesized)
ttgcctttgagcgggtctacactgccaaccagaactgtgtagatgcgtaccccactttcctcgctgtgctctggtctgcggggctactttgcagccaagttcctgctgcgtttgctggac

SEQ ID NO: 301727 - DNA, 120 bp, Artificial Sequence
  ENSG00000132965_3 (sequence is synthesized)
ccctggctacatatttgggaaacgcatcatactcttcctgttcctcatgtccgttgctggcatattcaactattacctcatcttctttttcggaagtgactttgaaaactacataaagac

SEQ ID NO: 301728 - DNA, 120 bp, Artificial Sequence
  ENSG00000132965_4 (sequence is synthesized)
gatctccaccaccatctcccctctacttctcattccctaactctctgctgaatatggggttggtgttctcatctaatcaatacctacaagtcatcataattcagctcttgagagcattct

SEQ ID NO: 301729 - DNA, 120 bp, Artificial Sequence
  ENSG00000132965_5 (sequence is synthesized)
gctcttctttagatggctgtaaatctattggccatctgggcttcacagcttgagttaaccttgcttttccgggaacaaaatgatgtcatgtcagctccgccccttgaacatgaccgtggc

SEQ ID NO: 301730 - DNA, 120 bp, Artificial Sequence
  ENSG00000132965_6 (sequence is synthesized)
cccaaatttgctattcccatgcattttgtttgtttcttcacttatcctgttctctgaagatgttttgtgaccaggtttgtgttttcttaaaataaaatgcagagacatgttttaagctga

SEQ ID NO: 301731 - DNA, 120 bp, Artificial Sequence
  ENSG00000132965_7 (sequence is synthesized)
tcctattatctgggcatttggaggtgaaggggtcacagctctggcaaagatggggttgaaagggcccggactccagggaggggcagctctgcatggcctgattcctgcaccccacctttg

SEQ ID NO: 301732 - DNA, 120 bp, Artificial Sequence
  ENSG00000132965_8 (sequence is synthesized)
ccccctcacacctcctctcatctcccgtttttgaagaggaggaccctgtcacatctggacaattctgcaagaactctgtagaactgacttcactgtgaaccaggctccagaagtcaacag

SEQ ID NO: 301733 - DNA, 120 bp, Artificial Sequence
  ENSG00000132965_9 (sequence is synthesized)
aaacaaaaatgctcacatttaatcacgatgctccctggcatacacagaagactctgaaaacttctgaatttgggaaatcctttggcaccttggggcacattgggaacataagccatcagt

SEQ ID NO: 301734 - DNA, 120 bp, Artificial Sequence
  ENSG00000132965_10 (sequence is synthesized)
ctgtggagctgatgaaatcctgcagggagcttcacggtgacagcaagaggagaaacacatccccatatgccccgcagagtttgaagtcccggctgcacctctccccagcagcaggttgac

SEQ ID NO: 301735 - DNA, 120 bp, Artificial Sequence
  ENSG00000132965_11 (sequence is synthesized)
tctggaaagttgcagcgttcttacctacagagtgggaacagtactacccattgcacagagtgggtgcaaagctctgtgacggaatacatggattctttgcccataaagtggagcacgaaa

SEQ ID NO: 301736 - DNA, 120 bp, Artificial Sequence
  ENSG00000132965_12 (sequence is synthesized)
caagtgagtcctaaccctgatgttgctaataagtgggggcatgggcaggggggcctccttctaggagtgatgaccacccttaataccacatgtctgtctgagccaagtttctgagcgcca

SEQ ID NO: 301737 - DNA, 120 bp, Artificial Sequence
  ENSG00000132965_13 (sequence is synthesized)
gggaggtgaggaaggttggacttcaccagagaggctttgtggacaccctttatcatcttagtgagtgctagtgtcaaaacaaagggagtggggatatggggcacattggtggagggaggt

SEQ ID NO: 301738 - DNA, 120 bp, Artificial Sequence
  ENSG00000132970_0 (sequence is synthesized)
gctgcgtgcggtgtggtgcgaggcgggtgcgccgggcggccgcggcgcggcgggaccatggagctcagagcgcagccccggcgccggcggcgggaccgcggaccgttttagttttgattg

SEQ ID NO: 301739 - DNA, 120 bp, Artificial Sequence
  ENSG00000132970_1 (sequence is synthesized)
ggcgggaccgcggaccgttttagttttgattgctgttaactactactgataactgagccaaagtggtgatgctacttgaggggaatttctgcaacccatagtcaacgattacatgattgt

SEQ ID NO: 301740 - DNA, 120 bp, Artificial Sequence
  ENSG00000132970_2 (sequence is synthesized)
gaaccatgcctttagtgaagaggaacattgagccccggcacttgtgccggggagctctgcctgaagggattaccagcgaacttgaatgtgtaaccaatagtactcttgccgctatcatac

SEQ ID NO: 301741 - DNA, 120 bp, Artificial Sequence
  ENSG00000132970_3 (sequence is synthesized)
gccagctgagcagtctgagcaaacatgctgaagacatatttggtgagttgtttaatgaggctaacaacttctacatcagagcaaattctcttcaagacagaattgatcgccttgctgtca

SEQ ID NO: 301742 - DNA, 120 bp, Artificial Sequence
  ENSG00000132970_4 (sequence is synthesized)
aagtcacccagctggattcaacagtggaagaggtctcactacaggatatcaacatgaaaaaagctttcaaaagttccacagtccaagaccagcaagtggtttcaaagaacagcattccta

SEQ ID NO: 301743 - DNA, 120 bp, Artificial Sequence
  ENSG00000132970_5 (sequence is synthesized)
atcctgttgctgatatttacaaccagagtgataagccaccgcctctgaacatcctgacaccatacagagatgacaagaaggatgggctgaagttctatactgatccttcctatttctttg

SEQ ID NO: 301744 - DNA, 120 bp, Artificial Sequence
  ENSG00000132970_6 (sequence is synthesized)
acctctggaaagaaaaaatgctacaggacacagaagacaaaaggaaagagaaaaggcgtcaaaaggagcaaaagcgtatagatggcaccacccgtgaggtgaaaaaggttagaaaagcca

SEQ ID NO: 301745 - DNA, 120 bp, Artificial Sequence
  ENSG00000132970_7 (sequence is synthesized)
gaaacaggcgccaggagtggaatatgatggcatatgacaaagagcttagacccgacaacaggttgtctcagagtgtgtaccatggagcgtcttccgagggatccctgtccccagatacta

SEQ ID NO: 301746 - DNA, 120 bp, Artificial Sequence
  ENSG00000132970_8 (sequence is synthesized)
ggtcacatgcatcggacgttacggattactcttacccggctactcccaaccattctctgcacccccagcctgtgaccccttcctatgcagctggtgacgtgccaccacacgggcctgcaa

SEQ ID NO: 301747 - DNA, 120 bp, Artificial Sequence
  ENSG00000132970_9 (sequence is synthesized)
gccaggctgcggagcatgagtaccggcccccatctgcctcggcgaggcacatggccctcaacagacctcagcagccgccccccccgcctccccctcaggccccagaggggtcccaggcct

SEQ ID NO: 301748 - DNA, 120 bp, Artificial Sequence
  ENSG00000132970_10 (sequence is synthesized)
ctgcaccgatggctccagcagactacgggatgctcccagcgcagataattgagtattacaacccatccggaccacctcctccgccacctcctcctgtgattccctcagcacaaactgcct

SEQ ID NO: 301749 - DNA, 120 bp, Artificial Sequence
  ENSG00000132970_11 (sequence is synthesized)
tcgtcagccctctccagatgcccatgcagcccccgttccctgcatcagccagctccacgcacgcagctcctcctcacccaccctccaccgggctcctggtcacagccccgccacccccgg

SEQ ID NO: 301750 - DNA, 120 bp, Artificial Sequence
  ENSG00000132970_12 (sequence is synthesized)
gcccaccacctcccccgccaggccctcctggtcccgggtcttctctttcgtcctccccaatgcatggccccccagtagctgaggcgaagcggcaagagcctgcacagccaccaatcagtg

SEQ ID NO: 301751 - DNA, 120 bp, Artificial Sequence
  ENSG00000132970_13 (sequence is synthesized)
atgctcgaagcgacctcctcgctgctattcgaatgggaattcaactgaaaaaggtgcaggagcagcgggagcaggaggccaagcgggagccagtggggaatgacgtggccacgatcctgt

SEQ ID NO: 301752 - DNA, 120 bp, Artificial Sequence
  ENSG00000132970_14 (sequence is synthesized)
cccggcgcattgccgtggagtacagcgactctgacgacgactcagagttcgacgagaacgactggtccgactgagcaaaggccggcggagaggccgcgtgtgggagcgtgttgaagattt

SEQ ID NO: 301753 - DNA, 120 bp, Artificial Sequence
  ENSG00000132970_15 (sequence is synthesized)
taagtggtctctacacccaaatagtggtattctaatcccgtagcatagcaccttttgtataaacaatgtgatattgcttctgcacatccaaaaattctgggtcttttcagtatttactgt

SEQ ID NO: 301754 - DNA, 120 bp, Artificial Sequence
  ENSG00000132970_16 (sequence is synthesized)
gtaatacttaagtgccactaaacatagcaaattgtgctgcacatgaggaaataggctgtcactatcacattgtcctgaaaacagcatctgctttcctcttggccatgagagtatttagtg

SEQ ID NO: 301755 - DNA, 120 bp, Artificial Sequence
  ENSG00000132970_17 (sequence is synthesized)
cagtttgggtttactcttactgatcaatataactctgcagacttgctgtgtgtttgtgaagctgcctggtgttaggtctctgcaagactaatgactatgtcagagtgatgtcttccaacc

SEQ ID NO: 301756 - DNA, 120 bp, Artificial Sequence
  ENSG00000132970_18 (sequence is synthesized)
agtaagtgatattgtttcaccgctttggtttttccttttgtttttttaaaggatgtgtttctgaataagttggttttagagggaaaggttcaacaaacagggagaatccagtgtttctgc

SEQ ID NO: 301757 - DNA, 120 bp, Artificial Sequence
  ENSG00000132970_19 (sequence is synthesized)
tttcagtttcttggcttggtagcctctgagtgaatctgatgctctgctgaataatttcattacctctgcacatgcctgtcaaatatgaaattggaagggcccttttcaggctgggttccc

SEQ ID NO: 301758 - DNA, 120 bp, Artificial Sequence
  ENSG00000132970_20 (sequence is synthesized)
tcaacagtaatgaaagtgaagaacagagtccattttccttcctggggccattggggatgacactcaagatacttgccagtctctccagtgtgggcaccagccggccagaacagatgcgag

SEQ ID NO: 301759 - DNA, 120 bp, Artificial Sequence
  ENSG00000132970_21 (sequence is synthesized)
cagtccatgactctgggagctacaccgctgagctgggcagagctgcggcacagggcctgggctgcaaaggagccctgctcctttagtttcctgacacctgtgtcctgagtgagccgcagg

SEQ ID NO: 301760 - DNA, 120 bp, Artificial Sequence
  ENSG00000132970_22 (sequence is synthesized)
agttcttagctcctcagcgagcaacagagagcactttagatggcacctttcaccacttggtcagaattttaaaagcttaggtttaggtgaaagtagatattgacagctattcacctttca

SEQ ID NO: 301761 - DNA, 120 bp, Artificial Sequence
  ENSG00000132970_23 (sequence is synthesized)
cggtgctggggccagattagggatcactcccgtgaggagggccttcaccctgttctagaagcacatggttgtcctcctgttgttggcacattaaatgataaaaagcacctcatgagattc

SEQ ID NO: 301762 - DNA, 120 bp, Artificial Sequence
  ENSG00000132970_24 (sequence is synthesized)
ccttgatcagccctgcagctgtagtacagtgctgtgccctcacctccacccttcctgttgttcccacgtgggcaataccagggacccatggggaaactcaagaatgacagcttctatatt

SEQ ID NO: 301763 - DNA, 120 bp, Artificial Sequence
  ENSG00000132970_25 (sequence is synthesized)
ttgtaattctggatgaaagataactgtgttgaacaaacaggtgctccaggctttgattatagatacgacttcaaaaatatgctaagacgcttgacttattaaggactttaacctactcaa

SEQ ID NO: 301764 - DNA, 120 bp, Artificial Sequence
  ENSG00000132970_26 (sequence is synthesized)
cagtatttcatatccattgtggttagttactcagttatgttgagaagaatctggagctaaaagcagagatgtttgaggtgacggtaggaatgtgagcaggatggtgatgggggtttttgt

SEQ ID NO: 301765 - DNA, 120 bp, Artificial Sequence
  ENSG00000132970_27 (sequence is synthesized)
taaaatgcatctgagcaagtcagccagccccgaagtcccctcagtgtgtgtgtctcgagtggctacctgttgggcttgtgggcagtgattgtacagagcctgtccattgggtgcagtcat

SEQ ID NO: 301766 - DNA, 120 bp, Artificial Sequence
  ENSG00000132970_28 (sequence is synthesized)
gtagatctgaagccctgaaaagcctcatgtctgcatcccctttccaaggctgcttccctggtgtgtctgttctctcctctgtcccaggtgctgggagcgtcctcttcagcgtcttttcct

SEQ ID NO: 301767 - DNA, 120 bp, Artificial Sequence
  ENSG00000132970_29 (sequence is synthesized)
agagctggtcaccactaggctgtcactataaattccttgaatataagtaacagttattaatgaacttctaaatttctaatttctctctctctctcttttttttttttttgttgttgttaa

SEQ ID NO: 301768 - DNA, 120 bp, Artificial Sequence
  ENSG00000132970_30 (sequence is synthesized)
aaagggcctactacattggcgctattcttaggacttctgcaacttttaaagtcttacttgtctttcttgttgcttttgtattaggagttccccgtgtgggtctagaactcccctttggta

SEQ ID NO: 301769 - DNA, 120 bp, Artificial Sequence
  ENSG00000132970_31 (sequence is synthesized)
atgcttctttgtttttttatggcccttctgttctcaggatggagagaacacagaagctactatccatgtcaggatttattctatttatatcttattacaataaaattagtggcactttat

SEQ ID NO: 301770 - DNA, 120 bp, Artificial Sequence
  ENSG00000132970_32 (sequence is synthesized)
tcataaatattcatgagcctgttaattgttagttgtcttcctgtagctgaatcaacaagttattttcaactcaattttatgacttgcgaaaaagcttttgccctgttgtgtaccataaca

SEQ ID NO: 301771 - DNA, 120 bp, Artificial Sequence
  ENSG00000132970_33 (sequence is synthesized)
tttaaaagaatggaaaatgactgaaatccaatttagattatttttagagtatttttccagcaaattcaatttattctgaaatttaaatccagatcttttctaatatggtattacaatgaa

SEQ ID NO: 301772 - DNA, 120 bp, Artificial Sequence
  ENSG00000132970_34 (sequence is synthesized)
aagaataaagagaagatttgaattttcagtttcattttcaaaaactatttaccaaaacaaatggagaagaaacatccaaaagcacatttcatttctccaaactttgtgttttaaattata

SEQ ID NO: 301773 - DNA, 120 bp, Artificial Sequence
  ENSG00000132970_35 (sequence is synthesized)
gttataaattgtaaggtaattttaaattgtccctcgtattatttctccacgtctgttttagtttaatgtctcctaagcttttctctcatagcgtagacctagggaagggatgggaagatt

SEQ ID NO: 301774 - DNA, 120 bp, Artificial Sequence
  ENSG00000132970_36 (sequence is synthesized)
gcccagtccccgatggctgcgcacacaggaggcggcggagcacaaggcaagtgagtttgcactgtcagccccagaccgtaagcttggctacactgatgtttttctttactaaggatacta

SEQ ID NO: 301775 - DNA, 120 bp, Artificial Sequence
  ENSG00000132970_37 (sequence is synthesized)
ttcaaaaattaacattttcatctcagtaagtttttagaacatcaaaatgttttctgagctccaagtggctaggttgtaaaagttttataataatttgcaattaaaatacatgatacatat

SEQ ID NO: 301776 - DNA, 120 bp, Artificial Sequence
  ENSG00000132970_38 (sequence is synthesized)
taatccattaaagactagtgggaatgtatcagccagagtagcaagtaatttttgttttataaatcatagtatctgtcatcttgcagtattaccaatgctgttgtaaattgaatttaaagt

SEQ ID NO: 301777 - DNA, 120 bp, Artificial Sequence
  ENSG00000132970_39 (sequence is synthesized)
aagtggtattaaaaaaaactgttaaacaatttttatctgtttgtatatcttactatagattatgtacaagtaacatctaaataaaattacacttttaaccctaagaggttttgcttatta

SEQ ID NO: 301778 - DNA, 120 bp, Artificial Sequence
  ENSG00000132970_40 (sequence is synthesized)
ctacaggacacagaagacaaaaggaaagagaaaaggcgtcaaaagagagagaaacacaagctgaaccctaacagaaaccagcaagtaaatgtgagaaaagtcagaacaagaaaagaagag

SEQ ID NO: 301779 - DNA, 120 bp, Artificial Sequence
  ENSG00000132970_41 (sequence is synthesized)
gtgtctcctctcttgctcttgatacatgtggactttttgcctttcctctctctcctcatttcagtgaagagagaagtcagaaatatggaatatattatttttctatgaagtgagattata

SEQ ID NO: 301780 - DNA, 120 bp, Artificial Sequence
  ENSG00000132972_0 (sequence is synthesized)
gcactcggcggttgttccagaagaaagagacagcgatggcggcagaggcttcgaagactgggccttctaggtcttcctaccagcgaatggggaggaagagtcagccctggggtgccgctg

SEQ ID NO: 301781 - DNA, 120 bp, Artificial Sequence
  ENSG00000132972_1 (sequence is synthesized)
aaatccagtgcaccaggtgtggaaggagggtatccagatcatccggtcaccattgtgaacttcaatgtggacatgctttttgtgaactatgcttgttaatgactgaagaatgcaccacaa

SEQ ID NO: 301782 - DNA, 120 bp, Artificial Sequence
  ENSG00000132972_2 (sequence is synthesized)
ttatatgccctgattgtgaggttgctacagctgtaaatactagacaacgctactacccaatggctggatatattaaggaagactccataatggaaaaactgcagcctaagacgataaaga

SEQ ID NO: 301783 - DNA, 120 bp, Artificial Sequence
  ENSG00000132972_3 (sequence is synthesized)
attgttctcaggactttaagaagactgctgatcagctaactactggtttagaacgttcagcctccacagacaagactcttttgaactcatcagctgtaatgttggacactaatactgcag

SEQ ID NO: 301784 - DNA, 120 bp, Artificial Sequence
  ENSG00000132972_4 (sequence is synthesized)
aagaaattgatgaagcattgaatacagcacaccatagtttcgaacagttaagcattgctggaaaagcacttgaacacatgcagaagcaaacgatagaggaaagagaaagagttatagaag

SEQ ID NO: 301785 - DNA, 120 bp, Artificial Sequence
  ENSG00000132972_5 (sequence is synthesized)
ttgtggagaaacagtttgaccaacttttggctttttttgattccaggaaaaagaacctgtgtgaagaatttgcaagaactactgatgattatctatcaaatttaataaaggctaaaagct

SEQ ID NO: 301786 - DNA, 120 bp, Artificial Sequence
  ENSG00000132972_6 (sequence is synthesized)
acattgaagagaaaaaaaataatttgaatgcagctatgaacatagcaagagcattacaattatcgccttctctaagaacatactgtgacctgaatcagattatccggactttgcagttaa

SEQ ID NO: 301787 - DNA, 120 bp, Artificial Sequence
  ENSG00000132972_7 (sequence is synthesized)
cttcagatagtgaattagcacaagttagttctccacaactaaggaaccctcccaggttgagtgtgaattgcagtgagatcatctgtatgttcaacaatatgggaaagattgaatttaggg

SEQ ID NO: 301788 - DNA, 120 bp, Artificial Sequence
  ENSG00000132972_8 (sequence is synthesized)
actcaacaaaatgttatccccaagaaaatgaaattagacagaatgttcaaaagaaatataataacaaaaaggaactttcttgttacgatacatacccaccgctagaaaagaaaaaggttg

SEQ ID NO: 301789 - DNA, 120 bp, Artificial Sequence
  ENSG00000132972_9 (sequence is synthesized)
acatgtctgtcctaaccagtgaagcaccaccacctcctttgcaacctgagacaaatgatgtacatttagaagcaaaaaacttccagccacagaaagacgttgcaacagcatcccctaaaa

SEQ ID NO: 301790 - DNA, 120 bp, Artificial Sequence
  ENSG00000132972_10 (sequence is synthesized)
ccattgctgtgttacctcagatgggatctagccctgatgtgataattgaagaaattattgaagacaacgtggaaagttctgcagagctagtttttgtaagccatgtaatagatccttgcc

SEQ ID NO: 301791 - DNA, 120 bp, Artificial Sequence
  ENSG00000132972_11 (sequence is synthesized)
atttctacattcggaagtattcacaaataaaagacgccaaagtactggagaagaaggtgaatgaattttgcaataggagttcacaccttgatccttcagacattttggaactaggtgcaa

SEQ ID NO: 301792 - DNA, 120 bp, Artificial Sequence
  ENSG00000132972_12 (sequence is synthesized)
gaatatttgtcagcagtattaaaaatggaatgtggtgtcgaggaactatcacagaattaattccaatagagggtagaaataccagaaaaccttgtagtccaaccagattatttgtccatg

SEQ ID NO: 301793 - DNA, 120 bp, Artificial Sequence
  ENSG00000132972_13 (sequence is synthesized)
aagttgcactaatacaaatattcatggtagattttggaaattctgaagtcctgattgtcactggagttgttgatacccatgtgagaccagaacactctgctaagcaacatattgcactaa

SEQ ID NO: 301794 - DNA, 120 bp, Artificial Sequence
  ENSG00000132972_14 (sequence is synthesized)
atgatttatgtctggttctaaggaaatctgaaccatatactgaagggctgctaaaagacatccagccattagcacaaccatgctcattgaaagacattgttccacagaattcaaatgaag

SEQ ID NO: 301795 - DNA, 120 bp, Artificial Sequence
  ENSG00000132972_15 (sequence is synthesized)
gctgggaagaggaagctaaagtggaatttttgaaaatggtaaataacaaggctgtttcaatgaaagtttttagagaagaagatggtgtgcttattgtagatctgcaaaaaccaccaccga

SEQ ID NO: 301796 - DNA, 120 bp, Artificial Sequence
  ENSG00000132972_16 (sequence is synthesized)
ataaaataagcagtgatatgcctgtgtctcttagagatgcgctagtttttatggaactagcaaagtttaagtcacaatcactaagaagtcactttgaaaaaaatactactttacactatc

SEQ ID NO: 301797 - DNA, 120 bp, Artificial Sequence
  ENSG00000132972_17 (sequence is synthesized)
atccacctattttgcctaaagaaatgacagatgtttcagtaacggtttgtcatataaatagtcctggagatttctatcttcagttgatagagggcctggatattttatttctattaaaga

SEQ ID NO: 301798 - DNA, 120 bp, Artificial Sequence
  ENSG00000132972_18 (sequence is synthesized)
caatcgaggaattctataaaagtgaagatggagaaaatctggaaatcctctgtccagttcaagatcaagcctgtgtagctaaatttgaagatggaatttggtaccgagcaaaagttatcg

SEQ ID NO: 301799 - DNA, 120 bp, Artificial Sequence
  ENSG00000132972_19 (sequence is synthesized)
gattgcctggacatcaggaagttgaagttaaatatgtggactttggtaatactgcaaaaataacaatcaaagacgtgcgtaaaataaaggatgagtttctgaatgccccagagaaggcaa

SEQ ID NO: 301800 - DNA, 120 bp, Artificial Sequence
  ENSG00000132972_20 (sequence is synthesized)
ttaaatgtaagttggcctatattgaaccatataaaaggacaatgcagtggtccaaagaagctaaagaaaaatttgaagaaaaggctcaagataaatttatgacatgttcagttatcaaaa

SEQ ID NO: 301801 - DNA, 120 bp, Artificial Sequence
  ENSG00000132972_21 (sequence is synthesized)
actactagtattaatgaccagctagttaaagagggcctagcatcttatgaaataggatacatcctcaaagataattctcaaaagcatattgaagtttgggatccttctccagaagaaatt

SEQ ID NO: 301802 - DNA, 120 bp, Artificial Sequence
  ENSG00000132972_22 (sequence is synthesized)
atttcaaatgaagtacacaacttaaatcctgtgtctgcaaaatctctacctaatgagaattttcagtcactttataataaggaattgcctgtgcatatctgtaatgtaatatctcctgag

SEQ ID NO: 301803 - DNA, 120 bp, Artificial Sequence
  ENSG00000132972_23 (sequence is synthesized)
aagatttatgttcagtggttgttaactgaaaacttacttaatagtttagaagaaaagatgatagctgcttatgaaaactcaaaatgggaacctgttaaatgggaaaatgatatgcactgt

SEQ ID NO: 301804 - DNA, 120 bp, Artificial Sequence
  ENSG00000132972_24 (sequence is synthesized)
gctgttaagatccaagataaaaatcagtggcgaagaggccagatcatcagaatggttacagacacattggtagaggtcttgctgtatgatgtgggtgttgaactagtagtgaatgttgac

SEQ ID NO: 301805 - DNA, 120 bp, Artificial Sequence
  ENSG00000132972_25 (sequence is synthesized)
tgtttaagaaaacttgaagaaaatctaaagacaatgggaagactctctttggaatgttctctggttgacataagaccagctggtgggagtgacaagtggacagcaacagcttgtgactgt

SEQ ID NO: 301806 - DNA, 120 bp, Artificial Sequence
  ENSG00000132972_26 (sequence is synthesized)
ctttcattgtacctgactggagctgtagcaactataatcttacaggtggatagtgaggaaaacaacacaacatggccattacctgtgaaaattttctgcagagatgaaaaaggagagcgt

SEQ ID NO: 301807 - DNA, 120 bp, Artificial Sequence
  ENSG00000132972_27 (sequence is synthesized)
gttgatgtttctaaatatttgattaaaaagggtttggctttgagagaaaggagaattaataacttagataacagccattcattatctgagaagtctctggaagtccccctggaacaggaa

SEQ ID NO: 301808 - DNA, 120 bp, Artificial Sequence
  ENSG00000132972_28 (sequence is synthesized)
gattcagtagttactaactgtattaaaactaactttgaccctgacaagaaaactgctgacataatcagtgaacagaaagtgtctgaatttcaggagaaaattctagaaccaagaaccact

SEQ ID NO: 301809 - DNA, 120 bp, Artificial Sequence
  ENSG00000132972_29 (sequence is synthesized)
agagggtataagccaccagctattcctaacatgaacgtatttgaggcaacagtcagctgtgttggtgatgatggaactatatttgtagtacctaaactatcagaatttgagctaataaaa

SEQ ID NO: 301810 - DNA, 120 bp, Artificial Sequence
  ENSG00000132972_30 (sequence is synthesized)
atgacaaatgaaattcaaagtaatttaaaatgccttggtcttttggagccttatttctggaaaaaaggagaagcatgtgcagtaagaggatccgatactctgtggtatcgtggcaaggtg

SEQ ID NO: 301811 - DNA, 120 bp, Artificial Sequence
  ENSG00000132972_31 (sequence is synthesized)
atggaggttgtaggtggcgctgtcagagtacaatatttagatcatggattcactgaaaagattccgcagtgccatctttaccctattttgctgtatcctgatataccccagttttgtatt

SEQ ID NO: 301812 - DNA, 120 bp, Artificial Sequence
  ENSG00000132972_32 (sequence is synthesized)
ccttgtcagctccataataccacacctgttgggaatgtctggcaaccagatgcaatagaagttcttcaacaactgctttcaaagagacaggtggacattcacattatggagttacctaaa

SEQ ID NO: 301813 - DNA, 120 bp, Artificial Sequence
  ENSG00000132972_33 (sequence is synthesized)
aatccatgggagaaattgtctattcacctctattttgatggaatgtcactttcttattttatggcatactataaatactgtacttctgaacatactgaggagatgttgaaagaaaaacca

SEQ ID NO: 301814 - DNA, 120 bp, Artificial Sequence
  ENSG00000132972_34 (sequence is synthesized)
agatcagatcatgataaaaagtatgaagaggaacaatgggaaataaggtttgaggaattgctttcggctgaaacagacactcctcttttaccaccatatttgtcttcatctctgccttcc

SEQ ID NO: 301815 - DNA, 120 bp, Artificial Sequence
  ENSG00000132972_35 (sequence is synthesized)
ccaggagaactctatgctgttcaagttaagcacgttgtctcacctaatgaagtgtatatttgccttgattctatagaaacttctaaccagtctaaccagcatagtgacacagatgatagt

SEQ ID NO: 301816 - DNA, 120 bp, Artificial Sequence
  ENSG00000132972_36 (sequence is synthesized)
ggagtcagcggggaatcagaatccgagagccttgatgaagcactgcagagggttaataagaaggtagaggcgcttcctcctctgacggattttagaacagaaatgccttgccttgcagaa

SEQ ID NO: 301817 - DNA, 120 bp, Artificial Sequence
  ENSG00000132972_37 (sequence is synthesized)
tatgatgatggcttatggtatagagcgaagattgttgccattaaagaatttaatcctttatctatcttagtacaatttgttgattatggatcaactgcaaagctgacattaaacagactg

SEQ ID NO: 301818 - DNA, 120 bp, Artificial Sequence
  ENSG00000132972_38 (sequence is synthesized)
tgccaaattccttctcatcttatgcggtatccagctcgagccataaaggttctcttggcagggtttaaacctcccttaagggatctaggggagacaagaataccatattgtcccaaatgg

SEQ ID NO: 301819 - DNA, 120 bp, Artificial Sequence
  ENSG00000132972_39 (sequence is synthesized)
agcatggaggcactgtgggctatgatagactgtcttcaaggaaaacaactctatgctgtgtccatggctccagcaccagaacagatagtgacattatatgacgatgaacagcatccagtt

SEQ ID NO: 301820 - DNA, 120 bp, Artificial Sequence
  ENSG00000132972_40 (sequence is synthesized)
catatgccgttggtagaaatggggcttgcagataaagatgaataagtgcctaagtgtatacagtgagagcatctatagaagcctagaagaattctgttatgtttagactatgtcttatct

SEQ ID NO: 301821 - DNA, 120 bp, Artificial Sequence
  ENSG00000132972_41 (sequence is synthesized)
ttagactatttcaggcttaattttcctaacttgttcagcactagtgctttacctctcatttttaattgaactgttaggaattgtgtggggaaaaaaagtaaataaatgttcgcttccaaa

SEQ ID NO: 301822 - DNA, 120 bp, Artificial Sequence
  ENSG00000132972_42 (sequence is synthesized)
cacagatgatcttggggagacacctagatatccaaaaaagcctcttcagaaaaactcatctgttccttttggatcaaaagcagatactgtaacaactgtctgagcttgatgtagtggagt

SEQ ID NO: 301823 - DNA, 120 bp, Artificial Sequence
  ENSG00000132972_43 (sequence is synthesized)
ttactgtatgtgtagttctgcagagctagtttttgtaagccatgtaatagatccttgccatttctacattcggaagtattcacaaataaaagacgccaaagtactggagaagaaggtgaa

SEQ ID NO: 301824 - DNA, 120 bp, Artificial Sequence
  ENSG00000132972_44 (sequence is synthesized)
gctgacacagaccacagatatcaatgtaacacaaaaaatagaagcagctttgaatctaagtacgacatgaaagcctagctctaaagttttgagacttgatatcttatttaacctggtttg

SEQ ID NO: 301825 - DNA, 120 bp, Artificial Sequence
  ENSG00000132972_45 (sequence is synthesized)
agaagaacttaaagcttcctaatctattttgttggcgtcattcctctgctgaatttttaaatgttcactctggcttacctgttaatggaagaatttgcataatatctacttagaaaggta

SEQ ID NO: 301826 - DNA, 120 bp, Artificial Sequence
  ENSG00000132975_0 (sequence is synthesized)
ggaaataggcgatttaaatattccatcgaggatggcggcccctggctcgagacctgccgctgccgcgtggttttctcggcagcagcccagatgtcaaacagttgttcgttttcagcatgc

SEQ ID NO: 301827 - DNA, 120 bp, Artificial Sequence
  ENSG00000132975_1 (sequence is synthesized)
aagatgtgattttccaatgtgcattcccagcgctgttgcaaacagaccgccgcgagtccgtgtgtgcctgcctcgctcacgctggtgttttgaagtcctaccctgtgttttccccaatgc

SEQ ID NO: 301828 - DNA, 120 bp, Artificial Sequence
  ENSG00000132975_2 (sequence is synthesized)
caaacggcatttttgttgtggggtttaaaccacagagactttggcttttgtttcatttcccaacagttcctcattcccgaagcttgtggcatttggtactggtatctgagcaggggctgg

SEQ ID NO: 301829 - DNA, 120 bp, Artificial Sequence
  ENSG00000132975_3 (sequence is synthesized)
ctttctgtttgtctgtgtgttttttgcatgatcttggattgtcaccctgctgtatttaaacattaaaaagcctgtcttttcgttgaagaggacaggggttaaaatgaatgaagacctgaa

SEQ ID NO: 301830 - DNA, 120 bp, Artificial Sequence
  ENSG00000132975_4 (sequence is synthesized)
ggtcaatttaagcgggctgcctcgggattatttagatgccgctgctgcggagaacatctcggctgctgtctcctcccgggttcctgccgtagagccagagcctgagctcgtagtcaaccc

SEQ ID NO: 301831 - DNA, 120 bp, Artificial Sequence
  ENSG00000132975_5 (sequence is synthesized)
ctgggacattgtcttgtgtacctcgggaaccctcatctcctgtgaaaatgccattgtggtccttatcatcttccacaaccccagcctgcgagcacccatgttcctgctaataggcagcct

SEQ ID NO: 301832 - DNA, 120 bp, Artificial Sequence
  ENSG00000132975_6 (sequence is synthesized)
ggctcttgcagacctgctggccggcattggactcatcaccaattttgtttttgcctacctgcttcagtcagaagccaccaagctggtcacgatcggcctcattgtcgcctctttctctgc

SEQ ID NO: 301833 - DNA, 120 bp, Artificial Sequence
  ENSG00000132975_7 (sequence is synthesized)
ctctgtctgcagcttgctggctatcactgttgaccgctacctctcactgtactacgctctgacgtaccattcggagaggacggtcacgtttacctatgtcatgctcgtcatgctctgggg

SEQ ID NO: 301834 - DNA, 120 bp, Artificial Sequence
  ENSG00000132975_8 (sequence is synthesized)
acctgcagcgtggtcagaccgctcaccaagaacaacgcggccatcctctcggtgtccttcctcttcatgtttgcgctcatgcttcagctctacatccagatctgtaagattgtgatgagg

SEQ ID NO: 301835 - DNA, 120 bp, Artificial Sequence
  ENSG00000132975_9 (sequence is synthesized)
cacgcccatcagatagccctgcagcaccacttcctggccacgtcgcactatgtgaccacccggaaaggggtctccaccctggctatcatcctggggacgtttgctgcttgctggatgcct

SEQ ID NO: 301836 - DNA, 120 bp, Artificial Sequence
  ENSG00000132975_10 (sequence is synthesized)
ttcaccctctattccttgatagcggattacacctacccctccatctatacctacgccaccctcctgcccgccacctacaattccatcatcaaccctgtcatatatgctttcagaaaccaa

SEQ ID NO: 301837 - DNA, 120 bp, Artificial Sequence
  ENSG00000132975_11 (sequence is synthesized)
gagatccagaaagcgctctgtctcatttgctgcggctgcatcccgtccagtctcgcccagagagcgcgctcgcccagtgatgtgtagcacccttgcacccaggaggactctgcatttacc

SEQ ID NO: 301838 - DNA, 120 bp, Artificial Sequence
  ENSG00000132975_12 (sequence is synthesized)
aagcacttccactgcctggccaaggtttgagatgcttcccttgaattccttgcattggattccctctcaagccacaggagcacttagcattcgtgaaacaatgacatcgttcagatgagt

SEQ ID NO: 301839 - DNA, 120 bp, Artificial Sequence
  ENSG00000132975_13 (sequence is synthesized)
taagtgattgaagtgaaaataatgttaccagtgttttcaccattaaaaaaaattgttgagctctccactcaacattattttgttttgcttgggggcaagggtttccttttatactttgtt

SEQ ID NO: 301840 - DNA, 120 bp, Artificial Sequence
  ENSG00000132975_14 (sequence is synthesized)
tggagggctgactgggggtaggaaaggaagggatatgatacgcccatgatgttattagaagtaaatgagtttcagagtttttacctggactttaaaataaatttgagtgattgaggaaaa

SEQ ID NO: 301841 - DNA, 120 bp, Artificial Sequence
  ENSG00000132975_15 (sequence is synthesized)
ttgagaaagacttactttttccagactattttttttttttacatgatggtagattttttaatgctgcatgtatgtaacagaatatgacccctttcaatccaatacaaatagtttacataa

SEQ ID NO: 301842 - DNA, 80 bp, Artificial Sequence
  ENSG00000132975_16 (sequence is synthesized)
gaaagctgggcgcgcgagccgaggctgctgctcacctgcagccgcgccgctcacctgccgcggagtgcgcgccccgcgcc

SEQ ID NO: 301843 - DNA, 120 bp, Artificial Sequence
  ENSG00000132975_17 (sequence is synthesized)
acagcgggcaactgcgccgacatgcgacacgagtagcccacgcgcttcggaagcaccggaggagccccctcggcctgggcgagccaagaggacaggggttaaaatgaatgaagacctgaa

SEQ ID NO: 301844 - DNA, 120 bp, Artificial Sequence
  ENSG00000132975_18 (sequence is synthesized)
aaccgtgaacccattcttatccattctttctttcctttcggcaattactgttcacgagaattccttcggtatttctataaatgttgcaactccttctgcatggtcgactgtgttagctag

SEQ ID NO: 301845 - DNA, 120 bp, Artificial Sequence
  ENSG00000132975_19 (sequence is synthesized)
accacttgtttcaaatgttgccatgtcaatctagattccaacgggtcatttttcaatatagttttccaatatgtactttctaaaatgaatcctgaagtaggttttgatcttcatatgaag

SEQ ID NO: 301846 - DNA, 120 bp, Artificial Sequence
  ENSG00000132975_20 (sequence is synthesized)
taggattgattagatccaccattgtagtttcttaagctattgtctgattgttttcagaaaacaaaaggaaaaaatattagcaattgagagtagattaaatttattttaatatattctgaa

SEQ ID NO: 301847 - DNA, 120 bp, Artificial Sequence
  ENSG00000132975_21 (sequence is synthesized)
aaaaactaatgtgacattatcatgaaatgaaaaaaatcacctttcctctctctctgagaatatactaatggttattcttgattgagataattagaataaatattataggccaagtttttc

SEQ ID NO: 301848 - DNA, 120 bp, Artificial Sequence
  ENSG00000132975_22 (sequence is synthesized)
tggttcatactgtctgtggtgcataatgcatttgaaacaggcagtcccctattttaatgattaggtttgtttgtcagtgcacagcgtccatctatgactgtgacatataccagctatatc

SEQ ID NO: 301849 - DNA, 120 bp, Artificial Sequence
  ENSG00000132975_23 (sequence is synthesized)
tgaaatcttttaactccttttcaccaaaaaccaatttatacacaataaaaatcacattgcctgttttcagagaacaagaatgtagtcaggaaattgcaaagaagaattcactttaaacac

SEQ ID NO: 301850 - DNA, 120 bp, Artificial Sequence
  ENSG00000132975_24 (sequence is synthesized)
attgtaaaatcgatgtgtctcaggtttcttttctgttcatgcagacaaatgtagacgcaggtaccttccctccatttgcaatggatttatagttatgtctatataatcagtggaaaaaat

SEQ ID NO: 301851 - DNA, 120 bp, Artificial Sequence
  ENSG00000132975_25 (sequence is synthesized)
tcttggcagcacattaattgagcccattcagatggcagcaaaagcagtatttcagggtcattggggaatcatttgtaataaattaacctcatcggtttgtcccagatgtgatgcccaggg

SEQ ID NO: 301852 - DNA, 120 bp, Artificial Sequence
  ENSG00000132975_26 (sequence is synthesized)
tgctctcaagaccattctgggagcctgcatgctgatgccttctctccagagcatcttctaatgtagcacacgtgtgaaaaaatcctctacttgaatctgtgtctcctccctgaggttact

SEQ ID NO: 301853 - DNA, 120 bp, Artificial Sequence
  ENSG00000132975_27 (sequence is synthesized)
tatggaagcaggagagggactgaaatacttaagaagtgggaaagaattttcaatacataccactgtatgatcaatctaataaaactgatgcctttaaaacatttcttttgaacatttgat

SEQ ID NO: 301854 - DNA, 120 bp, Artificial Sequence
  ENSG00000132975_28 (sequence is synthesized)
ggagttagtaggttgaacatgatgagtctgttcgtttttaattaattaaaattgaatagcaccaccataggagacttgacaaaggtaagttggttttgagaggggctaggaaatatccgt

SEQ ID NO: 301855 - DNA, 120 bp, Artificial Sequence
  ENSG00000132975_29 (sequence is synthesized)
aatgaggttttaaaggaataaatgatgattttataaaaatagtggctccatttgcatatctccaatagtcagaattataaagagaataatatgtacttgttgtgaccacatgtgtgccag

SEQ ID NO: 301856 - DNA, 120 bp, Artificial Sequence
  ENSG00000132975_30 (sequence is synthesized)
gccccatgctgcgtgttttactataatcacaaaactactacttttataggtgagaaaactaagactaagagaggcgaggataaaaaatgtgcccgaggccacaaagcacaaggatagagt

SEQ ID NO: 301857 - DNA, 120 bp, Artificial Sequence
  ENSG00000132975_31 (sequence is synthesized)
cagaatttgaagccagcttttccaaagtctaagtcttgctccttccctgtaccttgcaagctttcatccctcagtggataccagggctgaggaaactgatttgtaacacgttcctgtcac

SEQ ID NO: 301858 - DNA, 71 bp, Artificial Sequence
  ENSG00000132975_32 (sequence is synthesized)
ccagggctgaggaaactgatttgtaacacgttcctgtcacagagttttggctctacatttaagacataaaa

SEQ ID NO: 301859 - DNA, 74 bp, Artificial Sequence
  ENSG00000132975_33 (sequence is synthesized)
acataaaatttcctgtttaaagttacactagttacgtggttgcttttggcccatgtttttaaaacatatagttt

SEQ ID NO: 301860 - DNA, 120 bp, Artificial Sequence
  ENSG00000132975_34 (sequence is synthesized)
cgtggttgcttttggcccatgtttttaaaacatatagtttcagctaagagatttttcagttcaactaacaacatgcctttaccgtttaaattgtgaaaaatgttggatatttatgtggtt

SEQ ID NO: 301861 - DNA, 120 bp, Artificial Sequence
  ENSG00000132975_35 (sequence is synthesized)
ttctacaaggtttcttttttcctgtggagctaattatttttaaatgtgcacacatctcaatgtacatatgtgtatgtatgtatttatgcatacgtatacccaataatattaactttgcaa

SEQ ID NO: 301862 - DNA, 120 bp, Artificial Sequence
  ENSG00000132975_36 (sequence is synthesized)
caggaccaaagacctcatggaaaactgtcttatttccaacagtcctgaggtagcagataatcttttactccacataattaaaatttctagctaccaaggaattgatatttttccagtaga

SEQ ID NO: 301863 - DNA, 120 bp, Artificial Sequence
  ENSG00000132975_37 (sequence is synthesized)
aacagttatccttgtaactaggacagttccattactttaccagaatcctgaattagtcaaaactagtcatcgaagttatgactatctagggttttgtttccttttattcctttaactctg

SEQ ID NO: 301864 - DNA, 120 bp, Artificial Sequence
  ENSG00000132975_38 (sequence is synthesized)
tatttctttctatcagtgaagtttgtttttaaaggtacctggggcagggaagcagggtggagatagagcccctccttgcctggagcctacagtaaggagccaggttcaggaggagtggat

SEQ ID NO: 301865 - DNA, 120 bp, Artificial Sequence
  ENSG00000132975_39 (sequence is synthesized)
tccttggttgacttggccatgcagaaatagtcttagactcccccaggatttaaaataggattgaaacaagaagtttaaaagagcagaggaggaatagagatacttagtgccaataaaaat

SEQ ID NO: 301866 - DNA, 120 bp, Artificial Sequence
  ENSG00000132975_40 (sequence is synthesized)
atcatggagacttcttcggctttttaaaaaaaatgcttaatccattattaaaataatgattgactttattttatagtaatatgtgataatatgaagttaggatgacttgccatttcagat

SEQ ID NO: 301867 - DNA, 120 bp, Artificial Sequence
  ENSG00000132975_41 (sequence is synthesized)
ttaaaatacatattaattaagtgactactatgttgtgattttgaataatgtttaagtttctatattgattgtatgcctggtataataaaggaaaagactgccttattgtcccctttaaaa

SEQ ID NO: 301868 - DNA, 69 bp, Artificial Sequence
  ENSG00000133019_0 (sequence is synthesized)
agtatttttaattaagcacttgtgttctgattagtggccaaataaatgacagtcagaacttcagctaag

SEQ ID NO: 301869 - DNA, 120 bp, Artificial Sequence
  ENSG00000133019_1 (sequence is synthesized)
attagtggccaaataaatgacagtcagaacttcagctaaggtacaataaggttttgctgtggcgtggcacctggtctctttctagaaggaaagttcaacatacagcacaattctggacac

SEQ ID NO: 301870 - DNA, 120 bp, Artificial Sequence
  ENSG00000133019_2 (sequence is synthesized)
attgtattggtttgatgctcctacctggaacaggtggagctggtctcttgggcagcctgacatctggtccactcctctgtcctatgccgggatcatcatgaccgtagagattatgtcact

SEQ ID NO: 301871 - DNA, 120 bp, Artificial Sequence
  ENSG00000133019_3 (sequence is synthesized)
gttttgcatccttgttacataactcagttcctggtagattactatgtcagagagtcacaatgaccttgcacaataacagtacaacctcgcctttgtttccaaacatcagctcctcctgga

SEQ ID NO: 301872 - DNA, 120 bp, Artificial Sequence
  ENSG00000133019_4 (sequence is synthesized)
tacacagcccctccgatgcagggctgcccccgggaaccgtcactcatttcggcagctacaatgtttctcgagcagctggcaatttctcctctccagacggtaccaccgatgaccctctgg

SEQ ID NO: 301873 - DNA, 120 bp, Artificial Sequence
  ENSG00000133019_5 (sequence is synthesized)
gaggtcataccgtctggcaagtggtcttcatcgctttcttaacgggcatcctggccttggtgaccatcatcggcaacatcctggtaattgtgtcatttaaggtcaacaagcagctgaaga

SEQ ID NO: 301874 - DNA, 120 bp, Artificial Sequence
  ENSG00000133019_6 (sequence is synthesized)
cggtcaacaactacttcctcttaagcctggcctgtgccgatctgattatcggggtcatttcaatgaatctgtttacgacctacatcatcatgaatcgatgggccttagggaacttggcct

SEQ ID NO: 301875 - DNA, 120 bp, Artificial Sequence
  ENSG00000133019_7 (sequence is synthesized)
gtgacctctggcttgccattgactacgtagccagcaatgcctctgttatgaatcttctggtcatcagctttgacagatacttttccatcacgaggccgctcacgtaccgagccaaacgaa

SEQ ID NO: 301876 - DNA, 120 bp, Artificial Sequence
  ENSG00000133019_8 (sequence is synthesized)
caacaaagagagccggtgtgatgatcggtctggcttgggtcatctcctttgtcctttgggctcctgccatcttgttctggcaatactttgttggaaagagaactgtgcctccgggagagt

SEQ ID NO: 301877 - DNA, 120 bp, Artificial Sequence
  ENSG00000133019_9 (sequence is synthesized)
gcttcattcagttcctcagtgagcccaccattacttttggcacagccatcgctgctttttatatgcctgtcaccattatgactattttatactggaggatctataaggaaactgaaaagc

SEQ ID NO: 301878 - DNA, 120 bp, Artificial Sequence
  ENSG00000133019_10 (sequence is synthesized)
gtaccaaagagcttgctggcctgcaagcctctgggacagaggcagagacagaaaactttgtccaccccacgggcagttctcgaagctgcagcagttacgaacttcaacagcaaagcatga

SEQ ID NO: 301879 - DNA, 120 bp, Artificial Sequence
  ENSG00000133019_11 (sequence is synthesized)
aacgctccaacaggaggaagtatggccgctgccacttctggttcacaaccaagagctggaaacccagctccgagcagatggaccaagaccacagcagcagtgacagttggaacaacaatg

SEQ ID NO: 301880 - DNA, 120 bp, Artificial Sequence
  ENSG00000133019_12 (sequence is synthesized)
atgctgctgcctccctggagaactccgcctcctccgacgaggaggacattggctccgagacgagagccatctactccatcgtgctcaagcttccgggtcacagcaccatcctcaactcca

SEQ ID NO: 301881 - DNA, 120 bp, Artificial Sequence
  ENSG00000133019_13 (sequence is synthesized)
ccaagttaccctcatcggacaacctgcaggtgcctgaggaggagctggggatggtggacttggagaggaaagccgacaagctgcaggcccagaagagcgtggacgatggaggcagttttc

SEQ ID NO: 301882 - DNA, 120 bp, Artificial Sequence
  ENSG00000133019_14 (sequence is synthesized)
caaaaagcttctccaagcttcccatccagctagagtcagccgtggacacagctaagacttctgacgtcaactcctcagtgggtaagagcacggccactctacctctgtccttcaaggaag

SEQ ID NO: 301883 - DNA, 120 bp, Artificial Sequence
  ENSG00000133019_15 (sequence is synthesized)
ccactctggccaagaggtttgctctgaagaccagaagtcagatcactaagcggaaaaggatgtccctggtcaaggagaagaaagcggcccagaccctcagtgcgatcttgcttgccttca

SEQ ID NO: 301884 - DNA, 120 bp, Artificial Sequence
  ENSG00000133019_16 (sequence is synthesized)
tcatcacttggaccccatacaacatcatggttctggtgaacaccttttgtgacagctgcatacccaaaaccttttggaatctgggctactggctgtgctacatcaacagcaccgtgaacc

SEQ ID NO: 301885 - DNA, 120 bp, Artificial Sequence
  ENSG00000133019_17 (sequence is synthesized)
ccgtgtgctatgctctgtgcaacaaaacattcagaaccactttcaagatgctgctgctgtgccagtgtgacaaaaaaaagaggcgcaagcagcagtaccagcagagacagtcggtcattt

SEQ ID NO: 301886 - DNA, 120 bp, Artificial Sequence
  ENSG00000133019_18 (sequence is synthesized)
ttcacaagcgcgcacccgagcaggccttgtagaatgaggttgtatcaatagcagtgacaaaacgcacacatcaacccacagaccttaggaggaggaaggcgagggcggggtgacttctgg

SEQ ID NO: 301887 - DNA, 120 bp, Artificial Sequence
  ENSG00000133019_19 (sequence is synthesized)
tgatgataaaaatggttttatcacccagatgtgaaagaagctgcctgtttactgatccattgaataaacccattttaatagaaaaagtcaataccaattcagcaaaaagaaaaaaaaaac

SEQ ID NO: 301888 - DNA, 120 bp, Artificial Sequence
  ENSG00000133019_20 (sequence is synthesized)
atactactgaatataaagaaatttattctgaaatagactttacgtgtttttttcttaaagaggagaaaaatattgcttgacggcaattatatacccaaagtgatttgcctgggtccttta

SEQ ID NO: 301889 - DNA, 120 bp, Artificial Sequence
  ENSG00000133019_21 (sequence is synthesized)
attcccattagctttggaatctcagatgagcatagctgacccagttcccacattcttcccaaggatcccaaaagtgggaatccagaccccaagtggaacactgcaggcttacgaatctgt

SEQ ID NO: 301890 - DNA, 120 bp, Artificial Sequence
  ENSG00000133019_22 (sequence is synthesized)
ggttccaaaattatttcatacgttgcaaagctgaatcttcttgtcccaatagagcttcctgtcttttctttggtgtgttgttaaactctatttgtggacttgattcttgattcttgcaaa

SEQ ID NO: 301891 - DNA, 120 bp, Artificial Sequence
  ENSG00000133019_23 (sequence is synthesized)
gtactgttttgtgcagttcaagtttcgtacaaataaaaatacttaagtatatatatatgtgtgagttctgcacgcacacacatagtgtatataatatcatgggaaacactgaactggcaa

SEQ ID NO: 301892 - DNA, 120 bp, Artificial Sequence
  ENSG00000133019_24 (sequence is synthesized)
attattcctgcaacatacgctttcagtactttggtaactgaagttctctaggatcctaatgcaacattaacgtgaaataagcccagtgtaatgtttttgaaaccagggctgttttccaca

SEQ ID NO: 301893 - DNA, 120 bp, Artificial Sequence
  ENSG00000133019_25 (sequence is synthesized)
gagagcagccaggccttcccagcaggtctgtgcagagcggacaggctcgtgagtcagctgagcgccgtggcttcgccagacttggtgttaagcaacctcctttgttgatgtctcaacaga

SEQ ID NO: 301894 - DNA, 120 bp, Artificial Sequence
  ENSG00000133019_26 (sequence is synthesized)
gctaaatcggggcccctctgagctcaaagaatgaaccacatccacacgtttgaatttaatcatctaaatctgaatgtttcagaacaaaatttctgctatctaaactgcttgaaactcaat

SEQ ID NO: 301895 - DNA, 120 bp, Artificial Sequence
  ENSG00000133019_27 (sequence is synthesized)
atatatatgtgtatatatatatatatggcaaagcaaaaaaaaaaacatggtaagagagaatgaaggagaacattgtgtttgattcttgctgaatggcaccttctcaaagaaaatagggct

SEQ ID NO: 301896 - DNA, 120 bp, Artificial Sequence
  ENSG00000133019_28 (sequence is synthesized)
cttgctgaatggcaccttctcaaagaaaatagggcttgcacctttgttaatcagctgtggccagtgctttctggtgttcattgtgtaaccttcacccaggaataggtgaggttttaggaa

SEQ ID NO: 301897 - DNA, 120 bp, Artificial Sequence
  ENSG00000133019_29 (sequence is synthesized)
gttacatgtcctctgaagaaagaattacactctgaaaagtaatgcttcaaattgatttccttaccttttgggaaaaaaaaaaaattgtttttttgcattctcccttgaattgaccaaaat

SEQ ID NO: 301898 - DNA, 120 bp, Artificial Sequence
  ENSG00000133019_30 (sequence is synthesized)
gttaactgtttcatttggggaggggatggggtgctgccatcattgtcgttgttgttgctgctgtagctgttggggtttcttttcctgttgccggggctgtttggggagagggaggggagg

SEQ ID NO: 301899 - DNA, 120 bp, Artificial Sequence
  ENSG00000133019_31 (sequence is synthesized)
gaggtgggagggccgcggagatatcttccctttgtacagggcattcgtgttgtgaacccagagctgggtagaagctgcttttgtattcagtgtgaggtggtgtttacagacgactttgac

SEQ ID NO: 301900 - DNA, 120 bp, Artificial Sequence
  ENSG00000133019_32 (sequence is synthesized)
aacagtagaagtgtactcagtggtgtctgtgtatctgaactatttaatttcgtgttatgtttatatgcagaaatatttatggatactacaccaagtgtttatttaatgttgataaatatg

SEQ ID NO: 301901 - DNA, 120 bp, Artificial Sequence
  ENSG00000133019_33 (sequence is synthesized)
ggtgtcctttcaaagtgattctttaaggtccacttgagcaatgaatagagtatattggagctttcctgtggctaagaagaagaaacatgtcatcctgttggcatcaccaagcacctaact

SEQ ID NO: 301902 - DNA, 120 bp, Artificial Sequence
  ENSG00000133019_34 (sequence is synthesized)
ctttctaggtaataaaaagtcaacggtcacttcaacgtaaatgtttaaaaccactctttagttaaatctgatgggaactgaacaaagctccaccattgtgtctgaaatcattttacacag

SEQ ID NO: 301903 - DNA, 120 bp, Artificial Sequence
  ENSG00000133019_35 (sequence is synthesized)
ggaaaaaaaaaaacaatcagcataattgtaagaatgatttttttgggcccacattcaaccaaagaacaagaaagaaacagacgattttctaatatgtacacagcaaactacagaatgtca

SEQ ID NO: 301904 - DNA, 120 bp, Artificial Sequence
  ENSG00000133019_36 (sequence is synthesized)
tattatccacctgtgaaacatctagtaagcaattgcatctatattttatttctcaagttggcctggcactaataaatatgtgaaagcttattcaagtgtcccagtacttcagcacttccc

SEQ ID NO: 301905 - DNA, 120 bp, Artificial Sequence
  ENSG00000133019_37 (sequence is synthesized)
atccttttggaaactcctatcttgcctccctcccaaaagggctgtttcttttattaaaaaaaaaaaagaaatagaattaaatttgagaaaaggagaaaccctgaaatttaacagaacttt

SEQ ID NO: 301906 - DNA, 120 bp, Artificial Sequence
  ENSG00000133019_38 (sequence is synthesized)
gagagtcacttccaatctccttaaacatgattatctccttatccttgtccttttgtgatgctaataatagcagaaaaggaacaaatccaagactctaggtctcccttttttgttttactg

SEQ ID NO: 301907 - DNA, 120 bp, Artificial Sequence
  ENSG00000133019_39 (sequence is synthesized)
gttttattatagaattgtttttaagcctcttatggatgaaagctgcatttaaatactatctactgattttatagaaaggtatgtccatttcttgggtcactttcagagaaagaaaacaag

SEQ ID NO: 301908 - DNA, 120 bp, Artificial Sequence
  ENSG00000133019_40 (sequence is synthesized)
caaaataggttcttttgaatatgaataatttaaaagcataattgaagatgtagtgagtatttataattggaccttagttacacgtgcatttctcaaagggcttgtcattacaggagatat

SEQ ID NO: 301909 - DNA, 120 bp, Artificial Sequence
  ENSG00000133019_41 (sequence is synthesized)
tcagcacttacctaagatcaaaatgtcttcatcccaaattgggaatcgaattatttcatgccatatgcatgaggtttgcagacatttcaagattagccactttgcttgaaagaagaaaat

SEQ ID NO: 301910 - DNA, 120 bp, Artificial Sequence
  ENSG00000133019_42 (sequence is synthesized)
gatcaaacctaaaataaactacacatggagaatctctctctctctctctgcctctctctctctctttctccctcttcttccttctctctctctcacaagcacacacacacacactcaatc

SEQ ID NO: 301911 - DNA, 120 bp, Artificial Sequence
  ENSG00000133019_43 (sequence is synthesized)
tccattctccaggcattgccagatggttaggagaagtgagctctctctggtcccctagatccctcggctctgctctcctttgcccatcagctccctgtggcctctatgctagtcctccct

SEQ ID NO: 301912 - DNA, 120 bp, Artificial Sequence
  ENSG00000133019_44 (sequence is synthesized)
attctcctagtcaccctttgcctcttaagcccagccttgactctctacatatttttcatttctctttaccctttagtgtacaatagttgtagactctgacggaatgaaaacaaacaagaa

SEQ ID NO: 301913 - DNA, 120 bp, Artificial Sequence
  ENSG00000133019_45 (sequence is synthesized)
gcctaagcgttagaccctgctgtggctaaagatctagaaggcatatcagttttctctgtcaggcttcctacgttgccctcgtgcagggctcattgctctgcagagcgctggaagcccctt

SEQ ID NO: 301914 - DNA, 120 bp, Artificial Sequence
  ENSG00000133019_46 (sequence is synthesized)
catgtatcgagagagaagctggagcacagagctctgatgcacagttggctgtttcagctctgactcagggaggaaagaaggatgccaaggctctgtcacagcggagaagtctaataccag

SEQ ID NO: 301915 - DNA, 120 bp, Artificial Sequence
  ENSG00000133019_47 (sequence is synthesized)
agtggcacagagaaggattccagggatcagtcagggtgtcctgtacctatctgagtagagatgattcaaggatggggacatattccaggaaattgcacaatcttcccctggcagcttcag

SEQ ID NO: 301916 - DNA, 120 bp, Artificial Sequence
  ENSG00000133019_48 (sequence is synthesized)
aggacgagtgaaaatagtgcagtatagtcaaagaagcaatgaatttaggatgaggaacctgaagtttctggaccagtttggtcactgcttagttacatgtccttaggaatgcttgtcact

SEQ ID NO: 301917 - DNA, 120 bp, Artificial Sequence
  ENSG00000133019_49 (sequence is synthesized)
taacctaaactttctgggttttatcctcattgctcaaactaagcaacaacaccgaagcttctctaatttgccttctgatgccaaatcggtcaaaactgaggtcagcagctaccatgacga

SEQ ID NO: 301918 - DNA, 120 bp, Artificial Sequence
  ENSG00000133019_50 (sequence is synthesized)
aagtaaaatggtatattgggtgaatgtttgaaaatttcagattttatattctgtaaagttatttacttactctatttcaacaccacaaaatcttgaaatttggaaggtaaccaaggaagc

SEQ ID NO: 301919 - DNA, 120 bp, Artificial Sequence
  ENSG00000133019_51 (sequence is synthesized)
tttgaaatttgttggcaaacccggagtagtatggtttcaaataccactccaacccagcacctgaggtcgggcaaactcacaaaatagagtttctaggtagcaggtgtttgctttggtttt

SEQ ID NO: 301920 - DNA, 120 bp, Artificial Sequence
  ENSG00000133019_52 (sequence is synthesized)
gcaatagcatttctcataacagaactgaaactgtatagattacaacactccaaagttatttttttttaacctaaagaaccctacttctagcacctcctctgaaagaatattttgctccaa

SEQ ID NO: 301921 - DNA, 120 bp, Artificial Sequence
  ENSG00000133019_53 (sequence is synthesized)
taccacgtgcaacaaacttatttagacagtatcaactctagcccttaataggttcaaggacaagtttactgcttcctttctacacgcttaagttacactctcttctcctgttctgatgac

SEQ ID NO: 301922 - DNA, 120 bp, Artificial Sequence
  ENSG00000133019_54 (sequence is synthesized)
tctaaatcttcagcctctcccagcattaatgtgtgagtcaacattgcagacctgagaaaggtttctagaatggtaacccaatgttctttagaactggagaattccattttccttttctgg

SEQ ID NO: 301923 - DNA, 120 bp, Artificial Sequence
  ENSG00000133019_55 (sequence is synthesized)
ctttagtgttaatgtctgggaagggaggctcatgataagaaaataaaaatgagaaaagaagatctagttcataaaatgactataccccacgtaagtttgtaactgcacagtgttttgttg

SEQ ID NO: 301924 - DNA, 120 bp, Artificial Sequence
  ENSG00000133019_56 (sequence is synthesized)
tacggctcagaaatgagcaagtgttagtattattaggcacacatcacgttcacagcttcgcgcagagacggatagtgtatttggatatatggaagtcatccaaatgcgttgctagaatat

SEQ ID NO: 301925 - DNA, 120 bp, Artificial Sequence
  ENSG00000133019_57 (sequence is synthesized)
caggcctatgtttgttctggtagaaccacagagactcacacaaagttctgaccctaccactctggtctgggctgagaccaccccaaaaaatcatctagagaatcaaaggggctcacatct

SEQ ID NO: 301926 - DNA, 120 bp, Artificial Sequence
  ENSG00000133019_58 (sequence is synthesized)
cagttgcattctatttaaaagataaaggggccatactctccactgcaaagaagcattagtaaaacttcccgcacccaaattataatccggcaaccctagcttcagctaaaaagattatcc

SEQ ID NO: 301927 - DNA, 120 bp, Artificial Sequence
  ENSG00000133019_59 (sequence is synthesized)
ccagaatctaaaagcttactattgttctttcttggagtccaaaatgcttagcagttctgcagttcacatacaaaactcaaaactctttttatcctgtattctgtgagttccttgatgata

SEQ ID NO: 301928 - DNA, 120 bp, Artificial Sequence
  ENSG00000133019_60 (sequence is synthesized)
gtaattgggtcttattcatcactctgtatcctgtggctcacacagaatctggcaaattgcatatattcaataaatgttgaatatctaataacctccttattaatataacaaatattatca

SEQ ID NO: 301929 - DNA, 120 bp, Artificial Sequence
  ENSG00000133019_61 (sequence is synthesized)
acattctgtgcacatcaatgtcccatgctgctactgtagtcaggagttatttggctgggaagtggaaagtgttcacaaacatgatgcttatctaataaaatatcactgagcaataaggag

SEQ ID NO: 301930 - DNA, 120 bp, Artificial Sequence
  ENSG00000133019_62 (sequence is synthesized)
aaatattttaaatagatttgaagttgtgaacaaataatttagagtccaaagaggaaaaagaaaattaactctgttttttatccctagaactcagaaactttactggattggtcaacaaag

SEQ ID NO: 301931 - DNA, 120 bp, Artificial Sequence
  ENSG00000133019_63 (sequence is synthesized)
acaaactttttattgtataaaacagtagaattcatggaagggataattcttttggaacaggcttctcggttacttgccttagtaaaagaagtatctggagggcctggagagttcataaac

SEQ ID NO: 301932 - DNA, 120 bp, Artificial Sequence
  ENSG00000133019_64 (sequence is synthesized)
atagttttctgtgcaagtgaagatctgtagtttggcttaaaaatccttgcatgtagttttgcttggcgtggaaagttattaggagacaatcctttatcctgttctgcaagcaatcaaaca

SEQ ID NO: 301933 - DNA, 120 bp, Artificial Sequence
  ENSG00000133019_65 (sequence is synthesized)
catgatctcccttctagccattcctcatccagtacatgggcatttccagcctcctacatgtaacacttcaaacttcctctgggcgtctgcttagagctatgtgatggccacagtttgggc

SEQ ID NO: 301934 - DNA, 120 bp, Artificial Sequence
  ENSG00000133019_66 (sequence is synthesized)
aaagcccttctttcttttaaatataggaactgttaccaagtttggtgcaggcttgaggaataattacataaaaatgggcttccacgatggtgaatcagcatgctgatttctcttggcagg

SEQ ID NO: 301935 - DNA, 120 bp, Artificial Sequence
  ENSG00000133019_67 (sequence is synthesized)
aagctctcagggaaatgtctgtgaatcatttaaagatgctctctggtggatagagaaaccgcagtccaaaaacagatgggtgtatatttgctttgtaagcaaagggcatgtatcatactc

SEQ ID NO: 301936 - DNA, 120 bp, Artificial Sequence
  ENSG00000133019_68 (sequence is synthesized)
gcatctaaaacagtgtccacatctttgccaaaggcactgaattttacctttttttattacctcgtggccagcacttcctcagtaggcatttcaggtgtgtcacaaaccatgttcattttt

SEQ ID NO: 301937 - DNA, 120 bp, Artificial Sequence
  ENSG00000133019_69 (sequence is synthesized)
aatcttgaaaaagtcaatcgtctgtagtctgtactataaaatgatgcctgcaactttgtggtgaatattatccccaagttaacagtgaaataagtaaataaaactattattgaacaaaga

SEQ ID NO: 301938 - DNA, 120 bp, Artificial Sequence
  ENSG00000133019_70 (sequence is synthesized)
catgtgacgcgcggccgcagctgcccgcgggcggagcgctctcagaccccggagcgcacaccgcggggccatcggtgccatcgcggatctccaggctcctcatcagtccgccggggccgc

SEQ ID NO: 301939 - DNA, 120 bp, Artificial Sequence
  ENSG00000133019_71 (sequence is synthesized)
agcagcgcttctgggaagacgggcgatgaactgaagggcggctccgggcaggggggcacgatcttaaggacagtcgctccctgaacgcggagccggaggagacgaagggaaggtggagcg

SEQ ID NO: 301940 - DNA, 120 bp, Artificial Sequence
  ENSG00000133019_72 (sequence is synthesized)
ttgccctggcagagggaacctacccagtccattgctgcctgctacaagatatgaacagtaatggcacatattttggttatgagtcactcagaggactgtggattgaatgaactgtatcca

SEQ ID NO: 301941 - DNA, 120 bp, Artificial Sequence
  ENSG00000133019_73 (sequence is synthesized)
tccccatcatgatgtacagaaccaagtctcttcactatgtacagtgtacttgaccagaggattcatgaggggcagtattgtagtacgcagagtgcggaagcagagaagagagtccagctg

SEQ ID NO: 301942 - DNA, 120 bp, Artificial Sequence
  ENSG00000133019_74 (sequence is synthesized)
tttgttcgttaagccagatatggaagagatttgcaaaaaatgtaaatcatgtcacattttactaattttgtcttagaatatgtgttattttcattaaaagatactgtttaattatgctaa

SEQ ID NO: 301943 - DNA, 120 bp, Artificial Sequence
  ENSG00000133019_75 (sequence is synthesized)
ttttagtacggtattgttgcagctgacctgtatacgtaaggaattactgggtcatcagctctggggaatgtcttttgattatgaacacattttcagcatgtgtccactgaaggtggagct

SEQ ID NO: 301944 - DNA, 120 bp, Artificial Sequence
  ENSG00000133019_76 (sequence is synthesized)
attacaccagctctctcagtccggggaggaggaggagcaggaggaacgcgaggaggaaggagaggaggagcggccagcagtagccacgaccgccaccaccaggcagaggaagagttcgtg

SEQ ID NO: 301945 - DNA, 120 bp, Artificial Sequence
  ENSG00000133019_77 (sequence is synthesized)
gggaggaaaagacctctcctcccccttggagcgccttctctctgcttttggagaaagggaatacacgataaagaaggagacggaaagaagagaaaaagtgaggcgggagacagagggaaa

SEQ ID NO: 301946 - DNA, 120 bp, Artificial Sequence
  ENSG00000133019_78 (sequence is synthesized)
gagctagtaagtttgaaggggagtcataaagaggaacaggcattatacgcaaggctgaagaagcagttggtaactaacagtacatctttttctaaggccaacactaaacataagttgcag

SEQ ID NO: 301947 - DNA, 120 bp, Artificial Sequence
  ENSG00000133019_79 (sequence is synthesized)
agctggcctgtggtggaactcacaagtcttattggcaatatatgtgaggagacaaaaagcaacatatggagaaatacaaaaatatactccctagagatactgcctcttcagatgtcaaga

SEQ ID NO: 301948 - DNA, 120 bp, Artificial Sequence
  ENSG00000133019_80 (sequence is synthesized)
tttgagaaagtagagaagaaaagaatgaatccggatggttgttgagacagaaactgagcgtcgaacctcattttctctcgtacccaaaccttgatgaaacaacagaggaaagtattgggc

SEQ ID NO: 301949 - DNA, 120 bp, Artificial Sequence
  ENSG00000133019_81 (sequence is synthesized)
tgcaattgtaggcgcacaaaagcaaaccttgagtcatggatgaccgaccaaggaagagtccccttgggaggaggaggtgccaaagaccagtgatactgctttgggttatgtgcactgagg

SEQ ID NO: 301950 - DNA, 120 bp, Artificial Sequence
  ENSG00000133019_82 (sequence is synthesized)
gtttccaaccctgacggatatggattctaatttaaaatatcacagggaagaaaaaaatagacgttcccatggcaacattttctcagggccagctcttctgtcttattatcatatcttatt

SEQ ID NO: 301951 - DNA, 120 bp, Artificial Sequence
  ENSG00000133019_83 (sequence is synthesized)
taaatatttcctggaatcagtttaaacttaatccctctgtgtgtcttctattttcagtggccatggagagcgtaacatctggtcagaggttttccttaaataaatcatataattgtaggc

SEQ ID NO: 301952 - DNA, 120 bp, Artificial Sequence
  ENSG00000133019_84 (sequence is synthesized)
aaatgacagtcagaacttcagctaaggttttgctgtggcgtggcacctggtctctttctagaaggaaagttcaacatacagcacaattctggacacattgtattggtttgatgctcctac

SEQ ID NO: 301953 - DNA, 120 bp, Artificial Sequence
  ENSG00000133019_85 (sequence is synthesized)
ctggaacaggtaacagaggaagttcctaagttgtctggagattgcatgtcctcacacactaaaatcctctgagctgaatgattcagctttcactattgctgtgtctgtggacaaaaaagc

SEQ ID NO: 301954 - DNA, 120 bp, Artificial Sequence
  ENSG00000133019_86 (sequence is synthesized)
gagaagcgtgggaaatgactaccatacaaatcaagaaattcatgaaggcaaacagttgatgactgtcacctagcaatctgttattttcttttatcctttccccaagacatatgccctctg

SEQ ID NO: 301955 - DNA, 120 bp, Artificial Sequence
  ENSG00000133019_87 (sequence is synthesized)
acataagcattaaaatcaaattatacaattgtcagaaaacctgttctcaaagctttagggtaaaaattgtttaatcaaattgtaacacaaattgagaaatatcattaaagtgataatgcc

SEQ ID NO: 301956 - DNA, 120 bp, Artificial Sequence
  ENSG00000133019_88 (sequence is synthesized)
aggtatttttttaattaatatcatgtacacagttatatgttgagattttcaccagagtacctacttttataatgaaaaatgtgtaaaacacatgtattagtgtcgccggtatgaaatatg

SEQ ID NO: 301957 - DNA, 120 bp, Artificial Sequence
  ENSG00000133019_89 (sequence is synthesized)
gctagatctagtctatttctgtatcaaccaattgtaaaatgaagaggcatgctgagctgtatctattaggtataagtatataaatgtggtaattatgtatacctatataggcagaattta

SEQ ID NO: 301958 - DNA, 120 bp, Artificial Sequence
  ENSG00000133019_90 (sequence is synthesized)
tttttaactgaattaagaaacgtcactggacagtttcgatgtcttctggtcaatatcatatagatctggtgccaatgtaagcttaaactttttaccgagtttatgctttgcaacagttta

SEQ ID NO: 301959 - DNA, 120 bp, Artificial Sequence
  ENSG00000133019_91 (sequence is synthesized)
attttattatacagggtatttgatgtgcttccactcacagatgcaccatattaacagttggtgtatgatatttacggtgttgtggaaagaaaattaaactcagtcagaagatgttaattt

SEQ ID NO: 301960 - DNA, 120 bp, Artificial Sequence
  ENSG00000133019_92 (sequence is synthesized)
catttcagctccagcatttatcctcatactagtcccctaatctctaggcctcagtttcttcatttgaaaagtgaaaggaatcgtttctgctttacctagttcataagatttcctttgaag

SEQ ID NO: 301961 - DNA, 120 bp, Artificial Sequence
  ENSG00000133019_93 (sequence is synthesized)
gtcaacagaggtaacggatgtgaaattattagctaactctcaaactctgtaaaaataaatggtgttgtctgtggtcaactaacagcacaagtagagagctggaaaaagttgtgaccataa

SEQ ID NO: 301962 - DNA, 120 bp, Artificial Sequence
  ENSG00000133019_94 (sequence is synthesized)
ttgtctcttccaattaattaatgcagtctactattttatatgctacttgcctaagagataaatgataaaatcctcattaattttaatttatgacccaaattaatttttggtatatttgag

SEQ ID NO: 301963 - DNA, 120 bp, Artificial Sequence
  ENSG00000133020_0 (sequence is synthesized)
atttccaccaagaacccagagagtggaacacttctgaacctgcatttttatctggaactccagaggcagaatcctttgctaaataaatcgcagccatgagtgcgagctcagacgctgaga

SEQ ID NO: 301964 - DNA, 120 bp, Artificial Sequence
  ENSG00000133020_1 (sequence is synthesized)
tggctgtttttggcgaagctgctccctaccttcgaaaatcagaaaaggagcggattgaggcccaaaacaagccgtttgatgctaaaacatctgtctttgtggcggagcccaaggaatcct

SEQ ID NO: 301965 - DNA, 120 bp, Artificial Sequence
  ENSG00000133020_2 (sequence is synthesized)
atgtgaagagcactatacaaagcaaagaaggagggaaagtaaccgtaaagactgaaggtggagcaactctaactgtcagggaagaccaagtcttccctatgaaccctccgaaatatgaca

SEQ ID NO: 301966 - DNA, 120 bp, Artificial Sequence
  ENSG00000133020_3 (sequence is synthesized)
aaattgaggacatggccatgatgactcatctacacgagcctggagtgctgtacaacctcaaagagcgctatgcagcctggatgatctacacctactcaggcctcttctgtgtcaccgtca

SEQ ID NO: 301967 - DNA, 120 bp, Artificial Sequence
  ENSG00000133020_4 (sequence is synthesized)
acccctacaagtggctgccggtgtacaagcccgaggtggtggctgcctacagaggcaaaaagcgccaggaggccccgccccacatcttctccatctctgacaatgcctatcagttcatgt

SEQ ID NO: 301968 - DNA, 120 bp, Artificial Sequence
  ENSG00000133020_5 (sequence is synthesized)
tgactgatcgagagaatcagtccatcctgatcaccggagaatctggtgccggaaagactgtgaacaccaagcgtgtcatccaatactttgcaacaattgcagttactggagagaagaaga

SEQ ID NO: 301969 - DNA, 120 bp, Artificial Sequence
  ENSG00000133020_6 (sequence is synthesized)
aggatgaatctggcaaaatgcaggggactctggaagatcaaatcatcagcgccaatcccctactggaggcctttggcaatgccaaaactgtgaggaatgacaactcctctcgctttggta

SEQ ID NO: 301970 - DNA, 120 bp, Artificial Sequence
  ENSG00000133020_7 (sequence is synthesized)
aattcattagaatccactttggtactacagggaagctggcatctgctgatatagaaacatatcttttagaaaagtccagagttactttccagctaaaggcggaaagaagctaccatattt

SEQ ID NO: 301971 - DNA, 120 bp, Artificial Sequence
  ENSG00000133020_8 (sequence is synthesized)
tttatcagatcacttccaataagaagccagatctaattgaaatgctcctgatcaccaccaacccatatgactatgccttcgtcagtcagggggagatcacagttcccagtattgatgacc

SEQ ID NO: 301972 - DNA, 120 bp, Artificial Sequence
  ENSG00000133020_9 (sequence is synthesized)
aagaagagttgatggccactgatagtgccattgacatcctgggcttcactcctgaagagaaagtgtccatctataaactcacaggggctgtgatgcattatgggaacatgaaattcaagc

SEQ ID NO: 301973 - DNA, 120 bp, Artificial Sequence
  ENSG00000133020_10 (sequence is synthesized)
aaaagcagcgtgaggagcaagctgagccagatggcacagaagtcgctgacaaggcagcctatctccagagtctgaactctgcagacctactcaaagccctctgctaccctagggtcaagg

SEQ ID NO: 301974 - DNA, 120 bp, Artificial Sequence
  ENSG00000133020_11 (sequence is synthesized)
ttggcaatgagtatgtcaccaaaggccagactgtgcagcaggtgtacaatgcggtgggtgctctggccaaagccgtctacgagaagatgttcctgtggatggtcacccgcatcaaccagc

SEQ ID NO: 301975 - DNA, 120 bp, Artificial Sequence
  ENSG00000133020_12 (sequence is synthesized)
agctggacaccaagcagcccaggcagtacttcatcggggtcttggacattgctggctttgaaatctttgattttaacagcctggagcagctgtgcatcaacttcaccaacgagaaactgc

SEQ ID NO: 301976 - DNA, 120 bp, Artificial Sequence
  ENSG00000133020_13 (sequence is synthesized)
aacagtttttcaaccaccacatgtttgtgctagagcaggaggagtacaagaaggaaggcatcgagtggacgttcattgactttgggatggacctggctgcctgcattgagctcattgaga

SEQ ID NO: 301977 - DNA, 120 bp, Artificial Sequence
  ENSG00000133020_14 (sequence is synthesized)
agccactgggcatcttctccatcctggaagaggagtgcatgttccctaaggcaacggacacctccttcaagaacaagctgtatgaccagcacctgggcaagtctgccaacttccagaagc

SEQ ID NO: 301978 - DNA, 120 bp, Artificial Sequence
  ENSG00000133020_15 (sequence is synthesized)
ccaaggtggtcaaaggcaaggctgaggcccacttctctctgattcactatgctggcactgtggactacaacattactggctggctggacaaaaataaggaccccctgaatgatactgtgg

SEQ ID NO: 301979 - DNA, 120 bp, Artificial Sequence
  ENSG00000133020_16 (sequence is synthesized)
ttgggctgtaccagaagtctgcaatgaagactctagccagtctcttttccacgtatgctagtgctgaagcagatagcagcgcgaagaaaggtgctaagaaaaagggctcttctttccaga

SEQ ID NO: 301980 - DNA, 120 bp, Artificial Sequence
  ENSG00000133020_17 (sequence is synthesized)
ctgtgtctgcccttttcagggaaaatttaaataaattgatgacgaatctgaggagcacacaccctcacttcgtacggtgtatcattcccaatgaaaccaaaactcctggggcaatggaac

SEQ ID NO: 301981 - DNA, 120 bp, Artificial Sequence
  ENSG00000133020_18 (sequence is synthesized)
atgaacttgtgttgcaccagctgaggtgtaatggtgtgctggaaggcatccgcatctgtaggaaaggattcccaagcagaatcttatatggtgatttcaaacaaagatacaaggttttaa

SEQ ID NO: 301982 - DNA, 120 bp, Artificial Sequence
  ENSG00000133020_19 (sequence is synthesized)
atgcaagtgctattccagagggacagttcattgacagcaagaaggcttctgagaaacttcttgcatctattgatattgatcatactcaatataaatttggacataccaaggttttcttca

SEQ ID NO: 301983 - DNA, 120 bp, Artificial Sequence
  ENSG00000133020_20 (sequence is synthesized)
aagctggacttctgggtcttctggaagaaatgagagatgaaaaattagcccaaattataacaagaacacaagctgtctgtaggggattcctaatgagggtagaatatcagaagatgttgc

SEQ ID NO: 301984 - DNA, 120 bp, Artificial Sequence
  ENSG00000133020_21 (sequence is synthesized)
aaaggagagaagcacttttctgcatccagtataatgtccgtgccttcatgaacgtcaagcactggccctggatgaaactctttttcaagattaagcccctcctcaagagtgcagagaccg

SEQ ID NO: 301985 - DNA, 120 bp, Artificial Sequence
  ENSG00000133020_22 (sequence is synthesized)
agaaagagatggccaccatgaaggaagaattccagaaaaccaaagatgaactcgccaagtcagaggcaaaacggaaggagctagaggaaaaaatggtcactctcttaaaagagaaaaatg

SEQ ID NO: 301986 - DNA, 120 bp, Artificial Sequence
  ENSG00000133020_23 (sequence is synthesized)
acctgcaactccaggttcaatctgaagcagatagcttggctgatgcagaggaaaggtgtgagcaactgattaaaaacaaaatccaacttgaggccaaaatcaaagaggtgactgaaagag

SEQ ID NO: 301987 - DNA, 120 bp, Artificial Sequence
  ENSG00000133020_24 (sequence is synthesized)
ctgaggaggaggaagagatcaatgctgagctgacagccaagaagagaaaactggaggatgaatgttcagaactcaagaaagacattgatgaccttgagctgacactggccaaggttgaga

SEQ ID NO: 301988 - DNA, 120 bp, Artificial Sequence
  ENSG00000133020_25 (sequence is synthesized)
gaagagatggcaggcctggatgaaaccattgcaaaactgtccaaggagaagaaggctctccaagagacccaccagcagaccctggatgacctgcaggcagaggaggacaaagtcaacatc

SEQ ID NO: 301989 - DNA, 120 bp, Artificial Sequence
  ENSG00000133020_26 (sequence is synthesized)
ctgaccaaagctaaaaccaagctagaacagcaagtggatgatcttgaagggtctctggaacaagaaaagaagcttcgaatggatctagaaagagcaaagcggaaactggagggtgacctc

SEQ ID NO: 301990 - DNA, 120 bp, Artificial Sequence
  ENSG00000133020_27 (sequence is synthesized)
aaattggcccaagaatccacaatggatatggaaaatgacaaacagcaacttgatgaaaagcttgaaaagaaagaatttgaaatcagcaatttgataagcaaaattgaagatgagcaagct

SEQ ID NO: 301991 - DNA, 120 bp, Artificial Sequence
  ENSG00000133020_28 (sequence is synthesized)
gtagaaattcaactacagaagaagatcaaagagttgcaggcccgcattgaggagctgggggaagaaatcgaggcagagagggcgtcccgagccaaagcggagaagcagcgctctgacctc

SEQ ID NO: 301992 - DNA, 120 bp, Artificial Sequence
  ENSG00000133020_29 (sequence is synthesized)
tcccgggaactggaggagatcagcgagaggctggaagaagccggtggggcaacttctgctcaggtggaattgaacaagaagcgggaggctgagtttcagaaactgcgcagggacctggag

SEQ ID NO: 301993 - DNA, 120 bp, Artificial Sequence
  ENSG00000133020_30 (sequence is synthesized)
gaggccaccctgcagcatgaagctatggtggctgctcttcggaagaagcacgcagacagtatggctgagcttggggagcagattgacaacttgcagcgggtcaaacagaagctggagaag

SEQ ID NO: 301994 - DNA, 120 bp, Artificial Sequence
  ENSG00000133020_31 (sequence is synthesized)
gagaagagtgagctgaagatggagactgatgacctcagcagtaacgcagaggccatttccaaagccaagggaaaccttgaaaagatgtgccgctctctagaagatcaagtgagtgagctt

SEQ ID NO: 301995 - DNA, 120 bp, Artificial Sequence
  ENSG00000133020_32 (sequence is synthesized)
aagaccaaggaagaggagcagcagcggctgatcaatgacctcacagcacagagagcgcgcctgcagacagaagcgggtgaatattctcgacaattagatgagaaagatgctttagtctct

SEQ ID NO: 301996 - DNA, 120 bp, Artificial Sequence
  ENSG00000133020_33 (sequence is synthesized)
cagctttcaaggagcaagcaagcatctactcagcagattgaagagctgaaacatcaactagaggaagaaactaaagccaagaacgccctggcacacgccctgcagtcctcccgccatgac

SEQ ID NO: 301997 - DNA, 120 bp, Artificial Sequence
  ENSG00000133020_34 (sequence is synthesized)
tgcgacctgctgcgggaacagtatgaggaagagcaggaaggcaaagctgagctgcagagggcgctgtccaaggccaacagtgaggttgcccagtggagaaccaaatacgagacggatgcc

SEQ ID NO: 301998 - DNA, 120 bp, Artificial Sequence
  ENSG00000133020_35 (sequence is synthesized)
atccagcgcacagaggagctggaggaggccaagaaaaagttggcccagcgcctgcaagaagctgaggaacatgtagaagctgtgaacgccaaatgtgcttcccttgagaagacgaagcag

SEQ ID NO: 301999 - DNA, 120 bp, Artificial Sequence
  ENSG00000133020_36 (sequence is synthesized)
cggctccagaatgaagttgaagacctcatgcttgatgtggaaaggtctaatgcagcctgtgcagcccttgataagaagcaaaggaactttgacaaggtcctatcagaatggaagcagaag

SEQ ID NO: 302000 - DNA, 120 bp, Artificial Sequence
  ENSG00000133020_37 (sequence is synthesized)
tatgaggaaactcaggctgaacttgaggcctcccagaaggagtcacgttctcttagcactgagctgttcaaggtgaagaatgtctatgaggaatccctggatcaactcgaaacgctaaga

SEQ ID NO: 302001 - DNA, 120 bp, Artificial Sequence
  ENSG00000133020_38 (sequence is synthesized)
agagaaaataagaacttgcaacaggagatttctgacctcactgagcagattgcagagggaggaaagcaaattcatgaattggagaaaataaagaagcaagtagaacaagagaaatgtgaa

SEQ ID NO: 302002 - DNA, 120 bp, Artificial Sequence
  ENSG00000133020_39 (sequence is synthesized)
attcaggctgctttagaggaagcagaggcatctcttgaacatgaagaaggaaagattctgcgtatccagcttgagttaaaccaagtcaagtctgaagttgatagaaaaatcgcagaaaag

SEQ ID NO: 302003 - DNA, 120 bp, Artificial Sequence
  ENSG00000133020_40 (sequence is synthesized)
gatgaggaaattgaccagctgaagagaaaccacactagagtcgtggagacaatgcagagcacgctggatgcagagattagaagcagaaatgatgctctgagagtcaagaagaaaatggaa

SEQ ID NO: 302004 - DNA, 120 bp, Artificial Sequence
  ENSG00000133020_41 (sequence is synthesized)
ggagatctgaatgaaatggaaatccagctgaaccatgccaatcgcttagctgcagagagtttaaggaactacaggaacacccaaggaatcctgaaggaaacccagctccacctggatgat

SEQ ID NO: 302005 - DNA, 120 bp, Artificial Sequence
  ENSG00000133020_42 (sequence is synthesized)
gctctccggggccaggaggacctcaaggaacagctggcaattgtggagcgcagagccaacctgctgcaggctgagatcgaggagctgtgggccactctggaacagacagagagaagcagg

SEQ ID NO: 302006 - DNA, 120 bp, Artificial Sequence
  ENSG00000133020_43 (sequence is synthesized)
aaaatcgccgaacaggagctcctggatgccagtgagcgtgtccagctcctccacacccagaataccagtctcattaacaccaagaagaaattagaaaatgacgtttcccaactccaaagt

SEQ ID NO: 302007 - DNA, 120 bp, Artificial Sequence
  ENSG00000133020_44 (sequence is synthesized)
gaagtggaagaagtaatccaagaatcacgcaatgcagaagagaaagccaagaaggccatcactgatgctgccatgatggctgaggagctgaagaaggaacaggacaccagcgcccacctg

SEQ ID NO: 302008 - DNA, 120 bp, Artificial Sequence
  ENSG00000133020_45 (sequence is synthesized)
gagcggatgaagaagaacctggagcagacggtgaaggacctgcagcatcgtctagatgaggccgagcagctggcgctgaagggtgggaagaagcagatccagaaactggaggccagggta

SEQ ID NO: 302009 - DNA, 120 bp, Artificial Sequence
  ENSG00000133020_46 (sequence is synthesized)
cgtgagcttgaaggagaggttgaaaatgaacagaaacgtaatgcagaggctgttaaaggtttacggaaacatgagcgacgagtaaaagaactcacctaccagactgaagaagatcgcaag

SEQ ID NO: 302010 - DNA, 120 bp, Artificial Sequence
  ENSG00000133020_47 (sequence is synthesized)
aatgttctcaggctgcaggacttggtagataaattacaggcgaaggtgaaatcatacaagagacaagctgaggaggctgaggaacaatccaatgctaatctatctaaattccgcaaactc

SEQ ID NO: 302011 - DNA, 120 bp, Artificial Sequence
  ENSG00000133020_48 (sequence is synthesized)
cagcatgagctggaggaggccgaggaacgggctgacattgctgagtcccaggtcaacaaattgcgagtgaagagccgagaggttcacacaaaaatcagtgcagagtaaacacacctgcct

SEQ ID NO: 302012 - DNA, 120 bp, Artificial Sequence
  ENSG00000133020_49 (sequence is synthesized)
gatgctatcaagaggctgaagaaaggcacaaaatgtgctatttttggtcacttgctttatgacgtttattttcctgttaaagctgaataaataaaaactacagtaaatgtatacattaaa

SEQ ID NO: 302013 - DNA, 120 bp, Artificial Sequence
  ENSG00000133026_0 (sequence is synthesized)
agcagtgctaaaggagcccggcggaggcagcggtgggtttgggactgaggcgctggatctgtggtcgcggctggggacgtgcgcccgcgccaccatcttcggctgaagaggcaattgctt

SEQ ID NO: 302014 - DNA, 120 bp, Artificial Sequence
  ENSG00000133026_1 (sequence is synthesized)
ttggatcgttccatttacaatggcgcagagaactggactcgaggatccagagaggtatctctttgtggacagggctgtcatctacaaccctgccactcaagctgattggacagctaaaaa

SEQ ID NO: 302015 - DNA, 120 bp, Artificial Sequence
  ENSG00000133026_2 (sequence is synthesized)
gctagtgtggattccatcagaacgccatggttttgaggcagctagtatcaaagaagaacggggagatgaagttatggtggagttggcagagaatggaaagaaagcaatggtcaacaaaga

SEQ ID NO: 302016 - DNA, 120 bp, Artificial Sequence
  ENSG00000133026_3 (sequence is synthesized)
tgatattcagaagatgaacccacctaagttttccaaggtggaggatatggcagaattgacatgcttgaatgaagcttccgttttacataatctgaaggatcgctactattcaggactaat

SEQ ID NO: 302017 - DNA, 120 bp, Artificial Sequence
  ENSG00000133026_4 (sequence is synthesized)
ctatacttattctggactcttctgtgtagttataaacccttacaagaatcttccaatttactctgagaatattattgaaatgtacagagggaagaagcgtcatgagatgcctccacacat

SEQ ID NO: 302018 - DNA, 120 bp, Artificial Sequence
  ENSG00000133026_5 (sequence is synthesized)
ctatgctatatctgaatctgcttacagatgcatgcttcaagatcgtgaggaccagtcaattctttgcacgggtgagtcaggtgctgggaagacagaaaatacaaagaaagttattcagta

SEQ ID NO: 302019 - DNA, 120 bp, Artificial Sequence
  ENSG00000133026_6 (sequence is synthesized)
ccttgcccatgttgcttcttcacataaaggaagaaaggaccataatattcctggggaacttgaacggcagcttttgcaagcaaatccaattctggaatcatttggaaatgcgaagactgt

SEQ ID NO: 302020 - DNA, 120 bp, Artificial Sequence
  ENSG00000133026_7 (sequence is synthesized)
gaaaaatgataactcatctcgttttggcaaatttattcggatcaactttgatgtaactggctatatcgttggggccaacattgaaacataccttctggaaaagtctcgtgctgttcgtca

SEQ ID NO: 302021 - DNA, 120 bp, Artificial Sequence
  ENSG00000133026_8 (sequence is synthesized)
agcaaaagatgaacgtacttttcatatcttttaccagttgttatctggagcaggagaacacctaaagtctgatttgcttcttgaaggatttaataactacaggtttctctccaatggcta

SEQ ID NO: 302022 - DNA, 120 bp, Artificial Sequence
  ENSG00000133026_9 (sequence is synthesized)
tattcctattccgggacagcaagacaaagataatttccaggagaccatggaagcaatgcacataatgggcttctcccatgaagagattctgtcaatgcttaaagtagtatcttcagtgct

SEQ ID NO: 302023 - DNA, 120 bp, Artificial Sequence
  ENSG00000133026_10 (sequence is synthesized)
acagtttggaaatatttctttcaaaaaggagagaaatactgatcaagcttccatgccagaaaatacagttgcgcagaagctctgccatcttcttgggatgaatgtgatggagtttactcg

SEQ ID NO: 302024 - DNA, 120 bp, Artificial Sequence
  ENSG00000133026_11 (sequence is synthesized)
ggccatcctgactccccggatcaaggtcggccgagactatgtgcaaaaagcccagaccaaagaacaggcagattttgcagtagaagcattggcaaaagctacctatgagcggctctttcg

SEQ ID NO: 302025 - DNA, 120 bp, Artificial Sequence
  ENSG00000133026_12 (sequence is synthesized)
ctggctcgttcatcgcatcaataaagctctggataggaccaaacgtcagggagcatctttcattggaatcctggatattgctggatttgaaatttttgagctgaactcctttgaacaact

SEQ ID NO: 302026 - DNA, 120 bp, Artificial Sequence
  ENSG00000133026_13 (sequence is synthesized)
ttgcatcaactacaccaatgagaagctgcagcagctgttcaaccacaccatgtttatcctagaacaagaggaataccagcgcgaaggcatcgagtggaacttcatcgatttcgggctgga

SEQ ID NO: 302027 - DNA, 120 bp, Artificial Sequence
  ENSG00000133026_14 (sequence is synthesized)
tctgcagccatgcatcgacctaatagagagacctgcgaaccctcctggtgtactggcccttttggatgaagaatgctggttccctaaagccacagataaaacctttgttgaaaaactggt

SEQ ID NO: 302028 - DNA, 120 bp, Artificial Sequence
  ENSG00000133026_15 (sequence is synthesized)
tcaagagcaaggttcccactccaagtttcagaaacctcgacaattaaaagacaaagctgatttttgcattatacattatgcagggaaggtggactataaggcagatgagtggctgatgaa

SEQ ID NO: 302029 - DNA, 120 bp, Artificial Sequence
  ENSG00000133026_16 (sequence is synthesized)
gaatatggaccccctgaatgacaacgtggccacccttttgcaccagtcatcagacagatttgtggcagagctttggaaagatgtggaccgtatcgtgggtctggatcaagtcactggtat

SEQ ID NO: 302030 - DNA, 120 bp, Artificial Sequence
  ENSG00000133026_17 (sequence is synthesized)
gactgagacagcttttggctccgcatataaaaccaagaagggcatgtttcgtaccgttgggcaactctacaaagaatctctcaccaagctgatggcaactctccgaaacaccaaccctaa

SEQ ID NO: 302031 - DNA, 120 bp, Artificial Sequence
  ENSG00000133026_18 (sequence is synthesized)
ctttgttcgttgtatcattccaaatcacgagaagagggctggaaaattggatccacacctagtcctagatcagcttcgctgtaacggtgtcctggaagggatccgaatctgtcgccaggg

SEQ ID NO: 302032 - DNA, 120 bp, Artificial Sequence
  ENSG00000133026_19 (sequence is synthesized)
cttccctaaccgaatagttttccaggaattcagacagagatatgagatcctaactccaaatgctattcctaaaggttttatggatggtaaacaggcctgtgaacgaatgatccgggcttt

SEQ ID NO: 302033 - DNA, 120 bp, Artificial Sequence
  ENSG00000133026_20 (sequence is synthesized)
agaattggacccaaacttgtacagaattggacagagcaagatatttttcagagctggagttctggcacacttagaggaagaaagagatttaaaaatcaccgatatcattatcttcttcca

SEQ ID NO: 302034 - DNA, 120 bp, Artificial Sequence
  ENSG00000133026_21 (sequence is synthesized)
ggccgtttgcagaggttacctggccagaaaggcctttgccaagaagcagcagcaactaagtgccttaaaggtcttgcagcggaactgtgccgcgtacctgaaattacggcactggcagtg

SEQ ID NO: 302035 - DNA, 120 bp, Artificial Sequence
  ENSG00000133026_22 (sequence is synthesized)
gtggcgagtcttcacaaaggtgaagccgcttctacaagtgactcgccaggaggaagaacttcaggccaaagatgaagagctgttgaaggtgaaggagaagcagacgaaggtggaaggaga

SEQ ID NO: 302036 - DNA, 120 bp, Artificial Sequence
  ENSG00000133026_23 (sequence is synthesized)
gctggaggagatggagcggaagcaccagcagcttttagaagagaagaatatccttgcagaacaactacaagcagagactgagctctttgctgaagcagaagagatgagggcaagacttgc

SEQ ID NO: 302037 - DNA, 120 bp, Artificial Sequence
  ENSG00000133026_24 (sequence is synthesized)
tgctaaaaagcaggaattagaagagattctacatgacttggagtctagggttgaagaagaagaagaaagaaaccaaatcctccaaaatgaaaagaaaaaaatgcaagcacatattcagga

SEQ ID NO: 302038 - DNA, 120 bp, Artificial Sequence
  ENSG00000133026_25 (sequence is synthesized)
cctggaagaacagctagacgaggaggaaggggctcggcaaaagctgcagctggaaaaggtgacagcagaggccaagatcaagaagatggaagaggagattctgcttctcgaggaccaaaa

SEQ ID NO: 302039 - DNA, 120 bp, Artificial Sequence
  ENSG00000133026_26 (sequence is synthesized)
ttccaagttcatcaaagaaaagaaactcatggaagatcgcattgctgagtgttcctctcagctggctgaagaggaagaaaaggcgaaaaacttggccaaaatcaggaataagcaagaagt

SEQ ID NO: 302040 - DNA, 120 bp, Artificial Sequence
  ENSG00000133026_27 (sequence is synthesized)
gatgatctcagatttagaagaacgcttaaagaaggaagaaaagactcgtcaggaactggaaaaggccaaaagaaaactcgacggggagacgaccgacctgcaggaccagatcgcagagct

SEQ ID NO: 302041 - DNA, 120 bp, Artificial Sequence
  ENSG00000133026_28 (sequence is synthesized)
gcaggcgcagattgatgagctcaagctgcagctggccaagaaggaggaggagctgcagggcgcactggccagaggtgatgatgaaacactccataagaacaatgcccttaaagttgtgcg

SEQ ID NO: 302042 - DNA, 120 bp, Artificial Sequence
  ENSG00000133026_29 (sequence is synthesized)
agagctacaagcccaaattgctgaacttcaggaagactttgaatccgagaaggcttcacggaacaaggccgaaaagcagaaaagggacttgagtgaggaactggaagctctgaaaacaga

SEQ ID NO: 302043 - DNA, 120 bp, Artificial Sequence
  ENSG00000133026_30 (sequence is synthesized)
gctggaggacacgctggacaccacggcagcccagcaggaactacgtacaaaacgtgaacaagaagtggcagagctgaagaaagctcttgaggaggaaactaagaaccatgaagctcaaat

SEQ ID NO: 302044 - DNA, 120 bp, Artificial Sequence
  ENSG00000133026_31 (sequence is synthesized)
cctggagacagataacaaggagctggcgtgtgaggtgaaggtcctgcagcaggtcaaggctgagtctgagcacaagaggaagaagctcgacgcgcaggtccaggagctccatgccaaggt

SEQ ID NO: 302045 - DNA, 120 bp, Artificial Sequence
  ENSG00000133026_32 (sequence is synthesized)
ctctgaaggcgacaggctcagggtggagctggcggagaaagcaagtaagctgcagaatgagctagataatgtctccacccttctggaagaagcagagaagaagggtattaaatttgctaa

SEQ ID NO: 302046 - DNA, 120 bp, Artificial Sequence
  ENSG00000133026_33 (sequence is synthesized)
ggatgcagctagtcttgagtctcaactacaggatacacaggagcttcttcaggaggagacacgccagaaactaaacctgagcagtcggatccggcagctggaagaggagaagaacagtct

SEQ ID NO: 302047 - DNA, 120 bp, Artificial Sequence
  ENSG00000133026_34 (sequence is synthesized)
tcaggagcagcaggaggaggaggaggaggccaggaagaacctggagaagcaagtgctggccctgcagtcccagttggctgataccaagaagaaagtagatgacgacctgggaacaattga

SEQ ID NO: 302048 - DNA, 120 bp, Artificial Sequence
  ENSG00000133026_35 (sequence is synthesized)
aagtctggaagaagccaagaagaagcttctgaaggacgcggaggccctgagccagcgcctggaggagaaggcactggcgtatgacaaactggagaagaccaagaaccgcctgcagcagga

SEQ ID NO: 302049 - DNA, 120 bp, Artificial Sequence
  ENSG00000133026_36 (sequence is synthesized)
gctggacgacctcacggtggacctggaccaccagcgccaggtcgcctccaacttggagaagaagcagaagaagtttgaccagctgttagcagaagagaagagcatctctgctcgctatgc

SEQ ID NO: 302050 - DNA, 120 bp, Artificial Sequence
  ENSG00000133026_37 (sequence is synthesized)
cgaagagcgggaccgggccgaagccgaggccagagagaaagaaaccaaagccctgtcactggcccgggccctcgaggaagccctggaggccaaggaggagtttgagaggcagaacaagca

SEQ ID NO: 302051 - DNA, 120 bp, Artificial Sequence
  ENSG00000133026_38 (sequence is synthesized)
gctccgagcagacatggaagacctcatgagctccaaagatgatgtgggaaaaaacgttcacgaacttgaaaaatccaaacgggccctagagcagcaggtggaggaaatgaggacccagct

SEQ ID NO: 302052 - DNA, 120 bp, Artificial Sequence
  ENSG00000133026_39 (sequence is synthesized)
ggaggagctggaagacgaactccaggccacggaagatgccaagcttcgtctggaggtcaacatgcaggccatgaaggcgcagttcgagagagacctgcaaaccagggatgagcagaatga

SEQ ID NO: 302053 - DNA, 120 bp, Artificial Sequence
  ENSG00000133026_40 (sequence is synthesized)
agagaagaagcggctgctgatcaaacaggtgcgggagctcgaggcggagctggaggatgagaggaaacagcgggcgcttgctgtagcttcaaagaaaaagatggagatagacctgaagga

SEQ ID NO: 302054 - DNA, 120 bp, Artificial Sequence
  ENSG00000133026_41 (sequence is synthesized)
cctcgaagcccaaatcgaggctgcgaacaaagctcgggatgaggtgattaagcagctccgcaagctccaggctcagatgaaggattaccaacgtgaattagaagaagctcgtgcatccag

SEQ ID NO: 302055 - DNA, 120 bp, Artificial Sequence
  ENSG00000133026_42 (sequence is synthesized)
agatgagatttttgctcaatccaaagagagtgaaaagaaattgaagagtctggaagcagaaatccttcaattgcaggaggaacttgcctcatctgagcgagcccgccgacacgccgagca

SEQ ID NO: 302056 - DNA, 120 bp, Artificial Sequence
  ENSG00000133026_43 (sequence is synthesized)
ggagagagatgagctggcggacgagatcaccaacagcgcctctggcaagtccgcgctgctggatgagaagcggcgtctggaagctcggatcgcacagctggaggaggagctggaagagga

SEQ ID NO: 302057 - DNA, 120 bp, Artificial Sequence
  ENSG00000133026_44 (sequence is synthesized)
gcagagcaacatggagctgctcaacgaccgcttccgcaagaccactctacaggtggacacactgaacgccgagctagcagccgagcgcagcgccgcccagaagagtgacaatgcacgcca

SEQ ID NO: 302058 - DNA, 120 bp, Artificial Sequence
  ENSG00000133026_45 (sequence is synthesized)
gcaactggagcggcagaacaaggagctgaaggccaagctgcaggaactcgagggtgctgtcaagtctaagttcaaggccaccatctcagccctggaggccaagattgggcagctggagga

SEQ ID NO: 302059 - DNA, 120 bp, Artificial Sequence
  ENSG00000133026_46 (sequence is synthesized)
gcagcttgagcaggaagccaaggaacgagcagccgccaacaaattagtccgtcgcactgagaagaagctgaaagaaatcttcatgcaggttgaggatgagcgtcgacacgcggaccagta

SEQ ID NO: 302060 - DNA, 120 bp, Artificial Sequence
  ENSG00000133026_47 (sequence is synthesized)
taaagagcagatggagaaggccaacgctcggatgaagcagcttaaacgccagctggaggaagcagaagaagaagcgacgcgtgccaacgcatctcggcgtaaactccagcgggaactgga

SEQ ID NO: 302061 - DNA, 120 bp, Artificial Sequence
  ENSG00000133026_48 (sequence is synthesized)
tgatgccaccgaggccaacgagggcctgagccgcgaggtcagcaccctgaagaaccggctgaggcggggtggccccatcagcttctcttccagccgatctggccggcgccagctgcacct

SEQ ID NO: 302062 - DNA, 120 bp, Artificial Sequence
  ENSG00000133026_49 (sequence is synthesized)
tgaaggagcttccctggagctctccgacgatgacacagaaagtaagaccagtgatgtcaacgagacgcagccaccccagtcagagtaaagttgcaggaagccagaggaggcaatacagtg

SEQ ID NO: 302063 - DNA, 120 bp, Artificial Sequence
  ENSG00000133026_50 (sequence is synthesized)
ggacagttaggaatgcacccggggcctcctgcagatttcggaaattggcaagctacgggattccttcctgaaagatcaactgtgtcttaaggctctccagcctatgcatactgtatcctg

SEQ ID NO: 302064 - DNA, 120 bp, Artificial Sequence
  ENSG00000133026_51 (sequence is synthesized)
cttcagacttaggtacaattgctcccctttttatatatagacacacacaggacacatatattaaacagattgtttcatcattgcatctattttccatatagtcatcaagagaccatttta

SEQ ID NO: 302065 - DNA, 120 bp, Artificial Sequence
  ENSG00000133026_52 (sequence is synthesized)
taaaacatggtaagaccctttttaaaacaaactccaggcccttggttgcgggtcgctgggttattggggcagcgccgtggtcgtcactcagtcgctctgcatgctctctgtcatacagac

SEQ ID NO: 302066 - DNA, 120 bp, Artificial Sequence
  ENSG00000133026_53 (sequence is synthesized)
aggtaacctagttctgtgttcacgtggcccccgactcctcagccacatcaagtctcctagaccactgtggactctaaactgcacttgtctctctcatttccttcaaataatgatcaatgc

SEQ ID NO: 302067 - DNA, 120 bp, Artificial Sequence
  ENSG00000133026_54 (sequence is synthesized)
tatttcagtgagcaaactgtgaaaggggctttggaaagagtaggaggggtgggctggatcggaagcaacacccatttggggttaccatgtccatcccccaaggggggccctgcccctcga

SEQ ID NO: 302068 - DNA, 120 bp, Artificial Sequence
  ENSG00000133026_55 (sequence is synthesized)
gtcgatggtgtcccgcatctactcatgtgaactggccttggcgagggctggtctgtgcatagaagggatagtggccacactgcagctgaggccccaggtggcagccatggatcatgtaga

SEQ ID NO: 302069 - DNA, 120 bp, Artificial Sequence
  ENSG00000133026_56 (sequence is synthesized)
cttccagatggtctcccgaaccgcctggctctgccggcgccctcctcacgtcaggagcaagcagccgtggacccctaagccgagctggtggaaggcccctccccatcgccagccgggccc

SEQ ID NO: 302070 - DNA, 120 bp, Artificial Sequence
  ENSG00000133026_57 (sequence is synthesized)
tcatgctgaccttgcaaattcagccgctgctttgagcccaaaatgggaatattggttttgtgtccgaggcttgttccaagtttgtcaatgaggtttatggagcctccagaacagatgcca

SEQ ID NO: 302071 - DNA, 120 bp, Artificial Sequence
  ENSG00000133026_58 (sequence is synthesized)
tcttcctgaatgttgacatgccagtgggtgtgactccttcatttttccttctcccttccctttggacagtgttacagtgaacacttagcatcctgtttttggttggtagttaagcaaact

SEQ ID NO: 302072 - DNA, 120 bp, Artificial Sequence
  ENSG00000133026_59 (sequence is synthesized)
gacattacggaaagtgccttagacactacagtactaagacaatgttgaatatatcattcgcctctataacaatttaatgtattcagttttgactgtgcttcatatcatgtacctctctag

SEQ ID NO: 302073 - DNA, 120 bp, Artificial Sequence
  ENSG00000133026_60 (sequence is synthesized)
tcaaagtggtattacagacattcagtgacaatgaatcagtgttaattctaaatccttgatcctctgcaatgtgcttgaaaacacaaaccttttgggttaaaagctttaacatctattagg

SEQ ID NO: 302074 - DNA, 120 bp, Artificial Sequence
  ENSG00000133026_61 (sequence is synthesized)
aagaatttgtcctgtgggtttggaatcttggattttccccctttatgaactgtactggctgttgaccaccagacacctgaccgcaaatatcttttcttgtattcccatatttctagacaa

SEQ ID NO: 302075 - DNA, 120 bp, Artificial Sequence
  ENSG00000133026_62 (sequence is synthesized)
tgatttttgtaagacaataaatttattcattatagatatttgcgcctgctctgtttacttgaagaaaaaagcacccgtggagaataaagagacctcaataaacaagaataatcatgtgaa

SEQ ID NO: 302076 - DNA, 120 bp, Artificial Sequence
  ENSG00000133026_63 (sequence is synthesized)
ccttgcccatgttgcttcttcacataaaggaagaaaggaccataatattcctcaggaatcgcctaaaccagtgaaacaccagggggaacttgaacggcagcttttgcaagcaaatccaat

SEQ ID NO: 302077 - DNA, 120 bp, Artificial Sequence
  ENSG00000133026_64 (sequence is synthesized)
ctgaggcgctggatctgtggtcgcggctggggacgtgcgcccgcgccaccatcttcggctgaagtaactgagggcaaacccatcagacaaccagagccataatttgtggtcaccgctgaa

SEQ ID NO: 302078 - DNA, 120 bp, Artificial Sequence
  ENSG00000133026_65 (sequence is synthesized)
gagcccatggggctgagtttcagcagactttgttatgttcgggagcattcaaaaaccctgggagagtgagatggggtttgcttgctgtttggtgtgacctgagaaagtgaaaagcccagg

SEQ ID NO: 302079 - DNA, 120 bp, Artificial Sequence
  ENSG00000133026_66 (sequence is synthesized)
cgtacagaatttgtgtcaggacagcaagaaagtctcataaaccatctcaatatttatactttaaaatgacaaattatattatgaaacccttggaaattcacaccagaacaaattatttca

SEQ ID NO: 302080 - DNA, 120 bp, Artificial Sequence
  ENSG00000133026_67 (sequence is synthesized)
ttcacaccagaacaaattatttcactataacaaatgttttggtctctgtacattacagattaactgtagtatgttttatttattttttttttttgaatggagtctcactctgtcacccag

SEQ ID NO: 302081 - DNA, 120 bp, Artificial Sequence
  ENSG00000133026_68 (sequence is synthesized)
ggtcggccacgtgtcgtttcctcctggcagagctcttgcttttgttcgtttggtttaaaataatcttatttaaaggcatttaaatgtgatacatgtttatatcaaaattggaaaaaggga

SEQ ID NO: 302082 - DNA, 120 bp, Artificial Sequence
  ENSG00000133026_69 (sequence is synthesized)
aaacttctgaatgactgggatctcactactttcttttattaataatttctaattttattatgttatagtccaggaaaatagcctattctgttgctacttttttgaaatgtatcacagcct

SEQ ID NO: 302083 - DNA, 120 bp, Artificial Sequence
  ENSG00000133026_70 (sequence is synthesized)
gttttcttcttttttctttttgtttgaggcaatatataagatccattattgtaactaattcatggatacttgttgtcttcttagtttattagtgttcatatccagtatgtacttacttat

SEQ ID NO: 302084 - DNA, 120 bp, Artificial Sequence
  ENSG00000133026_71 (sequence is synthesized)
gctggtgtgtgttggtgtggagctgtcaaagcactacagtatcctgccatataagtgtgtggctgttagttcccggcttgtgcagtgcctaagtatgctgactgccttacctatatggca

SEQ ID NO: 302085 - DNA, 120 bp, Artificial Sequence
  ENSG00000133026_72 (sequence is synthesized)
tctcctgtcatttgttccacaaagcttgtgctgctgcactttcactgtgtcttttctttccctgctaacgagtgaggtttggcttatatttgttttctcctttcttctccccagtggacc

SEQ ID NO: 302086 - DNA, 120 bp, Artificial Sequence
  ENSG00000133027_0 (sequence is synthesized)
ggcgaggagaggcacaccactattgttttaatttgcttttacctgattcctggcagacttctgcgttatgacccggctgctgggctacgtggaccccctggatcccagctttgtggctgc

SEQ ID NO: 302087 - DNA, 120 bp, Artificial Sequence
  ENSG00000133027_1 (sequence is synthesized)
cgtcatcaccatcaccttcaatccgctctactggaatgtggttgcacgatgggaacacaagacccgcaagctgagcagggccttcggatccccctacctggcctgctactctctaagcgt

SEQ ID NO: 302088 - DNA, 120 bp, Artificial Sequence
  ENSG00000133027_2 (sequence is synthesized)
caccatcctgctcctgaacttcctgcgctcgcactgcttcacgcaggccatgctgagccagcccaggatggagagcctggacacccccgcggcctacagcctgggcctcgcgctcctggg

SEQ ID NO: 302089 - DNA, 120 bp, Artificial Sequence
  ENSG00000133027_3 (sequence is synthesized)
ttcctaggtgattacttcgggatcctcaaggaggcgagagtgaccgtgttccccttcaacatcctggacaaccccatgtactggggaagcacagccaactacctgggctgggccatcatg

SEQ ID NO: 302090 - DNA, 120 bp, Artificial Sequence
  ENSG00000133027_4 (sequence is synthesized)
cacgccagccccacgggcctgctcctgacggtgctggtggccctcacctacatagtggctctcctatacgaagagcccttcaccgctgagatctaccggcagaaagcctccgggtcccac

SEQ ID NO: 302091 - DNA, 120 bp, Artificial Sequence
  ENSG00000133027_5 (sequence is synthesized)
aagaggagctgattgagctgcaacagctttgctgaaggcctggccagcctcctggcctgccccaagtggcaggccctgcgcagggcgagaatggtgcctgctgctcagggctcgcccccg

SEQ ID NO: 302092 - DNA, 120 bp, Artificial Sequence
  ENSG00000133027_6 (sequence is synthesized)
gcgtgggctgccccagtgccttggaacctgctgccttggggaccctggacgtgccgacatatggccattgagctccaacccacacattcccattcaccaataaaggcaccctgaccccaa

SEQ ID NO: 302093 - DNA, 120 bp, Artificial Sequence
  ENSG00000133027_7 (sequence is synthesized)
ctgaccacagagcgctgctcccgagaaccctgcacccctcaatggagtaaattaccataaagcctcttccttacccatgctttggggtgttaacagctgaggctattcgtcggtgacctg

SEQ ID NO: 302094 - DNA, 120 bp, Artificial Sequence
  ENSG00000133027_8 (sequence is synthesized)
cccggctctataggtccggttccgggggcgcgtggctgcagcggggcccgcgtggtgcctcctgaggcggcccccggatgaagagatctgggaacccgggagccgaggcagacttctgcg

SEQ ID NO: 302095 - DNA, 120 bp, Artificial Sequence
  ENSG00000133027_9 (sequence is synthesized)
acttacccggctctataggtccggttccgggggcgcgtggctgcagcggggcccgcgtggtgcctcctgaggcggcccccggatgaagagatctgggaacccgggagccgaggtaacgaa

SEQ ID NO: 302096 - DNA, 120 bp, Artificial Sequence
  ENSG00000133027_10 (sequence is synthesized)
agtcacgggatggaactgtgctccagcgcacatcggaattgcctggagtctcccagggctccctctgggtcttctgaggggagaggctcctgtgtgctctggtgtggcgggcacagccag

SEQ ID NO: 302097 - DNA, 120 bp, Artificial Sequence
  ENSG00000133028_0 (sequence is synthesized)
caaaggagacccggtctccgaggctcatggcgatgctggtcctagtacccggacgagttatgcggcctctgggtggccaactttggcgcttcttgcctcgcggactcgagttttggggcc

SEQ ID NO: 302098 - DNA, 120 bp, Artificial Sequence
  ENSG00000133028_1 (sequence is synthesized)
cagccgaggggactgcgagagtcttgctgaggcagttctgcgcgcggcaagcggaggcgtggcgtgcctcggggcgccctggctattgcctgggaacccggcccctcagcactgcgaggc

SEQ ID NO: 302099 - DNA, 120 bp, Artificial Sequence
  ENSG00000133028_2 (sequence is synthesized)
cgccacccccgtggtcgcagaagggccccggagactccacgcgcccctcgaagcccgggcctgtttcctggaagtctttagcaatcacatttgctattggaggagctttactggctggaa

SEQ ID NO: 302100 - DNA, 120 bp, Artificial Sequence
  ENSG00000133028_3 (sequence is synthesized)
tgaagcacgtcaagaaagaaaaggcagagaagttagagaaggaacggcagcgacacatcggcaagcctttacttgggggaccgttttccctcacaactcatactggggagcgtaaaactg

SEQ ID NO: 302101 - DNA, 120 bp, Artificial Sequence
  ENSG00000133028_4 (sequence is synthesized)
acaaggactacttgggtcagtggttattgatttattttggcttcactcattgccctgatgtctgtccagaagaactagaaaagatgattcaagtcgtggatgaaatagatagcattacaa

SEQ ID NO: 302102 - DNA, 120 bp, Artificial Sequence
  ENSG00000133028_5 (sequence is synthesized)
ctctgccagatctaactccacttttcatcagcattgacccagagagggacacaaaagaagccatcgcaaattatgtgaaagaattttctcccaaactggttggcttgactggcacgagag

SEQ ID NO: 302103 - DNA, 120 bp, Artificial Sequence
  ENSG00000133028_6 (sequence is synthesized)
aagaggtcgatcaagtggccagagcatacagagtgtattacagccctggccccaaggacgaagatgaagactacatagtggatcacacaataataatgtacttgattggaccagatggtg

SEQ ID NO: 302104 - DNA, 120 bp, Artificial Sequence
  ENSG00000133028_7 (sequence is synthesized)
agtttctagattattttggccagaacaagaggaagggagaaatagctgcttcaattgccacacacatgaggccatacagaaaaaagagctagccaaagcagtgttgctggatgcagtatt

SEQ ID NO: 302105 - DNA, 120 bp, Artificial Sequence
  ENSG00000133028_8 (sequence is synthesized)
ctcttgctaagaggaaggaaactgtctcgcataggagcctatataaatataaacatatatacgtgcactctacagaatggccttcataccatgagaacatttctgttttggatggggatg

SEQ ID NO: 302106 - DNA, 120 bp, Artificial Sequence
  ENSG00000133028_9 (sequence is synthesized)
ttacccttgcgttcaaccaaaattgattcttggaactgtaaagattacaacccaaagtctcccaggaagctgtggggagaccagaggatcaagctgaagtgaagccagtgaagagcccac

SEQ ID NO: 302107 - DNA, 120 bp, Artificial Sequence
  ENSG00000133028_10 (sequence is synthesized)
ctgtggaaggacatggcggggcgaggcacagccagtgcattcctgcctgcgaacaggccctcccagcagctttgccgcctctccatcgtcttgggcccttgctcaaatagctgtgggact

SEQ ID NO: 302108 - DNA, 120 bp, Artificial Sequence
  ENSG00000133028_11 (sequence is synthesized)
gaatttcacagaaaagaatataatttccatagtgctcttgcttgcctcttcttgagttctttgctcttctgagttcttggtggctaataacagtcagattagggtctctgccattcagag

SEQ ID NO: 302109 - DNA, 120 bp, Artificial Sequence
  ENSG00000133028_12 (sequence is synthesized)
ttgatgcttgaaaactttagttttccttattaatgaatatcactatcagatttgactaatgaagaggaaatctattgtttgggggaaaaaaaacatcagtttgatttctctaggggttct

SEQ ID NO: 302110 - DNA, 120 bp, Artificial Sequence
  ENSG00000133028_13 (sequence is synthesized)
tttatgtgatttttagctaagtggtgtgccaggttttcagtgacataccaaatggaaataagaggatattgatcacgagtgtgatgctgagtacctttctgcatatactggattgtactt

SEQ ID NO: 302111 - DNA, 120 bp, Artificial Sequence
  ENSG00000133028_14 (sequence is synthesized)
tgtgtaaagtaaacatactcagttttgctgttcagacaagcgtgatctttttcatgggtgatgagtgggtacatagatggctgcacacagttctcaggaaagagacccacaggctccagc

SEQ ID NO: 302112 - DNA, 120 bp, Artificial Sequence
  ENSG00000133028_15 (sequence is synthesized)
gggcaggtgggtgggacgcttgctgaagtgcagttccccagacccagagctgaattcactgaatctgcagtatgatgcagagacctgcttccatgacagataccccaggtgactcggatg

SEQ ID NO: 302113 - DNA, 120 bp, Artificial Sequence
  ENSG00000133028_16 (sequence is synthesized)
ctggcggactgggaccatcccttaagaaagtgttttttggggaaataacttgcctggcacaatggctaatgcctataatcccaaaactttgggaggccagggcctgaggattgctagagg

SEQ ID NO: 302114 - DNA, 120 bp, Artificial Sequence
  ENSG00000133028_17 (sequence is synthesized)
gacaagcctgggcaacatagtgagaccccccccccccgcccccatctctacagaagatttttttggcatggtggcacatgcctgtagtcctggctactcaggagactgaaatggagtatc

SEQ ID NO: 302115 - DNA, 88 bp, Artificial Sequence
  ENSG00000133028_18 (sequence is synthesized)
tggtggcacatgcctgtagtcctggctactcaggagactgaaatggagtatcacttgagcccaggaattcaaggcttcagtgagctat

SEQ ID NO: 302116 - DNA, 120 bp, Artificial Sequence
  ENSG00000133028_19 (sequence is synthesized)
attaaaatgaatttaaaaataaataaatttgacccttcttttggtgtgtcagccattgaagaaaatgattattgagtgatagaatgaatcttggcttttgtttctaaatttaactgccct

SEQ ID NO: 302117 - DNA, 120 bp, Artificial Sequence
  ENSG00000133028_20 (sequence is synthesized)
agaatcctgggtttggcctttttctgccagaagctgctgccctaggggcaaagttctccaaaagtttttcagtaaatcctaagatgcaacaaatataatgcctagatagacaacagattc

SEQ ID NO: 302118 - DNA, 120 bp, Artificial Sequence
  ENSG00000133028_21 (sequence is synthesized)
tttttacatgatatgtttctacacgcacatgatagaggtcttttggtttttaaattctcaatacttaaacctaaatatatcaaagtaaaagtatgtgaaaaaaaactatgctagttatag

SEQ ID NO: 302119 - DNA, 120 bp, Artificial Sequence
  ENSG00000133028_22 (sequence is synthesized)
gttgaataatgtcccccaaaatttatacattgaagccctaatctcagtacttcagaatgtgactgtaattggagatagggtctttagagagatagttaaattaaaatgaggctgctaggt

SEQ ID NO: 302120 - DNA, 83 bp, Artificial Sequence
  ENSG00000133028_23 (sequence is synthesized)
tctttagagagatagttaaattaaaatgaggctgctaggttggccctaattctatatgactggtgttcttaaaataatagatt

SEQ ID NO: 302121 - DNA, 74 bp, Artificial Sequence
  ENSG00000133028_24 (sequence is synthesized)
ttgcgccattaggagacacagtgagacgaccatgagaagccagagagaaaacagccatcttacaagccaagaga

SEQ ID NO: 302122 - DNA, 120 bp, Artificial Sequence
  ENSG00000133028_25 (sequence is synthesized)
agaagccagagagaaaacagccatcttacaagccaagagagaagttgtgagaaaaaaaaaaaaaaacaaaccctgctgactccttgatttttgccttccaagctccagaactgtgaggaa

SEQ ID NO: 302123 - DNA, 120 bp, Artificial Sequence
  ENSG00000133028_26 (sequence is synthesized)
ataaatgtctgttgttttagccaccaaacctggtaaggcagtcctagcaagctaatacaatagcctgttccttaataaacaactgcaagatttagtttatagaaaccagctcggaagcag

SEQ ID NO: 302124 - DNA, 120 bp, Artificial Sequence
  ENSG00000133028_27 (sequence is synthesized)
ttggtttagaatgactttcctaggaatctggtcaagaaaggaacttactaaaagactattctcatttaacaaaagagatattaagtatctcaaaggccaaatctttaaaaagattatctg

SEQ ID NO: 302125 - DNA, 120 bp, Artificial Sequence
  ENSG00000133028_28 (sequence is synthesized)
ttttaagccacaaaacatttgtgtggatccctttgcagcaagtttgctcttagataagattcagtcttcgttctcagctgttgcaggttaaggcttgtgaaatgatccaaaaagggaaca

SEQ ID NO: 302126 - DNA, 120 bp, Artificial Sequence
  ENSG00000133028_29 (sequence is synthesized)
gcagcttttggagaaaacttttatttgttcttcattctagtgtcaagtttaaaggcttgaagtcagaatgttagaagtggggaaggggaccttagaggtgacgtcttccagatgttcctg

SEQ ID NO: 302127 - DNA, 120 bp, Artificial Sequence
  ENSG00000133028_30 (sequence is synthesized)
tttatgcacaaggggacagtctcggagaattaaggcgcaaaactcgggtcccaatttctaggtaggttcctgtttgttctgctgctatcgtgcgcttatggtgactgtgtgaatccaacc

SEQ ID NO: 302128 - DNA, 120 bp, Artificial Sequence
  ENSG00000133028_31 (sequence is synthesized)
atccaaccaaaacggaggttccgtatgccagtggggcaacgtttttcagctgcaaatcttgggaaatcaaaagcaaggctgttttttttttcttttcttttttgagacagagtttcactc

SEQ ID NO: 302129 - DNA, 120 bp, Artificial Sequence
  ENSG00000133028_32 (sequence is synthesized)
gccaccacgcccggcctcaaggctgtgtttcagtgaaatatcccttgcaaatctttacctgggtgggttacagtgttttcactagactcttcaatagaattaatattttaagaaatgcca

SEQ ID NO: 302130 - DNA, 120 bp, Artificial Sequence
  ENSG00000133028_33 (sequence is synthesized)
cttgtttatttgaaaagtataagaatcctatcaatgcagtaggcatgaatgtattcatgtgtctggctgttcatgaagcagctgatatcttaagtgtaagaggtgagatttactgactac

SEQ ID NO: 302131 - DNA, 120 bp, Artificial Sequence
  ENSG00000133028_34 (sequence is synthesized)
cagtaaaatatgcgagttgggaggctaatgattttaaattgtaaatgcgtctgcataagatcctttaaaatagcttttattgttcttaaatttatgtttaaaagaaattgacattaatat

SEQ ID NO: 302132 - DNA, 120 bp, Artificial Sequence
  ENSG00000133028_35 (sequence is synthesized)
tttcaaatcatccataatctcccaaaccttttttggttttctgtttagtaccatttaaatctttgtgtatgtgtatatgagctacctttaaaagagcagtcacccatgcgagcatttgtt

SEQ ID NO: 302133 - DNA, 120 bp, Artificial Sequence
  ENSG00000133028_36 (sequence is synthesized)
cgcccggcctagtttgtgctttttacttaccagttaggggttatattactgtgtaacaaaatggacggttatttctattcattaacaagattcaagtaatagcctctttagccacatatt

SEQ ID NO: 302134 - DNA, 120 bp, Artificial Sequence
  ENSG00000133028_37 (sequence is synthesized)
ccttaataacacctttagaccttataggggtaattattttctatatacttttccaatgtatttgaaagtttgttggctcttcttccgtaattatactatatcctcagtaaagaaagtttg

SEQ ID NO: 302135 - DNA, 120 bp, Artificial Sequence
  ENSG00000133028_38 (sequence is synthesized)
gcatacagaaaagttgaaggaagaaaattttcaatcactgttgttccactaccaagaaataatacttggaggtatttcctttcaatcttcaacatgaggatgctaatgtccccctcataa

SEQ ID NO: 302136 - DNA, 120 bp, Artificial Sequence
  ENSG00000133028_39 (sequence is synthesized)
ggggccttaaagtcactgactctgtgcactatttcatgagaacattgatgtgggtatttaaccgaaagaaaacttgagttttctttttttcctttttattgtgaaaatttggaaacttat

SEQ ID NO: 302137 - DNA, 120 bp, Artificial Sequence
  ENSG00000133028_40 (sequence is synthesized)
tcaaaaagtagaatagttaactaattgatgtacccatcagcaagcttcagtgattaccaccatttaattttgtctgcacccccccacccactgccaccccagcccattcccagcatgtgc

SEQ ID NO: 302138 - DNA, 81 bp, Artificial Sequence
  ENSG00000133028_41 (sequence is synthesized)
cccccacccactgccaccccagcccattcccagcatgtgcctctgaaagagaccaactttgtcctttaaaaacaaccacag

SEQ ID NO: 302139 - DNA, 120 bp, Artificial Sequence
  ENSG00000133028_42 (sequence is synthesized)
atcagcacagcaaaaaggtttttgtttttgctcttggattttgtcgtttggtttttgcttaatatcaaatatccagtcagtgtaaactcgtttataatttggtcctttgatttcaaggag

SEQ ID NO: 302140 - DNA, 120 bp, Artificial Sequence
  ENSG00000133028_43 (sequence is synthesized)
ctatgatgcagttcgttgtggggatgtgttgtctccatgtcatacatgtgactttgtccatgtttgcacccagttcaaggaagacacaaccctagggaaagacaaccctccccgccaagc

SEQ ID NO: 302141 - DNA, 120 bp, Artificial Sequence
  ENSG00000133028_44 (sequence is synthesized)
ctctcttcccattcttaaacatagggtggcgttattcaggttggaccagtttaaaaagactaacgcatttgtcctcgttgttgggtgttttttttctttaaatttgtaaaacaggaataa

SEQ ID NO: 302142 - DNA, 120 bp, Artificial Sequence
  ENSG00000133028_45 (sequence is synthesized)
ttgtgttaggatgaagtatgatactaggagaacagggaaaactaacccatcgtgttaaaagtcagaatagtgcttaactctggcaggaggtgagatggttagtaattcagaagggggtgc

SEQ ID NO: 302143 - DNA, 120 bp, Artificial Sequence
  ENSG00000133028_46 (sequence is synthesized)
caggagagcttccagagccattgaaatgttcagtagcttgatctgggtgatgatttacatacataaaaacatattaaactttgaacttaagatttatgccttttactgtttgcaccctat

SEQ ID NO: 302144 - DNA, 120 bp, Artificial Sequence
  ENSG00000133028_47 (sequence is synthesized)
aactccaaaagaaaagtagaggggaaaaagagtccctgcaaaaggcagtcttgaaagaaagcaagtctgtgatgtggagaatgcattggacagctctcagcaatttgctgtagcttgggc

SEQ ID NO: 302145 - DNA, 120 bp, Artificial Sequence
  ENSG00000133028_48 (sequence is synthesized)
agagagataaaagctaatgccagcatcaggttgcccaggcgagagaaggcctgaaagaagacagcgtggagaaagtgtcagcaagcttcagcaacagcaggaggcagatggtaggagagt

SEQ ID NO: 302146 - DNA, 120 bp, Artificial Sequence
  ENSG00000133028_49 (sequence is synthesized)
gggcctcaggtgtggtgtggcagagcagagtagccacacttaggccccagagacagtgtcttctcaccctcagttgaaggggcaggaaatcaatcgctctagtcacccctaagctggagg

SEQ ID NO: 302147 - DNA, 120 bp, Artificial Sequence
  ENSG00000133028_50 (sequence is synthesized)
acggacctaaagttgccacagctttgagaggcaaagaagtttgctcagtggcttttagagacttctagggccctgggaccctgacactgaggaggagcaaactgaaggggagagtgggca

SEQ ID NO: 302148 - DNA, 120 bp, Artificial Sequence
  ENSG00000133028_51 (sequence is synthesized)
cattccttgttggctgctgtggtgagcagcagctggtcgttgtcagtcaagctccggaccactctgatgatgctcactgcattttgatggagtaagccagggacattaccactgtgtttg

SEQ ID NO: 302149 - DNA, 120 bp, Artificial Sequence
  ENSG00000133028_52 (sequence is synthesized)
agccatctgaagtattcctgggtgggtctgcagttggcagcccgtgatcctttttccattcaaggatgatgcaaaggtaaggggccaaggctgagctctgtagatgcctgtgagagcctc

SEQ ID NO: 302150 - DNA, 120 bp, Artificial Sequence
  ENSG00000133028_53 (sequence is synthesized)
ctggtctcaagaggtcataccaagggccttggccaccaaggtttcgtgaggaccttgaggtggtttcgccatcacaatgtcagacgtgtcacacaccatctggtatgtcctcactgtata

SEQ ID NO: 302151 - DNA, 120 bp, Artificial Sequence
  ENSG00000133028_54 (sequence is synthesized)
gaggaagaagggcccaagtggtgaattatctacaagtttgtagcaaagctaatactcagactccctctacagccttgctactcagtgtagtctgtggtccggcagtgtcacaccactggg

SEQ ID NO: 302152 - DNA, 120 bp, Artificial Sequence
  ENSG00000133028_55 (sequence is synthesized)
gtgtagtctgtggtccggcagtgtcacaccactggggtacttagcagaaatgcagcttctcaggctccactccagctctcctcaatcacagtctgtttttttgtttgtttgtttgtttgt

SEQ ID NO: 302153 - DNA, 120 bp, Artificial Sequence
  ENSG00000133028_56 (sequence is synthesized)
atgtgagccaccacgcctggcccacagtctgtattttaacaagatccccacctcagtcttaggcacatggattctcctcaacccccaataccacagagtctattaatttttacccaatag

SEQ ID NO: 302154 - DNA, 120 bp, Artificial Sequence
  ENSG00000133028_57 (sequence is synthesized)
ggaaggggaaaaagtcaagaaagaataatgaattaagtaatctttccccctccaggaagctctttatttaatttcgctcccatgaaacacaatttgaagagtctctcaaataaacaaatt

SEQ ID NO: 302155 - DNA, 120 bp, Artificial Sequence
  ENSG00000133028_58 (sequence is synthesized)
ccattttctgataattatttaattgccccacttttgaaatttttgtcaaagacgactgtcactccctgtcagaacttctattcagcacagtataccaagcgtttctccatcgagttgtta

SEQ ID NO: 302156 - DNA, 120 bp, Artificial Sequence
  ENSG00000133028_59 (sequence is synthesized)
taatatgatcaaaaagcagggagagatgctgcttggttaccctgtggggccttatcggggctcagtgcagtctttccatgtaggcattctcaaatactcaattgaaacctgattgaggat

SEQ ID NO: 302157 - DNA, 120 bp, Artificial Sequence
  ENSG00000133028_60 (sequence is synthesized)
catttgatctctgttggccctagtgcagtaggctgctgagaaccactgatgcaatagactgagagactaactgcctgcttccctgtcagcccaggctctgctaaggccgtcttagttaca

SEQ ID NO: 302158 - DNA, 120 bp, Artificial Sequence
  ENSG00000133028_61 (sequence is synthesized)
gaagaaagtggggcagagagccctgcaaggattacattccattcctaacggagacaggcaagcgttcagtgcccgaagcagggcaggcctttgtatggctcacttttccctgtaccagcc

SEQ ID NO: 302159 - DNA, 120 bp, Artificial Sequence
  ENSG00000133028_62 (sequence is synthesized)
tcagccccgtacattcagaaagccctgtcgggaacgtgcgggatcacagcacaagacagtcattcactgattgattgacgacgtcaacattgcggaatacctatgttaagctgagtacga

SEQ ID NO: 302160 - DNA, 120 bp, Artificial Sequence
  ENSG00000133028_63 (sequence is synthesized)
agctgagtacgagggatataaaaagtaggccctggagagtgcctctgggatgcacataaccagacaagataaagaaaaggcagatcacgagatcaagagatcgagatcatcctggccaac

SEQ ID NO: 302161 - DNA, 75 bp, Artificial Sequence
  ENSG00000133028_64 (sequence is synthesized)
ggcagcttttagacatgaggccccaaagtgccaactagtgcacctaaacttcaactctcttttgagtgttttatg

SEQ ID NO: 302162 - DNA, 120 bp, Artificial Sequence
  ENSG00000133028_65 (sequence is synthesized)
tagtgcacctaaacttcaactctcttttgagtgttttatgtatctactcagcatccagttgtaaatatgcaaaaatcaatgcctactgtatttaaaaattactaaattcacaataaccac

SEQ ID NO: 302163 - DNA, 120 bp, Artificial Sequence
  ENSG00000133028_66 (sequence is synthesized)
acagaatctataataaatagaatcaatgtaataatgactcagatccaggggaagaaaattataaaattttggaaaaaatgatgagctattaattaagaaaatagtttgttccttggtgag

SEQ ID NO: 302164 - DNA, 120 bp, Artificial Sequence
  ENSG00000133028_67 (sequence is synthesized)
aagactcaatgtaaatatgtcagttttctcctgacttaagtcttcaacacaggcctaataatattgcagtggcaaatgattgccaggggcaggaggggatttggggaagtggtaaaaatg

SEQ ID NO: 302165 - DNA, 120 bp, Artificial Sequence
  ENSG00000133028_68 (sequence is synthesized)
atctgtgtcttggtagtggtcgctgcacaactgcatacatctgtgaaaactcactgaactgcgcactttaaaagggtgaattgtaatatacatacctcaataaaccttacttaaaaatta

SEQ ID NO: 302166 - DNA, 120 bp, Artificial Sequence
  ENSG00000133028_69 (sequence is synthesized)
ccttttttgttgttttttagctttttgttttgaaacaactttagatttaccaaaaaattgcaaagatagcataggttctacatacctttcacccagcttcccctaatattaacatcttgt

SEQ ID NO: 302167 - DNA, 120 bp, Artificial Sequence
  ENSG00000133028_70 (sequence is synthesized)
ggtgtgaatacggactaattggaactctctttcagatagcattacaactctgccagatctaactccacttttcatcagcattgacccagagagggacacaaaagaagccatcgcaaatta

SEQ ID NO: 302168 - DNA, 120 bp, Artificial Sequence
  ENSG00000133028_71 (sequence is synthesized)
acaaagaacgaaaaacctacgaatgctcttggcctcattaacaaggaacataagcagttccagatgaggaacccataacaaacttcaaataacgaaactgtagggagcaagggagtccgt

SEQ ID NO: 302169 - DNA, 120 bp, Artificial Sequence
  ENSG00000133028_72 (sequence is synthesized)
gagagtattttaagaaactgggacccaggaagactaagttaacggatgggatatcatgctgtctatatttctttacacactgctatgctttattaattaggttacattataatgttaaat

SEQ ID NO: 302170 - DNA, 120 bp, Artificial Sequence
  ENSG00000133028_73 (sequence is synthesized)
gactatttcaatcgcaatgggtcggtttctatttcaaagatgtaaaggagtcaacattctggcacttcctcttggccggcaggacgaggttgacaaagtcggccagacaagcctgtttcc

SEQ ID NO: 302171 - DNA, 120 bp, Artificial Sequence
  ENSG00000133030_0 (sequence is synthesized)
atgtcggcagccaaggagaacccgtgcaggaaattccaggccaacatcttcaacaagagcaagtgtcagaactgcttcaagccccgcgagtcgcatctgctcaacgacgaggacctgacg

SEQ ID NO: 302172 - DNA, 120 bp, Artificial Sequence
  ENSG00000133030_1 (sequence is synthesized)
caggcaaaacccatttatggcggttggctgctcctggctccagatgggaccgactttgacaacccagtgcaccggtctcggaaatggcagcgacggttcttcatcctttacgagcacggc

SEQ ID NO: 302173 - DNA, 120 bp, Artificial Sequence
  ENSG00000133030_2 (sequence is synthesized)
ctcttgcgctacgccctggatgagatgcccacgacccttcctcagggcaccatcaacatgaaccagtgcacagatgtggtggatggggagggccgcacgggccagaagttctccctgtgt

SEQ ID NO: 302174 - DNA, 120 bp, Artificial Sequence
  ENSG00000133030_3 (sequence is synthesized)
attctgacgcctgagaaggagcatttcatccgggcggagaccaaggagatcgtcagtgggtggctggagatgctcatggtctatccccggaccaacaagcagaatcagaagaagaaacgg

SEQ ID NO: 302175 - DNA, 120 bp, Artificial Sequence
  ENSG00000133030_4 (sequence is synthesized)
ctatccccggaccaacaagcagaatcagaagaagaaacggaaagtggagccccccacaccacaggagcctgggcctgccaaggtggctgttaccagcagcagcagcagcagcagcagcag

SEQ ID NO: 302176 - DNA, 120 bp, Artificial Sequence
  ENSG00000133030_5 (sequence is synthesized)
tccacactctggcaggaagaaatgaggaccaaggaccagccagatggcagcagcctgagtccagctcagagtcccagccagagccagcctcctgctgccagctccctgcgggaacctggg

SEQ ID NO: 302177 - DNA, 120 bp, Artificial Sequence
  ENSG00000133030_6 (sequence is synthesized)
ctagagagcaaagaagaggagagcgccatgagtagcgaccgcatggactgtggccgcaaagtccgggtggagagcggctacttctctctggagaagaccaaacaggacttgaaggctgaa

SEQ ID NO: 302178 - DNA, 120 bp, Artificial Sequence
  ENSG00000133030_7 (sequence is synthesized)
gaacagcagctgcccccgccgctctcccctcccagccccagcacccccaaccacaggaggtcccaggtgattgaaaagtttgaggccttggacattgagaaggcagagcacatggagacc

SEQ ID NO: 302179 - DNA, 120 bp, Artificial Sequence
  ENSG00000133030_8 (sequence is synthesized)
aatgcagtggggccctcaccatccagcgacacacgccagggccgcagcgagaagagggcgttccctaggaagcgggacttcaccaatgaagcccccccagctcctctcccagacgcctcg

SEQ ID NO: 302180 - DNA, 120 bp, Artificial Sequence
  ENSG00000133030_9 (sequence is synthesized)
gcttcccccctgtctccacaccgaagagccaagtcactggacaggaggtccacggagccctccgtgacgcccgacctgctgaatttcaagaaaggctggctgactaagcagtatgaggac

SEQ ID NO: 302181 - DNA, 120 bp, Artificial Sequence
  ENSG00000133030_10 (sequence is synthesized)
ggccagtggaagaaacactggtttgtcctcgccgatcaaagcctgagatactacagggattcagtggctgaggaggcagccgacttggatggagaaattgacttgtccgcatgttacgat

SEQ ID NO: 302182 - DNA, 120 bp, Artificial Sequence
  ENSG00000133030_11 (sequence is synthesized)
gtcacagagtatccagttcagagaaactatggcttccagatacatacaaaggagggcgagtttaccctgtcggccatgacatctgggattcggcggaactggatccagaccatcatgaag

SEQ ID NO: 302183 - DNA, 120 bp, Artificial Sequence
  ENSG00000133030_12 (sequence is synthesized)
cacgtgcacccgaccactgccccggatgtgaccagctcgttgccagaggaaaaaaacaagagcagctgctcttttgagacctgcccgaggcctactgagaagcaagaggcagagctgggg

SEQ ID NO: 302184 - DNA, 120 bp, Artificial Sequence
  ENSG00000133030_13 (sequence is synthesized)
gagccggaccctgagcagaagaggagccgcgcacgggagcggaggcgagagggccgctccaagacctttgactgggctgagttccgtcccatccagcaggccctggctcaggagcgggtg

SEQ ID NO: 302185 - DNA, 120 bp, Artificial Sequence
  ENSG00000133030_14 (sequence is synthesized)
ggcggcgtggggcctgctgacacccacgagcccctgcgccctgaggcggagcctggggagctggagcgggagcgtgcacggaggcgggaggagcgccgcaagcgcttcgggatgctcgac

SEQ ID NO: 302186 - DNA, 120 bp, Artificial Sequence
  ENSG00000133030_15 (sequence is synthesized)
gccacagacgggccaggcactgaggatgcagccctgcgcatggaggtggaccggagcccagggctgcctatgagcgacctcaaaacgcataacgtccacgtggagattgagcagcggtgg

SEQ ID NO: 302187 - DNA, 120 bp, Artificial Sequence
  ENSG00000133030_16 (sequence is synthesized)
gtggagaccacacctctccgggaagagaagcaggtgcccatcgcccccgtccacctgtcttctgaagatgggggtgaccggctctccacacacgagctgacctctctgctcgagaaggag

SEQ ID NO: 302188 - DNA, 120 bp, Artificial Sequence
  ENSG00000133030_17 (sequence is synthesized)
ctggagcagagccagaaggaggcctcagaccttctggagcagaaccggctcctgcaggaccagctgagggtggccctgggccgggagcagagcgcccgtgagggctacgtgctgcaggcc

SEQ ID NO: 302189 - DNA, 120 bp, Artificial Sequence
  ENSG00000133030_18 (sequence is synthesized)
acgtgcgagcgagggtttgcagcaatggaagaaacgcaccagaagaagattgaagatctccagaggcagcaccagcgggagctagagaaacttcgagaagagaaagaccgcctcctagcc

SEQ ID NO: 302190 - DNA, 120 bp, Artificial Sequence
  ENSG00000133030_19 (sequence is synthesized)
gaggagacagcggccaccatctcagccatcgaagccatgaagaacgcccaccgggaggaaatggagcgggagctggagaagagccagcggtcccagatcagcagcgtcaactcggatgtt

SEQ ID NO: 302191 - DNA, 120 bp, Artificial Sequence
  ENSG00000133030_20 (sequence is synthesized)
gaggccctgcggcgccagtacctggaggagctgcagtcggtgcagcgggaactggaggtcctctcggagcagtactcgcagaagtgcctggagaatgcccatctggcccaggcgctggag

SEQ ID NO: 302192 - DNA, 120 bp, Artificial Sequence
  ENSG00000133030_21 (sequence is synthesized)
gccgagcggcaggccctgcggcagtgccagcgtgagaaccaggagctcaatgcccacaaccaggagctgaacaaccgcctggctgcagagatcacacggttgcggacgctgctgactggg

SEQ ID NO: 302193 - DNA, 120 bp, Artificial Sequence
  ENSG00000133030_22 (sequence is synthesized)
gacggcggtggggaggccactgggtcaccccttgcacagggcaaggatgcctatgaactagaggtcttattgcgggtaaaggaatcggaaatacagtacctgaaacaggagattagctcc

SEQ ID NO: 302194 - DNA, 120 bp, Artificial Sequence
  ENSG00000133030_23 (sequence is synthesized)
ctcaaggatgagctgcagacggcactgcgggacaagaagtacgcaagtgacaagtacaaagacatctacacagagctcagcatcgcgaaggctaaggctgactgtgacatcagcaggttg

SEQ ID NO: 302195 - DNA, 120 bp, Artificial Sequence
  ENSG00000133030_24 (sequence is synthesized)
aaggagcagctcaaggctgcaacggaagcactgggggagaagtcccctgacagtgccacggtgtccggatatgatataatgaaatctaaaagcaaccctgacttcttgaagaaagacaga

SEQ ID NO: 302196 - DNA, 120 bp, Artificial Sequence
  ENSG00000133030_25 (sequence is synthesized)
tcctgtgtcacccggcaactcagaaacatcaggtccaagtccgtaattgagcaggtctcgtgggatacctgaaatgcacccgcttcccggcccatgcaggagagtctgaaggaaggcctg

SEQ ID NO: 302197 - DNA, 120 bp, Artificial Sequence
  ENSG00000133030_26 (sequence is synthesized)
acggtgcaagaacggttgaagctctttgaatccagggacttgaagaaagactaggtgtgtcccatccaagttgagcacgcgccttccccagcttgcagcagcacaccccaagcgctgctt

SEQ ID NO: 302198 - DNA, 120 bp, Artificial Sequence
  ENSG00000133030_27 (sequence is synthesized)
ttcacctgtacctttgttttattattattattattattgctgttgttgtcatcgttaactgtgggcatggaatgcgtgaggctggcttctgggttgtccacaccactctctgctgtgttg

SEQ ID NO: 302199 - DNA, 120 bp, Artificial Sequence
  ENSG00000133030_28 (sequence is synthesized)
acttcctgttgtcttcatcaaagcttttttccgtggtattctaaaattaggccagcagtgggggctgggagggcatctgtgttagtcctttcctggctgtgacccgccacactcactgtc

SEQ ID NO: 302200 - DNA, 120 bp, Artificial Sequence
  ENSG00000133030_29 (sequence is synthesized)
agtattaaggcccagcagcctgttgataagctaccctgtctcaccatgtgctggtgtggaaacggggcccagccagcacgcctcaaggtagatggaatccccactggtcagagaaaaagc

SEQ ID NO: 302201 - DNA, 120 bp, Artificial Sequence
  ENSG00000133030_30 (sequence is synthesized)
tatgcggacactccagcttggcctgggtcacagcactgactcctcacccgctagtctggctgttaagaggagaaagtgcactgccttccagcccaggaggaggacagcattttgtatttg

SEQ ID NO: 302202 - DNA, 120 bp, Artificial Sequence
  ENSG00000133030_31 (sequence is synthesized)
ttccactgatgcagcttagaaccacacccctgagagtcgtggcaaacctttcacaacctggaaaatgttgaaagcaaccattcctatttttgtttgttttttattaaatcttgcacaaaa

SEQ ID NO: 302203 - DNA, 120 bp, Artificial Sequence
  ENSG00000133030_32 (sequence is synthesized)
cgagattgttgacctgcagcccaggtttcagactctgattgcaaaaaacaaatgaattccccccaggaatcattcaaaatgggggaaggtttgggggtttgggttttttttttacctttt

SEQ ID NO: 302204 - DNA, 120 bp, Artificial Sequence
  ENSG00000133030_33 (sequence is synthesized)
ggaaaagaaaccgtcacattgctttggaaaaggttgagaggagacccctgttaagtcaagaagaaagtacagaggatgtcagaatctgatgagaacagcacattagtgtttattgagact

SEQ ID NO: 302205 - DNA, 120 bp, Artificial Sequence
  ENSG00000133030_34 (sequence is synthesized)
ccgatcttaactctcatttaattaatctgagctctgaaaacctatcttgcagcatttatctttaaaagagcctggttaaagtaaacctatactaacaattttgctttttctaacagtttg

SEQ ID NO: 302206 - DNA, 120 bp, Artificial Sequence
  ENSG00000133030_35 (sequence is synthesized)
aggaagacctttttaaccaccacaaaacattctatggcaattcttgaaaatctcttaaattggagtctattatggccccatgaaaaccattaatcccattaagatagggagtataaaccc

SEQ ID NO: 302207 - DNA, 120 bp, Artificial Sequence
  ENSG00000133030_36 (sequence is synthesized)
ctggctggtggaacaggttctgctactttaggagcaaggtggggtgtgagtagatggttttcatgccaagaacatgctttcactttgtattcatgcttgtgttggtgtgatggtctctgt

SEQ ID NO: 302208 - DNA, 120 bp, Artificial Sequence
  ENSG00000133030_37 (sequence is synthesized)
gggtgggtggatgctttgggcgttgaaatctagaaatcctgttgctcagtttctagatgaagtcatgagcaaggccatcagtggagctctggccccgcccccaatgtgcagaagggccgg

SEQ ID NO: 302209 - DNA, 120 bp, Artificial Sequence
  ENSG00000133030_38 (sequence is synthesized)
gagcaaggcctggagttttcatgtgttttcagacccaggtttaggtgctctcttctcactgaaataactaagtgctctccactggcatcgagccctttccacaagtttttaaggctctta

SEQ ID NO: 302210 - DNA, 120 bp, Artificial Sequence
  ENSG00000133030_39 (sequence is synthesized)
acccacactttcactcctctgctactagtcttcagtgttgttaacagcaagagaaaattgggtttgtttaaaaatctacttctctgaggtggcacagttgcgtagctgtagtcccagcta

SEQ ID NO: 302211 - DNA, 79 bp, Artificial Sequence
  ENSG00000133030_40 (sequence is synthesized)
gtcgaggctgcaatcagtcgccccatatcagatatagatatacttatcagaccccccctgaccatttagattggcagtg

SEQ ID NO: 302212 - DNA, 120 bp, Artificial Sequence
  ENSG00000133030_41 (sequence is synthesized)
atacttatcagaccccccctgaccatttagattggcagtgctttgagaaatgcactatgacctttctgtgtcaatgggaatatacagaaggaacattcgggaccccgctgtcccccacag

SEQ ID NO: 302213 - DNA, 120 bp, Artificial Sequence
  ENSG00000133030_42 (sequence is synthesized)
cctcattgttgtctccaggacactgctgggtcacacgaatgctccaggacagacagggacctggagtgcatcaggatctgaccagataggagtttttgcctcgtgtctgggtgctacgat

SEQ ID NO: 302214 - DNA, 120 bp, Artificial Sequence
  ENSG00000133030_43 (sequence is synthesized)
tttgtgccgttctctgaggtccaccacctgcccttcctggcatggtttccttcgtgaccatccctgctgcccctgggggtggaccccactggcccttctgcagacagctccctgccttct

SEQ ID NO: 302215 - DNA, 120 bp, Artificial Sequence
  ENSG00000133030_44 (sequence is synthesized)
aggatcatctgccttcagccctcacagtgctttaaattaaagcaagtttgcccataggacaaaagagcatttgattcccttttttctgtcacatatcccttgaggctggacttcaggaat

SEQ ID NO: 302216 - DNA, 120 bp, Artificial Sequence
  ENSG00000133030_45 (sequence is synthesized)
cctggaaaattaatatgagtgcagcatgtgaggggtcagagacaggccagcagggcgtctgcattcctccctgccacaggtctctccccagaggctggtttagtgtagggtattgccagg

SEQ ID NO: 302217 - DNA, 120 bp, Artificial Sequence
  ENSG00000133030_46 (sequence is synthesized)
aaacggactgaggctgctttgctaagagctcctgaaaatgccctgggcctgtcctggcgtttctgaagagccctcatacagggacagccaccatctgggtcaaggaagtctgggttccct

SEQ ID NO: 302218 - DNA, 120 bp, Artificial Sequence
  ENSG00000133030_47 (sequence is synthesized)
gctggtgggctccatcctgcgatggagtgaaccaggcgagaaaggatgacgatgttcttcatgttgcacctggacatgccccaggaacagagacttgcccaggtggcaacactggcacag

SEQ ID NO: 302219 - DNA, 120 bp, Artificial Sequence
  ENSG00000133030_48 (sequence is synthesized)
atgttgacggctgcccaactggtgccacactgagcagggagccttgtgctgcacagggctgggccctctctccagtttccttcctgcaggcatccaaataccctggaagggatttaaccc

SEQ ID NO: 302220 - DNA, 120 bp, Artificial Sequence
  ENSG00000133030_49 (sequence is synthesized)
ctgaattccagagggaagaaagaagaacagtgaagaagtagaactggtttctgtatggggagaggaaagtcttagggacagctgcaggcggggtctcaggctgctccttggcaccagcta

SEQ ID NO: 302221 - DNA, 120 bp, Artificial Sequence
  ENSG00000133030_50 (sequence is synthesized)
cacagtagtgagctttcccagctttaccgatgaggaagaagttcaaatagatagacttcagcattttaattattttcctataaatgtatttatgtgtagtatgctagcaccagccagtaa

SEQ ID NO: 302222 - DNA, 120 bp, Artificial Sequence
  ENSG00000133030_51 (sequence is synthesized)
gctgtgccacacatatgaatgggaaagcgaggcagttgtgctcgtgtgagtttctgcaggcttgtgggtaattaccttgtgtgcacgcctgcacgtgcagaatagtcactttctgctggt

SEQ ID NO: 302223 - DNA, 120 bp, Artificial Sequence
  ENSG00000133030_52 (sequence is synthesized)
cagtttctttatccacccatggtgccccagccccaggcaggtgtggagaccagcatttcagaggacgcgctgtccacagcctcccgggtctgagtggatcattgggcaggggtggagaca

SEQ ID NO: 302224 - DNA, 120 bp, Artificial Sequence
  ENSG00000133030_53 (sequence is synthesized)
gtgcgctgccctctgagctggaagcctgtgcttcagggagtcataatgggcctgtgctaagtgggtgatgcagtggacatcccagggcgactagaggtggcagtatcgcgaatttgcagg

SEQ ID NO: 302225 - DNA, 120 bp, Artificial Sequence
  ENSG00000133030_54 (sequence is synthesized)
tttattgaacaagaggtaacatcggagaggatcttgccttcggattcagcaagtatgaaggcagaagagcatggagagcaaggccccacagcctgcttagtgagttggaaggcccagcaa

SEQ ID NO: 302226 - DNA, 120 bp, Artificial Sequence
  ENSG00000133030_55 (sequence is synthesized)
gaacctgtttctgcagcagccaccagctcccatcaccccttgaccctccagctcatgctggagaagagggaattttggctgtttaaagaacacagttgtgaatctcagaatgtgcctgaa

SEQ ID NO: 302227 - DNA, 120 bp, Artificial Sequence
  ENSG00000133030_56 (sequence is synthesized)
aggaatactgacagataaggccggaaacaaaactgatggcttgaaaaacatttttatggaatgtatttactatcattttgttttactatagaggtagatgggactcttaacttttgggta

SEQ ID NO: 302228 - DNA, 120 bp, Artificial Sequence
  ENSG00000133030_57 (sequence is synthesized)
catggaaacatgctgaaaactgaacacaatcctgatcatcactcctgcctggctgtctcctgggaggctgccgggtgccacggagctgggacacagcagagcccgctaggtgttgcaggg

SEQ ID NO: 302229 - DNA, 120 bp, Artificial Sequence
  ENSG00000133030_58 (sequence is synthesized)
ccctggaggccaaggccaccctgtgtggggtccctgttggcagccaggtccctacacaaacaagtaatcctgtttggcctcctaggttttgcatatgacctgcagcctaatttggggtgt

SEQ ID NO: 302230 - DNA, 120 bp, Artificial Sequence
  ENSG00000133030_59 (sequence is synthesized)
aggggaagctctgctggcccctgctcctttgtatgttgggtgactttaatggctggccacatacccctttctcccagctactcattcactgacttgggtaagttctaagacagttcgcac

SEQ ID NO: 302231 - DNA, 120 bp, Artificial Sequence
  ENSG00000133030_60 (sequence is synthesized)
ttagaaaagaatgtgacacatcaacattaacttttcctgaaaagaagagtttgcctaacatggtcctaaagaagcttggaatttataagactttcctttataagatatagtgggggtttt

SEQ ID NO: 302232 - DNA, 85 bp, Artificial Sequence
  ENSG00000133030_61 (sequence is synthesized)
atttataagactttcctttataagatatagtgggggtttttttgggtggaggggggttgttttttgttttttgttttcatagtgg

SEQ ID NO: 302233 - DNA, 75 bp, Artificial Sequence
  ENSG00000133030_62 (sequence is synthesized)
gatacggtaaaaaaaaaaaactgtgacccctttgtcactaagggagaaagaaattaagtattgtcaaagttctat

SEQ ID NO: 302234 - DNA, 120 bp, Artificial Sequence
  ENSG00000133030_63 (sequence is synthesized)
cactaagggagaaagaaattaagtattgtcaaagttctataaagaatggaaatgtatgatattatacttcaaaggaatttgatgttgaaattttaaagaaaatttgtcatgttgatgaga

SEQ ID NO: 302235 - DNA, 120 bp, Artificial Sequence
  ENSG00000133030_64 (sequence is synthesized)
agcttcactttcctgggaacttcattcgttttagggcatgagataaaagtcctggctaggggagccataggtctgttgtacaaggaatttgctttctaaacaagttgtaacttgccctaa

SEQ ID NO: 302236 - DNA, 120 bp, Artificial Sequence
  ENSG00000133030_65 (sequence is synthesized)
ggtccctgttggagcactaagaggtgacacaggccagagacaacgtttcgtttccccttccctgcaagctgggatcagccctgtgttttctcctttcagctgaagtgagcgaaggttctc

SEQ ID NO: 302237 - DNA, 120 bp, Artificial Sequence
  ENSG00000133030_66 (sequence is synthesized)
agtgctggcaaaagagcccactttctaaaaggacttgggaagaaagctgctgggaacttgcttattaaaaagttccttagaattaaggtatctacccactgttttcgcacctttcacctt

SEQ ID NO: 302238 - DNA, 120 bp, Artificial Sequence
  ENSG00000133030_67 (sequence is synthesized)
cctgggctttcctgccctccagcattcttctctagagaggttcctagcccgctcagcgcgagcgtctccagtaggtaatagcagctgaacgtgggttttccacggacttcaggcttggag

SEQ ID NO: 302239 - DNA, 120 bp, Artificial Sequence
  ENSG00000133030_68 (sequence is synthesized)
gtgccatatacaagcacacttcttccttcccctggcttctccatgccaccacccactttaaagatgtaaactcagtagatttttcatccagtgaacggtcatcttcacatcgaaaggtga

SEQ ID NO: 302240 - DNA, 120 bp, Artificial Sequence
  ENSG00000133030_69 (sequence is synthesized)
aggccaccactgttctcaatgccaagcaacagaacgttctgagatggccgttcttccttgcacagcagctacggcaggttgttctgcagccaccccttagagggggctcttcgttttacc

SEQ ID NO: 302241 - DNA, 120 bp, Artificial Sequence
  ENSG00000133030_70 (sequence is synthesized)
tttgtacagttcttgtgtttacacatttgggccaaacagctttcagcaagggcatgtgtccacagctgatgggcagttaagaaccagcctgagctgaaggctagtaataccgtgctgtag

SEQ ID NO: 302242 - DNA, 120 bp, Artificial Sequence
  ENSG00000133030_71 (sequence is synthesized)
gctctttaaaaggaaagcctggcataaacccagcatggaaaggaacattatcagttatctcaaattttgtctgccagggacaagaccctgttcattcttttgcccttttcagaactgtga

SEQ ID NO: 302243 - DNA, 120 bp, Artificial Sequence
  ENSG00000133030_72 (sequence is synthesized)
gcttcaagtattcttgcttctctgtaaagggaagacatctcccttctctgaaatccttcaacaaaagaaaaggctcttggcagggtaggggagtcagtagctcaacactagatcatccct

SEQ ID NO: 302244 - DNA, 120 bp, Artificial Sequence
  ENSG00000133030_73 (sequence is synthesized)
agagatggggcaagtttctgtctgaacacgtcttgggtccgagtccttaggtgttcggatgcagtactttgtgaatacttaagctactgcatgcttggtgtagcttgcaatttctctgta

SEQ ID NO: 302245 - DNA, 120 bp, Artificial Sequence
  ENSG00000133030_74 (sequence is synthesized)
tttaaaagcagctgtgtttattttcttcaaaataacctgtatattatttagagcaagcaatgtaaatattactgagaagttactgcagggatttttgtgacagagtttgtatgggttttt

SEQ ID NO: 302246 - DNA, 120 bp, Artificial Sequence
  ENSG00000133030_75 (sequence is synthesized)
aaaaaaatcttagacacccctttttaagatggggagaacagggttgactgcaccgttgaagcccgcccagcattataaggaaatgtttttaatgactgctgcatctttgtaaaacgtttg

SEQ ID NO: 302247 - DNA, 120 bp, Artificial Sequence
  ENSG00000133030_76 (sequence is synthesized)
gtcatctaacagatggttttaaagtgtacaatatccaaaataacgatagccctgtatccatacattgtttcattgaaagaattctctattgcctcttcttggtagagccagagtccttaa

SEQ ID NO: 302248 - DNA, 120 bp, Artificial Sequence
  ENSG00000133030_77 (sequence is synthesized)
ggaaaatcaggaaaattaagaaaatgatggtgccatcttgaccagacttctgcacagtaatttaacgctatcctagggagacttggttgaaggcacagttctgggatcagggtctaaatg

SEQ ID NO: 302249 - DNA, 120 bp, Artificial Sequence
  ENSG00000133030_78 (sequence is synthesized)
tgcagtttctgagaaccttcaagaccactcactgggcagggctctgtggagcactggagctgtttggattccccagccctttggtcatatcctggaattccgtggaggctgcagaactta

SEQ ID NO: 302250 - DNA, 120 bp, Artificial Sequence
  ENSG00000133030_79 (sequence is synthesized)
gatgcagctgttttttacagcacctatttttgtcagattggtaaggaaacactgagtcacagaatacttaagaattggagactccagtaatgtaggatggcctgagaggacgtccaagtc

SEQ ID NO: 302251 - DNA, 120 bp, Artificial Sequence
  ENSG00000133030_80 (sequence is synthesized)
ccaaggggtggacacggcatgttcctcgggcacagcctcagtgggggccttccccaggcgcagctcggccacctgaggaaagggtgtttcggaggcgcagccacacacacagcgctggca

SEQ ID NO: 302252 - DNA, 120 bp, Artificial Sequence
  ENSG00000133030_81 (sequence is synthesized)
gcctcacggtcacgcccatcactccctgccccccactgcccttgagaagttagtggtgtcacatccttagttttatagacagctaggaatagattgtgaagaacactcagttcactactg

SEQ ID NO: 302253 - DNA, 120 bp, Artificial Sequence
  ENSG00000133030_82 (sequence is synthesized)
tgttacatttatatcacaagcttcaattaaaatggattttaaaggattttaggatttacctttagtattaacaacgtatctactgacatactgttaggattcaaaaccagttaagtataa

SEQ ID NO: 302254 - DNA, 120 bp, Artificial Sequence
  ENSG00000133030_83 (sequence is synthesized)
gaattacttcatgtggttttcctagggtacaatttataaaaggtagaaagcatccaagtggctcctcaacaattacaattcttaatgatttttctcacagctgtgcccttctgtcagggt

SEQ ID NO: 302255 - DNA, 120 bp, Artificial Sequence
  ENSG00000133030_84 (sequence is synthesized)
cagtgtcaaaattcgttatcaaaggcaaaacctactgtgccaagctggggcgctatatgtgaacggagtggaaatgcttcagtcacctctgccgcagcttgtgattccagcagttctcac

SEQ ID NO: 302256 - DNA, 120 bp, Artificial Sequence
  ENSG00000133030_85 (sequence is synthesized)
aaacgttctgtcacatgatgaaaagaagcagcttgtataattccaactggtgtttcatttctgttctaatgctaagtggtaacgcttaacaaacagactaaaagctgtgtgcagaagaaa

SEQ ID NO: 302257 - DNA, 120 bp, Artificial Sequence
  ENSG00000133030_86 (sequence is synthesized)
gggctgaatgagtaccgcctccctaggttccagcacagcgctcgggtctaagaagtagagccccggggtagggtgggccatccactgtcaggccagtgtctcaagaaagcctgaccagct

SEQ ID NO: 302258 - DNA, 120 bp, Artificial Sequence
  ENSG00000133030_87 (sequence is synthesized)
gagctgctgctttttttttgggggggggggggggaggggcgtcttgaggctttttttttttttacaaagttagtttgtgatcaacgattcactacaattgaagtgttactttgtcagaat

SEQ ID NO: 302259 - DNA, 120 bp, Artificial Sequence
  ENSG00000133030_88 (sequence is synthesized)
atttattcctttgtgtgacatgctagattccctggatgtagctgatcatttttattttgtaaatattacctaactttacataaactatatcataataaactatttttgcatcaccctttg

SEQ ID NO: 302260 - DNA, 120 bp, Artificial Sequence
  ENSG00000133030_89 (sequence is synthesized)
cccagccccagcacccccaaccacaggtacagttgccccgagtcgccctcccaggagctcggtggtcctcttccttccccaggtcctcgactcccccaccaaatggtctgcagcatctcc

SEQ ID NO: 302261 - DNA, 120 bp, Artificial Sequence
  ENSG00000133030_90 (sequence is synthesized)
ctcagctccctggatgtggccagccagccacctgcctacgtggactctggcagcactagggggcgggggacagagagactggggagcgcctttgcctttaaagccagcaggcaatatgcc

SEQ ID NO: 302262 - DNA, 120 bp, Artificial Sequence
  ENSG00000133030_91 (sequence is synthesized)
accctggccgacgtccctaaggccatcaggatcagccaccgagaagccttccaggtggagagaaggcggctggagcgtagaactcgggcccggagccctggcagggaggaggtggcccgt

SEQ ID NO: 302263 - DNA, 120 bp, Artificial Sequence
  ENSG00000133030_92 (sequence is synthesized)
cagaggctccatagagtcaaccaagaccttcaaagtgagcttgaagcccagtgccagcgccaggagctgattacacaccagattcagaccctgaagcgtagctatggggaggccaaggac

SEQ ID NO: 302264 - DNA, 120 bp, Artificial Sequence
  ENSG00000133030_93 (sequence is synthesized)
acgatccggcaccacgaggctgagatccggagccttcaggcacggctcagcaatgcggccgctgagctagccatcaaggagcaggcgctggccaagctcaagggcgacctgaagcgggag

SEQ ID NO: 302265 - DNA, 120 bp, Artificial Sequence
  ENSG00000133030_94 (sequence is synthesized)
cagggccgggtccgcgagcagctggaggagcggcaacacagcgaggcggcgctgagcagccagctgagggctagcgagcagaagctcaagagtgctgaggccctgctgctggagaagacg

SEQ ID NO: 302266 - DNA, 120 bp, Artificial Sequence
  ENSG00000133030_95 (sequence is synthesized)
caggagctacggggcctggagacacagcaggcgctgcagcgggaccggcagaaggaggtccagaggctgcaggagcgcattgccgacctcagccagcaactgggcgccagtgagcaggcg

SEQ ID NO: 302267 - DNA, 120 bp, Artificial Sequence
  ENSG00000133030_96 (sequence is synthesized)
cagcggctgatggaggagaagctgcagagaaactatgagctgctgctggagagctgtgagaaggagaagcaggcattgctgcagaacctaaaggaagtggaagacaaggccagcgcctat

SEQ ID NO: 302268 - DNA, 120 bp, Artificial Sequence
  ENSG00000133030_97 (sequence is synthesized)
gaggaccagctgcagggtcaggcacagcaggtggagaccctgcagaaggagaagctgagcgccactttcgagggcagtgagcaggtgcaccagctggaggagcagctggaggcacgagag

SEQ ID NO: 302269 - DNA, 120 bp, Artificial Sequence
  ENSG00000133030_98 (sequence is synthesized)
gccagcgtgcgcaggctcgcagagcacgtgcagagcctctgtgacgagcgggacctcctcagacagcggttccaggagctgacagagcgcgtggccacgtccgacgaggatgtggctgag

SEQ ID NO: 302270 - DNA, 120 bp, Artificial Sequence
  ENSG00000133030_99 (sequence is synthesized)
ctccgggaaaagctgaggagaagagaggctgacaaccagagcctggagcactcctaccagagggtctccagccagctgcagagcatgcacactctgctgagagagaaggaggaagagctg

SEQ ID NO: 302271 - DNA, 120 bp, Artificial Sequence
  ENSG00000133030_100 (sequence is synthesized)
gagcgcattaaggaagcacatgagaaggttctggagaagaaggagcaggacctcaatgaggctttggttaaaatggttgccttggggagcagcttagaggaaacagaaattaagctccag

SEQ ID NO: 302272 - DNA, 120 bp, Artificial Sequence
  ENSG00000133030_101 (sequence is synthesized)
gcaaaagaagagattttaaggaaatttgcaagtgaatctccaaaggacatggaagagccacggagtacccctgaagagacagaaagggatggcactttgctcccaggccaaccagtccaa

SEQ ID NO: 302273 - DNA, 120 bp, Artificial Sequence
  ENSG00000133030_102 (sequence is synthesized)
gccactagggcacctctaggcctcccacacacaaggctcgaggatgaggacgaggacctgggggctcctccgggggaagagtacggtgatggcagccccagtagggaagacagcatggtg

SEQ ID NO: 302274 - DNA, 120 bp, Artificial Sequence
  ENSG00000133030_103 (sequence is synthesized)
cccccaaagtcagtggaagtgcttgacagggagggccatcagcagggcacagccaaactcgaccaaggggcacctggtgttaaaaggcaaagaatccggttctccacaatccagtgccaa

SEQ ID NO: 302275 - DNA, 120 bp, Artificial Sequence
  ENSG00000133030_104 (sequence is synthesized)
agatacattcaccccgaagggtctgagaagacctggaccagcagcacatcttccgacaccagccaggaccggtcaccctcggaagaaagcatgtcctcagagcctgcacccagtgtactg

SEQ ID NO: 302276 - DNA, 120 bp, Artificial Sequence
  ENSG00000133030_105 (sequence is synthesized)
cctgcaactggcgactctgacacgtacctctccatcatccactccctggagaccaagctctacgtcacagaggaaaagctcaaagacgtgaccgtgaggctggagagccagcagggtcag

SEQ ID NO: 302277 - DNA, 120 bp, Artificial Sequence
  ENSG00000133030_106 (sequence is synthesized)
agccgtgaggcactgctcgcactgcaccaccagtgggcgggcaccgaggcccagctgcgtgagcagctccgcgccagcctgctccaggttggcgcactggcctcccagctggagcaggag

SEQ ID NO: 302278 - DNA, 120 bp, Artificial Sequence
  ENSG00000133030_107 (sequence is synthesized)
aggcaggagagggccaggagggttgaagggcatgttggagagcttggggacttccaggtcaagaatagtcaggccctgatgtgcctggaaaattgccgagaacaactgagatctctgcct

SEQ ID NO: 302279 - DNA, 120 bp, Artificial Sequence
  ENSG00000133030_108 (sequence is synthesized)
agggccagccaggaggatgagcaggacgcacgcgcagcctccctggccagtgtggagagtgcactcgtcagcgccatccaagccctgcagcactggccggccccagcccatggcggggcc

SEQ ID NO: 302280 - DNA, 120 bp, Artificial Sequence
  ENSG00000133030_109 (sequence is synthesized)
cgtgcacagctggagacaggtggcaccgaggagaatgggaagcctgcctccctgcagcagtgctcccagtctgagttgacagagcaggagcaggtgaggcttctttctgaccagattgct

SEQ ID NO: 302281 - DNA, 120 bp, Artificial Sequence
  ENSG00000133030_110 (sequence is synthesized)
ctggaggcctcgctgatcagccagatagcagattccctgaagaacacaacatcagatgtctcccgaatgctccatgagatttcttggtcaggacagccaccgatggaatctgctggggcc

SEQ ID NO: 302282 - DNA, 120 bp, Artificial Sequence
  ENSG00000133030_111 (sequence is synthesized)
cccgtagacacctgggccaggaaggtcctagtggatggtgagttctggagccaggttgagtctctgaggaagcacttggggacactgggaggagaggcagtcggtgcctcaggagacggg

SEQ ID NO: 302283 - DNA, 120 bp, Artificial Sequence
  ENSG00000133030_112 (sequence is synthesized)
cagcaaagcatcccacagggcctggcccccatcctggccaatgccacatgggtcagggcagagctcagctttgccacacagtcagtgagggagtcgttccaccgcaggctacagagcatc

SEQ ID NO: 302284 - DNA, 120 bp, Artificial Sequence
  ENSG00000133030_113 (sequence is synthesized)
caggagaccctgcggggcacccagacggccctgcggcagcacaaatgcctgctgagggaaatcctgggagcctaccaaaccccagactttgaaagagtgatgcagcaggtcttggaagcc

SEQ ID NO: 302285 - DNA, 120 bp, Artificial Sequence
  ENSG00000133030_114 (sequence is synthesized)
ctcaggcttccagcgggccatgaagatggtgttcagctgtcctgggacctgagccccttaggagaagtcctgggccgagactcagacagctctcaggagcccttcgatgtgtctgaccag

SEQ ID NO: 302286 - DNA, 120 bp, Artificial Sequence
  ENSG00000133030_115 (sequence is synthesized)
agccctggggcctttgttgctattcaggaggagcttgcccagcagctgaaggagaaggccagcctcttagaggagatagcggctgccttaccatctctgccacctgtggaatcgctgaga

SEQ ID NO: 302287 - DNA, 120 bp, Artificial Sequence
  ENSG00000133030_116 (sequence is synthesized)
gattgccagaagcttctccaggtgtcccagagtctctcgtataacacttgtttgggaggcctcggtcagtattcttcattgttggttcaggatgccattattcaggcccaggtttgctat

SEQ ID NO: 302288 - DNA, 120 bp, Artificial Sequence
  ENSG00000133030_117 (sequence is synthesized)
gcgtcctgcagaatccggctagaatatgagaaggagctccagctctgcaaggagtcctggcaaacccgggagccctcctgctcagagcaggcacaggcagcccgggccctgagggaggag

SEQ ID NO: 302289 - DNA, 120 bp, Artificial Sequence
  ENSG00000133030_118 (sequence is synthesized)
tatgaggagcttctccgcaagcagaagagcgagtacctggatgtgatcgccattgttgaaagggagaatgcagagctcaaggccaaggccgcccagctagaccatcagcagcagtgtctg

SEQ ID NO: 302290 - DNA, 120 bp, Artificial Sequence
  ENSG00000133030_119 (sequence is synthesized)
gaggatgcagagagcaagcacagcatgagcatgttcaccctgcggggcaggtatgaggaggagattcggtgtgtggtggagcagctgaccaggaccgagagcacactgcaggctgagcgc

SEQ ID NO: 302291 - DNA, 120 bp, Artificial Sequence
  ENSG00000133030_120 (sequence is synthesized)
agccgggtcctgagccagctggatgcctcggtcagagacaggcaggacatggagaggcatcatggtgagcagatacagaccctggaggacaggttccagctcaaggtccgggagctgcag

SEQ ID NO: 302292 - DNA, 120 bp, Artificial Sequence
  ENSG00000133030_121 (sequence is synthesized)
acgatccacgaggaggagctgaggaccctgcaggagcactactcgcagagcctgaggtgccttcaggacaccctctgcctccaccaggggccacaccccaaggccctgccagcccctgcc

SEQ ID NO: 302293 - DNA, 120 bp, Artificial Sequence
  ENSG00000133030_122 (sequence is synthesized)
cccaactggcaggccacccagggagaggctgactccatgacggggctgagggagcgcatccaggagctggaggcccagatggatgtcatgcgggaggagctgggacacaaggacctggag

SEQ ID NO: 302294 - DNA, 120 bp, Artificial Sequence
  ENSG00000133030_123 (sequence is synthesized)
atttaaatatttttaaattaaaatttttaaaatatttacattttaatttctaacatagtaaataccatcaatagatgaaatccacctaacagaagctcttctagggccaccagtttttaa

SEQ ID NO: 302295 - DNA, 120 bp, Artificial Sequence
  ENSG00000133030_124 (sequence is synthesized)
gagtgtgaagggatttcaacagcagcatgtttgaggaccactggcgtggactatctttggctggatacagggacagatggtggtgtgattgcacccagtgaggggcctgggtcatgcagt

SEQ ID NO: 302296 - DNA, 120 bp, Artificial Sequence
  ENSG00000133030_125 (sequence is synthesized)
agtaggatagacggtgtcctcacttgtcagtgtgtatactattaaaagtaaagtcagtgcagaaaatcacttacggaaatttgctcatctaggcattggttctacttcctaaaaatctca

SEQ ID NO: 302297 - DNA, 120 bp, Artificial Sequence
  ENSG00000133030_126 (sequence is synthesized)
aggggctcagaggtggaaaataaatatgaaaaagcatccttgtcttctagaatctcgtcggctgctgggaagaccaaggggccagccatcgcagggagcataagcactgagacaggcaca

SEQ ID NO: 302298 - DNA, 120 bp, Artificial Sequence
  ENSG00000133030_127 (sequence is synthesized)
cgtgcctgcccggctatcgtagccaggctggcagccttgcaactccctggggaagaacaatctaggaacattctggggtgtggagcaggaagggagtgtcacatgcaaaaggcaggatca

SEQ ID NO: 302299 - DNA, 120 bp, Artificial Sequence
  ENSG00000133030_128 (sequence is synthesized)
gccaaagcagaggggctgaagaagcagtgattcccccacctaatgtcagaagtaaaatcagttcatggtgaaaatttggggaaacaaaatcatgcagcaaaattgcctattaaaccccac

SEQ ID NO: 302300 - DNA, 120 bp, Artificial Sequence
  ENSG00000133030_129 (sequence is synthesized)
acggaggtaaaaatcggttcatattgtggttatgtatctattctcttatgatgtgtatttatgtgcttatgtaagacctaaaaacaataatttttaaataaaccagttatttttaataag

SEQ ID NO: 302301 - DNA, 120 bp, Artificial Sequence
  ENSG00000133030_130 (sequence is synthesized)
acacctgttctacctgggaatgcaaaccctgagctgcaaataagaacacagacgtgggagacaccacggcctgaagctgctctcctcttccccgctctcctctcctccggtcccgtgatg

SEQ ID NO: 302302 - DNA, 120 bp, Artificial Sequence
  ENSG00000133030_131 (sequence is synthesized)
ggttacgctgagccagcaatgtgcacgcactaactccacaggtgttaaagacactttctgctgaaccatttgaaagcaagctgtagggccctcgacatggcagcacccaggagaataagg

SEQ ID NO: 302303 - DNA, 120 bp, Artificial Sequence
  ENSG00000133030_132 (sequence is synthesized)
gcatctccacagctgagaccatgactgcagccaggagtgcctggacggacgcatctgacatccagccgtgtgcacaagcccagggctgctgcctgcttgacggctgctgttctttggatc

SEQ ID NO: 302304 - DNA, 120 bp, Artificial Sequence
  ENSG00000133030_133 (sequence is synthesized)
gataaccaggcctgggcttcctggtgtggcttgctcccatcctggggcatgcctatgtcgctctagggaggcacaggagagtttggaaagcaggtctcctgtcatgtacttgttagagtt

SEQ ID NO: 302305 - DNA, 120 bp, Artificial Sequence
  ENSG00000133030_134 (sequence is synthesized)
agcagaggtgctaagtcattggtgcccttctttaagaaaagagtaagaaagaagacacaggctagaaggaaggggagcctgtagcctgatcttactccctcagtcaacacctgagcatta

SEQ ID NO: 302306 - DNA, 120 bp, Artificial Sequence
  ENSG00000133030_135 (sequence is synthesized)
agtgaccagctggaggttgtcagctggctagtggcagagtcccaacccccagctcccagaagtggactctatgtacccccaacccactgtgggttgagaggctcccagcccggtgcccgc

SEQ ID NO: 302307 - DNA, 120 bp, Artificial Sequence
  ENSG00000133030_136 (sequence is synthesized)
ctccagcagacaagtccctcatccctgttttacgggcctttcaccgtgtccctccagaccagacacagccagcctctgcccacgtgctctctcttccttcctgtgggtcccacctggcag

SEQ ID NO: 302308 - DNA, 120 bp, Artificial Sequence
  ENSG00000133030_137 (sequence is synthesized)
caccgggaggaaatggagcgggagctggagaagagccagcggtcccagatcagcagcgtcaactcggatgttgaggccctgcggcgccagtacctgtcttattgcgggtaaaggaatcgg

SEQ ID NO: 302309 - DNA, 120 bp, Artificial Sequence
  ENSG00000133030_138 (sequence is synthesized)
ggaagaggaatggcatcagctatgagaccaccctgacccccacccgctgccccatcctacacccgaggtggcccctgaagcatgacctccagggatcttcacagtttgaagagccgctga

SEQ ID NO: 302310 - DNA, 120 bp, Artificial Sequence
  ENSG00000133030_139 (sequence is synthesized)
tatactctaatacttgcagtaatattttttaatagaatgcaatattggatgtacacaaaaggatacaagcagcatacatttacaatataaatctaaataataaaaatgaatgctcgtgaa

SEQ ID NO: 302311 - DNA, 120 bp, Artificial Sequence
  ENSG00000133030_140 (sequence is synthesized)
actttgtgtctaagcgcagggaggaagcagagcccggggccctcgccctcctctctccgggggtgaagacgccttaggcagccagttttccctcgcactccctgagaagcagctggcctc

SEQ ID NO: 302312 - DNA, 120 bp, Artificial Sequence
  ENSG00000133030_141 (sequence is synthesized)
ttgggggaggtggggtctcaggaattgatcttgtttcctctcttccttgtggagataattaggcttccaggcttgggagcccttcacccacttcctctgggttcttatcctcttgtccag

SEQ ID NO: 302313 - DNA, 120 bp, Artificial Sequence
  ENSG00000133030_142 (sequence is synthesized)
cccccatctaagctccgtctccggccgtagacagcctgaggaggccgccagccctttcacatgaaatcagcctgctttgtttttgttttaatttggtctttgattccttttactgttggc

SEQ ID NO: 302314 - DNA, 120 bp, Artificial Sequence
  ENSG00000133030_143 (sequence is synthesized)
agaaacaatgttaattcctgggcctcttccttgctaaattttggggtggggggtgcactgtgatccatgagggatgcaatgagaatggaggctgccttccgtggtggtggttgccttttg

SEQ ID NO: 302315 - DNA, 120 bp, Artificial Sequence
  ENSG00000133048_0 (sequence is synthesized)
gaggccctgtctaggtagctggcaccaggagccgtgggcaagggaagaggccacaccctgccctgctctgctgcagccagaatgggtgtgaaggcgtctcaaacaggctttgtggtcctg

SEQ ID NO: 302316 - DNA, 120 bp, Artificial Sequence
  ENSG00000133048_1 (sequence is synthesized)
gtgctgctccagtgctgctctgcatacaaactggtctgctactacaccagctggtcccagtaccgggaaggcgatgggagctgcttcccagatgcccttgaccgcttcctctgtacccac

SEQ ID NO: 302317 - DNA, 120 bp, Artificial Sequence
  ENSG00000133048_2 (sequence is synthesized)
atcatctacagctttgccaatataagcaacgatcacatcgacacctgggagtggaatgatgtgacgctctacggcatgctcaacacactcaagaacaggaaccccaacctgaagactctc

SEQ ID NO: 302318 - DNA, 120 bp, Artificial Sequence
  ENSG00000133048_3 (sequence is synthesized)
ttgtctgtcggaggatggaactttgggtctcaaagattttccaagatagcctccaacacccagagtcgccggactttcatcaagtcagtaccgccatttctgcgcacccatggctttgat

SEQ ID NO: 302319 - DNA, 120 bp, Artificial Sequence
  ENSG00000133048_4 (sequence is synthesized)
gggctggaccttgcctggctctaccctggacggagagacaaacagcattttaccaccctaatcaaggaaatgaaggccgaatttataaaggaagcccagccagggaaaaagcagctcctg

SEQ ID NO: 302320 - DNA, 120 bp, Artificial Sequence
  ENSG00000133048_5 (sequence is synthesized)
ctcagcgcagcactgtctgcggggaaggtcaccattgacagcagctatgacattgccaagatatcccaacacctggatttcattagcatcatgacctacgattttcatggagcctggcgt

SEQ ID NO: 302321 - DNA, 120 bp, Artificial Sequence
  ENSG00000133048_6 (sequence is synthesized)
gggaccacaggccatcacagtcccctgttccgaggtcaggaggatgcaagtcctgacagattcagcaacactgactatgctgtggggtacatgttgaggctgggggctcctgccagtaag

SEQ ID NO: 302322 - DNA, 120 bp, Artificial Sequence
  ENSG00000133048_7 (sequence is synthesized)
ccccaatctcaggaccgggaattccaggccggttcaccaaggaggcagggacccttgcctactatgagatctgtgacttcctccgcggagccacagtccatagaatcctcggccagcagg

SEQ ID NO: 302323 - DNA, 120 bp, Artificial Sequence
  ENSG00000133048_8 (sequence is synthesized)
tcccctatgccaccaagggcaaccagtgggtaggatacgacgaccaggaaagcgtcaaaagcaaggtgcagtacctgaaggacaggcagctggcgggcgccatggtatgggccctggacc

SEQ ID NO: 302324 - DNA, 120 bp, Artificial Sequence
  ENSG00000133048_9 (sequence is synthesized)
tggatgacttccagggctccttctgtggccaggatctgcgcttccctctcaccaatgccatcaaggatgcactcgctgcaacgtagccctctgttctgcacacagcacgggggccaagga

SEQ ID NO: 302325 - DNA, 120 bp, Artificial Sequence
  ENSG00000133048_10 (sequence is synthesized)
tgccccgtccccctctggctccagctggccgggagcctgatcacctgccctgctgagtcccaggctgagcctcagtctccctcccttggggcctatgcagaggtccacaacacacagatt

SEQ ID NO: 302326 - DNA, 120 bp, Artificial Sequence
  ENSG00000133048_11 (sequence is synthesized)
tgagctcagccctggtgggcagagaggtagggatggggctgtggggatagtgaggcatcgcaatgtaagactcgggattagtacacacttgttgattaatggaaatgtttacagatcccc

SEQ ID NO: 302327 - DNA, 120 bp, Artificial Sequence
  ENSG00000133048_12 (sequence is synthesized)
aagcctggcaagggaatttcttcaactccctgccccccagccctccttatcaaaggacaccattttggcaagctctatcaccaaggagccaaacatcctacaagacacagtgaccatact

SEQ ID NO: 302328 - DNA, 120 bp, Artificial Sequence
  ENSG00000133048_13 (sequence is synthesized)
aattataccccctgcaaagcccagcttgaaaccttcacttaggaacgtaatcgtgtcccctatcctacttccccttcctaattccacagctgctcaataaagtacaagagcttaacagtg

SEQ ID NO: 302329 - DNA, 120 bp, Artificial Sequence
  ENSG00000133048_14 (sequence is synthesized)
ctcagtgtcaaccagcaggcctcacatctctgtttaaatggaagaagctaagcagggccaaggcagccaccatctctgggtcatttgcctctggtttgtataaacttgtgtgatgcatgc

SEQ ID NO: 302330 - DNA, 120 bp, Artificial Sequence
  ENSG00000133048_15 (sequence is synthesized)
agcctgcagaccctgcagagagtgaggctgcaggatggagcaggagctaaaagagatttggagagtggcgtctcctggtgacctgcaaggtctcggcacgactccccacactgccttttc

SEQ ID NO: 302331 - DNA, 120 bp, Artificial Sequence
  ENSG00000133048_16 (sequence is synthesized)
actatgaggtaatggagttggggagaaggtaggattcccccacaccaccagcagccctggggaaggtgattccccaccacgttcttgctttttctcctttgggaataaagaaaatgtccg

SEQ ID NO: 302332 - DNA, 120 bp, Artificial Sequence
  ENSG00000133048_17 (sequence is synthesized)
gttgccccagcatgcctgaggaagtggaagggagaggttaggacatttgttgctgaaaatctccagcaggtacaggcacatgggcctgcaccactaggcacctgggatagccctctggct

SEQ ID NO: 302333 - DNA, 120 bp, Artificial Sequence
  ENSG00000133048_18 (sequence is synthesized)
taggatcccagggaggtgtaaactcagtgcttaattaaatggattctttagagggtgggaaacaggtggatgtcaaccatttgccccacatacccgtattcatgcaatccacccccagtg

SEQ ID NO: 302334 - DNA, 120 bp, Artificial Sequence
  ENSG00000133048_19 (sequence is synthesized)
ggctcaccggtgcgggtgtgcaaaacctcctcccaccccagtcatcttaggttcaggtcatcctttggtcctgctctttccccgccaggctgtctgttgatgctacttttaatctgcttt

SEQ ID NO: 302335 - DNA, 120 bp, Artificial Sequence
  ENSG00000133048_20 (sequence is synthesized)
cactaagataagcctggcagaagtggtgggggtaaggtgggctgtaggccagctcccaaatgtgtgctgggcataacagaagacccattcttgactgaagtgcccttgtgggaccctgag

SEQ ID NO: 302336 - DNA, 120 bp, Artificial Sequence
  ENSG00000133048_21 (sequence is synthesized)
cccgtgccctggagtggcacagggaggtgtgccagcaatggggaccgaggtcactggggactgctggggttcgggctagtggcctgtctggctgctgtctgcttccctcgttcacatcct

SEQ ID NO: 302337 - DNA, 120 bp, Artificial Sequence
  ENSG00000133048_22 (sequence is synthesized)
tgctgtctgcttccctcgttcacatcctgctggagccttaaataggagcccaaaagcttttctttcttacttttttttgagacaaaatctcactctgttgcccaggccggagtgcagtgg

SEQ ID NO: 302338 - DNA, 120 bp, Artificial Sequence
  ENSG00000133048_23 (sequence is synthesized)
cctcccaaagtgctgggattccaggtatgagccaccacgcccggcctaaagcttttctattaataatttcctgcctcaccctccatccccttcctcctcagacacctggatttcattagc

SEQ ID NO: 302339 - DNA, 120 bp, Artificial Sequence
  ENSG00000133048_24 (sequence is synthesized)
caaaagcaaggtaggtttccccaaggccacacctcaggacaaagagaaagaaggaggccccgctcccagcagccagattcctgtcccttgcactgaggtctgggctgggctcacagagca

SEQ ID NO: 302340 - DNA, 120 bp, Artificial Sequence
  ENSG00000133048_25 (sequence is synthesized)
catgtgccctgtacacactctgggtcagggaacccagccctgctcctctgggcctcccctgccaggtgcagtacctgaaggacaggcagctggcgggcgccatggtatgggccctggacc

SEQ ID NO: 302341 - DNA, 120 bp, Artificial Sequence
  ENSG00000133055_0 (sequence is synthesized)
accctagaggcccaggccccccaacggctgacccctgcacactccaccctggccccccagccagtccagcaatgatggaaaaaaacacctccgagggccctgcctgcagtccagaggaga

SEQ ID NO: 302342 - DNA, 120 bp, Artificial Sequence
  ENSG00000133055_1 (sequence is synthesized)
ccgcatctgaatctgccaaggtgcccacagcagagcctcccggagaagtggcagtatcagagtccaccagagaagagcaggtgcccaagccgcaggcccctgccccacaggcccctacag

SEQ ID NO: 302343 - DNA, 120 bp, Artificial Sequence
  ENSG00000133055_2 (sequence is synthesized)
cctccacagccactaagcctgcacccccaagtgaagatgtccccagtgccccactgctgctgaccctggatgatgtgagcagcagctctgtgactgtgagctgggagcccccagagaggc

SEQ ID NO: 302344 - DNA, 120 bp, Artificial Sequence
  ENSG00000133055_3 (sequence is synthesized)
tggggaggctgggcctccagggctatgtgctggagctctgcagagagggagcctcggagtgggtgcctgtgagtgcccggcccatgatggtgacccagcagactgtgcggaacctggctc

SEQ ID NO: 302345 - DNA, 120 bp, Artificial Sequence
  ENSG00000133055_4 (sequence is synthesized)
tgggagacaagttcctcctgcgcgtgtctgcagtgagttctgcaggggctggcccgccggccatgctggaccagcccatccacatccgagagaacattgaggcccccaagatccgtgtcc

SEQ ID NO: 302346 - DNA, 120 bp, Artificial Sequence
  ENSG00000133055_5 (sequence is synthesized)
cccgccacctccgtcagacctacatccgccaggtgggagagacggtcaacctgcaaatccccttccaggggaagcctaagcctcaggccacatggacccacaacggccatgccctggaca

SEQ ID NO: 302347 - DNA, 120 bp, Artificial Sequence
  ENSG00000133055_6 (sequence is synthesized)
gccagcgggtgagcatgcgcaccggggaccaggactccatcctcttcattcgctcggcccagcgctccgactctggccgctacgagctcactgtgcgcgtggaagacctggaggccaagg

SEQ ID NO: 302348 - DNA, 120 bp, Artificial Sequence
  ENSG00000133055_7 (sequence is synthesized)
tgattgagaaacctggaccccccagcagcatcaggctcctggacgtctggggctgcaatgctgctcttcagtggacgccaccccaggacacaggcaacacagagctcctgggctacatgg

SEQ ID NO: 302349 - DNA, 120 bp, Artificial Sequence
  ENSG00000133055_8 (sequence is synthesized)
tgcagaaggcagacaaaaagacagggcaatggttcacagtgctggagcgctaccacccaaccacctgcaccatctctgacctcatcatcggcaactcgtactccttccgggtcttctcag

SEQ ID NO: 302350 - DNA, 120 bp, Artificial Sequence
  ENSG00000133055_9 (sequence is synthesized)
aaaacctgtgtggactcagcacctcggccaccgtcaccaaggagctcgcccacatccagaaggcagatattgctgccaaacctaaagggtttattgagcgagacttctcagaagccccct

SEQ ID NO: 302351 - DNA, 120 bp, Artificial Sequence
  ENSG00000133055_10 (sequence is synthesized)
cattcacccagcccctggctgaccacacctccacccctggctacagcacccagttgttctgcagtgtccgagcttcacccaagcccaagatcatctggatgaaaaacaagatggagatcc

SEQ ID NO: 302352 - DNA, 120 bp, Artificial Sequence
  ENSG00000133055_11 (sequence is synthesized)
agggcaaccccaaataccgcgccctctctgagcaaggcgtctgcaccctagagatccggaaacccagcccctttgattctggggtctacacctgcaaggccataaatgtgctgggggagg

SEQ ID NO: 302353 - DNA, 120 bp, Artificial Sequence
  ENSG00000133055_12 (sequence is synthesized)
catctgtggactgccggctggaggtcaaagcctcagccgcacactgaagtcacgggaggaggctgtgatgaggagccaggtgctgcaggcctgaggggccaggtccaccaggcctacagt

SEQ ID NO: 302354 - DNA, 120 bp, Artificial Sequence
  ENSG00000133055_13 (sequence is synthesized)
caaactccagagatgcccaagacccccgcttccatagcgacggctgatggaaccgcccctggtacctgctggcctcccttccccagaggctggtgtccagaactcaggaatgggcctggt

SEQ ID NO: 302355 - DNA, 120 bp, Artificial Sequence
  ENSG00000133055_14 (sequence is synthesized)
aggccccaggccagactaactgggctcaaggggtgctggaaggcgcagagattggagtgccctgcggagttgcactctgggtgggaagcactcaaataaagatgcgtggtgttaacagtg

SEQ ID NO: 302356 - DNA, 120 bp, Artificial Sequence
  ENSG00000133056_0 (sequence is synthesized)
aaatttacttccccaaaacactgggacattgggatggaattcactcaccccaaatcatcaccctggttaaggagactaaagaatcagaagacatttgtgctttggggagcagaggccctc

SEQ ID NO: 302357 - DNA, 120 bp, Artificial Sequence
  ENSG00000133056_1 (sequence is synthesized)
agggtatagagaaggaagaagagagaggttcactgtagtcctgaagcagaaataagacctgtggctgaaggaagccttagcaattcactccttcctcttcctgagaactctctgtaggaa

SEQ ID NO: 302358 - DNA, 120 bp, Artificial Sequence
  ENSG00000133056_2 (sequence is synthesized)
gtctcacctagcagaggcttcacagtatttcagagaagccaaagattgtttgcctctttggaaactgttatccttccatcatgactgtgtcactcctgccactgttccaccatagagatg

SEQ ID NO: 302359 - DNA, 120 bp, Artificial Sequence
  ENSG00000133056_3 (sequence is synthesized)
gcgtcctttgcagcaaaccgtaagttataaggatgagggaagaagagtagagggccaaaaggattccattttgaggaaaaactacagtttgccttgccaggtagaagaatcaggcgccca

SEQ ID NO: 302360 - DNA, 120 bp, Artificial Sequence
  ENSG00000133056_4 (sequence is synthesized)
gacaccatgtcacaaccctccagaactgacgttggcaggaagtagagactttgttgcctgtgtcccccatcctcaccatgtcttcgactcagggcaatggggaacactggaagtccctgg

SEQ ID NO: 302361 - DNA, 120 bp, Artificial Sequence
  ENSG00000133056_5 (sequence is synthesized)
agtcagtgggcatcagccgcaaagagctagcgatggccgaagccctgcagatggagtatgatgccctgtcccggctccggcatgacaaggaggagaacagagccaagcagaacgcagacc

SEQ ID NO: 302362 - DNA, 120 bp, Artificial Sequence
  ENSG00000133056_6 (sequence is synthesized)
cctctctcatcagctgggatgagcctggggtagacttttacagcaagccagcaggaaggcggaccgacctcaagctgttacgcggtctctctggctctgatcctacccttaactacaact

SEQ ID NO: 302363 - DNA, 120 bp, Artificial Sequence
  ENSG00000133056_7 (sequence is synthesized)
cactctccccacaggaagggccgcccaaccactctacctcccaagggccacagcctggctcagatccctggcccaaaggctccctgtctggagactatctctacatttttgatggttcag

SEQ ID NO: 302364 - DNA, 120 bp, Artificial Sequence
  ENSG00000133056_8 (sequence is synthesized)
atgggggagtctcttcgtccccaggaccaggggacatagagggctcttgcaagaaactatccccacctcctctgcctccccgagcttctatctgggatacccctcccctgcctcccagaa

SEQ ID NO: 302365 - DNA, 120 bp, Artificial Sequence
  ENSG00000133056_9 (sequence is synthesized)
aggggtccccctcatcctccaagatctcccagcccagtgacatcaacactttctctttggtcgaacaattgccgggcaaactgctagagcatcggatcctagaagaggaagaggtgctgg

SEQ ID NO: 302366 - DNA, 120 bp, Artificial Sequence
  ENSG00000133056_10 (sequence is synthesized)
gaggtgggggtcaggggcgcctactggggtctgtggactatgatggtatcaatgatgcaattactaggctcaacttgaaatcgacctatgatgcggagatgttgcgggatgccaccaggg

SEQ ID NO: 302367 - DNA, 120 bp, Artificial Sequence
  ENSG00000133056_11 (sequence is synthesized)
gctggaaggagggccgagggccgctggacttcagcaaagacacctctggaaaacccgtggccaggagcaagactatgccccctcaggtgcccccccgcacctatgcctcccgctatggca

SEQ ID NO: 302368 - DNA, 120 bp, Artificial Sequence
  ENSG00000133056_12 (sequence is synthesized)
accgaaagaatgcgacgcctggcaagaaccgccggatttctgcagccccggtgggctcccggccccacactgttgccaatggccatgagttgtttgaggtctcagaagagagagatgagg

SEQ ID NO: 302369 - DNA, 120 bp, Artificial Sequence
  ENSG00000133056_13 (sequence is synthesized)
aggttgctgcattttgccacatgctggatatccttcgatctggctctgacatccaagactacttcctcactggctatgtctggagtgctgtcacccctagcccagagcacctcggggatg

SEQ ID NO: 302370 - DNA, 120 bp, Artificial Sequence
  ENSG00000133056_14 (sequence is synthesized)
aggtcaacctgaaggtgactgtgttgtgtgacaggcttcaagaggcactcactttcacctgcaactgttcctccactgtagacttgcttatctaccagaccctgtgctacacccatgatg

SEQ ID NO: 302371 - DNA, 120 bp, Artificial Sequence
  ENSG00000133056_15 (sequence is synthesized)
acctgaggaatgtggacgtgggtgactttgtgctaaagccctgcgggctggaggagttcctgcagaacaagcatgccttgggcagtcatgagtacatccaatactgccgcaagtttgaca

SEQ ID NO: 302372 - DNA, 120 bp, Artificial Sequence
  ENSG00000133056_16 (sequence is synthesized)
ttgacattcggctacagctgatggagcagaaggttgtgcgcagtgacctggcccggacggtgaatgatgaccagagcccctccaccttgaactacctcgtccatctccaagagaggcctg

SEQ ID NO: 302373 - DNA, 120 bp, Artificial Sequence
  ENSG00000133056_17 (sequence is synthesized)
tcaagcagaccatcagcaggcaggccctgagtcttctgttcgacacttaccacaatgaggtggatgccttcctgctggctgatggagacttcccactgaaggctgacagggtggtccagt

SEQ ID NO: 302374 - DNA, 120 bp, Artificial Sequence
  ENSG00000133056_18 (sequence is synthesized)
ccgtcaaggccatctgcaacgccctggccgccgtggaaacccctgagatcaccagtgctctcaaccagctgcccccctgcccctcccgcatgcagcctaaaattcagaaggatcccagtg

SEQ ID NO: 302375 - DNA, 120 bp, Artificial Sequence
  ENSG00000133056_19 (sequence is synthesized)
tcttggctgtgagggaaaaccgagagaaggtcgtggaagccctgaccgctgccatcttggacctggtggagctgtactgcaacacattcaacgcagacttccagacggcagtgcccggga

SEQ ID NO: 302376 - DNA, 120 bp, Artificial Sequence
  ENSG00000133056_20 (sequence is synthesized)
gccgcaagcatgacctggtccaggaggcctgccatttcgccaggtccctggccttcactgtctatgccacccaccgcatccccatcatctgggctaccagctatgaagatttctacctct

SEQ ID NO: 302377 - DNA, 120 bp, Artificial Sequence
  ENSG00000133056_21 (sequence is synthesized)
cctgctccctcagccatggcggcaaggagctgtgcagccccctgcagacccgaagagctcacttctccaagtacctcttccacctcatcgtctgggaccagcagatctgcttcccagtgc

SEQ ID NO: 302378 - DNA, 120 bp, Artificial Sequence
  ENSG00000133056_22 (sequence is synthesized)
aggtgaaccggctgcctcgggagacactgctgtgtgccactctctatgctctgcccatccccccaccggggagctcctcagaggccaataagcagcggcgggtgcctgaagccctgggct

SEQ ID NO: 302379 - DNA, 120 bp, Artificial Sequence
  ENSG00000133056_23 (sequence is synthesized)
gggtcactaccccactcttcaacttcaggcaggtcctgacctgtggccggaagcttctgggtttgtggccagcaacacaggaaaatcccagcgcccgttggagtgcacctaatttccacc

SEQ ID NO: 302380 - DNA, 120 bp, Artificial Sequence
  ENSG00000133056_24 (sequence is synthesized)
agccagacagtgtcatcctgcagattgacttccccacctcggcctttgacatcaagttcaccagcccccctggagacaagttcagcccccgctatgagtttggcagcctccgggaagaag

SEQ ID NO: 302381 - DNA, 120 bp, Artificial Sequence
  ENSG00000133056_25 (sequence is synthesized)
accagcgcaagcttaaagacatcatgcagaaagagtccttgtactggctcactgatgctgacaagaagcgcctgtgggagaagcgatattactgccactcggaggtgagctcgctccccc

SEQ ID NO: 302382 - DNA, 120 bp, Artificial Sequence
  ENSG00000133056_26 (sequence is synthesized)
tggtgctcgccagcgcccccagctgggagtgggcttgcctgcctgacatctatgttctcctgaagcagtggacccacatgaaccaccaggatgccctggggctcctgcatgccaccttcc

SEQ ID NO: 302383 - DNA, 120 bp, Artificial Sequence
  ENSG00000133056_27 (sequence is synthesized)
cggaccaggaggtgcgtcgtatggctgtgcagtggattggctcactctcagatgctgagctgctagactacctgccccagctggtacaggccctgaagtatgaatgctacctggacagcc

SEQ ID NO: 302384 - DNA, 120 bp, Artificial Sequence
  ENSG00000133056_28 (sequence is synthesized)
cgttggtgcgcttcctcctgaaacgagctgtgtctgacttgagagtgactcactacttcttctggttactgaaggacggcctcaaggactctcagttcagcatccgctaccagtatctgc

SEQ ID NO: 302385 - DNA, 120 bp, Artificial Sequence
  ENSG00000133056_29 (sequence is synthesized)
tggcagccttactgtgctgctgtggcaaggggctgagagaagagtttaaccgccagtgctggcttgtcaatgccctggccaaactggcccagcaggtccgggaggcagccccatctgcaa

SEQ ID NO: 302386 - DNA, 120 bp, Artificial Sequence
  ENSG00000133056_30 (sequence is synthesized)
ggcagggaatcctccgcacgggcctggaggaggtgaagcagttctttgccctcaatggctcgtgccgcttgccactcagccccagtctgctggttaagggaattgtgcccagggactgtt

SEQ ID NO: 302387 - DNA, 120 bp, Artificial Sequence
  ENSG00000133056_31 (sequence is synthesized)
cctacttcaactccaatgctgtccccctcaaactctccttccaaaatgtggatcccctgggtgagaacatccgtgtcatcttcaagtgtggggacgaccttcgccaggacatgctaacgc

SEQ ID NO: 302388 - DNA, 120 bp, Artificial Sequence
  ENSG00000133056_32 (sequence is synthesized)
tgattcgcatcatgagcaagatctgggtccaggaggggctggacatgcgcatggtcatcttccgctgcttctccaccggccggggcagagggatggtggagatgatccctaatgctgaga

SEQ ID NO: 302389 - DNA, 120 bp, Artificial Sequence
  ENSG00000133056_33 (sequence is synthesized)
ccctgcgtaagatccaggtggagcatggggtgaccggctcgttcaaggaccggcccctggcagactggctgcagaaacacaaccctggggaggacgagtatgagaaggctgtggagaact

SEQ ID NO: 302390 - DNA, 120 bp, Artificial Sequence
  ENSG00000133056_34 (sequence is synthesized)
ttatctactcctgcgctggctgctgcgtggccacgtacgtcttgggcatctgtgaccgacataatgacaacatcatgctgaagaccactggtcacatgttccacattgattttggccgct

SEQ ID NO: 302391 - DNA, 120 bp, Artificial Sequence
  ENSG00000133056_35 (sequence is synthesized)
tcctgggccatgcccagatgtttggcaacatcaagcgggaccgtgccccctttgtcttcacctcggacatggcgtatgtcatcaacgggggtgacaagccttccagccgcttccatgatt

SEQ ID NO: 302392 - DNA, 120 bp, Artificial Sequence
  ENSG00000133056_36 (sequence is synthesized)
ttgttgacctttgctgccaagcctacaacctcattcgcaagcacacccacctcttcctcaaccttctgggcctgatgttgtcctgtgggatccctgaactctcagacctggaggacctca

SEQ ID NO: 302393 - DNA, 120 bp, Artificial Sequence
  ENSG00000133056_37 (sequence is synthesized)
agtatgtgtacgatgccctgaggcctcaggatacagaggccaatgccactacctacttcactaggttgattgagtccagcctgggcagtgtagccacaaagctcaattttttcatccata

SEQ ID NO: 302394 - DNA, 120 bp, Artificial Sequence
  ENSG00000133056_38 (sequence is synthesized)
atctggctcagatgaagttcacgggctcagatgaccggctgaccctctcctttgcctcccgaacacacactctcaagagctctggccgaatcagtgatgttttcctctgccgccatgaga

SEQ ID NO: 302395 - DNA, 120 bp, Artificial Sequence
  ENSG00000133056_39 (sequence is synthesized)
agatcttccaccccaacaaaggctatatatatgtggtaaaggtgatgcgagagaacactcacgaggccacctacatccagcggacctttgaggagttccaggaattacacaataagttgc

SEQ ID NO: 302396 - DNA, 120 bp, Artificial Sequence
  ENSG00000133056_40 (sequence is synthesized)
ggctgctcttcccttcttcccacttgcccagcttccctagtcgcttcgtgatcggccgctcccggggagaggcggtggccgagcggcggagggaggagctaaacggttacatctggcact

SEQ ID NO: 302397 - DNA, 120 bp, Artificial Sequence
  ENSG00000133056_41 (sequence is synthesized)
tgatccacgcaccccctgaggtggccgagtgtgatttggtgtacaccttcttccacccactgccccgggatgagaaggctatgggcaccagcccagctcctaagtcctcagatggcacat

SEQ ID NO: 302398 - DNA, 120 bp, Artificial Sequence
  ENSG00000133056_42 (sequence is synthesized)
gggcccggcccgtcggaaaggtgggaggggaggtgaagctgtccatctcctacaaaaacaataaactcttcatcatggtgatgcatattcggggcttgcaactgctccaggatggaaatg

SEQ ID NO: 302399 - DNA, 120 bp, Artificial Sequence
  ENSG00000133056_43 (sequence is synthesized)
accctgacccctatgtgaaaatttacctccttcctgaccctcagaaaaccactaagaggaaaaccaaagtggcccggaaaacctgcaatcctacctacaatgagatgttggtatatgatg

SEQ ID NO: 302400 - DNA, 120 bp, Artificial Sequence
  ENSG00000133056_44 (sequence is synthesized)
ggatccccaagggtgacctgcagcagcgggagctccagctgagcgtgctgagtgagcagggattctgggagaacgtcctcctcggtgaggtgaacatccgcctgcgagagctggacctgg

SEQ ID NO: 302401 - DNA, 120 bp, Artificial Sequence
  ENSG00000133056_45 (sequence is synthesized)
ctcaggagaagaccggctggttcgccctgggatctcgaagtcatggcaccttgtgagcccagcagagccaccacccagcatcccaggctggtggcaggagctgggggagaggactctccc

SEQ ID NO: 302402 - DNA, 120 bp, Artificial Sequence
  ENSG00000133056_46 (sequence is synthesized)
ctgtgagactcctccttgtgaagggccagggccctgggcaggcctccagctcggtccaggtgattctggcctctgtggtaggaggcagggagagtaagacatgctctgctgtctcttcct

SEQ ID NO: 302403 - DNA, 120 bp, Artificial Sequence
  ENSG00000133056_47 (sequence is synthesized)
ctggagactgaacttgggttggttgtgatgagcagccccttggaggctgtgaggttgcagcaaagttttaagtttaccttgtgtcaagggagcaatgcttggtttggggagtgtgtgggg

SEQ ID NO: 302404 - DNA, 120 bp, Artificial Sequence
  ENSG00000133056_48 (sequence is synthesized)
tgggctgtatgaagtagcattttgggggtgggtgggtggatatcttaatttttatttttaaaaaatgaaatagtgatgttgtcctaactgggacaggaagccttgcgagaagggacgtac

SEQ ID NO: 302405 - DNA, 120 bp, Artificial Sequence
  ENSG00000133056_49 (sequence is synthesized)
ctatgccccagaaggcaagagaggaagactatttggactttttgtatgattaaggttcttattggacttttccctaggttttttttttttgttattgttgttgttgtttcgttttctagc

SEQ ID NO: 302406 - DNA, 120 bp, Artificial Sequence
  ENSG00000133056_50 (sequence is synthesized)
tataggaactatctggggaggggcccagtgggtcctcggccagagccctctctaaggacaggttggggagggttggggagggctgcctgtgctggactgaggcttgtgccactgggcctt

SEQ ID NO: 302407 - DNA, 120 bp, Artificial Sequence
  ENSG00000133056_51 (sequence is synthesized)
tctgattttgcctccaaaggagagcgctgtgatacctacatgtgtaaggaagggccttccgtattggggttctgccaaggacccgtattcagggacccatgctcttttggggggactttt

SEQ ID NO: 302408 - DNA, 120 bp, Artificial Sequence
  ENSG00000133056_52 (sequence is synthesized)
cctcttgtcttccctactttattaggacttgccctgaataccattttctaccccttgcccctccattctcctggcccttctgggggtcagctggtctctatgaatatgctgggggtgctt

SEQ ID NO: 302409 - DNA, 120 bp, Artificial Sequence
  ENSG00000133056_53 (sequence is synthesized)
ccccataggtctctcccttcatttgtctctggtgggacaaaatactgactcagtccttagatgtagtttcacccaagagcatcttggccctgggaagaggtccctaggctgcagatgcta

SEQ ID NO: 302410 - DNA, 120 bp, Artificial Sequence
  ENSG00000133056_54 (sequence is synthesized)
ctgactgcttgctaggtagcctctggaaagcattccccatccatcactccccacttctttctgctgtgctgcttccctcccaaactccatttctgtcaccctttttataagacttttcct

SEQ ID NO: 302411 - DNA, 120 bp, Artificial Sequence
  ENSG00000133056_55 (sequence is synthesized)
cattctgtggggccataaacctatttagtctggagccaaagggatgccctatctgaaggaaaggggcatggggtgggggattccatcaaaactgttgttttttgccccatgatttttctt

SEQ ID NO: 302412 - DNA, 120 bp, Artificial Sequence
  ENSG00000133056_56 (sequence is synthesized)
tggtcagtaggaggctggattggagtggtgattattcccctggagctaagctcaggagcccgaagggagagactgagactgactcccttatctcttcatattctttattccctaccagat

SEQ ID NO: 302413 - DNA, 87 bp, Artificial Sequence
  ENSG00000133056_57 (sequence is synthesized)
taccagatggacctgtcgccaggctggagtgtagtggcatgatctcgactcactgcaaaatctgcctcccgggttcaagcgattctc

SEQ ID NO: 302414 - DNA, 120 bp, Artificial Sequence
  ENSG00000133056_58 (sequence is synthesized)
ttacaggcgtgagccaccatgccccgccccagatggattttacatttgctcttttgtgtttcgctccaaagggttgtcttcctcgccaaaaggagggagggactttgaatttgatatgaa

SEQ ID NO: 302415 - DNA, 120 bp, Artificial Sequence
  ENSG00000133056_59 (sequence is synthesized)
aaaggagggagggactttgaatttgatatgaatctttaaaaccagaattggctggatatttcccatgattgggaaaagagtgaaatgaggacattctgtaaactgtccctccctaattcc

SEQ ID NO: 302416 - DNA, 120 bp, Artificial Sequence
  ENSG00000133056_60 (sequence is synthesized)
aaggatcagaaactccccgttttgctgactcattccataactggagaaagaagctccattgaccgaagccacagggcagcatggaagtttaaattttctctaaaattaaaatgccaagga

SEQ ID NO: 302417 - DNA, 120 bp, Artificial Sequence
  ENSG00000133056_61 (sequence is synthesized)
taaagctggctgcttccaggagggggaagaggagtggggagtgggcggtgaaacttttccagatgaacggaccataaatgtgttactggctttgtgcctgtagctcattttattatgacc

SEQ ID NO: 302418 - DNA, 120 bp, Artificial Sequence
  ENSG00000133056_62 (sequence is synthesized)
tatatgctcctgatttaaagagatctgtgtactgtttacttcccacttcccagaatcccttgtatctcctttctcgggaattgtattttctaataaatgacatttgagaaaaaaatgaaa

SEQ ID NO: 302419 - DNA, 120 bp, Artificial Sequence
  ENSG00000133056_63 (sequence is synthesized)
ggcttcccctctctcgcccgctgctgccgctattgtctcacccggggtggcctgactctgcgagctcgcgcacgctctcggcggagagcacccctccccacccccacaagctggtccttg

SEQ ID NO: 302420 - DNA, 120 bp, Artificial Sequence
  ENSG00000133056_64 (sequence is synthesized)
cgccctttgctgcctctccctctgccccttggagcctagggtctgtgcggagcctggagaggggagcggcccgggagcaggcggcgtgcggccggccagctcctctcgcgctggtgcaag

SEQ ID NO: 302421 - DNA, 120 bp, Artificial Sequence
  ENSG00000133056_65 (sequence is synthesized)
tacgtaaaaataaggattatgtttaacattgtataactgtcattttatgaaaagctcatgacatgcttctgcttttttctcattttaccgcagatgggtgaactttgtcacagctattag

SEQ ID NO: 302422 - DNA, 120 bp, Artificial Sequence
  ENSG00000133056_66 (sequence is synthesized)
agactgactagcatttggggaccactgtcttaggccatcccattctagccaatgccatggcaacaaggtagggcttgtggaggcctcatgactttcccttctgaccccttcccttcccag

SEQ ID NO: 302423 - DNA, 120 bp, Artificial Sequence
  ENSG00000133056_67 (sequence is synthesized)
ccctgagagggaggctgtatcctcagcctcagcctcagcctgacttcctgggccacctgttgcttgaagccacaggagtggcccctcctaatttgacttcctgtcctccataggatctgc

SEQ ID NO: 302424 - DNA, 120 bp, Artificial Sequence
  ENSG00000133056_68 (sequence is synthesized)
acatccctagagctcagggatttttaaaggccctgctctgagaggtggggctgttcccgctatttatagggactgggagattcctgttcccagctctgagttcctcacacccagctgggc

SEQ ID NO: 302425 - DNA, 120 bp, Artificial Sequence
  ENSG00000133056_69 (sequence is synthesized)
ctgctcactgagtcagggcaccctggtaggtggtcacctctgtcactccttctctctcctgcctcccctactccctcacccttccccatcccctgcatgtcatcagagttctgagacaga

SEQ ID NO: 302426 - DNA, 120 bp, Artificial Sequence
  ENSG00000133056_70 (sequence is synthesized)
gctcagcccagaatctccttgaagaagcggacacaaagcaaaaagctcttgccagttctgagtggggaaatgcggccttggtcctccccggctcagcttgttgcaggggctcagcctgct

SEQ ID NO: 302427 - DNA, 120 bp, Artificial Sequence
  ENSG00000133056_71 (sequence is synthesized)
ggctggctccaaatgccagcctgatacccctgctgccagcctctgcccggcagactcccccagccagcatcgggtgatgccaccagggcctgccagctgggcaaacgtgggctcccggcc

SEQ ID NO: 302428 - DNA, 120 bp, Artificial Sequence
  ENSG00000133056_72 (sequence is synthesized)
aaatacccttttggactaaacatctgcctgctttgcttggcctggtatggagtttgatgacaagtgctccccctgctggccaagctctccttgcacgcaagagctctcactccaggccca

SEQ ID NO: 302429 - DNA, 120 bp, Artificial Sequence
  ENSG00000133056_73 (sequence is synthesized)
ctggccagaaaggaaggcatggttgaatctgatgtttcaaaatttctaattttttaaagagttacaccatttttcaaatggataagcaaaatgtcatatgtacatacagtgggatattat

SEQ ID NO: 302430 - DNA, 120 bp, Artificial Sequence
  ENSG00000133059_0 (sequence is synthesized)
ggtttggtttgtttgcaacggcagtgacggaggttgggagccaggctgactgcaggcgggggcgtcaggaggcggattcctcctcccttcggcactggggggcggggaggagggaggccg

SEQ ID NO: 302431 - DNA, 120 bp, Artificial Sequence
  ENSG00000133059_1 (sequence is synthesized)
ggcctgcggccggggaccgagccgcaaagacagagcgggcagaggcgatggagggcgacggggtgccatggggcagcgagcccgtctcgggtcccggccccggcggcggcggaatgatcc

SEQ ID NO: 302432 - DNA, 120 bp, Artificial Sequence
  ENSG00000133059_2 (sequence is synthesized)
gcgagctgtgccggggcttcggccgctaccgccgctacctgggacggctgcgacagaacctgcgcgagacccagaagttcttccgcgacatcaagtgctcccacaaccacacttgtctct

SEQ ID NO: 302433 - DNA, 120 bp, Artificial Sequence
  ENSG00000133059_3 (sequence is synthesized)
cctccctcacgggcggcggcggggccgagcgcggccctgcaggcgatgtcgccgaaaccgggctgcaggcgggccaactgagctgcatttccttcccacctaaggaagagaagtacctcc

SEQ ID NO: 302434 - DNA, 120 bp, Artificial Sequence
  ENSG00000133059_4 (sequence is synthesized)
agcagattgtggactgcctcccttgcatactgatcctcggccaggattgtaacgtcaagtgccagctgttgaatctgctgttgggggtgcaggtgcttcccaccaccaagctgggcagtg

SEQ ID NO: 302435 - DNA, 120 bp, Artificial Sequence
  ENSG00000133059_5 (sequence is synthesized)
aggagagctgtaagcttcggcgcctccgcttcacctatgggactcagactcgggtcagcctggcgctccctggacagtatgaactagtgcacacgctggttgctcatcagggcaactggg

SEQ ID NO: 302436 - DNA, 120 bp, Artificial Sequence
  ENSG00000133059_6 (sequence is synthesized)
agaccatccctgaggaggatctggaggtccaagagaacaatgaggatgctgctcatgttttagcggaactggaggtaacgatgcaccatgctctcttacaggaagtggacgttgtggtag

SEQ ID NO: 302437 - DNA, 120 bp, Artificial Sequence
  ENSG00000133059_7 (sequence is synthesized)
caccatgccaaggcctccggcccacagtggatgttctgggtgacttggtgaatgatttcttgcctgtgataacctatgcactccacaaagatgaactctctgagagggatgagcaagagc

SEQ ID NO: 302438 - DNA, 120 bp, Artificial Sequence
  ENSG00000133059_8 (sequence is synthesized)
ttcaggaaatccgaaagtatttctcctttcctgtattctttttcaaagtgccgaaactgggctcggagataatagactcctcaaccaggagaatggagagcgaaagatcaccgctttatc

SEQ ID NO: 302439 - DNA, 120 bp, Artificial Sequence
  ENSG00000133059_9 (sequence is synthesized)
gccagctaattgacctgggctatctgagcagcagtcactggaactgtggggctcctggccaggatactaaagctcagagcatgttggtggaacagagtgaaaagctgagacacttgagca

SEQ ID NO: 302440 - DNA, 120 bp, Artificial Sequence
  ENSG00000133059_10 (sequence is synthesized)
cattttctcaccaggtgttacagactcgcctggtggatgcagccaaggccctgaacctggtgcactgccactgccttgacatctttattaaccaggcatttgacatgcagcgggacctgc

SEQ ID NO: 302441 - DNA, 120 bp, Artificial Sequence
  ENSG00000133059_11 (sequence is synthesized)
agatcactcccaaacgtctggaatatactcgaaaaaaggagaatgagttgtatgaatcattgatgaatattgccaaccgaaagcaggaggaaatgaaggatatgattgttgagacactta

SEQ ID NO: 302442 - DNA, 120 bp, Artificial Sequence
  ENSG00000133059_12 (sequence is synthesized)
ataccatgaaggaggaacttctggatgatgctactaacatggagtttaaagacgtcattgtccctgagaatggagaaccagtaggcaccagagagatcaaatgctgcatccgacagatcc

SEQ ID NO: 302443 - DNA, 120 bp, Artificial Sequence
  ENSG00000133059_13 (sequence is synthesized)
aggaactcatcatctcccgacttaatcaggcagtggctaataagctgatcagctcagtggattacctgagggaaagcttcgtcggaaccctggaacgatgtctgcagagcctggagaagt

SEQ ID NO: 302444 - DNA, 120 bp, Artificial Sequence
  ENSG00000133059_14 (sequence is synthesized)
ctcaggatgtctcagttcacatcaccagtaattatctcaaacagatcttaaatgctgcctatcatgttgaagtcacgtttcactcagggtcgtcagttacaaggatgctatgggagcaaa

SEQ ID NO: 302445 - DNA, 120 bp, Artificial Sequence
  ENSG00000133059_15 (sequence is synthesized)
tcaaacagatcatccagcgcatcacatgggtgagcccacctgccatcactctggaatggaagaggaaggtggcccaggaagccattgagagcctcagcgcctccaaattggctaagagca

SEQ ID NO: 302446 - DNA, 120 bp, Artificial Sequence
  ENSG00000133059_16 (sequence is synthesized)
tttgcagccaattccggactcggctcaatagttcccacgaggcttttgcagcctccttgcggcagctggaagctggccactcaggccggttagagaaaacggaagatctatggctgaggg

SEQ ID NO: 302447 - DNA, 120 bp, Artificial Sequence
  ENSG00000133059_17 (sequence is synthesized)
ttcggaaagatcatgctccccgcctggcccgcctttctctggaaagctgttctttacaggatgtcttgcttcatcgtaaacctaaactgggacaggaactgggccggggccagtatggtg

SEQ ID NO: 302448 - DNA, 120 bp, Artificial Sequence
  ENSG00000133059_18 (sequence is synthesized)
tggtatacctgtgtgacaactggggaggacacttcccttgtgccctcaaatcagttgtccctccagatgagaagcactggaatgatctggctttggaatttcactatatgaggtctctgc

SEQ ID NO: 302449 - DNA, 120 bp, Artificial Sequence
  ENSG00000133059_19 (sequence is synthesized)
cgaagcatgagcgattggtggatctccatggttcagtcattgactacaactatggtggtggctccagcattgctgtgctcctcattatggagcggctacaccgggatctctacacagggc

SEQ ID NO: 302450 - DNA, 120 bp, Artificial Sequence
  ENSG00000133059_20 (sequence is synthesized)
tgaaggctgggctgaccctggagacacgtttgcagatagcactagatgtggtggagggaatccgcttcctgcacagccagggacttgtccatcgtgatatcaaactgaaaaatgtgctgc

SEQ ID NO: 302451 - DNA, 120 bp, Artificial Sequence
  ENSG00000133059_21 (sequence is synthesized)
tggataagcagaaccgtgccaagatcactgacttaggattctgcaagccagaggccatgatgtcaggcagcattgtggggacaccaatccatatggcccctgaacttttcacagggaagt

SEQ ID NO: 302452 - DNA, 120 bp, Artificial Sequence
  ENSG00000133059_22 (sequence is synthesized)
acgataattccgtggatgtctacgcttttggaattcttttctggtatatctgctcaggctctgtcaagctccctgaggcatttgagaggtgtgctagcaaagaccatctctggaacaatg

SEQ ID NO: 302453 - DNA, 120 bp, Artificial Sequence
  ENSG00000133059_23 (sequence is synthesized)
tgcggaggggggctcgcccagaacgtcttcctgtgtttgatgaggagtgctggcagttgatggaagcctgttgggatggcgaccccttgaagaggcctctcttgggcattgtccagccca

SEQ ID NO: 302454 - DNA, 120 bp, Artificial Sequence
  ENSG00000133059_24 (sequence is synthesized)
tgctccagggcatcatgaatcggctctgcaagtccaattctgagcagccaaacagaggactagatgattctacttgaaagcaaagacctttctctttcactctctagttatttccttccc

SEQ ID NO: 302455 - DNA, 120 bp, Artificial Sequence
  ENSG00000133059_25 (sequence is synthesized)
cctcaccttttggccatggggagaatttgacatttattcactataggacacactcccaagggaactggtgcttgctgggaaacttggaaccttcccaggcagggatgactcctggacagt

SEQ ID NO: 302456 - DNA, 120 bp, Artificial Sequence
  ENSG00000133059_26 (sequence is synthesized)
gaagagttgaatgactgagcatattcagcagctcactgaagcgccaagctatccctttagcaaaaaagtgtctcagatgtgtaaaagctgaggaatgtggtgttctggcttcacaaatga

SEQ ID NO: 302457 - DNA, 120 bp, Artificial Sequence
  ENSG00000133059_27 (sequence is synthesized)
aaaggaggcagatgttaccattgtcttttcactgtatatacttctaagacagcaagcgggacactgcagtggcaatagtgttaaaaaatctcattctcatgatttttggctctagctagg

SEQ ID NO: 302458 - DNA, 120 bp, Artificial Sequence
  ENSG00000133059_28 (sequence is synthesized)
aatagtttagtcaggactcagaaaatttgagcttagttctgggattatgaaaacatggggacaaaaacaataacttgtggatgtctggttcctgctgtctgcagccaggtatctcaggtt

SEQ ID NO: 302459 - DNA, 120 bp, Artificial Sequence
  ENSG00000133059_29 (sequence is synthesized)
gcaatggtcagaagtcccagtgagggagctagaaacagagctatctgttcctcatagtgccagtgtgtttacatttataggaccacatatccctggtttctgggggagggtttcactgtt

SEQ ID NO: 302460 - DNA, 80 bp, Artificial Sequence
  ENSG00000133059_30 (sequence is synthesized)
gaccacatatccctggtttctgggggagggtttcactgttacatcaccaagaggccctgaaaagaggaaaaaaaaaaaaa

SEQ ID NO: 302461 - DNA, 120 bp, Artificial Sequence
  ENSG00000133059_31 (sequence is synthesized)
accccagaacagaatctgttcttttacctttgagtcttttcttttgtttacctcttttcatctcaaagtgggaaagctccagataacatggtacttaggagtgagtgtctaagcaaaacc

SEQ ID NO: 302462 - DNA, 120 bp, Artificial Sequence
  ENSG00000133059_32 (sequence is synthesized)
aacccaatgcgaagtatttgggtgagaactgagaggtgggagatgattggaggccatggcctatgtacaaacatactggaagaaaaccagcttgtttttaaaacttaacacaatcagaaa

SEQ ID NO: 302463 - DNA, 120 bp, Artificial Sequence
  ENSG00000133059_33 (sequence is synthesized)
tttttctttttgtgtttgaatctaacacactgacgtttggaaaacttgatcaatgagcttttaaccacgatttctcccgcaatttgttccttctttttacctttttaaaaatctgttaga

SEQ ID NO: 302464 - DNA, 120 bp, Artificial Sequence
  ENSG00000133059_34 (sequence is synthesized)
agaaaaaaagcagcagacgaaagagaaaaaccctcctctggtagttctgtgtgtgcccctcacccctgtgtgctagtgtctgggaagtttccctgaaaggtgggaggcgggtgggtggtc

SEQ ID NO: 302465 - DNA, 120 bp, Artificial Sequence
  ENSG00000133059_35 (sequence is synthesized)
ttttggagggttcctcatgaagtgtgcttgaggaaagaaattctgattctaggcagaggaaggggaacaatttaaatattggtgcatctcagatgcacttgacttcaagccttcctcaac

SEQ ID NO: 302466 - DNA, 120 bp, Artificial Sequence
  ENSG00000133059_36 (sequence is synthesized)
caaactggtccattagattccgaaaaacaggtagacgaggaagtagacagtggaagtgagtagtctccctccatctgcctaatccccaataactgtggtctggcccctgtgttcagcccg

SEQ ID NO: 302467 - DNA, 120 bp, Artificial Sequence
  ENSG00000133059_37 (sequence is synthesized)
ggtctggcccctgtgttcagcccgagagtttgtaaaacaggtccccaggtaggtgtataagatgagttgcaaattagccgggcatgctggcacgcaccagtaatcccagctacttgggag

SEQ ID NO: 302468 - DNA, 120 bp, Artificial Sequence
  ENSG00000133059_38 (sequence is synthesized)
acatctgctgctgggattttctagggttgtctatgacagaatgaccatcttttaaatattaatggagtataaatggagtctataatgggtctttcatataacttttaactctttggctat

SEQ ID NO: 302469 - DNA, 120 bp, Artificial Sequence
  ENSG00000133059_39 (sequence is synthesized)
cctgggctctgatcatgatatgtttgagcatagtagctccctaaactcttggagcctttcagaaattccatgtagtgctaataacctttttacttgcaaatgataaagtaactgactcag

SEQ ID NO: 302470 - DNA, 120 bp, Artificial Sequence
  ENSG00000133059_40 (sequence is synthesized)
tgtctttgggctctgcaggctttagccttgttttggtaggatgttcagtatattctcagaatttttaccacctatttagctatacttcaagtactctattctctgcactaacttactgtc

SEQ ID NO: 302471 - DNA, 120 bp, Artificial Sequence
  ENSG00000133059_41 (sequence is synthesized)
cttctgggaactatgatggggcttcaagggagtcaggtgtcaagaaaggaggggtaagtactctctacttgctggaaaatcattgtaagtctgttgtgtatgaaattttaggaaaagtct

SEQ ID NO: 302472 - DNA, 120 bp, Artificial Sequence
  ENSG00000133059_42 (sequence is synthesized)
tatatagttccctttccagactgttttcttttgactctaactataatcataagtctgtgcttccattatgaaggtcacattcctagcattcttgggaagtattagctcatactctcattc

SEQ ID NO: 302473 - DNA, 120 bp, Artificial Sequence
  ENSG00000133059_43 (sequence is synthesized)
acatatgggaggttagatttttttcctctacccagagtccctttttagtttaccccacggcttagtttgctgtcagataccagttctctagcagattccccaacagttttttccccagtg

SEQ ID NO: 302474 - DNA, 120 bp, Artificial Sequence
  ENSG00000133059_44 (sequence is synthesized)
gggagggtggaagggagggactgatataagtaaggagatgagtagttgtgttacagttcattttctttaaaaaaaagtattttgagaaaaggtgcaaaatattcttgaaagtctctaggc

SEQ ID NO: 302475 - DNA, 120 bp, Artificial Sequence
  ENSG00000133059_45 (sequence is synthesized)
cagccaaagtccacatatggatatttggggatgttatttaaatactcagcaggctgagtgcaggtatacgtgtgtatagagtgtgtatactttgcttttgttttataacattgtcagcta

SEQ ID NO: 302476 - DNA, 120 bp, Artificial Sequence
  ENSG00000133059_46 (sequence is synthesized)
attttggctttgttctttggcatccattcttattataagtgatggaatgccatgaaatgtactgtattgtatattacttgggaggacactaggttttcaaagaagtctggcagcacttgg

SEQ ID NO: 302477 - DNA, 120 bp, Artificial Sequence
  ENSG00000133059_47 (sequence is synthesized)
gttatagagggctcagcatgaccaaagtcctaaagattttacctcccagctttggttgtatgtgttcccaagtggtgaggtgagattgtggctggaggaagaaaaaggatggcatgaaag

SEQ ID NO: 302478 - DNA, 120 bp, Artificial Sequence
  ENSG00000133059_48 (sequence is synthesized)
aatgacccttattgtggtctgtccttctaatcaacataattagggcagcttaccccaacatgaaaatgatgacctggccatttttaatggccagagcttgaagtctggtctctcattttg

SEQ ID NO: 302479 - DNA, 120 bp, Artificial Sequence
  ENSG00000133059_49 (sequence is synthesized)
tttcagaaatgagtgagaggccttcctgcagagcagtcaggagaaatggtggagcctggggccctggaatggctgaccctgtgcctagagagctgatggcaagggctgtctggcatggct

SEQ ID NO: 302480 - DNA, 120 bp, Artificial Sequence
  ENSG00000133059_50 (sequence is synthesized)
catttgggtggggtttccccaggcataccttagttccctgatcctctgcaaagagtagctcattgactgagcaagcgcttcaggaggactgtgctggttgttcccagaccaaagagagtc

SEQ ID NO: 302481 - DNA, 120 bp, Artificial Sequence
  ENSG00000133059_51 (sequence is synthesized)
acttttgactccatcaacttcaaggggacagagcctaggcagcagattctcctaatttttaacactaaaattcaaggaagcagtggaggaaagaatgcattactaccacagatagaaata

SEQ ID NO: 302482 - DNA, 120 bp, Artificial Sequence
  ENSG00000133059_52 (sequence is synthesized)
ggggactcatagaactctcgactagtacctgtcagctctcaaatgcattcttgtgtctttgcttgagctgccaaagaagggtcacaaagtgttcttcctcatggaagaagtgcctcgggg

SEQ ID NO: 302483 - DNA, 120 bp, Artificial Sequence
  ENSG00000133059_53 (sequence is synthesized)
ttgcagggctgcaaagtgacaactgcactgaatgacactttattttttggctttggcttattatttagcactgggaggcccaggggaattggtgattacagtagcactttgggaagttaa

SEQ ID NO: 302484 - DNA, 120 bp, Artificial Sequence
  ENSG00000133059_54 (sequence is synthesized)
agccccctttgggcttgctttggagagatgatggcatgcttggtattccatttggataatcaggaagcctccctagtccatccatattgtgtcagagtgggattaacaaccctggaagag

SEQ ID NO: 302485 - DNA, 120 bp, Artificial Sequence
  ENSG00000133059_55 (sequence is synthesized)
accctggaagagtccactgccaaaagagtagttgctttcctggaatttccaaagcttttggattttctggatcaagtaacccactttttaaaacctgaggtcaggagttcgagaccagcc

SEQ ID NO: 302486 - DNA, 69 bp, Artificial Sequence
  ENSG00000133059_56 (sequence is synthesized)
ttaatccttcagttatggaggtgggatgaatagagcttgtttgatgttaaagtgggtaaggagggagtg

SEQ ID NO: 302487 - DNA, 120 bp, Artificial Sequence
  ENSG00000133059_57 (sequence is synthesized)
atagagcttgtttgatgttaaagtgggtaaggagggagtggccttgagacacttgtattccaaactctcctggaggtttccagtagcactactgttcctaaaagggtttcatttttaact

SEQ ID NO: 302488 - DNA, 120 bp, Artificial Sequence
  ENSG00000133059_58 (sequence is synthesized)
tcatctgttttgttaacatccagtccaattgaggtgatctcagaggtgcatcaggacatctagcactggggaggccaccttgcccagatagttgaaaagaaaattggtctgggcagcctg

SEQ ID NO: 302489 - DNA, 120 bp, Artificial Sequence
  ENSG00000133059_59 (sequence is synthesized)
ttgtcttttgtcttcatgtaatgttttttctttgttttaaaggactaatgtttattacagtgttaaataaaagtgtaagatactaagtgtgtagaataaaagtgcaataacaaaagacaa

SEQ ID NO: 302490 - DNA, 120 bp, Artificial Sequence
  ENSG00000133059_60 (sequence is synthesized)
tgactttggcacacacttcagtctttatcctctctcctttcttgtgctacctggctctttccataatattgttacagcaggaccgtcttaattgtgtgcattttgaagagatgcgactct

SEQ ID NO: 302491 - DNA, 120 bp, Artificial Sequence
  ENSG00000133059_61 (sequence is synthesized)
gggttaatcttcattagtgtaatattgaagggttgggtttggttttatagagtattctgtatacttgttgggatacacaaataccagatgtgctgtataataaagatcacattaacgttt

SEQ ID NO: 302492 - DNA, 87 bp, Artificial Sequence
  ENSG00000133059_62 (sequence is synthesized)
aatgtgtatgcatatatttgtgtgtatatgtatatatgtgtgtgtgtctatatctctatctatatagacatacacacaggagttatt

SEQ ID NO: 302493 - DNA, 74 bp, Artificial Sequence
  ENSG00000133059_63 (sequence is synthesized)
tcattctgtcacccaggttggagtgcatggtgtgatctcagttcactgcagcctccgtctcctctaggtgtgca

SEQ ID NO: 302494 - DNA, 120 bp, Artificial Sequence
  ENSG00000133059_64 (sequence is synthesized)
acaagtgtgagccaccacacccagcctaatgtaactgttttcctttccttttagtctttatctcattgttatatgtgattataatgttgtcatttatgcagttcacatcaccagtaatta

SEQ ID NO: 302495 - DNA, 120 bp, Artificial Sequence
  ENSG00000133063_0 (sequence is synthesized)
ggtttgtatgggctgcagcctgccgctgagctgcatcatggtgcggtctgtggcctgggcaggtttcatggtcctgctgatgatcccatggggctctgctgcaaaactggtctgctactt

SEQ ID NO: 302496 - DNA, 120 bp, Artificial Sequence
  ENSG00000133063_1 (sequence is synthesized)
caccaactgggcccagtacagacagggggaggctcgcttcctgcccaaggacttggaccccagcctttgcacccacctcatctacgccttcgctggcatgaccaaccaccagctgagcac

SEQ ID NO: 302497 - DNA, 120 bp, Artificial Sequence
  ENSG00000133063_2 (sequence is synthesized)
cactgagtggaatgacgagactctctaccaggagttcaatggcctgaagaagatgaatcccaagctgaagaccctgttagccatcggaggctggaatttcggcactcagaagttcacaga

SEQ ID NO: 302498 - DNA, 120 bp, Artificial Sequence
  ENSG00000133063_3 (sequence is synthesized)
tatggtagccacggccaacaaccgtcagacctttgtcaactcggccatcaggtttctgcgcaaatacagctttgacggccttgaccttgactgggagtacccaggaagccaggggagccc

SEQ ID NO: 302499 - DNA, 120 bp, Artificial Sequence
  ENSG00000133063_4 (sequence is synthesized)
tgccgtagacaaggagcgcttcacaaccctggtacaggacttggccaatgccttccagcaggaagcccagacctcagggaaggaacgccttcttctgagtgcagcggttccagctgggca

SEQ ID NO: 302500 - DNA, 120 bp, Artificial Sequence
  ENSG00000133063_5 (sequence is synthesized)
gacctatgtggatgctggatacgaggtggacaaaatcgcccagaacctggattttgtcaaccttatggcctacgacttccatggctcttgggagaaggtcacgggacataacagccccct

SEQ ID NO: 302501 - DNA, 120 bp, Artificial Sequence
  ENSG00000133063_6 (sequence is synthesized)
ctacaagaggcaagaagagagtggtgcagcagccagcctcaacgtggatgctgctgtgcaacagtggctgcagaaggggacccctgccagcaagctgatccttggcatgcctacctacgg

SEQ ID NO: 302502 - DNA, 120 bp, Artificial Sequence
  ENSG00000133063_7 (sequence is synthesized)
acgctccttcacactggcctcctcatcagacaccagagtgggggccccagccacagggtctggcactccaggccccttcaccaaggaaggagggatgctggcctactatgaagtctgctc

SEQ ID NO: 302503 - DNA, 120 bp, Artificial Sequence
  ENSG00000133063_8 (sequence is synthesized)
ctggaagggggccaccaaacagagaatccaggatcagaaggtgccctacatcttccgggacaaccagtgggtgggctttgatgatgtggagagcttcaaaaccaaggtcagctatctgaa

SEQ ID NO: 302504 - DNA, 120 bp, Artificial Sequence
  ENSG00000133063_9 (sequence is synthesized)
atccagacgctacggcaggaactgagtcttccatacttgccttcaggcaccccagagcttgaagttccaaaaccaggtcagccctctgaacctgagcatggccccagccctggacaagac

SEQ ID NO: 302505 - DNA, 120 bp, Artificial Sequence
  ENSG00000133063_10 (sequence is synthesized)
acgttctgccagggcaaagctgatgggctctatcccaatcctcgggaacggtccagcttctacagctgtgcagcggggcggctgttccagcaaagctgcccgacaggcctggtgttcagc

SEQ ID NO: 302506 - DNA, 120 bp, Artificial Sequence
  ENSG00000133063_11 (sequence is synthesized)
aactcctgcaaatgctgcacctggaattgagtcgctaaagcccctccagtcccagctttgaggctgggcccaggatcactctacagcctgcctcctgggttttccctgggggccgcaatc

SEQ ID NO: 302507 - DNA, 120 bp, Artificial Sequence
  ENSG00000133063_12 (sequence is synthesized)
tggctcctgcaggcctttctgtggtcttcctttatccaggctttctgctctcagccttgccttccttttttctgggtctcctgggctgcccctttcacttgcaaaataaatctttggttt

SEQ ID NO: 302508 - DNA, 120 bp, Artificial Sequence
  ENSG00000133063_13 (sequence is synthesized)
gtgcccctcttcccaaagatgtggtgacttaagaggctctctaagcacactgttgactccaaaacatccgcaggtcagagccaggtgggaaggtggtccgtgcaggatgtgccaggccct

SEQ ID NO: 302509 - DNA, 120 bp, Artificial Sequence
  ENSG00000133063_14 (sequence is synthesized)
gtggcaggtcttgccccatgagtccatatgccagtgggcagtttccagtacacaggtgatggcagccagagcgcggccccaagtgcaacacgttctttggttattggctcagaagcctgg

SEQ ID NO: 302510 - DNA, 120 bp, Artificial Sequence
  ENSG00000133063_15 (sequence is synthesized)
aaacaggagcttctgcggaccttcacgcacgtgttattcccaaaatgccactagatggcagcagagaagaacttttccctgatttaagcgctctgcgagcagccactcagcattacacta

SEQ ID NO: 302511 - DNA, 120 bp, Artificial Sequence
  ENSG00000133063_16 (sequence is synthesized)
agaattcagacccctggtactcaggggtcttcgagataaatcctgtttgggccctttgcaggccctatctcacctactgcccccgttcaccagatgaagaaggaacaatgattattctca

SEQ ID NO: 302512 - DNA, 120 bp, Artificial Sequence
  ENSG00000133063_17 (sequence is synthesized)
ctttataggcatttaaactgaagactgattctaaccaattctgagtccagaaccaaggcctgaaatgggccagagagcatgcacacggtgtcctggttaaataaagtcatcccaacattc

SEQ ID NO: 302513 - DNA, 120 bp, Artificial Sequence
  ENSG00000133063_18 (sequence is synthesized)
tctgttgcaggggtcaccggccaaggaggcggtctaccctgtgggtcctccccgctgcagggcacacagagtggcgcccgtggggctgagcacgaggcagtggctcctgaccctcctaca

SEQ ID NO: 302514 - DNA, 120 bp, Artificial Sequence
  ENSG00000133063_19 (sequence is synthesized)
caggaccgggcggacaggagaagccccacctttggctcagcacaaagcccacagcacagccccggtgcacagacgcggtcacatgcacgcccgtccacacacacccagagatggctacag

SEQ ID NO: 302515 - DNA, 120 bp, Artificial Sequence
  ENSG00000133063_20 (sequence is synthesized)
ggctagtggatttttccccagactgggcacccaggagtttttaactctcaagcaattcatcactgtcaccatttaagtatttctgccagtttattaaaagttatagaatcctttagtaaa

SEQ ID NO: 302516 - DNA, 120 bp, Artificial Sequence
  ENSG00000133063_21 (sequence is synthesized)
ttcaggagcaggttgttcattttccatgaagttgtgcagttttgagatggctacagggctagtggatttttccccaggtaacatgaggatatttttttccagtcttcaacatgagaactt

SEQ ID NO: 302517 - DNA, 120 bp, Artificial Sequence
  ENSG00000133063_22 (sequence is synthesized)
ttcaacatgagaacttggtggacttctagagatggagaaacagtttgagagagggcagtggagaagcaagagagctggtctggaacccagctgcctgactcgtttcatggtcctgctgat

SEQ ID NO: 302518 - DNA, 120 bp, Artificial Sequence
  ENSG00000133063_23 (sequence is synthesized)
tcagcatccaggctcccagcccaaggctgtctccagaatctacagccactcacaggcctgaggctgctggagcaaaaagggccctgtccagaagaggtcagctatctgaagcagaaggga

SEQ ID NO: 302519 - DNA, 120 bp, Artificial Sequence
  ENSG00000133063_24 (sequence is synthesized)
aggctcccagcccaaggctgtctccagaatctacagccactcacaggcctgaggctgctggagcaaaaagggccctgtccagaagaggtagccaggctctggggtggccgggtcaggctt

SEQ ID NO: 302520 - DNA, 120 bp, Artificial Sequence
  ENSG00000133063_25 (sequence is synthesized)
ccccgggctcctccactgcatcccctccctgcacaggtcagctatctgaagcagaagggactgggcggggccatggtctgggcactggacttagatgactttgccggcttctcctgcaac

SEQ ID NO: 302521 - DNA, 120 bp, Artificial Sequence
  ENSG00000133063_26 (sequence is synthesized)
cctcatccagacgctacggcaggaactgagtgcagaaatcacttagaggatttccagactgaagtgctatttcatgacaagagcactactctcccaagcccttctattgaataccactga

SEQ ID NO: 302522 - DNA, 120 bp, Artificial Sequence
  ENSG00000133063_27 (sequence is synthesized)
ctcttttaatattagtgtccagccattagtccttccttcaaagagacaggggaattaacattcgttgcatgaccagagaccatactaagcatgtattagacatccaataaatagttactg

SEQ ID NO: 302523 - DNA, 120 bp, Artificial Sequence
  ENSG00000133063_28 (sequence is synthesized)
aatgctccctcagacacttagtgaggaagcgtaattgggggaccactgcaggaactgaggtcctgaaggggcctgcaacagccctcccctcggggagctcccacccctgggggagacagg

SEQ ID NO: 302524 - DNA, 120 bp, Artificial Sequence
  ENSG00000133063_29 (sequence is synthesized)
ccagatgagactaccaagaagtcacacccctgccttcctacagggagcagtgctggatttaggtggaggtcaagtggcctgagggtgaaggttagagggctcctgaagccaggccaggct

SEQ ID NO: 302525 - DNA, 120 bp, Artificial Sequence
  ENSG00000133063_30 (sequence is synthesized)
gggttctctggcagggagtgggcgcccaagcccaggatcactgccttcttggtgggagtctcctatgccatccttcccctgtgctcagcccctccaggatcataggggccacccatttgt

SEQ ID NO: 302526 - DNA, 120 bp, Artificial Sequence
  ENSG00000133063_31 (sequence is synthesized)
cttgctagtaggggccctctttatccttgagaacgtacaggttgagacagtgttcgtgtcttgcttttttgggctgggccaccttggtgccattcttctggatgctcctgggattcagga

SEQ ID NO: 302527 - DNA, 120 bp, Artificial Sequence
  ENSG00000133063_32 (sequence is synthesized)
agtgaggtctttgaaatgaacgttcaggctgcaattaaccctaaggatttactgcagcttacaaagaaactttttcttttcagagctgttggccaggggccagggctgtccccactccca

SEQ ID NO: 302528 - DNA, 120 bp, Artificial Sequence
  ENSG00000133063_33 (sequence is synthesized)
tctggtcctggcggtctgcccttgaggctggggcaatatgaggagtgtgtaggcaagtccaaggctatgactcccatcatgtctccaggctccaggcgtcttcttaggttgcctgcctgg

SEQ ID NO: 302529 - DNA, 120 bp, Artificial Sequence
  ENSG00000133063_34 (sequence is synthesized)
taacaactgtagtcagtgtctcacacaggccccaaagctcagctaagtctcctcacctgggaaaaggcttccttcatgggcccactcctccctgattctcttgtgtgcctgagatctttt

SEQ ID NO: 302530 - DNA, 120 bp, Artificial Sequence
  ENSG00000133063_35 (sequence is synthesized)
aacaatagttcccatcactgggcagtgagtagatgcctcatacagggaaacccctcactgctgtaccatgatgattacaggacaaggacttggagccagatagaccgggatctgatccca

SEQ ID NO: 302531 - DNA, 120 bp, Artificial Sequence
  ENSG00000133063_36 (sequence is synthesized)
gttcagccaattactatctgtcaccttgggcaagctgcttaacttctctgaacctcagtttccaaatctgtcagtcaggataatagttcttatggcctggggttgtgcaggaatggaatg

SEQ ID NO: 302532 - DNA, 120 bp, Artificial Sequence
  ENSG00000133063_37 (sequence is synthesized)
ggataatgcatggactccacggagtaaatcgtttgtgtgatagtggcattatttcttctttaaatgtcactgtgacttactctactaccctgaggtctggttcagaagttctggtaagaa

SEQ ID NO: 302533 - DNA, 120 bp, Artificial Sequence
  ENSG00000133063_38 (sequence is synthesized)
gttacagggtgatcctgtgagtttgcatagagaaagcactcagacacgggctgcaggaactgtggccacatttgagagcacttgagctactgccacacacttcagaatatctggaggcag

SEQ ID NO: 302534 - DNA, 120 bp, Artificial Sequence
  ENSG00000133063_39 (sequence is synthesized)
gaacagagaaggggaggttgtgcatagtatattccaggctctgtgctagatcctttgcatcggaggcttcagttaatacaaattgtttgttgtaagatagcattatctccaagcctagag

SEQ ID NO: 302535 - DNA, 120 bp, Artificial Sequence
  ENSG00000133063_40 (sequence is synthesized)
aggccatgagacttgcccgaggccagaatctagtgtggtagaagctgctagtctccaataactttctactattttatcagggtaagaaaagttgtagcaggaaacatggctgcccagaat

SEQ ID NO: 302536 - DNA, 120 bp, Artificial Sequence
  ENSG00000133063_41 (sequence is synthesized)
gaagactgcatttcccagtctcctgtgtgggtaggcgtggtcacatgactgagttctggccaaagagaagtaagtagacgcgttatgcagcagtgtctgggaacctttcttaagacacag

SEQ ID NO: 302537 - DNA, 120 bp, Artificial Sequence
  ENSG00000133063_42 (sequence is synthesized)
gttgtgcatctgctgtctgctccttcttctttgtccctccctctgttttgctacttggtaggcaggtgctaccttgtaccatgagggcaagggccactcaataacaacacaattgctgct

SEQ ID NO: 302538 - DNA, 120 bp, Artificial Sequence
  ENSG00000133063_43 (sequence is synthesized)
gttgtgaattttctgttactctcatttctacctcatcttaactgagatgccctgtgatagagtgggggatttgaacctgagtcagtcagctgtttctcaacacaatgcgaggtttctggg

SEQ ID NO: 302539 - DNA, 120 bp, Artificial Sequence
  ENSG00000133063_44 (sequence is synthesized)
tcccctgtgtgctcctgctgtacctcatcagctcttaggtgtgaagcatcccttagaactctgatgaggtggcgttgaaggaggggagccactctaatgcagcttttcgaactcatccat

SEQ ID NO: 302540 - DNA, 120 bp, Artificial Sequence
  ENSG00000133063_45 (sequence is synthesized)
tccaaagatggctcagggcctttgctagatccagaggcagcttgagggcgaaagtccagggccctgagagggtggaagaggtgacacttctaagatccaggaaaccccagcctctgccac

SEQ ID NO: 302541 - DNA, 120 bp, Artificial Sequence
  ENSG00000133063_46 (sequence is synthesized)
aagactggctgcacagctacccctgtggcaggtgaaggcagtgctcaggtagtcctgggactctttctaaacttctctggcctggccctcaatgtcctctgacagactctagcttgctgg

SEQ ID NO: 302542 - DNA, 120 bp, Artificial Sequence
  ENSG00000133063_47 (sequence is synthesized)
gacacctctaaggaaactgccaagggaactgcagaagcaggagcaggtgagaagtgcccgggtgtcttctttccatgggggaatttggagaagcattctgagcccagcaaagtgtcaggc

SEQ ID NO: 302543 - DNA, 120 bp, Artificial Sequence
  ENSG00000133063_48 (sequence is synthesized)
aggcaaggtaaggcctcacctgataggaggtgtatcctcgtacctagtctcagcaaggaaggttgccagcttcatggctcttttgagttaaaagggctgtaagatccttggtaaacgacc

SEQ ID NO: 302544 - DNA, 120 bp, Artificial Sequence
  ENSG00000133063_49 (sequence is synthesized)
agagcctgaatgtcacagggaagaggttggactgggacccaatacagctgcctatgtatctgagaagacgctatttataaacagagaaggtatttattggctggacaatcctgaggaagt

SEQ ID NO: 302545 - DNA, 120 bp, Artificial Sequence
  ENSG00000133063_50 (sequence is synthesized)
ctcccacttctcactctcattcataaagtggggatcatgatcactacctctcaagcttactgtaacattgaatgaggtaatgaatatgaaaacactcaaaatctataaagtatctacaaa

SEQ ID NO: 302546 - DNA, 120 bp, Artificial Sequence
  ENSG00000133063_51 (sequence is synthesized)
ctggtgcaaccctccatccctgcccaccggctgctgtgaggtttggctggtaacagttcacagttattccctctgcagagacttccccgggaatggaagctgccttacttggggcttgca

SEQ ID NO: 302547 - DNA, 120 bp, Artificial Sequence
  ENSG00000133063_52 (sequence is synthesized)
gccgatgcttgtctgacacaggggcaggaaaggccagtccccgacctcaagacaagatgaactctggtgtagcacatgcttcagggatccccatgaaatcaggccgcagctcagccacag

SEQ ID NO: 302548 - DNA, 120 bp, Artificial Sequence
  ENSG00000133063_53 (sequence is synthesized)
ctgacaccacagcctggctccctccttccccaccccactctccttccttttctttcttctgagggttcttccccaacagaagaagatatgcatgaaatctgtcccaggctctgcttttaa

SEQ ID NO: 302549 - DNA, 120 bp, Artificial Sequence
  ENSG00000133063_54 (sequence is synthesized)
ggaatctggtccacttgtctgccgtacaaagttgctatgagggttaaataatataatacagatgaagagattagcccagtgcctggcatatacagtgcatatccaattaatgttaaagat

SEQ ID NO: 302550 - DNA, 120 bp, Artificial Sequence
  ENSG00000133063_55 (sequence is synthesized)
tgccattatccatgagactggagcatcaggaacatcttagtgtaatagtgaggtgtggaaatctggtgagtgagtcagtggattgaattttacatgcttagggactggggtgggcagaga

SEQ ID NO: 302551 - DNA, 120 bp, Artificial Sequence
  ENSG00000133063_56 (sequence is synthesized)
gaagggcagctgggtttccttgggtatcactggttgtctcagctttgggcagtgagggtcctttacacagctagggaaaagttccagtcattacatacttctaccagcagaggacgccac

SEQ ID NO: 302552 - DNA, 120 bp, Artificial Sequence
  ENSG00000133063_57 (sequence is synthesized)
ttccatacaaataagtgtttcctctgctatctgatgcagttttcatcaaagcagtctaggctggcaggaaagatcaggtacatgacagagcagaaagtgccttcagatttgcacagataa

SEQ ID NO: 302553 - DNA, 120 bp, Artificial Sequence
  ENSG00000133063_58 (sequence is synthesized)
taggagagggcagaacaggaagaaacagtgagttaagctgttcaggaagcttcgtgggaggtgaggccttgagcagggcactctagcaccagaaggagtattgagtggagatggcattcc

SEQ ID NO: 302554 - DNA, 120 bp, Artificial Sequence
  ENSG00000133063_59 (sequence is synthesized)
cagggaagccactaccctaggcaaggtgaccagggcctgagccagggccgtggcagggaggcagccacgagagggtatgaaggacaccaaacacagggacaggactgatttcagctgaga

SEQ ID NO: 302555 - DNA, 120 bp, Artificial Sequence
  ENSG00000133063_60 (sequence is synthesized)
ggtctaggaggagatcatgggcccaccaacatggggtagacgtcaggaaggagcacgtttttataggacagagcacacttctccaactggtttgactgccctgttacaatgtcctctgca

SEQ ID NO: 302556 - DNA, 120 bp, Artificial Sequence
  ENSG00000133063_61 (sequence is synthesized)
agccatcattctgtaggattcctgttttgtgtggattctagaaaccagtgaaatattcagaggtgttaatagcatcaagatttcattggttctttccattctttttatttttattttttg

SEQ ID NO: 302557 - DNA, 84 bp, Artificial Sequence
  ENSG00000133063_62 (sequence is synthesized)
tttcattggttctttccattctttttatttttattttttgagatggggtctcagtccctgccacagcctcaacaccccagggct

SEQ ID NO: 302558 - DNA, 120 bp, Artificial Sequence
  ENSG00000133063_63 (sequence is synthesized)
cataggatggctacagggctagtggatttttccccaggtaacatgaggatatttttttccagtcttcaacatgagaacttggtggacttctagaggtttcatggtcctgctgatgatccc

SEQ ID NO: 302559 - DNA, 120 bp, Artificial Sequence
  ENSG00000133065_0 (sequence is synthesized)
agtctgccccagatcacgtttgccaccggcagccaaccagttgggcccgagtccgcgggcaagaagcgattgggggcgcgtgagctcggctccccggtcccccgtccgggtgcccccccg

SEQ ID NO: 302560 - DNA, 120 bp, Artificial Sequence
  ENSG00000133065_1 (sequence is synthesized)
ccgggcccgaagcgatatatcctgccctccccggccacctcccccgcgtggaagcggagcggcggcctcgctgtaacgcagaagcgaaatgtagcgagccgggtgtcgcggctggacgct

SEQ ID NO: 302561 - DNA, 120 bp, Artificial Sequence
  ENSG00000133065_2 (sequence is synthesized)
cgccttggctgggggtgtgggggggcacgccgggggccaaggaggactgtcgaggaggagtgatgagaagagggggtgccctgcaccccccgagaccacgggccacgctgccacttgcca

SEQ ID NO: 302562 - DNA, 120 bp, Artificial Sequence
  ENSG00000133065_3 (sequence is synthesized)
ggcgccccccttcctcccaggcgaggggcaggtgttccacactgattctcgtgactttaaggaccagggatttgaagaggtattagctcttcccaggaagggaggaagtttctggaagag

SEQ ID NO: 302563 - DNA, 120 bp, Artificial Sequence
  ENSG00000133065_4 (sequence is synthesized)
aagggaaagacggcagacgctgcgctgggaccagcagagcctgaggagctgtgggaagctgacagagcccagccaaaggagcgggaaggagccgcagccccaggctggcactgtgttctg

SEQ ID NO: 302564 - DNA, 120 bp, Artificial Sequence
  ENSG00000133065_5 (sequence is synthesized)
aaagatttgaactcaagctgctttttacggaagaggggccacttcagagggcaccccagaatttggttgagctcttctactctggatgccccctgctctgaggagcctgccactgagaac

SEQ ID NO: 302565 - DNA, 120 bp, Artificial Sequence
  ENSG00000133065_6 (sequence is synthesized)
caaagaagataagaggacagatactttttcttcaagcacagagctggtgggttggagtcaggcatctgcacccctagtggctgtctggtgaggaatttcttgtttcttcccagcttgcgg

SEQ ID NO: 302566 - DNA, 120 bp, Artificial Sequence
  ENSG00000133065_7 (sequence is synthesized)
cttcagtgcttgatggggctgcctgttggtggatcagtttttgcagtgcctggtaggagtggagagccgtgggaagaggtcctgcggcgcccaagcctgggttcaccccaagactaagtt

SEQ ID NO: 302567 - DNA, 120 bp, Artificial Sequence
  ENSG00000133065_8 (sequence is synthesized)
ctttcccaagttagagaagaagagagaaagcaaaaagaagagaggaaagttctcccttcccctcctccgtgcctgtcatgtcctctaagccagagccgaaggacgtccaccaactgaacg

SEQ ID NO: 302568 - DNA, 120 bp, Artificial Sequence
  ENSG00000133065_9 (sequence is synthesized)
ggactggcccttctgcctctccctgctcttcagatggcccagggagagagcccttggctgggacctcagagttcctggggcctgatggggctggggtagaggtggtgattgagtctcggg

SEQ ID NO: 302569 - DNA, 120 bp, Artificial Sequence
  ENSG00000133065_10 (sequence is synthesized)
ccaacgccaagggggttcgggaggaggacgccctgctggagaacgggagccagagcaacgaaagtgacgacgtcagcacagaccgtggccctgcgccaccttccccgctcaaggagacct

SEQ ID NO: 302570 - DNA, 120 bp, Artificial Sequence
  ENSG00000133065_11 (sequence is synthesized)
ccttttccatcgggctgcaagtactgtttccattcctcctggcaggctttgggaccgtggctgctggcatggtgttggacatcgtgcagcactgggaagtcttccagaaggtgacagagg

SEQ ID NO: 302571 - DNA, 120 bp, Artificial Sequence
  ENSG00000133065_12 (sequence is synthesized)
tcttcatcctagtgcctgcgctgctggggctcaaagggaacctggaaatgaccctggcatcaaggctttccactgcagccaacattggacacatggacacacccaaggagctctggcgga

SEQ ID NO: 302572 - DNA, 120 bp, Artificial Sequence
  ENSG00000133065_13 (sequence is synthesized)
tgatcactgggaacatggccctcatccaggtgcaggccacggtggtgggcttcctggcgtccatcgcagccgtcgtctttggctggatccctgatggccacttcagtattccgcacgcct

SEQ ID NO: 302573 - DNA, 120 bp, Artificial Sequence
  ENSG00000133065_14 (sequence is synthesized)
tcctgctctgtgctagcagcgtggccacagccttcattgcctccctggtactgggtatgatcatgattggagtcatcattggctctcgcaagattgggatcaacccagacaacgtggcca

SEQ ID NO: 302574 - DNA, 120 bp, Artificial Sequence
  ENSG00000133065_15 (sequence is synthesized)
cacccattgctgccagcctgggcgacctcatcaccttggcgctgctctcaggcatcagctggggactctacctggaactgaatcactggcgatacatctacccactggtgtgtgctttct

SEQ ID NO: 302575 - DNA, 120 bp, Artificial Sequence
  ENSG00000133065_16 (sequence is synthesized)
ttgtggccctgctgcctgtctgggtggtgctggcccgacgaagtccagccacaagggaggtgttgtactcgggctgggagcctgttatcattgccatggccatcagcagtgtgggaggcc

SEQ ID NO: 302576 - DNA, 120 bp, Artificial Sequence
  ENSG00000133065_17 (sequence is synthesized)
tcatcttggacaagactgtctcagaccccaactttgctgggatggctgtcttcacgcctgtgattaatggtgttgggggcaatctggtggcagtgcaggccagccgcatctccaccttcc

SEQ ID NO: 302577 - DNA, 120 bp, Artificial Sequence
  ENSG00000133065_18 (sequence is synthesized)
tgcacatgaatggaatgcccggagagaactctgagcaagctcctcgccgctgtcccagtccttgtaccaccttcttcagccctgatgtgaattctcgctcagcccgggtcctcttcctcc

SEQ ID NO: 302578 - DNA, 120 bp, Artificial Sequence
  ENSG00000133065_19 (sequence is synthesized)
tcgtggtcccaggacacctggtgttcctctacaccatcagctgtatgcagggcgggcacaccaccctcacactcatcttcatcatcttctatatgacagctgcactgctccaggtgctga

SEQ ID NO: 302579 - DNA, 120 bp, Artificial Sequence
  ENSG00000133065_20 (sequence is synthesized)
cctgcttggcactgggctcctagcactcagcttccatgttctctggctcataggggaccgagacacggatgtcggggactagcttggtcactcaacattttccccatccctctgcacttt

SEQ ID NO: 302580 - DNA, 120 bp, Artificial Sequence
  ENSG00000133065_21 (sequence is synthesized)
ctatttgaaatttttcttttgttcccctgtccctcctccaccccacactcccacctctttctaggacttcactttgataccaaattctcattattttcaatgggaatttttatacattga

SEQ ID NO: 302581 - DNA, 120 bp, Artificial Sequence
  ENSG00000133065_22 (sequence is synthesized)
gccaagtttgtatagcaagaatttgggaaacacagatggcctgagataagcagtacaagtaggtttttgagacaatcaccaagtgcagtttcatggtgggtgcctccaggtgatgtggac

SEQ ID NO: 302582 - DNA, 120 bp, Artificial Sequence
  ENSG00000133065_23 (sequence is synthesized)
tggagcaggggagttttgtctggaatctggggacatggggtttggctttagcaacctgtcttggccctaatgagaaaccctttgtaagtgggctctggatttttggttttgttttctttt

SEQ ID NO: 302583 - DNA, 120 bp, Artificial Sequence
  ENSG00000133065_24 (sequence is synthesized)
tatctgttttgttttatttttggttttggttgaacagagggacagaagaataagtaacactcccaaacacagacatacttttgtagaagtggaccaacttcaaagctctggacaggagac

SEQ ID NO: 302584 - DNA, 120 bp, Artificial Sequence
  ENSG00000133065_25 (sequence is synthesized)
acctgctccaggcccctgtgatcccagttctgttctcttgccctctggacctaagcgttcccactcgcagaaagagtaaggtggactgacttttcaatttgtgcacatgcctcttgttca

SEQ ID NO: 302585 - DNA, 120 bp, Artificial Sequence
  ENSG00000133065_26 (sequence is synthesized)
atggcctggtcaacatcaacaacccctccctctgatcatttccagttgattgtcatatccaggaaaaaatggaacagtgcactcttctccctgttgacccatgtccacctattggttccc

SEQ ID NO: 302586 - DNA, 120 bp, Artificial Sequence
  ENSG00000133065_27 (sequence is synthesized)
caaaatccacattctccctgggcccaaatgactttgtctccctgggcccagattctttgtctctcttcaaccttcatctcaaattgtctctaagcactaccttccccagagcttgccagg

SEQ ID NO: 302587 - DNA, 120 bp, Artificial Sequence
  ENSG00000133065_28 (sequence is synthesized)
ttgggttttgagattagggtcaggtcatgggtatgtggagaatggtttggaggttgaggacaaccacaggtgtctcattgctgccatttctcctgaggacataatcacttggtcaccttg

SEQ ID NO: 302588 - DNA, 120 bp, Artificial Sequence
  ENSG00000133065_29 (sequence is synthesized)
gaccctgtcacttcctaaaattactcgttctgtcatgccatagaggtcagttttcctctttcttggcttctacccacaaacattcaccaatcatttattcgttcatttagcaaatatgca

SEQ ID NO: 302589 - DNA, 120 bp, Artificial Sequence
  ENSG00000133065_30 (sequence is synthesized)
gcctccgcaagatgagctctcctgcagacaagcatggtctgaaacattctttgagcaatatttattgagtgcctactatgtgttaggtactgtgccaggcactgataagccagtggtaag

SEQ ID NO: 302590 - DNA, 120 bp, Artificial Sequence
  ENSG00000133065_31 (sequence is synthesized)
ggaaacacagctctaacctcacctcattctccaggttacaaaggccatgtgcccctttgaatctggcagagaaagtttcctcgttgtaagtatttgcatctacttcaagccagattcttc

SEQ ID NO: 302591 - DNA, 120 bp, Artificial Sequence
  ENSG00000133065_32 (sequence is synthesized)
tgcctctttctcctttccagacccctactctgtgcagtgctgaccacagctagagccaccgccccattgctcaaccagtatttatttccctaaacgacccttcctcacattcccttccct

SEQ ID NO: 302592 - DNA, 120 bp, Artificial Sequence
  ENSG00000133065_33 (sequence is synthesized)
ccacctctccttaccaagcacccaaaagaggatttagaactagcagggtggacatcatctggttgtttctacttttctctgcctagcacaaaattgggagaaaactggagcctccatccg

SEQ ID NO: 302593 - DNA, 120 bp, Artificial Sequence
  ENSG00000133065_34 (sequence is synthesized)
cagtcacacgtgtacagatctggggatttggatgtaggctttttctaacttctctctcagaagcttctacagaaacccttccatctgtagcctcaagggcccacctccaagggaaggctt

SEQ ID NO: 302594 - DNA, 120 bp, Artificial Sequence
  ENSG00000133065_35 (sequence is synthesized)
aggcaatgatcctgtttctaccaacactgcaccttatcccaggaacctgccctagacctccagagaccatattttctctccctccatttctacccagacctccaggcctccttctggaat

SEQ ID NO: 302595 - DNA, 120 bp, Artificial Sequence
  ENSG00000133065_36 (sequence is synthesized)
catagaaccgtagaattggaaggaattttagaggttttctagttggagttgtgtccaacagaattcattaacaccagcctgggcttgtttttcctcctccctctggacttttttcatctt

SEQ ID NO: 302596 - DNA, 120 bp, Artificial Sequence
  ENSG00000133065_37 (sequence is synthesized)
ttcctccacctcaaaaaatacttacacacagattcttcttgtacaggcatcaaaaccaactcctctgcccctaaggctgtgtccctgtggtctccagccacccctaccccagtcactcgc

SEQ ID NO: 302597 - DNA, 120 bp, Artificial Sequence
  ENSG00000133065_38 (sequence is synthesized)
cccttcctcatctctggaatttggccaggcagtcccagaagactctggagtgacctcctttgcctaaaaagcagacagataggcatgccccaggccctgagtgagcagaggaggactgta

SEQ ID NO: 302598 - DNA, 120 bp, Artificial Sequence
  ENSG00000133065_39 (sequence is synthesized)
gggtgagagggaaagaaaatgaaggtgactttcatggaagtttcatttcttttccccgattgtaccaactgcatgtacttttggcctggctgcaaggagcaatattggtttactctcgta

SEQ ID NO: 302599 - DNA, 120 bp, Artificial Sequence
  ENSG00000133065_40 (sequence is synthesized)
tccttaaaaagttacagaactgtgtcttaagagaattatttatagttactataactgaattgacaaatgtcaacttaactgataaattatatttggtaaaataaagaggacgtttattta

SEQ ID NO: 302600 - DNA, 120 bp, Artificial Sequence
  ENSG00000133065_41 (sequence is synthesized)
ctcttcacagctgagacaacagagaaactggactgaaggcaaaggggccagggattgcaatttgaggggggattgcaaaggatttctggggtgtcaggcagcccagggcagctcagctgt

SEQ ID NO: 302601 - DNA, 120 bp, Artificial Sequence
  ENSG00000133065_42 (sequence is synthesized)
aacgaaaagaagtttatttagctcacagttctggaagctgggaagttcaagattgagcagctgcttctagtgagggcctcatgctgcatccaaacatccaaatggagaaacagaaggaaa

SEQ ID NO: 302602 - DNA, 120 bp, Artificial Sequence
  ENSG00000133065_43 (sequence is synthesized)
actgggcatgtgcaaaatgggcaaaacaagagaggcaaacctcgctttatgacaacccactctcatgggaactatacctttcccaagaaagacattaatccatcttaataacctattcac

SEQ ID NO: 302603 - DNA, 120 bp, Artificial Sequence
  ENSG00000133065_44 (sequence is synthesized)
tcttaaaggcaccacctcccaccaccacatttggggaccaagccacaacatgagttttgttggggacaaactatattcaaaccatagtaacgagggaatagcattataggagtccagtga

SEQ ID NO: 302604 - DNA, 120 bp, Artificial Sequence
  ENSG00000133065_45 (sequence is synthesized)
aagctctgtctttgcccccaacatggggaagccaatgctgaaaagcagggagggattgggaaagaaatacctgatctctctctccacctgccctctggttgcctgctgttgcctcccact

SEQ ID NO: 302605 - DNA, 120 bp, Artificial Sequence
  ENSG00000133065_46 (sequence is synthesized)
gaacaaacagtggaagcagccagcaagggagactgggtaatgcagtctgtggagaccagtcccccagagctcagagcaaggctgagaagagcagggagcaggttgggatgtgagggcaac

SEQ ID NO: 302606 - DNA, 120 bp, Artificial Sequence
  ENSG00000133065_47 (sequence is synthesized)
agagaaatcagcacaggtcctggcggagataccagattccagagtttggagctcaaacctgatccttgaaactggttaccagaatcagcatatgaccataggatgcctgggtctgctcag

SEQ ID NO: 302607 - DNA, 120 bp, Artificial Sequence
  ENSG00000133065_48 (sequence is synthesized)
agcattggagaggaggtgaggcggtgaggcaaggcagggcttcatcccctcagctgtgtaggaaggcaggtgcccatgctctactggtggagaagtcaggctctctgagtctgcagatct

SEQ ID NO: 302608 - DNA, 120 bp, Artificial Sequence
  ENSG00000133065_49 (sequence is synthesized)
gcacgtatcctttccggcactgtcacagctttgccaggggaacatggaactgctgcatctccatagaggggaggatgggggaggctggaagatgcactggaagcaggggtctttgtcttc

SEQ ID NO: 302609 - DNA, 120 bp, Artificial Sequence
  ENSG00000133065_50 (sequence is synthesized)
cttcttagtgccttactcttcttttggggactggtgaatgggtgatgcccacatagaccctaaattaagacagaggacagtgcctctatagatagaagacaaagagtgagaagatcattt

SEQ ID NO: 302610 - DNA, 120 bp, Artificial Sequence
  ENSG00000133067_0 (sequence is synthesized)
gaacgcttgtgtctaactgatgctcctaatgcggaagcccctgaaaggcggttgtggtgcaaaggaaaacccacaggccaaggaatgggaagaccaaggttgacacttgtttgtcaagtg

SEQ ID NO: 302611 - DNA, 120 bp, Artificial Sequence
  ENSG00000133067_1 (sequence is synthesized)
tcaataatcatctctgcccgggacctcagcatgaacaacctcacagagcttcagcctggcctcttccaccacctgcgcttcttggaggagctgcgtctctctgggaaccatctctcacac

SEQ ID NO: 302612 - DNA, 120 bp, Artificial Sequence
  ENSG00000133067_2 (sequence is synthesized)
atcccaggacaagcattctctggtctctacagcctgaaaatcctgatgctgcagaacaatcagctgggaggaatccccgcagaggcgctgtgggagctgccgagcctgcagtcgctgcgc

SEQ ID NO: 302613 - DNA, 120 bp, Artificial Sequence
  ENSG00000133067_3 (sequence is synthesized)
ctagatgccaacctcatctccctggtcccggagaggagctttgaggggctgtcctccctccgccacctctggctggacgacaatgcactcacggagatccctgtcagggccctcaacaac

SEQ ID NO: 302614 - DNA, 120 bp, Artificial Sequence
  ENSG00000133067_4 (sequence is synthesized)
ctccctgccctgcaggccatgaccctggccctcaaccgcatcagccacatccccgactacgcgttccagaatctcaccagccttgtggtgctgcatttgcataacaaccgcatccagcat

SEQ ID NO: 302615 - DNA, 120 bp, Artificial Sequence
  ENSG00000133067_5 (sequence is synthesized)
ctggggacccacagcttcgaggggctgcacaatctggagacactagacctgaattataacaagctgcaggagttccctgtggccatccggaccctgggcagactgcaggaactggggttc

SEQ ID NO: 302616 - DNA, 120 bp, Artificial Sequence
  ENSG00000133067_6 (sequence is synthesized)
cataacaacaacatcaaggccatcccagaaaaggccttcatggggaaccctctgctacagacgatacacttttatgataacccaatccagtttgtgggaagatcggcattccagtacctg

SEQ ID NO: 302617 - DNA, 120 bp, Artificial Sequence
  ENSG00000133067_7 (sequence is synthesized)
cctaaactccacacactatctctgaatggtgccatggacatccaggagtttccagatctcaaaggcaccaccagcctggagatcctgaccctgacccgcgcaggcatccggctgctccca

SEQ ID NO: 302618 - DNA, 120 bp, Artificial Sequence
  ENSG00000133067_8 (sequence is synthesized)
tcggggatgtgccaacagctgcccaggctccgagtcctggaactgtctcacaatcaaattgaggagctgcccagcctgcacaggtgtcagaaattggaggaaatcggcctccaacacaac

SEQ ID NO: 302619 - DNA, 120 bp, Artificial Sequence
  ENSG00000133067_9 (sequence is synthesized)
cgcatctgggaaattggagctgacaccttcagccagctgagctccctgcaagccctggatcttagctggaacgccatccggtccatccaccccgaggccttctccaccctgcactccctg

SEQ ID NO: 302620 - DNA, 120 bp, Artificial Sequence
  ENSG00000133067_10 (sequence is synthesized)
gtcaagctggacctgacagacaaccagctgaccacactgcccctggctggacttgggggcttgatgcatctgaagctcaaagggaaccttgctctctcccaggccttctccaaggacagt

SEQ ID NO: 302621 - DNA, 120 bp, Artificial Sequence
  ENSG00000133067_11 (sequence is synthesized)
ttcccaaaactgaggatcctggaggtgccttatgcctaccagtgctgtccctatgggatgtgtgccagcttcttcaaggcctctgggcagtgggaggctgaagaccttcaccttgatgat

SEQ ID NO: 302622 - DNA, 120 bp, Artificial Sequence
  ENSG00000133067_12 (sequence is synthesized)
gaggagtcttcaaaaaggcccctgggcctccttgccagacaagcagagaaccactatgaccaggacctggatgagctccagctggagatggaggactcaaagccacaccccagtgtccag

SEQ ID NO: 302623 - DNA, 120 bp, Artificial Sequence
  ENSG00000133067_13 (sequence is synthesized)
tgtagccctactccaggccccttcaagccctgtgagtacctctttgaaagctggggcatccgcctggccgtgtgggccatcgtgttgctctccgtgctctgcaatggactggtgctgctg

SEQ ID NO: 302624 - DNA, 120 bp, Artificial Sequence
  ENSG00000133067_14 (sequence is synthesized)
tggtaggtgcgattgcaggcgccaacaccttgactggcatttcctgtggccttctagcctcagtcgatgccctgacctttggtcagttctctgagtacggagcccgctgggagacggggc

SEQ ID NO: 302625 - DNA, 120 bp, Artificial Sequence
  ENSG00000133067_15 (sequence is synthesized)
taggctgccgggccactggcttcctggcagtacttgggtcggaggcatcggtgctgctgctcactctggccgcagtgcagtgcagcgtctccgtctcctgtgtccgggcctatgggaagt

SEQ ID NO: 302626 - DNA, 120 bp, Artificial Sequence
  ENSG00000133067_16 (sequence is synthesized)
ccccctccctgggcagcgttcgagcaggggtcctaggctgcctggcactggcagggctggccgccgcgctgcccctggcctcagtgggagaatacggggcctccccactctgcctgccct

SEQ ID NO: 302627 - DNA, 120 bp, Artificial Sequence
  ENSG00000133067_17 (sequence is synthesized)
acgcgccacctgagggtcagccagcagccctgggcttcaccgtggccctggtgatgatgaactccttctgtttcctggtcgtggccggtgcctacatcaaactgtactgtgacctgccgc

SEQ ID NO: 302628 - DNA, 120 bp, Artificial Sequence
  ENSG00000133067_18 (sequence is synthesized)
ggggcgactttgaggccgtgtgggactgcgccatggtgaggcacgtggcctggctcatcttcgcagacgggctcctctactgtcccgtggccttcctcagctttgcctccatgctgggcc

SEQ ID NO: 302629 - DNA, 120 bp, Artificial Sequence
  ENSG00000133067_19 (sequence is synthesized)
tcttccctgtcacgcccgaggccgtcaagtctgtcctgctggtggtgctgcccctgcctgcctgcctcaacccactgctgtacctgctcttcaacccccacttccgggatgaccttcggc

SEQ ID NO: 302630 - DNA, 120 bp, Artificial Sequence
  ENSG00000133067_20 (sequence is synthesized)
ggcttcggccccgcgcaggggactcagggcccctagcctatgctgcggccggggagctggagaagagctcctgtgattctacccaggccctggtagccttctctgatgtggatctcattc

SEQ ID NO: 302631 - DNA, 120 bp, Artificial Sequence
  ENSG00000133067_21 (sequence is synthesized)
tggaagcttctgaagctgggcggccccctgggctggagacctatggcttcccctcagtgaccctcatctcctgtcagcagccaggggcccccaggctggagggcagccattgtgtagagc

SEQ ID NO: 302632 - DNA, 120 bp, Artificial Sequence
  ENSG00000133067_22 (sequence is synthesized)
cagaggggaaccactttgggaacccccaaccctccatggatggagaactgctgctgagggcagagggatctacgccagcaggtggaggcttgtcagggggtggcggctttcagccctctg

SEQ ID NO: 302633 - DNA, 120 bp, Artificial Sequence
  ENSG00000133067_23 (sequence is synthesized)
gcttggcctttgcttcacacgtgtaaatatccctccccattcttctcttcccctctcttccctttcctctctccccctcggtgaatgatggctgcttctaaaacaaatacaaccaaaact

SEQ ID NO: 302634 - DNA, 120 bp, Artificial Sequence
  ENSG00000133067_24 (sequence is synthesized)
cagcagtgtgatctatagcaggatggcccagtccctggctccactgatcacctctctcctgtgaccatcaccaacgggtgcctcttggcctggctttcccttggccttcctcagcttcac

SEQ ID NO: 302635 - DNA, 120 bp, Artificial Sequence
  ENSG00000133067_25 (sequence is synthesized)
cttgatactgggcctcttccttgtcatgtctgaagctgtggaccagagacctggacttttgtctgcttaagggaaatgagggaagtaaagacagtgaaggggtggagggttgatcagggc

SEQ ID NO: 302636 - DNA, 120 bp, Artificial Sequence
  ENSG00000133067_26 (sequence is synthesized)
acagtggacagggagacctcacagagaaaggcctggaaggtgatttcccgtgtgactcatggataggatacaaaatgtgttccatgtaccattaatcttgacatatgccatgcataaaga

SEQ ID NO: 302637 - DNA, 120 bp, Artificial Sequence
  ENSG00000133067_27 (sequence is synthesized)
cttcctattaaaataagctttggaagagattacacatgatgtctttttcttagagattcacagtgcatgttagtgtaataaagagataagtcctacagtagtaaaatctattgaactttg

SEQ ID NO: 302638 - DNA, 120 bp, Artificial Sequence
  ENSG00000133067_28 (sequence is synthesized)
ggaccgggaggaagcagctgcggccatcgcgccgtgcgtccgcgcccggccgccaggtgccccagtagcccgaccgccgagatgcccagcccgccggggctccgggcgctatggctttgc

SEQ ID NO: 302639 - DNA, 120 bp, Artificial Sequence
  ENSG00000133067_29 (sequence is synthesized)
cgccccccagcccggcccggggcccaccgcctgcccggccccctgccactgccaggaggacggcatcatgctgtctgccgactgctctgagctcgggctgtccgccgttccgggggacct

SEQ ID NO: 302640 - DNA, 120 bp, Artificial Sequence
  ENSG00000133067_30 (sequence is synthesized)
ccctctcccagtccacgttccagacagcatgccgctcctggctttggtttctccggggttttctgttgtcatcagtgtgtggctgtgtacactcctatgcatatttcaggaaaagagtgc

SEQ ID NO: 302641 - DNA, 120 bp, Artificial Sequence
  ENSG00000133067_31 (sequence is synthesized)
tcccacgccccactgggggactgtgggaatgggacctccctaggtgaggccaccaggccagcggtcctggggcgactggtgttctgccattggagcctgggtttaggggtggagactgcc

SEQ ID NO: 302642 - DNA, 120 bp, Artificial Sequence
  ENSG00000133067_32 (sequence is synthesized)
atgaaagcctggagtcttggagtggagggagcacacagagggaagagccagcagtcctgggatgctggggtctggccccgggcttgtttacccacatgcccctccctggcactttctctg

SEQ ID NO: 302643 - DNA, 120 bp, Artificial Sequence
  ENSG00000133069_0 (sequence is synthesized)
aagtgggtgcagaatccatgtctttctgaacgacagttctgctgtgagaagctgccattagagagatccagcaggccccaggactcagctggccagccggtgacactgctcactgctcat

SEQ ID NO: 302644 - DNA, 120 bp, Artificial Sequence
  ENSG00000133069_1 (sequence is synthesized)
tgtcctcagctgtggacctctgtccccctctgctggccactcacagaatttcctgctggcactgtcaagatgaagtccaaggaggaagagactgctgtcgataagggagacctggtggcc

SEQ ID NO: 302645 - DNA, 120 bp, Artificial Sequence
  ENSG00000133069_2 (sequence is synthesized)
ctgagcctccccgccggccatggtgacaccgacggccccatcagcctggacgtgcccgatggggcaccggacccccagcggaccaaggccgccattgaccacctgcaccagaagatcctg

SEQ ID NO: 302646 - DNA, 120 bp, Artificial Sequence
  ENSG00000133069_3 (sequence is synthesized)
aagatcaccgagcagatcaagattgagcaggaggctcgcgacgacaatgtggcagagtatctgaaactggccaacaacgcggacaagcagcaggtgtcacgcatcaagcaagtgttcgag

SEQ ID NO: 302647 - DNA, 120 bp, Artificial Sequence
  ENSG00000133069_4 (sequence is synthesized)
aagaagaaccagaagtcagcccagaccatcgcccagctgcacaagaagctggagcactaccgccggcgcctgaaggagattgagcagaacgggccctcgcggcagcccaaggacgtgctg

SEQ ID NO: 302648 - DNA, 120 bp, Artificial Sequence
  ENSG00000133069_5 (sequence is synthesized)
cgggacatgcagcaggggctgaaggacgtgggcgccaacgtgcgcgcaggcatcagcggctttgggggcggcgtggtggagggcgtcaagggcagcctctctggcctctcacaggccacc

SEQ ID NO: 302649 - DNA, 120 bp, Artificial Sequence
  ENSG00000133069_6 (sequence is synthesized)
cacaccgccgtggtgtccaagccccgggagtttgccagcctcatccgcaacaagtttggcagtgctgacaacatcgcccacctgaaggaccccctggaagatgggccccctgaggaggca

SEQ ID NO: 302650 - DNA, 120 bp, Artificial Sequence
  ENSG00000133069_7 (sequence is synthesized)
gcccgggcactgagcggcagtgccacactcgtctccagccccaagtatggcagcgatgatgagtgctccagcgccagcgccagctcagccggggcaggcagcaactctggggctgggcct

SEQ ID NO: 302651 - DNA, 120 bp, Artificial Sequence
  ENSG00000133069_8 (sequence is synthesized)
ggtggggcgctggggagccctaagtccaatgcactgtatggtgctcctggaaacctggatgctctgctggaagagctacgggagatcaaggagggacagtctcacctggaggactccatg

SEQ ID NO: 302652 - DNA, 120 bp, Artificial Sequence
  ENSG00000133069_9 (sequence is synthesized)
gaagacctgaagactcagctgcagagggactacacctacatgacccagtgcctgcaggaggagcgctacaggtacgagcggctggaggagcagctcaacgacctgactgagcttcatcag

SEQ ID NO: 302653 - DNA, 120 bp, Artificial Sequence
  ENSG00000133069_10 (sequence is synthesized)
aacgagatgacgaacctgaagcaggagctggccagcatggaggagaaggtggcctaccagtcctatgagagggcacgggacatccaggaggccgtggagtcctgcctgacccgggtcacc

SEQ ID NO: 302654 - DNA, 120 bp, Artificial Sequence
  ENSG00000133069_11 (sequence is synthesized)
ccaacgcgcgggcgctgctgggcaagttcatcaacgtgatcctggcgctcatggccgtgctgctggtgttcgtgtccaccatcgccaacttcatcacgcccctcatgaagacacgcctgc

SEQ ID NO: 302655 - DNA, 120 bp, Artificial Sequence
  ENSG00000133069_12 (sequence is synthesized)
gcatcaccagcaccaccctcctggtcctcgtcctgttcctcctctggaagcactgggactccctcacctacctcctggagcacgtgttgctgcccagctgagtggccagccacaccaacc

SEQ ID NO: 302656 - DNA, 120 bp, Artificial Sequence
  ENSG00000133069_13 (sequence is synthesized)
ctgtgctctctggcccccagctggccacacttctccaggagggacccttggacttctttgtgtgtccagtttggcctcctgcccaaactgtccattccagcagctcctgcccccttctct

SEQ ID NO: 302657 - DNA, 120 bp, Artificial Sequence
  ENSG00000133069_14 (sequence is synthesized)
gtacttgcttctgtctgacaccttctccctgttggcctgaagggagcttagaatgcagccctacctggagatagtgcgggcacctgtggccaagtggagcagaggtggacatggggttgg

SEQ ID NO: 302658 - DNA, 120 bp, Artificial Sequence
  ENSG00000133069_15 (sequence is synthesized)
attgttttgattatttatagttacacaaggacttctcccagctgaccctcaggatgccccaagtcaggaagaccattaagaataggaggagagggctctgcctcaactttcctaggaaag

SEQ ID NO: 302659 - DNA, 120 bp, Artificial Sequence
  ENSG00000133069_16 (sequence is synthesized)
agcccacctcggagatagctacggttttctctggtggagatggtgaggatgaaggctggagagtgagggaggaggctctgctggccgcagagaacacagggatgggagggtccctagcct

SEQ ID NO: 302660 - DNA, 120 bp, Artificial Sequence
  ENSG00000133069_17 (sequence is synthesized)
tcgggcacctccagggccagagagcaggctcagagcagctagtgtggagctcagcatccccaccccacccctcctccctgtagagctgatttgaggcctccttctggggctgggctctgc

SEQ ID NO: 302661 - DNA, 120 bp, Artificial Sequence
  ENSG00000133069_18 (sequence is synthesized)
aggccaggtgggtgtggcctgtgttttcccttctgttctttctgcctgtactggatctgttattttcagggaaacaggccccagggcccccctgagcctcaccctaagcccttaggcctc

SEQ ID NO: 302662 - DNA, 120 bp, Artificial Sequence
  ENSG00000133069_19 (sequence is synthesized)
tgagagtgctgttgggttctatttatttatttatttgttcctttgttccctacccgtgcccccagtgtcttccctgctgagtaccaggagaggtcctgccccatcctctctctgaagcca

SEQ ID NO: 302663 - DNA, 120 bp, Artificial Sequence
  ENSG00000133069_20 (sequence is synthesized)
gggcccttccattccatttagcctttggatcatcctggctgggagaagtgggaccgagccacccagccccactatccccaagcagccctacagccgggatgggaggcacgtggcctctct

SEQ ID NO: 302664 - DNA, 120 bp, Artificial Sequence
  ENSG00000133069_21 (sequence is synthesized)
tttatccgtctatttattttgtaagtgtattcgtgtggaggaggttgttgctttatttttttaaggctctggagtgttgtgtatggtttcttttcacatcccagcctcccatgggcactt

SEQ ID NO: 302665 - DNA, 120 bp, Artificial Sequence
  ENSG00000133069_22 (sequence is synthesized)
ctaagaagagaggggatttcttggaaaaggagagaggaatcccctagagcagggaaagcagtgcctgccagctgttgtgcaccttcctgagaaataaatatcctctaaattttcaaacca

SEQ ID NO: 302666 - DNA, 120 bp, Artificial Sequence
  ENSG00000133069_23 (sequence is synthesized)
caggatgccccaagtcaggaagaccattaagaataggaggagagggctctgcctcaactttcctaggaaagagcccacctcggagatagctacggttttctctggtggagatgttggggt

SEQ ID NO: 302667 - DNA, 120 bp, Artificial Sequence
  ENSG00000133069_24 (sequence is synthesized)
cagccccagtcacccatactgagcgtggagatggagaagagaggatttcccatgaaactggtcattaaatgaactcatgcaagagacaagtcaccaacacagacctgatgtctctctgac

SEQ ID NO: 302668 - DNA, 120 bp, Artificial Sequence
  ENSG00000133069_25 (sequence is synthesized)
cggcatcctcctctcgagcttctcagccaagtgtggcctggcctggccaggccaagggtgggaagacctgagtgatgggattccgacttctgagaaggaaaaggccaaggaggggttccc

SEQ ID NO: 302669 - DNA, 120 bp, Artificial Sequence
  ENSG00000133069_26 (sequence is synthesized)
ctctgttggtcttgaagctcttatcatggtttggcagccatggagtccagatgagcaagctgaggctcagaaggatgaagggaactcactcatggacacacagctagtggacagcacacc

SEQ ID NO: 302670 - DNA, 120 bp, Artificial Sequence
  ENSG00000133069_27 (sequence is synthesized)
caggatgaacccaggttggacaacaatgctcctgcctgtaactgaagcgtgacaagccatattcagatgggaaatgagatctaggcaactctcagggtccagccaccagaaggttgagga

SEQ ID NO: 302671 - DNA, 120 bp, Artificial Sequence
  ENSG00000133069_28 (sequence is synthesized)
atgcgggctctaacctacatctgtcgactccaaagccacacagccgcccacacaaggtgcagtggctcacgcctgtaatctcaaagtggaggctgagggaggagcatcagttgggtccag

SEQ ID NO: 302672 - DNA, 120 bp, Artificial Sequence
  ENSG00000133069_29 (sequence is synthesized)
accatttatgcctctgtctttcagctccgtgtcaggtctctgtgtttgttccccattattcagcaagcgttttagtgactcacccatccgagattgtttgaataatgtgtgaagtgttat

SEQ ID NO: 302673 - DNA, 120 bp, Artificial Sequence
  ENSG00000133069_30 (sequence is synthesized)
tcgcagacaaagggctggagaaatccaagatgctaaccaaaaagtggacagcaggtgaccattagttttccttgctgaaaaatccagcagctgtcagagggctccatgtttggccacggt

SEQ ID NO: 302674 - DNA, 120 bp, Artificial Sequence
  ENSG00000133069_31 (sequence is synthesized)
ctgaagcacctgttccacagccgccgtcggtctcgggaaagggagcaccagacgtctcaggattcccagcagcatcagcagcagcagggtatgtccgaccatgactccccagatgagaag

SEQ ID NO: 302675 - DNA, 120 bp, Artificial Sequence
  ENSG00000133069_32 (sequence is synthesized)
gagcgctctccggagatgcatcgcgtctcctacgccatgtccctgcacgacctgcccgcccggcccaccgccttcaaccgcgtgctgcagcagatccgctcccggccctccatcaagcgg

SEQ ID NO: 302676 - DNA, 120 bp, Artificial Sequence
  ENSG00000133069_33 (sequence is synthesized)
ggcgccagcctgcacagcagcagtgggggcggcagcagcgggagcagcagccggcgcaccaagagtagctccctggagccccagcgtggcagccctcacctgctgcgcaaggccccccag

SEQ ID NO: 302677 - DNA, 120 bp, Artificial Sequence
  ENSG00000133069_34 (sequence is synthesized)
gacagcagcctggccgccatcctgcaccagcaccagtgccgtccccgctcttcctccaccaccgacactgctctgctgctggccgacggcagcaacgtgtacctcctggctgaggaggcc

SEQ ID NO: 302678 - DNA, 120 bp, Artificial Sequence
  ENSG00000133069_35 (sequence is synthesized)
tgaaccatttgcaagcctagcctccactggggagaagtctgttctcagagtgaggagctctgcacgcgttggctaaaagggtggcgtggctttgtgaaattgagagctggaggagcccag

SEQ ID NO: 302679 - DNA, 120 bp, Artificial Sequence
  ENSG00000133069_36 (sequence is synthesized)
tgctgagccagcagctagaaccagaagccgaaagaactgttcacatggagctgtttattttccggcctgaggttgccgagacaattggcgagctgtcttgaatatatctctatcaattaa

SEQ ID NO: 302680 - DNA, 120 bp, Artificial Sequence
  ENSG00000133069_37 (sequence is synthesized)
aacagcagctgagataaataatgcacctttgccggaactgccacagggactgcaggctcaggcttctcaagccagctcaccgtccagctgagcgagatgtcagcccaaggaaggaactta

SEQ ID NO: 302681 - DNA, 120 bp, Artificial Sequence
  ENSG00000133069_38 (sequence is synthesized)
gatgccttggaaattgatgcctcacagttattttctccagagaaggtgcagggtctgggctagggaaacggaaaggactctgttgcatttaataaagcctatatcctatggcagcagcca

SEQ ID NO: 302682 - DNA, 120 bp, Artificial Sequence
  ENSG00000133069_39 (sequence is synthesized)
ctaaggagctcaccagaataagccaatgccattcctcatttggcctgagcagctcagagtcaggaagtcagagcgcagaaaatccagcagctgtcagagggctccatgtttggccacggt

SEQ ID NO: 302683 - DNA, 120 bp, Artificial Sequence
  ENSG00000133069_40 (sequence is synthesized)
gtgcctcagtctggagatggcggctgcagagtctgggaactcaggcacacctgctcgcagcccagtgctgcccagggtctgtgaccccgggggcctgacacagtccgcagacagctgggg

SEQ ID NO: 302684 - DNA, 80 bp, Artificial Sequence
  ENSG00000133069_41 (sequence is synthesized)
ggaccatgcggggcaggggccggttgcagggccgggggctgcagccggcgccgatggcggccgactaggacctgcccggc

SEQ ID NO: 302685 - DNA, 120 bp, Artificial Sequence
  ENSG00000133069_42 (sequence is synthesized)
gagggatgcgctgtgccgcccagctcctctccgtcctgcccatgccctgaagcagaaagtttgggggccgggggttgtctcccttctccctcctgcaatgactgcccaaggactcttgct

SEQ ID NO: 302686 - DNA, 120 bp, Artificial Sequence
  ENSG00000133069_43 (sequence is synthesized)
gcccagcctcgactgtgacctgtcttcgctccccaggtcgaaatgaactattccaagctataaccaaggctcccccttctcgcccctccctcacccgcctttaagaattttttttttaat

SEQ ID NO: 302687 - DNA, 120 bp, Artificial Sequence
  ENSG00000133069_44 (sequence is synthesized)
tcaagaaattgtggtctgccatctcccctccttgttaataatttagaccccaggcctcatatgaatataagagggggtgcggtcttccccaagacggcgcgctggaaggacagattcccc

SEQ ID NO: 302688 - DNA, 120 bp, Artificial Sequence
  ENSG00000133069_45 (sequence is synthesized)
ttgccgacccacatacaccatgaagaggtgcagatcggacgagctgcagcaacaacagggcgaggaggatggagctgggctggaagatgccgcttcccacctgccgggcgcggacctccg

SEQ ID NO: 302689 - DNA, 120 bp, Artificial Sequence
  ENSG00000133069_46 (sequence is synthesized)
gcctggggagaccacgggtgctaactctgctggcgggccaacttcagacgccggcgctgccgcggcgcccaacccaggtccccgaagcaagcctcctgatttaaagaaaatccagcagct

SEQ ID NO: 302690 - DNA, 80 bp, Artificial Sequence
  ENSG00000133083_0 (sequence is synthesized)
gcacatccctgcactagtggccgcaaccgaggcgccgcgctccagcagctgctgccgcccagcccggccccgccgccgcc

SEQ ID NO: 302691 - DNA, 120 bp, Artificial Sequence
  ENSG00000133083_1 (sequence is synthesized)
cggcgaggacagcaccaggaggcggcccccagcgcggccacaaagacccccggcggcgtctctccgcggaccggtcctacttgaagtccatcatgtccttcggcagagacatggagctgg

SEQ ID NO: 302692 - DNA, 120 bp, Artificial Sequence
  ENSG00000133083_2 (sequence is synthesized)
agcacttcgacgagcgggataaggcgcagagatacagccgagggtcgcgggtgaacggcctgccgagcccgacgcacagcgcccactgcagcttctaccgcacccgcacgctgcagacgc

SEQ ID NO: 302693 - DNA, 120 bp, Artificial Sequence
  ENSG00000133083_3 (sequence is synthesized)
tcagctccgagaagaaggccaagaaagttcgtttctatcgaaacggagatcgatacttcaaagggattgtgtatgccatctccccagaccggttccgatcttttgaggccctgctggctg

SEQ ID NO: 302694 - DNA, 120 bp, Artificial Sequence
  ENSG00000133083_4 (sequence is synthesized)
atttgacccgaactctgtcggataacgtgaatttgccccagggagtgagaacaatctacaccattgatgggctcaagaagatttccagcctggaccaactggtggaaggagagagttatg

SEQ ID NO: 302695 - DNA, 120 bp, Artificial Sequence
  ENSG00000133083_5 (sequence is synthesized)
tatgtggctccatagagcccttcaagaaactggagtacaccaagaatgtgaaccccaactggtcggtgaacgtcaagaccacctcggcttctcgggcagtgtcttcactggccactgcca

SEQ ID NO: 302696 - DNA, 120 bp, Artificial Sequence
  ENSG00000133083_6 (sequence is synthesized)
aaggaagcccttcagaggtgcgagagaataaggatttcattcggcccaagctggtcaccatcatcagaagtggcgtgaagccacggaaagctgtcaggattctgctgaacaagaaaacgg

SEQ ID NO: 302697 - DNA, 120 bp, Artificial Sequence
  ENSG00000133083_7 (sequence is synthesized)
ctcattcctttgagcaggtcctcaccgatatcaccgatgccatcaagctggactcgggagtggtgaaacgcctgtacacgttggatgggaaacaggtgatgtgccttcaggacttttttg

SEQ ID NO: 302698 - DNA, 120 bp, Artificial Sequence
  ENSG00000133083_8 (sequence is synthesized)
gtgatgatgacatttttattgcatgtggaccggagaagttccgttaccaggatgatttcttgctagatgaaagtgaatgtcgagtggtaaagtccacttcttacaccaaaatagcttcat

SEQ ID NO: 302699 - DNA, 120 bp, Artificial Sequence
  ENSG00000133083_9 (sequence is synthesized)
catcccgcaggagcaccaccaagagcccaggaccgtccaggcgtagcaagtcccctgcctccaccagctcagttaatggaacccctggtagtcagctctctactccgcgctcaggcaagt

SEQ ID NO: 302700 - DNA, 120 bp, Artificial Sequence
  ENSG00000133083_10 (sequence is synthesized)
cgccaagcccatcacccaccagcccaggaagcctgcggaagcagaggagctctcagcatggcggctcctctacgtcacttgcgtccaccaaagtctgcagctcgatggatgagaacgatg

SEQ ID NO: 302701 - DNA, 120 bp, Artificial Sequence
  ENSG00000133083_11 (sequence is synthesized)
gccctggagaagaagtgtcggaggaaggcttccagattccagctacaataacagaacgatataaagtcggaagaacaataggagatggaaattttgctgttgtcaaggaatgtgtagaaa

SEQ ID NO: 302702 - DNA, 120 bp, Artificial Sequence
  ENSG00000133083_12 (sequence is synthesized)
gatcgactgctagagagtatgctctgaaaattatcaagaaaagcaaatgtcgaggcaaagagcacatgatccagaatgaagtgtctattttaagaagagtgaagcatcccaatatcgttc

SEQ ID NO: 302703 - DNA, 120 bp, Artificial Sequence
  ENSG00000133083_13 (sequence is synthesized)
ttctgattgaggagatggatgtgccaactgaactgtatcttgtcatggaattagtaaaggggggagacctttttgatgccattacttccactaacaaatacaccgagagagacgccagtg

SEQ ID NO: 302704 - DNA, 120 bp, Artificial Sequence
  ENSG00000133083_14 (sequence is synthesized)
ggatgctgtacaacctagccagcgccatcaaatacctgcatagcctgaacatcgtccaccgtgatatcaagccagagaacctgctggtgtatgagcaccaagatggcagcaaatcactga

SEQ ID NO: 302705 - DNA, 120 bp, Artificial Sequence
  ENSG00000133083_15 (sequence is synthesized)
agctgggtgactttggactggccaccattgtagacggccccctgtacacagtctgtggcaccccaacatacgtggctccagaaatcattgcagagactggatacggcctcaaggtggaca

SEQ ID NO: 302706 - DNA, 120 bp, Artificial Sequence
  ENSG00000133083_16 (sequence is synthesized)
tctgggcagcaggtgtaatcacttatatcctgctgtgtggtttccctccattccgtggaagtggtgatgaccaggaggtgctttttgatcagattttgatggggcaggtggactttcctt

SEQ ID NO: 302707 - DNA, 120 bp, Artificial Sequence
  ENSG00000133083_17 (sequence is synthesized)
ctccatactgggataatgtttccgattctgcaaaggagctcattaccatgatgctgttggtcgatgtagatcagcgattttctgctgttcaagtacttgagcatccctgggttaatgatg

SEQ ID NO: 302708 - DNA, 120 bp, Artificial Sequence
  ENSG00000133083_18 (sequence is synthesized)
atggcctcccagaaaatgaacatcagctgtcagtagctggaaagataaagaagcatttcaacacaggccccaagccgaatagcacagcagctggagtttctgtcatagcactggaccacg

SEQ ID NO: 302709 - DNA, 120 bp, Artificial Sequence
  ENSG00000133083_19 (sequence is synthesized)
ggtttaccatcaagagatcagggtctttggactactaccagcaaccaggaatgtattggataagaccaccgctcttgataaggagaggcaggttttccgacgaagacgcaaccaggatgt

SEQ ID NO: 302710 - DNA, 120 bp, Artificial Sequence
  ENSG00000133083_20 (sequence is synthesized)
gaggagccggtacaaggcgcagccagctcctcccgaactcaactcggaatcggaagactactccccaagctcctccgagactgttcgctcccctaactcgcccttttaataagacccttt

SEQ ID NO: 302711 - DNA, 120 bp, Artificial Sequence
  ENSG00000133083_21 (sequence is synthesized)
tactcaaagtcctagcttaaccctttgagactctgagatttttttcccccaaatttgtgtaaaacagtttcatctgatctatctagcgctcaatgcttgaatggcagaactgaaagtgtt

SEQ ID NO: 302712 - DNA, 120 bp, Artificial Sequence
  ENSG00000133083_22 (sequence is synthesized)
ttcaggtatctttgtagcggtttccctttactgaataagatgacacgtggtgattgtgaagatggtaatttgctgctaatagagtcctcaaagggttaaggccaatttgcaatttttttt

SEQ ID NO: 302713 - DNA, 120 bp, Artificial Sequence
  ENSG00000133083_23 (sequence is synthesized)
cttgttaaccctctgagtgcatagaattttattgagaattcttgtttgggaatttttcaggcctttggatgtatacacacatgtttcttgattttactgcagatcaaggggtgttgttag

SEQ ID NO: 302714 - DNA, 120 bp, Artificial Sequence
  ENSG00000133083_24 (sequence is synthesized)
atgctgaaatgtccagaaaagaaggacatttagaatgatatcttgtttgtccttttctgtgggtttagaacgtggcaggtttataacttcgacacacgcacggttctttcttcttcacaa

SEQ ID NO: 302715 - DNA, 120 bp, Artificial Sequence
  ENSG00000133083_25 (sequence is synthesized)
tcctattcagaaacagattttttttttcattagagatatgactgtcagttgcagtgagttctgcatcccaagtggagggaattgggtttgtggcaaagagcttgacccaggaaatagatg

SEQ ID NO: 302716 - DNA, 120 bp, Artificial Sequence
  ENSG00000133083_26 (sequence is synthesized)
gtgccccccaaattgtctccacatgaagatgtactgatgacgccccagaaatgctgcttccatatcagctgctgctagcgccagcgcagactctcagggagtcaccacagcttgtcttgt

SEQ ID NO: 302717 - DNA, 120 bp, Artificial Sequence
  ENSG00000133083_27 (sequence is synthesized)
gcttggtgagtgagggtctctctactcagtgtcagacatctacaggaaagaaacaactggtggaaaagagcaataaattgcccggtgctctgcagggctggaatttcaaacagaaagagg

SEQ ID NO: 302718 - DNA, 120 bp, Artificial Sequence
  ENSG00000133083_28 (sequence is synthesized)
gaataagatcctgtgatttttctcacctgcttttccacgcactgtggtcatcactgtgcaatctacatctagtatgaaatccacacataggagagctggggcacaaggggactggaggca

SEQ ID NO: 302719 - DNA, 120 bp, Artificial Sequence
  ENSG00000133083_29 (sequence is synthesized)
gttgctttgcaagatggctgaggagaaagcacactgggaacacaatccagaatgttctaacaataagttttcagtgaataaaccactggcaagacaattccatgtgcacctttaggttac

SEQ ID NO: 302720 - DNA, 120 bp, Artificial Sequence
  ENSG00000133083_30 (sequence is synthesized)
ctatatagtctcctaggaagatcaggatgaaagacctagatgatacccctgaggataaaacctccatcccctaaaatgattttttttaaataccactgtctttagctgtccaggaggtca

SEQ ID NO: 302721 - DNA, 120 bp, Artificial Sequence
  ENSG00000133083_31 (sequence is synthesized)
gagtgttttttctgtctttgggccaagtcctgtctgagacctgtattttcactcttgttaccaaatctatctccctagtgcagtgtctccaggcctgagtttcttctggaacagattcca

SEQ ID NO: 302722 - DNA, 120 bp, Artificial Sequence
  ENSG00000133083_32 (sequence is synthesized)
ttttagaatggggattcacaggttctgtgcatcaccacagtgctcagagaggattctcctggggtgtcttagaggcaggtgcccaactcaaatgtattcccaaggtttgctgggctctgg

SEQ ID NO: 302723 - DNA, 120 bp, Artificial Sequence
  ENSG00000133083_33 (sequence is synthesized)
gatccacgagacaaccagagagggatatctcatgaaatttgcatctggtggctgaacagtacctatgttctctgttttgaatatactttaatacctgagagtcttaaaatttgtgaacaa

SEQ ID NO: 302724 - DNA, 120 bp, Artificial Sequence
  ENSG00000133083_34 (sequence is synthesized)
cgtttctatagtcctttattttcaaatgcacattgatcttcacttgctgcatttttactcttcaaccctgaaactatggtctacattaatatggatttttaaatcacatgtcattacttt

SEQ ID NO: 302725 - DNA, 120 bp, Artificial Sequence
  ENSG00000133083_35 (sequence is synthesized)
tgcaacaccatcaccaaaattttttgctcttttacatttaggttcatctctgtggtctgtgttgtcctgacatgtaaaaagcatatcgtttattgaggtttttttcccccccttttagag

SEQ ID NO: 302726 - DNA, 120 bp, Artificial Sequence
  ENSG00000133083_36 (sequence is synthesized)
catccggaagtgataacacgcaaaatcacaaagtagcataaatcagtaaattagttgagttgtttttgggggggaggtgggggtagggggcacagaacaccagaaagagtgttggtgtgt

SEQ ID NO: 302727 - DNA, 120 bp, Artificial Sequence
  ENSG00000133083_37 (sequence is synthesized)
aggtagattccatattaatgaggaacactgaactagttggaaattactgctttctctagaaatataaagcaaagcactattccaaggctatggagtagctctacagcctggcctcaactc

SEQ ID NO: 302728 - DNA, 120 bp, Artificial Sequence
  ENSG00000133083_38 (sequence is synthesized)
taaaagtgtgaagaatgcaatgggcagagacctacctgcagtggactgtcattttcctttctttctctgaattactgctttttctgtgggcattaactatattgctacagcatctagtgt

SEQ ID NO: 302729 - DNA, 120 bp, Artificial Sequence
  ENSG00000133083_39 (sequence is synthesized)
actgagcctgcggtgcatggctcaggccttttcccatcgacgtctagggggactctggaccgtgtgaagctagggggtgtttctcagcacactgcagaagggcagctcagaagaatgcag

SEQ ID NO: 302730 - DNA, 120 bp, Artificial Sequence
  ENSG00000133083_40 (sequence is synthesized)
ggcccattcagcatggggatcccagcacatcactgtagaatttgagtgatctatgctgaataaacagtggaatgtgaccagtcaagtagaaatcttgagtaatcagatggaatgcaatct

SEQ ID NO: 302731 - DNA, 120 bp, Artificial Sequence
  ENSG00000133083_41 (sequence is synthesized)
ttctaacattaagctaccaagatcctgaatgtcagagatgtactcagagggttaacagacaagcacaaggcatgctgactacattggtgtatccagattgctttgcttttagccagtgct

SEQ ID NO: 302732 - DNA, 120 bp, Artificial Sequence
  ENSG00000133083_42 (sequence is synthesized)
ttctaatttttttctcgacattcttgggatagttcaagtttgaaataattaagtggtggtgttctttaaggaatttctataaccaaattgatcttatttttgatttcacttatcatagaa

SEQ ID NO: 302733 - DNA, 120 bp, Artificial Sequence
  ENSG00000133083_43 (sequence is synthesized)
caaatatgtatcattatggcagtgtatctatgtaattatcaatttaatcatcaccaccggtgtttccatattttttcccaagtatttaatatagctctcttatggtggtggcctggtgat

SEQ ID NO: 302734 - DNA, 120 bp, Artificial Sequence
  ENSG00000133083_44 (sequence is synthesized)
ggggaccgtctttcttttactgacacatgaccaatcatatggtattttcaagggaattttaagattcatcttttcagtttgatagtagactagttaaggaagaactctttcattacttgc

SEQ ID NO: 302735 - DNA, 120 bp, Artificial Sequence
  ENSG00000133083_45 (sequence is synthesized)
atcgtgtaaatcatctctgtagacatgtgttcatattaatgaacacattttttctcaacattgtagcagaaatcattttattcgtcatgatcaatgaatatgtgatttgctccagatcgt

SEQ ID NO: 302736 - DNA, 120 bp, Artificial Sequence
  ENSG00000133083_46 (sequence is synthesized)
tagaaggaaaagtaagatttcagtcatcaaaaatgtttttaccgtagccctcatctaacttacacgtggtgcatattaaaataagcagagaaaaaaaaatgtgaataaactactgaaaac

SEQ ID NO: 302737 - DNA, 120 bp, Artificial Sequence
  ENSG00000133083_47 (sequence is synthesized)
ccatgaatgaaggctaaaattgcaatcctttaccctttgaggcatatttcagttgaaaacaaaaagaaaagaaaatttggcttagagggtcacagagctcccatatgaccaagtctcaag

SEQ ID NO: 302738 - DNA, 120 bp, Artificial Sequence
  ENSG00000133083_48 (sequence is synthesized)
cacattaaatcatggttgtttactggccaagggcgtccactagacaactctatcccttgcgctgaagctcaatcgtgctgagggagagctttcttaatattactgtgttgctcttagccc

SEQ ID NO: 302739 - DNA, 120 bp, Artificial Sequence
  ENSG00000133083_49 (sequence is synthesized)
ttctctgggttaggatctgtcagcatttctatgataaactcctattctcaaaggtttttaatttgaccataaaaatgtgccccaggctgaagtttgctatacagggctgtaccaaagagt

SEQ ID NO: 302740 - DNA, 120 bp, Artificial Sequence
  ENSG00000133083_50 (sequence is synthesized)
gaaggtttacttccttctctttccaacttcttccccattctccaaggaaaagaacaacaaaaaaatctggtatggtccctccttaatagtgatttcagaattttggaaagcaccaagatc

SEQ ID NO: 302741 - DNA, 120 bp, Artificial Sequence
  ENSG00000133083_51 (sequence is synthesized)
caagatggtagttttaatgtagttactcattcgcacacattttttaaatttaatgggtcacctggcatatattgtagataacatatcttttctataatttgtaagtcaataattttttta

SEQ ID NO: 302742 - DNA, 120 bp, Artificial Sequence
  ENSG00000133083_52 (sequence is synthesized)
actgctacatgatatttttttttgcccaaagattttaaaagacttgaagttggtcagttcaaaactcagatttttctacacattgtctgccatgtccattaggagtttggggaaaatact

SEQ ID NO: 302743 - DNA, 120 bp, Artificial Sequence
  ENSG00000133083_53 (sequence is synthesized)
ctcacacagacccttactttgcatgcagtttagagggtaagatacgtgcttcttttggggataaagatttccttacttaattgtcaaatttcatggagccattctagtctgttggggaaa

SEQ ID NO: 302744 - DNA, 120 bp, Artificial Sequence
  ENSG00000133083_54 (sequence is synthesized)
atagtgattaaaagcacttccaaaattaacattttttgacaattcagatatgaaaagaagcaggggaaaataatacactttactcttttcttgcttaaaggcaaacaaatcaatgaaact

SEQ ID NO: 302745 - DNA, 120 bp, Artificial Sequence
  ENSG00000133083_55 (sequence is synthesized)
tgaggacacactaaacatttgataactgcaaatgtgctttaaaaattggttcaatggtgcttacacatgaaacggtaacaaatggggttcctaggacgtcagaaggaatctttagtttgt

SEQ ID NO: 302746 - DNA, 120 bp, Artificial Sequence
  ENSG00000133083_56 (sequence is synthesized)
atgtaattacacactagaggaggaggtgcttttaagccagtcttttatttttaatcatctcaaatatgcaaccatacatgcagtaacattaagggtcgtaaactggtgggaaacaggaac

SEQ ID NO: 302747 - DNA, 120 bp, Artificial Sequence
  ENSG00000133083_57 (sequence is synthesized)
ttcagtggagaggcttaaatgcctctggttagagtgggggtttttgtttgtttgtttattgttgggtttcaacactgagcatcatttctgtgatcaagtttctaactggcatgtgttttg

SEQ ID NO: 302748 - DNA, 120 bp, Artificial Sequence
  ENSG00000133083_58 (sequence is synthesized)
atcatgaggtttaccatatcttgcccatacagacaaatgagagatctagtttcattttgttccctaaagaaagaacactctctaaaattaaatcatacctgtaaatttcttcagcatttg

SEQ ID NO: 302749 - DNA, 120 bp, Artificial Sequence
  ENSG00000133083_59 (sequence is synthesized)
tttctgttcaatgaaattgagacccttaatgttgctttaatgtaaaattgaatattttgtctgtgatatactttaataatttaaagtaagtaatagttctaaagtcttcactgttgctac

SEQ ID NO: 302750 - DNA, 120 bp, Artificial Sequence
  ENSG00000133083_60 (sequence is synthesized)
taagagaaaatagaattttaaaggtgatgataaagatgctataatgtcagttcactccagtccaatcaaatgtagtaagaaaaagtccttgaatagttctctagggacaatttctcactt

SEQ ID NO: 302751 - DNA, 120 bp, Artificial Sequence
  ENSG00000133083_61 (sequence is synthesized)
gccattgacattaatctttggtgtattctcagaaaaaataaaaagaaattgaaactggtccaaggttatagtcatatcctcgataacttttgaaaaaaaattttattaggaaattaatac

SEQ ID NO: 302752 - DNA, 120 bp, Artificial Sequence
  ENSG00000133083_62 (sequence is synthesized)
tagcctttttcattctggctgaaagaaaattattaaaggattagttgagtgtgaaattcaacagtattttgctcatacatactaaaaaggtgcgtagggacttggcgcatttaaacaagt

SEQ ID NO: 302753 - DNA, 120 bp, Artificial Sequence
  ENSG00000133083_63 (sequence is synthesized)
ttctgaaaggtttcaatttgactcaagaaaaaaattcaatatttcttttgaaaatactgaatttatcacttgctgcatggatcagatggcataggttaatctttgattttcagaatccta

SEQ ID NO: 302754 - DNA, 120 bp, Artificial Sequence
  ENSG00000133083_64 (sequence is synthesized)
atgaaataactttcaaacaatttgtgtccttaattaaaggtggaatgagatccaatttttccccctaatccttcagtttaagctgatacatgtaggttaatgtggaatgaaatcatctgt

SEQ ID NO: 302755 - DNA, 120 bp, Artificial Sequence
  ENSG00000133083_65 (sequence is synthesized)
gatatattatgttcatttatcaactgagcttttttgatgttgcctgtttttatgtaaaacatgttcttaaagttaataaaataatagtacttggtgtatgaactactacataatacctta

SEQ ID NO: 302756 - DNA, 120 bp, Artificial Sequence
  ENSG00000133083_66 (sequence is synthesized)
acttcattatgattcagtgcaaagtactgacagcactggggcttccggaagggagtggtgtcgggatgggggttgctgttggcaagaggcttaattgacacctttgatgtagcctaagac

SEQ ID NO: 302757 - DNA, 120 bp, Artificial Sequence
  ENSG00000133083_67 (sequence is synthesized)
agaacctgcacctcccactgctgcttgggagacgtcagctttacgcagaaaaggcatctgctgatgaatcctgcatctcattcagcctgctctgggagcagccttagccatccttaaact

SEQ ID NO: 302758 - DNA, 120 bp, Artificial Sequence
  ENSG00000133083_68 (sequence is synthesized)
catccaaccgattcccatttccgcgggtgcttggcttagtgctgagacgggattccgccgttggtattcaggtccaacactaagactgtgtccatgttagaactcatagaagttaatgga

SEQ ID NO: 302759 - DNA, 120 bp, Artificial Sequence
  ENSG00000133083_69 (sequence is synthesized)
acacattcagttcacgaaggaatagcccagctgtgttcttagggggaattctctctatgcaaggctttaaaaattagtcatgcggtcagagtgtagctttcccacatgtcctccatagca

SEQ ID NO: 302760 - DNA, 120 bp, Artificial Sequence
  ENSG00000133083_70 (sequence is synthesized)
cagtgtgtatttcatgagcataattcaaaaacagctatttcaaaaatgtcccttgtcatatattacgttcctgcctgggccactgacttggataaatacaaataaaccaaataccattca

SEQ ID NO: 302761 - DNA, 120 bp, Artificial Sequence
  ENSG00000133083_71 (sequence is synthesized)
gaagcagagggacctgtaccgccccctctcttcggatgacttggattcagtaggagactcagtgtaaaagaaacaatggagcaatgtatatggtttgtgattgggtgaaggtttcacatt

SEQ ID NO: 302762 - DNA, 120 bp, Artificial Sequence
  ENSG00000133083_72 (sequence is synthesized)
tctgaagcaaaagtcttacagcaaaatacacaaaagagttttgcataccttgaaatgataaaagaccaaatcatccaaaagtaaatatgtatgcattttgttttcgtgatgttcaacctt

SEQ ID NO: 302763 - DNA, 120 bp, Artificial Sequence
  ENSG00000133083_73 (sequence is synthesized)
gaaattgagagatttttaaaaatatctcccacatggatttgattggggagagtttgaacacaaaatgctgagatttttgtacagggcctggctctagatgaatttcatacacggacccaa

SEQ ID NO: 302764 - DNA, 120 bp, Artificial Sequence
  ENSG00000133083_74 (sequence is synthesized)
tattgagtacaagaacacactaaccatgtggcaatatagagccagaatttctgcagatggagttttcttcttaattataagtagacatagagatataatttttctgtactttctgtaaag

SEQ ID NO: 302765 - DNA, 120 bp, Artificial Sequence
  ENSG00000133083_75 (sequence is synthesized)
catattaaaacggcactagcaggcatattttttctaaaggttatattgtttttaaaatttgaattgcttggtttttagaggtacttttattacaaaataataaaaatacttgggtagatt

SEQ ID NO: 302766 - DNA, 120 bp, Artificial Sequence
  ENSG00000133083_76 (sequence is synthesized)
ttttttctccctagacagtagaaaaagctacttactgttttgtgggttagtacatccgagagaaaaagaaaaattatgacaacgacacatctcataaagactctgaagttaggctttagg

SEQ ID NO: 302767 - DNA, 120 bp, Artificial Sequence
  ENSG00000133083_77 (sequence is synthesized)
aacttgccttgtttttgttgtcaagtaaattttattttttaaagttattttattagaaacagtataaatttagcttaagctatatgccaatatgaagaacttggccaatggcattgctat

SEQ ID NO: 302768 - DNA, 120 bp, Artificial Sequence
  ENSG00000133083_78 (sequence is synthesized)
agattgtataattttttcttacaatcatatacataattttttaaatgtgtaaaaactaaagctgggaattttttttttttccatacagacctaaaaaaaattgtgtctggactttttcca

SEQ ID NO: 302769 - DNA, 120 bp, Artificial Sequence
  ENSG00000133083_79 (sequence is synthesized)
agaaatccatttgaaaagcaaaattcacttaaatggtgctgtataaatcaggcccagagtatccaaatctccactctgaaaaattctcaatcttgctggtgttttggaaattttcatatg

SEQ ID NO: 302770 - DNA, 120 bp, Artificial Sequence
  ENSG00000133083_80 (sequence is synthesized)
caaaactccttttgtgttaaaccaattaagtctatgattataacccattgttaaacattaacctactaattctgctcttctagtcctctattttaaaaattatagtcgtctttgcttaaa

SEQ ID NO: 302771 - DNA, 120 bp, Artificial Sequence
  ENSG00000133083_81 (sequence is synthesized)
cataaaataatgattttaaagtctgaatgttaaaaattaatttaatgtgtatggtctattgtatttaagccatatcctagtggtcatttacttttactagttcaaacactaacagtttaa

SEQ ID NO: 302772 - DNA, 120 bp, Artificial Sequence
  ENSG00000133083_82 (sequence is synthesized)
gacttgtgaagcatggttttgatattctccaggcttgacatatctcagtaggtgataaattaaaaatgtttgatgccatttggaggcttttacatgattttttttttcaaattttacttg

SEQ ID NO: 302773 - DNA, 120 bp, Artificial Sequence
  ENSG00000133083_83 (sequence is synthesized)
aaaacaatttttaaatgttttattcaagatggagagaaattcagttgtcacacgctgttttaaatgttattgatttatctccctgataaattgttcaactagcaaattttaccatctggt

SEQ ID NO: 302774 - DNA, 120 bp, Artificial Sequence
  ENSG00000133083_84 (sequence is synthesized)
ttatagttacgtatgttaccatctcactttacaagtgaataaaatattccaaccaaaagaagaggaagaagaaaaaacgtccaggcaatctaacagcatttgaaaacttagccctataat

SEQ ID NO: 302775 - DNA, 120 bp, Artificial Sequence
  ENSG00000133083_85 (sequence is synthesized)
aattagtgcctcattatgctgtctgttggagagaaagacacttctctggcaggttattcaagagctgcaaactgaaacattccatcttgaaagaacagttcataataatacctgttccag

SEQ ID NO: 302776 - DNA, 120 bp, Artificial Sequence
  ENSG00000133083_86 (sequence is synthesized)
acttcaggttttaaaactgtttccaatagaaatgaccagagactcctgctgagatcaaaaggctgctttattttagctgaaacagtaaacatctgtgaggttgcctatgctggtgtctgt

SEQ ID NO: 302777 - DNA, 120 bp, Artificial Sequence
  ENSG00000133083_87 (sequence is synthesized)
tttagttatgtctttgtaaaatgcattacttaatacagttgggtccataaaagattagtatgtatttgactaaactgccaaaaatacaaagaaagcagtggaacagttactttaaaactg

SEQ ID NO: 302778 - DNA, 120 bp, Artificial Sequence
  ENSG00000133083_88 (sequence is synthesized)
gtggggtcagatggtccagaacaaaaataaattccaataattttaacttccctgcactgtcaatcttatggacaactactgctagaaaggtccaataaatgctatttgttctaagtggta

SEQ ID NO: 302779 - DNA, 120 bp, Artificial Sequence
  ENSG00000133083_89 (sequence is synthesized)
ggccaactttccattcaagcagttccaagggaagtgctttccacagcatttaatctcttgaacatatgacttctattaaaggactgttcaggggctatatatatcatttactttttgaaa

SEQ ID NO: 302780 - DNA, 120 bp, Artificial Sequence
  ENSG00000133083_90 (sequence is synthesized)
gtaaagtccctcagagattgaaacagcacaccatttatagtctttgagatctctttttatgcaaaacataattctattaaactaaagcagaaataaaaatttcttagcaacaaacacaga

SEQ ID NO: 302781 - DNA, 120 bp, Artificial Sequence
  ENSG00000133083_91 (sequence is synthesized)
agttttcagttcattggtggaacagaattggtgatttataggcacttatgattgagttacttatagaattctttataaaaaaaattcggcaatgaatttttaaattgttctactgagcgg

SEQ ID NO: 302782 - DNA, 120 bp, Artificial Sequence
  ENSG00000133083_92 (sequence is synthesized)
ggaatgcttcagcaaaagccacgcagttttgtcctaatgataatccttaaatgcgctctgaagacatcgtgctgtagttcaaagttcgatactttttcacttgcactcacttttttctta

SEQ ID NO: 302783 - DNA, 120 bp, Artificial Sequence
  ENSG00000133083_93 (sequence is synthesized)
gatgtagacattgtagaaaaagatattaggaatatttccctgctttcagcattttagaagtgcaaaagttaaaaatatataaagtatgaagttcagtgtgaactcaaaagactatagtgc

SEQ ID NO: 302784 - DNA, 120 bp, Artificial Sequence
  ENSG00000133083_94 (sequence is synthesized)
tgaaagccacatggtgtgtttttgtcttgtttaatcaactaggcagggggaaaaatctagacagtttctgtactgccatagaattttaagaagtgtcaggttctctcatctgtatacatc

SEQ ID NO: 302785 - DNA, 120 bp, Artificial Sequence
  ENSG00000133083_95 (sequence is synthesized)
cctgtgcgcatatattggctcatctaaatattaagaacccaaaaaacattttctaaaaccatttgaaccagcgctgatgtactatatatatatataccctacataaccagccggggaatt

SEQ ID NO: 302786 - DNA, 75 bp, Artificial Sequence
  ENSG00000133083_96 (sequence is synthesized)
actatatatatatataccctacataaccagccggggaatttccaacacatgccctgaagatctatacatgattgg

SEQ ID NO: 302787 - DNA, 120 bp, Artificial Sequence
  ENSG00000133083_97 (sequence is synthesized)
gaaagtgaatgaatatatagaataatattcctgaaaattccacatattttaattcttggactgctaaatttttcatatgtggccatatatctatacaggtgtttgggtgtttatgtaaat

SEQ ID NO: 302788 - DNA, 120 bp, Artificial Sequence
  ENSG00000133083_98 (sequence is synthesized)
ttgccaggcttggtgtgtatgtgggtatgcttctgtaagtatctgtgtatgtgtataaaccatcaacagtaaagtatagtatttgtgatacagccttataagttactggctcttgtggaa

SEQ ID NO: 302789 - DNA, 120 bp, Artificial Sequence
  ENSG00000133083_99 (sequence is synthesized)
ttatacataaaatcttcatgtaataaagtgttactctgtgacatattagttggggcatgtttaaattaaaaagcagtttgctcaactggtatggcaaatggttcaaaatattcagatata

SEQ ID NO: 302790 - DNA, 120 bp, Artificial Sequence
  ENSG00000133083_100 (sequence is synthesized)
actggtatggcaaatggttcaaaatattcagatatactgatttataaaaaaattgaaattcagctaaatccaatattgtgttaactattaaatataagtaacattaatgtttatattgat

SEQ ID NO: 302791 - DNA, 120 bp, Artificial Sequence
  ENSG00000133083_101 (sequence is synthesized)
tatgatttttttctattgtgtgtgtatggatggcttgtagtggttgccaatcactatactctaaaaaaatgaaacattgatacagttgcagattgtcaagtataatgttggaacataaat

SEQ ID NO: 302792 - DNA, 120 bp, Artificial Sequence
  ENSG00000133083_102 (sequence is synthesized)
agaagaaaatccagagtatatttgatatgaagtaagtttaataacaaagccagataacctgtaaggcgattctgtatgttctttcaaaactctaaactgttgacaaattttgaatatact

SEQ ID NO: 302793 - DNA, 120 bp, Artificial Sequence
  ENSG00000133083_103 (sequence is synthesized)
tgctgtatgtgtgtatatatctacataaatatatacacacttgaaaatgttaatcgaatgaatttactatatatgcatacatttgctcatttatgcatatttgcattaaccttgctagca

SEQ ID NO: 302794 - DNA, 120 bp, Artificial Sequence
  ENSG00000133083_104 (sequence is synthesized)
tctctatttgtgcatgttagtgacaactgtctttgattgaaatattgcacagaggcatagtgtgaaaaatagagatacactgaattcaatataccaattgcctgatatagcgtgttgtac

SEQ ID NO: 302795 - DNA, 120 bp, Artificial Sequence
  ENSG00000133083_105 (sequence is synthesized)
tgtcagttgaaaaatatttgtaattttgtgcctgttatgcatgtggaaaaaagaggaaatcagaggccctcactataatttttaagggtgcatgacatatgatgtctttaaaatgtggtt

SEQ ID NO: 302796 - DNA, 120 bp, Artificial Sequence
  ENSG00000133083_106 (sequence is synthesized)
cattttagtagattatggataaattccaagatagtataaatgatgcatgtaatacctgagtgtttgtattatatatggccacaaaatgtttttgaagccagggtagtagatatctaaaag

SEQ ID NO: 302797 - DNA, 120 bp, Artificial Sequence
  ENSG00000133083_107 (sequence is synthesized)
ttataggcaaagaagtatgaaagttaactttctgtgatgtgtttttgaggagttgatactcatcagtaagcaaggaattgagtttattttttctaagaactctttactttgaaatatatt

SEQ ID NO: 302798 - DNA, 120 bp, Artificial Sequence
  ENSG00000133083_108 (sequence is synthesized)
atgaatgttgtaaatttggataacgtttttataaagaggttacatactttctgctcacagtttcagttgattggatgtgtattctctttaaaaaaaaacattttgtgttaaaacatttga

SEQ ID NO: 302799 - DNA, 120 bp, Artificial Sequence
  ENSG00000133083_109 (sequence is synthesized)
cacagcaatatattttttaaatccatcaactaagtccatcagcagagctttatagagctaagggttgacaaaatgtttcattgaactacccaattttgaaagttcagttactttgtgctg

SEQ ID NO: 302800 - DNA, 120 bp, Artificial Sequence
  ENSG00000133083_110 (sequence is synthesized)
tggtttcattgtaaaatgttgtaccttgtgtttcacactggaccatgttattcctcttgaagttaactttgtgacacttaccaccttagaataactatataataaacaggaaaaactgcc

SEQ ID NO: 302801 - DNA, 85 bp, Artificial Sequence
  ENSG00000133083_111 (sequence is synthesized)
ggtcccagctactcaggaggctgaggtggtaggattgcttgaccctggaaaccagaggtggtaatgacagagtgagacatcatct

SEQ ID NO: 302802 - DNA, 120 bp, Artificial Sequence
  ENSG00000133083_112 (sequence is synthesized)
gctgctttatcagtttcattttaatcttgattgagatgccacaccccctcattcctttttttcacccattattcacactgacatttgccagctttctttccattgcacatgctcagtatc

SEQ ID NO: 302803 - DNA, 120 bp, Artificial Sequence
  ENSG00000133083_113 (sequence is synthesized)
aattttccttatggttaaaaggacagtatatttagtgctaatgccaaagcattttcctgacgttgctaattaaaacaatgatttccagtgctcttctgtcccttaacaaatggaagaaca

SEQ ID NO: 302804 - DNA, 120 bp, Artificial Sequence
  ENSG00000133101_0 (sequence is synthesized)
gagacgttagagggggttgttagcggctgttgggagaacgggtcacggaaacagtcccttccaaagccggggccatcgtggggtgggcgagtccgccctcccaggccgggggcgcggacc

SEQ ID NO: 302805 - DNA, 120 bp, Artificial Sequence
  ENSG00000133101_1 (sequence is synthesized)
agaggggacgtgtgcagacggccgcggtcagccccacctcgcccgggcggagacgcacagctggagctggagggccgtcgcccgttgggccctcaggggcctgaacgcccaggggtcgcg

SEQ ID NO: 302806 - DNA, 120 bp, Artificial Sequence
  ENSG00000133101_2 (sequence is synthesized)
gcgagtccacccggagcgagtcagcagcagcccgtggagtctgaagcaatgcactgcagcaaccccaagagtggagttgtgctggctacagtggcccgaggtcccgatgcttgtcagata

SEQ ID NO: 302807 - DNA, 120 bp, Artificial Sequence
  ENSG00000133101_3 (sequence is synthesized)
ctcaccagagccccgctgggccaggatcccccgcagaggacagtgctagggctgctaactgcaaatgggcagtacaggaggacctgtggccaggggatcacaagaatcaggtgttattct

SEQ ID NO: 302808 - DNA, 120 bp, Artificial Sequence
  ENSG00000133101_4 (sequence is synthesized)
ggatcagaaaatgccttccctccagctggaaagaaagcactccctgactgtggggtccaagagccccccaagcaagggtttgacatctacatggatgaactagagcagggggacagagac

SEQ ID NO: 302809 - DNA, 120 bp, Artificial Sequence
  ENSG00000133101_5 (sequence is synthesized)
agctgctcggtcagagaggggatggcatttgaggatgtgtatgaagtagacaccggcacactcaagtcagacctgcacttcctgctggatttcaacacagtttcccctatgctggtagat

SEQ ID NO: 302810 - DNA, 120 bp, Artificial Sequence
  ENSG00000133101_6 (sequence is synthesized)
tcatctctcctctcccagtctgaagatatatccagtcttggcacagatgtgataaatgtgactgaatatgctgaagaaatttatcagtaccttagggaagctgaaataaggcacagaccc

SEQ ID NO: 302811 - DNA, 120 bp, Artificial Sequence
  ENSG00000133101_7 (sequence is synthesized)
ggggaagaatataaacttcgagcagagaccctgtatctggctgtcaacttcctggacaggttcctttcatgtatgtctgttctgagagggaaactgcagctcgtaggaacagcagctatg

SEQ ID NO: 302812 - DNA, 120 bp, Artificial Sequence
  ENSG00000133101_8 (sequence is synthesized)
cttttggcttcgaaatatgaagagatatatcctcctgaagtagacgagtttgtctatatcaccgatgatacatacacaaaacgacaactgttaaaaatggaacacttgcttctgaaagtt

SEQ ID NO: 302813 - DNA, 120 bp, Artificial Sequence
  ENSG00000133101_9 (sequence is synthesized)
ctagcttttgatctgacagtaccaaccaccaaccagtttctccttcagtacttgaggcgacaaggagtgtgcgtcaggactgagaacctggctaagtacgtagcagagctgagtctactt

SEQ ID NO: 302814 - DNA, 120 bp, Artificial Sequence
  ENSG00000133101_10 (sequence is synthesized)
gaagcagatccattcttgaaatatcttccttcactgatagctgcagcagctttttgcctggcaaactatactgtgaacaagcacttttggccagaaacccttgctgcatttacagggtat

SEQ ID NO: 302815 - DNA, 120 bp, Artificial Sequence
  ENSG00000133101_11 (sequence is synthesized)
tcattaagtgaaattgtgccttgcctgagtgagcttcataaagcgtaccttgatataccccatcgacctcagcaagcaattagggagaagtacaaggcttcaaagtacctgtgtgtgtcc

SEQ ID NO: 302816 - DNA, 120 bp, Artificial Sequence
  ENSG00000133101_12 (sequence is synthesized)
ctcatggagccacctgcagttcttcttctacaataagtttctgaatggaagcacttccagaacttcacctccatatcagaagtgccaataatcgtcataggcttctgcacgttggatcaa

SEQ ID NO: 302817 - DNA, 120 bp, Artificial Sequence
  ENSG00000133101_13 (sequence is synthesized)
ctaatgttgtttacaatatagatgacattttaaaaatgtaaatgaatttagtttcccttagactttagtagtttgtaatatagtccaacattttttaaacaataaactgcttgtcttatg

SEQ ID NO: 302818 - DNA, 120 bp, Artificial Sequence
  ENSG00000133101_14 (sequence is synthesized)
acaatcttggctttcccgggccggcttcacgcagttgcgcaggagcccgcgggggaagacctctcgtggggacctcgagcacgacgtgcgaccctaaatccccacatctcctctgccgcc

SEQ ID NO: 302819 - DNA, 120 bp, Artificial Sequence
  ENSG00000133101_15 (sequence is synthesized)
tcctctgccgcctcgcaggccacatgcaccgggagccgggcggggcaggcgcggcccgcaaggacccccgcgatggagacgcaacactgccgcgactgcacttggggcagccccgccgcg

SEQ ID NO: 302820 - DNA, 120 bp, Artificial Sequence
  ENSG00000133101_16 (sequence is synthesized)
agttgttccggacacatagaaagataacgacgggaagagcggggcccgctttggggtccaggcaggttttggggcctcctgtctggtgggaggaggccgcagcgcagcaccctgctcgtc

SEQ ID NO: 302821 - DNA, 120 bp, Artificial Sequence
  ENSG00000133101_17 (sequence is synthesized)
acttgggatggagaccggctttcccgcaatcatgtaccctggatcttttattgggggctggggagaagagtatctcagctgggaaggaccggggctcccagatttcgtcttccagcagca

SEQ ID NO: 302822 - DNA, 120 bp, Artificial Sequence
  ENSG00000133103_0 (sequence is synthesized)
actcgcgctgcctccgtggtccctgcctggctgaggtggcagcagggggcgggacgcgcagcgctatggcagagggcagcggggaagtggtcgcagtgtctgcgaccggggctgccaacg

SEQ ID NO: 302823 - DNA, 120 bp, Artificial Sequence
  ENSG00000133103_1 (sequence is synthesized)
gcctcaacaatggggcaggcgggacctcggcgacgacctgcaacccgctgtcgcgcaagctgcataagatcctggagacgcggctggacaacgacaaggagatgttagaagctctcaagg

SEQ ID NO: 302824 - DNA, 120 bp, Artificial Sequence
  ENSG00000133103_2 (sequence is synthesized)
cactttcaaccttttttgttgaaaatagtctgcggactcgaagaaatttacgtggagatattgaacgtaaaagtttagccatcaatgaagaatttgtaagcattttcaaggaagtgaagg

SEQ ID NO: 302825 - DNA, 120 bp, Artificial Sequence
  ENSG00000133103_3 (sequence is synthesized)
aggaacttgaaagcataagcgaagatgttcaagcaatgagcaactgttgtcaagatatgacaagtcgcctacaggcagcaaaggaacagactcaagatttaatagtaaaaaccactaagc

SEQ ID NO: 302826 - DNA, 120 bp, Artificial Sequence
  ENSG00000133103_4 (sequence is synthesized)
ttcaatctgaaagccaaaaattagagataagagctcaagttgcagatgccttcttatccaagttccaactgacttctgatgaaatgagtcttctccgaggtacaagagaaggacccatta

SEQ ID NO: 302827 - DNA, 120 bp, Artificial Sequence
  ENSG00000133103_5 (sequence is synthesized)
ctgaggattttttcaaggcactgggaagagtaaaacagattcataatgatgtcaaagttctcttgcgtacaaatcaacaaacggcaggtttagaaattatggaacagatggccttacttc

SEQ ID NO: 302828 - DNA, 120 bp, Artificial Sequence
  ENSG00000133103_6 (sequence is synthesized)
aagaaacggcttatgaaagactttaccgatgggctcaaagtgaatgcagaacattgacacaagaatcatgtgacgtatctccagtattgacacaggcaatggaagccctgcaggacagac

SEQ ID NO: 302829 - DNA, 120 bp, Artificial Sequence
  ENSG00000133103_7 (sequence is synthesized)
ctgtcttatataaatataccttagatgaatttggaacagccagaagaagtacagttgttcgtggatttattgatgcgctcacaagagggggccccggaggtacacctagaccaattgaaa

SEQ ID NO: 302830 - DNA, 120 bp, Artificial Sequence
  ENSG00000133103_8 (sequence is synthesized)
tgcattctcatgaccctttgaggtatgtaggagatatgttggcttggctccatcaagctactgcttctgaaaaggaacaccttgaagctctcttaaagcatgtaactacacaaggtgttg

SEQ ID NO: 302831 - DNA, 120 bp, Artificial Sequence
  ENSG00000133103_9 (sequence is synthesized)
aagaaaatattcaagaagttgttgggcatatcactgaaggtgtgtgcaggcctctaaaggttcgaattgagcaagtaatagttgctgaacctggggcagttttattatataaaatttcta

SEQ ID NO: 302832 - DNA, 120 bp, Artificial Sequence
  ENSG00000133103_10 (sequence is synthesized)
atctcctcaaattttatcaccatacaatcagtggtattgttggaaatagtgcaactgcattattgactaccattgaagaaatgcatttgctaagcaaaaaaatattcttcaatagcttga

SEQ ID NO: 302833 - DNA, 120 bp, Artificial Sequence
  ENSG00000133103_11 (sequence is synthesized)
gtcttcatgcaagtaaattaatggacaaggttgaactcccaccacctgatcttggaccaagttctgcactaaatcagacactcatgttgctgcgtgaagttttagcatctcacgattctt

SEQ ID NO: 302834 - DNA, 120 bp, Artificial Sequence
  ENSG00000133103_12 (sequence is synthesized)
cagttgtaccattagatgctcgtcaagctgattttgtgcaggttttatcatgtgtcttggatcctctcctacagatgtgtactgtatcagccagcaatttaggcacagctgacatggcca

SEQ ID NO: 302835 - DNA, 120 bp, Artificial Sequence
  ENSG00000133103_13 (sequence is synthesized)
ctttcatggtcaattcactatatatgatgaagacaacattagctctatttgaattcactgacagacgtctggaaatgctacagtttcagatcgaagcacatttggacacacttataaatg

SEQ ID NO: 302836 - DNA, 120 bp, Artificial Sequence
  ENSG00000133103_14 (sequence is synthesized)
gcccaacctagattctgtgacactgaaggctgcaatggttcagtttgatcgttatctgtcagccccagacaacctattgataccacagctgaactttcttctaagtgccacagtgaaaga

SEQ ID NO: 302837 - DNA, 120 bp, Artificial Sequence
  ENSG00000133103_15 (sequence is synthesized)
gcagatcgtaaaacaatctacagaattagtctgcagagcctatggtgaagtgtatgcagccgtgatgaatccaatcaatgaatacaaagatccagagaacattcttcaccgatcgccgca

SEQ ID NO: 302838 - DNA, 120 bp, Artificial Sequence
  ENSG00000133103_16 (sequence is synthesized)
gcaagtgcagacgcttctttcctgattatcttatttcattgtgttagcaaaatatgacctccctaaaacactgaaggttattttttattctttgaatttttactctataatttgatagtt

SEQ ID NO: 302839 - DNA, 120 bp, Artificial Sequence
  ENSG00000133103_17 (sequence is synthesized)
acagttttctttgtatcataagattgtaagtcccgataatttttttttttttggtctcagtaacagggaagtaagtaacatgttgacctgagctagtattgctgtgtatctactctaaat

SEQ ID NO: 302840 - DNA, 120 bp, Artificial Sequence
  ENSG00000133103_18 (sequence is synthesized)
gagatgatctatttttttgctagccatctctccagctctgcagttttcactgtattcaggaagcataaagtagtatgaaaggtttgaagaatttttttttacaagactagttctaaatta

SEQ ID NO: 302841 - DNA, 120 bp, Artificial Sequence
  ENSG00000133103_19 (sequence is synthesized)
acagcttataaaaaatttgtctaaatttaataattagtataaggatatgacctaataaatgtctccttacctaaagattcatttgctttcttttaatatgagtaggcatacttagtagct

SEQ ID NO: 302842 - DNA, 120 bp, Artificial Sequence
  ENSG00000133103_20 (sequence is synthesized)
tttctgaacctagcctatgtctctgtccccaaaatagctgcccttaaagagttgttagcagagagaaaaataacagtgaatgtgctcctggtgtatatggcagtgaatctcctttctgtt

SEQ ID NO: 302843 - DNA, 120 bp, Artificial Sequence
  ENSG00000133103_21 (sequence is synthesized)
ctactttagcatactatatatatttgactgtgtacattcttatgcaattttaagtatacactcagcaataattagaaaaaaaggagagagaaaagtgatttaaacagggtggattccact

SEQ ID NO: 302844 - DNA, 120 bp, Artificial Sequence
  ENSG00000133103_22 (sequence is synthesized)
ctgtgggagccttcgatggaactcaaggtggagctcagcctttccaatgagctctaagcatgtagatagcctgagctgtgtctaagcctggtgtttaaagatgggtatttgtcatacaat

SEQ ID NO: 302845 - DNA, 120 bp, Artificial Sequence
  ENSG00000133103_23 (sequence is synthesized)
atgggtcctaaatccaaccaactacacattttatctggtgttcaaaccaaagaaacaatgatctactcaaacattggagaaaaaaactgccagaggaggagttgccaattggcagtgtgt

SEQ ID NO: 302846 - DNA, 120 bp, Artificial Sequence
  ENSG00000133103_24 (sequence is synthesized)
cttatctccatgttgtaactggactctgactttagaccattacctattaggaagattaaaaatgactgtatttttaaaggaataaatcccagtgtgcctgatttgacattcttgtcagca

SEQ ID NO: 302847 - DNA, 120 bp, Artificial Sequence
  ENSG00000133103_25 (sequence is synthesized)
aaaaaaaacttaatttctagtaaatctataaaaatgggtaagtccctaaattacaaatgagaaaattgaagcacaaggaaaaaaataactagtttgaaatattttgaaaagtaataacat

SEQ ID NO: 302848 - DNA, 120 bp, Artificial Sequence
  ENSG00000133103_26 (sequence is synthesized)
atgattatataatcgttatccatttgggtataaatctgtatttttagttttttccctttgattagtatgtgttacatataaagacagaaaataaagtataaatcaagagcttaaattgta

SEQ ID NO: 302849 - DNA, 120 bp, Artificial Sequence
  ENSG00000133103_27 (sequence is synthesized)
tataatttatttctacagagaaagaagattgataccttgctatgagtgaattcctttgttttatagggaaaatttattgtgctttttacctggttttttcaaataaaatattaaaatatt

SEQ ID NO: 302850 - DNA, 120 bp, Artificial Sequence
  ENSG00000133103_28 (sequence is synthesized)
caaacacccctggaggcgtttggctgtgtgagctgggagagtggaggagagcacaagactggatatgaaacagatgcaaaagagcagattccaagataaggagatgttagaagctctcaa

SEQ ID NO: 302851 - DNA, 120 bp, Artificial Sequence
  ENSG00000133103_29 (sequence is synthesized)
gttgttcgtggatttattgatgcgctcacaagagggggccccggaggtacacctagaccaattgaaatgcattctcatgaccctttgaggtatagtaatcagacagcagaagaggagttg

SEQ ID NO: 302852 - DNA, 120 bp, Artificial Sequence
  ENSG00000133103_30 (sequence is synthesized)
atagaaatgtggccagatggctttgtcatcttcccctgtctactctgtgactcttcatctggtggaaatgctgtgagggatgaaccaaatggaaactcagatttactcttcagaataatg

SEQ ID NO: 302853 - DNA, 120 bp, Artificial Sequence
  ENSG00000133103_31 (sequence is synthesized)
cggatcataatacgcacacacacagcatgtagagttgctgtgtggcttaaataagtaaatgtatgcaaagcactaaaatggtgtctgtctaagtgtaaacaccaattgtgttggctatta

SEQ ID NO: 302854 - DNA, 120 bp, Artificial Sequence
  ENSG00000133103_32 (sequence is synthesized)
tcactattgttgttcttatctcaaatatgtgttactttctaaataactttagtgttcatagattgttaaaagacaagatgacctgaagaaaagtaagccctaaaaatccattattaactt

SEQ ID NO: 302855 - DNA, 120 bp, Artificial Sequence
  ENSG00000133103_33 (sequence is synthesized)
ttttctccaccactcttttcttctaaacttcactattctttgtgttttcacaaaagttgcttacttcacctggcagagatagcattacgcaggggatgattaaaatatactcacttgtac

SEQ ID NO: 302856 - DNA, 120 bp, Artificial Sequence
  ENSG00000133103_34 (sequence is synthesized)
cctcttaccctggaccttagccatcaagttctcttccccataggcaatccctgttgcctaatttccaattcccctgcatactttaaagatcatctgtgcatctgcactcagaccactcac

SEQ ID NO: 302857 - DNA, 120 bp, Artificial Sequence
  ENSG00000133103_35 (sequence is synthesized)
acgtctaaaacaaatgatagcacactacacacaaagttctgttcctttttatgctcaatgatatgttttgcatcatatttcactgccgtataaataatgctgcctcgatttttaaaataa

SEQ ID NO: 302858 - DNA, 120 bp, Artificial Sequence
  ENSG00000133103_36 (sequence is synthesized)
ctgaacagtaatacacagtatgaatttactccaatttataatccaatccttagttaatggatattttgattttgttgttaagaatcatgcagcaatgatgtacctgttagacatgagtta

SEQ ID NO: 302859 - DNA, 120 bp, Artificial Sequence
  ENSG00000133103_37 (sequence is synthesized)
tcaattctttgccttctacttttaaacttcacttcctcataaagcaaccttttgcgatcatctgctccaccctgactcattccaatcacctgctccaccctgactcattctgatcacctg

SEQ ID NO: 302860 - DNA, 120 bp, Artificial Sequence
  ENSG00000133103_38 (sequence is synthesized)
atcacctgctccaccctgactcattctgatcacctgctctgcccagactcattcccatcacctgctccaccctgacttattccaattacctgctccaccctgtctcattctccaccctga

SEQ ID NO: 302861 - DNA, 120 bp, Artificial Sequence
  ENSG00000133103_39 (sequence is synthesized)
ctcattccataaccatttttcccaccaaaccagtcaccccctcaccctctttaaattagctaatcggaattagtttagcttgtgtggtctaacctagccaatagatgaatgacacagcag

SEQ ID NO: 302862 - DNA, 120 bp, Artificial Sequence
  ENSG00000133103_40 (sequence is synthesized)
caggagccacgttcgtcagggataagaacaccttccccttccttgtccaggggtgtactcaccattgctccatctgtgagggcgcacccttctatagaagtaaattgccttgctgagaag

SEQ ID NO: 302863 - DNA, 120 bp, Artificial Sequence
  ENSG00000133103_41 (sequence is synthesized)
ttgccttgctgagaagaaaaaaagaaaattttatatttgagtgctatttattttgtggcaccaaaactatttataacatacctgatctttattttaaatttttgtttatttaaatattaa

SEQ ID NO: 302864 - DNA, 120 bp, Artificial Sequence
  ENSG00000133103_42 (sequence is synthesized)
gtattaatttgtttaaataaatgtgaggtagggttccattgctattttttaaccaggtaggttatattgactaaccttcactttgaaagtgatttgaaatacacttttcatttattaaat

SEQ ID NO: 302865 - DNA, 120 bp, Artificial Sequence
  ENSG00000133103_43 (sequence is synthesized)
tctcccttgtgtttaggcagtaaggcataatatttgagagtgtgggctctgcagtccagctatctgggtttgaagtttatctcctttatttgcgagtggtacaaacttgaacaaattatg

SEQ ID NO: 302866 - DNA, 120 bp, Artificial Sequence
  ENSG00000133103_44 (sequence is synthesized)
taatttgtttttctcaattccctcatgcactaagtgaggataaaaatagcaataacaccatgagattgctgataacaaaatgcaaggtaaaaattgtgtaaggcttaaaattgtgtagcc

SEQ ID NO: 302867 - DNA, 120 bp, Artificial Sequence
  ENSG00000133103_45 (sequence is synthesized)
tggtatacaagaggctctaaataacataagctattattgcttttctacttattattatttctggcttttgtagtctttttcccattgttgatctttctactattcacaaagcatgagtct

SEQ ID NO: 302868 - DNA, 120 bp, Artificial Sequence
  ENSG00000133103_46 (sequence is synthesized)
ctaattaatgtaacttttcaatatgttttaatatctcatagatactgttcttcctcattacttttctattttataaatttctatttcatctgcttcataaattttgcattctcataaact

SEQ ID NO: 302869 - DNA, 120 bp, Artificial Sequence
  ENSG00000133103_47 (sequence is synthesized)
attttgcattctcataaactaagaatcatctcctgtagttaaaaaatattgtttgtatttttgttgggagtagagtgaattaaaatatattgacttaaggagaactgacatctttataat

SEQ ID NO: 302870 - DNA, 120 bp, Artificial Sequence
  ENSG00000133103_48 (sequence is synthesized)
attgaatcttcctgtttgagattggactttatgtccatattttaaagtctttgtttatgaccctaagtataattttaacgtttttatattaggcttatttctagatactttttgttaata

SEQ ID NO: 302871 - DNA, 120 bp, Artificial Sequence
  ENSG00000133103_49 (sequence is synthesized)
tatcatctaactggttgttcttcatatatataatgactatgaattttttctcagtcttttttctgaattctcacatcatttgtgttatatttttaagttgattctcttgagtttttcagg

SEQ ID NO: 302872 - DNA, 120 bp, Artificial Sequence
  ENSG00000133103_50 (sequence is synthesized)
taaacaattatatcacctataaaaataatgttgccaccttaaattaagaaaatgtttttctattgtctaattgcatggactgttgcctcaggaacagtataagattgcttacaaaagcct

SEQ ID NO: 302873 - DNA, 120 bp, Artificial Sequence
  ENSG00000133103_51 (sequence is synthesized)
tgctttcttgttccagattttaaaaacaaggctttcaatgacaatctcgctagcaagaagctggtatacttacatacatacatacaaacagacagacacccactttctatatgtatatct

SEQ ID NO: 302874 - DNA, 120 bp, Artificial Sequence
  ENSG00000133103_52 (sequence is synthesized)
agatagatttagatagacatatatgtgtgattcctgttaagatgaatctatttttggtatttaagattttaaaaatctagaatgggtattattatattgtattgaagctcttaagcatct

SEQ ID NO: 302875 - DNA, 120 bp, Artificial Sequence
  ENSG00000133103_53 (sequence is synthesized)
atggaaatgaaagtatgattcttctctttcgactaattaatatgtgatccatagtattttagtaacagatttcctaatatcgaatgatctaggcattgattctagcagattatgtctatg

SEQ ID NO: 302876 - DNA, 120 bp, Artificial Sequence
  ENSG00000133103_54 (sequence is synthesized)
ggtattttatttaagattttgcatcagtattaataaatgaccatggtctatgggtttgcttttttgtgtgctatgtttgcagagtgtttgtagtttacaagagatttttgcaaacttcta

SEQ ID NO: 302877 - DNA, 120 bp, Artificial Sequence
  ENSG00000133103_55 (sequence is synthesized)
tttatgacaatatggtagattatatatctgaaaaaaaaaccttctcattacagaacatatacaaaactgctgaataaaacgaggcaaccaacattttaaatatatggttaataaggtttt

SEQ ID NO: 302878 - DNA, 120 bp, Artificial Sequence
  ENSG00000133103_56 (sequence is synthesized)
tgcgtacaaatcaacaaacggcagggtgagtaactgctcactgaactaattgcattgctgcttatgtttccaaaattttaaagatattctagattgtttgtgaactatatagcattttgt

SEQ ID NO: 302879 - DNA, 120 bp, Artificial Sequence
  ENSG00000133103_57 (sequence is synthesized)
gaaatagaagtttaatctttatttatctttagagaatggtgaagttatactctgacaggtttaggctaaaacagcagttgataaataagtgatggttaaaatgtgacatttatttaattg

SEQ ID NO: 302880 - DNA, 120 bp, Artificial Sequence
  ENSG00000133103_58 (sequence is synthesized)
tagaaaattattgaaaaatcatcccataaaatgataaaaagttaatatgctgtaatatgtaatatgcaaacaaaataattaggtgcttagatgtatctgttgactaaagtttaaattata

SEQ ID NO: 302881 - DNA, 120 bp, Artificial Sequence
  ENSG00000133103_59 (sequence is synthesized)
tagtttgagtaatatttataataatttacaacaatactgttcaccttaacttgaatttgtttcatggggtatcagcttatttgaattttacatactatagaatacaatatggaaagagaa

SEQ ID NO: 302882 - DNA, 120 bp, Artificial Sequence
  ENSG00000133103_60 (sequence is synthesized)
aatatgtcttaaaatgtgaataaataccagttacaccgtctatgaaaacttagagaaagttgagatcagtataggaaggcttccctaaaataggtgaaagagtttgtttgcccttggtag

SEQ ID NO: 302883 - DNA, 120 bp, Artificial Sequence
  ENSG00000133104_0 (sequence is synthesized)
accagtaccagcccccaccttccgtctgtgcatgttttcttcagtcctggaaggaaatcataagtgatttgccccaaaaggattgctgttgaaaatggagcaagagccacaaaatggaga

SEQ ID NO: 302884 - DNA, 120 bp, Artificial Sequence
  ENSG00000133104_1 (sequence is synthesized)
acctgctgaaattaagatcatcagagaagcatataagaaggcctttttatttgttaacaaaggtctgaatacagatgaattaggtcagaaggaagaagcaaagaactactataagcaagg

SEQ ID NO: 302885 - DNA, 120 bp, Artificial Sequence
  ENSG00000133104_2 (sequence is synthesized)
aataggacacctgctcagagggatcagcatttcatcaaaagagtctgaacacacaggtcctgggtgggaatctgctagacagatgcaacagaaaatgaaagaaactctacagaatgtacg

SEQ ID NO: 302886 - DNA, 120 bp, Artificial Sequence
  ENSG00000133104_3 (sequence is synthesized)
caccaggctggaaattctagagaagggtcttgccacttctctgcagaatgatcttcaggaggtgcccaagttatatccagaatttccacctaaagacatgtgtgaaaaattaccagagcc

SEQ ID NO: 302887 - DNA, 120 bp, Artificial Sequence
  ENSG00000133104_4 (sequence is synthesized)
tcagtcttttagttcagctcctcagcatgctgaagtaaatggaaacacctcaactccaagtgcaggggcagttgctgcacctgcttctctgtctttaccatcacaaagttgtccagcaga

SEQ ID NO: 302888 - DNA, 120 bp, Artificial Sequence
  ENSG00000133104_5 (sequence is synthesized)
agctcctcctgcttatactcctcaagctgctgaaggtcactacactgtatcctatggaacagattctggggagttttcatcagttggagaggagttttataggaatcattctcagccacc

SEQ ID NO: 302889 - DNA, 120 bp, Artificial Sequence
  ENSG00000133104_6 (sequence is synthesized)
gcctcttgagaccttagggctggatgcagatgaattgattttgataccaaatggagtacagattttttttgtaaatcctgcaggggaggttagtgcaccttcgtatcctgggtaccttcg

SEQ ID NO: 302890 - DNA, 120 bp, Artificial Sequence
  ENSG00000133104_7 (sequence is synthesized)
aattgtgaggtttttggataattctctcgatacggttctaaaccgtcctcccgggtttcttcaggtttgtgactggttatatcctctagttcctgatagatctccggttctgaaatgtac

SEQ ID NO: 302891 - DNA, 120 bp, Artificial Sequence
  ENSG00000133104_8 (sequence is synthesized)
tgcgggagcctacatgtttcctgatacaatgctacaagcagcaggatgctttgtgggggtcgtcctgtcctctgagttaccagaggatgatagagagctctttgaggatctgttaaggca

SEQ ID NO: 302892 - DNA, 120 bp, Artificial Sequence
  ENSG00000133104_9 (sequence is synthesized)
aatgtctgaccttcggctccaggccaactggaacagagcagaagaagaaaatgaattccaaatccctggaagaactagaccctcctctgaccaactaaaagaagcctctggcactgatgt

SEQ ID NO: 302893 - DNA, 120 bp, Artificial Sequence
  ENSG00000133104_10 (sequence is synthesized)
gaaacagttggaccaaggcaataaggatgtacgtcataaaggaaaacgtggaaaaagggctaaagatacttcaagtgaagaagttaacctgagtcacattgtaccatgtgagccagttcc

SEQ ID NO: 302894 - DNA, 120 bp, Artificial Sequence
  ENSG00000133104_11 (sequence is synthesized)
agaagaaaagccaaaagaattacctgaatggagtgaaaaagtggctcacaacattttgtcaggtgcttcctgggtgagttggggtttagtcaaaggtgctgagattactggtaaggcaat

SEQ ID NO: 302895 - DNA, 120 bp, Artificial Sequence
  ENSG00000133104_12 (sequence is synthesized)
ccagaaaggtgcttctaaactccgagagcggattcaaccagaagaaaaacccgtggaagttagtccagctgtcaccaagggactttatatagcgaagcaagctacaggaggagcagcaaa

SEQ ID NO: 302896 - DNA, 120 bp, Artificial Sequence
  ENSG00000133104_13 (sequence is synthesized)
agtcagtcagttcctggttgatggagtttgcactgtagcaaattgcgttggaaaagaactagctccacatgtcaagaagcatggaagcaaacttgttccagaatctcttaaaaaagacaa

SEQ ID NO: 302897 - DNA, 120 bp, Artificial Sequence
  ENSG00000133104_14 (sequence is synthesized)
agatgggaaatctcctctggatggtgctatggttgtagcagcaagtagtgttcaaggattttcaactgtctggcaaggattggaatgtgcagctaaatgcatcgttaacaatgtttcagc

SEQ ID NO: 302898 - DNA, 120 bp, Artificial Sequence
  ENSG00000133104_15 (sequence is synthesized)
agaaactgtacaaactgtcagatacaaatacggatataatgcaggagaagctacccaccatgcggtggattctgcggtcaatgttggcgtaactgcctacaatattaacaacattggtat

SEQ ID NO: 302899 - DNA, 120 bp, Artificial Sequence
  ENSG00000133104_16 (sequence is synthesized)
caaagcaatggtgaagaaaactgcaacacaaacaggacacactctccttgaggactatcagatagttgataattctcagagggaaaatcaagaaggagcagcaaatgtcaacgtgagagg

SEQ ID NO: 302900 - DNA, 120 bp, Artificial Sequence
  ENSG00000133104_17 (sequence is synthesized)
ggagaaggatgagcagacgaaggaagtaaaggaggcaaagaagaaagataaatgatgaagtgctgggaatcacttataccaaagccttatgaaatggatgaaattttgttaaataggcaa

SEQ ID NO: 302901 - DNA, 120 bp, Artificial Sequence
  ENSG00000133104_18 (sequence is synthesized)
atgtggaattcctcacagattaaccagtattttttaaatgtattcattcctacaaattaactttcataaattttatggcatgtcttctatttaaaaggaaaagaataagtattcttgcat

SEQ ID NO: 302902 - DNA, 120 bp, Artificial Sequence
  ENSG00000133104_19 (sequence is synthesized)
ctggccttagaaatgtgaagttatattctcaagtttatttttttccaagtgtagctaaaatatttttgcaggtaaaataaagctgatagtacatgtgttgttcaaaccttgttaaaccta

SEQ ID NO: 302903 - DNA, 120 bp, Artificial Sequence
  ENSG00000133104_20 (sequence is synthesized)
ctgctgtctttcagaaggcaaataggaaactatatatttgcttaaaaattggcatttagtaaccttaattctttttatagaaggaatgacttaaagtattgtcccctctttttgcactaa

SEQ ID NO: 302904 - DNA, 120 bp, Artificial Sequence
  ENSG00000133104_21 (sequence is synthesized)
ttgtggatttttttagatgcttctcaaaattttcagtgtgtaagctaaacaaaaactaaaactaagaattctcaaaaaaacttgttcaaaacagggaaagactgatgaaaagtaaaatgg

SEQ ID NO: 302905 - DNA, 120 bp, Artificial Sequence
  ENSG00000133104_22 (sequence is synthesized)
actacttttgtaacttacctgtttgttaggaaatggaatggtctctttgatttaaaataaataaaaatagattattacgtcttttgtattgagactgtattgttatgagcctaggaaatt

SEQ ID NO: 302906 - DNA, 120 bp, Artificial Sequence
  ENSG00000133104_23 (sequence is synthesized)
tgggaacatgattgtattgtattaaaattcgaagtgattattatcagcttaattggattaaaaaagtacttcaagaaattattttatcatatctgcttctgtttttccaaaaggttaaaa

SEQ ID NO: 302907 - DNA, 120 bp, Artificial Sequence
  ENSG00000133104_24 (sequence is synthesized)
cttgtaaaaaaaatatatataaacaattgagtttactaatggtaaacatttttattctgggattcggtcattggaatttatattaaaagacaagttattaaaaaggaaaggttctattca

SEQ ID NO: 302908 - DNA, 120 bp, Artificial Sequence
  ENSG00000133104_25 (sequence is synthesized)
taatcagggtaaagaatatgaaaaccttagacgtaatccatggtggataggcattatggtttccactttggcagaaggcagactattcacagccctatttacttacataggctaaaaaac

SEQ ID NO: 302909 - DNA, 120 bp, Artificial Sequence
  ENSG00000133104_26 (sequence is synthesized)
tatgtaactaaatacctaatggtatttaatttttgtttattgaatttaagagattggtattagttttcatagctgtagtccattctaataatttctgatcttctagtggctacttaatta

SEQ ID NO: 302910 - DNA, 120 bp, Artificial Sequence
  ENSG00000133104_27 (sequence is synthesized)
gacattatttgaagctgtctgaagaatgcactttatgaattaaaaaactgaattgcctgacctcgttatcacatgagcttatattttgggaacacatagaactgatggaggcttttccta

SEQ ID NO: 302911 - DNA, 120 bp, Artificial Sequence
  ENSG00000133104_28 (sequence is synthesized)
aggccaaggataatgtactagttgttaaaatggaaataaaagtgaagtggtaaatagcttacagacagtctatgctttgtttaagaaatggaatggcacttcatatattctcatttgtgg

SEQ ID NO: 302912 - DNA, 120 bp, Artificial Sequence
  ENSG00000133104_29 (sequence is synthesized)
gtagaatgatggttaccagaggctgggaggcattgaagggatggggagggaagtgaggttgattaatgggtacgaaaatatagttagaacgaatttgttgtagtatttgatagcccaaca

SEQ ID NO: 302913 - DNA, 120 bp, Artificial Sequence
  ENSG00000133104_30 (sequence is synthesized)
tagttagaacgaatttgttgtagtatttgatagcccaacagggtgactacagtcaacaataactttatacatttaaaaataaaagagtgtaattgggacgtttgtaacacaaatgaatgc

SEQ ID NO: 302914 - DNA, 90 bp, Artificial Sequence
  ENSG00000133104_31 (sequence is synthesized)
aaaagagtgtaattgggacgtttgtaacacaaatgaatgcttgaagcagtagatacaccctgatgtaattattataaatcgcatacctgt

SEQ ID NO: 302915 - DNA, 120 bp, Artificial Sequence
  ENSG00000133104_32 (sequence is synthesized)
gaatggcaaataatggaacataaactttaaacagttagctttgaccagaggtcagcaaatatcctccatgggctaaatccagatgtccacctgttttcataaataacgttttattggagc

SEQ ID NO: 302916 - DNA, 120 bp, Artificial Sequence
  ENSG00000133104_33 (sequence is synthesized)
atagctgtacccatttgtttacatattggctatggctgctgtctagttcaacgtgagagttgaatagttgcatcagagagtatatggtccacaagcctaacttattcactctctggccct

SEQ ID NO: 302917 - DNA, 120 bp, Artificial Sequence
  ENSG00000133104_34 (sequence is synthesized)
ttgcagaaaaagtgtgctgccttagtctatagaaaatggacttttcccaccattcactgactcattaggagataggcatcttctaaagattttttttatattgtgtaatgattgatatat

SEQ ID NO: 302918 - DNA, 120 bp, Artificial Sequence
  ENSG00000133104_35 (sequence is synthesized)
agataaaattatatattacttgtaaggtatgatgaataacaacacttaaaaactcatcacacctaaagacatggaaagctgccaattacctatatgtatgttcttcctattttcttacct

SEQ ID NO: 302919 - DNA, 120 bp, Artificial Sequence
  ENSG00000133104_36 (sequence is synthesized)
ctttccccatgtcattttttattgttccttgccattttttaatcacacatgtatgttctccaaacatactgtttcattttttgaagctttctacatatagtgtctgaatgtgaagtctta

SEQ ID NO: 302920 - DNA, 120 bp, Artificial Sequence
  ENSG00000133104_37 (sequence is synthesized)
ctcaacttgcttttttgagtttatgtttaaaattcattcttgcgcttatatgcatggatggtttacttgctctatagtattctgtgtgagtataccacaatttaagtgttcattttccta

SEQ ID NO: 302921 - DNA, 120 bp, Artificial Sequence
  ENSG00000133104_38 (sequence is synthesized)
tcagttgacatttgtttttagtttttgttggtagaaacagtacactcaaaacatccttgactgtcccctggtacacatatgcaagagactttatgcgtaagagtggagttgttggcttgt

SEQ ID NO: 302922 - DNA, 120 bp, Artificial Sequence
  ENSG00000133104_39 (sequence is synthesized)
caagttttgcaaaataatgccaggtattttccaaaatgatgatattctcttgagtattacttccctttgcaatgtttttattgttaatgtagcatatataaaaaagtatctcataatttt

SEQ ID NO: 302923 - DNA, 120 bp, Artificial Sequence
  ENSG00000133104_40 (sequence is synthesized)
gtcttggttgccacggcaagcgcgcgcgcgaggccttgggaacctcgggaccggcccccggcgagcgcagcggcgcccagtgtaagggagtgggagctggtccgtgccgcggcggccgcg

SEQ ID NO: 302924 - DNA, 120 bp, Artificial Sequence
  ENSG00000133104_41 (sequence is synthesized)
cggaggcctcggtttcgctggagagaaagagattgcgcaggcgccgagcagccgacgtggccgcaggggaccgtgcctgggggggtctgcgcggggccgctgactcgcgaggttctctgt

SEQ ID NO: 302925 - DNA, 120 bp, Artificial Sequence
  ENSG00000133104_42 (sequence is synthesized)
cgcctgccgccctcgctccttttctccccttctagagtgttacggtgactcttgggtccgaaggggacggacgtcctcccacgtaccatttagaagaaatggagcaagagccacaaaatg

SEQ ID NO: 302926 - DNA, 120 bp, Artificial Sequence
  ENSG00000133104_43 (sequence is synthesized)
ggcggcggcgtgctgcgggctctgtggcgggagcgaggccgacgggcggggccgcgcggccgcgtgacgcgaagcgttcgagagcgcgcgtcgtggaacgtcttggttgccacggcaagc

SEQ ID NO: 302927 - DNA, 120 bp, Artificial Sequence
  ENSG00000133104_44 (sequence is synthesized)
gcgcgcgcgaggccttgggaacctcgggaccggcccccggcgagcgcagcggcgcccagtagtcatcttagtgggatttggggaagcaacagggctgtgtggggtaacctgccaccttta

SEQ ID NO: 302928 - DNA, 120 bp, Artificial Sequence
  ENSG00000133104_45 (sequence is synthesized)
ggaatgcgcagtttcgtgacgcagcattattgcgtgactctagggctgacccagtttttcactttctaattgtaaggaagtgcgctagtagtccaccgaggatcctcgagaaatggagca

SEQ ID NO: 302929 - DNA, 120 bp, Artificial Sequence
  ENSG00000133104_46 (sequence is synthesized)
atagtaaaacaatttagatgttcatttaagaatgttgcaagatgagtggtaaaaatcaagggaataatatatttttcctaagttttctttttttatggtcatattagttgatggagtttg

SEQ ID NO: 302930 - DNA, 120 bp, Artificial Sequence
  ENSG00000133104_47 (sequence is synthesized)
caaataaagatattgtttattagggaatactgagaaagataatattttgtattttggttttaaatgatcaatttagaaataaatgtagaaggaactagtcttttgaaacatcagatattg

SEQ ID NO: 302931 - DNA, 120 bp, Artificial Sequence
  ENSG00000133104_48 (sequence is synthesized)
tcatataagtataaattcttcctggcctattattctgttctactattgggaaaatggatagtgaaaagcttcaggaatcttcaaattcttaatagttctgaatctaaaattagttatgtt

SEQ ID NO: 302932 - DNA, 120 bp, Artificial Sequence
  ENSG00000133104_49 (sequence is synthesized)
cgtttcccctttgaagctccctcttaacctccccctacccctgtccctcagctgtggtctgaatgtgtcccttcaaaattcatatattgaaatcctaacccctgaggtgatggttttagg

SEQ ID NO: 302933 - DNA, 120 bp, Artificial Sequence
  ENSG00000133104_50 (sequence is synthesized)
aggtggggcctttggaaggtgattaggtcatgagggaggagccctcatcaatgggattagtcccttataaaagagatcccaaagagctgccttgtccctttcactatgtgaggaagcagt

SEQ ID NO: 302934 - DNA, 120 bp, Artificial Sequence
  ENSG00000133104_51 (sequence is synthesized)
aagaaggtgtcattctatgaaccaggaagtgggcccctcaccagagaccaaatgtaccagcaccttagtcttgtacttcccagcctctagaattgtgagaaataaatttttgttgttaat

SEQ ID NO: 302935 - DNA, 120 bp, Artificial Sequence
  ENSG00000133105_0 (sequence is synthesized)
agaacatgggaggcactgaacttactacatcagaactcctgctgaggtataagaggatacgtctaataactcaattgctgtaaacctatgattgtttttctggtttttaaacatctcttc

SEQ ID NO: 302936 - DNA, 120 bp, Artificial Sequence
  ENSG00000133105_1 (sequence is synthesized)
agcctcagattgattacaatgttctttctacttcatttcatcgttctgatcaatgtcaaagattttgcactgactcaaggtagcatgatcactccttcatgccaaaaaggatattttccc

SEQ ID NO: 302937 - DNA, 120 bp, Artificial Sequence
  ENSG00000133105_2 (sequence is synthesized)
tgtgggaatcttaccaagtgcttaccccgagcttttcactgtgatggcaaggatgactgtgggaacggggcggacgaagagaactgtggtgacactagtggatgggcgaccatatttggc

SEQ ID NO: 302938 - DNA, 120 bp, Artificial Sequence
  ENSG00000133105_3 (sequence is synthesized)
acagtgcatggaaatgctaacagcgtggccttaacacaggagtgctttctaaaacagtatccacaatgctgtgactgcaaagaaactgaattggaatgtgtaaatggtgacttaaagtct

SEQ ID NO: 302939 - DNA, 120 bp, Artificial Sequence
  ENSG00000133105_4 (sequence is synthesized)
gtgccgatgatttctaacaatgtgacattactgtctcttaagaaaaacaaaatccacagtcttccagataaagttttcatcaaatacacaaaacttaaaaagatatttcttcagcataat

SEQ ID NO: 302940 - DNA, 120 bp, Artificial Sequence
  ENSG00000133105_5 (sequence is synthesized)
tgcattagacacatatccaggaaagcattttttggattatgtaatctgcaaatattatatctcaaccacaactgcatcacaaccctcagacctggaatattcaaagacttacatcagcta

SEQ ID NO: 302941 - DNA, 120 bp, Artificial Sequence
  ENSG00000133105_6 (sequence is synthesized)
acttggctaattctagatgacaatccaataaccagaatttcacagcgcttgtttacgggattaaattccttgtttttcctgtctatggttaataactacttagaagctcttcccaagcag

SEQ ID NO: 302942 - DNA, 120 bp, Artificial Sequence
  ENSG00000133105_7 (sequence is synthesized)
atgtgtgcccaaatgcctcaactcaactgggtggatttggaaggcaatagaataaagtatctcacaaattctacgtttctgtcgtgcgattcgctcacagtgctgtttctgcctagaaat

SEQ ID NO: 302943 - DNA, 120 bp, Artificial Sequence
  ENSG00000133105_8 (sequence is synthesized)
caaattggttttgttccagagaagacattttcttcattaaaaaatttaggagaactggatctgtctagcaatacgataacggaactatcacctcacctttttaaagacttgaagcttcta

SEQ ID NO: 302944 - DNA, 120 bp, Artificial Sequence
  ENSG00000133105_9 (sequence is synthesized)
caaaagctgaacctgtcatccaatcctcttatgtatcttcacaagaaccagtttgaaagtcttaaacaacttcagtctctagacctggaaaggatagagattccaaatataaacacacga

SEQ ID NO: 302945 - DNA, 120 bp, Artificial Sequence
  ENSG00000133105_10 (sequence is synthesized)
atgtttcaacccatgaagaatctttctcacatttatttcaaaaactttcgatactgctcctatgctccccatgtccgaatatgtatgcccttgacggacggcatttcttcatttgaggac

SEQ ID NO: 302946 - DNA, 120 bp, Artificial Sequence
  ENSG00000133105_11 (sequence is synthesized)
ctcttggctaacaatatcctcagaatatttgtctgggttatagctttcattacctgctttggaaatctttttgtcattggcatgagatctttcattaaagctgaaaatacaactcacgct

SEQ ID NO: 302947 - DNA, 120 bp, Artificial Sequence
  ENSG00000133105_12 (sequence is synthesized)
atgtccatcaaaatcctttgttgtgctgattgcctgatgggtgtttacttgttctttgttggcattttcgatataaaataccgagggcagtatcagaagtatgccttgctgtggatggag

SEQ ID NO: 302948 - DNA, 120 bp, Artificial Sequence
  ENSG00000133105_13 (sequence is synthesized)
attgtcttccccttcagtaacattcgacctggaaaacggcagacctcagtcatcctcatttgcatctggatggcgggatttttaatagctgtaattccattttggaataaggattatttt

SEQ ID NO: 302949 - DNA, 120 bp, Artificial Sequence
  ENSG00000133105_14 (sequence is synthesized)
ggaaacttttatgggaaaaatggagtatgtttcccactttattatgaccaaacagaagatattggaagcaaagggtattctcttggaattttcctaggtgtgaacttgctggcttttctc

SEQ ID NO: 302950 - DNA, 120 bp, Artificial Sequence
  ENSG00000133105_15 (sequence is synthesized)
atcattgtgttttcctatattactatgttctgttccattcaaaaaaccgccttgcagaccacagaagtaaggaattgttttggaagagaggtggctgttgcaaatcgtttcttttttata

SEQ ID NO: 302951 - DNA, 120 bp, Artificial Sequence
  ENSG00000133105_16 (sequence is synthesized)
gtgttctctgatgccatctgctggattcctgtatttgtagttaaaatcctttccctcttccgggtggaaataccagacacaatgacttcctggatagtgatttttttccttccagttaac

SEQ ID NO: 302952 - DNA, 120 bp, Artificial Sequence
  ENSG00000133105_17 (sequence is synthesized)
agtgctttgaatccaatcctctatactctcacaaccaacttttttaaggacaagttgaaacagctgctgcacaaacatcagaggaaatcaattttcaaaattaaaaaaaaaagtttatct

SEQ ID NO: 302953 - DNA, 120 bp, Artificial Sequence
  ENSG00000133105_18 (sequence is synthesized)
acatccattgtgtggatagaggactcctcttccctgaaacttggggttttgaacaaaataacacttggagacagtataatgaaaccagtttcctagcaatcattttggatcactggactt

SEQ ID NO: 302954 - DNA, 120 bp, Artificial Sequence
  ENSG00000133105_19 (sequence is synthesized)
tcagtggactacctaaaacaggggacagcttttggaagatgacatctgcaatgcttttcatctttaccaacggcaagcctttctgcacagagagcacagcagaatggctcctgtcactgc

SEQ ID NO: 302955 - DNA, 120 bp, Artificial Sequence
  ENSG00000133105_20 (sequence is synthesized)
attccaatggcagctgtactatctaccaaccatgctgaggacagcaccaaaggttcctctcctcaccccacatgcctgaaaagcacatgtgaattcgtgtatagtgggctgaggtgcagc

SEQ ID NO: 302956 - DNA, 120 bp, Artificial Sequence
  ENSG00000133105_21 (sequence is synthesized)
tgatctctagctaatcaacacaacccaccaacaaatgaccacaggttggcactgtgtggtctttcacatcgggttgcactgtccatgaaatagaaacactcacaacatctgattccagtg

SEQ ID NO: 302957 - DNA, 120 bp, Artificial Sequence
  ENSG00000133105_22 (sequence is synthesized)
tggccataataacagaaatctaacaactctttccttgccttttcaatatcaaataaaaccatcagcatcctgctggattgatagcaaaggatttccaaaatattcatctacccgaagtcc

SEQ ID NO: 302958 - DNA, 120 bp, Artificial Sequence
  ENSG00000133105_23 (sequence is synthesized)
tcctctgtgaaggccggtggagtagccactttgaaaacagaacttccaaccaggttaccatgtctaacctatgaccagagagtcacactgatgaagcctcataccatttgccttttggat

SEQ ID NO: 302959 - DNA, 120 bp, Artificial Sequence
  ENSG00000133105_24 (sequence is synthesized)
tttatttaatatcagaagagatgaattcttaagatatttttctgaaggttgcccagggcacaaacaaattggacactttcactgctaaaaagtacactttaatattcttaaagtataatt

SEQ ID NO: 302960 - DNA, 120 bp, Artificial Sequence
  ENSG00000133105_25 (sequence is synthesized)
tctttagagcagtatccctattgctggcaagttctgctttcataaaatatgcagataagaagtgttaaatgggattcaagaattatggttttatttgggactgtttgcatactcacaatg

SEQ ID NO: 302961 - DNA, 120 bp, Artificial Sequence
  ENSG00000133105_26 (sequence is synthesized)
gttttgttctcattgtttttaacaaaaaagcaatgaagtttggggtggttttttgaaaacgaaactgaaaaaaattatatgtgaaaatgagaactgggtaaataaaattatattttgcac

SEQ ID NO: 302962 - DNA, 120 bp, Artificial Sequence
  ENSG00000133106_0 (sequence is synthesized)
ggaatcccatcttgagactcgctaagcgtcccagccgcatccctcccgcagcgacggcggcccgggacccgcgggctgtgaaccatgaacacccgcaatagagtggtgaactccgggctc

SEQ ID NO: 302963 - DNA, 120 bp, Artificial Sequence
  ENSG00000133106_1 (sequence is synthesized)
ggcgcctcccctgcctcccgcccgacccgggatccccaggacccttctgggcggcaaggggagctgagccccgtggaagaccagagagagggtttggaggcagcccctaagggcccttcg

SEQ ID NO: 302964 - DNA, 120 bp, Artificial Sequence
  ENSG00000133106_2 (sequence is synthesized)
cgggagagcgtcgtgcacgcgggccagaggcgcacaagtgcatacaccttgatagcaccaaatataaaccggagaaatgagatacaaagaattgcggagcaggagctggccaacctggag

SEQ ID NO: 302965 - DNA, 120 bp, Artificial Sequence
  ENSG00000133106_3 (sequence is synthesized)
aagtggaaggagcagaacagagctaaaccggttcacctggtgcccagacggctaggtggaagccagtcagaaactgaagtcagacagaaacaacaactccagctgatgcaatctaaatac

SEQ ID NO: 302966 - DNA, 120 bp, Artificial Sequence
  ENSG00000133106_4 (sequence is synthesized)
aagcaaaagctaaaaagagaagaatctgtaagaatcaagaaggaagctgaagaagctgaactccaaaaaatgaaggcaattcagagagagaagagcaataaactggaggagaaaaaaaga

SEQ ID NO: 302967 - DNA, 120 bp, Artificial Sequence
  ENSG00000133106_5 (sequence is synthesized)
cttcaagaaaaccttagaagagaagcatttagagagcatcagcaatacaaaaccgctgagttcttgagcaaactgaacacagaatcgccagacagaagtgcctgtcaaagtgctgtttgt

SEQ ID NO: 302968 - DNA, 120 bp, Artificial Sequence
  ENSG00000133106_6 (sequence is synthesized)
ggcccacaatcctcaacatgggccagaagctgggcttacagagattctctaaaggcagaagaaaacagaaaattgcaaaagatgaaggatgaacaacatcaaaagagtgaattactggaa

SEQ ID NO: 302969 - DNA, 120 bp, Artificial Sequence
  ENSG00000133106_7 (sequence is synthesized)
ctgaaacggcagcagcaagagcaagaaagagccaaaatccaccagactgaacacaggagggtaaataatgcttttctggaccgactccaaggcaaaagtcaaccaggtggcctcgagcaa

SEQ ID NO: 302970 - DNA, 120 bp, Artificial Sequence
  ENSG00000133106_8 (sequence is synthesized)
tctggaggctgttggaatatgaatagcggtaacagctggggtatatgagaaaatattgactcctatctggccttcatcaactgacctcgaaaagcctcatgagatgctttttcttaatgt

SEQ ID NO: 302971 - DNA, 120 bp, Artificial Sequence
  ENSG00000133106_9 (sequence is synthesized)
gattttgttcagcctcactgtttttaccttaatttcaactgcccacacacttgaccgtgcagtcaggagtgactggcttctccttgtcctcatttatgcatgtttggaggagctgattcc

SEQ ID NO: 302972 - DNA, 120 bp, Artificial Sequence
  ENSG00000133106_10 (sequence is synthesized)
tgaactcatatttaatctctactgccagggaaatgctacattatttttctaattggaagtataattagagtgatgttggtagggtagaaaaagagggagtcacttgatgctttcaggtta

SEQ ID NO: 302973 - DNA, 120 bp, Artificial Sequence
  ENSG00000133106_11 (sequence is synthesized)
atcagagctatgggtgctacaggcttgtctttctaagtgacatattcttatctaattctcagatcaggttttgaaagctttgggggtctttttagattttaatccctactttctttatgg

SEQ ID NO: 302974 - DNA, 120 bp, Artificial Sequence
  ENSG00000133106_12 (sequence is synthesized)
ggttttctctcttgaagggtctcattttaattcccttttccaggccgtatagatcaaatatagtactgtcattactgttggctcttgttttggtcttgacttactaatagtgttaccctg

SEQ ID NO: 302975 - DNA, 120 bp, Artificial Sequence
  ENSG00000133106_13 (sequence is synthesized)
attttcagagggggacagtttatctccagaaaggccaatgtttgtatacacatcagctagacacaaatatagacatcatatgtagtttgtacatgtttcagaaacttgttttttctttgc

SEQ ID NO: 302976 - DNA, 120 bp, Artificial Sequence
  ENSG00000133106_14 (sequence is synthesized)
tctgtgtaacctatttcctattgctagttcagttggctttcttattcacttctgtgaccctgaaccagttctcagaccctagagtgtaagagcattgattttctacgctgtgtaatctag

SEQ ID NO: 302977 - DNA, 120 bp, Artificial Sequence
  ENSG00000133106_15 (sequence is synthesized)
ctcaatccctctgtcccctccgcctcaccgtcccccagccaccacattgtatagcaaaagcattacattcaatcctagaataaaggtaaatacaacaaatcatctttgcagctggacaac

SEQ ID NO: 302978 - DNA, 120 bp, Artificial Sequence
  ENSG00000133106_16 (sequence is synthesized)
taataatactttgcagcattaagagatcttctgtgttaccagtcactctgttgaaatgaactttccgaatctctttattcaggaaaacatggggttttgaaattcttgggccaagagaca

SEQ ID NO: 302979 - DNA, 120 bp, Artificial Sequence
  ENSG00000133106_17 (sequence is synthesized)
taactgaggggttcgcagagctaggcaagggtgcactaggaaagggccacattggtgggtggggggtaacagagaacagatggtgtcaggaagtttctctggagtaaataatgtggatat

SEQ ID NO: 302980 - DNA, 120 bp, Artificial Sequence
  ENSG00000133106_18 (sequence is synthesized)
tcttggtttccctctcctccgccagctgaagctgtgttagtgctgttgacactaatataaaatgtttggtccatttgaaatccttgtcattgccttatatgggggaaactcaatccccca

SEQ ID NO: 302981 - DNA, 120 bp, Artificial Sequence
  ENSG00000133106_19 (sequence is synthesized)
gcctgtgttggaaatatcaccaaactgattgtaaatgtgcggctgtagcagacattttagtgtggtggtgtgcagccatttcggccctacacctgccagcctggctaccttacagttgtg

SEQ ID NO: 302982 - DNA, 120 bp, Artificial Sequence
  ENSG00000133106_20 (sequence is synthesized)
ttccgatttttgcgtctatgcttggtgtgcctcacttgctgcattttccagcatgcaaccaggagttgacgtaggaaaaagggatgctttcttactttggaagctctcagggaagttggt

SEQ ID NO: 302983 - DNA, 120 bp, Artificial Sequence
  ENSG00000133106_21 (sequence is synthesized)
gtcaatttctcctccactgcctggcctaccctgcactcccaaagattttgtgcagatgggtagttccattttttaaaaattgtgcagatatggaaaattgtgacttacttcatgaccaga

SEQ ID NO: 302984 - DNA, 120 bp, Artificial Sequence
  ENSG00000133106_22 (sequence is synthesized)
actatctagaatatgtgtgggggtataaacatcttgcttaaccaaatatctatgtaggcagaggtaaccaggagagaagcaagacttgctgcctaaaggagcccaccattttacttttca

SEQ ID NO: 302985 - DNA, 120 bp, Artificial Sequence
  ENSG00000133106_23 (sequence is synthesized)
catttaatctgccacgttgaatcaattggaataaaacctgactcgcaggtgactggacaggaaatcccaaagttccaccatttctatgcttaattttaatgtccccccgctttttttttt

SEQ ID NO: 302986 - DNA, 120 bp, Artificial Sequence
  ENSG00000133106_24 (sequence is synthesized)
gtagaaaataaaaacaagaaaatcgttccaatgtaagatgtttgttatagaaactttaggcaatacaggtgtgtaataaaatgtttaataaacttctaaacacttttgtatttggattta

SEQ ID NO: 302987 - DNA, 120 bp, Artificial Sequence
  ENSG00000133106_25 (sequence is synthesized)
gccgactctgcacagtggtctggagtgcctgaaaccagagcaagggtctccacctgtagcaccgagccctcattccctagagtcgcagtaagcttgggagcattgaagataaagcgagta

SEQ ID NO: 302988 - DNA, 120 bp, Artificial Sequence
  ENSG00000133106_26 (sequence is synthesized)
tgggcatcagaattctctggggatatgtttacctatgtgtggaaagttcttattgacgtgaaaatattctagttttgcacacattttctataggtaactttaaaaattaacttgatatag

SEQ ID NO: 302989 - DNA, 120 bp, Artificial Sequence
  ENSG00000133106_27 (sequence is synthesized)
gtcaacaagaaatgtgatatggggtagaaggttcaaattctgcctctaggtaggagcaagcctacgtcccagcaagactcgcagataaactagcctcttacaaccagaggagtggagctg

SEQ ID NO: 302990 - DNA, 120 bp, Artificial Sequence
  ENSG00000133106_28 (sequence is synthesized)
acaaagacagagacgttgaaaaagagacagaccaaggaagaaacacaaagacagaaatttcacgggcagaagacgtagcccggccattctctgtgatctaagtagcttgaagtaacaacc

SEQ ID NO: 302991 - DNA, 120 bp, Artificial Sequence
  ENSG00000133106_29 (sequence is synthesized)
tagtcattcatttaacattcagaatgcttctctctttttacaattggtttgttttggtgtgaagtatttttattttctcatttatatagactcaccaaatctcatcaaggttttttgttt

SEQ ID NO: 302992 - DNA, 120 bp, Artificial Sequence
  ENSG00000133106_30 (sequence is synthesized)
tttttagttttgattatacctttaaaaatattctactattaacacttctaagtttgtttctctacgttagtaacagaactcatgacatgatggtagatcctggatttctgttggcttgaa

SEQ ID NO: 302993 - DNA, 120 bp, Artificial Sequence
  ENSG00000133106_31 (sequence is synthesized)
caactttacacttattgccaataaacctccttgagggtagggaccacatcttactcgtttttgtgctctctgtacttaatgcgtacataacatgtttaattgatgtacagtaaatataaa

SEQ ID NO: 302994 - DNA, 120 bp, Artificial Sequence
  ENSG00000133106_32 (sequence is synthesized)
tgctgccatttaaagttatagcattatcctttagaggtggaagagaactaaagttcatttagttcacaaagaaattgtaggcttgctcaagtccagctgtggggctatgctgaaattcga

SEQ ID NO: 302995 - DNA, 120 bp, Artificial Sequence
  ENSG00000133106_33 (sequence is synthesized)
tggtctcctttattacatgattggtaggaaatttaacttcatgactaatgatggacagaaaggcacaaaagggaaaaagctctctaaagagtctccaccggacatgtagctccgggtggg

SEQ ID NO: 302996 - DNA, 120 bp, Artificial Sequence
  ENSG00000133106_34 (sequence is synthesized)
acagcgggtcagtgcagaatatgacaatcacagccatgcagggactatgggaactgccagcagttctggtatcttacaagcttttgatttaaatacttaataggagattaagtctcaatg

SEQ ID NO: 302997 - DNA, 120 bp, Artificial Sequence
  ENSG00000133106_35 (sequence is synthesized)
tggtctggatttcgaaatgtttcagaatttgtttttctagtaatggacatttgaaacaggtctcatgaggagataaggggaggcgctggagtgacagaactaatttctctctggcgcccc

SEQ ID NO: 302998 - DNA, 120 bp, Artificial Sequence
  ENSG00000133106_36 (sequence is synthesized)
attcgaaccctctgtgctgactcttggtgagaatgtgccacagggccgggcccaggatgacctgtacgggtcagggctgaatattgtgtttctaacctggaagccttgttcactcatgct

SEQ ID NO: 302999 - DNA, 120 bp, Artificial Sequence
  ENSG00000133106_37 (sequence is synthesized)
cacatatagttaattgccttctaatagttgtttcttatgctttgaagggactggttttcttttagaagtctaataattgacgatttgatatttctcgcctggcttagttgcggagcagga

SEQ ID NO: 303000 - DNA, 120 bp, Artificial Sequence
  ENSG00000133107_0 (sequence is synthesized)
agtcgcccagagaagcgggagtgggagaagctttgagagttgcaggggactacttttttccggtcgggcggcgggcctcatgggtgcttgtttaccgggctgggagcagggcattcaaaa

SEQ ID NO: 303001 - DNA, 120 bp, Artificial Sequence
  ENSG00000133107_1 (sequence is synthesized)
gctgggtgtcggagcgcactgaagtccaacacgcctgcagagaccgccctaagcctggaggtgtgtctggcttgcatccagaaccacagggtggattctcgccaccgacttggctggatg

SEQ ID NO: 303002 - DNA, 120 bp, Artificial Sequence
  ENSG00000133107_2 (sequence is synthesized)
acggctggctggtggtgagctcccctgcccactggctgacctcaagcagttggccccggtaggtggaggctattcgagggggacaagctggggacgcagcgtcagctcctgccagcgcgc

SEQ ID NO: 303003 - DNA, 120 bp, Artificial Sequence
  ENSG00000133107_3 (sequence is synthesized)
gggtctcctccacctccaagcagtgtggtgcgtgggacgcgcatcttcccggactatccctttccagcgcggtctgtgcggaccccgagcccggcagccaccagggacggagggcggggt

SEQ ID NO: 303004 - DNA, 120 bp, Artificial Sequence
  ENSG00000133107_4 (sequence is synthesized)
gcctttctctgggctcatccgctgtcagccgtgggaactcttaactttatccagagggatctgtgcaggcgggggtgggagaggttctcctcccctggcggttacctccccctcccgggc

SEQ ID NO: 303005 - DNA, 120 bp, Artificial Sequence
  ENSG00000133107_5 (sequence is synthesized)
cgcccctcccccgcctcccatggcttcgctttcagagcatcctcactccgcccagttcggtgccagctgcgtgggctccagcttcgatcgttttccttggaatgctccaaaactcagcag

SEQ ID NO: 303006 - DNA, 120 bp, Artificial Sequence
  ENSG00000133107_6 (sequence is synthesized)
cgactaagggaattccattggaatttgccgggcgtgctctcaccccgcacggcacccgcgccgtcagtcctcggatcccatcacttcagcccgaagattgcaactttgcagagacgaaga

SEQ ID NO: 303007 - DNA, 120 bp, Artificial Sequence
  ENSG00000133107_7 (sequence is synthesized)
aatagcatggcatgaaacatggctcagttctattacaaaagaaatgttaatgctccctatagagaccgcatccctctaaggatagtaagagcagaatcagaactctcgccatcagaaaaa

SEQ ID NO: 303008 - DNA, 120 bp, Artificial Sequence
  ENSG00000133107_8 (sequence is synthesized)
gcctacttgaatgctgtggaaaagggagattatgccagtgtcaagaaatccctagaggaagctgaaatttattttaaaatcaatattaattgcattgatcctctcggaagaactgctctc

SEQ ID NO: 303009 - DNA, 120 bp, Artificial Sequence
  ENSG00000133107_9 (sequence is synthesized)
ctcattgcaattgaaaatgagaacttggagctcatcgaactactcttaagctttaatgtctatgttggagatgctctattacatgctatcagaaaagaagtcgtcggagctgttgagctg

SEQ ID NO: 303010 - DNA, 120 bp, Artificial Sequence
  ENSG00000133107_10 (sequence is synthesized)
ttattgaaccacaaaaaacctagtggagaaaaacaggtgcctcctatactccttgataagcagttctctgaattcactccagacattacaccaatcattttggcagcccatacaaataat

SEQ ID NO: 303011 - DNA, 120 bp, Artificial Sequence
  ENSG00000133107_11 (sequence is synthesized)
tatgagataataaaactcttggttcagaaaggagtctcagtgcctcgaccccacgaggtccgctgtaactgtgtggaatgcgtgtccagttcagatgtggacagcctccgtcactcacgc

SEQ ID NO: 303012 - DNA, 120 bp, Artificial Sequence
  ENSG00000133107_12 (sequence is synthesized)
tccagactcaacatctacaaggccttggccagtccctctctcattgcactgtcaagcgaagatccttttctcacagcctttcagttaagttgggaacttcaggaactgagcaaggtggaa

SEQ ID NO: 303013 - DNA, 120 bp, Artificial Sequence
  ENSG00000133107_13 (sequence is synthesized)
aatgaattcaagtcggagtatgaagagctgtcacggcagtgcaaacaatttgctaaggacctactggatcagacgagaagttccagagaactggaaatcattcttaattaccgagatgac

SEQ ID NO: 303014 - DNA, 120 bp, Artificial Sequence
  ENSG00000133107_14 (sequence is synthesized)
aatagtctcatagaagaacaaagtggaaatgatcttgcaagactaaaattggccattaagtaccgtcaaaaagagtttgttgcccagcccaattgtcaacagctgctggcatctcgctgg

SEQ ID NO: 303015 - DNA, 120 bp, Artificial Sequence
  ENSG00000133107_15 (sequence is synthesized)
tacgatgagtttccaggctggaggagaagacactgggcagtgaagatggtgacatgtttcataataggacttctttttcctgtcttctctgtgtgctacctgatagctcccaaaagccca

SEQ ID NO: 303016 - DNA, 120 bp, Artificial Sequence
  ENSG00000133107_16 (sequence is synthesized)
gacaggtcagacttgaacaggcaaggtccaccaccaaccatcgtcgagtggatgatattaccgtgggtcctgggcttcatatggggagaaattaaacagatgtgggatggcggacttcag

SEQ ID NO: 303017 - DNA, 120 bp, Artificial Sequence
  ENSG00000133107_17 (sequence is synthesized)
gactacatccatgattggtggaatctaatggactttgtaatgaactccttatatttagcaacaatctccttgaaaattgttgcatttgtaaagtacagtgcccttaatccacgagaatca

SEQ ID NO: 303018 - DNA, 120 bp, Artificial Sequence
  ENSG00000133107_18 (sequence is synthesized)
tgggacatgtggcatcccactctggtggcagaggctttatttgctattgcaaacatcttcagttctctgcgtctgatctcactgtttactgcaaattctcacctgggacctctgcaaata

SEQ ID NO: 303019 - DNA, 120 bp, Artificial Sequence
  ENSG00000133107_19 (sequence is synthesized)
tctctgggaagaatgctcctggacattttgaagtttctattcatatactgccttgtgttgctagcatttgcaaatggcctaaatcaattgtacttctattatgaagaaacgaaagggtta

SEQ ID NO: 303020 - DNA, 120 bp, Artificial Sequence
  ENSG00000133107_20 (sequence is synthesized)
acctgcaaaggcataagatgtgaaaagcagaataatgcattttcaacgttatttgagacactgcagtccctgttttggtcaatatttgggctcatcaatttatatgtgaccaatgtcaaa

SEQ ID NO: 303021 - DNA, 120 bp, Artificial Sequence
  ENSG00000133107_21 (sequence is synthesized)
gcacagcatgaatttactgagtttgttggtgccaccatgtttgggacatacaatgtcatctctctggttgttctactcaacatgttaatagctatgatgaataattcttaccaactgatt

SEQ ID NO: 303022 - DNA, 120 bp, Artificial Sequence
  ENSG00000133107_22 (sequence is synthesized)
gctgaccatgcagatatagaatggaaatttgcacgaacaaagctttggatgagttattttgaagaaggaggtactctgcctactcccttcaatgtcatcccgagccccaagtctctctgg

SEQ ID NO: 303023 - DNA, 120 bp, Artificial Sequence
  ENSG00000133107_23 (sequence is synthesized)
tacctgatcaaatggatctggacacacttgtgcaagaaaaagatgagaagaaagccagaaagttttggaacaatagggaggcgagctgctgataacttgagaagacatcaccaataccaa

SEQ ID NO: 303024 - DNA, 120 bp, Artificial Sequence
  ENSG00000133107_24 (sequence is synthesized)
gaagttatgaggaacctggtgaagcgatacgttgctgcaatgattagagatgctaaaactgaagaaggcctgaccgaagagaactttaaggaactaaagcaagacatttctagtttccgc

SEQ ID NO: 303025 - DNA, 120 bp, Artificial Sequence
  ENSG00000133107_25 (sequence is synthesized)
tttgaagtcctgggattactaagaggaagcaaactttccacaatacaatctgcgaatgcctcgaaggagtcttcaaattcggcagactcagatgaaaagagtgatagcgaaggtaatagc

SEQ ID NO: 303026 - DNA, 120 bp, Artificial Sequence
  ENSG00000133107_26 (sequence is synthesized)
aaggacaagaaaaagaatttcagcctttttgatttaaccaccctgattcatccgagatcagcagcaattgcctctgaaagacataacataagcaatggctctgccctggtggttcaggag

SEQ ID NO: 303027 - DNA, 120 bp, Artificial Sequence
  ENSG00000133107_27 (sequence is synthesized)
ccgcccagggagaagcagagaaaagtgaattttgtgaccgatatcaaaaactttgggttatttcatagacgatcaaaacaaaatgctgctgagcaaaatgcaaaccaaatcttctctgtt

SEQ ID NO: 303028 - DNA, 120 bp, Artificial Sequence
  ENSG00000133107_28 (sequence is synthesized)
tcagaagaagttgctcgtcaacaggctgcaggaccacttgagagaaatattcaactggaatctcgaggattagcttcacggggtgacctgagcattcccggtctcagtgaacaatgtgtg

SEQ ID NO: 303029 - DNA, 120 bp, Artificial Sequence
  ENSG00000133107_29 (sequence is synthesized)
ttagtagaccatagagaaaggaatacggacacactggggttacaggtaggaaagagagtgtgtccattcaagtcagagaaggtggtggtggaggacacggttcctataataccaaaggag

SEQ ID NO: 303030 - DNA, 120 bp, Artificial Sequence
  ENSG00000133107_30 (sequence is synthesized)
aaacatgcaaaagaagaggactctagtatagactatgatctaaacctcccagacacagtcacccacgaagattacgtgaccacaagattgtgatacttgaaggaggaagcgtttaccata

SEQ ID NO: 303031 - DNA, 120 bp, Artificial Sequence
  ENSG00000133107_31 (sequence is synthesized)
cacatacgtattttccgtagtgctctgggtgggggaaaatgtttaaattgtattagcaaatgctaacttacactttatagcgtttatcagctgtggcatattacctgtaacatgtttaaa

SEQ ID NO: 303032 - DNA, 120 bp, Artificial Sequence
  ENSG00000133107_32 (sequence is synthesized)
taaggcaaaggcaatcaaaaacctttttgttttgtagcctgcttttgctttcacaatttgtcttacaattgtttttgttaataaataaatgcaccttgtattcttgtactgttgcaataa

SEQ ID NO: 303033 - DNA, 120 bp, Artificial Sequence
  ENSG00000133110_0 (sequence is synthesized)
gccagttctcttcggggactaactgcaacggagagactcaagatgattccctttttacccatgttttctctactattgctgcttattgttaaccctataaacgccaacaatcattatgac

SEQ ID NO: 303034 - DNA, 120 bp, Artificial Sequence
  ENSG00000133110_1 (sequence is synthesized)
aagatcttggctcatagtcgtatcaggggtcgggaccaaggcccaaatgtctgtgcccttcaacagattttgggcaccaaaaagaaatacttcagcacttgtaagaactggtataaaaag

SEQ ID NO: 303035 - DNA, 120 bp, Artificial Sequence
  ENSG00000133110_2 (sequence is synthesized)
tccatctgtggacagaaaacgactgtgttatatgaatgttgccctggttatatgagaatggaaggaatgaaaggctgcccagcagttttgcccattgaccatgtttatggcactctgggc

SEQ ID NO: 303036 - DNA, 120 bp, Artificial Sequence
  ENSG00000133110_3 (sequence is synthesized)
atcgtgggagccaccacaacgcagcgctattctgacgcctcaaaactgagggaggagatcgagggaaagggatccttcacttactttgcaccgagtaatgaggcttgggacaacttggat

SEQ ID NO: 303037 - DNA, 120 bp, Artificial Sequence
  ENSG00000133110_4 (sequence is synthesized)
tctgatatccgtagaggtttggagagcaacgtgaatgttgaattactgaatgctttacatagtcacatgattaataagagaatgttgaccaaggacttaaaaaatggcatgattattcct

SEQ ID NO: 303038 - DNA, 120 bp, Artificial Sequence
  ENSG00000133110_5 (sequence is synthesized)
tcaatgtataacaatttggggcttttcattaaccattatcctaatggggttgtcactgttaattgtgctcgaatcatccatgggaaccagattgcaacaaatggtgttgtccatgtcatt

SEQ ID NO: 303039 - DNA, 120 bp, Artificial Sequence
  ENSG00000133110_6 (sequence is synthesized)
gaccgtgtgcttacacaaattggtacctcaattcaagacttcattgaagcagaagatgacctttcatcttttagagcagctgccatcacatcggacatattggaggcccttggaagagac

SEQ ID NO: 303040 - DNA, 120 bp, Artificial Sequence
  ENSG00000133110_7 (sequence is synthesized)
ggtcacttcacactctttgctcccaccaatgaggcttttgagaaacttccacgaggtgtcctagaaaggatcatgggagacaaagtggcttccgaagctcttatgaagtaccacatctta

SEQ ID NO: 303041 - DNA, 120 bp, Artificial Sequence
  ENSG00000133110_8 (sequence is synthesized)
aatactctccagtgttctgagtctattatgggaggagcagtctttgagacgctggaaggaaatacaattgagataggatgtgacggtgacagtataacagtaaatggaatcaaaatggtg

SEQ ID NO: 303042 - DNA, 120 bp, Artificial Sequence
  ENSG00000133110_9 (sequence is synthesized)
aacaaaaaggatattgtgacaaataatggtgtgatccatttgattgatcaggtcctaattcctgattctgccaaacaagttattgagctggctggaaaacagcaaaccaccttcacggat

SEQ ID NO: 303043 - DNA, 120 bp, Artificial Sequence
  ENSG00000133110_10 (sequence is synthesized)
cttgtggcccaattaggcttggcatctgctctgaggccagatggagaatacactttgctggcacctgtgaataatgcattttctgatgatactctcagcatggatcagcgcctccttaaa

SEQ ID NO: 303044 - DNA, 120 bp, Artificial Sequence
  ENSG00000133110_11 (sequence is synthesized)
ttaattctgcagaatcacatattgaaagtaaaagttggccttaatgagctttacaacgggcaaatactggaaaccatcggaggcaaacagctcagagtcttcgtatatcgtacagctgtc

SEQ ID NO: 303045 - DNA, 120 bp, Artificial Sequence
  ENSG00000133110_12 (sequence is synthesized)
tgcattgaaaattcatgcatggagaaagggagtaagcaagggagaaacggtgcgattcacatattccgcgagatcatcaagccagcagagaaatccctccatgaaaagttaaaacaagat

SEQ ID NO: 303046 - DNA, 120 bp, Artificial Sequence
  ENSG00000133110_13 (sequence is synthesized)
aacctggagactggacattatttgtgccaaccaatgatgcttttaagggaatgactagtgaagaaaaagaaattctgatacgggacaaaaatgctcttcaaaacatcattctttatcacc

SEQ ID NO: 303047 - DNA, 120 bp, Artificial Sequence
  ENSG00000133110_14 (sequence is synthesized)
tgacaccaggagttttcattggaaaaggatttgaacctggtgttactaacattttaaagaccacacaaggaagcaaaatctttctgaaagaagtaaatgatacacttctggtgaatgaat

SEQ ID NO: 303048 - DNA, 120 bp, Artificial Sequence
  ENSG00000133110_15 (sequence is synthesized)
tgaaatcaaaagaatctgacatcatgacaacaaatggtgtaattcatgttgtagataaactcctctatccagcagacacacctgttggaaatgatcaactgctggaaatacttaataaat

SEQ ID NO: 303049 - DNA, 120 bp, Artificial Sequence
  ENSG00000133110_16 (sequence is synthesized)
taatcaaatacatccaaattaagtttgttcgtggtagcaccttcaaagaaatccccgtgactgtctatacaactaaaattataaccaaagttgtggaaccaaaaattaaagtgattgaag

SEQ ID NO: 303050 - DNA, 120 bp, Artificial Sequence
  ENSG00000133110_17 (sequence is synthesized)
gcagtcttcagcctattatcaaaactgaaggacccacactaacaaaagtcaaaattgaaggtgaacctgaattcagactgattaaagaaggtgaaacaataactgaagtgatccatggag

SEQ ID NO: 303051 - DNA, 120 bp, Artificial Sequence
  ENSG00000133110_18 (sequence is synthesized)
agccaattattaaaaaatacaccaaaatcattgatggagtgcctgtggaaataactgaaaaagagacacgagaagaacgaatcattacaggtcctgaaataaaatacactaggatttcta

SEQ ID NO: 303052 - DNA, 120 bp, Artificial Sequence
  ENSG00000133110_19 (sequence is synthesized)
ctggaggtggagaaacagaagaaactctgaagaaattgttacaagaagaggtcaccaaggtcaccaaattcattgaaggtggtgatggtcatttatttgaagatgaagaaattaaaagac

SEQ ID NO: 303053 - DNA, 120 bp, Artificial Sequence
  ENSG00000133110_20 (sequence is synthesized)
tgcttcagggagacacacccgtgaggaagttgcaagccaacaaaaaagttcaaggatctagaagacgattaagggaaggtcgttctcagtgaaaatccaaaaaccagaaaaaaatgttta

SEQ ID NO: 303054 - DNA, 120 bp, Artificial Sequence
  ENSG00000133110_21 (sequence is synthesized)
tacaaccctaagtcaataacctgaccttagaaaattgtgagagccaagttgacttcaggaactgaaacatcagcacaaagaagcaatcatcaaataattctgaacacaaatttaatattt

SEQ ID NO: 303055 - DNA, 120 bp, Artificial Sequence
  ENSG00000133110_22 (sequence is synthesized)
ttttttctgaatgagaaacatgagggaaattgtggagttagcctcctgtggtaaaggaattgaagaaaatataacaccttacaccctttttcatcttgacattaaaagttctggctaact

SEQ ID NO: 303056 - DNA, 120 bp, Artificial Sequence
  ENSG00000133110_23 (sequence is synthesized)
ttggaatccattagagaaaaatccttgtcaccagattcattacaattcaaatcgaagagttgtgaactgttatcccattgaaaagaccgagccttgtatgtatgttatggatacataaaa

SEQ ID NO: 303057 - DNA, 120 bp, Artificial Sequence
  ENSG00000133110_24 (sequence is synthesized)
tgcacgcaagccattatctctccatgggaagctaagttataaaaataggtgcttggtgtacaaaactttttatatcaaaaggctttgcacatttctatatgagtgggtttactggtaaat

SEQ ID NO: 303058 - DNA, 120 bp, Artificial Sequence
  ENSG00000133110_25 (sequence is synthesized)
tatgttattttttacaactaattttgtactctcagaatgtttgtcatatgcttcttgcaatgcatattttttaatctcaaacgtttcaataaaaccatttttcagatataaagagaatta

SEQ ID NO: 303059 - DNA, 120 bp, Artificial Sequence
  ENSG00000133110_26 (sequence is synthesized)
cttcaaattgagtaattcagaaaaactcaagatttaagttaaaaagtggtttggacttgggaacaggactttatacctcttttactgtaacaagtactcattaaaggaaattgaatgaaa

SEQ ID NO: 303060 - DNA, 120 bp, Artificial Sequence
  ENSG00000133110_27 (sequence is synthesized)
attttacagaggcagacattgcacataggtatgactgcaaaaatgggtggctaactctgggaagatacttgtgttaaactttatatgacatttaataacccttcatcataaggcaatgtt

SEQ ID NO: 303061 - DNA, 120 bp, Artificial Sequence
  ENSG00000133110_28 (sequence is synthesized)
ttttacaaaaagattgaaaaaatcatgtaagtcatttactctgcaaaaatggcacattaggtggggttccaaaatccataatgaaacaatgtgttttgcaactaagaaacattcattatg

SEQ ID NO: 303062 - DNA, 120 bp, Artificial Sequence
  ENSG00000133110_29 (sequence is synthesized)
atatatggaaaacactgtctgtctacttgtcctttacgaaaaaatgtaaaactctgaggatcataaaatttaactactaaaaataatcttcgtgtttaagtgatacttatttaagacttt

SEQ ID NO: 303063 - DNA, 120 bp, Artificial Sequence
  ENSG00000133110_30 (sequence is synthesized)
aacatgtatataatagaaaaaactggacttcatgctgagtatagatgatacatataaaagaagtcaaaatttggagaaaaaatttaaaaagataagtagaaaaatgaagtaactgtagaa

SEQ ID NO: 303064 - DNA, 120 bp, Artificial Sequence
  ENSG00000133110_31 (sequence is synthesized)
accatacttactctttgatctcaaatgcccaaaaactgaatgaaaatgtgaatttaggccgaccaggtagtcttgtcaataaactaaaagaaaaacaggaaaattgagaaatatgttaca

SEQ ID NO: 303065 - DNA, 120 bp, Artificial Sequence
  ENSG00000133110_32 (sequence is synthesized)
tgaaataaatgtcctattccggtaaatttaaaggactgttttaacatgataatttgtctcctaaaataatgtcccaggacccacactaacaaaagtcaaaattgaaggtgaacctgaatt

SEQ ID NO: 303066 - DNA, 120 bp, Artificial Sequence
  ENSG00000133110_33 (sequence is synthesized)
cagactgattaaagaaggtgaaacaataactgaagtgatccatggaggtgcgttccttatgttacctggggccgactaccttcgctgtgattattttgaaatagtgttggtttagaaata

SEQ ID NO: 303067 - DNA, 120 bp, Artificial Sequence
  ENSG00000133110_34 (sequence is synthesized)
ttgaacatctgatattttctcttagttcttattttataaaaattgtgggaattatttcctcagctatgagttcttattagctggtcagaaataaaacatagttagcttttaatggatcta

SEQ ID NO: 303068 - DNA, 120 bp, Artificial Sequence
  ENSG00000133110_35 (sequence is synthesized)
gttggaattaatttatctattaagtcactgggcccaacaaaatgtcatgatttttgcatatacaagtgaggattgtggaataaaattgtaacattaatgtcagtataaaaggaaatatta

SEQ ID NO: 303069 - DNA, 120 bp, Artificial Sequence
  ENSG00000133110_36 (sequence is synthesized)
gaaacagtaggaaaaaatgaccattgtataagtctctgtctaataagccactccactactaggatttatgatagggctcccattccaatgatatagaactccctggattctcactaagta

SEQ ID NO: 303070 - DNA, 120 bp, Artificial Sequence
  ENSG00000133110_37 (sequence is synthesized)
tttattccacatccagaaaacaagtatgacatggagagttaggatgtcaaatggccctctctctcaaccaagattcaggacatagctattaccttttagatccctattgatatgattttt

SEQ ID NO: 303071 - DNA, 120 bp, Artificial Sequence
  ENSG00000133110_38 (sequence is synthesized)
gggggatatgttctaaaaatgtttatgattgaatcttaaatggtaatatttgtagaaatatagttaatcattacaatgtctagcttatggatgtatagtcacaatatgagggtaaatcaa

SEQ ID NO: 303072 - DNA, 120 bp, Artificial Sequence
  ENSG00000133110_39 (sequence is synthesized)
aactaacccccttaacaggttctagtgactgagttcaactttttaaagactgagcaagcagattttttcttttaattgggttaaaaaaaaaaaagacaacatccactgttgtcttaatag

SEQ ID NO: 303073 - DNA, 120 bp, Artificial Sequence
  ENSG00000133110_40 (sequence is synthesized)
atggattggttcaatggtagttaatagttatgaagaaatgattactagtttaaacagtctttaaaaagttctatggtataaagtttggggagcaatgaatattttttttgctttgattca

SEQ ID NO: 303074 - DNA, 120 bp, Artificial Sequence
  ENSG00000133110_41 (sequence is synthesized)
gataattttaagggccttttaagtatgcaaaagggaaataattgttaaattgctagctgttaaacaagcccaaatttgatatactttttatatttaaaaaattatattcactgcccccat

SEQ ID NO: 303075 - DNA, 120 bp, Artificial Sequence
  ENSG00000133110_42 (sequence is synthesized)
aagagcaatcaaggcatgtctttaaattctatacatagatatagccaaaaatagtgcatttagtaacattcttttccaaaactatattcttgggaatgaatatctgtttcttctaacagt

SEQ ID NO: 303076 - DNA, 120 bp, Artificial Sequence
  ENSG00000133110_43 (sequence is synthesized)
ttgagtgataatctatacctgtagatataagttattttgcatataaaattaatcttaatcttttatggaatgttctctgtctgtggcattaaatgaaccttaagaacaaaaaaaaaagaa

SEQ ID NO: 303077 - DNA, 120 bp, Artificial Sequence
  ENSG00000133111_0 (sequence is synthesized)
gcgcagtcggggcgccttcccggtataggcgccttttaccccagcgtgtcctgagtctttggttcgcgaagtgccgttaggccaagcaggtgctaaaagcccggggtcgtggaccccggc

SEQ ID NO: 303078 - DNA, 120 bp, Artificial Sequence
  ENSG00000133111_1 (sequence is synthesized)
ctaaaagcccggggtcgtggaccccggccaggtcttagcagcatggaggcgcagggtgtagcggagggcgcggggccgggcgccgccagcggcgtgccccaccccgcggccctagccccg

SEQ ID NO: 303079 - DNA, 120 bp, Artificial Sequence
  ENSG00000133111_2 (sequence is synthesized)
cggtggcggccgcggcctctcaattcaccctgctagtgatgcaaccctgtgctgggcaggacgaggctgcggcccccgggggcagcgttggggcgggcaagcccgttaggtacctgtgcg

SEQ ID NO: 303080 - DNA, 120 bp, Artificial Sequence
  ENSG00000133111_3 (sequence is synthesized)
aaggggccggggatggcgaagaggaggctggggaggacgaggcggacctgttagacacttcggaccctccggggggaggcgagagcgcggctagtttggaggatctagaggacgaggaga

SEQ ID NO: 303081 - DNA, 120 bp, Artificial Sequence
  ENSG00000133111_4 (sequence is synthesized)
ctcactcggggggcgagggcagcagcgggggcgcccggaggcggggcagcggtgggggcagcatgagcaagacctgcacctacgaaggctgcagcgagaccacgagccaggtggccaagc

SEQ ID NO: 303082 - DNA, 120 bp, Artificial Sequence
  ENSG00000133111_5 (sequence is synthesized)
agcgcaaaccgtggatgtgcaagaaacaccgcaacaagatgtacaaggacaagtataaaaagaagaagagcgaccaggccctgaactgcggtgggactgcctcgactggcagcgcgggaa

SEQ ID NO: 303083 - DNA, 120 bp, Artificial Sequence
  ENSG00000133111_6 (sequence is synthesized)
acgtcaaactcgaggaaagtgcagataacatactctccattgttaaacaaagaacaggatcttttggggatcgtcctgcaagacctactcttttagaacaagtgttaaatcaaaaaagac

SEQ ID NO: 303084 - DNA, 120 bp, Artificial Sequence
  ENSG00000133111_7 (sequence is synthesized)
tgtcgttactaagaagtccagaagtagtgcaatttttacagaaacagcaacagctattaaatcagcaagttttggagcaaagacaacagcagtttccaggaacatcaatgtgagggaact

SEQ ID NO: 303085 - DNA, 120 bp, Artificial Sequence
  ENSG00000133111_8 (sequence is synthesized)
taccaagaacatctacatggttttttatcttattgtaatagatgagcatatttttttaccagacataaatggggtaataatctatgcctgtagaacataaacattttcctgtaaatgtat

SEQ ID NO: 303086 - DNA, 120 bp, Artificial Sequence
  ENSG00000133111_9 (sequence is synthesized)
attgcactttgtgcatctaatctttcagattactgtgagtttgaagaagtcagcttatctttccaaataacatttaattataatgttttttaaaaaatatattcctcttcagtcattgtt

SEQ ID NO: 303087 - DNA, 120 bp, Artificial Sequence
  ENSG00000133111_10 (sequence is synthesized)
actgaaggtaatgaagcagttactttctgtggaagtcataaagttaatagatattaatcttgactcatctagctcagtggttctcatcaagggtcaatttgattgtcatagtgaccttga

SEQ ID NO: 303088 - DNA, 120 bp, Artificial Sequence
  ENSG00000133111_11 (sequence is synthesized)
aaaccactggcttttagtgagtggccaggaatgctaaatgttctgcagtgtcaggggtagtcccacatactaaagattgtctcacccgcagtgccaataacactcctaagaaatgttgat

SEQ ID NO: 303089 - DNA, 120 bp, Artificial Sequence
  ENSG00000133111_12 (sequence is synthesized)
ggctattttgtggtgctaacatgtagttggggcacctataattgggttctcttaataacctttctttgcagttaagactgaagctgtcaaagaggtaagcacattttatatagacgtaag

SEQ ID NO: 303090 - DNA, 120 bp, Artificial Sequence
  ENSG00000133111_13 (sequence is synthesized)
gaaagtgattattgtttaatatctgtgaatttaggatgtgcatctcttttcagaggtgtgttagtaaaacctgacggattaactaagcacactgggatgtgtctcctacagttggcttct

SEQ ID NO: 303091 - DNA, 120 bp, Artificial Sequence
  ENSG00000133111_14 (sequence is synthesized)
ctctttgatgttacctgttagtgctgatctcttaaagcagacatttcttgtttgttgaatttgtgaacagtatagatctcagcccaccaatgccaagacaaaattatttttcttatactt

SEQ ID NO: 303092 - DNA, 120 bp, Artificial Sequence
  ENSG00000133111_15 (sequence is synthesized)
attttttattaaacaaaatgaaaaagatccttttcaaaaaggtgatcctgaaaataaaactaacactccagtattttgtcattgtttttcgcaattgagctatctgaaaactgttattcc

SEQ ID NO: 303093 - DNA, 120 bp, Artificial Sequence
  ENSG00000133111_16 (sequence is synthesized)
taagtaatgttcaaaaatgataagtaatctggatacctttttcttatactttctcctaggaaaactttaaaactttaaaaaggcaaacctaccaataggaataacaaattaaatgtcaag

SEQ ID NO: 303094 - DNA, 120 bp, Artificial Sequence
  ENSG00000133111_17 (sequence is synthesized)
agagtatatccaatattaggatataaatgtatgtgtctcaagtttaactctacaaaaatttgttacttgttttttaaactctatatataaagttcgacttaatcatggctgttctaagaa

SEQ ID NO: 303095 - DNA, 120 bp, Artificial Sequence
  ENSG00000133111_18 (sequence is synthesized)
gtacttatggagagcaagaacgtttttgttcatttcttaatgtgtgtgtttttacttgcatatctgttcaaaacacttttaacaaaattaattcattaaagtccagttgttgacctttga

SEQ ID NO: 303096 - DNA, 120 bp, Artificial Sequence
  ENSG00000133112_0 (sequence is synthesized)
ggaacggagccttgtgtctccgcctcaagtccccggatgctcacctccccgactcgcccccgctgtggccccgcccccgcgcggctcttcgtgccacgtcaccgcctgcgtcgcttccgg

SEQ ID NO: 303097 - DNA, 120 bp, Artificial Sequence
  ENSG00000133112_1 (sequence is synthesized)
aggcgcagcgggcgatgacgtagagggacgtgccctctatatgaggttggggagcggctgagtcggccttttccgcccgctcccccctccccccgagcgccgctccggctgcaccgcgct

SEQ ID NO: 303098 - DNA, 120 bp, Artificial Sequence
  ENSG00000133112_2 (sequence is synthesized)
cgctccgagtttcaggctcgtgctaagctagcgccgtcgtcgtctcccttcagtcgccatcatgattatctaccgggacctcatcagccacgatgagatgttctccgacatctacaagat

SEQ ID NO: 303099 - DNA, 120 bp, Artificial Sequence
  ENSG00000133112_3 (sequence is synthesized)
ccgggagatcgcggacgggttgtgcctggaggtggaggggaagatggtcagtaggacagaaggtaacattgatgactcgctcattggtggaaatgcctccgctgaaggccccgagggcga

SEQ ID NO: 303100 - DNA, 120 bp, Artificial Sequence
  ENSG00000133112_4 (sequence is synthesized)
aggtaccgaaagcacagtaatcactggtgtcgatattgtcatgaaccatcacctgcaggaaacaagtttcacaaaagaagcctacaagaagtacatcaaagattacatgaaatcaatcaa

SEQ ID NO: 303101 - DNA, 120 bp, Artificial Sequence
  ENSG00000133112_5 (sequence is synthesized)
agggaaacttgaagaacagagaccagaaagagtaaaaccttttatgacaggggctgcagaacaaatcaagcacatccttgctaatttcaaaaactaccagttctttattggtgaaaacat

SEQ ID NO: 303102 - DNA, 120 bp, Artificial Sequence
  ENSG00000133112_6 (sequence is synthesized)
gaatccagatggcatggttgctctattggactaccgtgaggatggtgtgaccccatatatgattttctttaaggatggtttagaaatggaaaaatgttaacaaatgtggcaattattttg

SEQ ID NO: 303103 - DNA, 120 bp, Artificial Sequence
  ENSG00000133112_7 (sequence is synthesized)
gatctatcacctgtcatcataactggcttctgcttgtcatccacacaacaccaggacttaagacaaatgggactgatgtcatcttgagctcttcatttattttgactgtgatttatttgg

SEQ ID NO: 303104 - DNA, 120 bp, Artificial Sequence
  ENSG00000133112_8 (sequence is synthesized)
agtggaggcattgtttttaagaaaaacatgtcatgtaggttgtctaaaaataaaatgcatttaaactcatttgagagaatgccttttagtttaatgcatatttaaactaaattgatcctg

SEQ ID NO: 303105 - DNA, 120 bp, Artificial Sequence
  ENSG00000133112_9 (sequence is synthesized)
tagtgttcctggagaagctagagcctgattgtaggctactactcatcaattaacttctacagtggagactacttctgggactggaatataaaaaagaatcaaaggttctgattttgagtt

SEQ ID NO: 303106 - DNA, 120 bp, Artificial Sequence
  ENSG00000133112_10 (sequence is synthesized)
gcaataaagggaaagaccatgctcatagcagtgccaacatctgaagtgtggagccttacccatttcatcacctacaacggaagtagttaactggaagagattaccaagagaataaaaaga

SEQ ID NO: 303107 - DNA, 120 bp, Artificial Sequence
  ENSG00000133112_11 (sequence is synthesized)
gactcattcagtggaagcaactttgtctcagcttatttcacataaagagagcgaagtcttttgggatgaatgttaattaaactccctggtaactagaacagggactggcaaactagccta

SEQ ID NO: 303108 - DNA, 120 bp, Artificial Sequence
  ENSG00000133112_12 (sequence is synthesized)
tctgaccacctgttttgtacactttaaggtggttggttgcctttttaaatggttgaggggaaaagaataccttgtgggatatggaatttaagttcgagtccagttttattggaacgtggc

SEQ ID NO: 303109 - DNA, 120 bp, Artificial Sequence
  ENSG00000133112_13 (sequence is synthesized)
tatgcttattcatttatggattgactgtggctgttgtcagtgcatgagcagagttgtgtctaacagactagagcctgcaagtttgccagcccctgatttaaaagatgaaggtacacagaa

SEQ ID NO: 303110 - DNA, 120 bp, Artificial Sequence
  ENSG00000133112_14 (sequence is synthesized)
tgtgggctggctggtgggcaaaggggtaaaaatgttctctatattgtatctgaaaagatggggtgtctgaataagaaaatgcatctatttgacagacctggagcagttgctatctgctgc

SEQ ID NO: 303111 - DNA, 120 bp, Artificial Sequence
  ENSG00000133112_15 (sequence is synthesized)
tatggtttccaccacagatgcaagaagaacatgtccttgcgctttccgtctgtctaattgtggcagctgagattgaatagaggaatacaggaggaaaaaaagcgggaagagtttttgagg

SEQ ID NO: 303112 - DNA, 120 bp, Artificial Sequence
  ENSG00000133112_16 (sequence is synthesized)
caggtcggtcacccaggcttgtagtgcagtggcacaagcaactcactgcattctctgcatcctgtgctcaagccattttcccacctcagtctcactagttgctgggactgcaggcatgca

SEQ ID NO: 303113 - DNA, 120 bp, Artificial Sequence
  ENSG00000133112_17 (sequence is synthesized)
ggactgcaggcatgcacccctatgcccagctaatttttgtagagaccgagtatcgcttagttgcccagggtggtctcaactcctgggctcaaggagatctgcccacctcagcctcccaaa

SEQ ID NO: 303114 - DNA, 120 bp, Artificial Sequence
  ENSG00000133112_18 (sequence is synthesized)
ggaggggaattttcaaaacgtgagttttgggaaatagtctatcagccttacctggttgattacacttgtaaaagaaagattaaaagcaggccagtgactctggtctgcttgaacatgtga

SEQ ID NO: 303115 - DNA, 120 bp, Artificial Sequence
  ENSG00000133112_19 (sequence is synthesized)
atagtgtccaaaacctgaggcagatactaatgttaacccccagcaccccgtgattggaaacaaacctaaatacgtattgggaacttaatagcaattttaagcattctgatagattttttg

SEQ ID NO: 303116 - DNA, 120 bp, Artificial Sequence
  ENSG00000133112_20 (sequence is synthesized)
tagggatggggtcatgccatgtggcccaggctggtctgaaaactctggcctcaagtgatctcaagctttggccttctaaagtgttgggattacaggtgtgaggcattgcacctggcttag

SEQ ID NO: 303117 - DNA, 120 bp, Artificial Sequence
  ENSG00000133112_21 (sequence is synthesized)
cgttctgatttgacattgtaatgaaaagtgtgagtctcatctacagggccttttgtcctctgaaatgatagcaggaagggaattttcaggcagtggtcaaagctggggaaaccaggatag

SEQ ID NO: 303118 - DNA, 120 bp, Artificial Sequence
  ENSG00000133112_22 (sequence is synthesized)
tgaagaaggccttgaggtgagagatggaagctaattggtgaactagccttggaagcctgaaacagacaagtagcaattcagagactttgtgggctccactgctccaacttgttttgaaga

SEQ ID NO: 303119 - DNA, 120 bp, Artificial Sequence
  ENSG00000133112_23 (sequence is synthesized)
ttttcagttctgcagaagaggtatttccccagttgtcctttcagtgctcttagctgttttcccaacatccagatccaatcaaggctgggacatagcattttatcatgtctatttaagtca

SEQ ID NO: 303120 - DNA, 120 bp, Artificial Sequence
  ENSG00000133112_24 (sequence is synthesized)
gaagtgatgaaccccagctgtttacctcatggtaaacctttgaagattccaggtagaatcttctcagactttgaagactgtctcattttatatctttttctcgttattcctagggtcaag

SEQ ID NO: 303121 - DNA, 120 bp, Artificial Sequence
  ENSG00000133112_25 (sequence is synthesized)
acgttttgggcaagaataaggatgtgaacatcagaaagctcataacattttgtttttgatgctaagtttaacaaaggcatgctttagtagcctgtgggccctagggtttgttaaagtgtg

SEQ ID NO: 303122 - DNA, 120 bp, Artificial Sequence
  ENSG00000133112_26 (sequence is synthesized)
gagaacaactgagtggagcaagaggacttttctaggaaggtccttgtaatgtgacatttgaaaacaaatgaaggtgtggaagtaggccatgtggatatcaggacaaaccattccaggcca

SEQ ID NO: 303123 - DNA, 120 bp, Artificial Sequence
  ENSG00000133112_27 (sequence is synthesized)
agacaacagcagttagtctggagtgtgatgtgttctgggaaaaaagtggccactttgctaacccaagaagacaggaagggttgtaaagcagtgggagtgtgcaaggaaggaagaccagac

SEQ ID NO: 303124 - DNA, 120 bp, Artificial Sequence
  ENSG00000133112_28 (sequence is synthesized)
ctcaaggaaaccacaggcgctctgagcagaagagttacatgatatgactcaaatttttaaaggatcactttggctgccaggtggcagggtaaaagcatagaataattgtgtataatgtgt

SEQ ID NO: 303125 - DNA, 120 bp, Artificial Sequence
  ENSG00000133112_29 (sequence is synthesized)
ttttaaggcaaagatagtggcttagtctagggtagtagactgaggtggtaggaaatgaagatagagacaacaggatatgctggtgggtgaggatggatttaatgttgatacaagtatttt

SEQ ID NO: 303126 - DNA, 120 bp, Artificial Sequence
  ENSG00000133112_30 (sequence is synthesized)
ggtctgagcgtttggaagaaagttggcactgaggtgggaagtcgagtttagttttgttagttttggatgtgttaagtttgagatgctgattcttcagagaagtctaagctggagaactat

SEQ ID NO: 303127 - DNA, 120 bp, Artificial Sequence
  ENSG00000133112_31 (sequence is synthesized)
atagagagtggaaagataacaatagacattgaaagccatgatacaggataaggtcatttggagagaggatagactgcattccaacatgagattggttgacaaagagaaaccaacaaaggt

SEQ ID NO: 303128 - DNA, 120 bp, Artificial Sequence
  ENSG00000133112_32 (sequence is synthesized)
aattaagaggtgctcccactgcacttgtactcagaaggctgaggtaggattgttagaggccagcctgggcaccacagggagaccccatctctaaaatttagccaggaaccatggctcatg

SEQ ID NO: 303129 - DNA, 72 bp, Artificial Sequence
  ENSG00000133112_33 (sequence is synthesized)
gaccccatctctaaaatttagccaggaaccatggctcatgcctgtagccccaggaatttgggaggctgagtg

SEQ ID NO: 303130 - DNA, 90 bp, Artificial Sequence
  ENSG00000133112_34 (sequence is synthesized)
gggagacctaaaaaaattaattgggcatctgtagtcccagctactcaggcggctgagctgagaggatggcttgagtccgagagattgagg

SEQ ID NO: 303131 - DNA, 120 bp, Artificial Sequence
  ENSG00000133112_35 (sequence is synthesized)
taaaaattttaaaaaagaaggaactgcccctgaggtaagaaccaagggagggcctcccagaggtcaggtggaaaaagttttaggaaggaggaagtagtcaacagggttacctgttgcaaa

SEQ ID NO: 303132 - DNA, 120 bp, Artificial Sequence
  ENSG00000133112_36 (sequence is synthesized)
gtacttaagtaatatgaggcctgatagtggtaaacttgactaccgttggatttcactagtgggaaaggaagtctaattaaaatgcactcaagagactaacagtcgcaggcatgaaataca

SEQ ID NO: 303133 - DNA, 120 bp, Artificial Sequence
  ENSG00000133112_37 (sequence is synthesized)
atacaggtacatggttttttattatgtgtgcatctgcttcagtaataggtgtgaattactcatttggatcattaggagtttcaaaatctagttaaatgactagatttttgttgatgtaaa

SEQ ID NO: 303134 - DNA, 120 bp, Artificial Sequence
  ENSG00000133112_38 (sequence is synthesized)
ttctgtcattctgaactgcagggattgtcagtaacttaactgcaaactaaactggtgataattatggtaaaattgcaagacgagcaataaatctcaaccaacttgagagaacactgataa

SEQ ID NO: 303135 - DNA, 120 bp, Artificial Sequence
  ENSG00000133112_39 (sequence is synthesized)
tggaaaaatgtgatgcaaaagaaagaaatccctgcgctttctgtctgtctttgtggcggcccagattgaattggggaatacatctttagcctggaaatgtaggctgcatgttaatggtaa

SEQ ID NO: 303136 - DNA, 120 bp, Artificial Sequence
  ENSG00000133112_40 (sequence is synthesized)
ttggctaacttttgaggttctttcgcagtgggtatacttttgtgaaagtccttgcttttttattaatgagttcacggaaaagagtggttgcttttctataatatgagcatactgaagcct

SEQ ID NO: 303137 - DNA, 120 bp, Artificial Sequence
  ENSG00000133112_41 (sequence is synthesized)
gcagtctgtttccgtttagaattagaatagtattttgaaaatagtcaacaagaaatgtaaacattcttgaaagataccttctgtgaactagtaatttcttaacagctggttgcctttttc

SEQ ID NO: 303138 - DNA, 120 bp, Artificial Sequence
  ENSG00000133112_42 (sequence is synthesized)
gtattccaggtgtagaaagtggctttcccagctcgcaggtgtttccaaatcttgtcttctgattgaaaatttgcttcccagatgacatttctcagtttttctttttgtgaattgcttaac

SEQ ID NO: 303139 - DNA, 120 bp, Artificial Sequence
  ENSG00000133112_43 (sequence is synthesized)
cacctaagtgttctttcagttttttgcttacaattttaatgtgtctcattgctactggtcctccttctaatgtatctgagcttgttaattctacttttggaaaatgtcagtggctttccc

SEQ ID NO: 303140 - DNA, 120 bp, Artificial Sequence
  ENSG00000133112_44 (sequence is synthesized)
tttcctctaattttccagcttcatgcatcccctggccataagatacttccagactgtatgatatattctatcactgtcagccttatgttccctgtggttgactatataagcacgctttag

SEQ ID NO: 303141 - DNA, 120 bp, Artificial Sequence
  ENSG00000133112_45 (sequence is synthesized)
ggtttgggattgtatttaggattgagagtaaaggtttcctgaaagcctagtgttcctggattgctctgtacgttatttttctatttaggtcactattaaggtgccttaatccagtgaaca

SEQ ID NO: 303142 - DNA, 120 bp, Artificial Sequence
  ENSG00000133112_46 (sequence is synthesized)
gatgtctatgataagtgagcatcagagcttttgggtactgaagttttgatttttgtggtggtctaaaccttcccttgtactgtagtttgttttgaatggcatgtatttgtatgtaatagt

SEQ ID NO: 303143 - DNA, 120 bp, Artificial Sequence
  ENSG00000133112_47 (sequence is synthesized)
ccgagcgccgctccggctgcaccgcgctcgctccgagtttcaggctcgtgctaagctagcgccgtcgtcgtctcccttcagtcgccatcatgattatctaccgggacctcatcagccgcg

SEQ ID NO: 303144 - DNA, 120 bp, Artificial Sequence
  ENSG00000133112_48 (sequence is synthesized)
ccgagcgccgctccggctgcaccgcgctcgctccgagtttcaggctcgtgctaagctagcgccgtcgtcgtctcccttcagtcgccatcatgattatctaccgggacctcatcagccgtg

SEQ ID NO: 303145 - DNA, 120 bp, Artificial Sequence
  ENSG00000133112_49 (sequence is synthesized)
agtcctcactgcactatccttactgccgcacacgggggtctggggtgcgggtgggggcggggaaggcgcagccgtcgcgggcctaggggacgccggcggtcttagccgagcgcggagggg

SEQ ID NO: 303146 - DNA, 120 bp, Artificial Sequence
  ENSG00000133112_50 (sequence is synthesized)
tcggtgcccggggctcgcgcccagctctggtgtgctacggaggggcagatcccgcgtgcggccgccggcgcgggaaatgcgggaaatggcggcgccaggcgcacggtgatgggcggctct

SEQ ID NO: 303147 - DNA, 120 bp, Artificial Sequence
  ENSG00000133112_51 (sequence is synthesized)
ggggagtccgggccgagcgggctcgggtttcctccgctcccccgcctgaggttgtgcaatcctccccgccgcctcctggcggaggagacgctctttccgggcttgggtttttctagaaaa

SEQ ID NO: 303148 - DNA, 120 bp, Artificial Sequence
  ENSG00000133112_52 (sequence is synthesized)
ttgtccgggacatgatgcttccggcttaggagcctggagtcctttcgtgtttgtcctgtccccacttaccaaccggaggcatcacatgcccgcaactggaaacaactttttaatgacccc

SEQ ID NO: 303149 - DNA, 120 bp, Artificial Sequence
  ENSG00000133112_53 (sequence is synthesized)
attttttgttccggccaacagacaactcttttaagttaggtcgttttgagaaatccacgggtcacaactttattcccaaaatggtgctttttttattttcagcaagaactaagaatactt

SEQ ID NO: 303150 - DNA, 120 bp, Artificial Sequence
  ENSG00000133112_54 (sequence is synthesized)
cttatccgtgaactattggcgtggaaggtgctttggatgcgtttgtgtcttttgcaattatactgctttttcttaatgcagatggtcagtaggacagaaggtaacattgatgactcgctc

SEQ ID NO: 303151 - DNA, 120 bp, Artificial Sequence
  ENSG00000133112_55 (sequence is synthesized)
aatgtgtaagtacaaggaagtgggttaaaataaataatgtaaaaaagacattttagatgtgatttgcaattgttttgtgacactgagaatgagttttacagcgttctgaaacatggtttt

SEQ ID NO: 303152 - DNA, 120 bp, Artificial Sequence
  ENSG00000133112_56 (sequence is synthesized)
agttttctctttggggatcaagagaattgtgtttcatatgtaaaaaattcttagggtataaaaaggcttagaatcttatttgtggaaaacgttgagtgcagatggggcataataaagtac

SEQ ID NO: 303153 - DNA, 89 bp, Artificial Sequence
  ENSG00000133112_57 (sequence is synthesized)
tgagtgcagatggggcataataaagtacagttttcagcacttgggacgccgaggtgggtgcatcacctgaggttgggagttcgagacca

SEQ ID NO: 303154 - DNA, 87 bp, Artificial Sequence
  ENSG00000133112_58 (sequence is synthesized)
agcgggcacctgtaatcccagctaatcgagagcctgaggcaggaaaatcacttaaacctgggaggggggttgcagtgagcagagatc

SEQ ID NO: 303155 - DNA, 120 bp, Artificial Sequence
  ENSG00000133114_0 (sequence is synthesized)
ccgggaaacctgccattcttcgctgctgatcgcgggattctttttggatagggttgacgttcgtggatagactcatatctgtgaccagtgtccgccaccgcggatggcaagagacctgat

SEQ ID NO: 303156 - DNA, 120 bp, Artificial Sequence
  ENSG00000133114_1 (sequence is synthesized)
cggaccggccctgccgcccggcttcaaggcccgcggaacagcggaggacgaagagcgggacccgagccctgttgcaggaccagctctgccccctaattataaaagcagtagttcagattc

SEQ ID NO: 303157 - DNA, 120 bp, Artificial Sequence
  ENSG00000133114_2 (sequence is synthesized)
atcagacagcgatgaagacagtagttctttgtacgaagaaggaaatcaagaatctgaagaagatgacagtggtccaactgcaagaaaacagaggaaaaatcaggatgatgacgatgatga

SEQ ID NO: 303158 - DNA, 120 bp, Artificial Sequence
  ENSG00000133114_3 (sequence is synthesized)
tgatgatgggttttttggaccagcccttcctcctggatttaaaaagcaggatgattctcctccaaggcccataataggtcctgcattgccacctggtttcattaaatctacacagaaaag

SEQ ID NO: 303159 - DNA, 120 bp, Artificial Sequence
  ENSG00000133114_4 (sequence is synthesized)
tgacaagggcagagatgatccaggacaacaggaaacagacagcagtgaagatgaggatattattggaccaatgcctgcaaaaggaccagttaactataatgtaacgacagagtttgaaaa

SEQ ID NO: 303160 - DNA, 120 bp, Artificial Sequence
  ENSG00000133114_5 (sequence is synthesized)
tggatgactgaacttcctccagaaatgaaagactttggtcttgggccaaggacttttaagagaagagctgatgacacatctggagatcgatcaatctggacagatactccagctgatagg

SEQ ID NO: 303161 - DNA, 120 bp, Artificial Sequence
  ENSG00000133114_6 (sequence is synthesized)
gaaaggaaagctaaggaaacacaagaagcaaggaagtcatccagtaagaaagatgaagaacatatattatcaggaagagataagagactggctgagcaggtatcttcatacaatgaatca

SEQ ID NO: 303162 - DNA, 120 bp, Artificial Sequence
  ENSG00000133114_7 (sequence is synthesized)
aaaagatcagaatctcttatggacatacatcataaaaagttaaagagtaaggctgctgaagacaaaaataagcctcaagagagaataccatttgaccgtgataaagatctcaaggttaat

SEQ ID NO: 303163 - DNA, 120 bp, Artificial Sequence
  ENSG00000133114_8 (sequence is synthesized)
cggtttgatgaagctcagaaaaaagccctaataaaaaaatctagagaactaaacaccagattttcacacggcaaaggcaatatgtttttataagtaagtatatttcagtgaggtatattt

SEQ ID NO: 303164 - DNA, 120 bp, Artificial Sequence
  ENSG00000133114_9 (sequence is synthesized)
atgtgaacttttctaaatactctattgtctttaataattgtgctgaaatctatttccttttataatagattaaaaattttatatttttataagtaaacagtgatttttgaaaagtcagcc

SEQ ID NO: 303165 - DNA, 120 bp, Artificial Sequence
  ENSG00000133114_10 (sequence is synthesized)
gaaaagtcagccttgtgggatgaaaaatatgtcttactggaaaaatccctcataataacctaatagggcattgctattaaaaatgctaaaataaaaattcagcttatgagaaatggcaaa

SEQ ID NO: 303166 - DNA, 90 bp, Artificial Sequence
  ENSG00000133114_11 (sequence is synthesized)
tttttttgagatgaagtctcactctgtagcccagactggaatccggtggcacaagttcaagtggttctcctgtctcagtctcccaagtag

SEQ ID NO: 303167 - DNA, 120 bp, Artificial Sequence
  ENSG00000133114_12 (sequence is synthesized)
tttcttgagttacacctaagaggaagaagtaacatgatggaaagtggttggagatagcacccaattaacatcgacagccaagtcttctatttcagaatattgatttatttcgctttggct

SEQ ID NO: 303168 - DNA, 120 bp, Artificial Sequence
  ENSG00000133114_13 (sequence is synthesized)
tttgatgccatcatgagatttaagtctgcagtttcaaaagctcatgctacttagatgatttttgcagcttaaaaaattgcttgtgactgcagtatgtacacagttaaaaagctgttcact

SEQ ID NO: 303169 - DNA, 120 bp, Artificial Sequence
  ENSG00000133114_14 (sequence is synthesized)
gcccctttcaaccttttcattttgagctttactaagagaatgcttttaggaacagaattcctaaagtgtaattttttatgtataaataaagttttatctatatctgagaagttgtagtat

SEQ ID NO: 303170 - DNA, 120 bp, Artificial Sequence
  ENSG00000133114_15 (sequence is synthesized)
ttatttttgttttaacattattagcttttctgaagcaggcagtattggtaaagagaatattctgtaaaggtttattccggccaaccagatcattgtaggctattgtaaaaaacaacaaca

SEQ ID NO: 303171 - DNA, 120 bp, Artificial Sequence
  ENSG00000133114_16 (sequence is synthesized)
actttaactccaactcgcttgccaggttttcattatctaatataactatacagatattatctgtttatttagaaacacaagacagacaaactggaaatgttcttgagagcactgtgacac

SEQ ID NO: 303172 - DNA, 120 bp, Artificial Sequence
  ENSG00000133114_17 (sequence is synthesized)
tgggttataaccaagattccattgttcttcatatcacaggacctgtaacagtgggtaggttttttctggattgtttgagtatgagtttctttggtttggtttggtttggtctctctaact

SEQ ID NO: 303173 - DNA, 120 bp, Artificial Sequence
  ENSG00000133114_18 (sequence is synthesized)
cccaaattgaaagtgaccaaaagagatgctttgcaacatcaaagctaagcattgaatgataggaatctgaacatgtagggtcaaaaagagagcctttgctttctcagatcatttccctat

SEQ ID NO: 303174 - DNA, 120 bp, Artificial Sequence
  ENSG00000133114_19 (sequence is synthesized)
aataagtatttctggaggaacttatatgtttgttcatttattcaataaacatttattaaatgcctcagtgtatgctaggtgctaagaacacaatggtgaaccaggcaggcatagtcttcc

SEQ ID NO: 303175 - DNA, 120 bp, Artificial Sequence
  ENSG00000133114_20 (sequence is synthesized)
tccctgggagaagattctgtgctggtcccttatagggtattcacagataagtaaagcagattccttgatttgtgattttatattctagtgggagagcagaaaaagatctgagtaaaaaag

SEQ ID NO: 303176 - DNA, 120 bp, Artificial Sequence
  ENSG00000133114_21 (sequence is synthesized)
atcaagtaattgcacattgttgataggtgttagaaagaaaacacggtagtgaaagactagaacaagtagttgaggatgggaattctatctagttagagtgataagaagtctctgaagatg

SEQ ID NO: 303177 - DNA, 120 bp, Artificial Sequence
  ENSG00000133114_22 (sequence is synthesized)
tgtcatttaagctgaaacctaaaaaaatgaaaagctagcagtgtgaaaagtgactgatcacatatgcaaatgccctgaagctttagttctttggtgtttgaggaactgctccagtatggc

SEQ ID NO: 303178 - DNA, 120 bp, Artificial Sequence
  ENSG00000133114_23 (sequence is synthesized)
gggtatattgtgagaaatatgatggttcagggttgggtcttcatagtgtctactgatactatgaagcctatataggaacatctaacccagtcctgggaggtgaaaggaagcttcctaatg

SEQ ID NO: 303179 - DNA, 64 bp, Artificial Sequence
  ENSG00000133114_24 (sequence is synthesized)
actggagtgtaatggcgcaatctcggctcactgcaccctccgccttccaggttcaagtgattct

SEQ ID NO: 303180 - DNA, 120 bp, Artificial Sequence
  ENSG00000133114_25 (sequence is synthesized)
cttcttaaccaagttataaacatgacattggagttggccagatggttcttacaccaaaggtctactctgctggccttccagaattgcccaaatgtgtctgaattcactcttaggcccttg

SEQ ID NO: 303181 - DNA, 120 bp, Artificial Sequence
  ENSG00000133114_26 (sequence is synthesized)
ctctgcaaacaccctgtatgtaactccactaataactgtcattagttatcagaacattaatacattgatctgaacattgagcctatactttatcatcaaaaccataaatatttaagaata

SEQ ID NO: 303182 - DNA, 120 bp, Artificial Sequence
  ENSG00000133114_27 (sequence is synthesized)
gctgtttttttaagaagttgttgtaaattacttgtttcctcctgggcctaattattgagggttatttacattctttttaagaactgaatagcaccagatgaattcaacaattattagtca

SEQ ID NO: 303183 - DNA, 120 bp, Artificial Sequence
  ENSG00000133114_28 (sequence is synthesized)
agtctctagaattctggacatagcagaatgtttttacttagggactgaaaaatacagtagatcagtctgtctcttaatttgtaatccttaaactatttctatcagaatcacctaggagtt

SEQ ID NO: 303184 - DNA, 120 bp, Artificial Sequence
  ENSG00000133114_29 (sequence is synthesized)
catttaaatgcagatctccaggcccaaacctattgaataggaatctttggggttagaatcagagcatcttcacttttaacaattatcccaggccattctttgtaaattcaagtttaagaa

SEQ ID NO: 303185 - DNA, 88 bp, Artificial Sequence
  ENSG00000133114_30 (sequence is synthesized)
aattatcccaggccattctttgtaaattcaagtttaagaaccactgcatttatgggcagacaaagggccaaggtgggaggattgcttg

SEQ ID NO: 303186 - DNA, 120 bp, Artificial Sequence
  ENSG00000133114_31 (sequence is synthesized)
ccctgactctaaaaagaaatttaaaaaaataataaccaccgcacttacatgtgttcctataaacaatcccctctcctttgttatatgttctgttttcctattatatattcctaaatacat

SEQ ID NO: 303187 - DNA, 120 bp, Artificial Sequence
  ENSG00000133114_32 (sequence is synthesized)
aatcactttactttgcatagcaacaaacaccagcaccagcaatacttgcctcttgaagaatggattgtcacttctcttgagtgaatgcctaaaagcattcacccttcaaacatctaccag

SEQ ID NO: 303188 - DNA, 120 bp, Artificial Sequence
  ENSG00000133114_33 (sequence is synthesized)
ccagttgctacagtgatcaagattctactgccattgataattcagtttcattgcactttgccctctcttcagcaccttttaaaatagataagtccctaagaggaatagtcagattgtagt

SEQ ID NO: 303189 - DNA, 120 bp, Artificial Sequence
  ENSG00000133114_34 (sequence is synthesized)
tccttgtccctggctgacttggggccatttaagactgaatgcctcaggaatgcagaacattgaaaaggcagggagcacaaaaagggagcactggtgggctatagatgatctgcaaaggat

SEQ ID NO: 303190 - DNA, 120 bp, Artificial Sequence
  ENSG00000133114_35 (sequence is synthesized)
ggtctctaccttatgactattttccttgggggaattaaccagttaatgttactttgaggtcttagataactgtgctttggcagctaaggtattaacttcagaagcaactgagtttacttt

SEQ ID NO: 303191 - DNA, 120 bp, Artificial Sequence
  ENSG00000133114_36 (sequence is synthesized)
tagataccagtttctgtatttgctgacaaagaaaagataacagtaggtaaaagaatgttaaaaagaaacaaaaggccaggcacaatgcctcacatctgtaatcccagcacttcaagaggc

SEQ ID NO: 303192 - DNA, 90 bp, Artificial Sequence
  ENSG00000133114_37 (sequence is synthesized)
aggtggcatgaccctgtctctacaaaaaaataaaaattaaaaattatctgggcatggtggcatggcatgcatctgtagtcccagctactc

SEQ ID NO: 303193 - DNA, 80 bp, Artificial Sequence
  ENSG00000133114_38 (sequence is synthesized)
acatgccactgcactccagccagggagacagagagaccccatctctaaaagagaaaaaaagaaagcaataaaattctgca

SEQ ID NO: 303194 - DNA, 120 bp, Artificial Sequence
  ENSG00000133114_39 (sequence is synthesized)
atctctaaaagagaaaaaaagaaagcaataaaattctgcagaactaggtaggaaagacaataaaagctacaagggtgcatcattgttttgagatctagacaaatttcgagaacctattca

SEQ ID NO: 303195 - DNA, 120 bp, Artificial Sequence
  ENSG00000133114_40 (sequence is synthesized)
agaatattgaaaagtatttcaaagttcattttcatatctctgattacttaccgctgtcctgccctttaaagcacttccatttgttttctttatgatggggtaatgttggccaaacaggct

SEQ ID NO: 303196 - DNA, 120 bp, Artificial Sequence
  ENSG00000133114_41 (sequence is synthesized)
atatgataaagtatttagtcctagttttatcttcatacaatcagagctctgagatgaaaataaacttgttccttttttatcactaggtacaaaacaacaaatgaagttgcttatgtatat

SEQ ID NO: 303197 - DNA, 120 bp, Artificial Sequence
  ENSG00000133114_42 (sequence is synthesized)
aatatgatgatttttgtctttttaggtaatggctgaaagcaacacattttgctaacctaaggataaataatactataatacctaattcacactacacacttaacaaaagcaatttatcat

SEQ ID NO: 303198 - DNA, 120 bp, Artificial Sequence
  ENSG00000133114_43 (sequence is synthesized)
cagcctaagattgctaatttttataacaggtacagacataattaacttaatattgaccagcaaataaatctagaaattgtgcttattctttagtattcattttaactgaatttaaattag

SEQ ID NO: 303199 - DNA, 120 bp, Artificial Sequence
  ENSG00000133114_44 (sequence is synthesized)
tgtttttccctaacagccttgtatattgcttaataaaattgtcatatttgaaaacagagattcttaaagtttaaaatgcttgcagtcaaatgacagtttatcaataaagatttaaaacta

SEQ ID NO: 303200 - DNA, 120 bp, Artificial Sequence
  ENSG00000133114_45 (sequence is synthesized)
gttgtttgtatgttaaacaaaatcccaactaggaaatgtttgttgcttagaaaggtcccctataagttaaggttcaaaactattccaatattcatccatagcccaatctgacaagggttc

SEQ ID NO: 303201 - DNA, 82 bp, Artificial Sequence
  ENSG00000133114_46 (sequence is synthesized)
tgagaggatcgcttgagcccagtagtttgagaccagcctgcttaagatggtgagaccccgtatctacaaaaaactaaccagg

SEQ ID NO: 303202 - DNA, 87 bp, Artificial Sequence
  ENSG00000133114_47 (sequence is synthesized)
aggtgggaggatcccttgagcccaggaattcaaggcagcagtgagctgtagtgagacctcgtctctttagaaaaaaaaaaagaggcc

SEQ ID NO: 303203 - DNA, 120 bp, Artificial Sequence
  ENSG00000133114_48 (sequence is synthesized)
cgagatcgtgccactgcactctagcctaggtgacaagatcgagagactctgtctcaaaaaagaaagaaaaagagaagaaaagaaattacataaaagctgaggttgcttcttaatatcttt

SEQ ID NO: 303204 - DNA, 120 bp, Artificial Sequence
  ENSG00000133114_49 (sequence is synthesized)
ggttgcttcttaatatctttatgatttttaattgtattaaacctatatcaatattcaaatgtgatttttgaggaaaatatgttaaatttagaaatattttccaacttactgagttttctt

SEQ ID NO: 303205 - DNA, 120 bp, Artificial Sequence
  ENSG00000133114_50 (sequence is synthesized)
attcttacctcagggggatttccctgtgcaatgaagaaaagttgaagaatactctttgtccatctttatttctttgtttttggcttcttaagattagagattactttaatcttaaaaaac

SEQ ID NO: 303206 - DNA, 120 bp, Artificial Sequence
  ENSG00000133114_51 (sequence is synthesized)
atacaaatttaccttgttctgtatgtccttttaaggtcatgtggaaacataaaacgaatgttttttatgtagaacagaatattctatgtgcctttagcttctgtggaagtatggggaatt

SEQ ID NO: 303207 - DNA, 120 bp, Artificial Sequence
  ENSG00000133114_52 (sequence is synthesized)
atgggcttttcttcaaataattattttaagaggcttccattccccctgatttttgtggtgtctcacaagtaccctctaaggtctggtcaggactgaccaccaaatctctaccacagcctg

SEQ ID NO: 303208 - DNA, 120 bp, Artificial Sequence
  ENSG00000133114_53 (sequence is synthesized)
gacctccttgtgaaatatacctaacctgccctagagtcagtgtgtcaagtccttactgtaaatccatgactttgaaatttgttgttttttccctttaaactgcagccagtgaatacaaat

SEQ ID NO: 303209 - DNA, 120 bp, Artificial Sequence
  ENSG00000133114_54 (sequence is synthesized)
ttacttgaaaatagagggtatggggttttgcctgttttgtaatcagtttgcttgttttagcactcagggctttttatttgttatttaattttttaattgtttttaagtcagaaagatctc

SEQ ID NO: 303210 - DNA, 120 bp, Artificial Sequence
  ENSG00000133114_55 (sequence is synthesized)
tgggttatctcatgtgctaaggaaaaactattttgctttttccaactttaatagttagtatttctaggggaggcaatcaagataagatatgccattaactgttagcattgtgaaatctgt

SEQ ID NO: 303211 - DNA, 120 bp, Artificial Sequence
  ENSG00000133114_56 (sequence is synthesized)
aagactcaatctctgatctcaaccaaagctttctgagtcctggaactttgctttgggacaactttactttacccatttatatgctgtacttaacagtttgtagctaatttatggggtcat

SEQ ID NO: 303212 - DNA, 120 bp, Artificial Sequence
  ENSG00000133114_57 (sequence is synthesized)
atcttttttttagctaatttacgggggtcatatcagtcatgaatagccttttttaaaaatttaataatccctgaatacaaaaatggaaatggaaaatttataatcataacccccctaatt

SEQ ID NO: 303213 - DNA, 120 bp, Artificial Sequence
  ENSG00000133114_58 (sequence is synthesized)
gggagtattataagtttgtaatgctttaagcactgcctcttaagatgataaatttataagatgagaaattctatttaaactattaaactattgttaaataaatgccaattctataagtta

SEQ ID NO: 303214 - DNA, 120 bp, Artificial Sequence
  ENSG00000133114_59 (sequence is synthesized)
gaaaaagcttcttgtgtactcaaaattgaacagagctaccttttgactaaaaatgtcatttttaatgagcagtattttctgaacacaaaattttgtacaagagtgtctccattgcattaa

SEQ ID NO: 303215 - DNA, 120 bp, Artificial Sequence
  ENSG00000133114_60 (sequence is synthesized)
tttaattttgttataattttttcccaatgaaaggaaaaaagtattttgtagctcctcttccttatgtaaattcttaacatatatttttgagaaatttgcattttttaaagtaaaattgtt

SEQ ID NO: 303216 - DNA, 120 bp, Artificial Sequence
  ENSG00000133114_61 (sequence is synthesized)
atctttggatacttacttttctttgttttcctcatttaaagagaatagggatatttctgtattatatatttactgtttcatccctcacctttggagtgaccatgaccttggcatgaagga

SEQ ID NO: 303217 - DNA, 120 bp, Artificial Sequence
  ENSG00000133114_62 (sequence is synthesized)
gagaaacctctgctttccgcctattgcttccaggagttactaccttactggccttggagataatgctcttttgtgccaacctgaggataattttaacaaaatgtaaggccagtttcagag

SEQ ID NO: 303218 - DNA, 120 bp, Artificial Sequence
  ENSG00000133114_63 (sequence is synthesized)
gttgttttgccccacagagagactaatcccaatacaagaatattgacaacaaaaggacaaagtagttattgcacaggacggaaaggtgtctttatttcatcccctccccacttccaaaga

SEQ ID NO: 303219 - DNA, 120 bp, Artificial Sequence
  ENSG00000133114_64 (sequence is synthesized)
tcttggccaagtgtcataggaatgtggcctcttttgaaatttaaaaatgaagaagaaaaaaagagcaacactaagttaatataatggagcagatacttttaatgttcttaccattgaata

SEQ ID NO: 303220 - DNA, 120 bp, Artificial Sequence
  ENSG00000133114_65 (sequence is synthesized)
tgccatttaagtttgttatacttgaaattatatgatttttgtccagctctctaaattgtcatctccaatagatttagatgcttcaaatagtaaccacattactgtgataggtattattag

SEQ ID NO: 303221 - DNA, 120 bp, Artificial Sequence
  ENSG00000133114_66 (sequence is synthesized)
ttatattttcttgcagattaatcccaattgttccactagtattctagttttgatgagacacaaatttttgttgttgtttatttttgtttttttgagagatggagtcttgctctgtcaccc

SEQ ID NO: 303222 - DNA, 120 bp, Artificial Sequence
  ENSG00000133114_67 (sequence is synthesized)
tgcctggccaagacacaaatttttaatggaaaaatattctgattcccagttcatgtaagctttatgaaaattgagtatattgtttatatgatggtacaaattattcttcctctaataata

SEQ ID NO: 303223 - DNA, 120 bp, Artificial Sequence
  ENSG00000133114_68 (sequence is synthesized)
taataatagcagtacagtatattttttccatagcatcagtgtaaaccatagcaaactaaaggagcattgctattaaaaagatgaattagctgggcgcagtggctcatacctataatccca

SEQ ID NO: 303224 - DNA, 120 bp, Artificial Sequence
  ENSG00000133114_69 (sequence is synthesized)
ccaggcccatctacccactccctggccgggccctgctcgctgaagaaagtcggaggcctaggagggcggaggagtggggagtgggcgcggcctgacccgagagaacttttctcttcccaa

SEQ ID NO: 303225 - DNA, 120 bp, Artificial Sequence
  ENSG00000133114_70 (sequence is synthesized)
ggcttcgtgatgataatacattctcatttagccttaatatgagctgcacgctgccctaactgactgatacccactcagtcatttaagccgtataagaaaaaaactattttcccatgttgc

SEQ ID NO: 303226 - DNA, 120 bp, Artificial Sequence
  ENSG00000133114_71 (sequence is synthesized)
aaatgggtacgcccaagcccatgccagtgtctagatcatactgctagcaagtgatggagcgcgacttagaaggaagcggttctcttaacctctgtgccatattgccttctgattacaaga

SEQ ID NO: 303227 - DNA, 120 bp, Artificial Sequence
  ENSG00000133114_72 (sequence is synthesized)
accttgcagatcctgttctctccagcccccgacctgccttcctagcctctcattctgttattgcatctgacaaacacagcccaatactcaatccagtctgagttgctgcgcaattcctta

SEQ ID NO: 303228 - DNA, 120 bp, Artificial Sequence
  ENSG00000133114_73 (sequence is synthesized)
acgctctaggcttctgggcttcctctggttgcattcctaaacataactgacaaacttctccccatccttcaaggcccaacttaaatgtcacaccaataaaacctttccagattccccgaa

SEQ ID NO: 303229 - DNA, 120 bp, Artificial Sequence
  ENSG00000133115_0 (sequence is synthesized)
atactttctcctctcccctctcccaagcacatctgagttgctgcctgttcttcacacttagctccaaacccatgaaaaattgccaagtataaaagcttctcaagaatgagatggattcta

SEQ ID NO: 303230 - DNA, 120 bp, Artificial Sequence
  ENSG00000133115_1 (sequence is synthesized)
gggtgtcttcacctgagaagcaagataaagagaatttcgtgggtgtcaacaataaacggcttggtgtatgtggctggatcctgttttccctctctttcctgttggtgatcattaccttcc

SEQ ID NO: 303231 - DNA, 120 bp, Artificial Sequence
  ENSG00000133115_2 (sequence is synthesized)
ccatctccatatggatgtgcttgaagatcattaaggagtatgaacgtgctgttgtattccgtctgggacgcatccaagctgacaaagccaaggggccaggtttgatcctggtcctgccat

SEQ ID NO: 303232 - DNA, 120 bp, Artificial Sequence
  ENSG00000133115_3 (sequence is synthesized)
gcatagatgtgtttgtcaaagttgacctccgaacagttacttgcaacattcctccacaagagatcctcaccagagactccgtaactactcaggtagatggagttgtctattacagaatct

SEQ ID NO: 303233 - DNA, 120 bp, Artificial Sequence
  ENSG00000133115_4 (sequence is synthesized)
atagtgctgtctcagcagtggctaatgtcaacgatgtccatcaagcaacatttctgctggctcaaaccactctgagaaatgtcttagggacacagaccttgtcccagatcttagctggac

SEQ ID NO: 303234 - DNA, 120 bp, Artificial Sequence
  ENSG00000133115_5 (sequence is synthesized)
gagaagagatcgcccatagcatccagactttacttgatgatgccaccgaactgtgggggatccgggtggcccgagtggaaatcaaagatgttcggattcccgtgcagttgcagagatcca

SEQ ID NO: 303235 - DNA, 120 bp, Artificial Sequence
  ENSG00000133115_6 (sequence is synthesized)
tggcagccgaggctgaggccacccgggaagcgagagccaaggtccttgcagctgaaggagaaatgaatgcttccaaatccctgaagtcagcctccatggtgctggctgagtctcccatag

SEQ ID NO: 303236 - DNA, 120 bp, Artificial Sequence
  ENSG00000133115_7 (sequence is synthesized)
ctagagggcattggtggcgtcagctatgataaccacaagaagcttccaaataaagcctgaggtcctcttgcggtagtcagctattgcatagagagtggtgtctattcctatggagaagcc

SEQ ID NO: 303237 - DNA, 120 bp, Artificial Sequence
  ENSG00000133115_8 (sequence is synthesized)
agtagttagaaacggtgagaattccaacactgttcatgtaacagtaactccatagatggaagagcattggcaggaaaaagctctagaggctatacagagaagaaaaaaagagcaaaaatg

SEQ ID NO: 303238 - DNA, 120 bp, Artificial Sequence
  ENSG00000133115_9 (sequence is synthesized)
agacctgtatattacttttatttttaggaccataatcaactttgtaatattcttatataattaattagtggtggtctccgactttatagcaggaactttctggtagtatgagaagaaatc

SEQ ID NO: 303239 - DNA, 120 bp, Artificial Sequence
  ENSG00000133115_10 (sequence is synthesized)
attgggtgactatgactaatgtttcagaattactttttaattgttttaaaaagcactccagataatttatagagtaacataggcctcatatttacactatatgttcgctttataattccg

SEQ ID NO: 303240 - DNA, 120 bp, Artificial Sequence
  ENSG00000133115_11 (sequence is synthesized)
aagttgttatttgctaaatctccaatggttgcaatcaaaccccacaatgctgaaaacagagattgattttgatgttaagaacaaaagaagtatggaaacttccaggctcaaacatgtccc

SEQ ID NO: 303241 - DNA, 120 bp, Artificial Sequence
  ENSG00000133115_12 (sequence is synthesized)
ccgtgccacaaggcaaactgcgatgagctcacagtccaggtctcttgctgtgtgtcctgcagggagtggccaactctccaccttccagcaccattatcagagggtgggaaaaggcacatg

SEQ ID NO: 303242 - DNA, 120 bp, Artificial Sequence
  ENSG00000133115_13 (sequence is synthesized)
aaagtggccagctcctgtcaatttatttgcttacaagggagaatgcttggaaaggttgcattggttgaaaccactgaggagcatcaccctggggatttcatgttttcactctgttcttag

SEQ ID NO: 303243 - DNA, 120 bp, Artificial Sequence
  ENSG00000133115_14 (sequence is synthesized)
tcccaggagccacaggtaatcgagaatgtttgtgaactctatccacatcccctcccccacctgccaaataacctgttcaaaacaaagaaggcatagaatataaatgaatttcaaaagtta

SEQ ID NO: 303244 - DNA, 80 bp, Artificial Sequence
  ENSG00000133116_0 (sequence is synthesized)
ccgtcgctgtcgctgctgctggtgctgctgggcctgggcggccgccgcctgcgtgcggagccgggcgacggcgcgcagac

SEQ ID NO: 303245 - DNA, 120 bp, Artificial Sequence
  ENSG00000133116_1 (sequence is synthesized)
ccgggcgacggcgcgcagacctgggcccgtttctcgcggcctcctgcccccgaggccgcgggcctcttccagggcaccttccccgacggcttcctctgggccgtgggcagcgccgcctac

SEQ ID NO: 303246 - DNA, 120 bp, Artificial Sequence
  ENSG00000133116_2 (sequence is synthesized)
cagaccgagggcggctggcagcagcacggcaagggtgcgtccatctgggatacgttcacccaccaccccctggcacccccgggagactcccggaacgccagtctgccgttgggcgccccg

SEQ ID NO: 303247 - DNA, 120 bp, Artificial Sequence
  ENSG00000133116_3 (sequence is synthesized)
tcgccgctgcagcccgccaccggggacgtagccagcgacagctacaacaacgtcttccgcgacacggaggcgctgcgcgagctcggggtcactcactaccgcttctccatctcgtgggcg

SEQ ID NO: 303248 - DNA, 120 bp, Artificial Sequence
  ENSG00000133116_4 (sequence is synthesized)
cgagtgctccccaatggcagcgcgggcgtccccaaccgcgaggggctgcgctactaccggcgcctgctggagcggctgcgggagctgggcgtgcagcccgtggtcaccctgtaccactgg

SEQ ID NO: 303249 - DNA, 120 bp, Artificial Sequence
  ENSG00000133116_5 (sequence is synthesized)
gacctgccccagcgcctgcaggacgcctacggcggctgggccaaccgcgccctggccgaccacttcagggattacgcggagctctgcttccgccacttcggcggtcaggtcaagtactgg

SEQ ID NO: 303250 - DNA, 120 bp, Artificial Sequence
  ENSG00000133116_6 (sequence is synthesized)
atcaccatcgacaacccctacgtggtggcctggcacggctacgccaccgggcgcctggcccccggcatccggggcagcccgcggctcgggtacctggtggcgcacaacctcctcctggct

SEQ ID NO: 303251 - DNA, 120 bp, Artificial Sequence
  ENSG00000133116_7 (sequence is synthesized)
catgccaaagtctggcatctctacaatacttctttccgtcccactcagggaggtcaggtgtccattgccctaagctctcactggatcaatcctcgaagaatgaccgaccacagcatcaaa

SEQ ID NO: 303252 - DNA, 120 bp, Artificial Sequence
  ENSG00000133116_8 (sequence is synthesized)
gaatgtcaaaaatctctggactttgtactaggttggtttgccaaacccgtatttattgatggtgactatcccgagagcatgaagaataacctttcatctattctgcctgattttactgaa

SEQ ID NO: 303253 - DNA, 120 bp, Artificial Sequence
  ENSG00000133116_9 (sequence is synthesized)
tctgagaaaaagttcatcaaaggaactgctgacttttttgctctttgctttggacccaccttgagttttcaacttttggaccctcacatgaagttccgccaattggaatctcccaacctg

SEQ ID NO: 303254 - DNA, 120 bp, Artificial Sequence
  ENSG00000133116_10 (sequence is synthesized)
aggcaactgctttcctggattgaccttgaatttaaccatcctcaaatatttattgtggaaaatggctggtttgtctcagggaccaccaagagagatgatgccaaatatatgtattacctc

SEQ ID NO: 303255 - DNA, 120 bp, Artificial Sequence
  ENSG00000133116_11 (sequence is synthesized)
aaaaagttcatcatggaaaccttaaaagccatcaagctggatggggtggatgtcatcgggtataccgcatggtccctcatggatggtttcgagtggcacagaggttacagcatcaggcgt

SEQ ID NO: 303256 - DNA, 120 bp, Artificial Sequence
  ENSG00000133116_12 (sequence is synthesized)
ggactcttctatgttgactttctaagccaggacaagatgttgttgccaaagtcttcagccttgttctaccaaaagctgatagagaaaaatggcttccctcctttacctgaaaatcagccc

SEQ ID NO: 303257 - DNA, 120 bp, Artificial Sequence
  ENSG00000133116_13 (sequence is synthesized)
ctagaagggacatttccctgtgactttgcttggggagttgttgacaactacattcaagtagataccactctgtctcagtttaccgacctgaatgtttacctgtgggatgtccaccacagt

SEQ ID NO: 303258 - DNA, 120 bp, Artificial Sequence
  ENSG00000133116_14 (sequence is synthesized)
aaaaggcttattaaagtggatggggttgtgaccaagaagaggaaatcctactgtgttgactttgctgccatccagccccagatcgctttactccaggaaatgcacgttacacattttcgc

SEQ ID NO: 303259 - DNA, 120 bp, Artificial Sequence
  ENSG00000133116_15 (sequence is synthesized)
ttctccctggactgggccctgattctccctctgggtaaccagtcccaggtgaaccacaccatcctgcagtactatcgctgcatggccagcgagcttgtccgtgtcaacatcaccccagtg

SEQ ID NO: 303260 - DNA, 120 bp, Artificial Sequence
  ENSG00000133116_16 (sequence is synthesized)
gtggccctgtggcagcctatggccccgaaccaaggactgccgcgcctcctggccaggcagggcgcctgggagaacccctacactgccctggcctttgcagagtatgcccgactgtgcttt

SEQ ID NO: 303261 - DNA, 120 bp, Artificial Sequence
  ENSG00000133116_17 (sequence is synthesized)
caagagctcggccatcacgtcaagctttggataacgatgaatgagccgtatacaaggaatatgacatacagtgctggccacaaccttctgaaggcccatgccctggcttggcatgtgtac

SEQ ID NO: 303262 - DNA, 120 bp, Artificial Sequence
  ENSG00000133116_18 (sequence is synthesized)
aatgaaaagtttaggcatgctcagaatgggaaaatatccatagccttgcaggctgattggatagaacctgcctgccctttctcccaaaaggacaaagaggtggctgagagagttttggaa

SEQ ID NO: 303263 - DNA, 120 bp, Artificial Sequence
  ENSG00000133116_19 (sequence is synthesized)
tttgacattggctggctggctgagcccattttcggctctggagattatccatgggtgatgagggactggctgaaccaaagaaacaattttcttcttccttatttcactgaagatgaaaaa

SEQ ID NO: 303264 - DNA, 120 bp, Artificial Sequence
  ENSG00000133116_20 (sequence is synthesized)
attacctagaagtgcaagaaatgaccgacatcacgtggctcaactcccccagtcaggtggcggtagtgccctgggggttgcgcaaagtgctgaactggctgaagttcaagtacggagacc

SEQ ID NO: 303265 - DNA, 120 bp, Artificial Sequence
  ENSG00000133116_21 (sequence is synthesized)
tccccatgtacataatatccaatggaatcgatgacgggctgcatgctgaggacgaccagctgagggtgtattatatgcagaattacataaacgaagctctcaaagcccacatactggatg

SEQ ID NO: 303266 - DNA, 120 bp, Artificial Sequence
  ENSG00000133116_22 (sequence is synthesized)
gtatcaatctttgcggatactttgcttattcgtttaacgaccgcacagctccgaggtttggcctctatcgttatgctgcagatcagtttgagcccaaggcatccatgaaacattacagga

SEQ ID NO: 303267 - DNA, 120 bp, Artificial Sequence
  ENSG00000133116_23 (sequence is synthesized)
aaattattgacagcaatggtttcccgggcccagaaactctggaaagattttgtccagaagaattcaccgtgtgtactgagtgcagtttttttcacacccgaaagtctttactggctttca

SEQ ID NO: 303268 - DNA, 120 bp, Artificial Sequence
  ENSG00000133116_24 (sequence is synthesized)
tagcttttctattttttgcttctattatttctctctcccttatattttactactcgaagaaaggcagaagaagttacaaatagttctgaacatttttctattcattcattttgaaataat

SEQ ID NO: 303269 - DNA, 120 bp, Artificial Sequence
  ENSG00000133116_25 (sequence is synthesized)
tatgcagacacatcagctgttaaccatttgcacctctaagtgttgtgaaactgtaaatttcatacatttgacttctagaaaacatttttgtggcttatgacagaggttttgaaatgggca

SEQ ID NO: 303270 - DNA, 120 bp, Artificial Sequence
  ENSG00000133116_26 (sequence is synthesized)
taggtgatcgtaaaatattgaataatgcgaatagtgcctgaatttgttctctttttgggtgattaaaaaactgacaggcactataatttctgtaacacactaacaaaagcatgaaaaata

SEQ ID NO: 303271 - DNA, 120 bp, Artificial Sequence
  ENSG00000133116_27 (sequence is synthesized)
ggaaccacaccaatgcaacatttgtgcagaaatttgaatgacaagattaggaatattttcttctgcacccacttctaaatttaatgtttttctggaagtagtaattgcaagagttcgaat

SEQ ID NO: 303272 - DNA, 120 bp, Artificial Sequence
  ENSG00000133116_28 (sequence is synthesized)
agaaagttatgtaccaagtaaccatttctcagctgccataataatgcctagtggcttcccctctgtcaaatctagtttcctatggaaaagaagatggcagatacaggagagacgacagag

SEQ ID NO: 303273 - DNA, 120 bp, Artificial Sequence
  ENSG00000133116_29 (sequence is synthesized)
ggtcctaggctggaatgttcctttcgaaagcaatgcttctatcaaatactagtattaatttatgtatctggttaatgacatacttggagagcaaattatggaaatgtgtattttatatga

SEQ ID NO: 303274 - DNA, 120 bp, Artificial Sequence
  ENSG00000133116_30 (sequence is synthesized)
tttttgaggtcctgtctaaaccctgtgtccctgagggatctgtctcactggcatcttgttgagggccttgcacataggaaacttttgataagtatctgcggaaaaacaaacatgaatcct

SEQ ID NO: 303275 - DNA, 120 bp, Artificial Sequence
  ENSG00000133116_31 (sequence is synthesized)
gtgatattgggctcttcaggaagcataaagcaattgtgaaatacagtataccgcagtggctctaggtggaggaaaggaggaaaaagtgcttattatgtgcaacattatgattaatctgat

SEQ ID NO: 303276 - DNA, 120 bp, Artificial Sequence
  ENSG00000133116_32 (sequence is synthesized)
tatacaccatttttgagcagatcttggaatgaatgacatgacctttccctagagaataaggatgaaataatcactcattctatgaacagtgacactactttctattctttagctgtactg

SEQ ID NO: 303277 - DNA, 120 bp, Artificial Sequence
  ENSG00000133116_33 (sequence is synthesized)
taatttctttgagttgatagttttacaaattcttaataggttcaaaagcaatctggtctgaataacactggatttgtttctgtgatctctgaggtctattttatgtttttgctgctactt

SEQ ID NO: 303278 - DNA, 120 bp, Artificial Sequence
  ENSG00000133116_34 (sequence is synthesized)
ctgtggaagtagctttgaactagttttactttgaactttcacgctgaaacatgctagtgatatctagaaagggctaattaggtctcatcctttaatgccccttaaataagtcttgctgat

SEQ ID NO: 303279 - DNA, 120 bp, Artificial Sequence
  ENSG00000133116_35 (sequence is synthesized)
tttcagacagggaagtctctctattacactggagctgttttatagataagtcaatattgtatcaggcaagataaaccaatgtcataacaggcattgccaacctcactgacacagggtcat

SEQ ID NO: 303280 - DNA, 120 bp, Artificial Sequence
  ENSG00000133116_36 (sequence is synthesized)
agtgtataataatatactgtactatataatatatcatctttagaggtatgattttttcatgaaagataagcttttggtaatattcattttaaagtggacttattaaaattggatgctaga

SEQ ID NO: 303281 - DNA, 120 bp, Artificial Sequence
  ENSG00000133116_37 (sequence is synthesized)
atatatttttctgattataagagtaatatatgttcattgtaaaaatttttaaaacacagaaactatatgcaaagaaaaaataaaaattatctataatctcagaacccagaaatagccact

SEQ ID NO: 303282 - DNA, 120 bp, Artificial Sequence
  ENSG00000133116_38 (sequence is synthesized)
agaacccagaaatagccactattaacatttcctacgtattttattttacatagatcatattgtatatagttagtatctttattaatttttattatgaaactttcctttgtcattattagt

SEQ ID NO: 303283 - DNA, 120 bp, Artificial Sequence
  ENSG00000133116_39 (sequence is synthesized)
cttcaaaagcatgatttttaatagttgttgagtattccaccacaggaatgtatcacaacttaaccgttcccgtttgttagactagtttcttattaatgttgatgaatgttgtttaaaaat

SEQ ID NO: 303284 - DNA, 120 bp, Artificial Sequence
  ENSG00000133116_40 (sequence is synthesized)
aattttgttgctacatttactttaatttccttgactgtaaagagaagtaattttgctccttgataaagtattatattaataataaatctgcctgcaactttttgccttctttcataatca

SEQ ID NO: 303285 - DNA, 120 bp, Artificial Sequence
  ENSG00000133119_0 (sequence is synthesized)
aagcgtaggcccccgggaactcgagctgccatgagcctctgggtggacaagtatcggccctgctccttgggacggctggactatcacaaggagcaggcggcccagctgcggaacctggtg

SEQ ID NO: 303286 - DNA, 120 bp, Artificial Sequence
  ENSG00000133119_1 (sequence is synthesized)
cagtgtggtgactttcctcatctgttagtgtacggaccatcaggtgctggaaaaaagacaagaattatgtgtattctacgtgaactttatggtgttggagtggaaaaattgagaattgaa

SEQ ID NO: 303287 - DNA, 120 bp, Artificial Sequence
  ENSG00000133119_2 (sequence is synthesized)
catcagaccatcacaactccatctaaaaaaaaaattgaaattagcaccattgcaagtaactaccaccttgaagttaatcctagtgatgctggaaatagtgaccgagtagtcattcaggag

SEQ ID NO: 303288 - DNA, 120 bp, Artificial Sequence
  ENSG00000133119_3 (sequence is synthesized)
atgttgaaaacagtggcacaatcacaacaacttgaaacaaactctcaaagggattttaaagtggtattattgacagaagttgacaaactcaccaaagatgctcagcatgccttgcgaaga

SEQ ID NO: 303289 - DNA, 120 bp, Artificial Sequence
  ENSG00000133119_4 (sequence is synthesized)
accatggaaaaatatatgtctacctgcagattgatcttgtgctgcaattctacatctaaagtgatcccacctattcgtagtaggtgcttggcggttcgtgtgcctgctcccagcattgaa

SEQ ID NO: 303290 - DNA, 120 bp, Artificial Sequence
  ENSG00000133119_5 (sequence is synthesized)
gatatttgccacgtgttatctactgtgtgtaagaaggaaggtctgaatcttccttcacaactggctcatagacttgcagagaagtcttgtagaaatctcagaaaagccctgcttatgtgt

SEQ ID NO: 303291 - DNA, 120 bp, Artificial Sequence
  ENSG00000133119_6 (sequence is synthesized)
gaagcctgcagagtgcaacaatatccttttactgcagatcaagaaatccctgagacagattgggaggtgtatctgagggagactgcaaatgctattgtcagtcagcaaactccacaaagg

SEQ ID NO: 303292 - DNA, 120 bp, Artificial Sequence
  ENSG00000133119_7 (sequence is synthesized)
ctccttgaagttcgtggaaggctgtatgagcttctaactcattgtattcctcctgagataataatgaagggccttctctcagaactgttacataattgtgatggacaactgaaaggggag

SEQ ID NO: 303293 - DNA, 120 bp, Artificial Sequence
  ENSG00000133119_8 (sequence is synthesized)
gtggcacaaatggcagcttactatgagcatcgtctacagctgggtagcaaagccatttatcacttggaagcgtttgtggccaaattcatggcactttataagaagttcatggaggatgga

SEQ ID NO: 303294 - DNA, 120 bp, Artificial Sequence
  ENSG00000133119_9 (sequence is synthesized)
gtcagttattcttgcaaagatttctcagtatcagtatttacatacagcttatattaaaagagctgtgggtaaattaactgaacttaatcatgtcgtatttgcgtttttttggtaataact

SEQ ID NO: 303295 - DNA, 120 bp, Artificial Sequence
  ENSG00000133119_10 (sequence is synthesized)
tctctgtgaactattaatcatcctctgagttaaataattgctcctatactattgaagtatgtagttttgtacataacttagagactttagagtctaagaaaatgatcttaatttacttta

SEQ ID NO: 303296 - DNA, 120 bp, Artificial Sequence
  ENSG00000133119_11 (sequence is synthesized)
agcattggttattcaagtattcattgttgatcctcctattctcttccgtctaatctctcacctgctaaaggagatttacacattagaaagcaaagattattttcatttatccagatgacc

SEQ ID NO: 303297 - DNA, 120 bp, Artificial Sequence
  ENSG00000133119_12 (sequence is synthesized)
attttctgccacaggtaacatgattgtttgacacaccattatatttaattctagtttctctcaatgaataattgtatttttgtaggaaatgtaagatttcattctgaaacataattattg

SEQ ID NO: 303298 - DNA, 120 bp, Artificial Sequence
  ENSG00000133119_13 (sequence is synthesized)
gtatggacaaaattgcagataccatttctgttgaggctgcagatttccaacttttatttcagtggttcagattagtattaggtcggtactaagaaataagcatgttttcactaatttaag

SEQ ID NO: 303299 - DNA, 120 bp, Artificial Sequence
  ENSG00000133119_14 (sequence is synthesized)
tacttgagactcttgaagaaaattcagaatgaagttctggagaaaggtatgttactgtagtaattactctttgaacaggttttgtgttttgtcattagctctgccctttttaattaaata

SEQ ID NO: 303300 - DNA, 120 bp, Artificial Sequence
  ENSG00000133119_15 (sequence is synthesized)
ttttggttcatggaccaaagggtttacttgacaaatttgtgtgacagactccgaacaattcctttactacgaagtataatttataaaataaaatatacccattttaagggtacagtttga

SEQ ID NO: 303301 - DNA, 120 bp, Artificial Sequence
  ENSG00000133119_16 (sequence is synthesized)
tttttgaccagtgaaactatgatcccaatcaaggtatagatgccgtcaccccaaaaagttccctccatatccctttgcagtcagttcatccctaccctggcccagatgatcactgatctt

SEQ ID NO: 303302 - DNA, 120 bp, Artificial Sequence
  ENSG00000133119_17 (sequence is synthesized)
gtcattatagatgagttttgccagttcaagaatttaatggaatcagatattgtaagcattcttgtgtaatacttcattctctctcattattgagattcatccatattgttgaatgtttca

SEQ ID NO: 303303 - DNA, 120 bp, Artificial Sequence
  ENSG00000133119_18 (sequence is synthesized)
ctagttaatgtttattgttcaatatttttgtatatacttttaaagcctattcacttgctgatggatctttggtttgtttccaggtttggttattatgaataaagttgctgtgaatactta

SEQ ID NO: 303304 - DNA, 120 bp, Artificial Sequence
  ENSG00000133119_19 (sequence is synthesized)
taatgaaggcatgtaaggaggaatcaagaagctgtgacatattctgaggacctccaaagaacaacttgctactgactggacttctctcatcttttagcatgtgaagttttgcaaatataa

SEQ ID NO: 303305 - DNA, 120 bp, Artificial Sequence
  ENSG00000133119_20 (sequence is synthesized)
tccactttgctctgaatgtcctgacacctgcttcagagctcaagattcagactccagcctgaatgttatttcctgagaaaatccctccctgacccactgtgctggttaggtccacctgct

SEQ ID NO: 303306 - DNA, 120 bp, Artificial Sequence
  ENSG00000133119_21 (sequence is synthesized)
aatcacatccacaaaaccctctgcttctccttcaaaacactcatctcctctgtaatgatcagatgaactcatgtctttctcagaggacaataaatttgatgaatggggaccatggaagtt

SEQ ID NO: 303307 - DNA, 120 bp, Artificial Sequence
  ENSG00000133119_22 (sequence is synthesized)
tatttccatctgtatccctacatctaactcatctgctggtacctatttgtcatgtatttaataagtacaactacctatgccaccctgcaataaaatgatattgttactttctcttcttta

SEQ ID NO: 303308 - DNA, 120 bp, Artificial Sequence
  ENSG00000133121_0 (sequence is synthesized)
aaaaatcgctgggtctgttgagctgtcctgggctgggtgccttgctctttgactgagactggagacagacggcaacagccacaggcagactgaggtggcaataggaaatctgccgagatg

SEQ ID NO: 303309 - DNA, 120 bp, Artificial Sequence
  ENSG00000133121_1 (sequence is synthesized)
ttcagtcaggtgcccaggaccccagcctcaggctgctactacctaaattccatgacacctgagggccaggagatgtacttgcgatttgatcagactacaagacgctctccttacaggatg

SEQ ID NO: 303310 - DNA, 120 bp, Artificial Sequence
  ENSG00000133121_2 (sequence is synthesized)
agccggattctagcacgccatcagctagtgactaaaattcaacaagaaattgaggcaaaagaagcatgtgactggctccgtgctgccgggttcccgcaatacgctcagttatatgaggat

SEQ ID NO: 303311 - DNA, 120 bp, Artificial Sequence
  ENSG00000133121_3 (sequence is synthesized)
tcacaatttcccatcaacattgtggctgtcaagaatgatcatgattttcttgaaaaggaccttgtagaacctctttgcagacgactaaatacgttgaacaagtgtgcctcaatgaaactt

SEQ ID NO: 303312 - DNA, 120 bp, Artificial Sequence
  ENSG00000133121_4 (sequence is synthesized)
gatgtgaacttccaaaggaaaaagggtgacgactccgatgaggaagatctttgtatcagcaacaaatggactttccaaagaaccagtcgcaggtggtctcgtgtggacgacctctacacg

SEQ ID NO: 303313 - DNA, 120 bp, Artificial Sequence
  ENSG00000133121_5 (sequence is synthesized)
ctgctccctcgaggagacagaaatgggtcaccgggaggcacggggatgaggaacacgaccagcagtgagagcgtcctcacagacctgagcgagcctgaggtctgctccattcacagcgaa

SEQ ID NO: 303314 - DNA, 120 bp, Artificial Sequence
  ENSG00000133121_6 (sequence is synthesized)
agcagtggaggcagcgacagtcgcagccagccgggccagtgctgtacagacaacccggtcatgctggatgccccactcgtcagcagcagcctcccacagccccccagagatgtcctcaac

SEQ ID NO: 303315 - DNA, 120 bp, Artificial Sequence
  ENSG00000133121_7 (sequence is synthesized)
caccccttccaccccaagaatgagaagcccacgagggctagggccaaatcatttttgaaacgcatggaaacactccgagggaagggagcccacgggaggcataaggggtctgggcggaca

SEQ ID NO: 303316 - DNA, 120 bp, Artificial Sequence
  ENSG00000133121_8 (sequence is synthesized)
ggtggcctggtgatcagtgggcccatgttgcagcaggagccagagtcctttaaggctatgcagtgcatccaaataccaaatggagatctccagaattcgccgccacctgcctgcagaaaa

SEQ ID NO: 303317 - DNA, 120 bp, Artificial Sequence
  ENSG00000133121_9 (sequence is synthesized)
gggctcccatgctctggcaagtcgagtggcgagagcagcccgtcggagcacagcagcagcggggtgagcacgccctgcctgaaggaacgcaagtgccacgaggccaacaagcgcgggggc

SEQ ID NO: 303318 - DNA, 120 bp, Artificial Sequence
  ENSG00000133121_10 (sequence is synthesized)
atgtacttggaggacctagatgtgctggcggggacagcactgccggatgcaggggaccaaagccgtatgcatgaatttcactcccaagagaatttggtggtgcatattcccaaggatcac

SEQ ID NO: 303319 - DNA, 120 bp, Artificial Sequence
  ENSG00000133121_11 (sequence is synthesized)
aaaccaggaacattccccaaggcactttctattgaaagcctctctcccacagatagtagcaatggggttaattggaggaccggtagcatctccctgggcagagagcaggtccctggtgcc

SEQ ID NO: 303320 - DNA, 120 bp, Artificial Sequence
  ENSG00000133121_12 (sequence is synthesized)
agggagccccggctcatggcgtcctgccacagagccagccgagtcagtatctatgacaatgtccctggctcccatctgtatgccagcacaggagatcttttggacttggagaaagatgac

SEQ ID NO: 303321 - DNA, 120 bp, Artificial Sequence
  ENSG00000133121_13 (sequence is synthesized)
cttttccctcacttggatgacattctgcagcatgtcaatgggctccaagaggtagtcgatgactggtccaaagatgtcttgcctgaactgcaaactcatgatacattggttggggaacct

SEQ ID NO: 303322 - DNA, 120 bp, Artificial Sequence
  ENSG00000133121_14 (sequence is synthesized)
ggcttatccacctttccatctcctaatcagatcaccttagattttgaaggtaactctgtctcagaaggtcggacgacacccagtgatgtggaaagagatgtaacatctcttaatgaatct

SEQ ID NO: 303323 - DNA, 120 bp, Artificial Sequence
  ENSG00000133121_15 (sequence is synthesized)
gagcctcctggggtcagagacaggagggattctggtgtaggggcctctctgaccaggccaaacaggcgactccgatggaacagtttccagctgtcgcaccagccccggccggccccagca

SEQ ID NO: 303324 - DNA, 120 bp, Artificial Sequence
  ENSG00000133121_16 (sequence is synthesized)
tcgccccacatcagcagccagacggccagccagctgagcctgctccagcgcttctcactgctccgcctcacggccatcatggagaagcactccatgtccaacaagcacggctggacatgg

SEQ ID NO: 303325 - DNA, 120 bp, Artificial Sequence
  ENSG00000133121_17 (sequence is synthesized)
tcagttccaaagttcatgaagaggatgaaagttcccgactacaaagacaaggctgtctttggcgttcctctcatagtccacgtccaaagaacgggacagcccctgcctcaaagtattcag

SEQ ID NO: 303326 - DNA, 120 bp, Artificial Sequence
  ENSG00000133121_18 (sequence is synthesized)
caagcactgagatatctacgcagcaactgcctcgatcaggtgggtctttttcgcaaatcaggagtgaagtctcgaatccatgcccttcgccaaatgaatgaaaacttccctgagaacgtc

SEQ ID NO: 303327 - DNA, 120 bp, Artificial Sequence
  ENSG00000133121_19 (sequence is synthesized)
aactatgaagaccagtctgcttatgatgtggcggatatggtgaaacagttcttccgggacctccctgagcctcttttcaccaacaagctcagtgagacctttctccatatctatcagtat

SEQ ID NO: 303328 - DNA, 120 bp, Artificial Sequence
  ENSG00000133121_20 (sequence is synthesized)
gtctccaaagagcagcggctgcaggccgtgcaggctgccatcctgctactggccgatgagaacagggaggtcctgcagacgctcttgtgtttcctgaacgacgtcgtcaacttggtggaa

SEQ ID NO: 303329 - DNA, 120 bp, Artificial Sequence
  ENSG00000133121_21 (sequence is synthesized)
gagaatcagatgacgcccatgaacctggcagtgtgtctggccccctccctctttcatcttaatttattgaagaaagaaagctctccacgagtcatacagaagaaatatgccactgggaag

SEQ ID NO: 303330 - DNA, 120 bp, Artificial Sequence
  ENSG00000133121_22 (sequence is synthesized)
ccagatcaaaaggacctcaacgagaatctggcagcagctcaggggctagcgcacatgatcatggaatgcgacagactttttgaggttccacacgagttggtggcccagtctcgtaactcg

SEQ ID NO: 303331 - DNA, 120 bp, Artificial Sequence
  ENSG00000133121_23 (sequence is synthesized)
tatgtggaggctgagatccacgtgccaaccctggaagaattggggacacagctggaggagagtggggcaactttccacacttacctgaaccatctcatccagggcctccagaaagaagcc

SEQ ID NO: 303332 - DNA, 120 bp, Artificial Sequence
  ENSG00000133121_24 (sequence is synthesized)
cacggacaatacagatcttgctttcaaaaaggtgggcgacgggaacccgctgaagctgtggaaggcttctgtggaggtggaagcacccccctcagtggtcctgaaccgcgtgctgagaga

SEQ ID NO: 303333 - DNA, 120 bp, Artificial Sequence
  ENSG00000133121_25 (sequence is synthesized)
gcgccacctgtgggacgaggactttgtgcagtggaaggttgtggaaactctagacaggcaaacagagatctaccagtatgtgctgaacagcatggctccccatccttccagagactttgt

SEQ ID NO: 303334 - DNA, 120 bp, Artificial Sequence
  ENSG00000133121_26 (sequence is synthesized)
ggttctcaggacctggaaaactgatttgcccaaaggaatgtgtaccctggtgtccctctccgtggagcatgaggaagcccagctcctgggtggtgtgcgagcagtggtgatggactcgca

SEQ ID NO: 303335 - DNA, 120 bp, Artificial Sequence
  ENSG00000133121_27 (sequence is synthesized)
gtacttgatagaaccgtgtggctctggcaagtcaagactgactcacatctgcaggatagacctgaaaggtcactccccagaatggtacagcaaaggctttggacatctgtgtgcagcaga

SEQ ID NO: 303336 - DNA, 120 bp, Artificial Sequence
  ENSG00000133121_28 (sequence is synthesized)
agttgccaggattagaaactctttccagcccctcattgctgagggcccagaaactaaaatctgagttttgcccagtgtgacatcaaactcagggaagaggaagctaaagtgacgagtgtg

SEQ ID NO: 303337 - DNA, 120 bp, Artificial Sequence
  ENSG00000133121_29 (sequence is synthesized)
gcagagagtgtgcatgtgagaaagcgagagaaagaggaactgaaggacgcggttaatgcctaaaaatggaaacgttaagaagttggaatgttggagatgcaagaatttccaagaactttc

SEQ ID NO: 303338 - DNA, 120 bp, Artificial Sequence
  ENSG00000133121_30 (sequence is synthesized)
ttagccttcctggagatggctacatccctactaatataattttaaaatgagaactttatatatattacttaaaattaaatggactattccttgtgcattgcctaatttgctatttaaagg

SEQ ID NO: 303339 - DNA, 120 bp, Artificial Sequence
  ENSG00000133121_31 (sequence is synthesized)
cttctaagaagcgtatacctaactgtaaataaatgtatgtatagcatatgtacatatgtgtgtatatctccatctttactgtatatatgtaaaataccaattttatatagaattgtgtgt

SEQ ID NO: 303340 - DNA, 120 bp, Artificial Sequence
  ENSG00000133121_32 (sequence is synthesized)
tttgaaaatgacggtgtctgactcagtgagtcccttcctcacacagttctttccaagtggctctgggccccatctctccactgtcctgtaagctgtgcagaacctgctgctaacaccaag

SEQ ID NO: 303341 - DNA, 120 bp, Artificial Sequence
  ENSG00000133121_33 (sequence is synthesized)
gtgtgaacatgccctgatgcctaaccaaagatgagttaaccaaaggaaaataacattaaaggagacttatgtgttaacgctttgtttctgctattcaaaaactgagagtggagatctggg

SEQ ID NO: 303342 - DNA, 120 bp, Artificial Sequence
  ENSG00000133121_34 (sequence is synthesized)
ataaagcaaggaaataataattactcctccttaaagcaaatgggggggtgagaagtcattaccaaatttaaagctagatgaggagttgccactgggcccagtaagatggaatttcagtga

SEQ ID NO: 303343 - DNA, 120 bp, Artificial Sequence
  ENSG00000133121_35 (sequence is synthesized)
gatatggaccaccggagtcagcgagagtgactgaaacagaagcgatacctctcgctcccatgcccatcactacagaccccaagtcaagatgaatatcatagcctttacttcttcacagcc

SEQ ID NO: 303344 - DNA, 120 bp, Artificial Sequence
  ENSG00000133121_36 (sequence is synthesized)
aaagggagcccctgtgttgtctcaagtttttataaatacatttcataatgttattaaatgtcattctatttgaccagtggcctatttggtcacagttaattggtgttttcttattgcact

SEQ ID NO: 303345 - DNA, 120 bp, Artificial Sequence
  ENSG00000133121_37 (sequence is synthesized)
gaattcaactccagacaccatacaaagggagatgatggccattccgttcaaatcctagatcgttacagcttcagggaattcatattttgttatgtgtaggatactcttaaaatgtaattc

SEQ ID NO: 303346 - DNA, 120 bp, Artificial Sequence
  ENSG00000133121_38 (sequence is synthesized)
attaaacttttacaatctgaaagacagggtttttaactaacatgagaccaaaactatgttctttgattagttttagatagtataatcgggtttattaattcttctgtgtttcttcactag

SEQ ID NO: 303347 - DNA, 120 bp, Artificial Sequence
  ENSG00000133121_39 (sequence is synthesized)
ccagtccaagctacctatgcatttgacccaaccttatttattattgtacagatgaagcgaattgactccctttagccaactgctaatggatcgaatgtgctttttattgtaattcaacag

SEQ ID NO: 303348 - DNA, 120 bp, Artificial Sequence
  ENSG00000133121_40 (sequence is synthesized)
ctatagagagaaagataacttattgtgtgtttgatttcagggagagagattttctttggtcatccataatagagattgataagatttagcaactggtgttggagaaaaaaagaaaagcaa

SEQ ID NO: 303349 - DNA, 120 bp, Artificial Sequence
  ENSG00000133121_41 (sequence is synthesized)
atgagtgttttcaggtttttttgcattatatgcatttatgtaatgtttctgttatcagcaatgtgcaattattttattgagaggaataaaaaagctttctatgagtttggtatggtgcga

SEQ ID NO: 303350 - DNA, 120 bp, Artificial Sequence
  ENSG00000133121_42 (sequence is synthesized)
ggaaaatcttacagtttgaattatgacctagaaatttttcattcccatatctacctaagaaggaagcagtaaatccataatttaccttttgggcaatgctttgtgagcaaaacaaagtca

SEQ ID NO: 303351 - DNA, 120 bp, Artificial Sequence
  ENSG00000133121_43 (sequence is synthesized)
cttctgccataacatcttgaatttaaccatatatgccagattactttatatgcatcaacaagatcaccagtgaagtttaatctagctaaacactggtcctgctcctgagatgggatccta

SEQ ID NO: 303352 - DNA, 120 bp, Artificial Sequence
  ENSG00000133121_44 (sequence is synthesized)
tgtgtttggaaaacgtgataggcacacgaggatgagtggctttgtatcgcccagagaggtgcttgtccagatttcacatgcacatgaattgcctggggatcttgtgaaactgcagactct

SEQ ID NO: 303353 - DNA, 120 bp, Artificial Sequence
  ENSG00000133121_45 (sequence is synthesized)
gctccaagtaatctgggctgggcctgagattctgcatttctaaggagtctcagggatgcctatgctgctggcctaaaaccacactcagaaacgaggacctagaagatccctaaaacagaa

SEQ ID NO: 303354 - DNA, 120 bp, Artificial Sequence
  ENSG00000133121_46 (sequence is synthesized)
taagaacaaatgtgattgtatttctgattctccctctcttcgaattatctgacttttttgtttttgtgcacatagtaatcatatcaccgctgcataacaacacagtgcatctttttaaaa

SEQ ID NO: 303355 - DNA, 120 bp, Artificial Sequence
  ENSG00000133121_47 (sequence is synthesized)
caaggaaaagggaaaaaaaggagaaaaaacgatgcatcaagcttgtttgtcaaataccacagtattttattcattgttatcttgccaatggaaataaagtatgatattgcatttaaatat

SEQ ID NO: 303356 - DNA, 120 bp, Artificial Sequence
  ENSG00000133121_48 (sequence is synthesized)
ccaatggaaataaagtatgatattgcatttaaatattatatttatacctcatgtatatttttacctcaattgttgatatcaatcatcaattgtaaataaataattgccaaggcaaataaa

SEQ ID NO: 303357 - DNA, 120 bp, Artificial Sequence
  ENSG00000133121_49 (sequence is synthesized)
cggaaacatgagagaggactatcatctgctccttgctctgaatttctttgaacctccatgctggaaccctcctcagttctccatgcaaacgttaaccaggcccctttgtggtgcttggtg

SEQ ID NO: 303358 - DNA, 120 bp, Artificial Sequence
  ENSG00000133121_50 (sequence is synthesized)
ctgcgctggtgcagagaatgcaaagacactgtctgtggtgggaaacagaaaagcagagtgaaccacacattccagcgccgggaaattgaggcaaaagaagcatgtgactggctccgtgct

SEQ ID NO: 303359 - DNA, 120 bp, Artificial Sequence
  ENSG00000133121_51 (sequence is synthesized)
gagcttagctgcacgcctcactggaagactaacaacccagccaagagcatttcaggagacaggacaccagcacttctgccgcctgcagctcgggctctccactcccgcggcattcccagc

SEQ ID NO: 303360 - DNA, 120 bp, Artificial Sequence
  ENSG00000133121_52 (sequence is synthesized)
ggcccattcctgcttccaaacaggcaggcccggccacgtagctccagttaacgtctaaatttctatgtgactatggatgcgttgccttttgcagctgtggattcgtgtgggttcctgttt

SEQ ID NO: 303361 - DNA, 120 bp, Artificial Sequence
  ENSG00000133121_53 (sequence is synthesized)
ccagtgtaaagatatggccaaattccgtcttttgaaaaaagcccttctttatggaatgtctggttggcatctgtctctgaggaatatataatttcagtgaagaatgttctcatttttaga

SEQ ID NO: 303362 - DNA, 120 bp, Artificial Sequence
  ENSG00000133121_54 (sequence is synthesized)
cctccttccctgaaaatttggatcctcatattagcattccattccacttgctgtacttttagttggaaggtctaaggcagacaaagctgcttaaatatttttatcactgacttcctagaa

SEQ ID NO: 303363 - DNA, 120 bp, Artificial Sequence
  ENSG00000133121_55 (sequence is synthesized)
gaaggaggaaaaaatcttggcaagaagaagggaaatcagtcttgcagaatatcttgaagaagcctgcgaaggaattccactgactgtgttcattatctattggtcccaatactgagtgga

SEQ ID NO: 303364 - DNA, 120 bp, Artificial Sequence
  ENSG00000133121_56 (sequence is synthesized)
caaaatcagggaggagattgaggggaagagagagactttatattcttgttattcacttctctatgtatatttcaggtgtttgtattgcattattaaaaacattagcaatgttttaaaaaa

SEQ ID NO: 303365 - DNA, 120 bp, Artificial Sequence
  ENSG00000133121_57 (sequence is synthesized)
ctagcgcggcgtttctggtggccaggcatcccggtcctcgcgcgtggcgcagcctcccagcgccggaccgacccatgtcgcgcccgcattgggtcccgggaccccggcgggagtgccgcg

SEQ ID NO: 303366 - DNA, 120 bp, Artificial Sequence
  ENSG00000133121_58 (sequence is synthesized)
tccgtcctttccagtcgccgggagtctgagtcgcgggccacgcgggagtggcggtggagagcccgccggtcgttatgaggacggatctaaaatgaccagcaaacggaaaccttgccaaac

SEQ ID NO: 303367 - DNA, 120 bp, Artificial Sequence
  ENSG00000133121_59 (sequence is synthesized)
gcagctcaggagatccatcagtgagcagttgcgggactccacggccagagcctgggatctgctgtggaagaacgtccgggagaggcggctggcaggactatctcttgagctgggcagtga

SEQ ID NO: 303368 - DNA, 120 bp, Artificial Sequence
  ENSG00000133121_60 (sequence is synthesized)
tcccttttttccttacttgaactgtaaagcaagtggtttgctaggtgttctgcccttaaacccatgcacccacatcctcatcagcctgaaagcattctggggaagatgcccagaatctat

SEQ ID NO: 303369 - DNA, 120 bp, Artificial Sequence
  ENSG00000133121_61 (sequence is synthesized)
agcaccttgagagaaggtcactagcaagctaaattagaagtggagattatggatgattccaacactcaatgttgtaagcatacaatgttcattccacattttctctccaacacagtggcc

SEQ ID NO: 303370 - DNA, 120 bp, Artificial Sequence
  ENSG00000133121_62 (sequence is synthesized)
acatttagtgtgcacctaagaaataaacagacttttttggtttggacccagaaataaattgtggtaacccagcagttttgactgttgatgtttaaaaacctgtacatgcactgtagacct

SEQ ID NO: 303371 - DNA, 120 bp, Artificial Sequence
  ENSG00000133121_63 (sequence is synthesized)
caattaataacaattagtaactttccctgttatcatgctaaattgtatattctacatgatggatggtgttagagaaatttttgtggtctagtaaacttttgttgcttcataacttcagaa

SEQ ID NO: 303372 - DNA, 120 bp, Artificial Sequence
  ENSG00000133121_64 (sequence is synthesized)
ccctttctaaaccctgcttggccatcgagagcgtgggatccaaagttcaattgcaagggttgggactcagctctgcctcccatgagctgcgaggcctcagcaattactgacttctttgtg

SEQ ID NO: 303373 - DNA, 120 bp, Artificial Sequence
  ENSG00000133121_65 (sequence is synthesized)
cctttcctgctgttctggttgtttttgttgatgatgactctgggtgcgtgttcacacgaggaatgtggagcttacacagtgcttcccagctggctctttctatgtctgctcctccaatga

SEQ ID NO: 303374 - DNA, 120 bp, Artificial Sequence
  ENSG00000133121_66 (sequence is synthesized)
ctcacagacaacagccaagcacagaggaaatattagctggcagagataacgaagagaaaacactcggtgacagatgcaccatctgtcagtttctgaggagcagttttcaagaaagctgaa

SEQ ID NO: 303375 - DNA, 120 bp, Artificial Sequence
  ENSG00000133124_0 (sequence is synthesized)
ccccaaccctccctttcctgaattccccctcctcctcgctcaccttaaaaccatcgtgcatcaccatggcgagttgctccttcactcgcgaccaagcgacaagaagactaagaggtgcag

SEQ ID NO: 303376 - DNA, 120 bp, Artificial Sequence
  ENSG00000133124_1 (sequence is synthesized)
cagcggcggcagcggcagctctagcagcagtggtgaccaccccgcttctttcctcgggaaccccgaccgcactcattgggaccgggtcgtcttgtccgggagccatgtggctctccacgg

SEQ ID NO: 303377 - DNA, 120 bp, Artificial Sequence
  ENSG00000133124_2 (sequence is synthesized)
ccactggctcccggtcagactccgagtccgaagaggaggacctgcccgtcggggaggaagtctgcaaacgcggctacctgcggaaacagaagcatgggcacaggcgctacttcgtgctca

SEQ ID NO: 303378 - DNA, 120 bp, Artificial Sequence
  ENSG00000133124_3 (sequence is synthesized)
aactcgagactgctgacgccccagctcggctggaatactacgaaaatgccaggaagttccggcacagtgtccgcgccgcggcggctgcagcagcggcggccgcctctggcgccgcgatcc

SEQ ID NO: 303379 - DNA, 120 bp, Artificial Sequence
  ENSG00000133124_4 (sequence is synthesized)
ccccgctcattccaccgcggcgcgtgatcaccctataccagtgcttttccgtgagccagcgagcagatgcaaggtaccgacacctcattgctcttttcacccaagacgaatacttcgcga

SEQ ID NO: 303380 - DNA, 120 bp, Artificial Sequence
  ENSG00000133124_5 (sequence is synthesized)
tggtggccgagaacgagtcggagcaggaaagctggtacttgctgctcagccgcctcatcctcgagagcaagcgccgccgctgcggcacgctcggcgcgcagccggacggagagccggccg

SEQ ID NO: 303381 - DNA, 120 bp, Artificial Sequence
  ENSG00000133124_6 (sequence is synthesized)
cgctggcggcggcagcggcggcggagccacccttctataaagatgtgtggcaggtaatagtcaaacccagggggctggggcacagaaaagagctgagcggcgtgttccggctgtgtctaa

SEQ ID NO: 303382 - DNA, 120 bp, Artificial Sequence
  ENSG00000133124_7 (sequence is synthesized)
ccgacgaggaggtcgtgtttgtgaggctgaacaccgaagtggccagcgtggtcgtccagctcctgagcatccgtcgctgtggacactcggagcagtatttcttcttggaagtaggcaggt

SEQ ID NO: 303383 - DNA, 120 bp, Artificial Sequence
  ENSG00000133124_8 (sequence is synthesized)
ccactgtcatcggtccgggagagctctggatgcaggtcgatgactgtgtggttgcccaaaacatgcatgagctgtttttggagaagatgagagccttgtgtgcagacgaatacagagccc

SEQ ID NO: 303384 - DNA, 120 bp, Artificial Sequence
  ENSG00000133124_9 (sequence is synthesized)
gctgccgcagctacagcatcagcatcggcgcccacctgttaaccctgctgtccgctaggaggcacctgggcttggtgccgctcgagccgggaggctggctcagaaggtcccgctttgagc

SEQ ID NO: 303385 - DNA, 120 bp, Artificial Sequence
  ENSG00000133124_10 (sequence is synthesized)
agttttgccacctcagggccatcggcgacggggaagacgagatgcttttcaccaggcgcttcgtaacacccagcgagcctgtggcccactccaggcgaggaagactgcacctgcccagag

SEQ ID NO: 303386 - DNA, 120 bp, Artificial Sequence
  ENSG00000133124_11 (sequence is synthesized)
ggcgcaggtcaaggagagcggtttcagtgccggccagcttttttcgccgcttagcacccagcccagcacgtccccggcaccctgcagaagccccgaacaatggagctcgcctgtcttctg

SEQ ID NO: 303387 - DNA, 120 bp, Artificial Sequence
  ENSG00000133124_12 (sequence is synthesized)
aagtgtctggttctggctctggcaactttggggaggaaggcaatccccagggcaaagaagatcaggaaggaagcggaggtgactacatgcctatgaacaattggggctcaggaaatggcc

SEQ ID NO: 303388 - DNA, 120 bp, Artificial Sequence
  ENSG00000133124_13 (sequence is synthesized)
ggggctcaggaggtggccagggctcaaatggccaaggctccagtagccatagctcgggaggaaaccagtgttcaggcgagggacagggatcccgaggtggtcagggctcaaatggccagg

SEQ ID NO: 303389 - DNA, 120 bp, Artificial Sequence
  ENSG00000133124_14 (sequence is synthesized)
gctcaggaggaaaccagtgctctagagatggccagggcaccgcaggtgggcacggttcaggtggtggccagagacctggaggtgggcatggctcaggtggtggccagggacctggagatg

SEQ ID NO: 303390 - DNA, 120 bp, Artificial Sequence
  ENSG00000133124_15 (sequence is synthesized)
gccatggctcaggtggtggcaagaactctggggggggcaaaggctcaggaagtgggaaaggatccgatggtgatggtgaacgtggaaaatctctgaagaaaagatcctattttggcaaat

SEQ ID NO: 303391 - DNA, 120 bp, Artificial Sequence
  ENSG00000133124_16 (sequence is synthesized)
gtctgggggaagattcagactttatttttgtgttgacagaggagccacgaaagaatgcaaagaagccaaagaagtgaaagatgcagagatcccagaaggtgcagctcgaggtccccacag

SEQ ID NO: 303392 - DNA, 120 bp, Artificial Sequence
  ENSG00000133124_17 (sequence is synthesized)
agccagagcttttgatgaagatgaggatgacccatacgtgccaatgaggccaggggtggccacccctcttgtaagctccagtgattatatgccaatggctcctcaaaatgtctctgcttc

SEQ ID NO: 303393 - DNA, 120 bp, Artificial Sequence
  ENSG00000133124_18 (sequence is synthesized)
aaaaaagcgccactctcgatccccttttgaagattcaagagggtacatgatgatgtttcccagagtgagcccaccacctgctccgagtcctccaaaagcacctgatactaataaagagga

SEQ ID NO: 303394 - DNA, 120 bp, Artificial Sequence
  ENSG00000133124_19 (sequence is synthesized)
tgactcaaaggacaatgacagtgagagtgactacatgtttatggctcctggagccggtgcaattccaaaaaaccccagaaatcctcagggtggctcttcctccaaaagttggagctccta

SEQ ID NO: 303395 - DNA, 120 bp, Artificial Sequence
  ENSG00000133124_20 (sequence is synthesized)
cttctctctaccaaacccttttcggagctcacctttgggacagaatgacaacagtgagtatgtgccaatgttacctggaaagttcctggggaggggcctagacaaagaagtctcctataa

SEQ ID NO: 303396 - DNA, 120 bp, Artificial Sequence
  ENSG00000133124_21 (sequence is synthesized)
ctgggaccccaaagatgcagcttcaaagccttcaggtgagggatcattctcaaagcctggagatgggggatcaccttcaaagccttcagatcatgagcccccaaagaataaagctaagag

SEQ ID NO: 303397 - DNA, 120 bp, Artificial Sequence
  ENSG00000133124_22 (sequence is synthesized)
acctaaccgactttcttttattacaaaaggatataaaatcaagccaaaaccacaaaagcccacacatgagcagagagaagctgacagctctagtgactacgtcaacatggacttcactaa

SEQ ID NO: 303398 - DNA, 120 bp, Artificial Sequence
  ENSG00000133124_23 (sequence is synthesized)
aagagagagcaatacaccagctccctctactcaaggactaccagattcgtggggcataattgctgaacccagacagtcagccttttctaattatgtgaatgttgagtttggagtgccatt

SEQ ID NO: 303399 - DNA, 120 bp, Artificial Sequence
  ENSG00000133124_24 (sequence is synthesized)
tccaaatccagcaaacgacctctcagatcttttaagagctataccacgtgccaaccccttatctctggacagtgctaggtggccacttcctccccttcccctcagtgctacaggtagcaa

SEQ ID NO: 303400 - DNA, 120 bp, Artificial Sequence
  ENSG00000133124_25 (sequence is synthesized)
tgctattgaggaagagggtgactacattgaagtaattttcaactcagcaatgacaccagccatggctcttgctgacagtgccattcgctatgatgctgaaacaggtcgaatctatgtggt

SEQ ID NO: 303401 - DNA, 120 bp, Artificial Sequence
  ENSG00000133124_26 (sequence is synthesized)
cgacccattttctgagtgctgtatggatatttctctctcccccagccgatgttctgaaccaccacctgtagctaggctgctgcaggaagaagagcaggagagaagacgcccacaaagccg

SEQ ID NO: 303402 - DNA, 120 bp, Artificial Sequence
  ENSG00000133124_27 (sequence is synthesized)
ttctcaaagtttctttgcagcagccagagccgctgtctctgcttttccaacagacagcctcgagagagacctttccccatcctcagccccggctgtcgcttcggctgcagagccgacttt

SEQ ID NO: 303403 - DNA, 120 bp, Artificial Sequence
  ENSG00000133124_28 (sequence is synthesized)
agccctcagccaagttgtagctgcggcctccgcgctcgccgcagccccgggcatcggcgcagcagccgcagctgctggatttgactccgcctctgcccgctggtttcaacctgttgctaa

SEQ ID NO: 303404 - DNA, 120 bp, Artificial Sequence
  ENSG00000133124_29 (sequence is synthesized)
tgctgctgatgccgaagcagtaaggggagcccaagacgttgccggtggctcgaaccctggagcccacaacccatctgcaaaccttgccagaggtgataaccaggctggcggggctgccgc

SEQ ID NO: 303405 - DNA, 120 bp, Artificial Sequence
  ENSG00000133124_30 (sequence is synthesized)
tgcagctgccgctccggaaccaccacctcgcagtcgccgggtgccaagacccccggagagagaagattctgacaacgacgacgacactcacgtgagaatggattttgccagacgtgataa

SEQ ID NO: 303406 - DNA, 120 bp, Artificial Sequence
  ENSG00000133124_31 (sequence is synthesized)
tcagttcgactctcccaaaagaggtcggtaattttagaattaatttccctaaagtgaatggtcattgtctaatgattcgatgcgctacagtctacagtgttagggatactatttcattaa

SEQ ID NO: 303407 - DNA, 120 bp, Artificial Sequence
  ENSG00000133131_0 (sequence is synthesized)
agtcgccgggtcggtagaggtgctgacagggcggagccgccgcttgcctcagccggcctcacccctcccgcccgggacaggtggctggagcgcgctccgcctccgccagctgcgagtggg

SEQ ID NO: 303408 - DNA, 120 bp, Artificial Sequence
  ENSG00000133131_1 (sequence is synthesized)
agcgagggagggccggtcccggacggtcgccgccagctgcgagtggaagtgagcgagggctagtcccggaccgccgggccaggggtccggcggcagcagacgggtaccgtggcggccaaa

SEQ ID NO: 303409 - DNA, 120 bp, Artificial Sequence
  ENSG00000133131_2 (sequence is synthesized)
ccctggcgcgccgggctgcgggctggcccggcccggcggcggcccgcaggccttcgggatccgcctgagcacgatgagcccccgctacctccagagcaactccagcagccacacgcgacc

SEQ ID NO: 303410 - DNA, 120 bp, Artificial Sequence
  ENSG00000133131_3 (sequence is synthesized)
ctccagagcaactccagcagccacacgcgacccttcagtgccatcgcggagctgctagataatgctgtagatccagatgtatctgccaggacggtctttatagatgttgaggaggtcaag

SEQ ID NO: 303411 - DNA, 120 bp, Artificial Sequence
  ENSG00000133131_4 (sequence is synthesized)
aataaatcttgtttgacctttaccgatgatggatgtgggatgacacctcataaactacaccgaatgctcagctttggctttacagataaagtaataaagaagagccagtgtcccattggg

SEQ ID NO: 303412 - DNA, 120 bp, Artificial Sequence
  ENSG00000133131_5 (sequence is synthesized)
gtctttggtaatggtttcaagtcaggctccatgcggctaggaaaggacgcccttgtcttcaccaagaatgggggtactctcactgttggacttctatcacagacctatctggaatgtgtc

SEQ ID NO: 303413 - DNA, 120 bp, Artificial Sequence
  ENSG00000133131_6 (sequence is synthesized)
caggcccaggcagttattgtaccaattgttccattcaaccagcaaaacaaaaaaatgattattaccgaggattcattgcccagcctagaagccatcttgaactattccattttcaaccgt

SEQ ID NO: 303414 - DNA, 120 bp, Artificial Sequence
  ENSG00000133131_7 (sequence is synthesized)
gaaaatgacctgctggcccagtttgatgccatcccaggcaaaaaaggcactcgtgttctcatttggaacatccgcagaaataaaaatggaaaatctgagttggactttgatacagatcaa

SEQ ID NO: 303415 - DNA, 120 bp, Artificial Sequence
  ENSG00000133131_8 (sequence is synthesized)
tatgacatcctggtatcagactttgacacagaagaaaaaatgactggcggtgttacctctgagctaccagaaacagaatattctttaagggcattttgtggtattctatacatgaagcca

SEQ ID NO: 303416 - DNA, 120 bp, Artificial Sequence
  ENSG00000133131_9 (sequence is synthesized)
cgcatgaaaatttttctgcgtcaaaagaaggtgactacccagatgattgccaagagcctggccaatgtagaatatgatacatataaacctaccttcacaaataagcaggtgagaatcacc

SEQ ID NO: 303417 - DNA, 120 bp, Artificial Sequence
  ENSG00000133131_10 (sequence is synthesized)
tttgggttctcttgcaagaatagtaaccagtttggaataatgatgtatcataacaaccgactcataaaatcttttgagaaggtggggtgccaggtgaagccaactcgtggagaaggtgta

SEQ ID NO: 303418 - DNA, 120 bp, Artificial Sequence
  ENSG00000133131_11 (sequence is synthesized)
ggagtaattggagtcattgagtgcaatttcctaaaacctgcctacaacaaacaagactttgagtataccaaggagtaccggctaacaataaatgcccttgcccagaagctcaatgcttac

SEQ ID NO: 303419 - DNA, 120 bp, Artificial Sequence
  ENSG00000133131_12 (sequence is synthesized)
tggaaggaaaaaacatctcaagataattttgagacctcaactgtagccaggccaataccgaaggttcctgaccagacatgggttcagtgtgatgagtgtcttaaatggagaaagcttcct

SEQ ID NO: 303420 - DNA, 120 bp, Artificial Sequence
  ENSG00000133131_13 (sequence is synthesized)
gggaagattgatccatccatgttacctgcaagatggttttgttattataattcccatccaaagtacaggagatgctctgttccagaggaacaagaactcactgatgaagacctgtgcttg

SEQ ID NO: 303421 - DNA, 120 bp, Artificial Sequence
  ENSG00000133131_14 (sequence is synthesized)
agcaaagctaagaaacaagaacaaactgttgaggagaagaagaagatgcctatggaaaatgagaaccaccaggtattcagtaatccaccaaagatccttactgttcaagaaatggctgga

SEQ ID NO: 303422 - DNA, 120 bp, Artificial Sequence
  ENSG00000133131_15 (sequence is synthesized)
ccatctcttcaacttaagcctctggattccagtgttttacagttttccagtaagtacaaatggatcctaggtgaagaaccggtggagaaacgaagaaggctccagaatgagatgacaaca

SEQ ID NO: 303423 - DNA, 120 bp, Artificial Sequence
  ENSG00000133131_16 (sequence is synthesized)
ccttctctagattattccatgcctgctccttacaggagggtagaagcacctgttgcctacccagaaggggagaacagccatgataaatcgagttctgagagaagtacaccaccatacctt

SEQ ID NO: 303424 - DNA, 120 bp, Artificial Sequence
  ENSG00000133131_17 (sequence is synthesized)
ttcccagaatacccagaagcaagcaagaatacaggtcagaatagggaggtttcaattctgtatccaggggccaaagaccaacgccaggggtccctgcttcctgaagaattagaagatcag

SEQ ID NO: 303425 - DNA, 120 bp, Artificial Sequence
  ENSG00000133131_18 (sequence is synthesized)
atgccaagattggtggcagaagaatctaacagaggtagcacaaccataaacaaagaagaagtcaacaagggaccttttgtagctgttgtgggtgttgccaaaggtgttagagattcagga

SEQ ID NO: 303426 - DNA, 120 bp, Artificial Sequence
  ENSG00000133131_19 (sequence is synthesized)
gctcccattcagctgatcccttttaacagagaggagcttgctgagagacgaaaagcagttgaatcctggaacccagtgccttattctgtggcctctgctgcaatccctgctgcagccatt

SEQ ID NO: 303427 - DNA, 120 bp, Artificial Sequence
  ENSG00000133131_20 (sequence is synthesized)
ggggagaaagcaagaggctatgaggagagcgaaggtcataatacaccaaagttgaagaaccagagagagctggaagaattgaagagaaccacagaaaaattggaacgtgttttggctgaa

SEQ ID NO: 303428 - DNA, 120 bp, Artificial Sequence
  ENSG00000133131_21 (sequence is synthesized)
aggaatttgttccagcaaaaggtggaggagctggaacaggagaggaatcactggcagtctgaattcaagaaagtccaacatgaattggtgatctacagtacccaggaggcggaaggcttg

SEQ ID NO: 303429 - DNA, 120 bp, Artificial Sequence
  ENSG00000133131_22 (sequence is synthesized)
tactggagcaagaaacacatgggttatcgccaagctgaattccagattctgaaagctgagctggaaagaaccaaagaggaaaagcaagagttaaaagagaaactgaaggaaacagagaca

SEQ ID NO: 303430 - DNA, 120 bp, Artificial Sequence
  ENSG00000133131_23 (sequence is synthesized)
cacctggaaatgctgcagaaggctcaggtctcctaccggaccccagagggagatgacctagaaagggctttggcaaagcttacgcggctacgtatccacgtcagctatctccttacttct

SEQ ID NO: 303431 - DNA, 120 bp, Artificial Sequence
  ENSG00000133131_24 (sequence is synthesized)
gtcctccctcacttggagcttcgtgagatcgggtatgactcagaacaagtggatgggatcctgtacacggtgctggaggcaaatcacatactggattgagcaccagactgtatacccttc

SEQ ID NO: 303432 - DNA, 80 bp, Artificial Sequence
  ENSG00000133131_25 (sequence is synthesized)
aaatcacatactggattgagcaccagactgtatacccttctcttctcttatcttctgtctgttctcttttctctccctcc

SEQ ID NO: 303433 - DNA, 120 bp, Artificial Sequence
  ENSG00000133131_26 (sequence is synthesized)
gtgtaaatcctggctcataatcagtctcctttttatcagttttggtgtggagaaagaggccagtttaaataggctttcaagagtctagggtcagaaaagcaatagtcactaagctaggtg

SEQ ID NO: 303434 - DNA, 120 bp, Artificial Sequence
  ENSG00000133131_27 (sequence is synthesized)
acctgaaagctttaattttcatgacctggatatgtggtctattgtatatctttttctgaaatggtttgtattcatttaggttagatcaatcagcagatattgggtccggtataccaggta

SEQ ID NO: 303435 - DNA, 120 bp, Artificial Sequence
  ENSG00000133131_28 (sequence is synthesized)
ttattttggggtaagctaacaagtacaactcatgtttgcagccttcgaagatgtaacaatctcgttggaaacataagacatacatcacattatacacaaaagtgtatgatatgtacaact

SEQ ID NO: 303436 - DNA, 120 bp, Artificial Sequence
  ENSG00000133131_29 (sequence is synthesized)
gagtggtacagatatgacatggaagatctgggggaggaagttcaaggaaggcaccacaccagaaatgggacctaaattaaggcttaaagaatgagcatggccacactgtcagtgagtgtt

SEQ ID NO: 303437 - DNA, 120 bp, Artificial Sequence
  ENSG00000133131_30 (sequence is synthesized)
ctttaggtggtaggactatggttgatatttttcttcttcctatcttcctgcctttttcagattttcaatattaaacttgttattcttacattggaaaaaaataaattgtttttaaaaaga

SEQ ID NO: 303438 - DNA, 120 bp, Artificial Sequence
  ENSG00000133131_31 (sequence is synthesized)
aattgagtaattacttcttagaaagctgcagccagtctccctgtgcttggtggcgttgtgctttcttctttctagctaatgaaaacataactgttgagaaatgtggttccattttgaagg

SEQ ID NO: 303439 - DNA, 120 bp, Artificial Sequence
  ENSG00000133131_32 (sequence is synthesized)
ggcttcattttattctgttggttaatgacttcatgtcatctcttctcctgccccctcactccttcatacagggctttggcaaagcttacgcggctacgtatccacgtcagctatctcctt

SEQ ID NO: 303440 - DNA, 120 bp, Artificial Sequence
  ENSG00000133131_33 (sequence is synthesized)
atctgccaggacggtctttatagatgttgaggaggtcaagaataaatcttgtttgacctttaccgatgatggatgtgggatgacacctcataaactacaccgaatgctcagttaggaatc

SEQ ID NO: 303441 - DNA, 81 bp, Artificial Sequence
  ENSG00000133131_34 (sequence is synthesized)
accgcatgttcagtacgaaggggaacatcacactctggggcctgttgtggggtggcgggaggggggagggatagcattaag

SEQ ID NO: 303442 - DNA, 120 bp, Artificial Sequence
  ENSG00000133134_0 (sequence is synthesized)
cgtgatcggccaacactgagtcttacctcgttgtggcgtcagaaccgccgtcgctcgctcccttctcggcagtggtacctgttcccggtgtccctgaggacgtgcgggccaggtttgcgg

SEQ ID NO: 303443 - DNA, 120 bp, Artificial Sequence
  ENSG00000133134_1 (sequence is synthesized)
ggccaagtgttgcggcgacgcacctcacgtcgagaatcgggaggaggagactgcaaggataggcccaggagtaatggagtccaaagaggaacgagcgttaaacaatctcatcgtggaaaa

SEQ ID NO: 303444 - DNA, 120 bp, Artificial Sequence
  ENSG00000133134_2 (sequence is synthesized)
tacctttgaatgttagtgaatactgtgtgcctagaggaaaccgtaggcggttccgcgttaggcagcccatcctgcagtatagatgggacataatgcataggcttggagagccacaggcaa

SEQ ID NO: 303445 - DNA, 120 bp, Artificial Sequence
  ENSG00000133134_3 (sequence is synthesized)
ggatgagagaggagaatatggaaaggattggggaggaggtgagacagctgatggaaaagctgagggaaaagcagttgagtcatagtttgcgggcagtcagcactgatccccctcaccatg

SEQ ID NO: 303446 - DNA, 120 bp, Artificial Sequence
  ENSG00000133134_4 (sequence is synthesized)
accatcacgatgagttttgccttatgccctgaatcctgatggtttccctgaagttaatagggagacccctgcttcctaaacttacacatttgtggtgtacctttgtcgtaaacgttttga

SEQ ID NO: 303447 - DNA, 120 bp, Artificial Sequence
  ENSG00000133134_5 (sequence is synthesized)
gggacgggggcggagcctctggcgatgacaacagccacacgtgatcggccaacactgagtcttacctcgttgtggcgtcagaaccgccgtcgctcgctcccttctcggcagtggtacctg

SEQ ID NO: 303448 - DNA, 120 bp, Artificial Sequence
  ENSG00000133134_6 (sequence is synthesized)
tctaaatgaatgttgtttttgacccagtttgtaagtttctgtcagcaggagagttttacctattgcatggaaagatgctcattatatattgtgaagttaataaaacagttttaaaaagca

SEQ ID NO: 303449 - DNA, 120 bp, Artificial Sequence
  ENSG00000133134_7 (sequence is synthesized)
tggtacctgttcccggtgtccctgaggacgtgcgggccaggtacggccccgaaagtaggaagcggagggggagcaggtaagggacccggagggggtccctggggttggtgtgggggagca

SEQ ID NO: 303450 - DNA, 120 bp, Artificial Sequence
  ENSG00000133134_8 (sequence is synthesized)
gcagcgcggagacgcagccggtccacgatgcagccccggggccccgccgcgggaccgcgagccttgtgtgagcggaggggtgcccggccccgcgggagccggcgatcctgaggctacgac

SEQ ID NO: 303451 - DNA, 120 bp, Artificial Sequence
  ENSG00000133135_0 (sequence is synthesized)
gcggtagcggagaagactggagctccgaggagctgcatctgcggcaacctgtgtgctgacgctacgtgcctcctggctccgacgtagctcgcagctccccagtctcactccattccttcc

SEQ ID NO: 303452 - DNA, 120 bp, Artificial Sequence
  ENSG00000133135_1 (sequence is synthesized)
ccacctggcgcgcacctgctcaagaccagggtcctgccaagcgctaggagggcgcgtgccaggggcgctagggaactgcggagcgcgcgcgccatggggccgccgcctggggccggggtc

SEQ ID NO: 303453 - DNA, 120 bp, Artificial Sequence
  ENSG00000133135_2 (sequence is synthesized)
tcctgccgcggtggctgcggcttttccagattgctggcatggtgcttcctgctggccctgagtccgcaggcacccggttcccggggggctgaagcagtgtggaccgcgtacctcaacgtg

SEQ ID NO: 303454 - DNA, 120 bp, Artificial Sequence
  ENSG00000133135_3 (sequence is synthesized)
tcctggcgggttccgcacacgggagtgaaccgtacggtgtgggagctgagcgaggagggcgtgtacggccaggactcgccgctggagcctgtggctggggtcctggtaccgcccgacggg

SEQ ID NO: 303455 - DNA, 120 bp, Artificial Sequence
  ENSG00000133135_4 (sequence is synthesized)
cccggggcgcttaacgcctgtaacccgcacacgaatttcacggtgcccacggtttggggaagcaccgtgcaagtctcttggttggccctcatccaacgcggcgggggctgcaccttcgca

SEQ ID NO: 303456 - DNA, 120 bp, Artificial Sequence
  ENSG00000133135_5 (sequence is synthesized)
gacaagatccatctggcttatgagagaggggcgtctggagccgtcatctttaacttccccgggacccgcaatgaggtcatccccatgtctcacccgggtgcagtagacattgttgcaatc

SEQ ID NO: 303457 - DNA, 120 bp, Artificial Sequence
  ENSG00000133135_6 (sequence is synthesized)
atgatcggcaatctgaaaggcacaaaaattctgcaatctattcaaagaggcatacaagtgacaatggtcatagaagtagggaaaaaacatggcccttgggtgaatcactattcaattttt

SEQ ID NO: 303458 - DNA, 120 bp, Artificial Sequence
  ENSG00000133135_7 (sequence is synthesized)
ttcgtttctgtgtccttttttattattacggcggcaactgtgggctattttatcttttattctgctcgaaggctacggaatgcaagagctcaaagcaggaagcagaggcaattaaaggca

SEQ ID NO: 303459 - DNA, 120 bp, Artificial Sequence
  ENSG00000133135_8 (sequence is synthesized)
gatgctaaaaaagctattggaaggcttcaactacgcacactgaaacaaggagacaaggaaattggccctgatggagatagttgtgctgtgtgcattgaattgtataaaccaaatgatttg

SEQ ID NO: 303460 - DNA, 120 bp, Artificial Sequence
  ENSG00000133135_9 (sequence is synthesized)
gtacgcatcttaacgtgcaaccatattttccataagacatgtgttgacccatggctgttagaacacaggacttgccccatgtgcaaatgtgacatactcaaagctttgggaattgaggtg

SEQ ID NO: 303461 - DNA, 120 bp, Artificial Sequence
  ENSG00000133135_10 (sequence is synthesized)
gatgttgaagatggatcagtgtctttacaagtccctgtatccaatgaaatatctaatagtgcctcctcccatgaagaggataatcgcagcgagaccgcatcatctggatatgcttcagta

SEQ ID NO: 303462 - DNA, 120 bp, Artificial Sequence
  ENSG00000133135_11 (sequence is synthesized)
caaatgaaagtctacagctggtaaaccatgaagcaaattctgtggcagtggatgttattcctcatgttgacaacccaacctttgaagaagacgaaactcctaatcaagagactgctgttc

SEQ ID NO: 303463 - DNA, 120 bp, Artificial Sequence
  ENSG00000133135_12 (sequence is synthesized)
gagaaattaaatcttaaaatctgtgtaaatagaaaacttgaaccattagtaataacagaactgccaatcagggcctagtttctattaataaattggataaatttaataaaataagagtga

SEQ ID NO: 303464 - DNA, 120 bp, Artificial Sequence
  ENSG00000133135_13 (sequence is synthesized)
tactgaaagtgctcagatgactaatattatgctatagttaaatggcttaaaatatttaacctgttaacttttttccacaaactcattataatatttttcataggcaagtttcctctcagt

SEQ ID NO: 303465 - DNA, 120 bp, Artificial Sequence
  ENSG00000133135_14 (sequence is synthesized)
agtgataacaacatttttagacattcaaaactgtcttcaagaagtcacgtttttcatttataacaattttcttataaaaacatgttgcttttaaaatgtggagtagctgtaatcacttta

SEQ ID NO: 303466 - DNA, 120 bp, Artificial Sequence
  ENSG00000133135_15 (sequence is synthesized)
ttttatgatagtatcttaatgaaaaatactacttctttagcttgggctacatgtgtcagggtttttctccaggtgcttatattgatctggaattgtaatgtaaaaagcaatgcaaactta

SEQ ID NO: 303467 - DNA, 120 bp, Artificial Sequence
  ENSG00000133135_16 (sequence is synthesized)
ggcgagtacttcttgaaatgtctatttaagctgctttaagttaatagaaaagattaaagcaaaatattcatttttactttttcttatttttaaaattaggctgaatgtacttcatgtgat

SEQ ID NO: 303468 - DNA, 120 bp, Artificial Sequence
  ENSG00000133135_17 (sequence is synthesized)
ttgtcaaccatagtttatcagagattatggacttaattgattggtatattagtgacatcaacttgacacaagattagacaaaaaattccttacaaaaatactgtgtaactatttctcaaa

SEQ ID NO: 303469 - DNA, 120 bp, Artificial Sequence
  ENSG00000133135_18 (sequence is synthesized)
cttgtgggatttttcaaaagctcagtatatgaatcatcatactgtttgaaattgctaatgacagagtaagtaacactaatattggtcattgatcttcgttcatgaattagtctacagaaa

SEQ ID NO: 303470 - DNA, 120 bp, Artificial Sequence
  ENSG00000133135_19 (sequence is synthesized)
aaaaatgttctgtaaaattagtctgttgaaaatgttttccaaacaatgttactttgaaaattgagtttatgtttgacctaaatgggctaaaattacattagataaactaaaattctgtcc

SEQ ID NO: 303471 - DNA, 120 bp, Artificial Sequence
  ENSG00000133135_20 (sequence is synthesized)
gtgtaactataaattttgtgaatgcattttcctggtgtttgaaaaagaagggggggagaattccaggtgccttaatataaagtttgaagcttcatccaccaaagttaaatagagctattt

SEQ ID NO: 303472 - DNA, 120 bp, Artificial Sequence
  ENSG00000133135_21 (sequence is synthesized)
aaaaatgcactttatttgtactctgtgtggcttttgttttagaattttgttcaaattatagcagaatttaggcaaaaataaaacagacatgtatttttgtttgctgaatggatgaaacca

SEQ ID NO: 303473 - DNA, 120 bp, Artificial Sequence
  ENSG00000133135_22 (sequence is synthesized)
ttgcattcttgtacactgatttgaaatgctgtaaatatgtcccaatttgtattgattctctttaaatataaaatgtaaataaaatattccaataaaagtttgtgtctggtgttagtttaa

SEQ ID NO: 303474 - DNA, 120 bp, Artificial Sequence
  ENSG00000133135_23 (sequence is synthesized)
atagagctgatgtatccagaggttatgttgctagaggtgagatcagttacctacgtgcaactgaaatttcaaacttctgttcagcagggacgtgagtggacaatggtgactgatagttgg

SEQ ID NO: 303475 - DNA, 120 bp, Artificial Sequence
  ENSG00000133135_24 (sequence is synthesized)
aaatatcagcaaacatcttaaattttatactcaaatgaatgagcaatgaaccaggagaataggtccagttttttttggctccttgtaatttttacctttttacttaaaattacagcatct

SEQ ID NO: 303476 - DNA, 120 bp, Artificial Sequence
  ENSG00000133135_25 (sequence is synthesized)
ttttcaatgagtgcctatgtgactgtgacttattacaatgaaaccagcaactacactgcaatagagacatgtgaatgtggcgtttatggattagcttcaccagtggctaatgctatggga

SEQ ID NO: 303477 - DNA, 120 bp, Artificial Sequence
  ENSG00000133135_26 (sequence is synthesized)
gtggtaggcatccctaagaacaataactaccaagcttgtgaccacaacactgagtttagtaatactaagaagccctggattgcgctgatagaaagaggtaattgtacattttcagaaaaa

SEQ ID NO: 303478 - DNA, 120 bp, Artificial Sequence
  ENSG00000133138_0 (sequence is synthesized)
ggcaatctctctgcctacgtgggagagaagggagggttgggggaagtgtggaaaacctgaacctgagctgctgtcgcctgaggaagatttggtgggaggagaagcagaggggaagagacg

SEQ ID NO: 303479 - DNA, 120 bp, Artificial Sequence
  ENSG00000133138_1 (sequence is synthesized)
ggttgagagtgaggtgaggagggcatctaggtcactgctcccggggggcacaaagttcgcgatgtggctgaagcctgaggaagtgcttctgaaaaatgcgctgaagctgtggctgatgga

SEQ ID NO: 303480 - DNA, 120 bp, Artificial Sequence
  ENSG00000133138_2 (sequence is synthesized)
aaggtccaacgactacttcgtgctgcagcggcgtcggggctacggggaggaaggcggaggggggctcacagggcttctggttgggactcttgattcagtcttggactctactgctaaagt

SEQ ID NO: 303481 - DNA, 120 bp, Artificial Sequence
  ENSG00000133138_3 (sequence is synthesized)
agctccatttcgcatcctacaccagacaccagattctcaagtttacttgtcaattgcatgtggagccaacagagaagaaataaccaagcattgggattggttggaacaaaatattatgaa

SEQ ID NO: 303482 - DNA, 120 bp, Artificial Sequence
  ENSG00000133138_4 (sequence is synthesized)
gaccttatctgtatttgattcaaatgaagatattactaattttgtacaaggaaaaataagaggattaattgctgaagagggaaaacattgttttgcaaaagaagatgatcctgagaaatt

SEQ ID NO: 303483 - DNA, 120 bp, Artificial Sequence
  ENSG00000133138_5 (sequence is synthesized)
tcgagaagcccttttgaaatttgaaaaatgttttggtttaccagagaaggagaagttagtgacctattattcatgcagttattggaaaggacgggttccttgtcagggttggctttatct

SEQ ID NO: 303484 - DNA, 120 bp, Artificial Sequence
  ENSG00000133138_6 (sequence is synthesized)
tagcaccaactttctgagcttctattcttttttgttgggatcagaaataaaactcattatctcctgggatgaagtctcaaaacttgaaaagacttcaaatgtcatactgacagagagtat

SEQ ID NO: 303485 - DNA, 120 bp, Artificial Sequence
  ENSG00000133138_7 (sequence is synthesized)
tcacgtgtgttcccaaggagagaatcactacttttcaatgtttttgcacattaaccaaacataccttcttatggaacagctggcaaactatgccattagaagactttttgataaggaaac

SEQ ID NO: 303486 - DNA, 120 bp, Artificial Sequence
  ENSG00000133138_8 (sequence is synthesized)
atttgataatgacccagtcctttataatcctctacagatcaccaaaagaggtctggaaaatagagcccacagtgagcaatttaatgccttttttaggctgcccaaaggagagagtttgaa

SEQ ID NO: 303487 - DNA, 120 bp, Artificial Sequence
  ENSG00000133138_9 (sequence is synthesized)
agaagtacatgaatgtttcttatgggtaccattcagccacttcaatactcatgggaaaatgtgcatctcagaaaattatatctgctttgctagccaagatggcaatcagtgtagtgtaat

SEQ ID NO: 303488 - DNA, 120 bp, Artificial Sequence
  ENSG00000133138_10 (sequence is synthesized)
cattccactacgagaggtcttagctatagataagacaaatgattccagcaaatctgtcatcattagcatcaaaggaaaaacagcttttcgcttccatgaagttaaagactttgaacaact

SEQ ID NO: 303489 - DNA, 120 bp, Artificial Sequence
  ENSG00000133138_11 (sequence is synthesized)
ggtagcaaaactcaggctcagatgcggagcagcttcaactcaatatcatgatattagcacagagcttgctattagttctgagtctacagagccatctgataattttgaggtgcaatcttt

SEQ ID NO: 303490 - DNA, 120 bp, Artificial Sequence
  ENSG00000133138_12 (sequence is synthesized)
gacaagtcagagggaatgcagtaaaactgtgaacactgaagccttaatgacagtatttcaccctcagaatttggagactcttaattctaaaatgttgaaagaaaaaatgaaggaacagtc

SEQ ID NO: 303491 - DNA, 120 bp, Artificial Sequence
  ENSG00000133138_13 (sequence is synthesized)
atggaaaatactgtttgcagaatgtggacgtggtgttagtatgtttcgaaccaaaaagactcgagatcttgttgtaagagggattccagaaacattaagaggagaactctggatgctttt

SEQ ID NO: 303492 - DNA, 120 bp, Artificial Sequence
  ENSG00000133138_14 (sequence is synthesized)
ttcaggtgctgttaatgacatggctactaatcctgactattatactgaagtggttgagcagtccttagggacctgcaacttggctactgaagaaattgaacgtgatttacgtcgctctct

SEQ ID NO: 303493 - DNA, 120 bp, Artificial Sequence
  ENSG00000133138_15 (sequence is synthesized)
gcctgagcacccagcctttcagagtgatactggcatatctgctctgagaagggtactcacagcttatgcatacaggaatcccaaaattggatactgccaggcaatgaatattttgacttc

SEQ ID NO: 303494 - DNA, 120 bp, Artificial Sequence
  ENSG00000133138_16 (sequence is synthesized)
agtgctgcttctatatgcaaaagaggaagaagctttttggcttctggttgctgtatgtgaacgaatgttgcctgattattttaatcgtcgaattattggtgccttggtggatcaggcagt

SEQ ID NO: 303495 - DNA, 120 bp, Artificial Sequence
  ENSG00000133138_17 (sequence is synthesized)
ctttgaagaacttatcagggatcaccttcctcagctgacagaacacatgactgatatgacattcttttcctcagtttctctctcttggtttctcacactttttattagtgtgctacctat

SEQ ID NO: 303496 - DNA, 120 bp, Artificial Sequence
  ENSG00000133138_18 (sequence is synthesized)
tgaaagtgcagtgaatgtggtggactgtttcttctatgatggaataaaggccattttgcaactgggattggcaatacttgactataatttagacaaactgctgacttgtaaagatgatgc

SEQ ID NO: 303497 - DNA, 120 bp, Artificial Sequence
  ENSG00000133138_19 (sequence is synthesized)
tgaagctgtgacagccttaaacaggttctttgacaatgtcactaataaggatagtccattgccttcaaatgttcagcaaggttcaaatgtgagtgatgaaaaaaccagtcatactagagt

SEQ ID NO: 303498 - DNA, 120 bp, Artificial Sequence
  ENSG00000133138_20 (sequence is synthesized)
ggatattacagatttgattagagaatcaaatgagaaatatggtaatattcgctatgaagatatacatagtatgcgctgtcgaaataggttgtatgtgatacagaccctagaggaaacaac

SEQ ID NO: 303499 - DNA, 120 bp, Artificial Sequence
  ENSG00000133138_21 (sequence is synthesized)
aaaacagaatgtgttgcgtgttgtatcacaagatgtgaaattgagccttcaagaattggatgaactttatgtcatctttaagaaagagctgtttttatcttgttattggtgtttgggttg

SEQ ID NO: 303500 - DNA, 120 bp, Artificial Sequence
  ENSG00000133138_22 (sequence is synthesized)
cccagtattgaagcatcatgaccccagtctgccatatttggaacagtatcagattgactgccagcagttcagagcgttgtatcacttgttgagtccctgggctcattctgcaaataaaga

SEQ ID NO: 303501 - DNA, 120 bp, Artificial Sequence
  ENSG00000133138_23 (sequence is synthesized)
tgtacaatggaagttttactgagaagcttaagctgctttttaagctacatattcctccagcttacactgaagtgaaatctaaggatgcttcaaaaggagatgaactttccaaggaagaat

SEQ ID NO: 303502 - DNA, 120 bp, Artificial Sequence
  ENSG00000133138_24 (sequence is synthesized)
tactttatttcagtcagctgcatgtttccaagcctgcaaatgagaaggaagcagaatcagcaaaacacagccctgaaaaaggcaaagggaaaattgatattcaagcatatctaagtcaat

SEQ ID NO: 303503 - DNA, 120 bp, Artificial Sequence
  ENSG00000133138_25 (sequence is synthesized)
ggcaagatgagcttttcaaaaaagaagaaaacattaaggatttaccaagaatgaatcagtctcagtttattcagttttcaaagaccctctataacttatttcatgaggaccctgaagaag

SEQ ID NO: 303504 - DNA, 120 bp, Artificial Sequence
  ENSG00000133138_26 (sequence is synthesized)
aatcattatatcaagccattgctgttgtaaccagccttttactcaggatggaagaagttggaaggaaactacatagccctacatcatcagccaaaggattctctggtactgtctgtggtt

SEQ ID NO: 303505 - DNA, 120 bp, Artificial Sequence
  ENSG00000133138_27 (sequence is synthesized)
ctggaggacccagtgaggaaaaaacagggagccacttggagaaagatccttgttcctttagggaggaacctcagtggtcatttgcatttgaacagattcttgcatcgctgttgaatgaac

SEQ ID NO: 303506 - DNA, 120 bp, Artificial Sequence
  ENSG00000133138_28 (sequence is synthesized)
cagcattggtgaggttttttgagaaacccatagatgtaaaagccaagctggaaaatgcaagaatttctcagttaaggtctagaaccaagatgtaaatccctaggaattgcctatcataga

SEQ ID NO: 303507 - DNA, 120 bp, Artificial Sequence
  ENSG00000133138_29 (sequence is synthesized)
caagtttactaacattcctgtagctgtcagtttgattcctgtgagtagggctcagggatttatcttgttaccaatgtgtctgaaggccaaaatatatatccagaagcacaatgcatcatt

SEQ ID NO: 303508 - DNA, 120 bp, Artificial Sequence
  ENSG00000133138_30 (sequence is synthesized)
cctttgttgttgataatgggctttgttagcactttttaaaacaaacaaacaaacaaaacaaaaaagcaaaccacatttgttatctcaaattttgatgatattctcaaatacaaatatact

SEQ ID NO: 303509 - DNA, 120 bp, Artificial Sequence
  ENSG00000133138_31 (sequence is synthesized)
tttttatatttcacaatatatgcaatatcaggggaatatgctaaatgttaccaccagagggcacaagcatatcacttttagtaaggaaattactagcttgtgttgctatttacatatgaa

SEQ ID NO: 303510 - DNA, 120 bp, Artificial Sequence
  ENSG00000133138_32 (sequence is synthesized)
ttactgattattttgaaaagacggtgttatgcttgggtgttagtgaggctgatatgtcatgtcaatcgataaaccctactttccaaattatctaaaagattaccatttggggcccttgtt

SEQ ID NO: 303511 - DNA, 120 bp, Artificial Sequence
  ENSG00000133138_33 (sequence is synthesized)
ttcaagttatctaactgaaatattattaatttttttaagttaatctcattcagtcttctagtaataaatgcttttttaagtaccttctacagtcttcctacctgaggggttcagaggctg

SEQ ID NO: 303512 - DNA, 120 bp, Artificial Sequence
  ENSG00000133138_34 (sequence is synthesized)
ctgactcacactgctaactctgttactgacaaaagcaaatcaataactctaaattctgggctgatataaagaaaaaaacaatattggatttggatttaatctgggtaaaatcagccttct

SEQ ID NO: 303513 - DNA, 120 bp, Artificial Sequence
  ENSG00000133138_35 (sequence is synthesized)
gagaagggctaagaaacagttcaattaactgtataggtctttcattagaccgagacatcactagaaattctgggcactgctgtttgtggtatttgtctcagagtagcttatgactgtttt

SEQ ID NO: 303514 - DNA, 120 bp, Artificial Sequence
  ENSG00000133138_36 (sequence is synthesized)
ggttctagctttagattttggattttcaccagtcatgtgttaatttacattagatagtaaagaatggctacactaagactgaattatcttattagtctggcaagcatataaagtatactt

SEQ ID NO: 303515 - DNA, 120 bp, Artificial Sequence
  ENSG00000133138_37 (sequence is synthesized)
gtatgtaatgattgccaaggtaacagaattgctgacatctgtctaaaaagttttgactatccaatttagatgtgtaatttctatatactttatgctgtttatatttcagtcattacacca

SEQ ID NO: 303516 - DNA, 120 bp, Artificial Sequence
  ENSG00000133138_38 (sequence is synthesized)
agtccatttagagataatgggctttgttagcactttcaaaaaaaaaaaaagcaaaccatacttgtccactgtcctgtgctattcctaccaaggacaatttattaatcaattgacttagaa

SEQ ID NO: 303517 - DNA, 120 bp, Artificial Sequence
  ENSG00000133138_39 (sequence is synthesized)
aatagggggagaaatcattcattggagcttctttctttagaaaagactttggttataagccttttgacttttctagatgtgaaaccatgaaagggcagacctccttcagagtgactcaag

SEQ ID NO: 303518 - DNA, 120 bp, Artificial Sequence
  ENSG00000133138_40 (sequence is synthesized)
aggtctccctttcttggagggagttggtacagtcagcctttgggaagaatccactgtgaacaaagcttaacacatggggcttcatcgctcatagaatatgttattttcaaagaagttcaa

SEQ ID NO: 303519 - DNA, 120 bp, Artificial Sequence
  ENSG00000133138_41 (sequence is synthesized)
gaattttcaagttgagcctttgaaaatcccataaattggttttagctaaacacttactagtagtgtctttaaattatttaatcaaccttgtcttttcaaggaaattaccacttaaagaga

SEQ ID NO: 303520 - DNA, 120 bp, Artificial Sequence
  ENSG00000133138_42 (sequence is synthesized)
tagttggtaaataaacatctatgccttttctcagaaatgatttgctgaactatgtccatattttacagcttagataatagtttatatggaaactattatacatctgctattgtgcaatga

SEQ ID NO: 303521 - DNA, 120 bp, Artificial Sequence
  ENSG00000133138_43 (sequence is synthesized)
ttgttaaattatactgaagtagctctagaaagacacatgtatacaaggcactattgtacacactttgctgaatattttgtcagttgtatttacaaagaaaggtactttcttaagagcata

SEQ ID NO: 303522 - DNA, 120 bp, Artificial Sequence
  ENSG00000133138_44 (sequence is synthesized)
tatgttattaatatttgatatgattttaaagtcagaatagtacagattgctgagtattatactttaggctagattaattaaaattgaatactgaaagagattttttgagttgcaaaaagt

SEQ ID NO: 303523 - DNA, 120 bp, Artificial Sequence
  ENSG00000133138_45 (sequence is synthesized)
ttataaatgcaaagcaaaaagaaaacatttattttctgagtctgcaggagaaacaaactaaacattatagttttatagctgctatcttgttaaccaaacaggttgttcataatattaaaa

SEQ ID NO: 303524 - DNA, 120 bp, Artificial Sequence
  ENSG00000133138_46 (sequence is synthesized)
atcttacgtagttgtgttaaactgaaccagttcattataccttatgcattaaattaaatatgttataaggtggctttacttgtctttataaaaataaatatatctactaaacatgaaaaa

SEQ ID NO: 303525 - DNA, 120 bp, Artificial Sequence
  ENSG00000133138_47 (sequence is synthesized)
cgtcgaattattggttcagatgattttatgccactagtaagaatccaaggacaatgtgttattggggagaagtagaaaaaggaaaatctggggtagcacctggcatgctctttctccaat

SEQ ID NO: 303526 - DNA, 120 bp, Artificial Sequence
  ENSG00000133138_48 (sequence is synthesized)
tttctactacttactcctattccccaaattctcccatcaaggaggaaatgaactctgagacagaagatgagttttcctcaaagcttgaccaggatataagtggatgccttattgggcaaa

SEQ ID NO: 303527 - DNA, 120 bp, Artificial Sequence
  ENSG00000133138_49 (sequence is synthesized)
gcagagggtaaccaattagaaggccctggcttctcttgattgatagctgagaactcatcagagggatcagtgctttctctgtgtattgctggagtctgaaagtgtgactctcatgtcact

SEQ ID NO: 303528 - DNA, 120 bp, Artificial Sequence
  ENSG00000133138_50 (sequence is synthesized)
gattcatttctgaagtgttaaattcagaataaatttttgataatcaaaatgaacttagagaactttgttgtttggcattgtcaagagtgaagaattctaattatttgtgtatttatcttg

SEQ ID NO: 303529 - DNA, 120 bp, Artificial Sequence
  ENSG00000133138_51 (sequence is synthesized)
tgttatgctagatattaaactccctgaacatgagactatttcattaattggtatagctcttataatacctagtacaggtctctgcatataataaagactcaataaataactcttcaaatg

SEQ ID NO: 303530 - DNA, 120 bp, Artificial Sequence
  ENSG00000133138_52 (sequence is synthesized)
cttcaactcaatatcatgatattagcacagaggtaattaattatacagcaatcaaatcatttggaaaaaaaggtgtgtgtttagtgtagcccattcttcaagaggaattcatagtacctt

SEQ ID NO: 303531 - DNA, 120 bp, Artificial Sequence
  ENSG00000133138_53 (sequence is synthesized)
tcctatttatgcccaggggttttttttaaagatagaatctaagaaattatattgtctaactcacatccttaagcagaagtgagaattaaggactttattcatttttaggaacccatacat

SEQ ID NO: 303532 - DNA, 120 bp, Artificial Sequence
  ENSG00000133138_54 (sequence is synthesized)
tataaaattactataatttgatctttcttttactctatttgctgtttaccatataaatataccttgtactttcacatagtttggtttttaagaagtcaaaatatatttgagaattcagtg

SEQ ID NO: 303533 - DNA, 120 bp, Artificial Sequence
  ENSG00000133138_55 (sequence is synthesized)
aggcctcgaaaaaggactcctcttactgttgcaaagacatagcaattttaaacctgtctggatatcttttatttaatatcttataggtcagccttatttacataatctggccaaaagcaa

SEQ ID NO: 303534 - DNA, 89 bp, Artificial Sequence
  ENSG00000133138_56 (sequence is synthesized)
ttataggtcagccttatttacataatctggccaaaagcaaaatagtggtatatctgtttactagtaaaatattagagaggacagagaaa

SEQ ID NO: 303535 - DNA, 120 bp, Artificial Sequence
  ENSG00000133138_57 (sequence is synthesized)
agtgctgcagatacattttgagatttggacaattgaagctgacttaactcttttattgaaagataattttctcagatactactcacattggcatactgtaatctctctttatcccaaatg

SEQ ID NO: 303536 - DNA, 120 bp, Artificial Sequence
  ENSG00000133138_58 (sequence is synthesized)
tattttttctttaagaaaaatctctgtaaggactctatgggctagaaaagttttaaaataaatttattagtttgttatatgaagtgatacagatttgatttatctcttgtaaagtcctta

SEQ ID NO: 303537 - DNA, 120 bp, Artificial Sequence
  ENSG00000133138_59 (sequence is synthesized)
aatctttttaaagttgcgtgttgtatcacaagatgtgaaattgagccttcaagaattggatgaactttatgtcatctttaaggtactgttgttcttctttaaatgaaaaataatgctttt

SEQ ID NO: 303538 - DNA, 120 bp, Artificial Sequence
  ENSG00000133138_60 (sequence is synthesized)
ttttagcagaattgtatcacagccattctaattatttttatctttattttagcagacatggtttttaaaatcttccaaaattactttttctaattagtaactttccttttttatttattt

SEQ ID NO: 303539 - DNA, 120 bp, Artificial Sequence
  ENSG00000133142_0 (sequence is synthesized)
gcacgggcgcagatgtaggcaccggtccgagtgcctgccctctgtccccgcggctgggtctcgtctgctccggttcctgggctcctaattcttggtccagcttcttccaggaaaaggagg

SEQ ID NO: 303540 - DNA, 120 bp, Artificial Sequence
  ENSG00000133142_1 (sequence is synthesized)
ggaaatctcgacatggaaaaactctacagtgaaaatgaaggaatggcttcaaaccaaggaaagatggaaaatgaagaacagccacaagacgagagaaagccagaagtaacttgtactctg

SEQ ID NO: 303541 - DNA, 120 bp, Artificial Sequence
  ENSG00000133142_2 (sequence is synthesized)
gaagacaagaagttagaaaacgagggaaagacagaaaacaagggcaaaacaggagatgaggaaatgttaaaggataaaggaaagccagagagtgagggagaggcaaaagaaggaaagtca

SEQ ID NO: 303542 - DNA, 120 bp, Artificial Sequence
  ENSG00000133142_3 (sequence is synthesized)
cccagctgaggatgatgtacccaggaaagccaaaagaaaaactaataaggggctggctcattacctcaaggagtataaagaggccatacatgatatgaatttcagcaatgaggacatgat

SEQ ID NO: 303543 - DNA, 120 bp, Artificial Sequence
  ENSG00000133142_4 (sequence is synthesized)
aagagaatttgacaatatggctaaggtgcaggatgagaagagaaaaagcaaacagaaattgggggcgtttttgtggatgcaaagaaatttacaggaccccttctaccctagaggtccaag

SEQ ID NO: 303544 - DNA, 120 bp, Artificial Sequence
  ENSG00000133142_5 (sequence is synthesized)
ggaattcaggggtggctgcagggccccacgaagggacattgaagacattccttatgtgtagtgtccctggcaggcatttaccaggccatgtgctttaacgttacggtaatactttacttt

SEQ ID NO: 303545 - DNA, 120 bp, Artificial Sequence
  ENSG00000133142_6 (sequence is synthesized)
aggcatccctcctgttgctagcagccttttgacctatctgcaatgcagtgttctcagtaggaaatgttcatctgttacatggaaaaaatgttgatggtgcattgtaaaattaaaaaacac

SEQ ID NO: 303546 - DNA, 120 bp, Artificial Sequence
  ENSG00000133142_7 (sequence is synthesized)
gggctgcggcattcacgtgatctgcacgggcgcagatgtaggcaccggtccgagtgcctgccctctgtccccgcggctgggtctcgtctgctccggttcctgggctcctaattcttggtc

SEQ ID NO: 303547 - DNA, 120 bp, Artificial Sequence
  ENSG00000133142_8 (sequence is synthesized)
cagcttcttccaggtcagtgtgcgggccttccacgctgccagcggaacactggaatggcggaaggggaacgggtctgcgcgtctgttgttcccagcgctctgcgaagcctgaaaaggagg

SEQ ID NO: 303548 - DNA, 120 bp, Artificial Sequence
  ENSG00000133142_9 (sequence is synthesized)
cagtggttatctctgggtgattttttctgttcttttttgttcatctgtccatttttctcctaaaaacagatttctttagtcataaaaataataaaatataaagtattggaaaacagtgaa

SEQ ID NO: 303549 - DNA, 120 bp, Artificial Sequence
  ENSG00000133142_10 (sequence is synthesized)
gcaccggtccgagtgcctgccctctgtccccgcggctgggtctcgtctgctccggttcctgggctcctaattcttggtccagcttcttccaggcacatcctcttctctgccctccgtcca

SEQ ID NO: 303550 - DNA, 120 bp, Artificial Sequence
  ENSG00000133142_11 (sequence is synthesized)
ttttggagccggagatggtgggctggggccgccccagtagtgagacagtggaagtaaaccccatctgccgttcccgtgcgtagagaaaaacgttgaccgcgaggctggggaggagagttg

SEQ ID NO: 303551 - DNA, 120 bp, Artificial Sequence
  ENSG00000133142_12 (sequence is synthesized)
cctctgaggaagaagggcacagagacccaaaattagtttggaaagcatcctgatttggtgcccgaggcctggaaagaaatggcggctggggtgcggcggaggtaggggaggaaaacgttg

SEQ ID NO: 303552 - DNA, 120 bp, Artificial Sequence
  ENSG00000133142_13 (sequence is synthesized)
gatgagaagggcctggactcaggaaagggaaccgcgtccgtgtgagcccgctgagcgcgcagaccctgcccctgtctcctgtctgtctgcaggtctgcgcgtctgttgttcccagcgctc

SEQ ID NO: 303553 - DNA, 120 bp, Artificial Sequence
  ENSG00000133142_14 (sequence is synthesized)
ttggtctaagacatgggctgacaaactttttccataaagggccagaaagtaaatatttcaggctttgtgggatatctatttatgatttattttactcctagtattatttcatcttttata

SEQ ID NO: 303554 - DNA, 120 bp, Artificial Sequence
  ENSG00000133142_15 (sequence is synthesized)
caggttattaaggttagtattgctgcataacaaattactccaaaatttaatcatttatattcaagaagagttcagctgctaggttcttattttgggactctcatgatgctgaggtcaaga

SEQ ID NO: 303555 - DNA, 120 bp, Artificial Sequence
  ENSG00000133142_16 (sequence is synthesized)
tgccagctggaggccaggcgccgcagctcacgcctgtaatcccagcgttttgggaggccaggggcctcccaaattcaaaaggaagagacaaagtccacatctgtcaatgcgaagaatgga

SEQ ID NO: 303556 - DNA, 120 bp, Artificial Sequence
  ENSG00000133142_17 (sequence is synthesized)
aaggtcacatatcatatgtggagcgggacataacaacttcggaaattaaatctcttccccaggtcagtgtgcgggccttccacgctgccagcggaacactggaatggcggaaggggaacg

SEQ ID NO: 303557 - DNA, 120 bp, Artificial Sequence
  ENSG00000133142_18 (sequence is synthesized)
ggtacggcagggggaaaggctgggggtggggtcgggtcgagtcgagggaagctggcccgagtgtggacagagatggcggtctgcgcgtctgttgttcccagcgctctgcgaagcctgaaa

SEQ ID NO: 303558 - DNA, 120 bp, Artificial Sequence
  ENSG00000133142_19 (sequence is synthesized)
aaggaggagcaacctgtccagaatccccgcaggtccgtgaaagtacggggctgcatggacaggggcccacaagggttgagagtgtggagggcccggccagggccgaattggggcctttcc

SEQ ID NO: 303559 - DNA, 120 bp, Artificial Sequence
  ENSG00000133142_20 (sequence is synthesized)
cattcccccacccacatgaacacacaccttaccaggctgaaccagtgcagagaaagtggcagagcctgtcaggcaatggctggctcacgtgtgtgggaggagtggcgggctacgtggtgg

SEQ ID NO: 303560 - DNA, 120 bp, Artificial Sequence
  ENSG00000133169_0 (sequence is synthesized)
actcgtgtctcgctaccagctccccgctgccctgcgctcggcgggctggcatccggcccgggggaaagcggaccagcccttctgcaggtctgcggggccaagtgtcccggcggcgcacct

SEQ ID NO: 303561 - DNA, 120 bp, Artificial Sequence
  ENSG00000133169_1 (sequence is synthesized)
cgtggcgagaatcgggagaaggaggagactacaaggataggcccaggagtaatggagtccaaagagaaacgagcagtaaacagtctcagcatggaaaatgccaaccaagaaaatgaagaa

SEQ ID NO: 303562 - DNA, 120 bp, Artificial Sequence
  ENSG00000133169_2 (sequence is synthesized)
aaggagcaagttgctaataaaggggagcccttggccctccctttggatgctggtgaatactgtgtgcctagaggaaatcgtaggcggttccgcgttaggcagcccatcctgcagtataga

SEQ ID NO: 303563 - DNA, 120 bp, Artificial Sequence
  ENSG00000133169_3 (sequence is synthesized)
gtgagacagctgatggaaaagctgagggaaaagcagttgagtcatagtctgcgggcagtcagcactgacccccctcaccatgaccatcatgatgagttttgccttatgccctgaatcctg

SEQ ID NO: 303564 - DNA, 120 bp, Artificial Sequence
  ENSG00000133169_4 (sequence is synthesized)
atggtttccctaaagttattacggaaacagacccctgctttcgaatttacatgttcatgatgtgcccttgttgtaaacctttacctgtcacttgtttacgtgggtctcctattaccagct

SEQ ID NO: 303565 - DNA, 120 bp, Artificial Sequence
  ENSG00000133169_5 (sequence is synthesized)
tctaattgaatattgtgtttttgaaccagtctgtaagatttttgttagcagaagaattttacctattgcatggaaagatgctcattatagtgaagttaataaagcacctttaaaaagcaa

SEQ ID NO: 303566 - DNA, 120 bp, Artificial Sequence
  ENSG00000133193_0 (sequence is synthesized)
ggtgcggttgggatggtgccactgcgcagccgcgagagggcggtaccacggcggcagcgacatgggggggcgcggagcagacgccggaagtagtggtggtacgggtccgactgaggggta

SEQ ID NO: 303567 - DNA, 120 bp, Artificial Sequence
  ENSG00000133193_1 (sequence is synthesized)
ctcgccaccggctgcgtccacccgagcggctgcgagagccaaggcccgagggggtgggcgtggcggccgccgaaacacaaccccctctgttccctctcttcgcggagcggcgccgcgtag

SEQ ID NO: 303568 - DNA, 120 bp, Artificial Sequence
  ENSG00000133193_2 (sequence is synthesized)
cttccatccgccagctgccatgagcgagcgcctccgtcccaggaaaaggagaaggaatggcaacgaagaagacaaccatcttcccccccagaccaaaagaagtagcagaaaccctgtctt

SEQ ID NO: 303569 - DNA, 120 bp, Artificial Sequence
  ENSG00000133193_3 (sequence is synthesized)
tcaggattcctgggacacagagtcttcaggcagtgacagtggtgggagcagcagcagcagcagcagcagcatcaatagcccggacagggccagcgggccggaaggcagcttgagccagac

SEQ ID NO: 303570 - DNA, 120 bp, Artificial Sequence
  ENSG00000133193_4 (sequence is synthesized)
catggccggatccagccctaacacgcctcagcccgtgcccgagcagtccgcgctgtgccaaggcctctacttccacatcaaccagaccctgagggaggcccacttccacagcctacagca

SEQ ID NO: 303571 - DNA, 120 bp, Artificial Sequence
  ENSG00000133193_5 (sequence is synthesized)
ccgagggcggcctctgacatgatgtgccggcagtttcttgccttctgtgaagggacagcgctgtgcagatttgatatttcaacttacaacttgttttaaaagaaaaattgcacacgaaaa

SEQ ID NO: 303572 - DNA, 120 bp, Artificial Sequence
  ENSG00000133193_6 (sequence is synthesized)
atgcctgttggcttttcagtctatatttgaaataacaggttaacaggcagttgtttacttgtggttttgctgcactattgcaatttcaaaggggctttgaagcaattttttataggattc

SEQ ID NO: 303573 - DNA, 120 bp, Artificial Sequence
  ENSG00000133193_7 (sequence is synthesized)
ttttgagggagggtatcaaatctatgtcaaggtagtggtttgaggaaaactcattctgtgtgttgaatccatagtatgtcccattcagactgatttccaaatctgtcaactagaaactct

SEQ ID NO: 303574 - DNA, 120 bp, Artificial Sequence
  ENSG00000133193_8 (sequence is synthesized)
actttatgtaaagggccttttaaaaatgcgggatcttcaattttttttattcaataaactagtaaagagtatctagtttccatgaaaaaacataagtttttttccaaaatataggaagct

SEQ ID NO: 303575 - DNA, 120 bp, Artificial Sequence
  ENSG00000133193_9 (sequence is synthesized)
tgattcagtcttgcactgaaattaactgccatactacctctcagtatgtagatgttctattgaaagtactctctcctgtgtaacaggagaacaatcagatccaattcagactgtcagtga

SEQ ID NO: 303576 - DNA, 120 bp, Artificial Sequence
  ENSG00000133193_10 (sequence is synthesized)
agcacactccctaataatagtctctactctttgttatatatttgtatttccagagagaatgtcttttagattcttgtatacccagataacttctgtgtcactattccaccagagtctgca

SEQ ID NO: 303577 - DNA, 120 bp, Artificial Sequence
  ENSG00000133193_11 (sequence is synthesized)
gtaaagtaatatgtaatgactttttgtcctacaaacttggtcagtcagcagcttacatgatctcattgacaattccaccttgtagtgtcaacaattaaggtgttgttgaacgctgataaa

SEQ ID NO: 303578 - DNA, 120 bp, Artificial Sequence
  ENSG00000133193_12 (sequence is synthesized)
atgtaagctacctgaactgatgtctaaagcaacaagtattgtgaaattttgggacaaggattaacttgatgcttaaagtaacccccaacagtaactagggggccacattccatcagtgaa

SEQ ID NO: 303579 - DNA, 120 bp, Artificial Sequence
  ENSG00000133193_13 (sequence is synthesized)
actggaaagattggtgtggctgagaatcagatgagcagaggcacctttagaagaaataatgtggtagtatttatttagggagagacagatgtgttgccatgttacttagtcatactagag

SEQ ID NO: 303580 - DNA, 120 bp, Artificial Sequence
  ENSG00000133193_14 (sequence is synthesized)
agccagccaagtttgaataatgaaggtgcagacgtgttgtcttcttcactgacaagctgtctgaacaaggagccaggaactgtcgggtcaccagctgtggagcgtgccggggggacaacc

SEQ ID NO: 303581 - DNA, 120 bp, Artificial Sequence
  ENSG00000133193_15 (sequence is synthesized)
tgccattggatgtagagaaaagtgccttagagttggcctgagccctcctgcccactcgccctccgcgcgacgccactcggagtccacacggcacacacaagcggagctgagaagcacgat

SEQ ID NO: 303582 - DNA, 120 bp, Artificial Sequence
  ENSG00000133193_16 (sequence is synthesized)
ggctctagtcagaggactttgctgtcggtccagatttgaagaggacacggaacagcatgagcctttgtgacaaaactagaatttggaaatgaggactgtcttgggaaaagggtagacaca

SEQ ID NO: 303583 - DNA, 120 bp, Artificial Sequence
  ENSG00000133193_17 (sequence is synthesized)
ggcacttctctccacagcctgctaacctaatgtgggcagaactgaaagatcactgcagtggaaactgttctggaagaggctgcaacatagcccatgcttagggactggatggtttttgca

SEQ ID NO: 303584 - DNA, 120 bp, Artificial Sequence
  ENSG00000133193_18 (sequence is synthesized)
agagctttttttttttttaaactaccatctcccaacttttaaagccagatacttgacaaggattttagatcttaatgggttcgatggtagggaatacggaaaggatacactgctaatatt

SEQ ID NO: 303585 - DNA, 120 bp, Artificial Sequence
  ENSG00000133193_19 (sequence is synthesized)
gtgtctaacaataaagcaaacaactcgatgctgtaagaagacaagctgtttgagctttcaaacacacatgcacacagcacaattcagaaatacccaggaggattcctgcaggcttaacag

SEQ ID NO: 303586 - DNA, 120 bp, Artificial Sequence
  ENSG00000133193_20 (sequence is synthesized)
ttggcatcgtactgaaatgaaacgtgtattaacaagaaaatgtcaaacttttggggaaacaaattttctgttacttcccacccaactaaaagggaagataaaaccatcatcaccagaaca

SEQ ID NO: 303587 - DNA, 120 bp, Artificial Sequence
  ENSG00000133193_21 (sequence is synthesized)
aaacagattttctccaaacaagtacaatgatagtgccgggttggcagttaactctttcaccctactaaattcaagagctcatctccaccctgtcctgtatattttctacatttctattaa

SEQ ID NO: 303588 - DNA, 120 bp, Artificial Sequence
  ENSG00000133193_22 (sequence is synthesized)
gaggctacttggtagtgtcagcgggcatcttttacaccttctagtagctcaagctagtaaaaccttgtacttctctattgcgccgccattaaaagcagcattagtgcattttgtcattca

SEQ ID NO: 303589 - DNA, 120 bp, Artificial Sequence
  ENSG00000133193_23 (sequence is synthesized)
gatgcttggaactgactatcagatttgggctccagagataactgtccctcgggactctccattaatgcctttacatcagggacacaatgatgattctgggcttctgctttcttttcttga

SEQ ID NO: 303590 - DNA, 120 bp, Artificial Sequence
  ENSG00000133195_0 (sequence is synthesized)
gaagtgactgcgggagtggagccggcgagagagtggcagcgggggctgatggaagtgcagtgggggctggagagggcaccctactgtatccagcatgctccaaggccacagctctgtgtt

SEQ ID NO: 303591 - DNA, 120 bp, Artificial Sequence
  ENSG00000133195_1 (sequence is synthesized)
ccaggccttgctggggaccttcttcacctgggggatgacagcagctggggcagctctcgtgttcgtattctctagtggacagaggcggatcttagatggaagtcttggctttgctgcagg

SEQ ID NO: 303592 - DNA, 120 bp, Artificial Sequence
  ENSG00000133195_2 (sequence is synthesized)
ggtcatgttggcagcttcctattggtctcttctggccccagcagttgagatggccacgtcctctgggggcttcggtgcctttgccttcttccctgtggctgttggcttcacccttggagc

SEQ ID NO: 303593 - DNA, 120 bp, Artificial Sequence
  ENSG00000133195_3 (sequence is synthesized)
ggcttttgtctacttggctgacctcctgatgcctcacttgggtgcagcagaagacccccagacgaccctggcactgaacttcggctctacgttgatgaagaagaagtctgatcctgaggg

SEQ ID NO: 303594 - DNA, 120 bp, Artificial Sequence
  ENSG00000133195_4 (sequence is synthesized)
tcccgcgctgctcttccctgagagtgaactttccatccggatagacaagagtgagaatggtgaggcatatcagagaaagaaggcggcagccactggccttccagagggtcctgctgtccc

SEQ ID NO: 303595 - DNA, 120 bp, Artificial Sequence
  ENSG00000133195_5 (sequence is synthesized)
tgtgccttctcgagggaatctggcacagcccggcggcagcagctggaggaggatcgcactgctcatcttggccatcactatacacaacgttccagagggtctcgctgttggagttggatt

SEQ ID NO: 303596 - DNA, 120 bp, Artificial Sequence
  ENSG00000133195_6 (sequence is synthesized)
tggggctatagaaaagacggcatctgctacctttgagagtgccaggaatttggccattggaatcgggatccagaatttccccgagggcctggctgtcagccttcccttgcgaggggcagg

SEQ ID NO: 303597 - DNA, 120 bp, Artificial Sequence
  ENSG00000133195_7 (sequence is synthesized)
cttctccacctggagagctttctggtatgggcagctgagcggcatggtggagcccctggccggggtctttggtgcctttgccgtggtgctggctgagcccatcctgccctacgctctggc

SEQ ID NO: 303598 - DNA, 120 bp, Artificial Sequence
  ENSG00000133195_8 (sequence is synthesized)
ctttgctgccggtgccatggtctacgtggtcatggacgacatcatccccgaagcccagatcagtggtaatgggaaactggcatcctgggcctccatcctgggatttgtagtgatgatgtc

SEQ ID NO: 303599 - DNA, 120 bp, Artificial Sequence
  ENSG00000133195_9 (sequence is synthesized)
actggacgttggcctgggctagggctgagacgcttcggaccccgggaaaggccatacgaagaaacagcagtggttggcttctatgggacaacaagcttctttcttcacattaaaactttt

SEQ ID NO: 303600 - DNA, 120 bp, Artificial Sequence
  ENSG00000133195_10 (sequence is synthesized)
ttccttcctctcttcttcatctcattatcctgattgactctgattataatagaaccatttttactttgctttgagggagatttttgatttaatggggaattttaaggtgtcatggaaata

SEQ ID NO: 303601 - DNA, 120 bp, Artificial Sequence
  ENSG00000133195_11 (sequence is synthesized)
gcctcccaactcctcaaggtcacctatagaagcgagctaccaaaagacgtctcctaagcattttggtggcctagtgactcagggcagagtggccagcacacctctcatccgcccctcctg

SEQ ID NO: 303602 - DNA, 120 bp, Artificial Sequence
  ENSG00000133195_12 (sequence is synthesized)
ctccatcactgctgagcctctccccatctagaatgttggaactggagcatcataaagatagcaagctaccttccaaggccgagccagcccagagaggagcatgtcttcctttacctcccc

SEQ ID NO: 303603 - DNA, 120 bp, Artificial Sequence
  ENSG00000133195_13 (sequence is synthesized)
ctaaggagatactacatgggagggggacacagaaaaagggaaggaaattggctagtctggctttttttttttttttttttaaaggcaaagattgacattattgaaggaaaggggatgagg

SEQ ID NO: 303604 - DNA, 120 bp, Artificial Sequence
  ENSG00000133195_14 (sequence is synthesized)
acaactgtgaactcacagtgagccctgtggaaagaagagacagacagagtgtgggtttgttcggaggcctctgctgtcaatggattccaggagcaaggccatttgtcgcgctttccaaat

SEQ ID NO: 303605 - DNA, 120 bp, Artificial Sequence
  ENSG00000133195_15 (sequence is synthesized)
ttcttaggcatttattttgataagtttatagccatcatgtttctaagagacttggagacaccagcaaactgctagaactcaaactcttcaattactcaaagaaggagccatttcagttaa

SEQ ID NO: 303606 - DNA, 120 bp, Artificial Sequence
  ENSG00000133195_16 (sequence is synthesized)
ctcaagtgaatgaaagagttttggaatctgctgtgggtccttccctgttgaccatttggtaacttataatctgacaaaaactcttgagctgcaacaggccttgccagagggctcaggatg

SEQ ID NO: 303607 - DNA, 120 bp, Artificial Sequence
  ENSG00000133195_17 (sequence is synthesized)
ggaaaggaagaaggggataggaaaagaagaggtaattttacatttcccctttaaagtaaattttagccaactcatcattctgaaatgtccctataaagaatgagtcgaactagaccagaa

SEQ ID NO: 303608 - DNA, 120 bp, Artificial Sequence
  ENSG00000133195_18 (sequence is synthesized)
gccagcctactccttcttacatagcttctccaacaggggtagcaatgacctgtccacttcaaacacagataaggcctgccatcctcattggttaaaggcacacgtgagactttcagtggg

SEQ ID NO: 303609 - DNA, 120 bp, Artificial Sequence
  ENSG00000133195_19 (sequence is synthesized)
ctctgctgagaaggaaggcagcccaggagtcaggtatgcaggcattgcattgtcagtgtctgctctcagagtttacacattcaattgcttccaagggtgaatctcctgctctgtgaatgc

SEQ ID NO: 303610 - DNA, 120 bp, Artificial Sequence
  ENSG00000133195_20 (sequence is synthesized)
tatcagaccccaaaggccaaccttgggctgggtctatgtacgttcttccgaagcactgatgatcaaaattgaagacacattcagaggtttgattggttgagattaactggtgtggtggtt

SEQ ID NO: 303611 - DNA, 120 bp, Artificial Sequence
  ENSG00000133195_21 (sequence is synthesized)
ggtgtatgtatgttttatttttatgtctttgtatgtagttctacataatgcaaattgtgctttctgatggacaagacctcataactgtgattaatatcaataaaaaggggatgttgtgga

SEQ ID NO: 303612 - DNA, 120 bp, Artificial Sequence
  ENSG00000133195_22 (sequence is synthesized)
cttgaacttggtttcctgccctggacttaacctgccttcctgacaccgactgacttcacctctccccatgccctcatgtcatgtcttatctgttcctattgtggatccgggattccttgg

SEQ ID NO: 303613 - DNA, 120 bp, Artificial Sequence
  ENSG00000133195_23 (sequence is synthesized)
cctgtcccttggcctgctgctgatcatatctccactctgacccacaatatagattttcaaggtaaaaatttttttaaaaaatgtttcactctgttgtctagtaaaatacatgaatgtgta

SEQ ID NO: 303614 - DNA, 120 bp, Artificial Sequence
  ENSG00000133195_24 (sequence is synthesized)
caaagcactagaaaattctgtggccagtccagaaagacaaaacatagcaccagtgtggcaagaagtggagctaatgcagcattaatgatcctggatgtttctgcactttcttattagaat

SEQ ID NO: 303615 - DNA, 120 bp, Artificial Sequence
  ENSG00000133195_25 (sequence is synthesized)
ttaccattcacctctaagcttcagctctgcagtgccccctatttgggattattgagcaatgtttaacgggaaagaaatgatgtctgttctccagccagtgactctgagtaatgatatcag

SEQ ID NO: 303616 - DNA, 120 bp, Artificial Sequence
  ENSG00000133195_26 (sequence is synthesized)
gtgtgcgggagggaagcaggaagtgactgcgggagtggagccggcgagagagtggcagcgggggctgatggaagtgcagtgggggctggagagggcaccctagttgggtggtccgcggac

SEQ ID NO: 303617 - DNA, 120 bp, Artificial Sequence
  ENSG00000133195_27 (sequence is synthesized)
cacgctttgagtagcgaggcattagagaacttttccacagtcctctccgcccagacctgaatccttctgctggattccccctcgtggagttagggcatgtgtgtgcagctccactaaggc

SEQ ID NO: 303618 - DNA, 120 bp, Artificial Sequence
  ENSG00000133195_28 (sequence is synthesized)
ttgaactgactcttggaagcggaacaacaggtttaaaagggggagaaaggaaataaagaaaacaaacctgtatcaatcagccgggaatgcccatgtgctgctgtggcagctgtatccagc

SEQ ID NO: 303619 - DNA, 120 bp, Artificial Sequence
  ENSG00000133195_29 (sequence is synthesized)
actgcgggagtggagccggcgagagagtggcagcgggggctgatggaagtgcagtgggggctggagagggcaccctagtgagttggcttttctctccttcggtgcctttggttgggctcg

SEQ ID NO: 303620 - DNA, 120 bp, Artificial Sequence
  ENSG00000133195_30 (sequence is synthesized)
agtgctgagattataggtgtaagccactgtacccaacctaccactattcctgaatactctcatcaccctgtaaagaaaccccacactctttgagcagtacctctgaggaaaaaaagaaac

SEQ ID NO: 303621 - DNA, 120 bp, Artificial Sequence
  ENSG00000133195_31 (sequence is synthesized)
tgcatgcttattagcagtcactccccattcctccctccctccagcccctgcactaatctactttgtctctacagtttccctaaccgggactgactttcatttaaacggtatcatgtaata

SEQ ID NO: 303622 - DNA, 120 bp, Artificial Sequence
  ENSG00000133195_32 (sequence is synthesized)
ctggtggtaggatgaatagtgagagaaatgccagcactgtcctatccctccgaatcactcaccctactactgcatggagctaaactggcatctggcccagcaccttcatttctcatttgt

SEQ ID NO: 303623 - DNA, 120 bp, Artificial Sequence
  ENSG00000133195_33 (sequence is synthesized)
gtgcgggagggaagcaggaagtgactgcgggagtggagccggcgagagagtggcagcgggggctgatggaagtgcagtgggggctggagagggcaccctagcggtgtgtgggggtacccg

SEQ ID NO: 303624 - DNA, 120 bp, Artificial Sequence
  ENSG00000133195_34 (sequence is synthesized)
ggattcctgggagcagaggcagctacaaatccagctgctcccaggcccctcccacttgctctggctgttagctggacctctggaacttgactgggaatctggttaacttgcagcaggtct

SEQ ID NO: 303625 - DNA, 120 bp, Artificial Sequence
  ENSG00000133195_35 (sequence is synthesized)
gaaaaagtttgaccaggaaaggtgactgtgtgtcgctatccaaatctatgttcggcttgtacagaaggtgtatctgcagaaggctaaggaccatatatgaatttggccattggaatcggg

SEQ ID NO: 303626 - DNA, 120 bp, Artificial Sequence
  ENSG00000133195_36 (sequence is synthesized)
gcttggaccaagagcagatccgtccccagcatcactcaggcctgacttcctaggcctgaccttggaagttttgggacagttgtctacgatttccaatgtcattatccacagtgtggggga

SEQ ID NO: 303627 - DNA, 120 bp, Artificial Sequence
  ENSG00000133195_37 (sequence is synthesized)
ggaagtgatacacatcaccttctctgtgccgtgatgggaagtaacagcctttgtcttgacgcatgagcccacgtgtatgctgttgctctgttgagcatctggggtggtgtggctctgagg

SEQ ID NO: 303628 - DNA, 120 bp, Artificial Sequence
  ENSG00000133195_38 (sequence is synthesized)
cctgcccagagccctgcaaacagtccctgtctgtccccatccctttcccccttcctccccacgttcatactctgactgcgtgagtgagtatctggcgcccctgcctcccctcctaccctt

SEQ ID NO: 303629 - DNA, 120 bp, Artificial Sequence
  ENSG00000133195_39 (sequence is synthesized)
tccagagtgtggtcacatcccatgacctgtgatccttgcctcatgagaaggggcccgtctgtgaggcctggcctcggagtcccttttgcctcagtctgagggagatactgagtttctcag

SEQ ID NO: 303630 - DNA, 120 bp, Artificial Sequence
  ENSG00000133195_40 (sequence is synthesized)
atgaaaacatcaccaggactgtctttcttgagttgaacttgatcttttaaattcattcctttgagttgtacttagctaaaatgtggatatccctatacattatattgttttgacctctaa

SEQ ID NO: 303631 - DNA, 120 bp, Artificial Sequence
  ENSG00000133216_0 (sequence is synthesized)
gggaagcgcagccatggctctgcggaggctgggggccgcgctgctgctgctgccgctgctcgccgccgtggaagaaacgctaatggactccactacagcgactgctgagctgggctggat

SEQ ID NO: 303632 - DNA, 120 bp, Artificial Sequence
  ENSG00000133216_1 (sequence is synthesized)
ggtgcatcctccatcagggtgggaagaggtgagtggctacgatgagaacatgaacacgatccgcacgtaccaggtgtgcaacgtgtttgagtcaagccagaacaactggctacggaccaa

SEQ ID NO: 303633 - DNA, 120 bp, Artificial Sequence
  ENSG00000133216_2 (sequence is synthesized)
gtttatccggcgccgtggcgcccaccgcatccacgtggagatgaagttttcggtgcgtgactgcagcagcatccccagcgtgcctggctcctgcaaggagaccttcaacctctattacta

SEQ ID NO: 303634 - DNA, 120 bp, Artificial Sequence
  ENSG00000133216_3 (sequence is synthesized)
tgaggctgactttgactcggccaccaagaccttccccaactggatggagaatccatgggtgaaggtggataccattgcagccgacgagagcttctcccaggtggacctgggtggccgcgt

SEQ ID NO: 303635 - DNA, 120 bp, Artificial Sequence
  ENSG00000133216_4 (sequence is synthesized)
catgaaaatcaacaccgaggtgcggagcttcggacctgtgtcccgcagcggcttctacctggccttccaggactatggcggctgcatgtccctcatcgccgtgcgtgtcttctaccgcaa

SEQ ID NO: 303636 - DNA, 120 bp, Artificial Sequence
  ENSG00000133216_5 (sequence is synthesized)
gtgcccccgcatcatccagaatggcgccatcttccaggaaaccctgtcgggggctgagagcacatcgctggtggctgcccggggcagctgcatcgccaatgcggaagaggtggatgtacc

SEQ ID NO: 303637 - DNA, 120 bp, Artificial Sequence
  ENSG00000133216_6 (sequence is synthesized)
catcaagctctactgtaacggggacggcgagtggctggtgcccatcgggcgctgcatgtgcaaagcaggcttcgaggccgttgagaatggcaccgtctgccgaggttgtccatctgggac

SEQ ID NO: 303638 - DNA, 120 bp, Artificial Sequence
  ENSG00000133216_7 (sequence is synthesized)
tttcaaggccaaccaaggggatgaggcctgtacccactgtcccatcaacagccggaccacttctgaaggggccaccaactgtgtctgccgcaatggctactacagagcagacctggaccc

SEQ ID NO: 303639 - DNA, 120 bp, Artificial Sequence
  ENSG00000133216_8 (sequence is synthesized)
cctggacatgccctgcacaaccatcccctccgcgccccaggctgtgatttccagtgtcaatgagacctccctcatgctggagtggacccctccccgcgactccggaggccgagaggacct

SEQ ID NO: 303640 - DNA, 120 bp, Artificial Sequence
  ENSG00000133216_9 (sequence is synthesized)
cgtctacaacatcatctgcaagagctgtggctcgggccggggtgcctgcacccgctgcggggacaatgtacagtacgcaccacgccagctaggcctgaccgagccacgcatttacatcag

SEQ ID NO: 303641 - DNA, 120 bp, Artificial Sequence
  ENSG00000133216_10 (sequence is synthesized)
tgacctgctggcccacacccagtacaccttcgagatccaggctgtgaacggcgttactgaccagagccccttctcgcctcagttcgcctctgtgaacatcaccaccaaccaggcagctcc

SEQ ID NO: 303642 - DNA, 120 bp, Artificial Sequence
  ENSG00000133216_11 (sequence is synthesized)
atcggcagtgtccatcatgcatcaggtgagccgcaccgtggacagcattaccctgtcgtggtcccagccggaccagcccaatggcgtgatcctggactatgagctgcagtactatgagaa

SEQ ID NO: 303643 - DNA, 120 bp, Artificial Sequence
  ENSG00000133216_12 (sequence is synthesized)
ggagctcagtgagtacaacgccacagccataaaaagccccaccaacacggtcaccgtgcagggcctcaaagccggcgccatctatgtcttccaggtgcgggcacgcaccgtggcaggtta

SEQ ID NO: 303644 - DNA, 120 bp, Artificial Sequence
  ENSG00000133216_13 (sequence is synthesized)
cgggcgctacagcggcaagatgtacttccagaccatgacagaagccgagtaccagacaagcatccaggagaagttgccactcatcatcggctcctcggccgctggcctggtcttcctcat

SEQ ID NO: 303645 - DNA, 120 bp, Artificial Sequence
  ENSG00000133216_14 (sequence is synthesized)
tgctgtggttgtcatcgccatcgtgtgtaacagaagacgggggtttgagcgtgctgactcggagtacacggacaagctgcaacactacaccagtggccacatgaccccaggcatgaagat

SEQ ID NO: 303646 - DNA, 120 bp, Artificial Sequence
  ENSG00000133216_15 (sequence is synthesized)
tcaaaattgagcaggtgatcggagcaggggagtttggcgaggtctgcagtggccacctgaagctgccaggcaagagagagatctttgtggccatcaagacgctcaagtcgggctacacgg

SEQ ID NO: 303647 - DNA, 120 bp, Artificial Sequence
  ENSG00000133216_16 (sequence is synthesized)
agaagcagcgccgggacttcctgagcgaagcctccatcatgggccagttcgaccatcccaacgtcatccacctggagggtgtcgtgaccaagagcacacctgtgatgatcatcaccgagt

SEQ ID NO: 303648 - DNA, 120 bp, Artificial Sequence
  ENSG00000133216_17 (sequence is synthesized)
tcatggagaatggctccctggactcctttctccggcaaaacgatgggcagttcacagtcatccagctggtgggcatgcttcggggcatcgcagctggcatgaagtacctggcagacatga

SEQ ID NO: 303649 - DNA, 120 bp, Artificial Sequence
  ENSG00000133216_18 (sequence is synthesized)
actatgttcaccgtgacctggctgcccgcaacatcctcgtcaacagcaacctggtctgcaaggtgtcggactttgggctctcacgctttctagaggacgatacctcagaccccacctaca

SEQ ID NO: 303650 - DNA, 120 bp, Artificial Sequence
  ENSG00000133216_19 (sequence is synthesized)
ccagtgccctgggcggaaagatccccatccgctggacagccccggaagccatccagtaccggaagttcacctcggccagtgatgtgtggagctacggcattgtcatgtgggaggtgatgt

SEQ ID NO: 303651 - DNA, 120 bp, Artificial Sequence
  ENSG00000133216_20 (sequence is synthesized)
cctatggggagcggccctactgggacatgaccaaccaggatgtaatcaatgccattgagcaggactatcggctgccaccgcccatggactgcccgagcgccctgcaccaactcatgctgg

SEQ ID NO: 303652 - DNA, 120 bp, Artificial Sequence
  ENSG00000133216_21 (sequence is synthesized)
actgttggcagaaggaccgcaaccaccggcccaagttcggccaaattgtcaacacgctagacaagatgatccgcaatcccaacagcctcaaagccatggcgcccctctcctctggcatca

SEQ ID NO: 303653 - DNA, 120 bp, Artificial Sequence
  ENSG00000133216_22 (sequence is synthesized)
acctgccgctgctggaccgcacgatccccgactacaccagctttaacacggtggacgagtggctggaggccatcaagatggggcagtacaaggagagcttcgccaatgccggcttcacct

SEQ ID NO: 303654 - DNA, 120 bp, Artificial Sequence
  ENSG00000133216_23 (sequence is synthesized)
cctttgacgtcgtgtctcagatgatgatggaggacattctccgggttggggtcactttggctggccaccagaaaaaaatcctgaacagtatccaggtgatgcgggcgcagatgaaccaga

SEQ ID NO: 303655 - DNA, 120 bp, Artificial Sequence
  ENSG00000133216_24 (sequence is synthesized)
ttcagtctgtggaggtttgacattcacctgcctcggctcacctcttcctccaagccccgccccctctgccccacgtgccggccctcctggtgctctatccactgcagggccagccactcg

SEQ ID NO: 303656 - DNA, 120 bp, Artificial Sequence
  ENSG00000133216_25 (sequence is synthesized)
ccaggaggccacgggccacgggaagaaccaagcggtgccagccacgagacgtcaccaagaaaacatgcaactcaaacgacggaaaaaaaaagggaatgggaaaaaagaaaacagatcctg

SEQ ID NO: 303657 - DNA, 120 bp, Artificial Sequence
  ENSG00000133216_26 (sequence is synthesized)
ggagggggcgggaaatacaaggaatattttttaaagaggattctcataaggaaagcaatgactgttcttgcgggggataaaaaagggcttgggagattcatgcgatgtgtccaatcggag

SEQ ID NO: 303658 - DNA, 120 bp, Artificial Sequence
  ENSG00000133216_27 (sequence is synthesized)
acaaaagcagtttctctccaactccctctgggaaggtgacctggccagagccaagaaacactttcagaaaaacaaatgtgaaggggagagacaggggccgcccttggctcctgtccctgc

SEQ ID NO: 303659 - DNA, 120 bp, Artificial Sequence
  ENSG00000133216_28 (sequence is synthesized)
tgctcctctaggcctcactcaacaaccaagcgcctggaggacgggacagatggacagacagccaccctgagaacccctctgggaaaatctattcctgccaccactgggcaaacagaagaa

SEQ ID NO: 303660 - DNA, 120 bp, Artificial Sequence
  ENSG00000133216_29 (sequence is synthesized)
tttttctgtctttggagagtattttagaaactccaatgaaagacactgtttctcctgttggctcacagggctgaaaggggcttttgtcctcctgggtcagggagaacgcggggaccccag

SEQ ID NO: 303661 - DNA, 120 bp, Artificial Sequence
  ENSG00000133216_30 (sequence is synthesized)
ctgaggatgggcaacccccaggtctgcagctccaggtacatatcacgcgcacagcctggcagcctggccctcctggtgcccactcccgccagcccctgcctcgaggactgatactgcagt

SEQ ID NO: 303662 - DNA, 120 bp, Artificial Sequence
  ENSG00000133216_31 (sequence is synthesized)
gactgccgtcagctccgactgccgctgagaagggttgatcctgcatctgggtttgtttacagcaattcctggactcgggggtattttggtcacagggtggttttggtttagggggtttgt

SEQ ID NO: 303663 - DNA, 120 bp, Artificial Sequence
  ENSG00000133216_32 (sequence is synthesized)
ttgttgggttgttttttgttttttggttttttttaatgacaatgaagtgacactttgacatttcctaccttttgaggacttgatccttctccaggaagaaggtgctttctgcttactgac

SEQ ID NO: 303664 - DNA, 120 bp, Artificial Sequence
  ENSG00000133216_33 (sequence is synthesized)
ttaggcaatacaccaagggcgagattttatatgcacatttctggatttttttatacggttttcattgacactcttccctcctcccacctgccaccaggcctcaccaaagcccactgccat

SEQ ID NO: 303665 - DNA, 120 bp, Artificial Sequence
  ENSG00000133216_34 (sequence is synthesized)
ggggccatctgggccattcagagactggagtgagatttgggtgtggagggggaggcgccaaggtggaggagcttcccactccaggactgttgatgaaagggacagattgaggaggaagtg

SEQ ID NO: 303666 - DNA, 120 bp, Artificial Sequence
  ENSG00000133216_35 (sequence is synthesized)
ggctctgaggctgcagggctggaagtccttgcccacttcccactctcctgccccaatctatctagtacttcccaggcaaataggcccctttgaggctcctgagtgccctcagatggtcaa

SEQ ID NO: 303667 - DNA, 120 bp, Artificial Sequence
  ENSG00000133216_36 (sequence is synthesized)
aacccagttttccctctgggagcctaaaccaggctgcatcggaggccaggacccggatcattcactgtgataccctgccctccagagggtgcgctcagagacacgggcaagcatgcctct

SEQ ID NO: 303668 - DNA, 120 bp, Artificial Sequence
  ENSG00000133216_37 (sequence is synthesized)
tcccttccctggagagaaagtgtgtgatttctctcccacctccttccccccaccagacctttgctgggcctaaaggtcttggccatggggacgccctcagtctagggatctggccacaga

SEQ ID NO: 303669 - DNA, 120 bp, Artificial Sequence
  ENSG00000133216_38 (sequence is synthesized)
ctccctcctgtgaaccaacacagacacccaagcagagcaatcagttagtgaattgaatggaaataaacgctttagttataatatgacccctgttctctgtaagttccaagggagaccttg

SEQ ID NO: 303670 - DNA, 120 bp, Artificial Sequence
  ENSG00000133216_39 (sequence is synthesized)
gtacccttgggatgcacgtgacccaggtgctaagggttgctcttctaagcagcccttcctccctcaggcttccagaaagcccagggcagagaaaacacatggagaacgacagctccacgt

SEQ ID NO: 303671 - DNA, 120 bp, Artificial Sequence
  ENSG00000133216_40 (sequence is synthesized)
ggcctttctggccctggcttgtcaaaagcacaggcaacaaaggaagtgagttggaagtggctcagaactcagccttcgatgccctgggaatcagggtgagcccctgcaggtacataagta

SEQ ID NO: 303672 - DNA, 120 bp, Artificial Sequence
  ENSG00000133216_41 (sequence is synthesized)
gcagagaattgacgagagtgcactcggaagagggtctgagtgtcaggtgagctgtcatagtgggaacgtgagggtcttagagtgctcatgtacccccaggcacagccaactctggttttc

SEQ ID NO: 303673 - DNA, 120 bp, Artificial Sequence
  ENSG00000133216_42 (sequence is synthesized)
tctgtgcaaatgagctcttgctcacattaaaatcagaattgtccacgtggcaggaggaggcagggagatggatgtgccatggatatcgggtctggctgaggaaggggagccaaggagact

SEQ ID NO: 303674 - DNA, 120 bp, Artificial Sequence
  ENSG00000133216_43 (sequence is synthesized)
acctctcgggacctttcccagatccgaggagatggccagtgagaaagattcgggccacaggcagccagctagaagcgccacggtcagagtgaacatccagcacagcacagcccatcgtct

SEQ ID NO: 303675 - DNA, 120 bp, Artificial Sequence
  ENSG00000133216_44 (sequence is synthesized)
gtcactcacctgttccgggagcctgagctgcaaagggaaggaagggattagagagaagtgtgggccccccatggggacagcagggcaagccacagggaaagcattggcaggtttcccaca

SEQ ID NO: 303676 - DNA, 120 bp, Artificial Sequence
  ENSG00000133216_45 (sequence is synthesized)
cccactggccttcactttgtgccccaaaggtgccctgcgcgggtggcagctgtctcggcacacaaggtcaccttctggtgggagctgccctgatgctctttagattagttctgtctcccc

SEQ ID NO: 303677 - DNA, 120 bp, Artificial Sequence
  ENSG00000133216_46 (sequence is synthesized)
agcccaccccccaactgttctggggccccacatggggctggcagtcggtgcttcccgtcagatggcttcctgtcctaagccgctgagctggtgaccactagccagcatgtctgcccctcc

SEQ ID NO: 303678 - DNA, 120 bp, Artificial Sequence
  ENSG00000133216_47 (sequence is synthesized)
accctccagggccgaggtcctcagtggccatggccccctgcaaacctgcttcccagagcacaggtgctaccagacctctgtgtctccacttcagggtaacaaacagatgtcactgtgact

SEQ ID NO: 303679 - DNA, 120 bp, Artificial Sequence
  ENSG00000133216_48 (sequence is synthesized)
gtcccaggggtacaggcgctgctcacatctcttccacccccacccacccaccccacccgctaccggggcagtcgccccgccccaacctcttgcttgctgctcagcggggagtggcaggcc

SEQ ID NO: 303680 - DNA, 120 bp, Artificial Sequence
  ENSG00000133216_49 (sequence is synthesized)
atgttgccaagcgccttccacttacaccacccgctcacccaggcacacagctctgagccacccgctgcctggttactaatcctttcctggctcaacctccccaagtgccagcccccgcct

SEQ ID NO: 303681 - DNA, 120 bp, Artificial Sequence
  ENSG00000133216_50 (sequence is synthesized)
gcccagcagtgttaggggagtttccggctgctctgcacacagttggtactgcaggaaagaaagctgccttgtaaacacaggccagggcaccgtggaaatggggaccagctgctctgggag

SEQ ID NO: 303682 - DNA, 120 bp, Artificial Sequence
  ENSG00000133216_51 (sequence is synthesized)
ggtgcagctagcagagctgtgcagcgccaggctgggtaggagagagccatgctacccacccgcacccctactgctacgaagcccccagaatgggtcattgttggtgctcagcagtcctct

SEQ ID NO: 303683 - DNA, 120 bp, Artificial Sequence
  ENSG00000133216_52 (sequence is synthesized)
ccctcggggatgatatccaaaatatcaactgcgaagactcgggcagaccaatcagaatagatgatggcctgagtgctggaccagaggcctcagagcagggacccgggtggcggggcagta

SEQ ID NO: 303684 - DNA, 120 bp, Artificial Sequence
  ENSG00000133216_53 (sequence is synthesized)
ggagacacttaagggactcagggctatggctgtttactaaccagcagtgcctcttactcagatggcatcagctgaactttccccatcatttctagttggtccccaccctgccaccatcta

SEQ ID NO: 303685 - DNA, 120 bp, Artificial Sequence
  ENSG00000133216_54 (sequence is synthesized)
ggggcttctctgccaccaccttgtgagcagttgctagcctcacactcctctcccatcaggggctcatctccaaaaggctgggagctcccgccctgcccagttaatcctcctgcctcactg

SEQ ID NO: 303686 - DNA, 120 bp, Artificial Sequence
  ENSG00000133216_55 (sequence is synthesized)
aagcacaggaaggacccaggccccagaccatcacccaccccagggctgggccctgggccactcctggctcactccagggcccctgttgtttgaagatggtaccaaaggctggaagactct

SEQ ID NO: 303687 - DNA, 120 bp, Artificial Sequence
  ENSG00000133216_56 (sequence is synthesized)
tgctagggaagataacgtaaatgcattcaaaagacagggtaccacatgatgctagggaaagtgcgtcatgaccgcagggtagcagcctgctcctgtcactagggatgtgaatctggggag

SEQ ID NO: 303688 - DNA, 120 bp, Artificial Sequence
  ENSG00000133216_57 (sequence is synthesized)
acacttcccctcactgagccatctgtaaaatgagagcattggactgggtgaggcaggctgtgcaaaacacttatacaccttagtcccatgaggaaggagtattccccctgcatattttgg

SEQ ID NO: 303689 - DNA, 120 bp, Artificial Sequence
  ENSG00000133216_58 (sequence is synthesized)
ggggaaactgaggctcagggggatgaagtactttgctcagggtaacacagccaggaaggagcagagcaaggccatgagctttggatttttctgtttccaatgtctcctctaccgtgctca

SEQ ID NO: 303690 - DNA, 120 bp, Artificial Sequence
  ENSG00000133216_59 (sequence is synthesized)
attagatgatgagaaacagttggtgtctgatgctggccaataagagaaaagaaagctcaagtgggctggggctgtcagggagggcttcatggagaggctgtcttgaaaatgacagaggtc

SEQ ID NO: 303691 - DNA, 120 bp, Artificial Sequence
  ENSG00000133216_60 (sequence is synthesized)
aaaagaaaggtcactccaagacgcagctgccagaatggtccaacacagtgaggagttgtgtctggatgggccagtggaacgggggaagtgaaggttgatataagtggaggttgaggcagt

SEQ ID NO: 303692 - DNA, 120 bp, Artificial Sequence
  ENSG00000133216_61 (sequence is synthesized)
ttaggcgtgatgtacagtccagccacagcaggttcttgagcaggagggtagcatagtgagcatcaggttctaggaagaagcaccagttcagccatcagatggggcaggatgcctcccagc

SEQ ID NO: 303693 - DNA, 120 bp, Artificial Sequence
  ENSG00000133216_62 (sequence is synthesized)
tactcctctccccgagaaggaattgcccccggagcggccctcatttattccaggagaagccaggccctgctgcttcagtttccatcctcactgacgcagataatccaaagagtcacttca

SEQ ID NO: 303694 - DNA, 120 bp, Artificial Sequence
  ENSG00000133216_63 (sequence is synthesized)
gctgcttggaacagcagggttgggtcttgtgctacctgattcttaatttggctgatgtctaccccatttcctccaggcttctctagaggtggcaggggtggggtggggagaaagctgcca

SEQ ID NO: 303695 - DNA, 120 bp, Artificial Sequence
  ENSG00000133216_64 (sequence is synthesized)
gacaccaaaggagctgagcctggcgggggcgggcgtgcgggtgggcatgagaaattgctcaggaaacccatccctgccctggtcaccctagtcctggagagatcacccagacatgttgga

SEQ ID NO: 303696 - DNA, 120 bp, Artificial Sequence
  ENSG00000133216_65 (sequence is synthesized)
atgagtctggggtcctgtcttttccaataatgtgttatcctggggaaacccagagggaagttgagggagccccactgtgctgtgtgatgctacatacgcatgcgaatacaccaccgggtg

SEQ ID NO: 303697 - DNA, 120 bp, Artificial Sequence
  ENSG00000133216_66 (sequence is synthesized)
gccttgacccagccttctgcaaaatggcttctgccatcaaacttaaggtggagaatggtcttgcagctgccagtttttccttcagagaaactaaggtcagagtgttggctgcagaaaagg

SEQ ID NO: 303698 - DNA, 120 bp, Artificial Sequence
  ENSG00000133216_67 (sequence is synthesized)
acttggcctttgtcacataacaggaaagagagtcaactccgggcacaccccctcggaggctaatctcaggaggttggaaccacagggattgcaataatcgctgaatacttaccatatgcc

SEQ ID NO: 303699 - DNA, 120 bp, Artificial Sequence
  ENSG00000133216_68 (sequence is synthesized)
aggtgccaaagcattatcctctccactttatgagtgaggaaactgattcccagaggtgattcccagaagattccaaccaggccatctgtctgtagtccttccttcccacctcctgggatt

SEQ ID NO: 303700 - DNA, 120 bp, Artificial Sequence
  ENSG00000133216_69 (sequence is synthesized)
tctcaaaatgtttgccatcgcccacctgtatcagaatctcctgggctatttattgtttaacttgcagactcctgggcgccaccccaaccccctaaatcagaatccctggggttgggccca

SEQ ID NO: 303701 - DNA, 120 bp, Artificial Sequence
  ENSG00000133216_70 (sequence is synthesized)
agagtctccattttttgacaagctcctccaggagattcctccagacatggaaatcctcacttgactcttcccccataacaaactgccctgatgtctgcagagagagggtctgctgtagac

SEQ ID NO: 303702 - DNA, 120 bp, Artificial Sequence
  ENSG00000133216_71 (sequence is synthesized)
agggattaagaaaaagcaggacattttcagataggatgcccaaacccagacgcagattaggacccatgaagtagggggtagagctgaccctcaggaatgtgcccagacagagctaagctt

SEQ ID NO: 303703 - DNA, 120 bp, Artificial Sequence
  ENSG00000133216_72 (sequence is synthesized)
tcaggaaaattagaaagaccctcagacccagagtctgtctgagtttagcttcgcagcatgaaggctgccttgagaaagctgatataacaagaagcagcagaaatttaatactttggaggg

SEQ ID NO: 303704 - DNA, 120 bp, Artificial Sequence
  ENSG00000133216_73 (sequence is synthesized)
gcccagcaacccactcagggccaccctgggagaccccacagaccccaaggctatggtccagacctgttcactcaacacctggccaggcggggcctccagctggacctagagctacagatg

SEQ ID NO: 303705 - DNA, 120 bp, Artificial Sequence
  ENSG00000133216_74 (sequence is synthesized)
ccccaccaccactaccaagcccggctacccagaccaagacacggcttttcctggaggagagagagagcaaaggccctgtctctacccaagacctaacggcccctgttgaaggagagggag

SEQ ID NO: 303706 - DNA, 120 bp, Artificial Sequence
  ENSG00000133216_75 (sequence is synthesized)
caggagagggaggagggaggaggtcacagccaggaccacatacactcttgggggccctgctgagactgcaagagtcatgaattctaacgttccacaggtgaaagattccaagattctagg

SEQ ID NO: 303707 - DNA, 120 bp, Artificial Sequence
  ENSG00000133216_76 (sequence is synthesized)
attgcaaaaccccatcattctaagattccaatggaatgattccatgtttctaagattccatcacactatgattctatgctgctaattcttgaaatttcgagtctcattgttcgttgctgt

SEQ ID NO: 303708 - DNA, 120 bp, Artificial Sequence
  ENSG00000133216_77 (sequence is synthesized)
tccccagacctgtgggccctagcatttttttaaaagcacaaaaaaaaaagagcaagaaagagagaaagagatggggagggagacagctgaaaacagatactaagaaaagctccatccctt

SEQ ID NO: 303709 - DNA, 120 bp, Artificial Sequence
  ENSG00000133216_78 (sequence is synthesized)
ggatctgagttacagatgcaccttggcaagggccaaagaccctccttttgagtggggtgcagaacgtctttccctggtagagtggcagaattgcatgcatcaggccttcctgggggtaaa

SEQ ID NO: 303710 - DNA, 120 bp, Artificial Sequence
  ENSG00000133216_79 (sequence is synthesized)
aggggctggctgttccaggctacagctgagtaaagccccacacaggccacagtgcccactggctggtggacctaggaaccaagcagggccccactggctcagtctggggagggactcatc

SEQ ID NO: 303711 - DNA, 120 bp, Artificial Sequence
  ENSG00000133216_80 (sequence is synthesized)
tggggtggaatttccctccctgcagcaaggaagctgcagggccaggaatttgccttgggagacccccactgaggaatatttccgaagcagaaccccttcctattcagagccagagtctta

SEQ ID NO: 303712 - DNA, 120 bp, Artificial Sequence
  ENSG00000133216_81 (sequence is synthesized)
acactggacaaccacagggtgttgctgcaaactccagagccaggtgccttccctctgacatttgggacatagcttccatggccacacagccttcgcccccttccaagaccccccttgacc

SEQ ID NO: 303713 - DNA, 120 bp, Artificial Sequence
  ENSG00000133216_82 (sequence is synthesized)
tttctaatcttagtcactgccttccagagctgggaggccacacggcagaggtgcctgtgaatcactccgtcatcagcctggccgctttcccctctgtggagagggactctgatgggcagg

SEQ ID NO: 303714 - DNA, 120 bp, Artificial Sequence
  ENSG00000133216_83 (sequence is synthesized)
gggcaccaagttgagcctctgaggctggcccagcataggccaggcagggacattcactcacaaccagcctttttggactctagagaagagtaattaccacttggtcatgcccagccccca

SEQ ID NO: 303715 - DNA, 120 bp, Artificial Sequence
  ENSG00000133216_84 (sequence is synthesized)
aatcataatcatagctgctatttcttgagtgccagcaatgtgccaggcaccgtgcccaactttttatacacaatgtcttgcctaatcctcacacctctgtgagacaggtacaattattac

SEQ ID NO: 303716 - DNA, 120 bp, Artificial Sequence
  ENSG00000133216_85 (sequence is synthesized)
tcccattccacagactagcaaactcagagacgtgacatggtggctctcccaggtcacacagccagtaagtggcctctgaccccagtaccccccacttaatcaccatgctatgctgctacc

SEQ ID NO: 303717 - DNA, 120 bp, Artificial Sequence
  ENSG00000133216_86 (sequence is synthesized)
agtggtacacactcagcccctctccactgtcagatcctttgccagtcaaatcccagatccccgggggggcactgtggcaccctctttgagcgtggcctccctggagctgctgtcagagcc

SEQ ID NO: 303718 - DNA, 120 bp, Artificial Sequence
  ENSG00000133216_87 (sequence is synthesized)
atgggctgtgggagtgagtgtgcacactccttctcctgaagtgtctgccccagcctgagctatgcagaccggagctctcaaccagggtatggggctgtctggcagggtttcccagaaccc

SEQ ID NO: 303719 - DNA, 120 bp, Artificial Sequence
  ENSG00000133216_88 (sequence is synthesized)
tgtttcctgtggtcataaatatgggttttcctgacaatgttgggaggtcagggactgatacagctggggttccaaccgccgtgggtcagacctggctcctccggaccccactgctgtgac

SEQ ID NO: 303720 - DNA, 120 bp, Artificial Sequence
  ENSG00000133216_89 (sequence is synthesized)
caaggaaatctcaccagctgtgtccaagatcaaccctgaccctgttactccaatgcctttgtaggagtatttttagcagaaccgtttttttcccaaaataaatgtgaattgtaaaaatta

SEQ ID NO: 303721 - DNA, 120 bp, Artificial Sequence
  ENSG00000133216_90 (sequence is synthesized)
ttaaggaacttgcccaaggtcacagaggtcatatatactagagccaggatttgaacccaagaagtctggctccagcttgtgatcttaacctccatgctataaagcctgtaataacattgc

SEQ ID NO: 303722 - DNA, 120 bp, Artificial Sequence
  ENSG00000133216_91 (sequence is synthesized)
gcactggccttggagtcaggctgcctggctcccaatccagctccgctccttcccactgtgagacctcaggcaggtgccttgacctctctggatctcacttttctggtctggaggatacac

SEQ ID NO: 303723 - DNA, 120 bp, Artificial Sequence
  ENSG00000133216_92 (sequence is synthesized)
ccagcaatctcagtgaaatgcaacagtcacatccctttccctaccacgaccctttcatcttgacctcagtggcttgatgttgggaaaaactgggtttccaaaaagctgcacttatgaagt

SEQ ID NO: 303724 - DNA, 120 bp, Artificial Sequence
  ENSG00000133216_93 (sequence is synthesized)
tctggagggtgaggaatagatcatgtcccaatagggaagcagggaccaaggggcaagatggccaactttggagtcacctgtggactgatacccaggtctgcctgccacctacaagctctg

SEQ ID NO: 303725 - DNA, 120 bp, Artificial Sequence
  ENSG00000133216_94 (sequence is synthesized)
tgaccttggtcaaatcatagcacctccctcagcctccgttttctcacctacaaactgggggttggtaggaaggttgagggagatataaaggaagcgggtgcttagaaaatgcaagctggc

SEQ ID NO: 303726 - DNA, 66 bp, Artificial Sequence
  ENSG00000133216_95 (sequence is synthesized)
atggtgaaaccccgtctctactaaaatgcaaaaaattagccacgcaaggtggcataggaggtagag

SEQ ID NO: 303727 - DNA, 120 bp, Artificial Sequence
  ENSG00000133216_96 (sequence is synthesized)
cctgggtgacagagcgagactctgtctcgaaaaagaaagaaaatgtaagctggcttccccctcccaatagcaggggagagaaggccccctagggaccctgattccgactcaagtgctctt

SEQ ID NO: 303728 - DNA, 120 bp, Artificial Sequence
  ENSG00000133216_97 (sequence is synthesized)
tcaagtgctcttccacctcacaccatagtcgctccctccagctgtggctgcctgcccactccccactccccactccccagtactccttgctttgccatcttcctcccggggaagcccagg

SEQ ID NO: 303729 - DNA, 120 bp, Artificial Sequence
  ENSG00000133226_0 (sequence is synthesized)
agcgatctccgagcgaggcggcaagatggacgcgggatttttccgcggaacaagtgcagaacaggataatcggttcagcaacaaacagaagaaactactgaagcagctgaaatttgcaga

SEQ ID NO: 303730 - DNA, 120 bp, Artificial Sequence
  ENSG00000133226_1 (sequence is synthesized)
atgcctagaaaaaaaggtggacatgagcaaagtaaatttggaggttataaagccttggataacaaaaagagtaacggaaatccttgggtttgaagatgatgttgtgattgagtttatatt

SEQ ID NO: 303731 - DNA, 120 bp, Artificial Sequence
  ENSG00000133226_2 (sequence is synthesized)
caaccagctggaagtgaagaatccagactccaaaatgatgcaaatcaacctgactggatttttgaatggaaaaaatgctcgagaatttatgggagaactgtggcccctgctgctaagtgc

SEQ ID NO: 303732 - DNA, 120 bp, Artificial Sequence
  ENSG00000133226_3 (sequence is synthesized)
acaagaaaacatcgcgggaatcccttctgctttcctagaactgaagaaagaagaaataaaacaaagacagattgaacaagaaaaactggcatctatgaaaaagcaagatgaagacaaaga

SEQ ID NO: 303733 - DNA, 120 bp, Artificial Sequence
  ENSG00000133226_4 (sequence is synthesized)
taaaagagataaggaagaaaaagaaagcagcagagaaaaaagggagcggtctcgtagcccaagaagacgcaaatccagatctccttcccctagaagacgatcttcccctgtcaggagaga

SEQ ID NO: 303734 - DNA, 120 bp, Artificial Sequence
  ENSG00000133226_5 (sequence is synthesized)
gagaaagcgcagtcattctcgatctccccgtcacagaaccaagagccggagtccttcccctgctccagaaaagaaggaaaaaactccagagctcccagaaccttcagtgaaagtaaaaga

SEQ ID NO: 303735 - DNA, 120 bp, Artificial Sequence
  ENSG00000133226_6 (sequence is synthesized)
accttcagtacaagaggctacttctactagtgacattctgaaagttcccaaacctgaacctataccagagcctaaagaaccttctccggaaaaaaattccaaaaaagaaaaggagaagga

SEQ ID NO: 303736 - DNA, 120 bp, Artificial Sequence
  ENSG00000133226_7 (sequence is synthesized)
gaagacccgaccacgatctcggtcacgctccaaatcaagatcccggacgcggtcccgctctccttctcacactcgacctagacggcgccatagatcccgatcaagatcgtattcacctag

SEQ ID NO: 303737 - DNA, 120 bp, Artificial Sequence
  ENSG00000133226_8 (sequence is synthesized)
aaggcggccaagcccaagaaggcggccatctcctcgaagaagaactccgccaagaagaatgcctcctccaccaaggcatagaaggagtagatctccagtaagacgaagaagacgttcgtc

SEQ ID NO: 303738 - DNA, 120 bp, Artificial Sequence
  ENSG00000133226_9 (sequence is synthesized)
agcatccttgtctgggagtagctcatcatcctcttcatctcgttcacggtcaccaccaaagaagcctcccaagaggacatccagcccccctcggaaaactcgtaggttatctccttcagc

SEQ ID NO: 303739 - DNA, 120 bp, Artificial Sequence
  ENSG00000133226_10 (sequence is synthesized)
aagtcctccaaggcgaaggcacaggccatcacctcctgcaactccaccacccaaaactcggcattcccctacaccccagcagtcaaaccgtacaagaaaaagtcgtgtttctgtgtctcc

SEQ ID NO: 303740 - DNA, 120 bp, Artificial Sequence
  ENSG00000133226_11 (sequence is synthesized)
agggagaacttcaggtaaagtgacaaaacataaaggtactgagaaaagagaatccccttcaccagcaccgaagcctagaaaagtagagttatctgaatcggaagaagataaaggtggcaa

SEQ ID NO: 303741 - DNA, 120 bp, Artificial Sequence
  ENSG00000133226_12 (sequence is synthesized)
aatggctgcagcagattctgtgcagcagagacgccaatacagacgacaaaaccagcagtcttcatctgactctggctcctcctcctcctcagaagatgaacgacccaagagatcccatgt

SEQ ID NO: 303742 - DNA, 120 bp, Artificial Sequence
  ENSG00000133226_13 (sequence is synthesized)
gaagaatggtgaggttggcaggcggcggagacattccccttcccggagtgcttctccatcaccacgaaagcgccaaaaagagacttcccctcgtggtagacggaggagaagtccatcccc

SEQ ID NO: 303743 - DNA, 120 bp, Artificial Sequence
  ENSG00000133226_14 (sequence is synthesized)
accacccaccagaaggcgacggtctccttctcccgcccctcctcctcgacggcgcaggactcccacaccaccaccacgacgaaggactccttctcctcccccacgtcggcgctcaccttc

SEQ ID NO: 303744 - DNA, 120 bp, Artificial Sequence
  ENSG00000133226_15 (sequence is synthesized)
tcctccaatacagaggagatactctccttctccacctccaaagagaagaacggcttcacctcctccccctcctaaacgaagagcatcaccatctccaccaccaaagcggcgggtctccca

SEQ ID NO: 303745 - DNA, 120 bp, Artificial Sequence
  ENSG00000133226_16 (sequence is synthesized)
ttctccacctcccaaacaaagaagctccccagtcaccaagagacgttcaccttcattatcatccaagcataggaaagggtcttccccaagccgctctacccgggaggcccgatcaccaca

SEQ ID NO: 303746 - DNA, 120 bp, Artificial Sequence
  ENSG00000133226_17 (sequence is synthesized)
accaaacaaacggcattcgccctcaccacggcctcgagctcctcagacctcctcaagtcctccacccgttcgaagaggagcgtcgtcatcaccccaaagaaggcagtccccgtctccaag

SEQ ID NO: 303747 - DNA, 120 bp, Artificial Sequence
  ENSG00000133226_18 (sequence is synthesized)
tactaggcccattaggagagtctccaggactccggaacctaaaaagataaaaaaggctgcttccccaagcccacagtctgtaagaagggtctcatcctcccgatctgtctccgggtctcc

SEQ ID NO: 303748 - DNA, 120 bp, Artificial Sequence
  ENSG00000133226_19 (sequence is synthesized)
tgagccagcagctaaaaagcccccagcacctccatcccccgtccagtctcagtcaccgtctacaaactggtcaccagctgtaccggtcaaaaaggccaaaagcccaacaccgagcccatc

SEQ ID NO: 303749 - DNA, 120 bp, Artificial Sequence
  ENSG00000133226_20 (sequence is synthesized)
accgccaagaaattcagatcaggaaggaggtggaaagaaaaagaagaaaaagaaggacaagaaacacaaaaaggataagaagcacaagaagcacaaaaaacacaagaaggaaaaggctgt

SEQ ID NO: 303750 - DNA, 120 bp, Artificial Sequence
  ENSG00000133226_21 (sequence is synthesized)
ggctgcagctgctgcagctgctgtgacccctgcagccattgcagctgccacaaccacattagcacaggaagagccagtggcagcgccagagccgaagaaggagactgaaagtgaagctga

SEQ ID NO: 303751 - DNA, 120 bp, Artificial Sequence
  ENSG00000133226_22 (sequence is synthesized)
agataaccttgatgatttagaaaagcacctgcgtgaaaaggccctgagatcaatgaggaaggcccaagtgtccccacagtcttagggggaaatgtttgttatgatgtaaattttatttgg

SEQ ID NO: 303752 - DNA, 120 bp, Artificial Sequence
  ENSG00000133226_23 (sequence is synthesized)
tttgtacgcagttcaatttcaaaattgctaaaatgtgtttgagctttagactataacatttgttgtaataattgctaggttgaagttcaacatgtaaaaaaagggggcatggatttacat

SEQ ID NO: 303753 - DNA, 120 bp, Artificial Sequence
  ENSG00000133226_24 (sequence is synthesized)
tgcaaaaggtgtccacagtgtattagtgacattctttcattgacagctgacataattcattgagtgaaatattttaagccaaaaaaaaattccctttttaaaaaagggggtttaaatact

SEQ ID NO: 303754 - DNA, 120 bp, Artificial Sequence
  ENSG00000133226_25 (sequence is synthesized)
gttggcatttttatggttcctttaaatgccctagctattcccagaggggtttttttgtttgtttttttggttttgattttctttttgtttttctttcttcttcttatttttttcatttga

SEQ ID NO: 303755 - DNA, 120 bp, Artificial Sequence
  ENSG00000133226_26 (sequence is synthesized)
gtcttagctcccatttaagttatgcttctgaccttgtatggtctgtaagcttgcccagaaataagaccactgttttgaactaccacaaaagtataaatgaatattttaatgccacaatct

SEQ ID NO: 303756 - DNA, 120 bp, Artificial Sequence
  ENSG00000133226_27 (sequence is synthesized)
ttcctgttgcctgtggagtctctgctgaaatgaatcaggattcgagctctaggatgagacagaaaatgaaagcatgttgtttgccaggacactgtgggtttatattgatgtgtaacaagt

SEQ ID NO: 303757 - DNA, 88 bp, Artificial Sequence
  ENSG00000133226_28 (sequence is synthesized)
aaggcaatgagctagtcccagaaaggatccttcagttacatacaatttgtttaatgaaatgtcatggctctgttcatatttttgtctt

SEQ ID NO: 303758 - DNA, 120 bp, Artificial Sequence
  ENSG00000133226_29 (sequence is synthesized)
gtttaatgaaatgtcatggctctgttcatatttttgtcttgttcttccaattggtatatacaactttcagagcctcttgtatttggaaggctggaagggcccagactttggaatagtgtc

SEQ ID NO: 303759 - DNA, 89 bp, Artificial Sequence
  ENSG00000133226_30 (sequence is synthesized)
ttggtttcactgtttttgaaactaaagctatataaagcttgtggattaaacagaataaatttctaaatttaaaaattttgccactctta

SEQ ID NO: 303760 - DNA, 120 bp, Artificial Sequence
  ENSG00000133226_31 (sequence is synthesized)
gcgacggtggccggaaaatggcggcgggaatgggccgggatggtacctcgctgcccgcctgcctggcggggcctgcaggccgagcgccgtgcgtgccgccgggtcctggggcctagcgga

SEQ ID NO: 303761 - DNA, 120 bp, Artificial Sequence
  ENSG00000133226_32 (sequence is synthesized)
aaaaagtaaaaatattttatgcttttccattaggaatacttacatagctgtttatatttggaagcttccccccacccccatataaaaggaataagttatgaatatgagcttttaagtcaa

SEQ ID NO: 303762 - DNA, 120 bp, Artificial Sequence
  ENSG00000133226_33 (sequence is synthesized)
acttgaggtactatttacagatcttattccattttttgggatagtttctgtggtataagttaaatgccacaggcttttacttggttcttagcagttattaatttgtttttgaggggtatg

SEQ ID NO: 303763 - DNA, 120 bp, Artificial Sequence
  ENSG00000133226_34 (sequence is synthesized)
cttccaaaactaaacttgagtaagacattgaacatttcttgtgtgtgatgtaaggaactgacattactaatcttacataagaagcatcattaacagaatagatagaggattatggggctt

SEQ ID NO: 303764 - DNA, 120 bp, Artificial Sequence
  ENSG00000133226_35 (sequence is synthesized)
tgtacagtgtagttggtggttttctcatgtgaagagagatggctgttctcaatgctgaatgttttttcctttttgtctagggctgcttccccaagcccacagtctgtaagaagggtctca

SEQ ID NO: 303765 - DNA, 120 bp, Artificial Sequence
  ENSG00000133226_36 (sequence is synthesized)
cacagcagagtgagtgtcccaatgtcgctctgacccaactcccttgatgatgcagtgtgtgtttggagataaatgatataacattaaactcaaggtggttgagttgcagtagggagtcgg

SEQ ID NO: 303766 - DNA, 120 bp, Artificial Sequence
  ENSG00000133226_37 (sequence is synthesized)
aagcaagccaagggaacatctttctctacaggggacttggcgattccaaacccccaaggttccaagaagaaactgaagacacctggaatctaatccagactccaaaatgatgcaaatcaa

SEQ ID NO: 303767 - DNA, 120 bp, Artificial Sequence
  ENSG00000133226_38 (sequence is synthesized)
gattaacaggctgctctgatgcttttggtagagtgagagagaatttggtaatctgttagagattatattgctgagaagctactagggaagactatttgtaaaatagtaaggactatatat

SEQ ID NO: 303768 - DNA, 120 bp, Artificial Sequence
  ENSG00000133226_39 (sequence is synthesized)
atgtctaagcccctatggtagacttaaaaaatactaatttaaatgagttttaggttggttgatttgttggttggttggttttgaagtaacctgtttttcttcctgtcgtgtctttttgca

SEQ ID NO: 303769 - DNA, 83 bp, Artificial Sequence
  ENSG00000133226_40 (sequence is synthesized)
aacatggtgaaactccgtctctacaaaaatattttaaaaaattagccaggcatgattaggggagaattgcttgaacctgggag

SEQ ID NO: 303770 - DNA, 72 bp, Artificial Sequence
  ENSG00000133226_41 (sequence is synthesized)
acacacacacaaaaaaaagaaaaaaaattaactataattcttcttggtttagtggtagacggaggagaagtc

SEQ ID NO: 303771 - DNA, 120 bp, Artificial Sequence
  ENSG00000133226_42 (sequence is synthesized)
ggcatctatgaaaaagcaagatgaagacaaagataaaagagataaggaagaaaaagaaagcagcagagaaaaaagggagcggtctcgtagcccaagaagtgagactattgttaggttcac

SEQ ID NO: 303772 - DNA, 120 bp, Artificial Sequence
  ENSG00000133226_43 (sequence is synthesized)
aagggttattttacaatgtttgttgtgaaaagaattcactttgtaaacaactattaaggctggaagtttagtgaaggtgcatagttttgaaagctacacaggtgaaaaatcaaacttatt

SEQ ID NO: 303773 - DNA, 120 bp, Artificial Sequence
  ENSG00000133226_44 (sequence is synthesized)
gtttgtaattttgctgttacatgttaagttactttgacagcaattttctaatgataatgtgatttatgatttaaaaggcctgaaccaaaatggaagttattccttgcgtctgaagtatag

SEQ ID NO: 303774 - DNA, 120 bp, Artificial Sequence
  ENSG00000133226_45 (sequence is synthesized)
aacaacaaaaaacacaaacaggaaagagcaattgggtaaagctgtacactgctcttttaaaatactattatgagatggacatttatgtgaagcatgaggggcaattctgatttgattgga

SEQ ID NO: 303775 - DNA, 120 bp, Artificial Sequence
  ENSG00000133226_46 (sequence is synthesized)
tattgtttttaaaggaactaaggtctttgtagctgcatgtcagctagtcatcagttacattttagagacaggatttttgtttatacttaaacttcagacaaattggcagcatataattgt

SEQ ID NO: 303776 - DNA, 120 bp, Artificial Sequence
  ENSG00000133226_47 (sequence is synthesized)
tcctttatacatgagataatatgatgatataactgatgtttaagaacattcttattgtaagacagtttctgttttgccacagcaacccaaaggacagttaagatatgtaccatatgacct

SEQ ID NO: 303777 - DNA, 120 bp, Artificial Sequence
  ENSG00000133226_48 (sequence is synthesized)
ttttgcatatataccaatgtgaatttacttttacattaatcatttcccccaaagagttcaccctatgttttgacagaacagttggcatttcaactgataaggtatttctagttttaaaat

SEQ ID NO: 303778 - DNA, 120 bp, Artificial Sequence
  ENSG00000133226_49 (sequence is synthesized)
gttttttaaatgatgattgaagatagattttattggagaaatgctttactgatgtgtattttagtgcattttaaaaacctaagtatctggtagtattccccttgtagtgagcatgagatt

SEQ ID NO: 303779 - DNA, 120 bp, Artificial Sequence
  ENSG00000133226_50 (sequence is synthesized)
aaagtttagaactttttaagacaattctttttttgtggttgtgtactcattattgcttgttcgtcttttgcaatttagataaatgatataacattaaactcaaggtggttgagttgcagt

SEQ ID NO: 303780 - DNA, 120 bp, Artificial Sequence
  ENSG00000133226_51 (sequence is synthesized)
gagctgtgcttgttatacagaccttgttgcttgaccaacggatttagcatttaaaaacccaattatttttgagaaatcttgacctcttagcactttgtggacagttgagaatttgaggca

SEQ ID NO: 303781 - DNA, 120 bp, Artificial Sequence
  ENSG00000133226_52 (sequence is synthesized)
ttgttataatagattttccttatataaaactcaggcctttagcttagccctcagaagttacagactgcatgcataacttgttagttttcataactggacaatagatattttatgcaaagc

SEQ ID NO: 303782 - DNA, 120 bp, Artificial Sequence
  ENSG00000133226_53 (sequence is synthesized)
tatctgtagtgttagggagcagtttatgtactttttccgtttctcattgggggaaaatttccaggcaagcaaatacttttcttgttagtaaatactagaatttgtggatgtttcatgatg

SEQ ID NO: 303783 - DNA, 120 bp, Artificial Sequence
  ENSG00000133226_54 (sequence is synthesized)
tcactgatgttctgtaattgtgatgaaatttgataacttgggattatttgagaatttggttaactccttcaagtatttggatgtggttggatttttgtttgctttttagggtttctgttt

SEQ ID NO: 303784 - DNA, 120 bp, Artificial Sequence
  ENSG00000133226_55 (sequence is synthesized)
tgttttgtttttgctttattggtggttattaataattaatttagaattggtaaattttaaaccaccatgtcatatatgtgtgcatgattagaaaaataaaccaaactattatagcagtaa

SEQ ID NO: 303785 - DNA, 120 bp, Artificial Sequence
  ENSG00000133226_56 (sequence is synthesized)
gtgctgggattacagatatgagccactgagcccagccaaggccacagtatcttaatctctagccatttgctttaacacctacatgaatgtcaagcaactggtaatgtggtcttaacccta

SEQ ID NO: 303786 - DNA, 120 bp, Artificial Sequence
  ENSG00000133226_57 (sequence is synthesized)
ctgaaaaatggagaagcaacaaataaaagtgtcatgcaattattgaccatggaataaatatacagaagaccaagagaaattcagaaatcataaagcatcgatattgcactccagcctggg

SEQ ID NO: 303787 - DNA, 120 bp, Artificial Sequence
  ENSG00000133226_58 (sequence is synthesized)
caacaagaatgaaacatcatctcaaaaaaacaaaagtttactcttttatctcaaaagtttattgtacgatgtaaatcttcagctttggcaaaatactattttaaacactcaaccattctg

SEQ ID NO: 303788 - DNA, 120 bp, Artificial Sequence
  ENSG00000133226_59 (sequence is synthesized)
gctgattttgattttttgcacatttggtcatccccttctgcttgaagattaagtatagggtaagagctaagactctgaaggcagacagacttgggtggaatcccccattccagaatttaa

SEQ ID NO: 303789 - DNA, 120 bp, Artificial Sequence
  ENSG00000133243_0 (sequence is synthesized)
cggaggaggcggcgggcccgggggcggcggcgctgcagcgcgaggccgcgtacaactggcaggccagcaagcccaccgtgcaggagcgcttcgccttcctcttcaacaacgaggtgctgt

SEQ ID NO: 303790 - DNA, 120 bp, Artificial Sequence
  ENSG00000133243_1 (sequence is synthesized)
gcgacgtgcacttcctggtgggcaaggggctcagctcgcagcgcatccccgcgcacaggttcgtgctggccgtgggcagcgccgtctttgatgccatgttcaacgggggaatggccacaa

SEQ ID NO: 303791 - DNA, 120 bp, Artificial Sequence
  ENSG00000133243_2 (sequence is synthesized)
catccacggagattgagctgcccgacgtggaacccgctgccttcctcgcactgctcaagtttctctactcggacgaggtgcagattggcccggagacggtgatgaccacgctatacaccg

SEQ ID NO: 303792 - DNA, 120 bp, Artificial Sequence
  ENSG00000133243_3 (sequence is synthesized)
ccaagaagtacgcggtgccagcgctcgaggcccattgcgtggagttcctgaagaagaacctgcgagccgacaacgccttcatgctgctcacgcaggcgcgactcttcgatgaaccgcagc

SEQ ID NO: 303793 - DNA, 120 bp, Artificial Sequence
  ENSG00000133243_4 (sequence is synthesized)
tggccagcctgtgcctggagaacatcgacaaaaacactgcagacgccatcaccgcggagggcttcaccgacattgacctggacacgctggtggctgtcctggagcgcgacacactgggca

SEQ ID NO: 303794 - DNA, 120 bp, Artificial Sequence
  ENSG00000133243_5 (sequence is synthesized)
tccgtgaggtgcggctgttcaatgccgttgtccgctggtccgaggccgagtgtcagcggcagcagctgcaggtgacgccagagaacaggcggaaggttctgggcaaggccctgggcctca

SEQ ID NO: 303795 - DNA, 120 bp, Artificial Sequence
  ENSG00000133243_6 (sequence is synthesized)
ttcgcttcccgctcatgaccatcgaggagttcgctgcaggtcccgcacagtcgggcatcctggtggaccgcgaggtggtcagcctcttcctgcacttcaccgtcaaccccaagccacgag

SEQ ID NO: 303796 - DNA, 120 bp, Artificial Sequence
  ENSG00000133243_7 (sequence is synthesized)
tggagttcattgaccggccccgctgctgcctgcgtgggaaggagtgcagcatcaaccgcttccagcaggtggagagtcgctggggctacagcgggaccagtgaccgcatcaggttctcag

SEQ ID NO: 303797 - DNA, 120 bp, Artificial Sequence
  ENSG00000133243_8 (sequence is synthesized)
gggccagaacgacacgggcttcagctgcgacggctcagccagcaccttccgcgtcatgttcaaggagccggtggaggtgctgcccaacgtcaactacacggcctgtgccacgctcaaggg

SEQ ID NO: 303798 - DNA, 120 bp, Artificial Sequence
  ENSG00000133243_9 (sequence is synthesized)
cccagactcccactacggcaccaaaggcctgcgcaaggtgacacacgagtcgcccaccacgggcgccaagacctgcttcaccttttgctacgcggccgggaacaacaatggcacatccgt

SEQ ID NO: 303799 - DNA, 120 bp, Artificial Sequence
  ENSG00000133243_10 (sequence is synthesized)
ggaggacggccagatccccgaggtcatcttctacacctaggctgcccgacaccgacaccgccctccctccgtggggatagccgcagccccaggccatcatctgctgctggggccccccca

SEQ ID NO: 303800 - DNA, 120 bp, Artificial Sequence
  ENSG00000133243_11 (sequence is synthesized)
ccacgcggtgccaggcccagtgtcccccaggccgtctgtccactccatgccacctttctcagcatcaggacggggttgccctgtgttcaccacgagtgtggctgctggatcagggcagcc

SEQ ID NO: 303801 - DNA, 120 bp, Artificial Sequence
  ENSG00000133243_12 (sequence is synthesized)
ggggaggtggccaggccagtggccaggccctgtggagacaatccctcaggactagggacagggctgtgccggcctgggccagggcccacggacccgcagctcagggcgcctgcccacgtc

SEQ ID NO: 303802 - DNA, 120 bp, Artificial Sequence
  ENSG00000133243_13 (sequence is synthesized)
gtctgccggcggtgcgccgcgggcgtccctcgcgtctcttcactgcacattgcaatgcatttgcgattcccatttctctgctaggagccagcctgggtggcgctgctcccagagccgtgg

SEQ ID NO: 303803 - DNA, 120 bp, Artificial Sequence
  ENSG00000133243_14 (sequence is synthesized)
gtcccagaccttgcgttccttttgttcctgtccgtttatcaggacacgggccccacctgtcacgtgcccgaggccacccaagcccagcctgcggggcgttcccactgcctggatgccggc

SEQ ID NO: 303804 - DNA, 120 bp, Artificial Sequence
  ENSG00000133243_15 (sequence is synthesized)
ttgagttctgcgcacgcaggattcagtgtggggacggcccctgccggataggcctagccctggcccaggtggtgagcggtttgcagtgtccgttctcatccacctgatgggcccagataa

SEQ ID NO: 303805 - DNA, 120 bp, Artificial Sequence
  ENSG00000133243_16 (sequence is synthesized)
aggcccccgctgtccagcctccctggacggccctcgcggtccctgcagcccaagatgggactcagaccctgtgccccagagctcccctgccgcagaatggggccccagccggccccgacc

SEQ ID NO: 303806 - DNA, 120 bp, Artificial Sequence
  ENSG00000133243_17 (sequence is synthesized)
gggtccaggagcactgctcgcctgtacatactgttgccctagcccacctggtgccgtgggagccacccccaggtgctgggggcacagcccctccccactccggccacgcccccacccacc

SEQ ID NO: 303807 - DNA, 120 bp, Artificial Sequence
  ENSG00000133243_18 (sequence is synthesized)
ccgcgtgtttctgccctgtgactcctggaacctgcgtcctccccaaagccatgggaggggtgtcctcctcagaccatgcccccagatgatttttttaaataaagaaacaaatgcacctgc

SEQ ID NO: 303808 - DNA, 120 bp, Artificial Sequence
  ENSG00000133243_19 (sequence is synthesized)
aagagagatggcgctcgggacggaagggttccctgccctgccccaggagcctgcatgggagaaggcgtgaggaggtgaaggaagcttatggtacctgcacaccgacaggctggagcgcga

SEQ ID NO: 303809 - DNA, 120 bp, Artificial Sequence
  ENSG00000133243_20 (sequence is synthesized)
gagcaaccctgtggcctgtcctggtctctgactcaccctgaagaatgagaaacctgtttaaagtgaagtgtgatggaatcaagtcagacgtgaggaaggacctacctccttggtcaaagc

SEQ ID NO: 303810 - DNA, 85 bp, Artificial Sequence
  ENSG00000133243_21 (sequence is synthesized)
agtggtggagtcatagctcatcaaaagctcaaccttccaggctcaagtgatgcttccgtctcagccttctgagtagctgggacaa

SEQ ID NO: 303811 - DNA, 120 bp, Artificial Sequence
  ENSG00000133243_22 (sequence is synthesized)
cagaagtcatgtctgctgtttgtcttgggatggagctgccggggacacggcccctcccaccacaagtggccaagggcatgttgtggtcgggaagcttcaccggtcggccccggccacctc

SEQ ID NO: 303812 - DNA, 120 bp, Artificial Sequence
  ENSG00000133243_23 (sequence is synthesized)
acctctgcctgccactcggggtcctgggccctgctgccccccgagtgcagctgcaacgccccttttgcctaaagcagcaggccctgccgacagggacctgagcatctttttcttccttcc

SEQ ID NO: 303813 - DNA, 120 bp, Artificial Sequence
  ENSG00000133243_24 (sequence is synthesized)
ttggcctctgaggtcctgagagggaactccccaactctcccgccccagtcagcggtcacaggggagtctctgggcccacaacagggccggcctggtggctgagaccctggtggctcctgg

SEQ ID NO: 303814 - DNA, 120 bp, Artificial Sequence
  ENSG00000133243_25 (sequence is synthesized)
ccacgctcaggaaggcccgtgtggtcagggctgcatttgaaccggccccgcactggggatctgccgagggctgggtgctgatgtccccaccgcgccccccgtcgatgtctcttgccaggc

SEQ ID NO: 303815 - DNA, 120 bp, Artificial Sequence
  ENSG00000133243_26 (sequence is synthesized)
attgttaacattgtttattgagttttgatactcagtcttcctgattcacttaacccataatggtctgtttctcaccagttattaaactgtgtctgcactgggctggcttgcagctgagcg

SEQ ID NO: 303816 - DNA, 120 bp, Artificial Sequence
  ENSG00000133243_27 (sequence is synthesized)
atgcggagttgagcccaccttggttgatgagtgattaggtctcaggcaggcagggctgctctcattagagcagagggtgctgtgtcctggcactcctgggggtggatggtggacccccaa

SEQ ID NO: 303817 - DNA, 120 bp, Artificial Sequence
  ENSG00000133243_28 (sequence is synthesized)
ttctgcccctcctggcctcccctccctacccagagccccttcacatcccatgcacagtccctctgcctgtgacatctctgcaccgggattaagagcctggctcttggagtctgcctgggg

SEQ ID NO: 303818 - DNA, 120 bp, Artificial Sequence
  ENSG00000133243_29 (sequence is synthesized)
tccgctagccatcacccctgggggtgtaagcgcttgagaaggtgtctgcctagggcccaccgtggagaggaacccccagactgcttctagaagccagggctgcagcctggggggtacagg

SEQ ID NO: 303819 - DNA, 120 bp, Artificial Sequence
  ENSG00000133243_30 (sequence is synthesized)
cctagcagggagccacagtgacccctcccagccaatggccctgagagaacaggcagtggagccccccgcccccacccacagtgaagtgacgggtggtccctacagtggggccagaccctg

SEQ ID NO: 303820 - DNA, 120 bp, Artificial Sequence
  ENSG00000133243_31 (sequence is synthesized)
agacatcacccctgagtgagtgcatctgtcagaccctgaggcatcgcccctgagtgagcgtatctgtcggcctctggtctgtgccctgggacctctccctaaaagcccaggcagcagggg

SEQ ID NO: 303821 - DNA, 120 bp, Artificial Sequence
  ENSG00000133243_32 (sequence is synthesized)
ccatggctggtggctagtcccccggggaggggctgcccaggtccctgcaccttgaaagtccgacgcagacatcttagggggaaggagcgtgtcctcccaggcactcgggatcctggggtg

SEQ ID NO: 303822 - DNA, 120 bp, Artificial Sequence
  ENSG00000133243_33 (sequence is synthesized)
gggtgcaggcgggggggtccggacatgggggtggaggactcggggatgacggagatggggggccgggcatgggggtggagaactcagggatgatgaagacggcgggggggccgccgggca

SEQ ID NO: 303823 - DNA, 120 bp, Artificial Sequence
  ENSG00000133243_34 (sequence is synthesized)
tgggggtggaggactcagggacgatggaggggaccgggcatgggggtgggctcgccccagctcaccttaggctatccctgggtatccacgctgctgcctgtcatctgccacggcaggttc

SEQ ID NO: 303824 - DNA, 120 bp, Artificial Sequence
  ENSG00000133243_35 (sequence is synthesized)
gtgcccccgagttcactgcggaaagcctggcagatgcctggcatatacagataggaagaaacctggcttgtgaggacgcgtccacagggccatctgttagccccggcccggctctgtccc

SEQ ID NO: 303825 - DNA, 120 bp, Artificial Sequence
  ENSG00000133243_36 (sequence is synthesized)
caccgtgcacactgccagaccccgcctctcgtgtctgtccagctgttttggtggcatcttcccaggagggaagggagtccccgtctcgcgcccttgtgctacctgctggtgcaggtacca

SEQ ID NO: 303826 - DNA, 120 bp, Artificial Sequence
  ENSG00000133243_37 (sequence is synthesized)
gcacagggaccctgccactcccacccgcacccctgtgcgccaagacccctaggccttgctccctgcgtcctccctgctgcctccagacccagtgacccccaccggagacccccaggctca

SEQ ID NO: 303827 - DNA, 120 bp, Artificial Sequence
  ENSG00000133243_38 (sequence is synthesized)
agaccttcaaaccatgctgctcccctccagggataccccctgcccgccctgcagtccagatcatagactaccatccacagcccctccagccccggacccccacctcagccagagacccct

SEQ ID NO: 303828 - DNA, 120 bp, Artificial Sequence
  ENSG00000133243_39 (sequence is synthesized)
gggccctgccacctcccacttcagtgaccacccacctccagctccgccactgccaggctctggaccctggactctgcagaaggttcgtgctggccgtgggcagcgccgtctttgatgcca

SEQ ID NO: 303829 - DNA, 120 bp, Artificial Sequence
  ENSG00000133243_40 (sequence is synthesized)
ttgtgttgataaagctttatttataaacacactcacagggccagatttgggccacgggccatagttgccagcccggctttaactgctggtcctcacgttagtctcactgcctcctgcagg

SEQ ID NO: 303830 - DNA, 120 bp, Artificial Sequence
  ENSG00000133243_41 (sequence is synthesized)
catggccggggtggctgtcatgcgcccgagtgggccttggggtcccctgctgcagggcctgggttccagggtgacgtgaaggggcagcgctaacgatgcctcctgccctcgtggctgctc

SEQ ID NO: 303831 - DNA, 120 bp, Artificial Sequence
  ENSG00000133243_42 (sequence is synthesized)
actgcctgacgccatccagctctggagcaaaacaggcctggaactttccagaaggggctgggacagagccctggggctggtgcacactcgccgtctggccttccccaggtccacgcggcc

SEQ ID NO: 303832 - DNA, 68 bp, Artificial Sequence
  ENSG00000133243_43 (sequence is synthesized)
cctccaccccaccaccgcgcctggctaaaaaaaaagaaaaaaaaaaaccagagagaactttctctctc

SEQ ID NO: 303833 - DNA, 120 bp, Artificial Sequence
  ENSG00000133246_0 (sequence is synthesized)
acagtcacttcctgaaggcagcggccccagctcgggtcccactcatcccatggcccatcacctgcctgcagccatggagagccatcaggacttccggagcatcaaagcaaagttccaggc

SEQ ID NO: 303834 - DNA, 120 bp, Artificial Sequence
  ENSG00000133246_1 (sequence is synthesized)
ctctcagccggagcccagcgacctgcccaaaaaacctccgaagcctgagtttggtaaactgaagaagttctcccagcctgagctaagcgagcaccccaagaaggccccgctgcctgagtt

SEQ ID NO: 303835 - DNA, 120 bp, Artificial Sequence
  ENSG00000133246_2 (sequence is synthesized)
tggtgcagtgtccttgaagcccccgccgcctgaggtcactgacctccccaagaagcccccgccgcctgaggtcactgacctccccaagaagcccccgccgcctgaggtcactgacctccc

SEQ ID NO: 303836 - DNA, 120 bp, Artificial Sequence
  ENSG00000133246_3 (sequence is synthesized)
caagaagcccccgccgcctgaggtcactgacctccccaagaagccgtccaaactggagttgagtgacctctccaagaagttcccacagctgggggccactccgtttccaaggaagcccct

SEQ ID NO: 303837 - DNA, 120 bp, Artificial Sequence
  ENSG00000133246_4 (sequence is synthesized)
gcagcctgaggtcggtgaggcccctttgaaggcctcgctgccggagcctggtgcgccggcccggaaacccctgcagcccgacgaactcagtcaccccgccagacccccctccgaacccaa

SEQ ID NO: 303838 - DNA, 120 bp, Artificial Sequence
  ENSG00000133246_5 (sequence is synthesized)
atccggcgcattccccaggaagctctggcaacccgaggccggtgaggctaccccgaggtccccgcagcctgagttgagtacctttcccaagaagcctgcgcagcctgagttcaacgtgta

SEQ ID NO: 303839 - DNA, 120 bp, Artificial Sequence
  ENSG00000133246_6 (sequence is synthesized)
ccccaaaaagcctccgcagcctcaggtcggtggcctccctaagaagtccgtgccgcagcctgagttcagcgaggccgctcagactcccctctggaagcctcagtccagcgagccgaagcg

SEQ ID NO: 303840 - DNA, 120 bp, Artificial Sequence
  ENSG00000133246_7 (sequence is synthesized)
cgactccagcgcctttcccaaaaaggcctcccagcctccgctgagtgactttcccaagaagcctccgcagcctgagcttggggacctcaccaggacctcctcagagcccgaagtcagcgt

SEQ ID NO: 303841 - DNA, 120 bp, Artificial Sequence
  ENSG00000133246_8 (sequence is synthesized)
gcttcccaagaggccgcggccggccgaattcaaagcgctctccaagaagcccccgcagcccgagctgggcggcctccccaggacctcctcagagcccgagttcaactcactccccaggaa

SEQ ID NO: 303842 - DNA, 120 bp, Artificial Sequence
  ENSG00000133246_9 (sequence is synthesized)
agttctcacagcctgagcccagcgctgtcctcaagagacacccgcagcctgagttcttcggtgatctccctcgaaagcctccactccccagctccgcttccgagagctcactgcctgcgg

SEQ ID NO: 303843 - DNA, 120 bp, Artificial Sequence
  ENSG00000133246_10 (sequence is synthesized)
ccgtggccggcttcagctcccggcacccgctcagccctgggtttggagcggctgggacaccccgctggaggtcaggaggcctggttcacagtggaggggccaggccaggcctcagaccca

SEQ ID NO: 303844 - DNA, 120 bp, Artificial Sequence
  ENSG00000133246_11 (sequence is synthesized)
gccatccaccccggcggaggcctctgccccctgccagcagcctgggacaccctccagccaagcccccgctgcccccggggcccgtggatatgcagagctttcggagaccctctgcagcat

SEQ ID NO: 303845 - DNA, 120 bp, Artificial Sequence
  ENSG00000133246_12 (sequence is synthesized)
ccatagatctacggaggacccgctcggccgctgggctccacttccaggaccgacagcctgaagacatcccgcaggtcccagatgagatctacgagctgtatgacgatgtggaacccagag

SEQ ID NO: 303846 - DNA, 120 bp, Artificial Sequence
  ENSG00000133246_13 (sequence is synthesized)
atgactccagccccagccccaagggcagagatgaagcgccctcagttcagcaagccgccaggaggccaccacaagacccagcgctcaggaaggagaaggatccccagccacagcagttgc

SEQ ID NO: 303847 - DNA, 120 bp, Artificial Sequence
  ENSG00000133246_14 (sequence is synthesized)
cacccatggacccaaagttgctgaagcagctgaggaaggcagagaaggccgagagggagttccggaagaagttcaagtttgaaggggagatcgtggttcacacgaagatgatgatcgacc

SEQ ID NO: 303848 - DNA, 120 bp, Artificial Sequence
  ENSG00000133246_15 (sequence is synthesized)
ccaacgctaagacacgtcgcgggggtggcaagcacctcgggatccggcgcggggagatcctggaggtgatcgagttcaccagcaatgaggagatgctgtgccgggaccccaaaggcaaat

SEQ ID NO: 303849 - DNA, 120 bp, Artificial Sequence
  ENSG00000133246_16 (sequence is synthesized)
atggctacgtgcccagaacagcgctcctgcccctggagacggaggtgtacgatgatgtcgacttctgcgatcccctggaaaaccaaccactccccctgggacggtaagaccggtaggcgt

SEQ ID NO: 303850 - DNA, 120 bp, Artificial Sequence
  ENSG00000133246_17 (sequence is synthesized)
ggggccaggacagccagccagcccagcgcccgctcacccaggagccctggatcccggcgcgggaaagtcacagagctgcctgggcttgtacctggccacataaagccccagtttaaagca

SEQ ID NO: 303851 - DNA, 71 bp, Artificial Sequence
  ENSG00000133246_18 (sequence is synthesized)
agaaccctagacccaacttgctctaggaggcagaagtgaaatggcctcgaagcctacagataaatcctgcc

SEQ ID NO: 303852 - DNA, 120 bp, Artificial Sequence
  ENSG00000133246_19 (sequence is synthesized)
agaagtgaaatggcctcgaagcctacagataaatcctgcctttaccatttaccagctgggtgaccttgggcagtttgcttgacctctctgagcctttatttccttgtggacaagttgggc

SEQ ID NO: 303853 - DNA, 120 bp, Artificial Sequence
  ENSG00000133246_20 (sequence is synthesized)
atgacagtggcgtctactggcatgaacaaggttgctgagagggctgccatgaggggcgtggcccagcagttcccaccatgctgagcacgtggcaggagttaagggaatggaaggcaatcc

SEQ ID NO: 303854 - DNA, 120 bp, Artificial Sequence
  ENSG00000133246_21 (sequence is synthesized)
agaagaacccatgacccctgagaaaggcttgcggaagaaggtgggcagggagaggtttgggaggggacctggtgggatttggggagtcctcagaactgacacagggaggccttactcaag

SEQ ID NO: 303855 - DNA, 64 bp, Artificial Sequence
  ENSG00000133246_22 (sequence is synthesized)
ggggagtcctcagaactgacacagggaggccttactcaagatccagccaagtggattgcctgag

SEQ ID NO: 303856 - DNA, 71 bp, Artificial Sequence
  ENSG00000133246_23 (sequence is synthesized)
caaaaacacaaaaacaaacaaaaaacagctaccagggtaaaggctgagccggcgggccctgccttgactcg

SEQ ID NO: 303857 - DNA, 120 bp, Artificial Sequence
  ENSG00000133246_24 (sequence is synthesized)
gagctaagcaggagtcctggcagggcggagaccagggtcccaccgatcccaggctcagaaagaagacaggggcccaagggcggcagcacaagcagaggccctaacatctcgcgccccagt

SEQ ID NO: 303858 - DNA, 120 bp, Artificial Sequence
  ENSG00000133246_25 (sequence is synthesized)
ccccgggggcgctgctcactattgggcttctggggagaggggtccatggaagtcacgcttcctcggcagatcccctggaaaaccaaccactccccctgggacggtaagaccggtaggcgt

SEQ ID NO: 303859 - DNA, 120 bp, Artificial Sequence
  ENSG00000133247_0 (sequence is synthesized)
agtgtttgacgagagccgaaggaggctgtgggaggtgttggcggcggcggcgcgggcgcctgaggaggaggaggagaagcggatgagatcgtggggctcaccagcgtcccccatggcttc

SEQ ID NO: 303860 - DNA, 120 bp, Artificial Sequence
  ENSG00000133247_1 (sequence is synthesized)
tgagtagcgtgggagtggagtcagcaccaagccaggctccccgcgcctgccttgccctcacctgctcctgctctctgccagaggcagcatggtccgcagggcaccatggggcccgacaga

SEQ ID NO: 303861 - DNA, 120 bp, Artificial Sequence
  ENSG00000133247_2 (sequence is synthesized)
gtgacagcacgagaactgtgcgagaacgacgacctggccaccagcctcgtcctggacccctacctcggtttccgcacccataagatgaacgtcagccctgtgccccccctgcggcgacag

SEQ ID NO: 303862 - DNA, 120 bp, Artificial Sequence
  ENSG00000133247_3 (sequence is synthesized)
cagcacctgcgctcagcgctggaaactttcctgaggcagcgggacctggaggctgcgtaccgggccctgacgctgggaggctggacggcccgctacttccagagccggggcccgcggcag

SEQ ID NO: 303863 - DNA, 120 bp, Artificial Sequence
  ENSG00000133247_4 (sequence is synthesized)
gaggctgccctcaagacccacgtctatcgctacctccgtgccttcctgccggaaagtggctttaccatcctgccctgcacgcgctactccatggagaccaacggggccaagatcgtgtcc

SEQ ID NO: 303864 - DNA, 120 bp, Artificial Sequence
  ENSG00000133247_5 (sequence is synthesized)
actcgtgcttggaaaaagaatgagaagctggagctgctggtgggctgcattgcagagctgcgggaggcagatgaggggctgctgagggccggtgagaatgacttcagcatcatgtactca

SEQ ID NO: 303865 - DNA, 120 bp, Artificial Sequence
  ENSG00000133247_6 (sequence is synthesized)
acccgcaagcggagtgctcagctgtggctgggcccagccgccttcatcaaccatgactgcaaacccaactgcaagtttgtgcctgcagatgggaacgcagcctgcgtgaaggtgctccgg

SEQ ID NO: 303866 - DNA, 120 bp, Artificial Sequence
  ENSG00000133247_7 (sequence is synthesized)
gacattgagcctggggacgaggtgacatgcttctacggcgagggcttcttcggcgagaagaatgagcactgtgaatgccacacctgtgagaggaaaggtgaaggagctttccgaaccagg

SEQ ID NO: 303867 - DNA, 120 bp, Artificial Sequence
  ENSG00000133247_8 (sequence is synthesized)
cctagggagcccgcgttgccaccacggcccctggacaagtaccagctgcgtgagaccaagcggcggctgcagcaaggcctggacagtggcagccgacagggcctgctgggccctcgggcc

SEQ ID NO: 303868 - DNA, 120 bp, Artificial Sequence
  ENSG00000133247_9 (sequence is synthesized)
cacccatccccgctgcgccgggacccattctgcgccgcctgccagcccctgcgcctgccagcctgcagcgcccgcccagacacctcacccctctggctccagtggctgcctcagccccag

SEQ ID NO: 303869 - DNA, 120 bp, Artificial Sequence
  ENSG00000133247_10 (sequence is synthesized)
ccccggaagcgccgacgcccccggccccggagggccccagtgctctccacccaccacgctgcccgcgtctccctgcaccgatggggaggctgtggcccccactgccgcctgcgaggagag

SEQ ID NO: 303870 - DNA, 120 bp, Artificial Sequence
  ENSG00000133247_11 (sequence is synthesized)
ctgcgaggagaggccctggtggccctgggccagcccccccacgcccgctgggcccctcagcaggactggcactgggcccggcgctatgggctgccttacgtggtgcgtgtggaccttcgt

SEQ ID NO: 303871 - DNA, 120 bp, Artificial Sequence
  ENSG00000133247_12 (sequence is synthesized)
cgcctggccccagccccaccagctaccccagcccctgctgggaccccaggccccatcctgatcccgaagcaggccctcgccttcgcccccttctccccacccaagcgcctacggctggtg

SEQ ID NO: 303872 - DNA, 120 bp, Artificial Sequence
  ENSG00000133247_13 (sequence is synthesized)
gtcagccacggctccatcgacctggatgtcggcggtgaagagctgtgacaggccggacggggaggcccagcagggagagagggtctctctcctagctgctacccaggacctccagaagga

SEQ ID NO: 303873 - DNA, 120 bp, Artificial Sequence
  ENSG00000133247_14 (sequence is synthesized)
gcccttggacctctgggagggagctgacccttgactccagcatagctctgaccctggaatggggttggtttggacacccccagggatctgagccctgaccctttgtgactgctgacccct

SEQ ID NO: 303874 - DNA, 120 bp, Artificial Sequence
  ENSG00000133247_15 (sequence is synthesized)
gagccacccccactcccacagggagccccggccatttgctgccctccccacccctgccccagcctcaggactgcaggagccatccgcccccctcagccccttcctccccagggagcaaag

SEQ ID NO: 303875 - DNA, 120 bp, Artificial Sequence
  ENSG00000133247_16 (sequence is synthesized)
ccataaggggcaggggccaccccacggcatctccccagaagtacaggcctcaggaggaggtggaactgatgtagggggtggcactccccagagactgccctcacgaggggactgggttcg

SEQ ID NO: 303876 - DNA, 120 bp, Artificial Sequence
  ENSG00000133247_17 (sequence is synthesized)
ctctcagctctgcagctgtctgcggtggggggaaggttggggggtgtctggaggcatgttcccctcaccaccccccgtgggtctcagggaggccgggtgtgacctcatctttctcatggt

SEQ ID NO: 303877 - DNA, 120 bp, Artificial Sequence
  ENSG00000133247_18 (sequence is synthesized)
gctatcctggtgctattggggtggggagctccctcccctcccccacaccagaaaggggtatgttgggggcttggaagcacttgaactttttattttattaaaaccttgttataagcagca

SEQ ID NO: 303878 - DNA, 120 bp, Artificial Sequence
  ENSG00000133247_19 (sequence is synthesized)
ggaaggtggtggggctaatcccggaagacctttgtggctaccgtggtgccgctggagcaggagaccccggatgtgaccccagggttcctggggcttccaggaaagaactaggcttctggt

SEQ ID NO: 303879 - DNA, 120 bp, Artificial Sequence
  ENSG00000133247_20 (sequence is synthesized)
cagggccgtgctgtccttacctccttgtgacctgagcccccaccacatgttaaacacccctgagtgcaatgaggagcccctgcccctgcccctgcggggttcacagtctggtgaggaggt

SEQ ID NO: 303880 - DNA, 120 bp, Artificial Sequence
  ENSG00000133247_21 (sequence is synthesized)
ggggggcagacaagtcaacatgcagtcactggtcccagctggtacatgctgcaggggagctgtgaggaatgagcaagtgctcccagggcgaggctcacactgacaggggaagcacccgcc

SEQ ID NO: 303881 - DNA, 120 bp, Artificial Sequence
  ENSG00000133247_22 (sequence is synthesized)
tgagggtctggtggggcgagtagggggtagtccaggcaggagggatttgggggcaggaggtgctatgagagcgaggggagagaatgggggctgtatctgctgtgtgcgtgctgccctgaa

SEQ ID NO: 303882 - DNA, 120 bp, Artificial Sequence
  ENSG00000133247_23 (sequence is synthesized)
ggctttcagtagaagggtcctgtggggctgtgggctggagcagggaagcccacccaggcaggaggggaagagggagatctggaagatggatcgccaatagccagcaccagcgcccaggag

SEQ ID NO: 303883 - DNA, 120 bp, Artificial Sequence
  ENSG00000133247_24 (sequence is synthesized)
gtggctgggcccagccgccttcatcaaccatggtgagggtcaggcaggtggatgggcaggacgggatagagccaggcagggctggaggggtgtagtgggagggttctgcgactgagctgc

SEQ ID NO: 303884 - DNA, 120 bp, Artificial Sequence
  ENSG00000133247_25 (sequence is synthesized)
cgagctcatctacctctcttctctctcctgccccaactggctccagactgcaaacccaactgcaaggtaaggccttgggactcgggaggagagggcacgcaggaagaaagggtgcctgtg

SEQ ID NO: 303885 - DNA, 77 bp, Artificial Sequence
  ENSG00000133247_26 (sequence is synthesized)
ctcgggaggagagggcacgcaggaagaaagggtgcctgtggcctggggaaagggtttttggtcagtaaagagccaaa

SEQ ID NO: 303886 - DNA, 120 bp, Artificial Sequence
  ENSG00000133247_27 (sequence is synthesized)
agtggctttaccatcctgccctgcacgcgctactccatggagaccaacggggccaagatcgtgtccactcgtgcttgagctgcgggaggcagatgaggggctgctgagggccggtgagaa

SEQ ID NO: 303887 - DNA, 120 bp, Artificial Sequence
  ENSG00000133247_28 (sequence is synthesized)
gtgcatgtgggggttgtgtgtttaggggggatctgtgtctgcgctgcggagcaagagcaagagctaaggcgatggctgacatggctctgggctttccctactctcagaagtacttgttgc

SEQ ID NO: 303888 - DNA, 120 bp, Artificial Sequence
  ENSG00000133247_29 (sequence is synthesized)
ggaatgccacttttaggggctcagctgttgccccattccaggagaggacgctccgggccagggtgcccggccaggtgtggggagtgggtgagccctcccctgtgccctgggccagggcgc

SEQ ID NO: 303889 - DNA, 120 bp, Artificial Sequence
  ENSG00000133247_30 (sequence is synthesized)
atgctgtccagacatgcccaggagaggccgctggttgtcctgtagcccggaagcagaaggaatcaggagggttggctccagggcggcattgagggtgcaccctctggagcacagacctcg

SEQ ID NO: 303890 - DNA, 120 bp, Artificial Sequence
  ENSG00000133247_31 (sequence is synthesized)
atggggcaccccgggaggcatgacaaagggatccagatttttggctccagagtcagaactgagttggggtcctggcgatgccacccctggcctttggtttttcatctcagatggggttgg

SEQ ID NO: 303891 - DNA, 120 bp, Artificial Sequence
  ENSG00000133247_32 (sequence is synthesized)
tgaggatctctggaactctgcgggctggtcaagtgtgccggagggttttggacagcgaatgcgtggccctggtctgacaccacacacagacgctgggggggatggaaacaaaaggcggca

SEQ ID NO: 303892 - DNA, 120 bp, Artificial Sequence
  ENSG00000133247_33 (sequence is synthesized)
ttcggagaggctctgcagggccagtgtgctccagccaccttgagcacacgagagggcggccagctctccagcgatctagaaccatctggcttcacagaagccatgctgggcatcgacgga

SEQ ID NO: 303893 - DNA, 120 bp, Artificial Sequence
  ENSG00000133247_34 (sequence is synthesized)
gagggtgggcccgaggggtcaggacccctccccttgcaccgctgccgcccctcggccctctccttagcctggtcctcccctcagctccaagtgggggttggggccggggcccgggaaggc

SEQ ID NO: 303894 - DNA, 120 bp, Artificial Sequence
  ENSG00000133250_0 (sequence is synthesized)
gagagctgagaggtggaaaatggcgctgacgtgagcgcgaactcgcactgcccagagggtggccgccgcctaagctgcagccgccggagccgcagaaacaagaggccgagccgtgtcgaa

SEQ ID NO: 303895 - DNA, 120 bp, Artificial Sequence
  ENSG00000133250_1 (sequence is synthesized)
gatggaggagaaaccctcagggcccatcccagacatgctggccactgcagagcccagctccagtgagaccgacaaggaggtgttgtccccggctgtgccagctgcagccccttcctcctc

SEQ ID NO: 303896 - DNA, 120 bp, Artificial Sequence
  ENSG00000133250_2 (sequence is synthesized)
catgtcggaggagccaggccctgagcaggcagccacaccgccagtgtgggaacgtggaggggctggagggatgcagcagggctcctccccagccccagacagctgccagcctggccccgg

SEQ ID NO: 303897 - DNA, 120 bp, Artificial Sequence
  ENSG00000133250_3 (sequence is synthesized)
acccagccctggcctgaccagcatagtctccgggaccagcgaggacctgcggcctcccagacgacgcccacctccagggaagcaaatcccttgctccagccctggctgctgcctcagttt

SEQ ID NO: 303898 - DNA, 120 bp, Artificial Sequence
  ENSG00000133250_4 (sequence is synthesized)
tcccagcgtccgtgacctggcacagcatctgcgaacccactgcccgcccacacagtccctggaaggcaagctcttccgctgctcagccctgagctgcaccgagaccttccccagcatgca

SEQ ID NO: 303899 - DNA, 120 bp, Artificial Sequence
  ENSG00000133250_5 (sequence is synthesized)
ggagctggtggctcacagcaaactgcactacaaacccaatcgctacttcaagtgtgagaactgcctcctgcgcttccgcacgcaccgctcgctcttcaagcacctgcatgtttgcgcgga

SEQ ID NO: 303900 - DNA, 120 bp, Artificial Sequence
  ENSG00000133250_6 (sequence is synthesized)
caagcacctgcatgtttgcgcggagcatgcgcagagcccagccccgccgccacccccggccctggaccgagagccgcccgcgccggagcgccccccggaggttgaccccgcatcagcgcc

SEQ ID NO: 303901 - DNA, 120 bp, Artificial Sequence
  ENSG00000133250_7 (sequence is synthesized)
acccttcacgacccccgcccctgcccccaccggaccgttcctgccctacttgaaccctgcgccctttggcctaagccccccgcgcctgcgccccttcctggccgctgcacccgggccgcc

SEQ ID NO: 303902 - DNA, 120 bp, Artificial Sequence
  ENSG00000133250_8 (sequence is synthesized)
ggcttccagcgccgccgtctggaaaaagagccaaggtgctggcagcagcccccgaagaccccagggcggctccgacgcgccctcagggcacgcggccccgagccgcatcgtgtgggagca

SEQ ID NO: 303903 - DNA, 120 bp, Artificial Sequence
  ENSG00000133250_9 (sequence is synthesized)
gtgggagcacacacgcggccgctactcgtgcatgcagtgcgccttctccacggcctcgcggcccgccatgaccctgcacctggaggaccaccgccccggcgcccccgcggcccccgcggc

SEQ ID NO: 303904 - DNA, 120 bp, Artificial Sequence
  ENSG00000133250_10 (sequence is synthesized)
cccgcttgcacccaaggtgtcgccgctgctgtcagagggggagcttccagtgttctcgcagctctgaatcccgccgctttgggggtgggccatgggatgtgggtagttttgtcatttgga

SEQ ID NO: 303905 - DNA, 120 bp, Artificial Sequence
  ENSG00000133250_11 (sequence is synthesized)
gggggctgcagggaaggggggctggggtggacaataaagaaggcgccatgagccagcctatgctgtgttcccatcccttgtccatccaaagcatagtgggctcgagcccagcagtcatgg

SEQ ID NO: 303906 - DNA, 120 bp, Artificial Sequence
  ENSG00000133250_12 (sequence is synthesized)
attgatcacatcttgggaggaccacctgggtccacaggtgcaggcctcacagcccacctgtgtcctgtcttcccatcaccccaatcctgggacccaggtccccacctccagctgtggttg

SEQ ID NO: 303907 - DNA, 120 bp, Artificial Sequence
  ENSG00000133250_13 (sequence is synthesized)
cccaggtccccacctccagctgtggttgaggtccccagtacccactgtggcagcgttctcccttgtccagaaaccaaatgggatggggactctccagttttctttttttttttttttctt

SEQ ID NO: 303908 - DNA, 79 bp, Artificial Sequence
  ENSG00000133250_14 (sequence is synthesized)
cagcactttgggaggctggggcatacatggtaaaaccccatctctactaaacacaaaaaattagccaggtgtggtggcg

SEQ ID NO: 303909 - DNA, 67 bp, Artificial Sequence
  ENSG00000133250_15 (sequence is synthesized)
tattgcactccagtctgggcaatacgagtggaactccatctcaaaaataaagaaaattaaaaagcaa

SEQ ID NO: 303910 - DNA, 120 bp, Artificial Sequence
  ENSG00000133250_16 (sequence is synthesized)
aggggctttctttcctgcgccctgcggggtctggtggataccaggaggcagcagtgctcatccccttcccagggggcacaaatgccaccgtcccgaaatacaggatttttgccttaaaaa

SEQ ID NO: 303911 - DNA, 120 bp, Artificial Sequence
  ENSG00000133250_17 (sequence is synthesized)
ttgacccgcccctttaccgcaggtgctggcagcagcccccgaagaccccagggcggctccgacgcgccctcagggcacgcggccccgagccgcatcgtgtgggagcacacacgcggccgc

SEQ ID NO: 303912 - DNA, 120 bp, Artificial Sequence
  ENSG00000133250_18 (sequence is synthesized)
atcgctacttcaagttcccacccgaagtggtcaggaagggtcgctgccacagttgtacaggagcggggaggtgtgagaactgcctcctgcgcttccgcacgcaccgctcgctcttcaagc

SEQ ID NO: 303913 - DNA, 120 bp, Artificial Sequence
  ENSG00000133250_19 (sequence is synthesized)
ggaaaatggcgctgacgtgagcgcgaactcgcactgcccagagggtggccgccgcctaagctgcagccgccggagccgcagaaacaagaggccgagccgtgtcgaagatgggaagcaaat

SEQ ID NO: 303914 - DNA, 120 bp, Artificial Sequence
  ENSG00000133256_0 (sequence is synthesized)
ctccagggacaggcagccaccatgagcctcagtgaggagcaggcccggagctttctggaccagaaccccgattttgcccgccagtactttgggaagaaactgagccctgagaatgtggcc

SEQ ID NO: 303915 - DNA, 120 bp, Artificial Sequence
  ENSG00000133256_1 (sequence is synthesized)
gcggcctgcgaggacgggtgcccgccggactgcgacagcctccgggacctctgccaggtggaggagagcacggcgctgctggagctggtgcaggatatgcaggagagcatcaacatggag

SEQ ID NO: 303916 - DNA, 120 bp, Artificial Sequence
  ENSG00000133256_2 (sequence is synthesized)
cgcgtggtcttcaaggtcctgcggcgcctctgcaccctcctgcaggccgaccgctgcagcctcttcatgtaccgccagcgcaacggcgtggccgagctggccaccaggcttttcagcgtg

SEQ ID NO: 303917 - DNA, 120 bp, Artificial Sequence
  ENSG00000133256_3 (sequence is synthesized)
cagccggacagcgtcctggaggactgcctggtgccccccgactccgagatcgtcttcccactggacatcggggtcgtgggccacgtggctcagaccaaaaagatggtgaacgtcgaggac

SEQ ID NO: 303918 - DNA, 120 bp, Artificial Sequence
  ENSG00000133256_4 (sequence is synthesized)
gtggccgagtgccctcacttcagctcatttgctgacgagctcactgactacaagacaaagaatatgctggccacacccatcatgaatggcaaagacgtcgtggcggtgatcatggcagtg

SEQ ID NO: 303919 - DNA, 120 bp, Artificial Sequence
  ENSG00000133256_5 (sequence is synthesized)
aacaagctcaacggcccattcttcaccagcgaagacgaagatgtgttcttgaagtacctgaattttgccacgttgtacctgaagatctatcacctgagctacctccacaactgcgagacg

SEQ ID NO: 303920 - DNA, 120 bp, Artificial Sequence
  ENSG00000133256_6 (sequence is synthesized)
cgccgcggccaggtgctgctgtggtcggccaacaaggtgtttgaggagctgacggacatcgagaggcagttccacaaggccttctacacggtgcgggcctacctcaactgcgagcggtac

SEQ ID NO: 303921 - DNA, 120 bp, Artificial Sequence
  ENSG00000133256_7 (sequence is synthesized)
tccgtgggcctcctggacatgaccaaggagaaggaattttttgacgtgtggtctgtgctgatgggagagtcccagccgtactcgggcccacgcacgcctgatggccgggaaattgtcttc

SEQ ID NO: 303922 - DNA, 120 bp, Artificial Sequence
  ENSG00000133256_8 (sequence is synthesized)
tacaaagtgatcgactacgtcctccacggcaaggaggagatcaaggtcattcccacaccctcagccgatcactgggccctggccagcggccttccaagctacgtggcagaaagcggcttt

SEQ ID NO: 303923 - DNA, 120 bp, Artificial Sequence
  ENSG00000133256_9 (sequence is synthesized)
atttgtaacatcatgaatgcttccgctgacgaaatgttcaaatttcaggaaggggccctggacgactccgggtggctcatcaagaatgtgctgtccatgcccatcgtcaacaagaaggag

SEQ ID NO: 303924 - DNA, 120 bp, Artificial Sequence
  ENSG00000133256_10 (sequence is synthesized)
gagattgtgggagtcgccacattttacaacaggaaagacgggaagccctttgacgaacaggacgaggttctcatggagtccctgacacagttcctgggctggtcagtgatgaacaccgac

SEQ ID NO: 303925 - DNA, 120 bp, Artificial Sequence
  ENSG00000133256_11 (sequence is synthesized)
acctacgacaagatgaacaagctggagaaccgcaaggacatcgcacaggacatggtcctttaccacgtgaagtgcgacagggacgagatccagctcatcctgccaaccagagcgcgcctg

SEQ ID NO: 303926 - DNA, 120 bp, Artificial Sequence
  ENSG00000133256_12 (sequence is synthesized)
gggaaggagcctgctgactgcgatgaggacgagctgggcgaaatcctgaaggaggagctgccagggcccaccacatttgacatctacgaattccacttctctgacctggagtgcaccgaa

SEQ ID NO: 303927 - DNA, 120 bp, Artificial Sequence
  ENSG00000133256_13 (sequence is synthesized)
accggagaatcacctaccacaactggcgccacggcttcaacgtggcccagacgatgttcacgctgctcatgaccggcaaactgaagagctactacacggacctggaggccttcgccatgg

SEQ ID NO: 303928 - DNA, 120 bp, Artificial Sequence
  ENSG00000133256_14 (sequence is synthesized)
tgacagccggcctgtgccatgacatcgaccaccgcggcaccaacaacctgtaccagatgaagtcccagaaccccttggctaagctccacggctcctcgattttggagcggcaccacctgg

SEQ ID NO: 303929 - DNA, 120 bp, Artificial Sequence
  ENSG00000133256_15 (sequence is synthesized)
agtttgggaagttcctgctctcggaggagaccctgaacatctaccagaacctgaaccggcggcagcacgagcacgtgatccacctgatggacatcgccatcatcgccacggacctggccc

SEQ ID NO: 303930 - DNA, 120 bp, Artificial Sequence
  ENSG00000133256_16 (sequence is synthesized)
tgtacttcaagaagagagcgatgtttcagaagatcgtggatgagtccaagaactaccaggacaagaagagctgggtggagtacctgtccctggagacgacccggaaggagatcgtcatgg

SEQ ID NO: 303931 - DNA, 120 bp, Artificial Sequence
  ENSG00000133256_17 (sequence is synthesized)
ccatgatgatgacagcctgcgacctgtctgccatcaccaagccctgggaagtccagagcaaggtcgcacttctcgtggctgctgagttctgggagcaaggtgacttggaaaggacagtct

SEQ ID NO: 303932 - DNA, 120 bp, Artificial Sequence
  ENSG00000133256_18 (sequence is synthesized)
tggatcagcagcccattcctatgatggaccggaacaaggcggccgagctccccaagctgcaagtgggcttcatcgacttcgtgtgcacattcgtgtacaaggagttctctcgtttccacg

SEQ ID NO: 303933 - DNA, 120 bp, Artificial Sequence
  ENSG00000133256_19 (sequence is synthesized)
aagagatcctgcccatgttcgaccgactgcagaacaataggaaagagtggaaggcgctggctgatgagtatgaggccaaagtgaaggctctggaggagaaggaggaggaggagagggtgg

SEQ ID NO: 303934 - DNA, 120 bp, Artificial Sequence
  ENSG00000133256_20 (sequence is synthesized)
cagccaagaaagtaggcacagaaatttgcaatggcggcccagcacccaagtcttcaacctgctgtatcctgtgagcactggtcccatggggaccctatggctccctcaatcttcacccac

SEQ ID NO: 303935 - DNA, 120 bp, Artificial Sequence
  ENSG00000133256_21 (sequence is synthesized)
ctcaatcttcacccactaggatttgggttctgcctgtggctatttgctacaagaggttaggaagcccaagaaaatgactgaagatcattctggatattttaatttttttttttttttttt

SEQ ID NO: 303936 - DNA, 120 bp, Artificial Sequence
  ENSG00000133256_22 (sequence is synthesized)
aggcatgagccaccacgcccagcctgtttttataaactgaagccaactgtgaataaactgtagcctacattactcatccatttttggatagttaccactgggagacctttgaaaagggtc

SEQ ID NO: 303937 - DNA, 120 bp, Artificial Sequence
  ENSG00000133256_23 (sequence is synthesized)
ggtccatgaactctgaaatcactgagaacatttgcagccacacatgtacatatgtgtacacaggtagacagatggacacaggccgtttctcatccagtttaggaaaacacacatgctcag

SEQ ID NO: 303938 - DNA, 120 bp, Artificial Sequence
  ENSG00000133256_24 (sequence is synthesized)
aggtgggaactggccggtgggaccccgggtgcctgtctgtggtctccaccaggctcccctgctgctgcactccagggatggggtgtccagggctggtccctgaatgagggccgccaggct

SEQ ID NO: 303939 - DNA, 120 bp, Artificial Sequence
  ENSG00000133256_25 (sequence is synthesized)
gaggatgctgccagggaagggcactgacgtgcatggacctggaggatgccactggccaaaagctaggatctcactcacatgtgggatccgaaaaccctgaattcatggaaacagagagtg

SEQ ID NO: 303940 - DNA, 120 bp, Artificial Sequence
  ENSG00000133256_26 (sequence is synthesized)
gaaagggggttgcaggaggccggggcaggaagagagatagagaaagcagagacgttggtgaaagggtgcaaagcgttcgttagctggagctgtgggcttcaaggtcagccgcgctgtgtg

SEQ ID NO: 303941 - DNA, 120 bp, Artificial Sequence
  ENSG00000133256_27 (sequence is synthesized)
ccacgtgggacctcctgtgcacgtgtaggatgcgtgtgtgtgtgtgtgtgtgagagtacgggcccagcttgtgtgtgggattgtgcggaacacagactgggaagacagatgtaaaccgcg

SEQ ID NO: 303942 - DNA, 120 bp, Artificial Sequence
  ENSG00000133256_28 (sequence is synthesized)
gcgtgtgatgcgtgtcccgtgagtattggggacggtctgcatgtgtgtgcaccctgagcctgtgcatgtgtggacatgggtgtgagtgcacccgcattcgtagaatacctgcgcacggcg

SEQ ID NO: 303943 - DNA, 120 bp, Artificial Sequence
  ENSG00000133256_29 (sequence is synthesized)
accgcagcggaggagagggagctggcaccatgcggtagaagacccagcggccgccgcgagtgtgaggaggcagggcctggtggggcctgggtctgggccttgaccaaggaggcagagaaa

SEQ ID NO: 303944 - DNA, 120 bp, Artificial Sequence
  ENSG00000133256_30 (sequence is synthesized)
ggtggcccaaggagggccctgggacgcttggcggaggccacaggcggcctgacgtgcggaaaccacggcccgatgttctcaaagccctgctcgccgcaggtggttctggagcagccgggc

SEQ ID NO: 303945 - DNA, 120 bp, Artificial Sequence
  ENSG00000133256_31 (sequence is synthesized)
gagaggtggccgcagggcgcctgacgcgctgggcataacctccgcagaccctgaacatctaccagaacctgaaccggcggcagcacgagcacgtgatccacctgatggacatcgccatca

SEQ ID NO: 303946 - DNA, 120 bp, Artificial Sequence
  ENSG00000133256_32 (sequence is synthesized)
atcatcgccacggacctggccctgtacttcaagtgcgcgccttccgggagggggcgcctcgcggggcgggcgggtagcctgggacccccggcagacacgggggcgcagcggcggcacagc

SEQ ID NO: 303947 - DNA, 120 bp, Artificial Sequence
  ENSG00000133256_33 (sequence is synthesized)
gaggagaatgcacctggcgattccacacatctacagcgagtctcctgagccgcaggcgccggggctgtggagagccgtctccattcagcaggcgccagggctatggggagccgtctccat

SEQ ID NO: 303948 - DNA, 120 bp, Artificial Sequence
  ENSG00000133256_34 (sequence is synthesized)
gtgactgcggccagggcggctccacgacggtgactggggtcagggcaggagagtgtggaggccagtgaggagggtccacacccatcggtgaggcaggagtcagggtcagccgcgctgtgt

SEQ ID NO: 303949 - DNA, 120 bp, Artificial Sequence
  ENSG00000133265_0 (sequence is synthesized)
cgctgaggtgcgaaaactgggccaggggcagggctttgaccagctacttgagcgtgaaggggcggcgcccgcacgaaggggcgtcccagcttggaggcggggcccggatgggaggggcgg

SEQ ID NO: 303950 - DNA, 120 bp, Artificial Sequence
  ENSG00000133265_1 (sequence is synthesized)
ggccgagtgcagtatcccgccagatggcggcgcccagcagagtcaggtgcggacgactttgtctgtaggagcagcggcggcttgaggacccggggagaccctcaagaatcgacccatcag

SEQ ID NO: 303951 - DNA, 120 bp, Artificial Sequence
  ENSG00000133265_2 (sequence is synthesized)
gacgccagagctgcttcagcggtgaccaccttctccctctaacacattcttcccttcttcacaaacggcccatgtcagacgaaggctcaagggggagccgcctgcccctggcgctgcccc

SEQ ID NO: 303952 - DNA, 120 bp, Artificial Sequence
  ENSG00000133265_3 (sequence is synthesized)
cggcctcccagggttgctcttcagggggcggcggcggcggctcctcggctgggggctcgggcaattcccggcccccacgcaacctccaaggcttgctgcagatggccatcaccgcgggct

SEQ ID NO: 303953 - DNA, 120 bp, Artificial Sequence
  ENSG00000133265_4 (sequence is synthesized)
ctgaagagccagaccctcctccagaaccgatgagtgaggagaggcgtcagtggctgcaggaggccatgtcggctgccttccgaggccagcgggaggaggtggagcagatgaagagctgcc

SEQ ID NO: 303954 - DNA, 120 bp, Artificial Sequence
  ENSG00000133265_5 (sequence is synthesized)
tccgagtgctgtcacagcccatgccccccactgctggggaggccgagcaggcggccgaccagcaagagcgagagggggccctggagctgctggccgacctgtgtgagaacatggacaatg

SEQ ID NO: 303955 - DNA, 120 bp, Artificial Sequence
  ENSG00000133265_6 (sequence is synthesized)
ccgcagacttctgccagctgtctggcatgcacctgctggtgggccggtacctggaggcgggggctgcgggactgcggtggcgggcggcacagctcatcggcacgtgcagtcagaacgtgg

SEQ ID NO: 303956 - DNA, 120 bp, Artificial Sequence
  ENSG00000133265_7 (sequence is synthesized)
caaggccctcttcgccatctcctgtctggtccgagagcaggaggctgggctgctgcagttcctccgcctggacggcttctctgtgttgatgagggccatgcagcagcaggtgcagaagct

SEQ ID NO: 303957 - DNA, 120 bp, Artificial Sequence
  ENSG00000133265_8 (sequence is synthesized)
caaggtcaaatcagcattcctgctgcagaacctgctggtgggccaccctgaacacaaagggaccctgtgctccatggggatggtccagcagctggtggccctggtgcggacagagcacag

SEQ ID NO: 303958 - DNA, 120 bp, Artificial Sequence
  ENSG00000133265_9 (sequence is synthesized)
ccccttccacgagcacgtgcttggagccctgtgcagcctggtgacagactttccgcagggtgtgcgcgagtgtcgggagccggaactgggcctggaggagctcctccgccaccgctgtca

SEQ ID NO: 303959 - DNA, 120 bp, Artificial Sequence
  ENSG00000133265_10 (sequence is synthesized)
gctgctgcagcagcatgaggagtaccaggaggagctggagttctgtgaaaagctgctacagacctgtttctccagcccagcggacgacagcatggatcggtgaaaccaggtggcttcttg

SEQ ID NO: 303960 - DNA, 120 bp, Artificial Sequence
  ENSG00000133265_11 (sequence is synthesized)
cccccttctccgtgggaaccccaggcctcttgcctccctccccacctacaaggccctctcccaagggatcgcagggcctaggtgcctggacccagggtgtgccagcccgtctctgtgcag

SEQ ID NO: 303961 - DNA, 120 bp, Artificial Sequence
  ENSG00000133265_12 (sequence is synthesized)
tccctggaaggggcgctgagaaaggcaccagctccttggaccccacctcccatgctctcactctcatccccgttctcttgtccacacagctcttccaataaaggtgtttctcttcctcct

SEQ ID NO: 303962 - DNA, 120 bp, Artificial Sequence
  ENSG00000133265_13 (sequence is synthesized)
tctcctccttcactgccgcctttgtcatctcctttggagggtgcatgggggacgggaggaggggcacgggtttaagggacttggggagccactggaagaataataaaagtgttgctcttt

SEQ ID NO: 303963 - DNA, 120 bp, Artificial Sequence
  ENSG00000133265_14 (sequence is synthesized)
gttgctagggagaaaggagaggcttatgactttggggaagggtcctgtgggtatgaaggaaggaaaaggggctgtggttaagtgggctgggggcagagtggtttggggtcatggggggtc

SEQ ID NO: 303964 - DNA, 120 bp, Artificial Sequence
  ENSG00000133265_15 (sequence is synthesized)
cgacccatcaggacgccagagctgcttcagcggtgaccaccttctccctctaacacattcttcccttcttcacaaacggcccatcaagagcgagagggggccctggagctgctggccgac

SEQ ID NO: 303965 - DNA, 120 bp, Artificial Sequence
  ENSG00000133265_16 (sequence is synthesized)
gactttgtctgtaggagcagcggcggcttgaggacccggggaggtgagatccgccttattccggcgcccctcttcggagaggagggagaagacttgttgctaaggagaccaaagggcggg

SEQ ID NO: 303966 - DNA, 80 bp, Artificial Sequence
  ENSG00000133275_0 (sequence is synthesized)
gctgcgctgctgaggccgggccggccgcccagacgctgcccgcgggcccggccacggcggagccaagctgtgagccgtga

SEQ ID NO: 303967 - DNA, 120 bp, Artificial Sequence
  ENSG00000133275_1 (sequence is synthesized)
agccaagctgtgagccgtgagctttgaggcggtgggatgtgtcagcagaatgtctcctgcccccgagagcgaccccgaggccactgagaagagcagcgcggcctggccggcccgaacgcc

SEQ ID NO: 303968 - DNA, 120 bp, Artificial Sequence
  ENSG00000133275_2 (sequence is synthesized)
tgcgtctcagtagctgggagccacgggcccacgcccgcccaccggccgcagtgatgttctagccacagaggagccaagacctcaggtttccagagacttgggatttgcacggcagcagag

SEQ ID NO: 303969 - DNA, 120 bp, Artificial Sequence
  ENSG00000133275_3 (sequence is synthesized)
tcaccgtggagaggccagggtatcacaaacttatggattttgacaagaaaggagggaaaggggagacggaggagggccggagaatgtccaaggccggcgggggccggagcagccacggca

SEQ ID NO: 303970 - DNA, 120 bp, Artificial Sequence
  ENSG00000133275_4 (sequence is synthesized)
tccggagctcggggaccagctcgggggtcctgatggtgggccccaacttccgcgtcggcaagaagatcggctgcggcaacttcggggagctccgcctaggaaagaatctctatacaaatg

SEQ ID NO: 303971 - DNA, 120 bp, Artificial Sequence
  ENSG00000133275_5 (sequence is synthesized)
aatacgtggctatcaaattggagccgatcaagtcccgggccccgcagctgcacctggagtaccggttctacaagcagctcagcgccacagagggcgtccctcaggtctactacttcggtc

SEQ ID NO: 303972 - DNA, 120 bp, Artificial Sequence
  ENSG00000133275_6 (sequence is synthesized)
cgtgcgggaagtacaacgccatggtgctggagctgctggggcccagcctggaggacctgttcgacctgtgcgaccggaccttcacgctcaagacggtgctgatgatcgccatccagctga

SEQ ID NO: 303973 - DNA, 120 bp, Artificial Sequence
  ENSG00000133275_7 (sequence is synthesized)
tcacgcgcatggagtatgtgcacaccaagagcctaatctaccgggacgtgaagcccgagaacttcctggtgggccgcccggggaccaagcggcagcatgccatccacatcatcgacttcg

SEQ ID NO: 303974 - DNA, 120 bp, Artificial Sequence
  ENSG00000133275_8 (sequence is synthesized)
ggctggccaaggagtacatcgaccccgagaccaagaagcacatcccgtaccgcgagcacaagagcctgacgggcacggcgcgctacatgagcatcaacacgcacctgggcaaggagcaga

SEQ ID NO: 303975 - DNA, 120 bp, Artificial Sequence
  ENSG00000133275_9 (sequence is synthesized)
gccgccgcgacgacctggaggcgctgggccacatgttcatgtacttcctgcgcggcagcctcccctggcaggggctcaaggccgacacgctcaaggagcggtaccagaagatcggggaca

SEQ ID NO: 303976 - DNA, 120 bp, Artificial Sequence
  ENSG00000133275_10 (sequence is synthesized)
ccaaacgcgccacgcccatcgaggtgctctgcgagaacttcccagaggagatggccacgtacctgcgctatgtgcggcgcctggacttcttcgagaagcccgactatgactacctgcgga

SEQ ID NO: 303977 - DNA, 120 bp, Artificial Sequence
  ENSG00000133275_11 (sequence is synthesized)
tcttcgaccgcagtggcttcgtgttcgactatgagtacgactgggccgggaagcccctgccgacccccatcggcaccgtccacaccgacctgccctcccagcctcagctccgggacaaaa

SEQ ID NO: 303978 - DNA, 120 bp, Artificial Sequence
  ENSG00000133275_12 (sequence is synthesized)
cccagccgcacagcaaaaaccaggcgttgaactccaccaacggggagctgaatgcggacgaccccacggccggccactccaacgccccgatcacagcgcctgcagaggtggaggtggccg

SEQ ID NO: 303979 - DNA, 120 bp, Artificial Sequence
  ENSG00000133275_13 (sequence is synthesized)
atgaaaccaaatgctgctgtttcttcaagaggagaaagagaaaatcgctgcagcgacacaagtgaccctgggcgcgtgcagccccctgaatcttctccgtgcagccccttggggcgcgac

SEQ ID NO: 303980 - DNA, 120 bp, Artificial Sequence
  ENSG00000133275_14 (sequence is synthesized)
cttgtgcgaggccctcggggcccacccacagcggcccagggccagaccctggctggaagccagaacgcagactgcaggggccgcgcctggctcaggcggccccacccccgggacgtgggg

SEQ ID NO: 303981 - DNA, 120 bp, Artificial Sequence
  ENSG00000133275_15 (sequence is synthesized)
tcacttccttcatgtaagactttggccgaaatttctacacctgtgtctagtcctcccctccaagagcattaactatttaaaacaaggaaaagaggaaaaaaaaaacagaggcccgcccta

SEQ ID NO: 303982 - DNA, 120 bp, Artificial Sequence
  ENSG00000133275_16 (sequence is synthesized)
ccccactcctgcccctccgtttctttgctgaagtgagtagtgtgatcctggaggccccccggcctggccccgccccgccagccgcccccgttagcgtcataaagtccagcttgtctccct

SEQ ID NO: 303983 - DNA, 120 bp, Artificial Sequence
  ENSG00000133275_17 (sequence is synthesized)
cgatccaaaggccgttttctcgaggggagggcaggcccggcctggaggggtgctgtggagctgtcttgcccaggccctcctgggagggggacaggcattgttgccaggggtgaggccgtg

SEQ ID NO: 303984 - DNA, 120 bp, Artificial Sequence
  ENSG00000133275_18 (sequence is synthesized)
ccccaggcctccccgaaaccaaaggggaaggcaggggtggggccgtggctgaagccggctccccaaccaaaatgctgcaccaaagctcgggcgccgcgggcacggctgctgcagtctctt

SEQ ID NO: 303985 - DNA, 120 bp, Artificial Sequence
  ENSG00000133275_19 (sequence is synthesized)
cccagcctggccctggcaaggggcgggtgggcgctgccaggcgggtgcttctcgacgcacttgctcccggaggctgcgccccggcgcctggaacccgaggtgggaggaccggttggtgtc

SEQ ID NO: 303986 - DNA, 120 bp, Artificial Sequence
  ENSG00000133275_20 (sequence is synthesized)
accctgctcggccctcagccctgccgcgtggggcgcgtgggcacggagcttcctgcctctctgctccgacacccggcaagcagccggagacaaaacgccttaaagcccccggcccagccc

SEQ ID NO: 303987 - DNA, 120 bp, Artificial Sequence
  ENSG00000133275_21 (sequence is synthesized)
tgcaggtatattgcaggggcctgggggcggccctggactggcgggcggttccccagtggggtgccctggaggctgccgggcagagtggagcagcttggggccgtgcccagggcggtggct

SEQ ID NO: 303988 - DNA, 120 bp, Artificial Sequence
  ENSG00000133275_22 (sequence is synthesized)
gtgagtctagtttttgctttaccaagtgtacagaaatggcatttacgtttctctgatgctcccttgaagccatagaatttaggggcttttttaaaaaaataaaagaaaaatgaaaccaaa

SEQ ID NO: 303989 - DNA, 120 bp, Artificial Sequence
  ENSG00000133275_23 (sequence is synthesized)
agagaagggggctcccggggccctccccagggaactggccctgggcccagaccagatggaggaccccgaaaagaacagggcaggtttggttggtggcctccagtctcttgtcctcaacga

SEQ ID NO: 303990 - DNA, 120 bp, Artificial Sequence
  ENSG00000133275_24 (sequence is synthesized)
gggttttggcagctccctctcagtggcctctccgctctgcaccgaaggggatgggtccgacccagcctggcatcatcacagcctcgagtggcgtccagcctgccccgctccaccagtggc

SEQ ID NO: 303991 - DNA, 120 bp, Artificial Sequence
  ENSG00000133275_25 (sequence is synthesized)
gtcccgggccccgcagctgcacctggagtaccggttctacaagcagctcagcgccacaggtaccgggcggcccgcgggtggggcgggggctgcgcaggggcagggagggggctgccgccg

SEQ ID NO: 303992 - DNA, 120 bp, Artificial Sequence
  ENSG00000133275_26 (sequence is synthesized)
ccgttacgctccaccgtgtggcccagtgcgccggggcggtccacaaggccatgtggggctctgcctccccaccccaggacatgcaggagccttcttggtgtttcctggctcccggaggcc

SEQ ID NO: 303993 - DNA, 120 bp, Artificial Sequence
  ENSG00000133275_27 (sequence is synthesized)
aaaaccaggtgaggcccgggcgggaccgaccgccccagggaggggcatgggcggccagcgtgaccccctactgcccccaccaggcgttgaactccaccaacggggagctgaatgcggacg

SEQ ID NO: 303994 - DNA, 120 bp, Artificial Sequence
  ENSG00000133302_0 (sequence is synthesized)
cccagagcccggattcgtgaagcagttgagtgctgcagcggcagtcgtcgcccctgccgccgctgccaccgaaggaagcatcccagacaccgggaagatggaagatggtaccccaaagca

SEQ ID NO: 303995 - DNA, 120 bp, Artificial Sequence
  ENSG00000133302_1 (sequence is synthesized)
tatcatccagatgacaggatttaagatggaagaaaaagaagcgctagtcaaattacttttaaaactagattgcacttttattaagagtgagaaatacaaaaattgtacacatcttatagc

SEQ ID NO: 303996 - DNA, 120 bp, Artificial Sequence
  ENSG00000133302_2 (sequence is synthesized)
tgaacgcctatgtaagagtgaaaaatttttagcagcttgtgcggcaggaaagtggatactaaccaaggactatataattcatagtgccaaaagtggcagatggcttgatgaaacaactta

SEQ ID NO: 303997 - DNA, 120 bp, Artificial Sequence
  ENSG00000133302_3 (sequence is synthesized)
tgaatggggatataaaattgaaaaagattcccgttattcacctcaaatgcaatctgcacctaaaagatggcgtgaagaactgaaacgcactggtgctccaggagccttccacagatggaa

SEQ ID NO: 303998 - DNA, 120 bp, Artificial Sequence
  ENSG00000133302_4 (sequence is synthesized)
agttgtcctccttgttagaactgataagcgaagtgattctcttataagagttttggaggctggaaaggcaaatgttattttaccaaaaagttcaccaagtggaataactcatgtgattgc

SEQ ID NO: 303999 - DNA, 120 bp, Artificial Sequence
  ENSG00000133302_5 (sequence is synthesized)
cagtaatgcaagaattaaagctgagaaagaaaaagataactttaaggctccattttatccaattcagtatctaggggattttcttttagagaaagaaattcagaatgatgaagattccca

SEQ ID NO: 304000 - DNA, 120 bp, Artificial Sequence
  ENSG00000133302_6 (sequence is synthesized)
aaccaattctgtttggactgaacatagcaatgaagaaacaaacaaagatttcaggaaagatgcaggatttcttgaaatgaaaggtgccttaagagagaccatgtatagaacccagaaaga

SEQ ID NO: 304001 - DNA, 120 bp, Artificial Sequence
  ENSG00000133302_7 (sequence is synthesized)
aatgcaaaatcatgaagatgttaatgttggttctattttgattcaacatcacaaaaaagaaaaattcagtggttccagtaaagatttgaaatttgttaaaatgagaaatacctttggaag

SEQ ID NO: 304002 - DNA, 120 bp, Artificial Sequence
  ENSG00000133302_8 (sequence is synthesized)
ccatacatatgaaaatcagaaggaaattaagaaaaaagatgaagatattcagaggagttatactttgaggagaaaacgcaagaaaggaaaagaaagcaattgcaagaaaggcgttgaaca

SEQ ID NO: 304003 - DNA, 120 bp, Artificial Sequence
  ENSG00000133302_9 (sequence is synthesized)
tgaaaaaataaaaagtaccttaagaaggcacatatataatagagatcagaaagaaatgaagaattctatttttgctgaatatgccaaagaatcaaaagccatggctattaagacagatgt

SEQ ID NO: 304004 - DNA, 120 bp, Artificial Sequence
  ENSG00000133302_10 (sequence is synthesized)
ggatgttgttgaaataaaaaataccttaaggaagcacatatatagagctcaggctgtcagatacaactgcattagaatagataaacaaccagtgtacaacgtagaggttaaaaatgctga

SEQ ID NO: 304005 - DNA, 120 bp, Artificial Sequence
  ENSG00000133302_11 (sequence is synthesized)
atttcccagaggtgtattaaatttaattgaaagcctcatagaaggacatttttttaaagaagcaattgaggaactttccactttgcaggcacattatatccctcctgtatgcgttcttca

SEQ ID NO: 304006 - DNA, 120 bp, Artificial Sequence
  ENSG00000133302_12 (sequence is synthesized)
tgcccttctagagaacgttctacaggataacatagatacattttctggtcgatactttcatatattgtcagctcttcttcacctgcatcctccttggaagtctccagccatgtcgagata

SEQ ID NO: 304007 - DNA, 120 bp, Artificial Sequence
  ENSG00000133302_13 (sequence is synthesized)
ttatttagagttgtttcagtgtccaacttgtatgaaaggagcatggtctttagtagaagtccttatcaggtcttgccttttcaatgaaagcttttgtcatcaaatttcagaaaatattgg

SEQ ID NO: 304008 - DNA, 120 bp, Artificial Sequence
  ENSG00000133302_14 (sequence is synthesized)
ctccaaggtgctccacctgacgctactcaaatttttctttaatttaattgaaagtgaagtacaacatctgagtcaaaagttgtatgactggtcagattctcagaatctgaaaataacagg

SEQ ID NO: 304009 - DNA, 120 bp, Artificial Sequence
  ENSG00000133302_15 (sequence is synthesized)
aaaggcaatgcttcttgaaattttttggtcaggaagtgaaacctctgggcttttgaccaaaccagtaaatatgcttttggaatggactatatattctcacaaggaaaaattcaagtctaa

SEQ ID NO: 304010 - DNA, 120 bp, Artificial Sequence
  ENSG00000133302_16 (sequence is synthesized)
tgatgtcttcaaacatgaactagcttacttattggctggaattcttggagcagcaatagattattggattttccttggtcttaagatgggtagaaatgtgatgcgacacatgtctgatga

SEQ ID NO: 304011 - DNA, 120 bp, Artificial Sequence
  ENSG00000133302_17 (sequence is synthesized)
cttaggaagttatgtttctctttcgtgtgatgacttttcttcacaggaattagagattttcatttgctccttttcctcctcctggcttcaaatgtttgttgcagaggcagtctttaaaaa

SEQ ID NO: 304012 - DNA, 120 bp, Artificial Sequence
  ENSG00000133302_18 (sequence is synthesized)
gttgtgtctacagagctctggcagtgtttcttctgagccactctctcttcagaaaatggtatattcctatttaccagccttggggaaaactggtgtgcttgggtctggaaagattcaggt

SEQ ID NO: 304013 - DNA, 120 bp, Artificial Sequence
  ENSG00000133302_19 (sequence is synthesized)
gtcaaagaaaataggacagcggccttgttttgactctcagagaaccttactaatgctgaatggtactaaacaaaaacaagtcgaagggctgccagagttactagacctgaaccttgctaa

SEQ ID NO: 304014 - DNA, 120 bp, Artificial Sequence
  ENSG00000133302_20 (sequence is synthesized)
atgttcctcatcattaaaaaaattgaaaaagaagtcagaaggagaattgtcatgttccaaggagaattgcccctctgtagttaaaaagatgaattttcacaagactaatctaaaaggaga

SEQ ID NO: 304015 - DNA, 120 bp, Artificial Sequence
  ENSG00000133302_21 (sequence is synthesized)
aacagccctgcatagagcttgcataaataaccaagtggagaaattgattcttcttctctctttgccaggaatagacatcaatgttaaagacaatgctggctggacgcctttgcatgaagc

SEQ ID NO: 304016 - DNA, 120 bp, Artificial Sequence
  ENSG00000133302_22 (sequence is synthesized)
ctgtaactatggcaacacagtgtgtgtccaggaaattttgcaacgttgtccagaggtagatctgctcactcaagtggacggggtgactcctttgcatgatgcactgtcaaacggacatgt

SEQ ID NO: 304017 - DNA, 120 bp, Artificial Sequence
  ENSG00000133302_23 (sequence is synthesized)
gggagaattgcccttggattatgtggtttcacctcaaatcaaagaagaactgtttgctattacaaaaatagaagatacagtggagaactttcatgcacaagcagagaaacattttcatta

SEQ ID NO: 304018 - DNA, 120 bp, Artificial Sequence
  ENSG00000133302_24 (sequence is synthesized)
ccagcaacttgaatttggctcctttttacttagtaggatgttgctaaatttttgttcaatttttgatttatcttcagagttcattttagcttccaaagggttaactcatctaaatgaact

SEQ ID NO: 304019 - DNA, 120 bp, Artificial Sequence
  ENSG00000133302_25 (sequence is synthesized)
gcttatggcttgtaaaagtcataaagaaaccaccagtgttcatactgactggttactggatctttatgctggaaatataaagacattgcagaaactcccacacattcttaaggaactgcc

SEQ ID NO: 304020 - DNA, 120 bp, Artificial Sequence
  ENSG00000133302_26 (sequence is synthesized)
tgagaatttgaaagtgtgtcctggggtacacactgaggccttgatgataacattggaaatgatgtgtcggtcagtcatggagttttcatgatgatgctagaaagtatggattgactttct

SEQ ID NO: 304021 - DNA, 120 bp, Artificial Sequence
  ENSG00000133302_27 (sequence is synthesized)
aaatctgttcagtttgcattggtacttactgtggacttcatagcttactgacagatagtaatttgatttatttattgacagactttgcagccttgctaaattttaaaagcatttttaaaa

SEQ ID NO: 304022 - DNA, 120 bp, Artificial Sequence
  ENSG00000133302_28 (sequence is synthesized)
aaacttctacaaaactctagtatgggcttctgactttttccagggtgtagaatttgactcaaaagtaaaaataattttgttttagtatattctactttcattaatgtttttttgttctga

SEQ ID NO: 304023 - DNA, 120 bp, Artificial Sequence
  ENSG00000133302_29 (sequence is synthesized)
aagtgatattatattgtacatgtaaaattaatttaaatattttttcaaataaaaatgtaatgtcctgtattctagatgttctaggtcttagaatcatggcaagcatattcatacaaatgc

SEQ ID NO: 304024 - DNA, 120 bp, Artificial Sequence
  ENSG00000133302_30 (sequence is synthesized)
gtacctataaacttgtagctcctgactcttagggatggattttgaggaaaaaacaagactaaacaaaaacatgtagctccctatttcttctctctaggttgttggactgaaatatgcatt

SEQ ID NO: 304025 - DNA, 120 bp, Artificial Sequence
  ENSG00000133302_31 (sequence is synthesized)
ttagctttgtgtgtttctaaaataaacatttctaaaatttacagtaataattaatattcttttggtttttaaatgcagcaaatatgcagagtctgacagttcaattccttgatctgtttt

SEQ ID NO: 304026 - DNA, 120 bp, Artificial Sequence
  ENSG00000133302_32 (sequence is synthesized)
attttagcaattcatatacaaaatgtatctgtcgctgccctatgtaacccagtattctgtacctgaaaacattctgctgcataggtttatgagtttaatattaagatattgagtggcatc

SEQ ID NO: 304027 - DNA, 120 bp, Artificial Sequence
  ENSG00000133302_33 (sequence is synthesized)
taagtaatagatttgagattatttaagatcttaatatatagtatgaatttactgagtagtaatgttttaatttgcagtttttccttatagcagtttgtagtaaaactaaaagaaagggtg

SEQ ID NO: 304028 - DNA, 120 bp, Artificial Sequence
  ENSG00000133302_34 (sequence is synthesized)
tggataataaccacttttgagattggagtttcttcactactgggagtaagttacattatgatacaggtggaaaataaacacttccatttagcttttatgtaattcaagtgatgaccttag

SEQ ID NO: 304029 - DNA, 120 bp, Artificial Sequence
  ENSG00000133302_35 (sequence is synthesized)
cagttaatctgctaaagcaatacacttcagttttattttggaaatagatattttaacaagatacaaatgctcagtatcatattactgggtttgtaatctaaattgaaaactgctatatca

SEQ ID NO: 304030 - DNA, 120 bp, Artificial Sequence
  ENSG00000133302_36 (sequence is synthesized)
gtatgaaaaaatattttaaataagtactttttccacacatactcaggaaatactagtttctatttagccttcaaatttggcatcatacaaatctctttattattaatctgccaaagtatc

SEQ ID NO: 304031 - DNA, 120 bp, Artificial Sequence
  ENSG00000133302_37 (sequence is synthesized)
agacaaaaaatgatatagtgaagactatctaagaagagtttaaatgcttatagagagtaaagtgcttctccagatgatgaataagaacgttttttattccaatgagtacctctttacttc

SEQ ID NO: 304032 - DNA, 120 bp, Artificial Sequence
  ENSG00000133302_38 (sequence is synthesized)
acttgtaaaggtgtctgggatagtgtttgcttggtaaactaatataaacttgtaaacataggctttgacatcatacacattttcaaatccttgtctagtttcttaataactaaattgcaa

SEQ ID NO: 304033 - DNA, 120 bp, Artificial Sequence
  ENSG00000133302_39 (sequence is synthesized)
ggcaaattcttttctgagctttggctttcctacatgtcaaatagaaatcacaccaggtatctttgtcatgatagaattgttagcatatcacatcatatgacacttaataaatattatttc

SEQ ID NO: 304034 - DNA, 120 bp, Artificial Sequence
  ENSG00000133302_40 (sequence is synthesized)
ctttctaattcttacctcctcttttgattataatgaatcatttagacaaaaggcaatatagtaattgtttaagttggtagtaattctaaggtaattaaggaatcaacatcatgagttagg

SEQ ID NO: 304035 - DNA, 120 bp, Artificial Sequence
  ENSG00000133302_41 (sequence is synthesized)
gttttatactgttagtacaaagtagttttccaaattagatgttcataacgtatatttgtttaattgcaattagcattaatatttcataattgactgctctgtctgccaacttctacaagc

SEQ ID NO: 304036 - DNA, 120 bp, Artificial Sequence
  ENSG00000133302_42 (sequence is synthesized)
agtgatgacatgaagtgtgaaacagatgtcactgaggtctctgcctttaagaagttttacacttcttcgaaagtccaacgtggcaaacataggttactgtgttctgtgccctggctaaca

SEQ ID NO: 304037 - DNA, 120 bp, Artificial Sequence
  ENSG00000133302_43 (sequence is synthesized)
ataccagtatatgagtatgaatctaaatgttcaggaaaaggcttcattcccaaaattacttcttatactttattttagaaaacataataataattgccttgaataattgcccaaatctat

SEQ ID NO: 304038 - DNA, 120 bp, Artificial Sequence
  ENSG00000133302_44 (sequence is synthesized)
cttggaggtataggaagaagaaattctcaataagtaaagtataattcatagtcttagtcctagattttcaatggcagacttttcaaagttgcatctgaagacaaggttgagaaatgctat

SEQ ID NO: 304039 - DNA, 120 bp, Artificial Sequence
  ENSG00000133302_45 (sequence is synthesized)
tcttcactgtattttgccagatgtgatatcatagttctatggaatcatattttttaaatttctgtaagagaccttattacaatgtaaataaagctggagaggagatttctgagcagttaa

SEQ ID NO: 304040 - DNA, 120 bp, Artificial Sequence
  ENSG00000133302_46 (sequence is synthesized)
aaagaataattctgtatataaacagtggaggtagataaatctatcttcttttatagtcctatctctcctatttataaaaatctacaaaaaccaggtattttctcattattttaatggaat

SEQ ID NO: 304041 - DNA, 120 bp, Artificial Sequence
  ENSG00000133302_47 (sequence is synthesized)
tatttcctaacaaacttgatggtattggataaaattaaagtttattctaaactgttaagttgtaggtccttggaaaatttgctttgttaactcttttgtcatgtggagagagagagagat

SEQ ID NO: 304042 - DNA, 120 bp, Artificial Sequence
  ENSG00000133302_48 (sequence is synthesized)
ggaggggagagaattagttagctagggttcttaagaatacctttaatcattacataccctgtatttttaaatagctatgttttgcccctcaaaaagtattcaaaataaatactaacagaa

SEQ ID NO: 304043 - DNA, 120 bp, Artificial Sequence
  ENSG00000133302_49 (sequence is synthesized)
gaagcagttgagtgctgcagcggcagtcgtcgcccctgccgccgctgccaccgaaggaagcatcccagacaccgggaagagacagggtttcaccatgctgtccaggctggtctcgaactc

SEQ ID NO: 304044 - DNA, 120 bp, Artificial Sequence
  ENSG00000133302_50 (sequence is synthesized)
actctaaacttttattgctgcaaaacccagtatttttggtgttctctgatcatttgggggttttatagcaggattgaagctttaaaccttgaactaggggagacaatgcctgtgttaaac

SEQ ID NO: 304045 - DNA, 120 bp, Artificial Sequence
  ENSG00000133302_51 (sequence is synthesized)
cttttgcagtagaatttcattgctgaattgctgatagaacagaagcagtatggattggtgggggtccttccccttcccaccccccacccccgcctttttaaatgcaggggatgtttaaac

SEQ ID NO: 304046 - DNA, 120 bp, Artificial Sequence
  ENSG00000133302_52 (sequence is synthesized)
ggtgactcctttgcatgatgcactgtcaaacggacatgtagaaattggcaagctgctactacagcatgggggtcatactccctgtcacaaactccagctgaactaacttggaggaggatc

SEQ ID NO: 304047 - DNA, 120 bp, Artificial Sequence
  ENSG00000133302_53 (sequence is synthesized)
tcactatcgatcttcaaaatacatcaattctaagtagacaaccttccacctttgaagaacaaaacttttactgtttcacaaacacattagacaagaatgtggttcgatcaacagggcata

SEQ ID NO: 304048 - DNA, 120 bp, Artificial Sequence
  ENSG00000133302_54 (sequence is synthesized)
ggattcatgaaatcaacatttattcatatggtatcacctggggcagcaggaatgcttctggttctgattaaaaccaccgcaacaacttgtggatctaaggactttgttcttaaattaatt

SEQ ID NO: 304049 - DNA, 120 bp, Artificial Sequence
  ENSG00000133313_0 (sequence is synthesized)
cgtggtacggaaccggcgccgcgcttgctgctggtaacagggccttgcctagtgggccttccttcccaggtcgcccctcagtctccactagagacaggactgaccagttgctcttccttc

SEQ ID NO: 304050 - DNA, 120 bp, Artificial Sequence
  ENSG00000133313_1 (sequence is synthesized)
caagaaccttcgagatctgcggtctggggtctggttgaaagatggcggccctcactaccctgtttaagtacatagatgaaaatcaggatcgctacattaagaaactcgcaaaatgggtgg

SEQ ID NO: 304051 - DNA, 120 bp, Artificial Sequence
  ENSG00000133313_2 (sequence is synthesized)
ctatccagagtgtgtctgcgtggccggagaagagaggcgaaatcaggaggatgatggaagttgctgctgcagatgttaagcagttggggggctctgtggaactggtggatatcggaaaac

SEQ ID NO: 304052 - DNA, 120 bp, Artificial Sequence
  ENSG00000133313_3 (sequence is synthesized)
aaaagctccctgatggctcggagatcccgctccctcctattctgctcggcaggctgggctccgacccacagaagaagaccgtgtgcatttacgggcacctggatgtgcagcctgcagccc

SEQ ID NO: 304053 - DNA, 120 bp, Artificial Sequence
  ENSG00000133313_4 (sequence is synthesized)
tggaggacggctgggacagcgagcccttcaccctggtggagcgagacggcaagctgtatgggagaggttcgactgatgataagggcccggtggccggctggataaacgccctggaagcgt

SEQ ID NO: 304054 - DNA, 120 bp, Artificial Sequence
  ENSG00000133313_5 (sequence is synthesized)
atcagaaaacaggccaggagattcctgtcaacgtccgattctgcctcgaaggcatggaggagtcaggctctgagggcctagacgagctgatttttgcccggaaagacacattctttaagg

SEQ ID NO: 304055 - DNA, 120 bp, Artificial Sequence
  ENSG00000133313_6 (sequence is synthesized)
atgtggactatgtctgcatttctgacaattactggctgggaaagaagaagccctgcatcacctacggcctcaggggcatttgctactttttcatcgaggtggagtgcagcaacaaagacc

SEQ ID NO: 304056 - DNA, 120 bp, Artificial Sequence
  ENSG00000133313_7 (sequence is synthesized)
tccattctggggtgtacgggggctcggtgcatgaggccatgactgatctcattttgctgatgggctctttggtggacaagagggggaacatcctgatccccggcattaacgaggccgtgg

SEQ ID NO: 304057 - DNA, 120 bp, Artificial Sequence
  ENSG00000133313_8 (sequence is synthesized)
ccgccgtcacggaagaggagcacaagctgtacgacgacatcgactttgacatagaggagtttgccaaggatgtgggggcgcagatcctcctgcacagccacaagaaagacatcctcatgc

SEQ ID NO: 304058 - DNA, 120 bp, Artificial Sequence
  ENSG00000133313_9 (sequence is synthesized)
accgatggcggtacccgtctctgtccctccatggcatcgaaggcgccttctctgggtctggggccaagaccgtgattcccaggaaggtggttggcaagttctccatcaggctcgtgccga

SEQ ID NO: 304059 - DNA, 120 bp, Artificial Sequence
  ENSG00000133313_10 (sequence is synthesized)
acatgactcctgaagtcgtcggcgagcaggtcacaagctacctaactaagaagtttgctgaactacgcagccccaatgagttcaaggtgtacatgggccacggtgggaagccctgggtct

SEQ ID NO: 304060 - DNA, 120 bp, Artificial Sequence
  ENSG00000133313_11 (sequence is synthesized)
ccgacttcagtcaccctcattacctggctgggagaagagccatgaagacagtttttggtgttgagccagacttgaccagggaaggcggcagtattcccgtgaccttgacctttcaggagg

SEQ ID NO: 304061 - DNA, 120 bp, Artificial Sequence
  ENSG00000133313_12 (sequence is synthesized)
ccacgggcaagaacgtcatgctgctgcctgtggggtcagcggatgacggagcccactcccagaatgaaaagctcaacaggtataactacatagagggaaccaagatgctggccgcgtacc

SEQ ID NO: 304062 - DNA, 120 bp, Artificial Sequence
  ENSG00000133313_13 (sequence is synthesized)
tgtatgaggtctcccagctgaaggactaggccaagccctctgtgtgccatctccaatgagaaggaatcctgccctcacctcacccttttccaacttgcccagggaagtggaggttccctc

SEQ ID NO: 304063 - DNA, 120 bp, Artificial Sequence
  ENSG00000133313_14 (sequence is synthesized)
tttcctttccctcttgtcaggtcatccatgactttagagaacagacacaagtgtatccagctgtccacgggtggagctacccgttgggcttatgagtgacctggagtgacagctgagtca

SEQ ID NO: 304064 - DNA, 120 bp, Artificial Sequence
  ENSG00000133313_15 (sequence is synthesized)
ccctgggtaagttctcagagtggtcaggatggcttgacctgcagaagatacccaaggtccaaaagcacaaggtctgcggaaagttctggttgtcggccgggcaccacggctcacacctat

SEQ ID NO: 304065 - DNA, 120 bp, Artificial Sequence
  ENSG00000133313_16 (sequence is synthesized)
acaggaggatcacttgaggccaggagtctgagacaagcctaggcaacaaaacaagactctgtctctacaaaaagtttaagaaatgagccagacatggtggtgtatgcctgtagtcccagc

SEQ ID NO: 304066 - DNA, 120 bp, Artificial Sequence
  ENSG00000133313_17 (sequence is synthesized)
aggctgaggcaggaggatcgcttgagaccaagagtttgagcctgcggtgagctgtgaatgcaccacggcactcaagcctgggcaatgtagcaagatcctgtctctacaagaaatttttta

SEQ ID NO: 304067 - DNA, 86 bp, Artificial Sequence
  ENSG00000133313_18 (sequence is synthesized)
gagctgtgaatgcaccacggcactcaagcctgggcaatgtagcaagatcctgtctctacaagaaattttttaaaaatgagccaaag

SEQ ID NO: 304068 - DNA, 120 bp, Artificial Sequence
  ENSG00000133313_19 (sequence is synthesized)
gcactccagcctgggcgacagaacgagaccccatctcaaaaaaaataagttctggttgtcattgaattgggataaacagagagcttgatgctttctgccttctgtctcaggtgatgcatt

SEQ ID NO: 304069 - DNA, 120 bp, Artificial Sequence
  ENSG00000133313_20 (sequence is synthesized)
tgaggaaagaaattagggcctcctctgatctctcgctatctgcgggtcctgtccttttctcaagaccttcaccattactggcattttcctgtcttctctttagtatgatccctcaaaacc

SEQ ID NO: 304070 - DNA, 120 bp, Artificial Sequence
  ENSG00000133313_21 (sequence is synthesized)
tcactaactggaaggatgattttgtctcagtttgtactcctaaataaaaagtaaacatgacacctctaaaagaatcgctccatctcagttgctcgtcgcgtgcacaccatgcttattgag

SEQ ID NO: 304071 - DNA, 120 bp, Artificial Sequence
  ENSG00000133313_22 (sequence is synthesized)
tggtgtctggttggtggtgtcagctcagggcaggggacagcaggcaggacccggaaaacagaacccaggtcttcccaggcgagcactccctccctcgtccacacaagtggaggctcactc

SEQ ID NO: 304072 - DNA, 120 bp, Artificial Sequence
  ENSG00000133313_23 (sequence is synthesized)
gtggccccctgcatgttccgagaagtgtccctgtctctgctccttaacggctgtggggccacaggaagtccagctggcttaaacaaagaattgattggcccacttgacataaaagaacag

SEQ ID NO: 304073 - DNA, 120 bp, Artificial Sequence
  ENSG00000133313_24 (sequence is synthesized)
agtaaactcaatgaaaggaaaaggctccttgaagtggttggttccagggctgggcagggaagatgcaagatgagtctggaccctctcacatcggaacgtaaggatgcgctcctgagggcg

SEQ ID NO: 304074 - DNA, 120 bp, Artificial Sequence
  ENSG00000133313_25 (sequence is synthesized)
tggggctgcgtccaaggacacaggagccagcctggaagagtttgcaggggcccaggggagcaattggagtgagaaaatagcagtagtgttggatttttaccatggaataaacaacaatcc

SEQ ID NO: 304075 - DNA, 120 bp, Artificial Sequence
  ENSG00000133313_26 (sequence is synthesized)
atgagtccatactaatataaataaagtgacaaagtgggtgagaaggaccagtgcccctggatgaagaatctctgctcatgtgggaggaaggtgggagatcaaagctggagcacttgctgc

SEQ ID NO: 304076 - DNA, 120 bp, Artificial Sequence
  ENSG00000133313_27 (sequence is synthesized)
tgcaggtgagacccctgacacactctcaaattggtaggcaaaggtttaaagaacgggatatttgcttagcttaaaagcacctcccaaggggaaaacagtaacttcacagtggagagacct

SEQ ID NO: 304077 - DNA, 120 bp, Artificial Sequence
  ENSG00000133313_28 (sequence is synthesized)
ggcaggcaccaccctcagatcaaaatgaacctcagcagtaatgacacgtccacatcagcacccccaacaccactccctgaggaggacatgccagttctgggaacatcacactcatcgtga

SEQ ID NO: 304078 - DNA, 120 bp, Artificial Sequence
  ENSG00000133313_29 (sequence is synthesized)
caaaacatcagacaaacccaaacggatgaaatgtgaggaaaatctgtagttggttttacgtggatgttaatctcttagttttgatcattgtgctgtagctgcataagaggttagctgggt

SEQ ID NO: 304079 - DNA, 120 bp, Artificial Sequence
  ENSG00000133313_30 (sequence is synthesized)
gaagtgtatctggggaccctctatggcttttgcatcttttctctaagtctcctgtcatttcaaagtaaaaacaaaaaaagaagacaagggtagcggcttcaggtacagctggacccagca

SEQ ID NO: 304080 - DNA, 120 bp, Artificial Sequence
  ENSG00000133313_31 (sequence is synthesized)
ctcagtgctatctgggcttgtggctccaactcaactcctccatcagaactgtgagaaatgcattctttcagcttctaatcctgcaaaaagaactgcatggtcttcccccagaaatcctaa

SEQ ID NO: 304081 - DNA, 120 bp, Artificial Sequence
  ENSG00000133313_32 (sequence is synthesized)
gagtagctgctggtgtctcatgcatgcgagctgcatatgggcccccgttagtcaggaacccatgctgagaggtgctatgctttgaatgtttggctcctcccaaactcgtgttgaaactta

SEQ ID NO: 304082 - DNA, 120 bp, Artificial Sequence
  ENSG00000133313_33 (sequence is synthesized)
atagccattgtaacagtattaagaggcagggccttcaagagctggtcaggccatgagggccctgtcctcctgactgagtgaatgctgttattgtaggagtgggcttgtttggcctcctct

SEQ ID NO: 304083 - DNA, 120 bp, Artificial Sequence
  ENSG00000133313_34 (sequence is synthesized)
tgctctctctacccctctctgagcccttgtgttgtgggatgacacagccagaaggcccttgccaggttccggtccctccaccttggacctcccagcctcccgaacgttgagccaatacat

SEQ ID NO: 304084 - DNA, 120 bp, Artificial Sequence
  ENSG00000133313_35 (sequence is synthesized)
ctctgctcattgtaaattacctagtcttgggcattgtgttacagcagcaaaaagcagcctacggcagtcaccgtgctaacacctgcagcagcctgcggcggtcaccgtgctaacacgtgc

SEQ ID NO: 304085 - DNA, 120 bp, Artificial Sequence
  ENSG00000133313_36 (sequence is synthesized)
agcagcctgtgtggctcaggccagtcagcttcccctggaagcaagtgtgaggtcgtcgcctctggaagtgctagcggagggtgatctcccggaggaaatcagagtggtgttctactagaa

SEQ ID NO: 304086 - DNA, 120 bp, Artificial Sequence
  ENSG00000133313_37 (sequence is synthesized)
ggccgatgactcctgggtaaagtgccaatgctcacctccatctctgcaagctcagtccctcgtggaatttccaggagcacaagggcaatctcgacagctccacgttcccagtgcccgacc

SEQ ID NO: 304087 - DNA, 120 bp, Artificial Sequence
  ENSG00000133313_38 (sequence is synthesized)
caagcctggcccatgatcagataaatgcctaagtggggtggcatggacatttgcacacgtccagactgctttatgttagaagctgagctggcatgccactagctggttttgatgtaaaca

SEQ ID NO: 304088 - DNA, 120 bp, Artificial Sequence
  ENSG00000133313_39 (sequence is synthesized)
acaattttgtaaaaccctggactgaatgggtctgactaacggctggttctgtgaacttgagcctcagcgtcctgtgtcagaagagcacaaaccactttcccagagaggttatgaagacag

SEQ ID NO: 304089 - DNA, 120 bp, Artificial Sequence
  ENSG00000133313_40 (sequence is synthesized)
aaatgaccctgtgacccctttgcaaagtatgaagaacggttcccactcatgcatggagctggatcttctcaagtgggaaacaggcgtggtaaataaatactgttgtttcagctggtgtaa

SEQ ID NO: 304090 - DNA, 120 bp, Artificial Sequence
  ENSG00000133313_41 (sequence is synthesized)
tctctcttccctcagtacaaacagtttttaaaatctttaacccaaagcacacgtgatgggtctgtcctatttccaatcagcctgttcaactgcagcagccacagaggaaactcgcaaaat

SEQ ID NO: 304091 - DNA, 120 bp, Artificial Sequence
  ENSG00000133313_42 (sequence is synthesized)
gcgcttgctgctggtaacagggccttgcctagtgggccttccttcccaggcatggtggctcatgtgtgtaacctcggcactttgggagaccaaggcggacagatcgcttgagtccaggag

SEQ ID NO: 304092 - DNA, 120 bp, Artificial Sequence
  ENSG00000133313_43 (sequence is synthesized)
gggagaagagccatgaagacaggttggacgctctccttgtggatgatgccgcgcagggcccttcgcacgtctgacaggactctgctatatcgcgtgggcgtgtagctatgtcgggggcgc

SEQ ID NO: 304093 - DNA, 120 bp, Artificial Sequence
  ENSG00000133313_44 (sequence is synthesized)
tgctgtatcgtgggggcgtgtagttaagtcagcatgaggacagctagtgtgtgggatgagcctggacccctggcggaccttgaacgcgggcttgctgtccccagggccttgcacagcatc

SEQ ID NO: 304094 - DNA, 120 bp, Artificial Sequence
  ENSG00000133313_45 (sequence is synthesized)
tgttactcgacagacacccgggccatgcatgcccccgcttcctggctctggccaagtcagtaattatgacagtcacggttcagaagctaatcaaagataatgcatcacatgtaagtgacc

SEQ ID NO: 304095 - DNA, 120 bp, Artificial Sequence
  ENSG00000133313_46 (sequence is synthesized)
cgagacggtggagtgcagcaacaaagacctccattctggggtgtacgggggctcggtgcatgaggccatgactgatctcattttgctgatgggctctttggtggacaagagggggaacat

SEQ ID NO: 304096 - DNA, 120 bp, Artificial Sequence
  ENSG00000133313_47 (sequence is synthesized)
aggggcatttgctactttttcatcgaggtacagtgccaagctgtacgggtcacttctttctaacccctgaatctcccggttctcccaaacgcaaagtagacaaggacccagaagtcaggt

SEQ ID NO: 304097 - DNA, 120 bp, Artificial Sequence
  ENSG00000133313_48 (sequence is synthesized)
gtctctgtgagtgtggtcccttgccagaacatagtgcaggctctgtcacatcacacaggcccctcactgtctctgtgtggtttacgtcctcctaaaaataaattctgatttttaaaatgt

SEQ ID NO: 304098 - DNA, 120 bp, Artificial Sequence
  ENSG00000133313_49 (sequence is synthesized)
taaataaataaataaagttactccgtatgaactttagatttttagaggggagtgaggtgtcatttaaaaggataatgcttttgcttaaatcagcatactgcttttaccttaattagtggt

SEQ ID NO: 304099 - DNA, 120 bp, Artificial Sequence
  ENSG00000133313_50 (sequence is synthesized)
gttctccagagcatataaaaatggttccatttaatggctttgtaacgggggaggtggggggaagtgaaacaggagtaacccagaagtgtgaatgggaggagaaactggaacctggcctag

SEQ ID NO: 304100 - DNA, 120 bp, Artificial Sequence
  ENSG00000133313_51 (sequence is synthesized)
attttttatgagatgtaattccatgtcattgtccttgtcacggtggaattactaacttgcggtggattgtaggattaaccctctctgtgcacttgggcgcccctccagcgtcagacccac

SEQ ID NO: 304101 - DNA, 120 bp, Artificial Sequence
  ENSG00000133313_52 (sequence is synthesized)
ctgtctgcttggccgtgccctcactcctggaactcgctctctctggacagaagtctttgtctttgctccttgtccgctgtcttacagtctccgcggatggcaccatctctctgccacctg

SEQ ID NO: 304102 - DNA, 120 bp, Artificial Sequence
  ENSG00000133313_53 (sequence is synthesized)
cactgggaactgggtccccatccctgccaggctctcctctgggaccactgcccttcccacgttgaaagctccctgtccccctcacccactccgtggctgggtcctgctctccacttctgg

SEQ ID NO: 304103 - DNA, 120 bp, Artificial Sequence
  ENSG00000133313_54 (sequence is synthesized)
gccttcacggtgccactccttttctgggctgctcccagagtgacctcaacatgccacttctcttcttgactcctcttgggggactcaggatggcacagagggtccctcccctcacctgcc

SEQ ID NO: 304104 - DNA, 120 bp, Artificial Sequence
  ENSG00000133313_55 (sequence is synthesized)
ttctgcctgccccttctcccacctgtacccagccacacgggaccacgtgcagcccccaggagcctgtgctgctcaaaactgcacctgggcacctgcgcgggcgtcagccccatcaccgct

SEQ ID NO: 304105 - DNA, 120 bp, Artificial Sequence
  ENSG00000133313_56 (sequence is synthesized)
gcctcgtcctctgtgaggcctgcctccagccatcctcttagccctccctgtcccagtctcagtaggctcctgactgtcaaggaacctagaagagcacctgtactgtgggaaaacttcact

SEQ ID NO: 304106 - DNA, 120 bp, Artificial Sequence
  ENSG00000133313_57 (sequence is synthesized)
cactgccagccgcccggcctccctctccttgtcagggagccctggagggtgggggcaggtcacatttgtcggcagctctgagccagcaccgtgccagccgctgtagttgttcagtgtttg

SEQ ID NO: 304107 - DNA, 120 bp, Artificial Sequence
  ENSG00000133313_58 (sequence is synthesized)
ttgtagggataaggattgttgttttagaaaagcttatatttgatcttcagtttttgtgaaaagttgggtttcattcgtcaaaggaaattccccaggtggtgatgactttcagcctcatac

SEQ ID NO: 304108 - DNA, 120 bp, Artificial Sequence
  ENSG00000133313_59 (sequence is synthesized)
taccttgggctggggcctgctgaggctgcgggacctgggaagcaggctgagccccgggaggtcaggagactggccacgcagacccaggcccacgagaaggccacgccttgaggacggctc

SEQ ID NO: 304109 - DNA, 120 bp, Artificial Sequence
  ENSG00000133313_60 (sequence is synthesized)
cctcctctggttccatgaggccgggactgcgtggcagaggatggaggaggcgtggggccttgtcttcaagttgtcgcttgtgttgtcagcttccccagaagcaattgtggtgaggggccg

SEQ ID NO: 304110 - DNA, 120 bp, Artificial Sequence
  ENSG00000133313_61 (sequence is synthesized)
tcagagtgataactacagaaagaaagaagcagaggttaaatgataaacatgttctttgtttttttatcaaattaggtgtcacaattgggtgggggtgagattatggttcttttttgacaa

SEQ ID NO: 304111 - DNA, 120 bp, Artificial Sequence
  ENSG00000133313_62 (sequence is synthesized)
cggtgccttgaggttcctaagtgactgggcttcctgtccccattgctccccgctgcttctggtaaatgggttttaatgaactaagcagctggctgcgactccctggagttagactggagg

SEQ ID NO: 304112 - DNA, 120 bp, Artificial Sequence
  ENSG00000133313_63 (sequence is synthesized)
tctccaccctgacccagcaggaagccatgcccccacctgaccaccgtgaccacggtgggagaaggaaggggttcttgggagcatccacgtggcttatctctttgatgatgccaaattctc

SEQ ID NO: 304113 - DNA, 120 bp, Artificial Sequence
  ENSG00000133313_64 (sequence is synthesized)
tgacaaatttaacgatagtgttgggtggaaattgggggctcctgatcggaaggggaagcctctctcgtgtttgcttggctaaggggttatcagatgtgcacctgagacacgctgcttctg

SEQ ID NO: 304114 - DNA, 120 bp, Artificial Sequence
  ENSG00000133313_65 (sequence is synthesized)
tcagaaaacaggccaggtatgccccccacgctgacttctgcctgagtcctgggttccatctgagccatacaaagacaggctctctgttcacacaacagcttataaagctcacaggaaaag

SEQ ID NO: 304115 - DNA, 120 bp, Artificial Sequence
  ENSG00000133313_66 (sequence is synthesized)
ataagacaagcgtcccccagcccttatcagcacagatgactcggatgtaagagtataggtttgttttccagctttaggaaacattcaaagtgtaattgttttacagctgcttaaaggtca

SEQ ID NO: 304116 - DNA, 120 bp, Artificial Sequence
  ENSG00000133313_67 (sequence is synthesized)
gtgtggcctcttggtcaggtgcttgtggaggtttagctgatgccctttggctgtttctggactaagatcatcaactttcttaaactgaatctggttttccttgggctctgtcgtctgtgt

SEQ ID NO: 304117 - DNA, 120 bp, Artificial Sequence
  ENSG00000133313_68 (sequence is synthesized)
tgtgggtttgtggtggtggacacaggatgtgacattcttgctgggatccctgaagtgactatatcctctgcaataacagaaagtgaaacttatctttgtgctttaagagtgtaaaaattt

SEQ ID NO: 304118 - DNA, 120 bp, Artificial Sequence
  ENSG00000133313_69 (sequence is synthesized)
gtaaaaatttttattaaagtaccagtaaaactaaaagtgcctacttttagttttcactgtattttcttcaactcaggccctccctctgttgttacctgccatctgacacggaattttgtg

SEQ ID NO: 304119 - DNA, 120 bp, Artificial Sequence
  ENSG00000133313_70 (sequence is synthesized)
taattttccttccaagtaaagaagggaagtttagccccagcctctaactggttcccaaagtttttgtctctgaagccgcagtcacttcctggagcgtctctggctgggtgttgcagtgct

SEQ ID NO: 304120 - DNA, 120 bp, Artificial Sequence
  ENSG00000133313_71 (sequence is synthesized)
actttggaccaagcgtgttctggtcagagtcccagagccgccccttaccatggtgccttgtggaggggactctggtggctggaggtcagcccagcttctgactgtccccctcagctggga

SEQ ID NO: 304121 - DNA, 120 bp, Artificial Sequence
  ENSG00000133313_72 (sequence is synthesized)
ttcctggggagatggagtcttcccactgggaatgggagcctggggctcacccttcatgctgaatactgaggtcttgtcacgaggaggtgtccccgggtcagcgcctggctctatcctggg

SEQ ID NO: 304122 - DNA, 120 bp, Artificial Sequence
  ENSG00000133313_73 (sequence is synthesized)
tctggatgcagtgtagcctgtggtcattgattttatgaagtacctcggtctgctcaggctgccacaataaagaccacagacgcggtagcttacgtggcagacgcgatagcttacgtggca

SEQ ID NO: 304123 - DNA, 120 bp, Artificial Sequence
  ENSG00000133313_74 (sequence is synthesized)
gaaacggattcctcactgtttcggaggcggatgagtccaggaccaaggtgccggcagctgtggcatctgacgagggttcctcctggccgtggccgctggcctcgcttgtcctcacatggc

SEQ ID NO: 304124 - DNA, 120 bp, Artificial Sequence
  ENSG00000133313_75 (sequence is synthesized)
agagggcaggctctcggtatcttctcacccaggcccacccttctggcctcatttaacctttgtctaaataaggtttagaaagagaaaaaaaaactactaaagaaaaaaagctaggctttt

SEQ ID NO: 304125 - DNA, 120 bp, Artificial Sequence
  ENSG00000133313_76 (sequence is synthesized)
aaagaattcaagttagttttattcaggcgcctcactgaggaatgcggactgcggcccggggcccaggagcagccttggagaggtttggctgggctgctctgagagagcggctcagcccgc

SEQ ID NO: 304126 - DNA, 120 bp, Artificial Sequence
  ENSG00000133313_77 (sequence is synthesized)
agctcatctgcaggtggaggagcttcggtgcgtgctgaatcacatcgcacctgctcagatgttacattccagccaagccacactgagcctcggtgtaagagcacatgtggtcaaaggtca

SEQ ID NO: 304127 - DNA, 120 bp, Artificial Sequence
  ENSG00000133313_78 (sequence is synthesized)
cagaggcgcaaccactaatgcggtcaggtgctatcttatgtgtgggaaaaggtaaggacagggtcatttatctcctaaggaatgcagcgactcgggcaagaggcaggggtggtgtgtgct

SEQ ID NO: 304128 - DNA, 120 bp, Artificial Sequence
  ENSG00000133313_79 (sequence is synthesized)
cccccgttttgtcttcaaagcatctttcctgagagctacaggtagtggcagggtggagcctgtgaaaggccggcaagcagaatggcgcaaacgcagcttctcacatttgtgactttgtct

SEQ ID NO: 304129 - DNA, 120 bp, Artificial Sequence
  ENSG00000133313_80 (sequence is synthesized)
cacaccttagttacttctgttaagtccccaagtgtagtcataatggagtttagggcttaaatatatgaattctgggggcacgcaaacattctgtccataatataaagcaggtcagggaag

SEQ ID NO: 304130 - DNA, 120 bp, Artificial Sequence
  ENSG00000133313_81 (sequence is synthesized)
tctttggaaagagtgaattgcttgatattaaaactttgtcttttactttgaaataactgggttttattttttgataagaagtcccctctttctggccgggcgcggtggctcacacttgta

SEQ ID NO: 304131 - DNA, 84 bp, Artificial Sequence
  ENSG00000133313_82 (sequence is synthesized)
ccactgtgaaaaaataaaaaataaaaaaagaagtctcctctttccttactctagttatgtagctcagtattaagcaacagaaaa

SEQ ID NO: 304132 - DNA, 120 bp, Artificial Sequence
  ENSG00000133313_83 (sequence is synthesized)
cttactctagttatgtagctcagtattaagcaacagaaaatgagactcatcgtagactcagcatagacccatcacagacctgtcagaggccgattgtaagctcgctgtagacccatgata

SEQ ID NO: 304133 - DNA, 80 bp, Artificial Sequence
  ENSG00000133313_84 (sequence is synthesized)
cacccctctgcctgtggctggattggtgggcgtggcgggggcgtggcgatgcctgccctccggacaaggcggggttggtg

SEQ ID NO: 304134 - DNA, 120 bp, Artificial Sequence
  ENSG00000133315_0 (sequence is synthesized)
gagcaggtcgccgctggctggcagtcgccacccggtcccagagtaaataagggagagacactcccgagcgccgtaaatagagtccaagtgggcggagagccgtcccgcgccgcccgctca

SEQ ID NO: 304135 - DNA, 120 bp, Artificial Sequence
  ENSG00000133315_1 (sequence is synthesized)
tgtctctacagagccgactgtccggccgcctggcacagctgcgcgcggcggggcagctgctcgtccccccgcgcccccggcccggacacttggcgggtgccacgaggacccgcagcagca

SEQ ID NO: 304136 - DNA, 80 bp, Artificial Sequence
  ENSG00000133315_2 (sequence is synthesized)
cgtgcggtcccccggcgttcctgggcgtgttcggccgccgtgcgcggacctcggcgggagttggggcgtggggggcggcg

SEQ ID NO: 304137 - DNA, 120 bp, Artificial Sequence
  ENSG00000133315_3 (sequence is synthesized)
tggccatggcggcgaaggtggacctgagcacctccaccgactggaaggaggcgaaatcctttctgaagggcctgagtgacaagcagcgggaggaacattacttctgcaaggactttgtca

SEQ ID NO: 304138 - DNA, 120 bp, Artificial Sequence
  ENSG00000133315_4 (sequence is synthesized)
ggctgaagaagatcccgacatggaaggagatggcgaaaggggtggctgtgaaggtggaggagcccaggtataaaaaggacaagcagctcaatgagaaaatctccctgctccgcagcgaca

SEQ ID NO: 304139 - DNA, 120 bp, Artificial Sequence
  ENSG00000133315_5 (sequence is synthesized)
gcggtggcgtggacggctgcattcatcgggccgccggccccctgcttaccgacgagtgccggaccctgcagagctgtaagactggcaaggccaagatcaccggcggctatcggctcccgg

SEQ ID NO: 304140 - DNA, 120 bp, Artificial Sequence
  ENSG00000133315_6 (sequence is synthesized)
ccaagtacgtcatccacacagtggggcccatcgcctacggggagcccagcgccagtcaggctgccgagctccgcagctgctacctgagcagtctggacctgctgctggagcaccggctcc

SEQ ID NO: 304141 - DNA, 120 bp, Artificial Sequence
  ENSG00000133315_7 (sequence is synthesized)
gctcggtggcgttcccctgcatctccaccggcgtgtttggctacccctgtgaggcggccgccgagatcgtgctggccacgctgcgagagtggctggagcagcacaaggacaaggtggacc

SEQ ID NO: 304142 - DNA, 120 bp, Artificial Sequence
  ENSG00000133315_8 (sequence is synthesized)
ggctgatcatctgcgtgttcctcgagaaggacgaggacatctaccggagccggctcccccactacttccccgtggcctgaggctcccgcagcccaccctgaccgggactgacccgccttc

SEQ ID NO: 304143 - DNA, 120 bp, Artificial Sequence
  ENSG00000133315_9 (sequence is synthesized)
gggaccccgctcccagctctgagaggtcgccaaagcctgcagcctggcctgggcctggccaccccttctttccctccgcgccccgcccccgaggagcctaataaagatctcgttgtggca

SEQ ID NO: 304144 - DNA, 120 bp, Artificial Sequence
  ENSG00000133315_10 (sequence is synthesized)
gacggaggcagggtctgaacacgggcttcccacacagagcccgagtctcctttcagccgtccagggctttgtggaaccccagcgttcaaagtggctttggcactggtcaggcctccaggg

SEQ ID NO: 304145 - DNA, 120 bp, Artificial Sequence
  ENSG00000133315_11 (sequence is synthesized)
tcctgggtggccttggctcccaccccagcccctgtgcccaccagggggcagcagagattgcagttcccaggagcccatatatcagcctgtttattagtggaataaaagtcgttggcaacg

SEQ ID NO: 304146 - DNA, 120 bp, Artificial Sequence
  ENSG00000133315_12 (sequence is synthesized)
ttactcggagataaggagccggctttctcggggagatttgtgcgctctttttcaattacccctcgtctttctctgccacttttgcactaaagggataataaatgtatccgagcgtttcaa

SEQ ID NO: 304147 - DNA, 120 bp, Artificial Sequence
  ENSG00000133315_13 (sequence is synthesized)
ccctgcttaccgacgagtgccggaccctgcagagctgtaagactggcaaggccaagatcaccggcggctatcggctcccggccaagtgtgagtccccgacgcgcccccagctgtggggcg

SEQ ID NO: 304148 - DNA, 120 bp, Artificial Sequence
  ENSG00000133315_14 (sequence is synthesized)
cagacagggcgcccgtgtgtcactgggacatcaggggtgcggcccccacaggagtgctggggaactcctcagggggcccttcttaaccttaagggccaagacccggcccccaccccgcac

SEQ ID NO: 304149 - DNA, 120 bp, Artificial Sequence
  ENSG00000133315_15 (sequence is synthesized)
ttccttccctgtttctcctgcgcaagggcgcctggcggtggcgagatgggggtgatggcacacagccgtgagcctccgtgaagggcgcagggccaggcaggtgaaagcctgcaccagggc

SEQ ID NO: 304150 - DNA, 120 bp, Artificial Sequence
  ENSG00000133316_0 (sequence is synthesized)
agcaactacactgcgctgcatcggactcgacgcccgctggtgacgcacacgctgcgccggaagtgtgaactgtctgcctccaggctttgtcatggcggctgctgctgcacgctggaacca

SEQ ID NO: 304151 - DNA, 120 bp, Artificial Sequence
  ENSG00000133316_1 (sequence is synthesized)
tgtgtgggtcggcaccgagactgggatcttgaaaggggtaaatcttcagcgaaaacaggcggcgaacttcacggccggaggacagccgcggcgcgaggaggcagtgagcgccctgtgttg

SEQ ID NO: 304152 - DNA, 120 bp, Artificial Sequence
  ENSG00000133316_2 (sequence is synthesized)
gggcaccggcggcgagacccagatgctggtgggctgcgcggacaggacggtgaagcacttcagcaccgaggatggcatattccagggtcagagacactgcccgggcggggagggcatgtt

SEQ ID NO: 304153 - DNA, 120 bp, Artificial Sequence
  ENSG00000133316_3 (sequence is synthesized)
ccgtggcctcgcccaggccgacggcaccctcatcacatgtgtggattctgggattctcagagtctggcatgacaaggacaaggacacatcctctgacccactcctggaactgagagtggg

SEQ ID NO: 304154 - DNA, 120 bp, Artificial Sequence
  ENSG00000133316_4 (sequence is synthesized)
ccctggggtgtgtaggatgcgccaagacccagcacacccccatgtggttgccacaggtgggaaagagaatgctttgaagatatgggacctgcagggctctgaggaacctgtgttcagggc

SEQ ID NO: 304155 - DNA, 120 bp, Artificial Sequence
  ENSG00000133316_5 (sequence is synthesized)
cctgcacagggtaccaccaggtccgtgtttatgatccagcatccccccagcgccggccagtcctagagaccacctatggagagtacccactaacagccatgaccctcactccgggaggca

SEQ ID NO: 304156 - DNA, 120 bp, Artificial Sequence
  ENSG00000133316_6 (sequence is synthesized)
actcagtgattgtgggaaacactcatgggcagctggcagaaattgaccttcggcaagggcgtctactgggctgtctgaaggggctggcaggcagtgtgcgtgggttgcagtgccaccctt

SEQ ID NO: 304157 - DNA, 120 bp, Artificial Sequence
  ENSG00000133316_7 (sequence is synthesized)
caaagcctctactagcctcctgtggcttggacagagtcttgaggatacacaggatccagaatccacggggtctggagcataaggtttatctcaagtctcaattgaactgcctcctcttgt

SEQ ID NO: 304158 - DNA, 120 bp, Artificial Sequence
  ENSG00000133316_8 (sequence is synthesized)
caggcagggacaactgggaggatgagccccaagagcctcaagaacccaacaaggtgcccctagaagacacagagacagatgaactttgggcatccttggaggcagctgccaagcggaagc

SEQ ID NO: 304159 - DNA, 120 bp, Artificial Sequence
  ENSG00000133316_9 (sequence is synthesized)
tctcgggtttggagcagccccaaggagctctccaaacgagacggagaaagaagaagcggcctgggtccaccagcccctgacgcccctgtgcccactttgtaaataaactgctgaacaccc

SEQ ID NO: 304160 - DNA, 120 bp, Artificial Sequence
  ENSG00000133316_10 (sequence is synthesized)
acgcatcgacctggtattgcagtacttccaggaacggtgcactctcccttcggggagagaacaaccgttgtttaatggaagatttcgatcagttaggtccagaacacatattacataatg

SEQ ID NO: 304161 - DNA, 120 bp, Artificial Sequence
  ENSG00000133316_11 (sequence is synthesized)
gtccagaacacatattacataatggagccgggagacagactagggctggcttgatccggccacgcagtccaggaaaggtgcttttcacccccaagtgcaaaatgatcaatgtattcttcc

SEQ ID NO: 304162 - DNA, 120 bp, Artificial Sequence
  ENSG00000133316_12 (sequence is synthesized)
gctgcacgctggaaccatgtgtgggtcggcaccgagactgggatcttgaaaggtgggtggcaggctcgggcgtcgggaagtgcaggggtgcactcgcgcccctggcgtgactgacgcctt

SEQ ID NO: 304163 - DNA, 120 bp, Artificial Sequence
  ENSG00000133316_13 (sequence is synthesized)
gggggcgaaggagggctgaaaacaggggcacatcgagccccccatagccctgtcctccatctgcccaccccaccaggtgcggaatgactggctggacttgcgggttcccatctgggacca

SEQ ID NO: 304164 - DNA, 120 bp, Artificial Sequence
  ENSG00000133316_14 (sequence is synthesized)
ctggggaagggaggattaaggactctggaacggactcttatctcctattctttacagctcctggaactgagagtgggccctggggtgtgtaggatgcgccaagacccagcacacccccat

SEQ ID NO: 304165 - DNA, 120 bp, Artificial Sequence
  ENSG00000133316_15 (sequence is synthesized)
gggtggagtttcctgaactatgcctgttttcctcccacctggaagagaggaaaggagagtggatccccttcactgtgggaattatagggtgcaggtgtcagaggacattgggctgggtgt

SEQ ID NO: 304166 - DNA, 120 bp, Artificial Sequence
  ENSG00000133316_16 (sequence is synthesized)
taagagaactgggttctggtcctgatgcagcctctctgatttgctttgggacccaggcctgagcctcccatctctggcctcagctcctcagctttacaggaagggcccgaatggggaatc

SEQ ID NO: 304167 - DNA, 120 bp, Artificial Sequence
  ENSG00000133316_17 (sequence is synthesized)
tttatggtttgtctcatttgaggtcttgagacacgggcggggctgggtcactgtatttgtcctattttctttgcttctgcacattgaagtctgatcttggtcatatgcctctgctcaaaa

SEQ ID NO: 304168 - DNA, 120 bp, Artificial Sequence
  ENSG00000133316_18 (sequence is synthesized)
tctgtccctccatttcccctagatgggagtatggggggatggaatgctcacacacttccaacctaggggacctctcccctcagctctgtccatttatgctgctaagcagctctcctgaca

SEQ ID NO: 304169 - DNA, 120 bp, Artificial Sequence
  ENSG00000133316_19 (sequence is synthesized)
ccctgatgctcagagaagaggcatacatctaagatgagaaagtttctgggagtggatcataaataagaaagcagtgtgcagggagggggtgaggatgcagagacgccagagggtaggtgc

SEQ ID NO: 304170 - DNA, 81 bp, Artificial Sequence
  ENSG00000133316_20 (sequence is synthesized)
ggattacaggcgtgagccaccgcgcctcgctgtccgcctcttgaagagtaaacgaggccgggcgcggtggtttagtaatac

SEQ ID NO: 304171 - DNA, 120 bp, Artificial Sequence
  ENSG00000133316_21 (sequence is synthesized)
gtttctcccaggatcacagaagcttgtcacctgcacagggtaccaccaggtaaggtgtcacctcacacctgccttctcctgggataaagcagcctcctggagaaatggcccccacggttt

SEQ ID NO: 304172 - DNA, 120 bp, Artificial Sequence
  ENSG00000133316_22 (sequence is synthesized)
gacacaactgctcttctcaccattctgagttcagaggagcaagcgcttccccgtctgttccaaccctgtccctgagcccatgaccttcctctactgtattctagggtggagtttcctgaa

SEQ ID NO: 304173 - DNA, 120 bp, Artificial Sequence
  ENSG00000133316_23 (sequence is synthesized)
tttgcgccgaagatatcgacttgaactccccggaccatccgaatcacaagtcgaacgaaagccttctgattaccgtgctgtggcggcgactatccacgttcggtcgtcggggctcctcgc

SEQ ID NO: 304174 - DNA, 120 bp, Artificial Sequence
  ENSG00000133316_24 (sequence is synthesized)
ggccaagcaagaggcaaccagaccagattcggaagcaggagagtccgatccgagaaggcaaccaggaggagccggagaagggatgaccccagacctgctctcagtccgccccaacctcca

SEQ ID NO: 304175 - DNA, 120 bp, Artificial Sequence
  ENSG00000133316_25 (sequence is synthesized)
tgccctccgttcatgtttctgtctcagcatgcctggctccttaaggtccctcatcttttgcaggtttatctcaagtctcaattgaactgcctcctcttgtcaggcagggacaactgggag

SEQ ID NO: 304176 - DNA, 120 bp, Artificial Sequence
  ENSG00000133316_26 (sequence is synthesized)
gatacagagcccgaacccagctagggagggttggcaggtgtgagaaagaacataggcgcaggctgtgcagatcctggggagagacttgcttggacttctcgggagggatattttaagcaa

SEQ ID NO: 304177 - DNA, 120 bp, Artificial Sequence
  ENSG00000133316_27 (sequence is synthesized)
gagactgacatttagtgcctgaaactcagagcaaggaacccaagaagttggtgtttgactttgaccaagccctaaattcagaccagccctagtaagcaactcaagattcagacagaccag

SEQ ID NO: 304178 - DNA, 120 bp, Artificial Sequence
  ENSG00000133316_28 (sequence is synthesized)
tacagccagatgctagacatagctgtgaacagcaaaagcactctggaatatcacagagttgatttctagctgtggttgtaacatagctgagtggcaaattagtttctcagcgcttctatt

SEQ ID NO: 304179 - DNA, 120 bp, Artificial Sequence
  ENSG00000133316_29 (sequence is synthesized)
cctagagcccagtgacctagaggcttccttctaaactggactgttagtagggaatctggttgatatgagtttggggcctagagaatacttttatacttttttttttctttaaacattagt

SEQ ID NO: 304180 - DNA, 120 bp, Artificial Sequence
  ENSG00000133317_0 (sequence is synthesized)
cacaggagccagcctctggcttctctctgcaatggccatgtgctgcagacccggagtgggtagttagttggttaatgccagtcttcctcccctggacactgagttctgctgacagccccc

SEQ ID NO: 304181 - DNA, 120 bp, Artificial Sequence
  ENSG00000133317_1 (sequence is synthesized)
gcccagccagagctctgctgtataccaccgggagtggggctggtgtggagcctggaggtcgcccgctgccctcctagggctgctccagacagcattaaaacgctgcaggtcgcaggtgag

SEQ ID NO: 304182 - DNA, 120 bp, Artificial Sequence
  ENSG00000133317_2 (sequence is synthesized)
actaacagctgggagagctgctccaggcatttaggaccctgactggggcagatgagtcagcccagtgggggcagggctcctggaacgaggatctacagttggagttgccccactgtcatg

SEQ ID NO: 304183 - DNA, 120 bp, Artificial Sequence
  ENSG00000133317_3 (sequence is synthesized)
tcacctggagaaaaactggacccaattcctgacagcttcattctgcaaccaccagtcttccacccggtggttccttatgtcacgacgatttttggaggcctgcatgcaggcaagatggtc

SEQ ID NO: 304184 - DNA, 120 bp, Artificial Sequence
  ENSG00000133317_4 (sequence is synthesized)
atgctgcaaggagtggtccctctagatgcacacaggtttcaggtggacttccagtgtggctgcagcctgtgtccccggccagatatcgccttccacttcaaccctcgcttccataccacc

SEQ ID NO: 304185 - DNA, 120 bp, Artificial Sequence
  ENSG00000133317_5 (sequence is synthesized)
aagccccatgtcatctgcaacaccctgcatggtggacgctggcaaagggaggcccggtggccccacctggccctgcgaagaggctccagcttcctcatcctctttctcttcgggaatgag

SEQ ID NO: 304186 - DNA, 120 bp, Artificial Sequence
  ENSG00000133317_6 (sequence is synthesized)
tgtctcatgtggacacgctgggtatatttggtgacatcctggtagaggctgttggattcctgaacatcaatccatttgtggagggcagcagagagtacccagctggacatcctttcctgc

SEQ ID NO: 304187 - DNA, 120 bp, Artificial Sequence
  ENSG00000133317_7 (sequence is synthesized)
tgatgagccccaggctggaggtgccctgctcacatgctcttccccagggtctctcgcctgggcaggtcatcatagtacggggactggtcttgcaagagccgaagcattttactgtgagcc

SEQ ID NO: 304188 - DNA, 120 bp, Artificial Sequence
  ENSG00000133317_8 (sequence is synthesized)
tgagggaccaggctgcccatgctcctgtgacactcagggcctccttcgcagacagaactctggcctggatctcccgctgggggcagaagaaactgatctcagcccccttcctcttttacc

SEQ ID NO: 304189 - DNA, 120 bp, Artificial Sequence
  ENSG00000133317_9 (sequence is synthesized)
cccagagattctttgaggtgctgctcctgttccaggagggagggctgaagctggcgctcaatgggcaggggctgggggccaccagcatgaaccagcaggccctggagcagctgcgggagc

SEQ ID NO: 304190 - DNA, 120 bp, Artificial Sequence
  ENSG00000133317_10 (sequence is synthesized)
tccggatcagtggaagtgtccagctctactgtgtccactcctgaggatggttccagggaaataccgccagaaaacaagaaggtcagcccactcccagggccccactctcctcccctcatt

SEQ ID NO: 304191 - DNA, 120 bp, Artificial Sequence
  ENSG00000133317_11 (sequence is synthesized)
aaaccatccacctgacaccagcacatcaggcctggttcacctctggggtcacgagactgagtctacaggagctttgggcctgagggaaggcacaagagtgcaaaggttcctcgaactctg

SEQ ID NO: 304192 - DNA, 120 bp, Artificial Sequence
  ENSG00000133317_12 (sequence is synthesized)
caccttcctccaccaggagcctgggatatggctccatctgccttcagggcctggactgcactcacagaggcaagtgttgtagactaacaaagatactccaaaatacaatggcttaaagaa

SEQ ID NO: 304193 - DNA, 120 bp, Artificial Sequence
  ENSG00000133317_13 (sequence is synthesized)
agagtgctgagattacaggcatgagccacagagcccagcccaggtaacttctacatggggaaaggtgagcctgggaaggccattgttaagtgcctctccaggggtccatttcagagttag

SEQ ID NO: 304194 - DNA, 120 bp, Artificial Sequence
  ENSG00000133317_14 (sequence is synthesized)
tttcagagttagctgtcagttcctaacttgtccattcttcttgcctcccagttcctagtctccagccactcaacagtcctcagaaagccccagtaccaggcttctggggaccagggtgac

SEQ ID NO: 304195 - DNA, 120 bp, Artificial Sequence
  ENSG00000133317_15 (sequence is synthesized)
atctagtggatggcaagcctccctggggtcactgcagcctgttgtgtcctaggagctggggaaaggcaactggctggtgctgaatttggcaagggagcggaatttgacttctctggtgta

SEQ ID NO: 304196 - DNA, 120 bp, Artificial Sequence
  ENSG00000133317_16 (sequence is synthesized)
atgcagctttgccgtgtgacggtccaggaaaggggattaggtggaagaaaatatttcagtgaacactgatttttacctataaggaattttctgtttggagaggaaaagttgagttttatt

SEQ ID NO: 304197 - DNA, 120 bp, Artificial Sequence
  ENSG00000133317_17 (sequence is synthesized)
ctgctcctttcctcccactcgcctgacatagaggtccctaagccctttctccaaacctgcatggatgagtttcttttcttgttcaggtggttccttatgtcacgacgatttttggaggcc

SEQ ID NO: 304198 - DNA, 120 bp, Artificial Sequence
  ENSG00000133318_0 (sequence is synthesized)
gctcggctgagtcagtcagtctgtcggagtctgtcctcggagcaggcggagtaaagggacttgagcgagccagttgccggattattctatttcccctccctctctcccgccccgtatctc

SEQ ID NO: 304199 - DNA, 120 bp, Artificial Sequence
  ENSG00000133318_1 (sequence is synthesized)
ttttcacccttctcccaccctcgctcgcgtagccatggcggagccgtcggcggccactcagtcccattccatctcctcgtcgtccttcggagccgagccgtccgcgcccggcggcggcgg

SEQ ID NO: 304200 - DNA, 120 bp, Artificial Sequence
  ENSG00000133318_2 (sequence is synthesized)
gagcccaggagcctgccccgccctggggacgaagagctgcagctcctcctgtgcggagggattgagctctctttgctctgatgagccatcttcagaaattatgacttcttcctttctttc

SEQ ID NO: 304201 - DNA, 120 bp, Artificial Sequence
  ENSG00000133318_3 (sequence is synthesized)
atcttctgaaatacataacactggccttacaatactacatggagaaaaaagccatgtgttagggagccagcctattttagccaaagaaggaaaagaccacttggatcttctagatatgaa

SEQ ID NO: 304202 - DNA, 120 bp, Artificial Sequence
  ENSG00000133318_4 (sequence is synthesized)
aaagatggaaaagcctcaggggaccagcaacaacgtatcagactcttcagtttctcttgcagcaggagttcattgtgaccgtccttctattccagccagtttcccagagcatcctgcttt

SEQ ID NO: 304203 - DNA, 120 bp, Artificial Sequence
  ENSG00000133318_5 (sequence is synthesized)
tctctcaaagaaaattggtcaagtggaagagcaaatagataaagagaccaagaacccaaatggggtatcaagtagggaggctaaaactgcattggatgctgatgacagattcactttgct

SEQ ID NO: 304204 - DNA, 120 bp, Artificial Sequence
  ENSG00000133318_6 (sequence is synthesized)
gacagcccagaaaccacctactgagtactctaaggtagaaggcatttatacatattctttgtctccatccaaagtttcaggagatgatgttattgaaaaggattcccctgaatcaccatt

SEQ ID NO: 304205 - DNA, 120 bp, Artificial Sequence
  ENSG00000133318_7 (sequence is synthesized)
tgaagtaattattgacaaagcagcatttgacaaagaatttaaagactcatataaggagagcacagatgattttggtagctggtctgtgcacactgataaagaatcatccgaagacatttc

SEQ ID NO: 304206 - DNA, 120 bp, Artificial Sequence
  ENSG00000133318_8 (sequence is synthesized)
agagactaatgacaagctttttccactgagaaataaagaggcaggacgttacccaatgtctgcattgctcagtaggcagttttcacacacaaatgcagcactggaagaggtgtccagatg

SEQ ID NO: 304207 - DNA, 120 bp, Artificial Sequence
  ENSG00000133318_9 (sequence is synthesized)
cgtgaatgatatgcataactttactaacgaaatactgacttgggatctggttccccaagtgaaacaacagaccgataaatcttctgactgcatcacaaaaactacaggacttgacatgag

SEQ ID NO: 304208 - DNA, 120 bp, Artificial Sequence
  ENSG00000133318_10 (sequence is synthesized)
tgaatataattcagaaattccagttgtaaatcttaaaactagcactcatcagaaaactcctgtatgttctattgatgggagcactcccatcactaaatcaacaggtgattgggcagaagc

SEQ ID NO: 304209 - DNA, 120 bp, Artificial Sequence
  ENSG00000133318_11 (sequence is synthesized)
atctctccagcaagaaaatgctattactggaaaacctgtacctgactctttgaattccacaaaagaattcagtatcaaaggtgtgcaaggcaatatgcagaaacaggatgacacacttgc

SEQ ID NO: 304210 - DNA, 120 bp, Artificial Sequence
  ENSG00000133318_12 (sequence is synthesized)
agaattacctggatctccacctgagaaatgtgactctttgggttctggagtggccacagtgaaagtggttttacctgatgaccacctgaaagatgaaatggactggcagagctctgcatt

SEQ ID NO: 304211 - DNA, 120 bp, Artificial Sequence
  ENSG00000133318_13 (sequence is synthesized)
gggagaaatcacagaagctgatagttctggtgagtctgatgacacagtaatagaggacatcacagcagatacatcatttgaaaataacaaaattcaggctgaaaaacctgtttccattcc

SEQ ID NO: 304212 - DNA, 120 bp, Artificial Sequence
  ENSG00000133318_14 (sequence is synthesized)
aagtgctgttgtaaaaacaggtgaaagagaaatcaaagagattcccagttgtgagagagaagaaaaaacatctaaaaactttgaagaattggtcagtgactctgagctgcatcaagatca

SEQ ID NO: 304213 - DNA, 120 bp, Artificial Sequence
  ENSG00000133318_15 (sequence is synthesized)
gcctgatattcttggaaggagtccagctagtgaggcagcatgttcaaaagtacccgatacgaatgtctccttagaagatgtgagtgaagttgctcctgaaaagcctattactactgagaa

SEQ ID NO: 304214 - DNA, 120 bp, Artificial Sequence
  ENSG00000133318_16 (sequence is synthesized)
ccccaaacttccttcaacagtgtctccaaatgtttttaatgagacagaattctcattaaatgtgacaacatctgcctatttggagtcattacatgggaaaaatgttaaacatatagatga

SEQ ID NO: 304215 - DNA, 120 bp, Artificial Sequence
  ENSG00000133318_17 (sequence is synthesized)
ttcctccccagaggacctgatagcagcctttacagaaaccagagataaaggaatagtagatagtgaaagaaatgcttttaaagcaatatcagagaagatgacagactttaaaacaactcc

SEQ ID NO: 304216 - DNA, 120 bp, Artificial Sequence
  ENSG00000133318_18 (sequence is synthesized)
tcctgtagaagtcttacatgaaaatgagtccggtggttctgaaattaaagacattggaagcaaatacagtgaacaaagcaaagaaacaaatggaagtgagcctctaggtgttttccctac

SEQ ID NO: 304217 - DNA, 120 bp, Artificial Sequence
  ENSG00000133318_19 (sequence is synthesized)
ccaaggtactccagtagcatctcttgacttagaacaagaacagctcacaattaaggctcttaaagaattaggtgaaagacaggttgagaagtcaacttctgcacagcgtgacgcagaatt

SEQ ID NO: 304218 - DNA, 120 bp, Artificial Sequence
  ENSG00000133318_20 (sequence is synthesized)
tcaagaatggatctgatcttgggatttcccagaagcccatcactatcagagaaactactagggtagatgctgtttccagccttagcaagactgaattggtaaaaaagcatgtcctagcaa

SEQ ID NO: 304219 - DNA, 120 bp, Artificial Sequence
  ENSG00000133318_21 (sequence is synthesized)
gacttctgacagacttctcagtgcacgatctgattttctggagagatgtgaagaagactgggtttgtctttggcaccacgctgatcatgctgctttccctggcagctttcagtgtcatca

SEQ ID NO: 304220 - DNA, 120 bp, Artificial Sequence
  ENSG00000133318_22 (sequence is synthesized)
gtgtggtttcttacctcatcctggctcttctctctgtcaccatcagcttcaggatctacaagtccgtcatccaagctgtacagaagtcagaagaaggccatccattcaaagcctacctgg

SEQ ID NO: 304221 - DNA, 120 bp, Artificial Sequence
  ENSG00000133318_23 (sequence is synthesized)
acgtagacattactctgtcctcagaagctttccataattacatgaatgctgccatggtgcacatcaacagggccctgaaactcattattcgtctctttctggtagaagatctggttgact

SEQ ID NO: 304222 - DNA, 120 bp, Artificial Sequence
  ENSG00000133318_24 (sequence is synthesized)
ccttgaagctggctgtcttcatgtggctgatgacctatgttggtgctgtttttaacggaatcacccttctaattcttgctgaactgctcattttcagtgtcccgattgtctatgagaagt

SEQ ID NO: 304223 - DNA, 120 bp, Artificial Sequence
  ENSG00000133318_25 (sequence is synthesized)
acaagacccagattgatcactatgttggcatcgcccgagatcagaccaagtcaattgttgaaaagatccaagcaaaactccctggaatcgccaaaaaaaaggcagaataagtacatggaa

SEQ ID NO: 304224 - DNA, 120 bp, Artificial Sequence
  ENSG00000133318_26 (sequence is synthesized)
accagaaatgcaacagttactaaaacaccatttaatagttataacgtcgttacttgtactatgaaggaaaatactcagtgtcagcttgagcctgcattccaagctttttttttaatttgg

SEQ ID NO: 304225 - DNA, 120 bp, Artificial Sequence
  ENSG00000133318_27 (sequence is synthesized)
tgttttctcccatcctttccctttaaccctcagtatcaagcacaaaaattgatggactgataaaagaactatcttagaactcagaagaagaaagaatcaaattcataggataagtcaata

SEQ ID NO: 304226 - DNA, 120 bp, Artificial Sequence
  ENSG00000133318_28 (sequence is synthesized)
ccttaatggtggtagagcctttacctgtagcttgaaaggggaaagattggaggtaagagagaaaatgaaagaacacctctgggtccttctgtccagttttcagcactagtcttactcagc

SEQ ID NO: 304227 - DNA, 120 bp, Artificial Sequence
  ENSG00000133318_29 (sequence is synthesized)
tatccattatagttttgcccttaagaagtcatgattaacttatgaaaaaattatttggggacaggagtgtgataccttccttggtttttttttgcagccctcaaatcctatcttcctgcc

SEQ ID NO: 304228 - DNA, 120 bp, Artificial Sequence
  ENSG00000133318_30 (sequence is synthesized)
ccacaatgtgagcagctacccctgatactccttttctttaatgatttaactatcaacttgataaataacttataggtgatagtgataattcctgattccaagaatgccatctgataaaaa

SEQ ID NO: 304229 - DNA, 120 bp, Artificial Sequence
  ENSG00000133318_31 (sequence is synthesized)
agaatagaaatggaaagtgggactgagagggagtcagcaggcatgctgcggtggcggtcactccctctgccactatccccagggaaggaaaggctccgccatttgggaaagtggtttcta

SEQ ID NO: 304230 - DNA, 120 bp, Artificial Sequence
  ENSG00000133318_32 (sequence is synthesized)
cgtcactggacaccggttctgagcattagtttgagaactcgttcccgaatgtgctttcctccctctcccctgcccacctcaagtttaataaataaggttgtacttttcttactataaaat

SEQ ID NO: 304231 - DNA, 120 bp, Artificial Sequence
  ENSG00000133318_33 (sequence is synthesized)
aaatgtctgtaactgctgtgcactgctgtaaacttgttagagaaaaaaataacctgcatgtgggctcctcagttattgagtttttgtgatcctatctcagtctgggggggaacattctca

SEQ ID NO: 304232 - DNA, 120 bp, Artificial Sequence
  ENSG00000133318_34 (sequence is synthesized)
agaggtgaaatacagaaagcctttttttcttgatcttttcccgagattcaaatctccgattcccatttgggggcaagtttttttcttcaccttcaatatgagaattcagcgaacttgaaa

SEQ ID NO: 304233 - DNA, 120 bp, Artificial Sequence
  ENSG00000133318_35 (sequence is synthesized)
gaaaaatcatctgtgagttccttcaggttctcactcatagtcatgatccttcagagggaatatgcactggcgagtttaaagtaagggctatgatatttgatggtcccaaagtacggcagc

SEQ ID NO: 304234 - DNA, 120 bp, Artificial Sequence
  ENSG00000133318_36 (sequence is synthesized)
tgcaaaaagtagtggaaggaaattgtctacgtgtcttggaaaaattagttaggaatttggatgggtaaaaggtacccttgccttactccatcttattttcttagccccctttgagtgttt

SEQ ID NO: 304235 - DNA, 120 bp, Artificial Sequence
  ENSG00000133318_37 (sequence is synthesized)
taactggtttcatgtcctagtaggaagtgcattctccatcctcatcctctgccctcccaggaagtcagtgattgtctttttgggcttcccctccaaaggaccttctgcagtggaagtgcc

SEQ ID NO: 304236 - DNA, 120 bp, Artificial Sequence
  ENSG00000133318_38 (sequence is synthesized)
acatccagttcttttcttttgttgctgctgtgtttagataattgaagagatctttgtgccacacaggatttttttttttttttaagaaaaacctatagatgaaaaattactaatgaaact

SEQ ID NO: 304237 - DNA, 120 bp, Artificial Sequence
  ENSG00000133318_39 (sequence is synthesized)
gtgtgtacgtgtctgtgcgtgcaacataaaaatacagtagcacctaaggagcttgaatcttggttcctgtaaaatttcaaattgatgtggtattaataaaaaaaaaaaaaacacaaacaa

SEQ ID NO: 304238 - DNA, 120 bp, Artificial Sequence
  ENSG00000133318_40 (sequence is synthesized)
ccgccctggggacgaagagctgcagctcctcctgtgcggattcctttgtttcttcctcttcctctcagcctgtatctctattttcgacctcacaagagggattgagctctctttgctctg

SEQ ID NO: 304239 - DNA, 120 bp, Artificial Sequence
  ENSG00000133318_41 (sequence is synthesized)
tctaaaaggcttattagtttttggtcttcattctatttaatgttttcatgcctttataaactttttacttccagcccaatttttcccattgtcttggtacaggtcagctgtgtccaagtt

SEQ ID NO: 304240 - DNA, 120 bp, Artificial Sequence
  ENSG00000133318_42 (sequence is synthesized)
cacagatgatgatgctaccttatttttctacatgtgggaaagcttgattgatagtaatgattagcgcctgcatctcacaatcactgagaaatgaatgcagcactgagctctgtttgccct

SEQ ID NO: 304241 - DNA, 120 bp, Artificial Sequence
  ENSG00000133318_43 (sequence is synthesized)
ctaagcttgtccccagaaaaaacaagatataccctaaatagtaagttataatatttttattagggaacattattagagtttttttttaatatatctcgtagccatgtcatattaatcttt

SEQ ID NO: 304242 - DNA, 120 bp, Artificial Sequence
  ENSG00000133318_44 (sequence is synthesized)
ctaatgcagctgattggtggcatgaagcatcccctagagaccttgaaatcaccttaagaagtggccaagttagaagccaagaactttttgacaaattagaggctcatacttgaagttcaa

SEQ ID NO: 304243 - DNA, 120 bp, Artificial Sequence
  ENSG00000133321_0 (sequence is synthesized)
ccttcagcataaaagctgatccacaaacaagaggagcaccagacctcctcttggcttcgagatggcttcgccacaccaagagcccaaacctggagacctgattgagattttccgccttgg

SEQ ID NO: 304244 - DNA, 120 bp, Artificial Sequence
  ENSG00000133321_1 (sequence is synthesized)
ctatgagcactgggccctgtatataggagatggctacgtgatccatctggctcctccaagtgagtaccccggggctggctcctccagtgtcttctcagtcctgagcaacagtgcagaggt

SEQ ID NO: 304245 - DNA, 120 bp, Artificial Sequence
  ENSG00000133321_2 (sequence is synthesized)
gaaacgggagcgcctggaagatgtggtgggaggctgttgctatcgggtcaacaacagcttggaccatgagtaccaaccacggcccgtggaggtgatcatcagttctgcgaaggagatggt

SEQ ID NO: 304246 - DNA, 120 bp, Artificial Sequence
  ENSG00000133321_3 (sequence is synthesized)
gtgagcactttgtcacccagctgagatatggcaagtcccgctgtaaacaggtggaaaaggccaaggttgaagtcggtgtggccacggcgcttggaatcctggttgttgctggatgctctt

SEQ ID NO: 304247 - DNA, 120 bp, Artificial Sequence
  ENSG00000133321_4 (sequence is synthesized)
ttgcgattaggagataccaaaaaaaagcgacagcctgaagcagccacaaaatcctgtgttagaagcagctgtgggggtcccagtggagatgagcctcccccatgcctccagcagcctgac

SEQ ID NO: 304248 - DNA, 120 bp, Artificial Sequence
  ENSG00000133321_5 (sequence is synthesized)
cctcgtgccctgtctcaggcgttctctagatcctttcctctgtttccctctctcgctggcaaaagtatgatctaattgaaacaagactgaaggatcaataaacagccatctgccccttca

SEQ ID NO: 304249 - DNA, 120 bp, Artificial Sequence
  ENSG00000133321_6 (sequence is synthesized)
aatccatctccctctgcttggggctggactcacggggctgtgcagccaggcgatcactgtgaatgatgcaaatgcagcctcttagagacctgctggctgagagtcaggacctctgagctc

SEQ ID NO: 304250 - DNA, 120 bp, Artificial Sequence
  ENSG00000133321_7 (sequence is synthesized)
caatgccagatctgcttctaatccacagagggtctttggacagttcccttccccccaggcctctccatgtgcagaggagggggtggatggaggagctctgaggatccttcccctctaaaa

SEQ ID NO: 304251 - DNA, 120 bp, Artificial Sequence
  ENSG00000133321_8 (sequence is synthesized)
cctatcctgaaaatggctcctgaagttctgggggtcatcaggagaatctgggccaacccaggacaatgacaggtcctgcaaccccccaaagagtactcaggcaagggacgctcagggtcc

SEQ ID NO: 304252 - DNA, 120 bp, Artificial Sequence
  ENSG00000133321_9 (sequence is synthesized)
gtggacctgtgtaagagctcaaggacatttgtgtgtaagatctgggcacagcctccatcccttgccccttcacagtctttcacatttgttgccccaaaacactcaactaataagtggcag

SEQ ID NO: 304253 - DNA, 120 bp, Artificial Sequence
  ENSG00000133321_10 (sequence is synthesized)
cttcagcataaaagctgatccacaaacaagaggagcaccagacctcctcttggcttcgagatggcttcggtgagtaccccggggctggctcctccagtgtcttctcagtcctgagcaaca

SEQ ID NO: 304254 - DNA, 120 bp, Artificial Sequence
  ENSG00000133328_0 (sequence is synthesized)
aatttaaggctggacacagagtcagcaacacacaagacatcatcttgaaggaaggatggctttggccagaccaagaccgagacttggagacctgattgagatttctcgctttggctatgc

SEQ ID NO: 304255 - DNA, 120 bp, Artificial Sequence
  ENSG00000133328_1 (sequence is synthesized)
acactgggccatctacgtgggagatggctatgtggtccatctggctccggcaagtgaaattgctggagctggtgcggccagtgtcctgtctgccctgaccaacaaagccatagtgaagaa

SEQ ID NO: 304256 - DNA, 120 bp, Artificial Sequence
  ENSG00000133328_2 (sequence is synthesized)
ggaactgctgtctgtggtggctgggggagacaactacagggtcaataacaagcacgatgacagatacacaccactgccttccaacaaaatcgtcaagcgggcagaggagttggtggggca

SEQ ID NO: 304257 - DNA, 120 bp, Artificial Sequence
  ENSG00000133328_3 (sequence is synthesized)
gaccagtgacaactgcgagcacttcgtgaaccatctgcgctatggcgtctcccgcagtgaccaggtcactggtgcagtcacgacagtaggtgtggcagcaggcctgctggctgccgcaag

SEQ ID NO: 304258 - DNA, 120 bp, Artificial Sequence
  ENSG00000133328_4 (sequence is synthesized)
ccttgtggggatcctgctggccagaagcaagcgggaaaggcaataaatccaagaaattgtcccaacaaccaccaattcttacggaggaatattatttagccagcaggagtggagtttggt

SEQ ID NO: 304259 - DNA, 120 bp, Artificial Sequence
  ENSG00000133328_5 (sequence is synthesized)
ttactgattttactgttttgtgttcatgaatctttattttaatggagttaaaagcacaggaaaatgtatttggaaatgcagcttagtatgaattctattaaagacacaattgggctctgc

SEQ ID NO: 304260 - DNA, 120 bp, Artificial Sequence
  ENSG00000133392_0 (sequence is synthesized)
gagatttggacgctccggcctgggaggtgcgtcagatccgagctcgccatccagtttcctctccactagtccccccagttggagatctgggaccaacaaggcaccatggcgcagaagggc

SEQ ID NO: 304261 - DNA, 120 bp, Artificial Sequence
  ENSG00000133392_1 (sequence is synthesized)
caactcagtgacgatgagaagttcctctttgtggacaaaaacttcatcaacagcccagtggcccaggctgactgggccgccaagagactcgtctgggtcccctcggagaagcagggcttc

SEQ ID NO: 304262 - DNA, 120 bp, Artificial Sequence
  ENSG00000133392_2 (sequence is synthesized)
gaggcagccagcattaaggaggagaagggggatgaggtggttgtggagctggtggagaatggcaagaaggtcacggttgggaaagatgacatccagaagatgaacccacccaagttctcc

SEQ ID NO: 304263 - DNA, 120 bp, Artificial Sequence
  ENSG00000133392_3 (sequence is synthesized)
aaggtggaggacatggcggagctgacgtgcctcaacgaagcctccgtgctacacaacctgagggagcggtacttctcagggctaatatatacgtactctggcctcttctgcgtggtggtc

SEQ ID NO: 304264 - DNA, 120 bp, Artificial Sequence
  ENSG00000133392_4 (sequence is synthesized)
aacccctataaacacctgcccatctactcggagaagatcgtcgacatgtacaagggcaagaagaggcacgagatgccgcctcacatctacgccatcgcagacacggcctaccggagcatg

SEQ ID NO: 304265 - DNA, 120 bp, Artificial Sequence
  ENSG00000133392_5 (sequence is synthesized)
cttcaagatcgggaggaccagtccattctatgcacaggcgagtctggagccgggaaaaccgaaaacaccaagaaggtcattcagtacctggccgtggtggcctcctcccacaagggcaag

SEQ ID NO: 304266 - DNA, 120 bp, Artificial Sequence
  ENSG00000133392_6 (sequence is synthesized)
aaagacacaagtatcacgggagagctggaaaagcagcttctacaagcaaacccgattctggaggctttcggcaacgccaaaacagtgaagaacgacaactcctcacgattcggcaaattc

SEQ ID NO: 304267 - DNA, 120 bp, Artificial Sequence
  ENSG00000133392_7 (sequence is synthesized)
atccgcatcaacttcgacgtcacgggttacatcgtgggagccaacattgagacctatctgctagaaaaatcacgggcaattcgccaagccagagacgagaggacattccacatcttttac

SEQ ID NO: 304268 - DNA, 120 bp, Artificial Sequence
  ENSG00000133392_8 (sequence is synthesized)
tacatgattgctggagccaaggagaagatgagaagtgacttgcttttggagggcttcaacaactacaccttcctctccaatggctttgtgcccatcccagcagcccaggatgatgagatg

SEQ ID NO: 304269 - DNA, 120 bp, Artificial Sequence
  ENSG00000133392_9 (sequence is synthesized)
ttccaggaaaccgtggaggccatggcaatcatgggtttcagcgaggaggagcagctatccatattgaaggtggtatcatcggtcctgcagcttggaaatatcgtcttcaagaaggaaaga

SEQ ID NO: 304270 - DNA, 120 bp, Artificial Sequence
  ENSG00000133392_10 (sequence is synthesized)
aacacagaccaggcgtccatgccagataacacagctgctcagaaagtttgccacctcatgggaattaatgtgacagatttcaccagatccatcctcactcctcgtatcaaggttgggcga

SEQ ID NO: 304271 - DNA, 120 bp, Artificial Sequence
  ENSG00000133392_11 (sequence is synthesized)
gatgtggtacagaaagctcagacaaaagaacaggctgactttgctgtagaggctttggccaaggcaacatatgagcgccttttccgctggatactcacccgcgtgaacaaagccctggac

SEQ ID NO: 304272 - DNA, 120 bp, Artificial Sequence
  ENSG00000133392_12 (sequence is synthesized)
aagacccatcggcaaggggcttccttcctggggatcctggatatagctggatttgagatctttgaggtgaactccttcgagcagctgtgcatcaactacaccaacgagaagctgcagcag

SEQ ID NO: 304273 - DNA, 120 bp, Artificial Sequence
  ENSG00000133392_13 (sequence is synthesized)
ctcttcaaccacaccatgttcatcctggagcaggaggagtaccagcgcgagggcatcgagtggaacttcatcgactttgggctggacctacagccctgcatcgagctcatcgagcgaccg

SEQ ID NO: 304274 - DNA, 120 bp, Artificial Sequence
  ENSG00000133392_14 (sequence is synthesized)
aacaaccctccaggtgtgctggccctgctggacgaggaatgctggttccccaaagccacggacaagtctttcgtggagaagctgtgcacggagcagggcagccaccccaagttccagaag

SEQ ID NO: 304275 - DNA, 120 bp, Artificial Sequence
  ENSG00000133392_15 (sequence is synthesized)
cccaagcagctcaaggacaagactgagttctccatcatccattatgctgggaaggtggactataatgcgagtgcctggctgaccaagaatatggacccgctgaatgacaacgtgacttcc

SEQ ID NO: 304276 - DNA, 120 bp, Artificial Sequence
  ENSG00000133392_16 (sequence is synthesized)
ctgctcaatgcctcctccgacaagtttgtggccgacctgtggaaggacgtggaccgcatcgtgggcctggaccagatggccaagatgacggagagctcgctgcccagcgcctccaagacc

SEQ ID NO: 304277 - DNA, 120 bp, Artificial Sequence
  ENSG00000133392_17 (sequence is synthesized)
aagaagggcatgttccgcacagtggggcagctgtacaaggagcagctgggcaagctgatgaccacgctacgcaacaccacgcccaacttcgtgcgctgcatcatccccaaccacgagaag

SEQ ID NO: 304278 - DNA, 120 bp, Artificial Sequence
  ENSG00000133392_18 (sequence is synthesized)
aggtccggcaagctggatgcgttcctggtgctggagcagctgcggtgcaatggggtgctggaaggcattcgcatctgccggcagggcttccccaaccggatcgtcttccaggagttccgc

SEQ ID NO: 304279 - DNA, 120 bp, Artificial Sequence
  ENSG00000133392_19 (sequence is synthesized)
caacgctacgagatcctggcggcgaatgccatccccaaaggcttcatggacgggaagcaggcctgcattctcatgatcaaagccctggaacttgaccccaacttatacaggatagggcag

SEQ ID NO: 304280 - DNA, 120 bp, Artificial Sequence
  ENSG00000133392_20 (sequence is synthesized)
agcaaaatcttcttccgaactggcgtcctggcccacctagaggaggagcgagatttgaagatcaccgatgtcatcatggccttccaggcgatgtgtcgtggctacttggccagaaaggct

SEQ ID NO: 304281 - DNA, 120 bp, Artificial Sequence
  ENSG00000133392_21 (sequence is synthesized)
tttgccaagaggcagcagcagctgaccgccatgaaggtgattcagaggaactgcgccgcctacctcaagctgcggaactggcagtggtggaggcttttcaccaaagtgaagccactgctg

SEQ ID NO: 304282 - DNA, 120 bp, Artificial Sequence
  ENSG00000133392_22 (sequence is synthesized)
caggtgacacggcaggaggaggagatgcaggccaaggaggatgaactgcagaagaccaaggagcggcagcagaaggcagagaatgagcttaaggagctggaacagaagcactcgcagctg

SEQ ID NO: 304283 - DNA, 120 bp, Artificial Sequence
  ENSG00000133392_23 (sequence is synthesized)
accgaggagaagaacctgctacaggaacagctgcaggcagagacagagctgtatgcagaggctgaggagatgcgggtgcggctggcggccaagaagcaggagctggaggagatactgcat

SEQ ID NO: 304284 - DNA, 120 bp, Artificial Sequence
  ENSG00000133392_24 (sequence is synthesized)
gagatggaggcccgcctggaggaggaggaagacaggggccagcagctacaggctgaaaggaagaagatggcccagcagatgctggaccttgaagaacagctggaggaggaggaagctgcc

SEQ ID NO: 304285 - DNA, 120 bp, Artificial Sequence
  ENSG00000133392_25 (sequence is synthesized)
aggcagaagctgcaacttgagaaggtcacggctgaggccaagatcaagaaactggaggatgagatcctggtcatggatgatcagaacaataaactatcaaaagaacgaaaactccttgag

SEQ ID NO: 304286 - DNA, 120 bp, Artificial Sequence
  ENSG00000133392_26 (sequence is synthesized)
gagaggattagtgacttaacgacaaatcttgcagaagaggaagaaaaggccaagaatcttaccaagctgaaaaacaagcatgaatctatgatttcagaactggaagtgcggctaaagaag

SEQ ID NO: 304287 - DNA, 120 bp, Artificial Sequence
  ENSG00000133392_27 (sequence is synthesized)
gaagagaagagccgacaggagctggagaagctgaaacggaagctggagggtgatgccagcgacttccacgagcagatcgctgacctccaggcgcagatcgcagagctcaagatgcagctg

SEQ ID NO: 304288 - DNA, 120 bp, Artificial Sequence
  ENSG00000133392_28 (sequence is synthesized)
ttgacgatgaaatcgctcagaagaacaatgccctgaagaagatccgggagctggagggccacatctcagacctccaggaggacctggactcagagcgggccgccaggaacaaggctgaaa

SEQ ID NO: 304289 - DNA, 120 bp, Artificial Sequence
  ENSG00000133392_29 (sequence is synthesized)
agcagaagcgagacctcggcgaggagctggaggccctaaagacagagctggaagacacactggacagcacagccactcagcaggagctcagggccaagagggagcaggaggtgacggtgc

SEQ ID NO: 304290 - DNA, 120 bp, Artificial Sequence
  ENSG00000133392_30 (sequence is synthesized)
tgaagaaggccctggatgaagagacgcggtcccatgaggctcaggtccaggagatgaggcagaaacacgcacaggcggtggaggagctcacagagcagcttgagcagttcaagagggcca

SEQ ID NO: 304291 - DNA, 120 bp, Artificial Sequence
  ENSG00000133392_31 (sequence is synthesized)
aggcgaacctagacaagaataagcagacgctggagaaagagaacgcagacctggccggggagctgcgggtcctgggccaggccaagcaggaggtggaacataagaagaagaagctggagg

SEQ ID NO: 304292 - DNA, 120 bp, Artificial Sequence
  ENSG00000133392_32 (sequence is synthesized)
cgcaggtgcaggagctgcagtccaagtgcagcgatggggagcgggcccgggcggagctcaatgacaaagtccacaagctgcagaatgaagttgagagcgtcacagggatgcttaacgagg

SEQ ID NO: 304293 - DNA, 120 bp, Artificial Sequence
  ENSG00000133392_33 (sequence is synthesized)
ccgaggggaaggccattaagctggccaaggacgtggcgtccctcagttcccagctccaggacacccaggagctgcttcaagaagaaacccggcagaagctcaacgtgtctacgaagctgc

SEQ ID NO: 304294 - DNA, 120 bp, Artificial Sequence
  ENSG00000133392_34 (sequence is synthesized)
gccagctggaggaggagcggaacagcctgcaagaccagctggacgaggagatggaggccaagcagaacctggagcgccacatctccactctcaacatccagctctccgactcgaagaaga

SEQ ID NO: 304295 - DNA, 120 bp, Artificial Sequence
  ENSG00000133392_35 (sequence is synthesized)
agctgcaggactttgccagcaccgtggaagctctggaagaggggaagaagaggttccagaaggagatcgagaacctcacccagcagtacgaggagaaggcggccgcttatgataaactgg

SEQ ID NO: 304296 - DNA, 120 bp, Artificial Sequence
  ENSG00000133392_36 (sequence is synthesized)
aaaagaccaagaacaggcttcagcaggagctggacgacctggttgttgatttggacaaccagcggcaactcgtgtccaacctggaaaagaagcagaggaaatttgatcagttgttagccg

SEQ ID NO: 304297 - DNA, 120 bp, Artificial Sequence
  ENSG00000133392_37 (sequence is synthesized)
aggagaaaaacatctcttccaaatacgcggatgagagggacagagctgaggcagaagccagggagaaggaaaccaaggccctgtccctggctcgggcccttgaagaggccttggaagcca

SEQ ID NO: 304298 - DNA, 120 bp, Artificial Sequence
  ENSG00000133392_38 (sequence is synthesized)
aagaggaactcgagcggaccaacaaaatgctcaaagccgaaatggaagacctggtcagctccaaggatgacgtgggcaagaacgtccatgagctggagaagtccaagcgggccctggaga

SEQ ID NO: 304299 - DNA, 120 bp, Artificial Sequence
  ENSG00000133392_39 (sequence is synthesized)
cccagatggaggagatgaagacgcagctggaagagctggaggacgagctgcaagccacggaggacgccaaactgcggctggaagtcaacatgcaggcgctcaagggccagttcgaaaggg

SEQ ID NO: 304300 - DNA, 120 bp, Artificial Sequence
  ENSG00000133392_40 (sequence is synthesized)
atctccaagcccgggacgagcagaatgaggagaagaggaggcaactgcagagacagcttcacgagtatgagacggaactggaagacgagcgaaagcaacgtgccctggcagctgcagcaa

SEQ ID NO: 304301 - DNA, 120 bp, Artificial Sequence
  ENSG00000133392_41 (sequence is synthesized)
agaagaagctggaaggggacctgaaagacctggagcttcaggccgactctgccatcaaggggagggaggaagccatcaagcagctacgcaaactgcaggctcagatgaaggactttcaaa

SEQ ID NO: 304302 - DNA, 120 bp, Artificial Sequence
  ENSG00000133392_42 (sequence is synthesized)
gagagctggaagatgcccgtgcctccagagatgagatctttgccacagccaaagagaatgagaagaaagccaagagcttggaagcagacctcatgcagctacaagaggacctcgccgccg

SEQ ID NO: 304303 - DNA, 120 bp, Artificial Sequence
  ENSG00000133392_43 (sequence is synthesized)
ctgagagggctcgcaaacaagcggacctcgagaaggaggaactggcagaggagctggccagtagcctgtcgggaaggaacgcactccaggacgagaagcgccgcctggaggcccggatcg

SEQ ID NO: 304304 - DNA, 120 bp, Artificial Sequence
  ENSG00000133392_44 (sequence is synthesized)
cccagctggaggaggagctggaggaggagcagggcaacatggaggccatgagcgaccgggtccgcaaagccacacagcaggccgagcagctcagcaacgagctggccacagagcgcagca

SEQ ID NO: 304305 - DNA, 120 bp, Artificial Sequence
  ENSG00000133392_45 (sequence is synthesized)
cggcccagaagaatgagagtgcccggcagcagctcgagcggcagaacaaggagctccggagcaagctccacgagatggagggggccgtcaagtccaagttcaagtccaccatcgcggcgc

SEQ ID NO: 304306 - DNA, 120 bp, Artificial Sequence
  ENSG00000133392_46 (sequence is synthesized)
tggaggccaagattgcacagctggaggagcaggtcgagcaggaggccagagagaaacaggcggccaccaagtcgctgaagcagaaagacaagaagctgaaggaaatcttgctgcaggtgg

SEQ ID NO: 304307 - DNA, 120 bp, Artificial Sequence
  ENSG00000133392_47 (sequence is synthesized)
aggacgagcgcaagatggccgagcagtacaaggagcaggcagagaaaggcaatgccagggtcaagcagctcaagaggcagctggaggaggcagaggaggagtcccagcgcatcaacgcca

SEQ ID NO: 304308 - DNA, 120 bp, Artificial Sequence
  ENSG00000133392_48 (sequence is synthesized)
accgcaggaagctgcagcgggagctggatgaggccacggagagcaacgaggccatgggccgcgaggtgaacgcactcaagagcaagctcaggcgaggaaacgagacctctttcgttcctt

SEQ ID NO: 304309 - DNA, 120 bp, Artificial Sequence
  ENSG00000133392_49 (sequence is synthesized)
ctagaaggtctggaggacgtagagttattgaaaatgcagatggttctgaggaggaaacggacactcgagacgcagacttcaatggaaccaaggccagtgaataagcaactttctacagtt

SEQ ID NO: 304310 - DNA, 120 bp, Artificial Sequence
  ENSG00000133392_50 (sequence is synthesized)
ttgcaccacggcaagaaaaccaaaaaccaaaacaaacaaacaaaaaaaacccaacaacaacccagaacaaagcaaaacccagcagactgtacttagcattgtctaaatccattctcaaat

SEQ ID NO: 304311 - DNA, 120 bp, Artificial Sequence
  ENSG00000133392_51 (sequence is synthesized)
tccaaatatcacagacacccctcacacaaggaatataaaaaccaccaccctccagcctgggcaacgtagtaaaacctcatctatacaagaatttaaaaataagctgggcgtggtggtaca

SEQ ID NO: 304312 - DNA, 87 bp, Artificial Sequence
  ENSG00000133392_52 (sequence is synthesized)
cgtggtggtacccaggaagaacgctccagcccaggacttcgaggctgcaatgagctataattgcatcattgcactccagcctgggca

SEQ ID NO: 304313 - DNA, 120 bp, Artificial Sequence
  ENSG00000133392_53 (sequence is synthesized)
tctcaaccaccaccaccaccaccacccctactacccctgtattcaaggtaaaaattgaagtttgtatgatgtaagagatgagaaaaacccaacaggaaacacagacacatcctccagttc

SEQ ID NO: 304314 - DNA, 120 bp, Artificial Sequence
  ENSG00000133392_54 (sequence is synthesized)
tatcaatggattgtgcagacactgagtttttagaaaaacatatccacggtaaccggtccctggcaattctgtttacatgaaatggggagaaagtcaccgaaatgggtgccgccggccccc

SEQ ID NO: 304315 - DNA, 120 bp, Artificial Sequence
  ENSG00000133392_55 (sequence is synthesized)
actcccaattcattccctaacctgcaaacctttccaacttctcacgtcaggcctttgagaattctttccccctctcctggtttccacacctcagacacgcacagttcaccaagtgccttc

SEQ ID NO: 304316 - DNA, 120 bp, Artificial Sequence
  ENSG00000133392_56 (sequence is synthesized)
tgtagtcacatgaattgaaaaggagacgctgctcccacggaggggagcaggaatgctgcactgtttacaccctgactgtgcttaaaaacactttcactaataaatggttataaatcacaa

SEQ ID NO: 304317 - DNA, 120 bp, Artificial Sequence
  ENSG00000133392_57 (sequence is synthesized)
ttttatcagagtcccatacctcacgggtattttctcaatcagtgaacacctcaagtactagcccatgtgttttgagtaaaaagggctcctttcaacgaggatccccttctagaggctttg

SEQ ID NO: 304318 - DNA, 120 bp, Artificial Sequence
  ENSG00000133392_58 (sequence is synthesized)
ggtgaacgcactcaagagcaagctcaggtgaggagcccgtggcccgggaggaccccgtctctcaggccagagaaaagcactgggggctcgggctcctttcggcctgcaaatgccccttgt

SEQ ID NO: 304319 - DNA, 120 bp, Artificial Sequence
  ENSG00000133392_59 (sequence is synthesized)
gcccacagccgccactcccttctgtggtttattcctgcttctccttaatcactaagcttagtgtgggccaggcactgagatcagacccgggccctgccttgcctggtagcagctaacctt

SEQ ID NO: 304320 - DNA, 120 bp, Artificial Sequence
  ENSG00000133392_60 (sequence is synthesized)
ctagatcctttaacgatcgaccgtctcccatccggtcctccggctgaggaggaggaagaggctatccccactgtctcctccagcccctccttcattgcatcactgagtcttcacgacatc

SEQ ID NO: 304321 - DNA, 120 bp, Artificial Sequence
  ENSG00000133392_61 (sequence is synthesized)
cattgaagctgcaacaccaccccccgccacttcacctccttcctgacatgctctgctcctcctttctccccctcagcactgctgccatctgggctgcattattctcgggtatgggggctg

SEQ ID NO: 304322 - DNA, 120 bp, Artificial Sequence
  ENSG00000133392_62 (sequence is synthesized)
tccgacattccccatcagaaggaaaaagatccctgaaaagtagcaggtgcttacatttctggcctctacccaccggctgcagtagtcccccaccaccctgcaatgtgacaaccaaaaatg

SEQ ID NO: 304323 - DNA, 120 bp, Artificial Sequence
  ENSG00000133392_63 (sequence is synthesized)
tctctagatgttgccagaagtcctctagagatgggagggtacgactgccaccccgctgagaattcctgctgtcactggagtgggggctgttttctctcccatgcctctggtaccttgggg

SEQ ID NO: 304324 - DNA, 120 bp, Artificial Sequence
  ENSG00000133392_64 (sequence is synthesized)
gtcccccctgctcccaagggctgcttccaccaccctgtccatccatcccgattggctcccaggaggttttagctccgggcttcctgtctcccacaccactcctcacagttctccatgatt

SEQ ID NO: 304325 - DNA, 120 bp, Artificial Sequence
  ENSG00000133392_65 (sequence is synthesized)
tcaacatccaggtgggcgacgcagcctctcggttccttgaccctctgggtgatcctgctgcttctaccgggccaaccagtactcctaggagccctcacaatttgaccctcaggcatccca

SEQ ID NO: 304326 - DNA, 120 bp, Artificial Sequence
  ENSG00000133392_66 (sequence is synthesized)
ttgtctgcctggtgccacctttctttggctctgtccccaacggggtcttcactccattaatgccatcagcctctgacccagctccaaaccagctgtctagtaacccccgtcgcgcatcct

SEQ ID NO: 304327 - DNA, 120 bp, Artificial Sequence
  ENSG00000133392_67 (sequence is synthesized)
cgcatcctcaacatccggttccccctcttgcattgctgcaatcatttggtgaaagcacaacccaaatgaaactcaagcttggctgggcacgggactcacacctataatcccagcactttg

SEQ ID NO: 304328 - DNA, 120 bp, Artificial Sequence
  ENSG00000133392_68 (sequence is synthesized)
aggcaggtgaatcgctttgagctcaggagttcaagagcagcaagaccccatctctacaacaaacaaacaaaaatcagccaggtgggatggcgcaaacctaaaatcccagctactcaggag

SEQ ID NO: 304329 - DNA, 120 bp, Artificial Sequence
  ENSG00000133392_69 (sequence is synthesized)
gctgaggtgggacgatcagtggagccccagaggtcaaggctgcagtgagccatgatctagccaatgcacttaccctggatggacagagtgagaccctgtctcaaaaaacccaaaacccac

SEQ ID NO: 304330 - DNA, 120 bp, Artificial Sequence
  ENSG00000133392_70 (sequence is synthesized)
tctccaccttttcccacagagcaggccttgctcaggggtcctcccacacccctccctcatcttctcactctctgctgcttttcactttttctttgaacttatgatcgctcctccccattc

SEQ ID NO: 304331 - DNA, 120 bp, Artificial Sequence
  ENSG00000133392_71 (sequence is synthesized)
tctctcagctggggaccttacttcctacttaactcaaaagcagaaatgatcatgaaacgtgcacaagctcccactgcctcatcatcctacctccgtgcacctctgtacacttctattttt

SEQ ID NO: 304332 - DNA, 120 bp, Artificial Sequence
  ENSG00000133392_72 (sequence is synthesized)
tttccatttctatgctgaaccctctggcaccaaccgaggccaacacctccattggacccgaccctcttgttcactcaagcacatagctccaaaaatccttattttgcaaggttttctctt

SEQ ID NO: 304333 - DNA, 120 bp, Artificial Sequence
  ENSG00000133392_73 (sequence is synthesized)
tcatttgctccatcagcaaatggaataacctcttagccccatgtctaccttgctacccttactacaaaactggatgtgaatgccgaaaccctgtctctaccaaaaaatataaaaattagc

SEQ ID NO: 304334 - DNA, 120 bp, Artificial Sequence
  ENSG00000133392_74 (sequence is synthesized)
gtgctctgatttagagctcctcagtcttgccactgttgatattttggggtgactaattctgttgtgggggctgtcctgtgcactgtagggtgtttagcagtatccctggcctctacccac

SEQ ID NO: 304335 - DNA, 120 bp, Artificial Sequence
  ENSG00000133392_75 (sequence is synthesized)
tggatgccagaggcaccccccaccccagctgtgacaatcagcagtgtctccagacaatatcccctagtggggatcggtgggggcaacattgtccctggctcggaaccactgatcgaattt

SEQ ID NO: 304336 - DNA, 120 bp, Artificial Sequence
  ENSG00000133392_76 (sequence is synthesized)
aaggatgacgtgggcaagaacgtaagtggctctgggtggtttttctcgtccatgtttcgcctgcccaccctctgtgctattcaccagtccatgcgaggctagctcctggcctttttcata

SEQ ID NO: 304337 - DNA, 120 bp, Artificial Sequence
  ENSG00000133392_77 (sequence is synthesized)
gcgaactatcatcggaaatggaaggaggtttttggactggtgcaggggctgggaggggctgagaatggcagtcgaggatgggtctgagttggggggtccgaggataaggctggggtctga

SEQ ID NO: 304338 - DNA, 120 bp, Artificial Sequence
  ENSG00000133392_78 (sequence is synthesized)
actctcaggggtcatcttgagtcccggccatgcatcctgtgggaggccaaagccacctccctgatctcctgaggtgccgctcacggtgggtttctcaatcgtcttcatgaagttgagcct

SEQ ID NO: 304339 - DNA, 120 bp, Artificial Sequence
  ENSG00000133392_79 (sequence is synthesized)
gctggccagtagcctgtcgggaaggtaggaaactgaatggaggaagagggctctgaagcagaggatggggggacaggcagcatcctcgacccccattttattttttaaattttttcgaga

SEQ ID NO: 304340 - DNA, 120 bp, Artificial Sequence
  ENSG00000133392_80 (sequence is synthesized)
acaggtgtgagccaccgtgcctggccctggacccccatttcaatgctgctgctgacgaagcgtcctctgagattggggacagacccatggtggttaggttttccgtcagcgctttcatgc

SEQ ID NO: 304341 - DNA, 120 bp, Artificial Sequence
  ENSG00000133392_81 (sequence is synthesized)
gcgctttcatgcctgtttgggggtgtggctgctttcattcattcccaataagtagctgtgtggggagaaggggaggccaggaagagtcagggaggagtgtgctggtccccatcccaatcc

SEQ ID NO: 304342 - DNA, 120 bp, Artificial Sequence
  ENSG00000133392_82 (sequence is synthesized)
cagctttgctgacacggacccggcctgagtcccggctgtccacttcctggctgtgtaactacagatgagtcttctaatcttctccaagcctcagtttcacccattagatgatgagggcaa

SEQ ID NO: 304343 - DNA, 120 bp, Artificial Sequence
  ENSG00000133392_83 (sequence is synthesized)
tacccctgaggcatgactccaaggagggggcatcttttaaggcgggggagggtagaggcccccaccatggccgcccttcccccaggaacgcactccaggacgagaagcgccgcctggagg

SEQ ID NO: 304344 - DNA, 120 bp, Artificial Sequence
  ENSG00000133392_84 (sequence is synthesized)
gcctactgtctctcctgcagcaggatcctgcaccagtcaacacacgcgtggcggcttcctgtgtgcaggccctggattgagggacaagagggtggtggggcctgagagtagagatccagg

SEQ ID NO: 304345 - DNA, 120 bp, Artificial Sequence
  ENSG00000133392_85 (sequence is synthesized)
gcccttacaccagtgcccaggctgctgtcttcagaatactcctctccacgctgcagtgtctcattttccagccacggcgtggctggctccccgtacctcacggccatccctggagtccgg

SEQ ID NO: 304346 - DNA, 120 bp, Artificial Sequence
  ENSG00000133392_86 (sequence is synthesized)
gccttgggatgctctttcattgcgttttcccctagctgaagctctgaccttatccagtgagcccttggtgatgtcactgagcactagttccatggtgggcactagggaccatccagtaac

SEQ ID NO: 304347 - DNA, 120 bp, Artificial Sequence
  ENSG00000133392_87 (sequence is synthesized)
ctgcagccccttgtggtgtagggtgaacaggcatcattctccaggcgactccaggacagagaaagcaagggacaagtcactcgctcagcctgggtggcactgacacttgtggaagcacct

SEQ ID NO: 304348 - DNA, 85 bp, Artificial Sequence
  ENSG00000133392_88 (sequence is synthesized)
ggcctggaagaagctcttgagtggagttttacaggatgaaggagaggacagggtgcccgggatcaagggactcgtgcagaggcca

SEQ ID NO: 304349 - DNA, 120 bp, Artificial Sequence
  ENSG00000133392_89 (sequence is synthesized)
ggacagggtgcccgggatcaagggactcgtgcagaggccaaacaaggcaggaagaggcatggtctcagtgcgctctcttgggcttccctgagtccgcctcatggccttcactctcctccc

SEQ ID NO: 304350 - DNA, 120 bp, Artificial Sequence
  ENSG00000133392_90 (sequence is synthesized)
gaaagtaaagatgctttcctgcatcctaatacctcaaacgcgaatcacaaacaggggcctttctgttctgattccctgattctaagaggccacctgtttaagatgcatcattgactgaat

SEQ ID NO: 304351 - DNA, 120 bp, Artificial Sequence
  ENSG00000133392_91 (sequence is synthesized)
gacagccttttcttgaaggggaagaaatgcttctactttaaataaatgtaccaagttacgagtgcaggaagggaacgagttttagacctgggttctcatcgtggatgccccagtttttgc

SEQ ID NO: 304352 - DNA, 120 bp, Artificial Sequence
  ENSG00000133392_92 (sequence is synthesized)
tgatgaaccttgggcaagttactctacctctctgagcttccagttttttagctggaaactgagcataatcattttgacctcagagagctgttcatgaggtgtcactaagataacgcatga

SEQ ID NO: 304353 - DNA, 120 bp, Artificial Sequence
  ENSG00000133392_93 (sequence is synthesized)
cgagagcttagaacagtgcgtggttctcaggtcagaaatgattgttgttgtttttacctccctccctcactccttccttccctccctcccttccttccttcctttcttcttcctttttga

SEQ ID NO: 304354 - DNA, 120 bp, Artificial Sequence
  ENSG00000133392_94 (sequence is synthesized)
ggctggagtgcagtggcgcagtctcaactcactgcaacctctgcctcttggactcaagcaattctcgtgtctgagcctcccgagtggctggaattagaggcgcccaccaccacactggcc

SEQ ID NO: 304355 - DNA, 66 bp, Artificial Sequence
  ENSG00000133392_95 (sequence is synthesized)
tggactcaagcaattctcgtgtctgagcctcccgagtggctggaattagaggcgcccaccaccaca

SEQ ID NO: 304356 - DNA, 120 bp, Artificial Sequence
  ENSG00000133392_96 (sequence is synthesized)
tgctgggattataggcatgacccactgcgcccagcctagacatgttagaattggataaaccattgaggaaagaggacttgacggtgtctagatccccgtgtcccagtgggatttataagg

SEQ ID NO: 304357 - DNA, 120 bp, Artificial Sequence
  ENSG00000133392_97 (sequence is synthesized)
ggatttataaggcagggttttggagggtgtgatgtcccagctgttctgtgaagactgggagccggggaagggttcgggttccttaatgaaagtcataccccagggactgcagggacaggt

SEQ ID NO: 304358 - DNA, 120 bp, Artificial Sequence
  ENSG00000133392_98 (sequence is synthesized)
ccctcaccagtaggaccctgatgtgtcaggttcattcattgacacatggacccaagatggtcaaggccagctttgggagctcttggccctcccgcaacagacctaacttgtcaagtttcg

SEQ ID NO: 304359 - DNA, 120 bp, Artificial Sequence
  ENSG00000133392_99 (sequence is synthesized)
ttactaagttccctgttgctgtccttcctggataactggggcaattttattcttaaagttttcctgtgtccaagatggcagccaagcagggaagacagaattacgttcactgttctatcg

SEQ ID NO: 304360 - DNA, 120 bp, Artificial Sequence
  ENSG00000133392_100 (sequence is synthesized)
tttctcaatctatcgatagcccttaaacgggaagagtgctggttcagggtcacagtgtgaaattcctaaaacaacccaggagagaataggtttgacagggctgggtgtggtagctgacac

SEQ ID NO: 304361 - DNA, 89 bp, Artificial Sequence
  ENSG00000133392_101 (sequence is synthesized)
cttgggaggctgaggcaggaggatcatttacatcacaccactgcactccagcctgggccgcagagccagaccctgtctctgaaaataaa

SEQ ID NO: 304362 - DNA, 120 bp, Artificial Sequence
  ENSG00000133392_102 (sequence is synthesized)
agcctgggccgcagagccagaccctgtctctgaaaataaacaaataaataaataagttagtcagaaacagctggtgtaggctgggcatggtggctcctacctgtaatcccagcactttgg

SEQ ID NO: 304363 - DNA, 120 bp, Artificial Sequence
  ENSG00000133392_103 (sequence is synthesized)
aaagacacaagtatcacggtgagtggcagttcccaatcagaggccatgatttagccaaccggtctccagcttgcagcccaaccgagatacaaacagaacatcattgcaagaactcaggcc

SEQ ID NO: 304364 - DNA, 120 bp, Artificial Sequence
  ENSG00000133392_104 (sequence is synthesized)
ccatctgactacccctcccctgaagactcaaagagggaccgtctttttggcgagcaggcctgttgagtgtgggtgatttcttggctcagctagaagcatccctccagaagggggcccgtt

SEQ ID NO: 304365 - DNA, 120 bp, Artificial Sequence
  ENSG00000133392_105 (sequence is synthesized)
ttgtgaaatgagaataagccctttccttccatagcgagatcttcctccacgtcggggcttctcagtggtggcactgatgtcattttggaccagataactcttccttggaggggcttccct

SEQ ID NO: 304366 - DNA, 120 bp, Artificial Sequence
  ENSG00000133392_106 (sequence is synthesized)
gtgacaaccaaaaatatctctagacattgtcagatgttccctggggtgggacagttgcccttgattgagaagcactcctttcatgaatctctgtaacgtcccaggggttaaggtaccttt

SEQ ID NO: 304367 - DNA, 120 bp, Artificial Sequence
  ENSG00000133392_107 (sequence is synthesized)
tgggttcccggattcctccacgtgtccccctgtccctgggatggagatgctggtatcactcggcccgtgggcttcagtgcaatgccattcagtaactgtggattgagcacctactgtatg

SEQ ID NO: 304368 - DNA, 120 bp, Artificial Sequence
  ENSG00000133392_108 (sequence is synthesized)
ccaggaaccacttggggtggggacctggggataagtctgagagatgctgttattctcttctctgagcttccagacctgtggaagagcatgtagttgtcaaagaatccctcaaataaacag

SEQ ID NO: 304369 - DNA, 120 bp, Artificial Sequence
  ENSG00000133392_109 (sequence is synthesized)
atgatgacacggtatgactaagagcttgggaggaaaagaagagcaggtttctagagtcatcacctctagggcccatccttctcttcctcctcgtgtgtcagccctgccccatctatccca

SEQ ID NO: 304370 - DNA, 120 bp, Artificial Sequence
  ENSG00000133392_110 (sequence is synthesized)
caggagggggcacgtggtagggccgctaggactggccggtgcctccgtctgcaggtttgtgggtgggaagatggtaggatggagatctgaccacggcatggggtgtctccagtgttcgcc

SEQ ID NO: 304371 - DNA, 120 bp, Artificial Sequence
  ENSG00000133392_111 (sequence is synthesized)
attccagatgtcactttgcgtcctcagaggggactctggggcagccaccatggccggcttgtctggaggcccttggagatctaggatgggcgctggtcgtggctttggagaactttcctt

SEQ ID NO: 304372 - DNA, 120 bp, Artificial Sequence
  ENSG00000133392_112 (sequence is synthesized)
ctccaaacaaatgcaggaaactcaagattcagcatcctagaattgtctctggcaagttggtttccagccatagtgagtgggaacaatggccccagaggctgtgtggcagtttaaacacag

SEQ ID NO: 304373 - DNA, 120 bp, Artificial Sequence
  ENSG00000133392_113 (sequence is synthesized)
tttccactgccttccctttccctaaagagtaaacacaggagataatactttctaacaactcatcgttatcaagggcctactatgtgctgcttgttttggctgcatgcgtaaacacatctc

SEQ ID NO: 304374 - DNA, 120 bp, Artificial Sequence
  ENSG00000133392_114 (sequence is synthesized)
agacattgtctcactggatactgttttaaggagcctaatgtggccccagtaattatgaaaacctttgaaatgtctggatctctaagaaattagaaaaaggagggaatggctgagcatggg

SEQ ID NO: 304375 - DNA, 120 bp, Artificial Sequence
  ENSG00000133392_115 (sequence is synthesized)
ggctcatgcctgtaatctgtgttttgggaggccaaggtgggaggatggtctgagcccaggagttcaggaccagcctgggtgacatagtgagaccctgtctgtaccaaaaaaaaaaaaaaa

SEQ ID NO: 304376 - DNA, 120 bp, Artificial Sequence
  ENSG00000133392_116 (sequence is synthesized)
agttagcggatggcatgcccggaagccatctgaaatcacctctagagtttggggaccactgcgtgagacagggaaaagtccaaacccctctgagaaggggaagagagcagctggcgcagg

SEQ ID NO: 304377 - DNA, 120 bp, Artificial Sequence
  ENSG00000133392_117 (sequence is synthesized)
ttctctgggagctacaaaaaggaggatgtgtggacaaatcaaaacagaaacaaatagcagcttcctgctttgtcctgtagaccaggtaccctgatgccttcctagcatgcggaggaatga

SEQ ID NO: 304378 - DNA, 120 bp, Artificial Sequence
  ENSG00000133392_118 (sequence is synthesized)
ggaggaagccatgcccatccttgtcccctctagacactttcccggctcctgtccagcccagccctgatgcctggaaaaataaggaagggaaagcaggaggggaggacaaggagaaaaact

SEQ ID NO: 304379 - DNA, 120 bp, Artificial Sequence
  ENSG00000133392_119 (sequence is synthesized)
cccagaatccagggcctggaggcctcggggcccaactgcagccgccatgttttagggctaggccaagagcagctcgtttgctttcccagcttaacttaccacattggccctttcctgcca

SEQ ID NO: 304380 - DNA, 120 bp, Artificial Sequence
  ENSG00000133392_120 (sequence is synthesized)
tgattaatcacgtgaccgcgtttgtgcaaaggcatcccggcagagggggccggtgggctgtgtacagtctcagcttcctttaacccaatgaatggagctcaggcaacctgctttgaagct

SEQ ID NO: 304381 - DNA, 120 bp, Artificial Sequence
  ENSG00000133392_121 (sequence is synthesized)
ttattccgcagtccgctaagaggattcctggtgggttttgtgcattccttacttgtctgctgtagaagacttcagaaaaccagtcctgagaaagaaaaaattgcaacttaaaaaaaattg

SEQ ID NO: 304382 - DNA, 120 bp, Artificial Sequence
  ENSG00000133392_122 (sequence is synthesized)
cactaaaataattagaaggaggcttgtagtggtttaacttgaagaaggctgcttgttaaacatgaacagcagcacgactgccatgtacagtgggacaggtggtgcactgcacaactccgg

SEQ ID NO: 304383 - DNA, 120 bp, Artificial Sequence
  ENSG00000133392_123 (sequence is synthesized)
ggggcaccattcatcatgatgtaaatgacatcaccgacattgtgcaaggcagtggctttgagtggcagtgatgttgcacagatgagcaggccctggtcttgaaaaaagtgaccttcctag

SEQ ID NO: 304384 - DNA, 120 bp, Artificial Sequence
  ENSG00000133392_124 (sequence is synthesized)
ggagcagatgtcctagctattagagagctcagacagttgcttctcttctgaaatcctcctgtaaatctgaacattagcatcagggtctaagaggaggtaggagataggagagaacctgtg

SEQ ID NO: 304385 - DNA, 120 bp, Artificial Sequence
  ENSG00000133392_125 (sequence is synthesized)
ccgcccagaccctggggctcccagaagccagggctgtcccaagcggtcacagcgtccccagggcgccctctgcccccacctaccccgaggaccccattttccatgtggggaaggctatct

SEQ ID NO: 304386 - DNA, 120 bp, Artificial Sequence
  ENSG00000133392_126 (sequence is synthesized)
gaatctcagacccattccccatccctggaggaaaaggaggaagggaggatgcatccagagacttttcagttgtggagttgctgtgcaggtcatccagccactcattcattcattatccca

SEQ ID NO: 304387 - DNA, 120 bp, Artificial Sequence
  ENSG00000133392_127 (sequence is synthesized)
ggaagtattcactgggctctgccctgtcctgggtgctggggagcagtgttagaaaaattgtagcccttccctgtgggtttctcataatctggtgcaggcatcttcagcttggggcgattg

SEQ ID NO: 304388 - DNA, 120 bp, Artificial Sequence
  ENSG00000133392_128 (sequence is synthesized)
tgtcctctatatggacatgctacagacatttttggttgtcacaaccaggagggggctgttagtcagcatctagtgggtaggggccagggatgccctaagcattgtacaatgcacaggatg

SEQ ID NO: 304389 - DNA, 120 bp, Artificial Sequence
  ENSG00000133392_129 (sequence is synthesized)
gtccctcaacccccagcacagaatccctacaagatgccagtagtgctgaggttatgggagacacggggagaggtaaacatacagctgatgatggtgatggaatgtggtcagttaggagaa

SEQ ID NO: 304390 - DNA, 120 bp, Artificial Sequence
  ENSG00000133392_130 (sequence is synthesized)
caccaaagagccagggctcctcccacagcctcaggactcagagaaagcttctggtgaacttgaacgttaagaatgtgtggccatcaacttggtgacatggaaggcagggtggggcctagg

SEQ ID NO: 304391 - DNA, 120 bp, Artificial Sequence
  ENSG00000133392_131 (sequence is synthesized)
ataagcagggggcctaggataagcagagggcccaggctaagcaagagtgtggaggtgagaagtgaaggaactaggtaagaaaatgctagatagtgtccaggcgtgttgctcacgcctgta

SEQ ID NO: 304392 - DNA, 74 bp, Artificial Sequence
  ENSG00000133392_132 (sequence is synthesized)
tgtaatcccagctactcaggaggctgagaaacaaaaatctagcattccagcctgggcagcagagcgagactcca

SEQ ID NO: 304393 - DNA, 120 bp, Artificial Sequence
  ENSG00000133392_133 (sequence is synthesized)
tgctcaatgcctcctccgacaagtttgtggccgacctgtggaaggacggtgctctcaggatttccccaatagacaatacttggaaaccctgactgccgaaggaggcgttggtgatggaag

SEQ ID NO: 304394 - DNA, 120 bp, Artificial Sequence
  ENSG00000133392_134 (sequence is synthesized)
agaagtaagtgactagcaatgacatgtgattggatggcttgagccttccctttcatcagaatccggggttaagggattggctattaaaacagtctcagatcctgccagaaaggaccatgt

SEQ ID NO: 304395 - DNA, 120 bp, Artificial Sequence
  ENSG00000133392_135 (sequence is synthesized)
ctgtgagtgacatatgaacagttcttcatctcctcccaatgagtgagtgtggcttgtgttcagtcattctcatttactgagcacctactatgtgacatagtagccatcaactccaattag

SEQ ID NO: 304396 - DNA, 120 bp, Artificial Sequence
  ENSG00000133393_0 (sequence is synthesized)
cctggcggccgttgaaaaatggcgactgtggcagagttgaaggctgttttaaaggacaccttggaaaaaaagggggtattagggcatttaaaagcaaggatccgagctgaagttttcaat

SEQ ID NO: 304397 - DNA, 120 bp, Artificial Sequence
  ENSG00000133393_1 (sequence is synthesized)
gccctagatgatgaccgtgaaccccgaccatcattgtctcatgaaaaccttctaattaatgaattaattcgagagtatttagaattcaacaaatataagtatacagcatctgtcctcata

SEQ ID NO: 304398 - DNA, 120 bp, Artificial Sequence
  ENSG00000133393_2 (sequence is synthesized)
gcagaatctggtcaacctgtagttccgttggacagacagtttctcatccatgaactaaatgcatttgaagaatcaaaggataatacaatacctcttttatatgggattttagcccatttc

SEQ ID NO: 304399 - DNA, 120 bp, Artificial Sequence
  ENSG00000133393_3 (sequence is synthesized)
ttgcgtggaactaaggatggcatccagaatgcatttctgaaagggccttcacttcagccttcagacccaagtcttggcagacaacctagtagaagaaagccaatggatgaccacctaaga

SEQ ID NO: 304400 - DNA, 120 bp, Artificial Sequence
  ENSG00000133393_4 (sequence is synthesized)
aaggaggaacagaaaagtactaacattgaagatcttcatgtttctcaggcagtcaacagataatgctttgtttggggtatcttttgtcttaaaattgtattattaattaaataacttatt

SEQ ID NO: 304401 - DNA, 120 bp, Artificial Sequence
  ENSG00000133393_5 (sequence is synthesized)
tattgtcccaatgttaccaaaatgcaccactaatgtttgtagaaattggagtttctacaaaacacccctcatgtttaactacatttgtgaataaaagctaactcttgtcatctagcttat

SEQ ID NO: 304402 - DNA, 80 bp, Artificial Sequence
  ENSG00000133393_6 (sequence is synthesized)
acatttgtgaataaaagctaactcttgtcatctagcttattggatttgacttgaaaaaaaaagtattgtttttacgaagt

SEQ ID NO: 304403 - DNA, 64 bp, Artificial Sequence
  ENSG00000133393_7 (sequence is synthesized)
ctcactgcaataacaggcctgtgccaccacaccggagtagtttttgtatttttagtagagatgg

SEQ ID NO: 304404 - DNA, 69 bp, Artificial Sequence
  ENSG00000133393_8 (sequence is synthesized)
gtgtgcctttaggaagtattataaaggcccttaaagtttgtaaggaaatgaaagggctttgtattacct

SEQ ID NO: 304405 - DNA, 120 bp, Artificial Sequence
  ENSG00000133393_9 (sequence is synthesized)
aaggtagaggagaagtaaatttgctgtaataattttgctgtaaataaaacaaagagtttattttattagataaagaatgtgaagtaagcatgaagagacaggctttgggagaaataccag

SEQ ID NO: 304406 - DNA, 120 bp, Artificial Sequence
  ENSG00000133393_10 (sequence is synthesized)
aaagggatttttcaaagatggcattgtttaatctccgtgtggccctcggttgtgcaatcacagatgagccagaagagggccagccccctacttgtttgggctccgaaactcttaccaaac

SEQ ID NO: 304407 - DNA, 120 bp, Artificial Sequence
  ENSG00000133393_11 (sequence is synthesized)
atcaatttttattcttgggatagaaaaatagtatgtgctatctctaatacgctacttcgatatttattaaagaagtatttttaatgtagtgtccacaggctcatttcattgaaaacaact

SEQ ID NO: 304408 - DNA, 120 bp, Artificial Sequence
  ENSG00000133393_12 (sequence is synthesized)
gactatgatgatagacagctcctgattggcaaaagttcgatggtatattcagaattaaattttgcctgcacacctaaacactgacaacatttagcttaaaggttttccatggagaagagt

SEQ ID NO: 304409 - DNA, 120 bp, Artificial Sequence
  ENSG00000133393_13 (sequence is synthesized)
ggtaagagctgtagttagcaaaattggcatcctctttagggtgtcaattctgtgctgctttgcaaattgttgaaacttttgattttctgtttggcaatgctagtcagtgttcacttctta

SEQ ID NO: 304410 - DNA, 120 bp, Artificial Sequence
  ENSG00000133393_14 (sequence is synthesized)
cagattagccaagaatttttatctaaatgcagaaacttattaatgaaatccatttaaactatacttacacaacattttgggaggccctgctggtaaaattatatatggatgcagaagtat

SEQ ID NO: 304411 - DNA, 120 bp, Artificial Sequence
  ENSG00000133393_15 (sequence is synthesized)
tgcaagagtccattttccatttttaaatctgcaatatctgattacattgatgaattccgttgtattgtatgtgtgaatataaatatctgaattctcccgggggacttggttttcgtccaa

SEQ ID NO: 304412 - DNA, 120 bp, Artificial Sequence
  ENSG00000133393_16 (sequence is synthesized)
ggatgttggcagtggacacttagtttacctcaggaattgcaatcatgtaagactatattcggaaaaaatgctggagtatataattttggatactgatataaaatcatcaagatggaagtt

SEQ ID NO: 304413 - DNA, 120 bp, Artificial Sequence
  ENSG00000133393_17 (sequence is synthesized)
aagcagaattgtcacgtgtagtccatagcgcttttatatgcattattctgtaatttgtttgtactgcggcaactttttatactttcaatgtatcatttaataaaaaaaataagcaagtca

SEQ ID NO: 304414 - DNA, 120 bp, Artificial Sequence
  ENSG00000133398_0 (sequence is synthesized)
agcgtagggccacgcctgcggcgctgctggttgaggctgtgtgggtcggggacgggccgaggcgatggcggagaagtttgaccacctagaggagcacctggagaagttcgtggagaacat

SEQ ID NO: 304415 - DNA, 120 bp, Artificial Sequence
  ENSG00000133398_1 (sequence is synthesized)
tcggcagctcggcatcatcgtcagtgacttccagcccagcagccaggccgggctcaaccaaaagctgaattttattgttactggcttacaggatattgacaagtgcagacagcagcttca

SEQ ID NO: 304416 - DNA, 120 bp, Artificial Sequence
  ENSG00000133398_2 (sequence is synthesized)
tgatattactgtaccgttagaagtttttgaatatatagatcaaggtcgaaatccccagctctacaccaaagagtgcctggagagggctctagctaaaaatgagcaagttaaaggcaagat

SEQ ID NO: 304417 - DNA, 120 bp, Artificial Sequence
  ENSG00000133398_3 (sequence is synthesized)
cgacaccatgaagaaatttaaaagcctgttgattcaagaactttctaaagtatttccggaagacatggctaagtatcgaagcatccggggggaggatcacccgccttcttaaccagctca

SEQ ID NO: 304418 - DNA, 120 bp, Artificial Sequence
  ENSG00000133398_4 (sequence is synthesized)
ctgggactgcgatgcggcgtgaggctgggactgcgagtgctgacgccaccttcctgctgaggtgggactgggccctggacacacccctcagcccctctgtcctcattgtttggcctcatg

SEQ ID NO: 304419 - DNA, 120 bp, Artificial Sequence
  ENSG00000133398_5 (sequence is synthesized)
ggaccgaggggctggaggagaggcggagctgtgccccagctgttccagcagcttgtctggcgtcaactggctttcagagtgctgacccctcatcactgtggggatcattctctctgaggg

SEQ ID NO: 304420 - DNA, 120 bp, Artificial Sequence
  ENSG00000133398_6 (sequence is synthesized)
cagatgaggcgcaggaaaatagtcttggaaatgttaaatatgatgggtaaattaaaagttttacaacattctacctaatatttttcttttaacatactctttctgttctattgtattatg

SEQ ID NO: 304421 - DNA, 120 bp, Artificial Sequence
  ENSG00000133398_7 (sequence is synthesized)
gtgtccgaaagctaaataacgactaggaaaaatttttttaaaaaaagaaaaatcagtttaatgtgggaagtacttaagtggtattatattttacattttcaagtatagtgcataaagaat

SEQ ID NO: 304422 - DNA, 120 bp, Artificial Sequence
  ENSG00000133398_8 (sequence is synthesized)
gttttaaatgtaactgttttcatggatttcaattagacatgcctataataaactaagtatgtggcttattccatgtaattatttttgtaatataatacaatgtgtcttgtaaacagttaa

SEQ ID NO: 304423 - DNA, 120 bp, Artificial Sequence
  ENSG00000133398_9 (sequence is synthesized)
tttagttttttcttttgtcaagagttgccttaccatacaagctgctgtaaggatcaaaaaggtaataaatagcatgaacgaattttgaaaagtgcaaatgctaaacacatgtaaagtggt

SEQ ID NO: 304424 - DNA, 120 bp, Artificial Sequence
  ENSG00000133398_10 (sequence is synthesized)
atggcttgtgaagcgtgcttgggtttatcagtgatcattacttgattttatgagctgttcgtattatcagaagtaatgaaatcagatgatctgtacttgtgtaaatgagggaatattaat

SEQ ID NO: 304425 - DNA, 120 bp, Artificial Sequence
  ENSG00000133398_11 (sequence is synthesized)
tcccctggttcctacactgagttttgtctaaacaaggccgtgtgcagttatatatacctaacctttattcccccatacctttcagaaagctgtgagaataggtgtcagtcatgagaatgc

SEQ ID NO: 304426 - DNA, 120 bp, Artificial Sequence
  ENSG00000133398_12 (sequence is synthesized)
ttttgagtaagtaacattcttgatattagtcttgggtataaatcttgttcagttatggtgtggtatcgtgacttcttcatcactggcattcgagtgcctgctgtgtggtaggcacagcct

SEQ ID NO: 304427 - DNA, 120 bp, Artificial Sequence
  ENSG00000133398_13 (sequence is synthesized)
gggtgctggggatgtgccagtggaaaaaaaaatagacaaaaatacaaaaatacctgcccttatggaacttccgttctaatggcattacaaaacgaaaaaaaagaatatccttaatattct

SEQ ID NO: 304428 - DNA, 120 bp, Artificial Sequence
  ENSG00000133398_14 (sequence is synthesized)
attgtggaaaaaaagttacatgtaaataaaagcttattaaatatatgaaatacatcataggtcctcaaagccctgcttaggctaaagaacagccacaaaactttcttttttccttaagag

SEQ ID NO: 304429 - DNA, 80 bp, Artificial Sequence
  ENSG00000133401_0 (sequence is synthesized)
gaggctcggcggatcccctgcgcagcgaggcgaggagcggaccccagcgccggtgcgtgccggccccgggcagcgggacg

SEQ ID NO: 304430 - DNA, 80 bp, Artificial Sequence
  ENSG00000133401_1 (sequence is synthesized)
cgaacccaaggcaccgggattgcgcctcccgcggctgccggcgaaccgcggctctgcagctcggggcaggcgcggcggcg

SEQ ID NO: 304431 - DNA, 120 bp, Artificial Sequence
  ENSG00000133401_2 (sequence is synthesized)
ccgccgggcggcgcctgggtctggacgcgcgaggaagccgcgggagcctcggccaagccgcgagcaggtgtgaatgagcccagggaaggacacacggccactgctggagggatcctccat

SEQ ID NO: 304432 - DNA, 120 bp, Artificial Sequence
  ENSG00000133401_3 (sequence is synthesized)
tcctgtgtcatttgcatgggtcctgctgtgaaatgaacctggcagggacttgttagacacttccttccttccctcattgagcactccagtgccattgttccacagttgttctaattgggt

SEQ ID NO: 304433 - DNA, 120 bp, Artificial Sequence
  ENSG00000133401_4 (sequence is synthesized)
cctagcttcctcctgccaaggcaaacagcatagtctcgagtaggtgtccctaggctcatctgccagcctgaacatgaacacaggcaaagctgatgatggccagggaccccaggggacgtg

SEQ ID NO: 304434 - DNA, 120 bp, Artificial Sequence
  ENSG00000133401_5 (sequence is synthesized)
gggccctgtggggtctggcccccaggagcaagacctctgatgatgctggtgtctgggagtgagcaccatgcccatcacccaggacaatgccgtgctgcacctgcccctcctctaccagtg

SEQ ID NO: 304435 - DNA, 120 bp, Artificial Sequence
  ENSG00000133401_6 (sequence is synthesized)
gctgcagaacagcctgcaggaaggtggggatgggccggagcagcggctctgccaggcggccatccagaagctgcaggagtacatccagctgaactttgctgtggatgagagtacggtccc

SEQ ID NO: 304436 - DNA, 120 bp, Artificial Sequence
  ENSG00000133401_7 (sequence is synthesized)
acctgatcacagcccccccgaaatggagatctgtactgtgtacctcaccaaggagctgggggacacagagactgtgggcctgagttttgggaacatccctgttttcggggactatggtga

SEQ ID NO: 304437 - DNA, 120 bp, Artificial Sequence
  ENSG00000133401_8 (sequence is synthesized)
aaagcgcagggggggcaagaagaggaaaacccaccagggtcctgtgctggatgtgggctgcatctgggtgacagagctgaggaagaacagcccagcagggaagagtgggaaggtccgact

SEQ ID NO: 304438 - DNA, 120 bp, Artificial Sequence
  ENSG00000133401_9 (sequence is synthesized)
gcgggatgagatcctctcactgaatgggcagctgatggttggagttgatgtcagtggggccagttacctggctgagcagtgctggaatggcggctttatctacctgatcatgctgcgtcg

SEQ ID NO: 304439 - DNA, 120 bp, Artificial Sequence
  ENSG00000133401_10 (sequence is synthesized)
ctttaagcacaaagcccactccacttataatggcaacagtagcaacagctctgaaccaggagaaacacctaccttggagctgggtgaccgaactgcgaaaaaggggaaacgaaccagaaa

SEQ ID NO: 304440 - DNA, 120 bp, Artificial Sequence
  ENSG00000133401_11 (sequence is synthesized)
gtttggggtcatctccaggcctcctgccaacaaggcccctgaagaatccaagggcagcgctggctgtgaggtgtccagtgaccccagcactgagctggagaacggccctgaccctgaact

SEQ ID NO: 304441 - DNA, 120 bp, Artificial Sequence
  ENSG00000133401_12 (sequence is synthesized)
tggaaacggccatgtctttcagctagaaaatggcccagattctctcaaggaggtggctggaccccatctagagaggtcagaagtggacagagggacagagcatagaattccaaagacaga

SEQ ID NO: 304442 - DNA, 120 bp, Artificial Sequence
  ENSG00000133401_13 (sequence is synthesized)
tgctcctctgaccacaagcaatgacaaacgccgcttctcaaaaggtgggaagacggacttccaatcgagtgactgcctggcacgggaggaagttggccgaatatggaagatggagctgct

SEQ ID NO: 304443 - DNA, 120 bp, Artificial Sequence
  ENSG00000133401_14 (sequence is synthesized)
caaagaatcggatgggctgggaattcaggttagtggaggccgaggatcaaagcgctcacctcacgctatcgttgtcactcaagtgaaggaaggaggtgccgctcacagggatggcaggct

SEQ ID NO: 304444 - DNA, 120 bp, Artificial Sequence
  ENSG00000133401_15 (sequence is synthesized)
gtccttaggagatgagctgctggtaatcaatggtcatttactggtcgggctctcccacgaggaagcagtggccattcttcgctccgccacgggaatggtgcagcttgtggtggccagcaa

SEQ ID NO: 304445 - DNA, 120 bp, Artificial Sequence
  ENSG00000133401_16 (sequence is synthesized)
ggaaaactccgcagaggacctcctcaggttaacatctaagagcttgccagatctgaccagctcggtagaagatgtgtcctcctggactgataacgaagaccaggaggcagacggggaaga

SEQ ID NO: 304446 - DNA, 120 bp, Artificial Sequence
  ENSG00000133401_17 (sequence is synthesized)
ggacgaaggaaccagctcttctgtccagagagcaatgcctgggacagatgaaccccaagatgtgtgcggtgctgaggaatccaaggggaacttggaaagtcccaaacagggcagcaataa

SEQ ID NO: 304447 - DNA, 120 bp, Artificial Sequence
  ENSG00000133401_18 (sequence is synthesized)
aatcaagctcaagagtcgcctttcagggggtgtacaccgccttgagtcagttgaagaatataacgagctgatggtgcggaatggggacccccggatccggatgttggaggtctcccgaga

SEQ ID NO: 304448 - DNA, 120 bp, Artificial Sequence
  ENSG00000133401_19 (sequence is synthesized)
tggccggaaacactccctcccgcagctgctggactcttccagtgcctcacaggaataccacattgtgaagaagtctacccgctccttaagcacgactcaggtggaatctccttggaggct

SEQ ID NO: 304449 - DNA, 120 bp, Artificial Sequence
  ENSG00000133401_20 (sequence is synthesized)
cattcggccatccgtcatctcgatcattgggttgtacaaagaaaaaggcaagggccttggctttagtattgctggaggtcgagactgcattcgtggacagatggggatttttgtcaagac

SEQ ID NO: 304450 - DNA, 120 bp, Artificial Sequence
  ENSG00000133401_21 (sequence is synthesized)
catcttcccaaatggatcagctgcagaggacggaagacttaaagaaggggatgaaatcctagatgtaaatggaataccaataaagggcttgacatttcaagaagccattcatacctttaa

SEQ ID NO: 304451 - DNA, 120 bp, Artificial Sequence
  ENSG00000133401_22 (sequence is synthesized)
gcaaatccggagtggattatttgttttaacggtacgcacaaagttggtgagccccagcctcacaccctgctcgacacccacacacatgagcagatccgcctccccgaacttcaataccag

SEQ ID NO: 304452 - DNA, 120 bp, Artificial Sequence
  ENSG00000133401_23 (sequence is synthesized)
tgggggagcctcagcgggaggttccgatgaaggcagttcttcatccctgggtcggaagacccctgggcccaaggacaggatcgtcatggaagtaacactcaacaaagagccaagagttgg

SEQ ID NO: 304453 - DNA, 120 bp, Artificial Sequence
  ENSG00000133401_24 (sequence is synthesized)
attaggcattggtgcctgctgcttggctctggaaaacagtcctcctggcatctacattcacagccttgctccaggatcagtggccaagatggagagcaacctgagccgcggggatcaaat

SEQ ID NO: 304454 - DNA, 120 bp, Artificial Sequence
  ENSG00000133401_25 (sequence is synthesized)
cctggaagtgaactccgtcaacgtccgccatgctgctttaagcaaagtccacgccatcttgagtaaatgccctccaggacccgttcgccttgtcatcggccggcaccctaatccaaaggt

SEQ ID NO: 304455 - DNA, 120 bp, Artificial Sequence
  ENSG00000133401_26 (sequence is synthesized)
ttccgagcaggaaatggatgaagtcatagcacgcagcacttatcaggagagcaaagaggccaattcctctcctggcttaggtacccccttgaagagtccctctcttgcaaaaaaggactc

SEQ ID NO: 304456 - DNA, 120 bp, Artificial Sequence
  ENSG00000133401_27 (sequence is synthesized)
ccttatttctgaatctgaactctcccagtactttgcccacgatgtccctggccccttgtcagacttcatggtggccggttctgaggacgaggatcacccgggaagtggctgcagcacgtc

SEQ ID NO: 304457 - DNA, 120 bp, Artificial Sequence
  ENSG00000133401_28 (sequence is synthesized)
ggaggagggcagcctgcctcccagcacctccactcacaaggagcctggaaaacccagagccaacagcctcgtgactcttgggagccatcgggcttctgggctcttccacaagcaggtgac

SEQ ID NO: 304458 - DNA, 120 bp, Artificial Sequence
  ENSG00000133401_29 (sequence is synthesized)
agttgccagacaagccagtctccccggaagcccacaggccctccgaaaccctctcctccgccagaggaaggtaggctgctacgatgccaacgatgccagtgatgaggaagagtttgacag

SEQ ID NO: 304459 - DNA, 120 bp, Artificial Sequence
  ENSG00000133401_30 (sequence is synthesized)
agaaggggactgcatttcactcccaggggccctcccgggtcccatcaggcctctgtcagaggatgacccgaggcgtgtctcaatttcctcttccaagggcatggacgtccacaaccaaga

SEQ ID NO: 304460 - DNA, 120 bp, Artificial Sequence
  ENSG00000133401_31 (sequence is synthesized)
ggaacgaccccggaaaacactggtgagcaaggccatctcggcacctcttcttggtagctcagtggacttagaggagagtatcccagagggcatggtggatgctgcgtcctatgcagccaa

SEQ ID NO: 304461 - DNA, 120 bp, Artificial Sequence
  ENSG00000133401_32 (sequence is synthesized)
cctcacggactctgcagaggcccccaaggggagccctggaagctggtggaagaaggaactgtcaggatcaagtagcgcacccaaattggaatacacagtccgtacagacacccagagtcc

SEQ ID NO: 304462 - DNA, 120 bp, Artificial Sequence
  ENSG00000133401_33 (sequence is synthesized)
gacgaacactgggagccccagttccccccagcagaaaagtgaaggcctgggctccaggcacagaccagtggccagggtaagcccccactgcaagagatccgaggctgaggccaagcccag

SEQ ID NO: 304463 - DNA, 120 bp, Artificial Sequence
  ENSG00000133401_34 (sequence is synthesized)
tggctcacagacagtgaacctgactggcagagccaatgatccatgcgatctggactcgagagtccaggccacttctgtcaaagtgactgtcgctggctttcagccaggtggagctgtgga

SEQ ID NO: 304464 - DNA, 120 bp, Artificial Sequence
  ENSG00000133401_35 (sequence is synthesized)
gaaggaatctctgggaaagctgaccactggagatgcttgtgtctctaccagctgtgaactagccagtgctctgtcccatctggatgccagccacctcacagagaacctgcccaaagctgc

SEQ ID NO: 304465 - DNA, 120 bp, Artificial Sequence
  ENSG00000133401_36 (sequence is synthesized)
atcagagctggggcaacaacccatgactgaactggacagctcctcagacctcatctcttccccagggaagaagggggccgctcatcctgaccccagcaagacctctgtagacacagggca

SEQ ID NO: 304466 - DNA, 120 bp, Artificial Sequence
  ENSG00000133401_37 (sequence is synthesized)
agtcagtcggccagagaatcccagccagcctgcatcgcccagggtcaccaagtgcaaggccaggtctccagtcaggctcccccatgagggcagcccctccccgggggagaaagcagcggc

SEQ ID NO: 304467 - DNA, 120 bp, Artificial Sequence
  ENSG00000133401_38 (sequence is synthesized)
tccccctgactacagcaagactcgatcagcatcggaaaccagcacaccccacaataccaggagggtggctgccctcaggggagcgggacctggagcagagggaatgacaccagctggtgc

SEQ ID NO: 304468 - DNA, 120 bp, Artificial Sequence
  ENSG00000133401_39 (sequence is synthesized)
tgtcctgccaggagaccccctcacatcccaggagcagagacagggagctccaggtaaccacagtaaggctctggaaatgacaggaatccatgcacctgaaagctcccaggagccttccct

SEQ ID NO: 304469 - DNA, 120 bp, Artificial Sequence
  ENSG00000133401_40 (sequence is synthesized)
gctggagggagcagattctgtgtcctcaagggcaccgcaggccagcctctccatgctgccatccactgacaacaccaaagaagcatgtggccatgtctcggggcactgctgcccaggggg

SEQ ID NO: 304470 - DNA, 120 bp, Artificial Sequence
  ENSG00000133401_41 (sequence is synthesized)
gagtagagagagccctgtgacggacattgacagcttcatcaaggagctggatgcttctgcagcaaggtctccgtcttcccagacgggggacagtggctctcaggagggcagtgctcaggg

SEQ ID NO: 304471 - DNA, 120 bp, Artificial Sequence
  ENSG00000133401_42 (sequence is synthesized)
ccacccaccagccggggctggaggtgggagctcctgccgtgccgaaccagtcccggggggccagacctcctccccgaggagggcctgggctgctggtgcccccgcctacccacaatgggc

SEQ ID NO: 304472 - DNA, 120 bp, Artificial Sequence
  ENSG00000133401_43 (sequence is synthesized)
ctcccagccttcggttttagattcaattaatcccgacaaacattttactgtgaacaaaaactttctgagcaactactctagaaattttagcagttttcatgaagacagcacctccctatc

SEQ ID NO: 304473 - DNA, 120 bp, Artificial Sequence
  ENSG00000133401_44 (sequence is synthesized)
aggcctgggtgacagcacggagccgtctctgtcatccatgtatggcgatgctgaggattcttcttctgaccctgagtcactcactgaagccccacgagcttctgccagggacggctggtc

SEQ ID NO: 304474 - DNA, 120 bp, Artificial Sequence
  ENSG00000133401_45 (sequence is synthesized)
ccctcctcgttcccgtgtgtctttgcacaaggaagatccttcggagtcagaagaggaacagattgagatttgttccacacgtggctgccccaatccaccctcgagtcctgctcatcttcc

SEQ ID NO: 304475 - DNA, 120 bp, Artificial Sequence
  ENSG00000133401_46 (sequence is synthesized)
cacccaggctgccatctgtcctgcctcagccaaagttctgtcattaaaatacagcactccgagagagtcggtggccagtccccgtgagaaggccgcctgcttgccaggctcatacacttc

SEQ ID NO: 304476 - DNA, 120 bp, Artificial Sequence
  ENSG00000133401_47 (sequence is synthesized)
aggcccagactcttcccagccatcatcactcttggagatgagctctcaggagcatgaaactcatgcggacataagcacttcacagaaccacaggccctcgtgtgcagaagaaaccacaga

SEQ ID NO: 304477 - DNA, 120 bp, Artificial Sequence
  ENSG00000133401_48 (sequence is synthesized)
agtcaccagcgctagctcagccatggaaaacagtccgctgtctaaagtagccaggcattttcacagtccgcccatcattctcagctcccccaacatggtaaatggcttggaacatgacct

SEQ ID NO: 304478 - DNA, 120 bp, Artificial Sequence
  ENSG00000133401_49 (sequence is synthesized)
aaaacctccacatctctgaaagtcaagacctggatgacttgctacagaaaccaaaaatgatcgctaggaggcccatcatggcctggtttaaagaaataaataaacataaccaaggcacac

SEQ ID NO: 304479 - DNA, 120 bp, Artificial Sequence
  ENSG00000133401_50 (sequence is synthesized)
atttgaggagcaaaaccgagaaggaacaacctctaatgcctgccagaagtcccgactccaagattcagatggtgagttcaagccaaaaaaagggcgttactgtgcctcatagccctcctc

SEQ ID NO: 304480 - DNA, 120 bp, Artificial Sequence
  ENSG00000133401_51 (sequence is synthesized)
agccgaaaacaaacctggaaaataaggacctgtctaagaagagtccggcagaaatgcttctgactaatggtcagaaggcaaagtgtggtccgaagctgaagaggctcagcctcaagggca

SEQ ID NO: 304481 - DNA, 120 bp, Artificial Sequence
  ENSG00000133401_52 (sequence is synthesized)
aggccaaagtcaactctgaggcccctgctgcgaatgctgtgaaggctggggggacggaccacaggaaacccttgatctcaccccagacctcccacaaaacactttctaaggcagtgtcac

SEQ ID NO: 304482 - DNA, 120 bp, Artificial Sequence
  ENSG00000133401_53 (sequence is synthesized)
agcggctccatgtagccgaccacgaggaccctgacagaaacaccacagctgcccccaggtccccccagtgtgtgctggaaagcaagccacctcttgccacctctgggccactgaaaccct

SEQ ID NO: 304483 - DNA, 120 bp, Artificial Sequence
  ENSG00000133401_54 (sequence is synthesized)
cagtgtctgacacgagcatcaggacatttgtctcgcccctgacctctcccaagcctgttcctgagcaaggcatgtggagcaggttccacatggctgtcctctctgaacccgacagaggtt

SEQ ID NO: 304484 - DNA, 120 bp, Artificial Sequence
  ENSG00000133401_55 (sequence is synthesized)
gcccaaccacccctaaatctcctaagtgtagagcagagggcagggcgccccgtgctgactccgggccggtgagtccggcagcgtctaggaacggcatgtccgtggcagggaacagacaga

SEQ ID NO: 304485 - DNA, 120 bp, Artificial Sequence
  ENSG00000133401_56 (sequence is synthesized)
gtgagccgcgcctggccagccatgtggcagcagacacagcccaacccaggccgactggcgaaaaaggaggcaacataatggccagcgatcgcctcgaaagaacaaaccagctgaaaatcg

SEQ ID NO: 304486 - DNA, 120 bp, Artificial Sequence
  ENSG00000133401_57 (sequence is synthesized)
tggagatttctgctgaagcagtgtcagagactgtatgtggtaacaagccagctgaaagcgacagacggggagggtgcttggcccagggcaactgtcaggagaagagtgaaatcaggctct

SEQ ID NO: 304487 - DNA, 120 bp, Artificial Sequence
  ENSG00000133401_58 (sequence is synthesized)
atcgccaggtcgcagaatcatccacaagtcatccatcctcactcccatctcatgcctcccaggcagagcaggaaatgtcacgatcattcagcatggcaaaactggcgtcctcctcctcct

SEQ ID NO: 304488 - DNA, 120 bp, Artificial Sequence
  ENSG00000133401_59 (sequence is synthesized)
cccttcaaacagccattagaaaggcagaatactcccagggaaaatcaagcctgatgtcagactcccgaggggtgcccagaaacagcattccagggggcccctcgggggaggaccatctct

SEQ ID NO: 304489 - DNA, 120 bp, Artificial Sequence
  ENSG00000133401_60 (sequence is synthesized)
acttcaccccaaggccagcgaccaggacctactccatgccagcccagttctcaagccattttggacgggagggtcaccccccacacagcctgggtcgctctcgggacagccaggtccctg

SEQ ID NO: 304490 - DNA, 120 bp, Artificial Sequence
  ENSG00000133401_61 (sequence is synthesized)
tgacaagcagtgttgtccccgaggcaaaggcatccagaggtggtcttcccagcctggctaatggacagggcatatatagtgtaaagccgctgctggacacatcgaggaatcttccagcca

SEQ ID NO: 304491 - DNA, 120 bp, Artificial Sequence
  ENSG00000133401_62 (sequence is synthesized)
cagatgaaggggatatcatttcagtccaggagacgagctgcctagtcacagacaaaatcaaagtcaccagacgacactactgctatgagcagaactggccccatgaatctacctcatttt

SEQ ID NO: 304492 - DNA, 120 bp, Artificial Sequence
  ENSG00000133401_63 (sequence is synthesized)
tctctgtgaagcagcggatcaagtcttttgagaacctggccaatgctgaccggcctgtagccaagtccggggcttccccatttttgtcggtgagctccaagcctcccattgggaggcggt

SEQ ID NO: 304493 - DNA, 120 bp, Artificial Sequence
  ENSG00000133401_64 (sequence is synthesized)
cttccggcagcattgtttccgggagcctgggccacccaggtgacgcagcagcaaggttgttgagacgcagcttgagttcctgcagcgaaaaccaaagcgaagccggcaccctcctgcccc

SEQ ID NO: 304494 - DNA, 120 bp, Artificial Sequence
  ENSG00000133401_65 (sequence is synthesized)
agatggccaagtctccctcaatcatgacactgaccatctctcggcagaacccaccagagaccagtagcaagggctctgattcggaactaaagaaatcacttggtcctttgggaattccca

SEQ ID NO: 304495 - DNA, 120 bp, Artificial Sequence
  ENSG00000133401_66 (sequence is synthesized)
ccccaacgatgaccctggcttctcctgttaagaggaacaagtcctcggtacgccacacgcagccctcgcccgtgtcccgctccaagctccaggagctgagagccttgagcatgcctgacc

SEQ ID NO: 304496 - DNA, 120 bp, Artificial Sequence
  ENSG00000133401_67 (sequence is synthesized)
ttgacaagctctgcagcgaggattactcagcagggccgagcgccgtgctcttcaaaactgagctggagatcacccccaggaggtcacctggccctcctgctggaggcgtttcgtgtcccg

SEQ ID NO: 304497 - DNA, 120 bp, Artificial Sequence
  ENSG00000133401_68 (sequence is synthesized)
agaagggcgggaacagggcctgtccaggaggaagtggccctaaaaccagtgctgctgagacacccagttcagccagtgatacgggtgaagctgcccaggatctgccttttagaagaagct

SEQ ID NO: 304498 - DNA, 120 bp, Artificial Sequence
  ENSG00000133401_69 (sequence is synthesized)
ggtcagttaatttggatcaacttctagtctcagcgggggaccagcaaagattacagtctgttttatcgtcagtgggatcgaaatctaccatcctaactctcattcaggaagcgaaagcac

SEQ ID NO: 304499 - DNA, 120 bp, Artificial Sequence
  ENSG00000133401_70 (sequence is synthesized)
aatcagagaatgaagaagatgtttgcttcatagtcttgaatagaaaagaaggctcaggtctgggattcagtgtggcaggagggacagatgtggagccaaaatcaatcacggtccacaggg

SEQ ID NO: 304500 - DNA, 120 bp, Artificial Sequence
  ENSG00000133401_71 (sequence is synthesized)
tgttttctcagggggcggcttctcaggaagggactatgaaccgaggggatttccttctgtcagtcaacggcgcctcactggctggcttagcccacgggaatgtcctgaaggttctgcacc

SEQ ID NO: 304501 - DNA, 120 bp, Artificial Sequence
  ENSG00000133401_72 (sequence is synthesized)
aggcacagctgcacaaagatgccctcgtggtcatcaagaaagggatggatcagcccaggccctctgcccggcaggagcctcccacagccaatgggaagggtttgctgtccagaaagacca

SEQ ID NO: 304502 - DNA, 120 bp, Artificial Sequence
  ENSG00000133401_73 (sequence is synthesized)
tccccctggagcctggcattgggagaagtgtggctgtacacgatgctctgtgtgttgaagtgctgaagacctcggctgggctgggactgagtctggatgggggaaaatcatcggtgacgg

SEQ ID NO: 304503 - DNA, 120 bp, Artificial Sequence
  ENSG00000133401_74 (sequence is synthesized)
gagatgggcccttggtcattaaaagagtgtacaaaggtggtgcggctgaacaagctggaataatagaagctggagatgaaattcttgctattaatgggaaacctctggttgggctcatgc

SEQ ID NO: 304504 - DNA, 120 bp, Artificial Sequence
  ENSG00000133401_75 (sequence is synthesized)
actttgatgcctggaatattatgaagtctgtcccagaaggacctgtgcagttattaattagaaagcataggaattcttcatgaattttaacaagaatcattttctcagttctcttctttc

SEQ ID NO: 304505 - DNA, 120 bp, Artificial Sequence
  ENSG00000133401_76 (sequence is synthesized)
tttagcaaatcagagtgacttctttaaaccacaggttgttgaaatggccaacactggtacagacacggactataaaaatctccaagcttgtgcttacacatgaagcctgacttaactgta

SEQ ID NO: 304506 - DNA, 120 bp, Artificial Sequence
  ENSG00000133401_77 (sequence is synthesized)
tgtgcaacagcaatgaaattaactccagaagccttccacctgcgtcacccaggccgggagggttccttcgttccagtgcctgtcccctacctttatgttatgtttactgatggggataca

SEQ ID NO: 304507 - DNA, 120 bp, Artificial Sequence
  ENSG00000133401_78 (sequence is synthesized)
agatgtgacacacccttctttatttgaaacaaacaaacatttagctagacctttgcttccttcttgccagctctcccaacatacccaatcctggtgatcagggaactaaaagtctgaggg

SEQ ID NO: 304508 - DNA, 120 bp, Artificial Sequence
  ENSG00000133401_79 (sequence is synthesized)
ggacacaaatgtcacacctaagaggacaatcaatcattttgtatgattttgtaagtaaatgacagaatgcttttaggcacattcaatggaaggaggagatgtaggtctgtatatgttacc

SEQ ID NO: 304509 - DNA, 120 bp, Artificial Sequence
  ENSG00000133401_80 (sequence is synthesized)
ctgaaaagagaataagacttacttaaaaaaatgaattatgacctgttaggctgagctcaggaattgtccaaaaaggaaaaagcaaaataattaattgagagtattttttagtgagtgtaa

SEQ ID NO: 304510 - DNA, 120 bp, Artificial Sequence
  ENSG00000133401_81 (sequence is synthesized)
tgtataatgtacgtatgcaaagttcaactcaataggttattgatcaccatgaagtattgatcattttctatctcaaaagtgtaagccataaggctgttttacagaatagcacttctgata

SEQ ID NO: 304511 - DNA, 120 bp, Artificial Sequence
  ENSG00000133401_82 (sequence is synthesized)
agctgtattaaatagccatgagcttcactgcttagagggagcagaaaggtcaacatctaaaagcaccttacaactagtttttgaacctgtcttgataagtgcttgaattcaagactggtc

SEQ ID NO: 304512 - DNA, 120 bp, Artificial Sequence
  ENSG00000133401_83 (sequence is synthesized)
agtccaagagcagacaaaaatatcacaagtcagtcagtcactgggtttccatttctgaattttatgcactccaaccatgaatttaaactaaatttttagaaatcaagtatctttctaagt

SEQ ID NO: 304513 - DNA, 120 bp, Artificial Sequence
  ENSG00000133401_84 (sequence is synthesized)
gtccttggatttatagacaatgtatgtacaatccaaatagaggagcttaatggaatccttttaggagactggttggtttttttccctctttcccaacatgtttaagaaatgtaacattct

SEQ ID NO: 304514 - DNA, 120 bp, Artificial Sequence
  ENSG00000133401_85 (sequence is synthesized)
aagtattggatctcttttcttgacctagtataatgacaactgcagtgacttaagtttttgctgttttcgttttcccgctttgcaatttcctccttttgccaaaaatgttttcctacagaa

SEQ ID NO: 304515 - DNA, 120 bp, Artificial Sequence
  ENSG00000133401_86 (sequence is synthesized)
gactgtcgtgactcacgctacttgggaaactcactctggccactcctcctctggtggcatgagctgcttcccagtagctattccgattggatattccgttcgtcgtcacatagctggctt

SEQ ID NO: 304516 - DNA, 120 bp, Artificial Sequence
  ENSG00000133401_87 (sequence is synthesized)
ttctctcctcatgatgtaccttattttcttaggtaaataattccaaactctcatcgggtcataaagaggaggagaaacagggtgagtcaaggtaaaggagcagaaatgtagttacaagcc

SEQ ID NO: 304517 - DNA, 120 bp, Artificial Sequence
  ENSG00000133401_88 (sequence is synthesized)
aggtcgtcttcagtggcacaaaccaacccgttgagccctgacaacatgagtggagagtgcatttgccatacctgtgtgcatgacactaagattttatgttggagatacttctttaaataa

SEQ ID NO: 304518 - DNA, 120 bp, Artificial Sequence
  ENSG00000133401_89 (sequence is synthesized)
cctacagcttgggtctatggctgtgacccccagattcatggaggggctttagccatcagctttgtacatcatcatttttctgaatgaccaatcccactaaacatctttgaagtcggccta

SEQ ID NO: 304519 - DNA, 120 bp, Artificial Sequence
  ENSG00000133401_90 (sequence is synthesized)
gagaggtccttcagatgagagagaaatagctggcttgtctgagtccagatttctcatcaactggcaatacaaaggaaaatatggtacaggagttagttagaaaggtcttattgattttac

SEQ ID NO: 304520 - DNA, 120 bp, Artificial Sequence
  ENSG00000133401_91 (sequence is synthesized)
ttctacttttcactacagttacaggtagaatactgtaggaagtcagtgcaaggtgcatgcttgattgatagatattgattgattgtttttcagtctctggggtcagttttgtggtttctg

SEQ ID NO: 304521 - DNA, 120 bp, Artificial Sequence
  ENSG00000133401_92 (sequence is synthesized)
ctttcttgcctaaatcaaagactatttcaagtcaacaacactgaaaactgcttttcgcctccactcttacagctgtgcctaataataattaattaataaacgcacagccctatgtgaaca

SEQ ID NO: 304522 - DNA, 120 bp, Artificial Sequence
  ENSG00000133401_93 (sequence is synthesized)
gacaggaatttcttgtgcaatgtggagcaaatggaatggtctccttccgcaagtctttttaatcctcatatctggagtacaagggtagacctctggcttaccacatacactatgctaaag

SEQ ID NO: 304523 - DNA, 120 bp, Artificial Sequence
  ENSG00000133401_94 (sequence is synthesized)
tcatcagccactgctactacatcttgccagaaggtttccctcgccaacaaacagttgaaatttaagggaagaagcaaaagctaaactgtctttgaccctaagatagatagaaagctattt

SEQ ID NO: 304524 - DNA, 120 bp, Artificial Sequence
  ENSG00000133401_95 (sequence is synthesized)
atttgtcttcagtgttcaaggcatgactagtatttctaattagcctaataaattcccacactttctgaagtgaacactaatggtattgtcctactaaaactgtcattgtttctttttttt

SEQ ID NO: 304525 - DNA, 120 bp, Artificial Sequence
  ENSG00000133401_96 (sequence is synthesized)
taactggtcagtcattcacaataagctatgagggtaaataaatatgtgttataacaagtaaaccgtagttgcaagaatataccatgaagattaaagtaggctgggtttcatttccatctt

SEQ ID NO: 304526 - DNA, 120 bp, Artificial Sequence
  ENSG00000133401_97 (sequence is synthesized)
cccacacatctcattgaatttgatggttgacttaattggcaccataactttgtatgatattatacattaacctttatttatgtaaagtaaaatgccttatatattaaagagtaagtgcaa

SEQ ID NO: 304527 - DNA, 120 bp, Artificial Sequence
  ENSG00000133401_98 (sequence is synthesized)
taatatgaaatagcctgtacattttaaaaatgttgtcaccaagttatataaatccacatctctgtaaacaaccttttttaagtaattttaaaaaaaataaacactctgcttactacttga

SEQ ID NO: 304528 - DNA, 120 bp, Artificial Sequence
  ENSG00000133401_99 (sequence is synthesized)
aatcggcgtctttcccagaccaccatgagggccggcgttcctgctcagctgtgaatgctgctgttgttatggctgctgcttggcttaggtgtgaatgagcccagggaaggacacacggcc

SEQ ID NO: 304529 - DNA, 68 bp, Artificial Sequence
  ENSG00000133401_100 (sequence is synthesized)
ggtccgactgcgggatgagatcctctcactgaatgggcagctgatggttggagttgatgtcagtgggg

SEQ ID NO: 304530 - DNA, 120 bp, Artificial Sequence
  ENSG00000133401_101 (sequence is synthesized)
ggattacaggcatgagccaccacgtccagtcattaacaactttttcttgatatcatcatgtccttcattccacattaaccagcctgcccgagtttccaccagatcttgcttgctaccctg

SEQ ID NO: 304531 - DNA, 120 bp, Artificial Sequence
  ENSG00000133401_102 (sequence is synthesized)
agcctgcccgagtttccaccagatcttgcttgctaccctgattccgagtctcccccacactgctccatgtgtaaactggaaagtagtcctaacagggtcacagctccccttcataccctt

SEQ ID NO: 304532 - DNA, 120 bp, Artificial Sequence
  ENSG00000133401_103 (sequence is synthesized)
tccccgcagactgcatttataaatgggctaaactccaccctccttggggttaaagtgaggtgggccctttgtacagcgccacatgtaaacaacgtggcttttgagatgtcccctaaagcc

SEQ ID NO: 304533 - DNA, 120 bp, Artificial Sequence
  ENSG00000133401_104 (sequence is synthesized)
tggagaggaagccacgtttttcatttgtgagaaaattattcaaggttctatctggtcctttgcttttcccaactaggaggtttttcagctgatggagaatggtggtggaccagataagat

SEQ ID NO: 304534 - DNA, 120 bp, Artificial Sequence
  ENSG00000133401_105 (sequence is synthesized)
ctggagccggcggagagcagccttcgggaagtcctgcaggagccgcgttccaggagggcagctggcagccgccccaggcccccgggccgcctgcaggtgattaggctaatgagctgcccc

SEQ ID NO: 304535 - DNA, 120 bp, Artificial Sequence
  ENSG00000133401_106 (sequence is synthesized)
gggggcgcggagaccggcctggcgagcggattacccggcgcccagctgctgccggcggagactcccaggagctccggagaggaaccctccgaaggtgacttcagaactggagttacctgg

SEQ ID NO: 304536 - DNA, 120 bp, Artificial Sequence
  ENSG00000133401_107 (sequence is synthesized)
cagagctggggcaacaacccatgactggtaagattattttcccatttgttaatcttaaagtaggtggggagataccctaatgaaagcattatacaggccaggcgcagtggcttacacctg

SEQ ID NO: 304537 - DNA, 63 bp, Artificial Sequence
  ENSG00000133401_108 (sequence is synthesized)
ggtggtgtaggcggaggttgcagtgagccaaggtggcaccattgcactgcagcctgggcaaca

SEQ ID NO: 304538 - DNA, 120 bp, Artificial Sequence
  ENSG00000133401_109 (sequence is synthesized)
acagaacaaaggatgcaagtacagcagcaacacagccaggagggcagccccagaattgggaggccaacagtgctactgggctcaagtgctgttataagtggtgcggctgaacaagctgga

SEQ ID NO: 304539 - DNA, 120 bp, Artificial Sequence
  ENSG00000133401_110 (sequence is synthesized)
agaagtgtggcgtcttggtccaggatgcaggtccctgattcgggttggacgtggtcatcaaacccagaaattgaaggatcttgggcctgccttgatgttcatttctctcatctataaaat

SEQ ID NO: 304540 - DNA, 120 bp, Artificial Sequence
  ENSG00000133401_111 (sequence is synthesized)
atattcagagcctcagaaccacgtgcagcgtctgtttctgcagtgcgagctgtttaatgccctgttaagtactgcagatgtctggagtgccgtgcatcttggcattcaggggtgacgtct

SEQ ID NO: 304541 - DNA, 120 bp, Artificial Sequence
  ENSG00000133401_112 (sequence is synthesized)
ttttttattcgagagggcaaagcagagggtatgggttaggcagtgccttctgggaggggccttttgttccttctccacatctctccctgataagggtagctggattcctttctacaactt

SEQ ID NO: 304542 - DNA, 120 bp, Artificial Sequence
  ENSG00000133401_113 (sequence is synthesized)
ggcttccttgtggcctgagctgtttgtagtccttgctgaaaatggctccgattccatttaacaaatgagaaacacttcttgtccagatgcctccatggtccccagtcttccttctgtgtc

SEQ ID NO: 304543 - DNA, 120 bp, Artificial Sequence
  ENSG00000133401_114 (sequence is synthesized)
atttcactttccctcttccagagggctgaggccctcctcaatacagggaaacaccttggtcatcagatcttgtcatgcttgcctttgccccaaaactgtctcgaccacttggtggacttt

SEQ ID NO: 304544 - DNA, 120 bp, Artificial Sequence
  ENSG00000133401_115 (sequence is synthesized)
cagtgggatccttgtaaactgtcaaaggaaaccacttcatcctcacagctgccagtttttaagcctcgtgaactcagatctggatggtccttctgtcatttataatcaatcactcagtat

SEQ ID NO: 304545 - DNA, 120 bp, Artificial Sequence
  ENSG00000133401_116 (sequence is synthesized)
tcctgcagcaacttcagggcctctggtcttgaagcagaccctgcagagcaatcaatcaaacgctgagcgcctggagggcttaacctcgctcagtttcctgttcttcagtctccctaaccc

SEQ ID NO: 304546 - DNA, 120 bp, Artificial Sequence
  ENSG00000133401_117 (sequence is synthesized)
aggtctacccggtcctatgcagttatattccttaccatacactgacagcgtccagctgggggcccggtgcagtaagctgcacagtagagatgctgggacgcttttaaattcctgatgccc

SEQ ID NO: 304547 - DNA, 120 bp, Artificial Sequence
  ENSG00000133401_118 (sequence is synthesized)
aggaaattcccagcttaattaaatcagaaatgccgcagtgggggccagacaccgtttcacgttcccaggtgactccagtatgcagccagactcgagccactgcaatagacccattttcct

SEQ ID NO: 304548 - DNA, 120 bp, Artificial Sequence
  ENSG00000133401_119 (sequence is synthesized)
gttgaaaaatcatgctccccccagtgttagtaaatgtccttcagaccctgtggagtggccttctttaaaccacgacaatggactggcctttatgtccaaaggagacaatgctagcttggc

SEQ ID NO: 304549 - DNA, 120 bp, Artificial Sequence
  ENSG00000133401_120 (sequence is synthesized)
ttcagccctagtgaacagtgaacagaggaagcaggcagtttaatccatccgtggtccttcctctgcctcccaattaactaagtgtgcctttgcagtcaactctgacgtccttggctggta

SEQ ID NO: 304550 - DNA, 120 bp, Artificial Sequence
  ENSG00000133401_121 (sequence is synthesized)
ggcaggcaagggagggaagtacaaggcaagtttacaatcctgattcaaaccagcccactatcccgaaaccagcacacagagccggcatcaccatggaaacacatttcctcacagtggagc

SEQ ID NO: 304551 - DNA, 120 bp, Artificial Sequence
  ENSG00000133401_122 (sequence is synthesized)
aagatgccagtagaggcagcgagtgtgtttgtgaagacagccatagccaggggcagggtttccctttgcaggagcaggagtggcaggagcggggaggcaggaagctctctgggttcctgg

SEQ ID NO: 304552 - DNA, 120 bp, Artificial Sequence
  ENSG00000133401_123 (sequence is synthesized)
gggctttggagtccattctaacagtctcacatgagactgggcattttggtgctgccaagtcttggtaccagaggatgatctgctgctgccattagcagccagggttggcagaaaatcaaa

SEQ ID NO: 304553 - DNA, 120 bp, Artificial Sequence
  ENSG00000133401_124 (sequence is synthesized)
tttggagtccccaagtgtgacttcagtcctcactgagaagtgcacagccggtgtggggggcttaacaagagcactttgctttctggggatttctgcttgggcataaaagcatttgccaat

SEQ ID NO: 304554 - DNA, 120 bp, Artificial Sequence
  ENSG00000133401_125 (sequence is synthesized)
gcttgcagaaaacacagaacaaaggatgcaagtacagcagcaacacagccaggagggcagccccagaattgggaggccaacagtgctactgggctcaagtgctgttataaggagaagtgt

SEQ ID NO: 304555 - DNA, 120 bp, Artificial Sequence
  ENSG00000133401_126 (sequence is synthesized)
acagagcatggggagctggcaggaagttggagcacgcatggcgcagcttgtatttttgttgatagttaataacccaggactttaaagacctgaatggagaagggaagtgaagcacaacca

SEQ ID NO: 304556 - DNA, 120 bp, Artificial Sequence
  ENSG00000133401_127 (sequence is synthesized)
actttggagtctgtcccattccagaggctgctgaagcacagcagagcacgctcacctgaccagctcataaagcagttacctggctgagcagtgctggaatggcggctttatctacctgat

SEQ ID NO: 304557 - DNA, 120 bp, Artificial Sequence
  ENSG00000133401_128 (sequence is synthesized)
gaaatgtctagtactgaagacatctaagattttcaaagtctgagtgtatttttctgccagataccacaatagaacaaatgagagtaatctctgaccttgccgtgtgctgacttttaggaa

SEQ ID NO: 304558 - DNA, 89 bp, Artificial Sequence
  ENSG00000133401_129 (sequence is synthesized)
caaaaatataaaaaaaaaagctgtgcatggtggtgtatgcctgtggtagcagctactctgaaggctgaggtggtgcggctgaacaagct

SEQ ID NO: 304559 - DNA, 120 bp, Artificial Sequence
  ENSG00000133401_130 (sequence is synthesized)
catgattgggcatttcgaacgtttccagagaaaaggttgtcttgaaaggtgacaaccaaaggctgcctcagtgtaacctcgtctccctcagatgaagaccttttaagttacagactttgc

SEQ ID NO: 304560 - DNA, 120 bp, Artificial Sequence
  ENSG00000133422_0 (sequence is synthesized)
agttgtgagatccgggtagtgcccggtcaggtggtgcgctcgccactgccctcgatccggtccttggaagccgggagtagctcctcttcgtggggaggcggccacgggaccgaggcccgg

SEQ ID NO: 304561 - DNA, 120 bp, Artificial Sequence
  ENSG00000133422_1 (sequence is synthesized)
gaagggcctgggaggctgaggctgttgtctgagggacgtgggggcggggcgcggcctgcccgaggtgctgtgggcgggtcatttgtgaggtgtttatgtgggccaagtgtgaggtaatct

SEQ ID NO: 304562 - DNA, 120 bp, Artificial Sequence
  ENSG00000133422_2 (sequence is synthesized)
gaccaccaccctgaactgggtttggtccggctttgaaaaaagaaatcgtgagtgcctaggagctttttcacttgggaggtggtgaagctgcaacttgcgccatataacactccgtcgaca

SEQ ID NO: 304563 - DNA, 120 bp, Artificial Sequence
  ENSG00000133422_3 (sequence is synthesized)
tcttggtctccggtcttgggcctgtttaagaatcctggcatcacgtgtggcgaagacatggctgatcagttttctgacagaagtgggtaaatttccgcgttggtaaatttcctgacagga

SEQ ID NO: 304564 - DNA, 120 bp, Artificial Sequence
  ENSG00000133422_4 (sequence is synthesized)
aatttcggggaaccaaaaaaggctggaagaacatgaagatggagcagtcataaaccacccactcaaggaccatctccttcaggaccatccacacgagactcagattgtctgaattgagct

SEQ ID NO: 304565 - DNA, 120 bp, Artificial Sequence
  ENSG00000133422_5 (sequence is synthesized)
atcgcaacttaatgctaaaagctccttaaagctacagatttatgacatagttccttccaaaatattacatcataaatcattgagaagattaaaaaaaaacacttgaagaaattgtagttt

SEQ ID NO: 304566 - DNA, 120 bp, Artificial Sequence
  ENSG00000133422_6 (sequence is synthesized)
taaacatctctgcatatattttggatagctactaggttactttaactgtcattaaggagcacagacttactgaagctttactggacagaatcctgggaaatcgatatcattataaggtta

SEQ ID NO: 304567 - DNA, 120 bp, Artificial Sequence
  ENSG00000133422_7 (sequence is synthesized)
tatttcccagttagcgggtgaagggctggagaccttattgcagtcatggctttcacaaattacagcagtctgaatcgagctcagctaacctttgaatatctgcacacaaattcaaccact

SEQ ID NO: 304568 - DNA, 120 bp, Artificial Sequence
  ENSG00000133422_8 (sequence is synthesized)
cacgaattcttgtttggtgcccttgctgaactggttgataatgcaagagatgctgatgccaccagaatagatatttatgcagaaagacgagaggaccttcgaggaggatttatgctttgc

SEQ ID NO: 304569 - DNA, 120 bp, Artificial Sequence
  ENSG00000133422_9 (sequence is synthesized)
tttttggatgatggagcaggaatggatccaagtgatgctgccagtgtgatccagtttgggaagtcggccaagcgaacacctgagtctactcagattgggcagtacgggaatgggttaaaa

SEQ ID NO: 304570 - DNA, 120 bp, Artificial Sequence
  ENSG00000133422_10 (sequence is synthesized)
tcgggctcaatgcgcattgggaaggattttatcctgttcaccaagaaggaagacaccatgacctgcctcttcctgtctcgcacgtttcatgaggaagaaggcattgatgaagtgatagtc

SEQ ID NO: 304571 - DNA, 120 bp, Artificial Sequence
  ENSG00000133422_11 (sequence is synthesized)
ccactgcccacctggaatgctcggacccgggaacctgtcacagacaatgtagagaaatttgccattgagacagaactcatctataagtactctccattccgcactgaggaggaagtgatg

SEQ ID NO: 304572 - DNA, 120 bp, Artificial Sequence
  ENSG00000133422_12 (sequence is synthesized)
acccagtttatgaagattcctggggacagcggaacattggtgatcatcttcaatctcaaactcatggataatggagagccagaactagacataatctcaaatccaagagatatccagatg

SEQ ID NO: 304573 - DNA, 120 bp, Artificial Sequence
  ENSG00000133422_13 (sequence is synthesized)
gcagagacgtccccagagggcacgaagccagagcggcgctcgttccgtgcctatgccgctgtgctctatattgatccccggatgaggatcttcatccatgggcacaaggtgcagaccaag

SEQ ID NO: 304574 - DNA, 120 bp, Artificial Sequence
  ENSG00000133422_14 (sequence is synthesized)
aggctctcctgctgcctgtacaagcccaggatgtacaagtacacgtcaagccgtttcaagacccgtgcggagcaggaggtgaagaaagcagagcacgtagcaaggattgctgaagagaag

SEQ ID NO: 304575 - DNA, 120 bp, Artificial Sequence
  ENSG00000133422_15 (sequence is synthesized)
gcgcgggaggcagagagcaaagctcggacattagaagtacgcctaggtggagacctcacgcgggactccagggtgatgttgcgacaggtccagaacagagccatcactctgcgcagagaa

SEQ ID NO: 304576 - DNA, 120 bp, Artificial Sequence
  ENSG00000133422_16 (sequence is synthesized)
gccgatgtcaagaagaggatcaaggaggccaagcagcgagcacttaaagaacctaaggaactgaattttgtttttggtgtcaacattgaacaccgggatctggatggcatgttcatctac

SEQ ID NO: 304577 - DNA, 120 bp, Artificial Sequence
  ENSG00000133422_17 (sequence is synthesized)
aactgtagccgactgatcaaaatgtatgagaaagtgggcccacagctggaagggggcatggcatgtggcggggttgttggggttgttgatgtgccctacctggtcctggagcctacacac

SEQ ID NO: 304578 - DNA, 120 bp, Artificial Sequence
  ENSG00000133422_18 (sequence is synthesized)
aacaaacaggactttgctgatgccaaggagtaccggcacctgctccgagcaatgggggagcacctggcgcagtattggaaggatattgccatcgcccagaggggaatcatcaagttctgg

SEQ ID NO: 304579 - DNA, 120 bp, Artificial Sequence
  ENSG00000133422_19 (sequence is synthesized)
gatgagtttggctacctctctgccaactggaaccagcccccatccagtgagctgcgttacaaacgccggagagctatggaaatccccaccaccatccagtgcgatttgtgtctgaaatgg

SEQ ID NO: 304580 - DNA, 120 bp, Artificial Sequence
  ENSG00000133422_20 (sequence is synthesized)
agaaccctccccttccagctgagttctgtggaaaaagattaccctgacacctgggtttgctccatgaaccctgatcctgaacaggaccggtgtgaggcttctgaacaaaagcagaaggtt

SEQ ID NO: 304581 - DNA, 120 bp, Artificial Sequence
  ENSG00000133422_21 (sequence is synthesized)
cccctgggaacattcagaaaggacatgaagacgcaggaagagaagcagaaacaactgacagagaaaattcgccagcagcaggagaagctggaggcccttcagaaaaccacacccatccgc

SEQ ID NO: 304582 - DNA, 120 bp, Artificial Sequence
  ENSG00000133422_22 (sequence is synthesized)
tcccaagcagacctgaagaaattgcccttggaagtgaccaccagaccttccactgaggaacctgtgcgtagacctcagcgtcctcggtcgccccctttacctgctgtgatcaggaacgcc

SEQ ID NO: 304583 - DNA, 120 bp, Artificial Sequence
  ENSG00000133422_23 (sequence is synthesized)
tttgccaactcctagaccagccagccagccccgaaaggctcctgtcatcagcagtaccccaaagctccctgctttggcagcccgggaggaggccagcacatctaggctgctccagccacc

SEQ ID NO: 304584 - DNA, 120 bp, Artificial Sequence
  ENSG00000133422_24 (sequence is synthesized)
tgaggcaccccgaaagcctgccaacactctcgtcaagactgcatcccgacctgcccctctggtgcagcaactgtcaccatctttactgcccaactccaagagccctcgggaggttccttc

SEQ ID NO: 304585 - DNA, 120 bp, Artificial Sequence
  ENSG00000133422_25 (sequence is synthesized)
tcccaaagtcatcaagactccagtggtgaagaagacagagtcacccatcaaactctccccggctacccctagtcggaagcggagtgtcgcagtttctgatgaggaagaagttgaggagga

SEQ ID NO: 304586 - DNA, 120 bp, Artificial Sequence
  ENSG00000133422_26 (sequence is synthesized)
agctgagaggaggaaggagaggtgcaagcggggcagatttgttgtgaaggaggaaaagaaggactcgaatgagctctcagacagtgctggggaagaggactcggctgacctcaagagagc

SEQ ID NO: 304587 - DNA, 120 bp, Artificial Sequence
  ENSG00000133422_27 (sequence is synthesized)
tcagaaagataaagggctgcacgtggaggtgcgtgtgaacagggagtggtacacgggccgtgtcacagccgtggaggtgggcaagcatgtggtgcggtggaaggtgaagtttgactacgt

SEQ ID NO: 304588 - DNA, 120 bp, Artificial Sequence
  ENSG00000133422_28 (sequence is synthesized)
gcccacagacacgacaccaagagaccgctgggtggagaaaggcagtgaggatgtgcggctgatgaaacccccttctccggaacatcagagccttgatacacaacaggagggcggggagga

SEQ ID NO: 304589 - DNA, 120 bp, Artificial Sequence
  ENSG00000133422_29 (sequence is synthesized)
ggaggtgggccctgtggcccagcaggccatagctgtcgcagagccctccacttccgaatgcctccgcattgagcctgacaccactgccctgagcaccaatcacgagaccatcgacctgct

SEQ ID NO: 304590 - DNA, 120 bp, Artificial Sequence
  ENSG00000133422_30 (sequence is synthesized)
tgtccagatcctccggaattgtttacggtacttcctgcctccaagtttccccatctccaagaagcagctgagtgctatgaattcagatgagctaatatcttttcctctgaaggagtactt

SEQ ID NO: 304591 - DNA, 120 bp, Artificial Sequence
  ENSG00000133422_31 (sequence is synthesized)
caagcaatatgaagtagggctccaaaacctgtgcaattcctaccagagccgtgctgactcccgggccaaggcctccgaggaaagcctgcgcacctccgagaggaagctccgcgagacgga

SEQ ID NO: 304592 - DNA, 120 bp, Artificial Sequence
  ENSG00000133422_32 (sequence is synthesized)
ggagaagctgcagaagctgaggaccaacatcgtggcactcctgcaaaaggtgcaggaggacatagacatcaacacagatgatgagctggacgcctacattgaggacctcatcaccaaggg

SEQ ID NO: 304593 - DNA, 120 bp, Artificial Sequence
  ENSG00000133422_33 (sequence is synthesized)
ggactgaaggcaggagagagagcagctcccctgcccacctgcccctcaaccctgtagctgcagggggaggggacttcattcatgggttggtggtcgcaccttggtttgacttacacggga

SEQ ID NO: 304594 - DNA, 120 bp, Artificial Sequence
  ENSG00000133422_34 (sequence is synthesized)
catttgtgtttttggaggaaaagataccctgattctttgaatcttccttaagtttataaatatttattttttaaaagaagatgctgtgcctgtgagaccatacttttttttttttttttt

SEQ ID NO: 304595 - DNA, 120 bp, Artificial Sequence
  ENSG00000133422_35 (sequence is synthesized)
tttttttttttttttttttggtgactgcaaaggacagagaacctttccactttggccatactgggttgctaagccggagccatttcagctcctggctcctcaagataacggcgagtccag

SEQ ID NO: 304596 - DNA, 120 bp, Artificial Sequence
  ENSG00000133422_36 (sequence is synthesized)
tgccatcttggagaagctccaggggcagggctgacttttctcctacaggaggaacaatgtggggatctgagggatgggagggagacttccccctagagtggtggtcctgctgggggctca

SEQ ID NO: 304597 - DNA, 120 bp, Artificial Sequence
  ENSG00000133422_37 (sequence is synthesized)
tatccagggacccaaaaggggggctgtgtaggaggttccacattggaggggctctctctctcgcagctgtcagagttggtcctggctgtggcgtccaaacagcttgagggaaaaagatcc

SEQ ID NO: 304598 - DNA, 120 bp, Artificial Sequence
  ENSG00000133422_38 (sequence is synthesized)
tgtctaaccacctcatctactactcaagttctttctgaaggagggatttcttcagttaaccatggacagtgaggtttctcaccacagtaacttgagtccaggttgagggggagacagatc

SEQ ID NO: 304599 - DNA, 120 bp, Artificial Sequence
  ENSG00000133422_39 (sequence is synthesized)
tgtggtaaatctctgacttgggcagcacactgagtgtggaaccccacaggactccttagggaaggagcttgtgtgtgaaagaacccctggggctgagctggtgacctccatgtgtgggtg

SEQ ID NO: 304600 - DNA, 120 bp, Artificial Sequence
  ENSG00000133422_40 (sequence is synthesized)
cagcagggccttggatggtgccaattgatctggacagcctgttgatgcttttctacttccacccttcggcctggccccactgagccccatcaaggtgcctgaagagggggccagtgagat

SEQ ID NO: 304601 - DNA, 120 bp, Artificial Sequence
  ENSG00000133422_41 (sequence is synthesized)
cccgtggccacagggactccagaggcatctctgcaggaagcacaccatgccttccctccatgttccatcacggcgccacaatctgtgtcccttaacttctcagggtcaaagacaaaggca

SEQ ID NO: 304602 - DNA, 120 bp, Artificial Sequence
  ENSG00000133422_42 (sequence is synthesized)
agcgttgctgaattttctctttaatggccattggaagagtctggttcagtttttcccaactctcttcccactcgtatttggggcctctgggttttctgaaggcacaaggactgtgacttt

SEQ ID NO: 304603 - DNA, 120 bp, Artificial Sequence
  ENSG00000133422_43 (sequence is synthesized)
gtaccactaacctgtggttcaaacctgggtgtgtttctggcatctccctaacccagatcagcaatggccaccctgctcctctgaggtcagcagaagactgggaagcagaggtgagggatg

SEQ ID NO: 304604 - DNA, 120 bp, Artificial Sequence
  ENSG00000133422_44 (sequence is synthesized)
caggccacactggaatgggaagtcttttccccactggatgtgcctgtctggtgggttttggaccttcccagactacatctctaggagaggcctgtttggagtagtacactgagagaccct

SEQ ID NO: 304605 - DNA, 120 bp, Artificial Sequence
  ENSG00000133422_45 (sequence is synthesized)
ggcctcttctgctggaagactgtccaagtcttggggtttcttgagctggtgattcctctgccatcctgctctctctcttcatctcaggcagcatggggtccacttttgtccccaaaccta

SEQ ID NO: 304606 - DNA, 120 bp, Artificial Sequence
  ENSG00000133422_46 (sequence is synthesized)
atgttttaatccaaatgcaaattggttccacatttttactggagggtaatcagtttttaaaattcacacacatgtaatcgaaacgcaatactataaagttctactggtgagactcctgaa

SEQ ID NO: 304607 - DNA, 120 bp, Artificial Sequence
  ENSG00000133422_47 (sequence is synthesized)
atgtatcccactggagtgaaatgtgtcactggatatcttgagctctgtattgaagaactgagatcagtgaaatacttgttgctaatccagaagaatctgatttttgtttattggatcaaa

SEQ ID NO: 304608 - DNA, 120 bp, Artificial Sequence
  ENSG00000133422_48 (sequence is synthesized)
attttctaaatgcaaactttagttatttgaagtcaatatgttgagttgtttcattcaagtgtttataggaatccaacaaatactgctctattggatcgccaaatgttggactattttagt

SEQ ID NO: 304609 - DNA, 120 bp, Artificial Sequence
  ENSG00000133422_49 (sequence is synthesized)
atcaaccgtttcccctctgtagtgacaacgtcctaaacagttaggtttataacaagtgtttactttctaacaagaaaacagaagacatttaaatgacaactttcaagaagaaaattttta

SEQ ID NO: 304610 - DNA, 120 bp, Artificial Sequence
  ENSG00000133422_50 (sequence is synthesized)
ttttttcagaagttggcattatcttcctggcagattgctcacatccaatattatttgtatatgctaaacaggaaacggcaacttgtttatatctctatttagatagtctttccccaaaat

SEQ ID NO: 304611 - DNA, 120 bp, Artificial Sequence
  ENSG00000133422_51 (sequence is synthesized)
ttccacagaaacatacagtgttcatggttcttgagttcatgaaggagtaatctaatcactccaacatggtctggaatgtttcaggtttaatccatatgcccactctcttggaggctgtcc

SEQ ID NO: 304612 - DNA, 120 bp, Artificial Sequence
  ENSG00000133422_52 (sequence is synthesized)
agtagcgtcaaaactttagtgttttaatacattcacctgttacttttgagatgaagttcacctttcttggatcacatgcaaaggatgtttaggtctgtgaagaaaagaatttctaggccg

SEQ ID NO: 304613 - DNA, 120 bp, Artificial Sequence
  ENSG00000133422_53 (sequence is synthesized)
aggacttgttaaagattaacaattgaggggagttggggagctctggaaagccttgagtagtataaaaacaatgcaaatggtggttttaagatttttttcaaaaaacttaaatattttata

SEQ ID NO: 304614 - DNA, 120 bp, Artificial Sequence
  ENSG00000133424_0 (sequence is synthesized)
cggccgcgctcgtctcgccgggctgttcgcgggcaggccctgccctgaagggacgaatcggcttggagcgcgggaggtggagtcggccccggcggtcgctccctggacccaacccgaggc

SEQ ID NO: 304615 - DNA, 120 bp, Artificial Sequence
  ENSG00000133424_1 (sequence is synthesized)
tgacccaggcccctgcccatgcggggcgcccctggctcggaagagtcccccgggccgggagcagctccaggcagcggccccggaggaagaggaagaagggacagtgctcagcttggggga

SEQ ID NO: 304616 - DNA, 120 bp, Artificial Sequence
  ENSG00000133424_2 (sequence is synthesized)
cccggaccctcgccgcggcatttggagccgggggcagtcccgaactctgtgcttggcaccgccgctccgagtagggcagcgcctgccgggaccctgacccggaccccctgcgcctcgtag

SEQ ID NO: 304617 - DNA, 120 bp, Artificial Sequence
  ENSG00000133424_3 (sequence is synthesized)
gcggcggcgccgccgcgccaccctgttcttccgtgtctccctctgcctggcggcagtcacggccaagaacctacattaagaaacgcattcagatgcatcagccgtttgtaaagcacctgt

SEQ ID NO: 304618 - DNA, 120 bp, Artificial Sequence
  ENSG00000133424_4 (sequence is synthesized)
cgtgagccagagagtattatgagggaggccgaggacttcatgctccggacagagaaacggcgctgggattagggattgccacttctgagaggatgctgggaatctgcagggggagacgga

SEQ ID NO: 304619 - DNA, 120 bp, Artificial Sequence
  ENSG00000133424_5 (sequence is synthesized)
aattcttggctgcctcgttgagtcttctctgcatcccagccatcacctggatttacctgttttctgggagcttcgaagatggaaagcccgtgtctctgtcaccgctggagtcccaggcac

SEQ ID NO: 304620 - DNA, 120 bp, Artificial Sequence
  ENSG00000133424_6 (sequence is synthesized)
acagccccaggtacacggcctccagccagcgggagcgcgagagcctggaggtgcgcatgcgcgaggtggaggaggagaaccgcgccctccgcaggcagctcagcctggcccagggccgag

SEQ ID NO: 304621 - DNA, 120 bp, Artificial Sequence
  ENSG00000133424_7 (sequence is synthesized)
ccccatcccatcgccgaggcaaccactccaagacctactccatggaggagggcactggagacagcgagaaccttcgggctggcatcgtggcaggcaacagctccgagtgtgggcagcagc

SEQ ID NO: 304622 - DNA, 120 bp, Artificial Sequence
  ENSG00000133424_8 (sequence is synthesized)
cggtcgtggagaaatgcgagacaatccacgttgctattgtctgcgccggatacaatgccagccgggatgtcgtcaccctggtcaaatccgtcctgttccatagacggaaccctctgcact

SEQ ID NO: 304623 - DNA, 120 bp, Artificial Sequence
  ENSG00000133424_9 (sequence is synthesized)
tccaccttattgctgactccattgcggagcagatcctggccacgctcttccagacctggatggtgcccgctgtgcgtgtggacttctacaatgcagacgagctcaagtctgaagtttcct

SEQ ID NO: 304624 - DNA, 120 bp, Artificial Sequence
  ENSG00000133424_10 (sequence is synthesized)
ggatccccaataaacattactctgggatttatggtctgatgaagcttgtcctgaccaagactcttcctgccaacctggagagagtcatcgtccttgacacggatatcacctttgccactg

SEQ ID NO: 304625 - DNA, 120 bp, Artificial Sequence
  ENSG00000133424_11 (sequence is synthesized)
acattgcagagctgtgggctgtgttccacaagttcaaaggtcagcaagtcctgggcttggtggagaaccagagtgactggtaccttggaaacctgtggaaaaatcaccgcccatggccag

SEQ ID NO: 304626 - DNA, 120 bp, Artificial Sequence
  ENSG00000133424_12 (sequence is synthesized)
cccttggaagaggctacaacacaggggtgatcctgttacttctggataagctgcggaagatgaaatgggagcagatgtggaggctgaccgcagagagggagctcatgggcatgctctcta

SEQ ID NO: 304627 - DNA, 120 bp, Artificial Sequence
  ENSG00000133424_13 (sequence is synthesized)
catccttagctgaccaggatattttcaatgccgtcatcaaacaaaaccccttccttgtgtaccagctcccctgcttctggaatgtgcagctgtcagaccacacccgctccgagcagtgct

SEQ ID NO: 304628 - DNA, 120 bp, Artificial Sequence
  ENSG00000133424_14 (sequence is synthesized)
acagagacgtgtctgatctaaaggtcattcactggaactcccccaagaagctccgggtgaagaacaagcatgtggagttttttcgcaacctctacctgaccttcctggagtatgacggca

SEQ ID NO: 304629 - DNA, 120 bp, Artificial Sequence
  ENSG00000133424_15 (sequence is synthesized)
atcttctgaggcgggaactgtttggctgccccagtgaggctgatgtcaacagtgaaaacctccagaagcagctgtctgagctggacgaggacgacctgtgctatgagttccggcgagagc

SEQ ID NO: 304630 - DNA, 120 bp, Artificial Sequence
  ENSG00000133424_16 (sequence is synthesized)
gcttcactgtccaccgcacccacctgtacttcctgcactacgagtatgagcctgcagcagacagcacggacgtcaccctggtcgctcagctgtccatggacaggctccagatgctggagg

SEQ ID NO: 304631 - DNA, 120 bp, Artificial Sequence
  ENSG00000133424_17 (sequence is synthesized)
ccatctgcaagcactgggaggggcccatcagcctggccctctacctgtcagacgccgaggcccagcagttcctccgctacgcacagggctctgaggtgcttatgagccgccacaacgtgg

SEQ ID NO: 304632 - DNA, 120 bp, Artificial Sequence
  ENSG00000133424_18 (sequence is synthesized)
ttcctgtctgacattgacttcctgcccatgtatgggctctatgagtacctcaggaagtctgtcatccagctcgatcttgccaacaccaagaaagcaatgattgtccccgcgttcgagaca

SEQ ID NO: 304633 - DNA, 120 bp, Artificial Sequence
  ENSG00000133424_19 (sequence is synthesized)
ctgcgctaccggctgtccttccccaagtcaaaagcggagttgctgtcaatgctggacatggggaccctcttcacattcaggtaccacgtctggacgaaaggccacgcacccacaaacttc

SEQ ID NO: 304634 - DNA, 120 bp, Artificial Sequence
  ENSG00000133424_20 (sequence is synthesized)
gccaagtggcggaccgccaccacgccttaccgggttgagtgggaggccgattttgagccgtatgttgttgtgagacgtgactgcccggagtacgaccggaggtttgtaggctttggctgg

SEQ ID NO: 304635 - DNA, 120 bp, Artificial Sequence
  ENSG00000133424_21 (sequence is synthesized)
aacaaagtggctcatatcatggagctggatgtgcaggagtatgagttcattgtgctgcccaacgcctacatgatccacatgcctcatgcccccagcttcgacattaccaagttccgttcc

SEQ ID NO: 304636 - DNA, 120 bp, Artificial Sequence
  ENSG00000133424_22 (sequence is synthesized)
aacaagcaataccgcatctgtctcaaaaccctcaaggaagagtttcagcaggacatgtcccgccgctacggctttgctgccctgaaatatctcacagccgagaacaacagctagcaccaa

SEQ ID NO: 304637 - DNA, 120 bp, Artificial Sequence
  ENSG00000133424_23 (sequence is synthesized)
gaagcccaccactagggggagacatgctgtaggggaagtgccactcgctgtttggggcccggccttcaaattcaaaattgagccatgctttttcggtttgtttttatttatctctttggc

SEQ ID NO: 304638 - DNA, 120 bp, Artificial Sequence
  ENSG00000133424_24 (sequence is synthesized)
ccagccaagctgccctcactacagagaccttggacaaggatccagccagtccctctctgccccacaaccctgcattcccagaggttagctatgcagcccacctagatgagtctcttcaag

SEQ ID NO: 304639 - DNA, 120 bp, Artificial Sequence
  ENSG00000133424_25 (sequence is synthesized)
aatgggaaatcaaggggtgacagggagtaaaagggttatcatcttactgcaaagccacaagatcagggcagggctttaggatgttctggatgctttttaataattatgcttcccatcata

SEQ ID NO: 304640 - DNA, 120 bp, Artificial Sequence
  ENSG00000133424_26 (sequence is synthesized)
actggggagaaagggaagtcagggttctaggggttattcgtcccaggaaatagaagtgaaattgtctttattaagtgaaaactttcccctttgccctgcaatgtagctgggcattcaaac

SEQ ID NO: 304641 - DNA, 120 bp, Artificial Sequence
  ENSG00000133424_27 (sequence is synthesized)
ggagggcaaaccgatgatctaaaccaaccacttggaaaaacccaatggggacattgtaaccagagggtcctggaggtggggttgatgggtttccttatccccaaagtcactcctgttttg

SEQ ID NO: 304642 - DNA, 120 bp, Artificial Sequence
  ENSG00000133424_28 (sequence is synthesized)
ttttgtttttctttgggggttttgtttatttttggggctggcaatccaaaatagaaaatctgatcctttgaggctctaaaggaaaatcagctgcctctaccaaccaccctctatcagcag

SEQ ID NO: 304643 - DNA, 120 bp, Artificial Sequence
  ENSG00000133424_29 (sequence is synthesized)
tggcccaggaaggaggtcaagcatcttcggccgatatttaaacatgggcagcttccttcaggatgatcaccgaggctcccgtgactttgaactccctactctccagaatccaggggctat

SEQ ID NO: 304644 - DNA, 120 bp, Artificial Sequence
  ENSG00000133424_30 (sequence is synthesized)
agcgatggggactgcggaattacgagggctggctgttttacaccggtcacattttctattggcagtgactgattcatgggaaagggctttgaaggaactacttcagtgcacacacaaggt

SEQ ID NO: 304645 - DNA, 120 bp, Artificial Sequence
  ENSG00000133424_31 (sequence is synthesized)
acgaacctctcaggcctttcgaagaactttcataattcatgaaagcccagttctgaagattcacgtatccatctggagacctacaggaagaaagtgattgggttcctctggttcttgcct

SEQ ID NO: 304646 - DNA, 120 bp, Artificial Sequence
  ENSG00000133424_32 (sequence is synthesized)
gcttcactgtggatgggaagaggtgacaacctcagtctccctttgggacctgtccaagggtaggcaaccaccttcaccttcacacagattgaggagacactggactttttacccattttc

SEQ ID NO: 304647 - DNA, 120 bp, Artificial Sequence
  ENSG00000133424_33 (sequence is synthesized)
tttaatcttcaatattaatattgtgtttacattgatgagaacaagagttaatgccctaccctctgctgggctgtttgtattgagttgcaatgtgaccagcgaaagctgcatttaataaat

SEQ ID NO: 304648 - DNA, 120 bp, Artificial Sequence
  ENSG00000133424_34 (sequence is synthesized)
gaaagtacagactgtttcttccccattcccctcccactcttgcaggaagctactgagacacaccttgacatagagagctaaattgcagtggataaacagcaacttcacactttctgttcc

SEQ ID NO: 304649 - DNA, 120 bp, Artificial Sequence
  ENSG00000133424_35 (sequence is synthesized)
cccattctatttttctcatcatttgaactttagccttttttttccccttttgcctgaagttagatcccactctgtctctaactcaaaccatcttcaagttttccattccgcatctttctc

SEQ ID NO: 304650 - DNA, 120 bp, Artificial Sequence
  ENSG00000133424_36 (sequence is synthesized)
attcagaacagactagacaaataactccacagcatgtctcattaggccaggaacactccagctaatcgaggcgtgcctttgtcgtgcgctgctcgtgccaggggagttaaaaaaagaaat

SEQ ID NO: 304651 - DNA, 120 bp, Artificial Sequence
  ENSG00000133424_37 (sequence is synthesized)
aggcctgatcccaagggtgtgggcagggcagagataataaacccaaatacaaagtcaggccacccaggaatgaggtggtgtgctctatcggggccggattcccccagctccagatcatct

SEQ ID NO: 304652 - DNA, 120 bp, Artificial Sequence
  ENSG00000133424_38 (sequence is synthesized)
atgaaaggcaaatgacttttcaaacattctgcagctgggatgacttctttttttaattttttaaaatatgtcaaggtgatttgtaatccacagcaaaatgttaatatggtctgaagtttc

SEQ ID NO: 304653 - DNA, 120 bp, Artificial Sequence
  ENSG00000133424_39 (sequence is synthesized)
agtccacaatgagtcagtatccaggaagtagaggcgggaatggaaaaggaagattccaagaattttcaaaaacacaagaaaagagctttggacttccacaggccatggactggggagagg

SEQ ID NO: 304654 - DNA, 120 bp, Artificial Sequence
  ENSG00000133424_40 (sequence is synthesized)
tataagccgatataaatccatcttttggggctttgattttagccagaccctatctcccatcatcagctgcaagacgacagttccaaacacatgcctataattgtcctcggcgttggcttc

SEQ ID NO: 304655 - DNA, 120 bp, Artificial Sequence
  ENSG00000133424_41 (sequence is synthesized)
aagtggtacatgccaggtgaacatcatccccgtggtaagattgaagtagtacatggcaggtgaacatccctgtggaaagattgaagtggtacatgccaggtgaacatccccgtggtaaca

SEQ ID NO: 304656 - DNA, 120 bp, Artificial Sequence
  ENSG00000133424_42 (sequence is synthesized)
ttgaagtggtacatgccaggtgaacatccccgtggtaagattgaagtggtaggtgcagatgaacatccccgtggtaagattaaggtggtacgtgccaggtgaacatccctgtggtaagat

SEQ ID NO: 304657 - DNA, 120 bp, Artificial Sequence
  ENSG00000133424_43 (sequence is synthesized)
gcttcactgcaaaggcagacttgagtggggaaggacttctcaatgtctcctggagttccaggtggccctaggtatcctggatggcgtgggagtcttaaacaccaacgtaaacagaaaggg

SEQ ID NO: 304658 - DNA, 120 bp, Artificial Sequence
  ENSG00000133424_44 (sequence is synthesized)
gatatttgaaattcatgcatttcacagtttattaatttctttccattttaaccctccttactaacattcatttacccttcaagaatcatcataagcatcattttcccaggaagtcctttc

SEQ ID NO: 304659 - DNA, 120 bp, Artificial Sequence
  ENSG00000133424_45 (sequence is synthesized)
ctctatgccatcagaatagcaaaatctagtgtttactctggccacagcgtttaccacactgaataataatctctcctctatgtacctgttttgtttccttaaacaggccatagcaggtat

SEQ ID NO: 304660 - DNA, 120 bp, Artificial Sequence
  ENSG00000133424_46 (sequence is synthesized)
tttacttgattttgttcctgaagtgctaccatacagtgtccagcatagagttggtactcttggtgtttttctgaagcaatgatggaataaatagttgcttagattttcaaattcatctca

SEQ ID NO: 304661 - DNA, 120 bp, Artificial Sequence
  ENSG00000133424_47 (sequence is synthesized)
tatatttgatcatatgattttattatcacaaacagcagttaaggactcgaaggaaacattgacccagggaagtccagggattgtatcatatcagagataaaagggatgttagagtgatgt

SEQ ID NO: 304662 - DNA, 120 bp, Artificial Sequence
  ENSG00000133424_48 (sequence is synthesized)
tttcccagctgggctgtgtgatacaatcagctgtagagcctgtgaataacccagtgtcctcgctaataatgctgtgaccttctaaatcagaattttgggggtttggatctaaacctgcat

SEQ ID NO: 304663 - DNA, 120 bp, Artificial Sequence
  ENSG00000133424_49 (sequence is synthesized)
attagtaaaggtccctagatgattttgaagtacaggtagatttaaaaatcacagatgaggaatcaaactggtgagtggcttcccgtgaggttcaaatggcacagcattttctcagaacct

SEQ ID NO: 304664 - DNA, 120 bp, Artificial Sequence
  ENSG00000133424_50 (sequence is synthesized)
atgggagatctcctaatactgtatccaaggttgttgttggtgacaccaaactgcagcaaatccctggacttgcagcaaactcaccagtgctccagtgttaacaatgggtgagcacagagc

SEQ ID NO: 304665 - DNA, 120 bp, Artificial Sequence
  ENSG00000133424_51 (sequence is synthesized)
aactatgccactttaaagagcacaccaattttaatgctatctcaactatcatcaaggtttttccttaatcatataaacatcaaattgtggcttcttcaggatctatccccgaagttcttc

SEQ ID NO: 304666 - DNA, 120 bp, Artificial Sequence
  ENSG00000133424_52 (sequence is synthesized)
tggggtaaaatcaaagcatctattctttttataatttaaacttttattttagattcagtggtacacatgcagatttgttacatgggtttattgcacgatgctgaggtttgggatacgatt

SEQ ID NO: 304667 - DNA, 120 bp, Artificial Sequence
  ENSG00000133424_53 (sequence is synthesized)
ggtcccgtcactcaggtagtgagcatagtatccatagttagtttttccaccctcccttcctcctgcctctagtagtccccgttgtctatagttgccatctttttgtccatgagtacccag

SEQ ID NO: 304668 - DNA, 120 bp, Artificial Sequence
  ENSG00000133424_54 (sequence is synthesized)
ttcctcagcatatgttttaaggacctatgtgcttacctgtgcttgggatgagagttcgtggtaattttttttttttaattcttgtcttggccgagcgcagtggctcacacctgtaatacc

SEQ ID NO: 304669 - DNA, 90 bp, Artificial Sequence
  ENSG00000133424_55 (sequence is synthesized)
tggatcatctgaggtcaggagtttgagacaagcctgaccaacatgtgaaaccctgtctctattttgtgtgcctgtaatcccagctacttg

SEQ ID NO: 304670 - DNA, 120 bp, Artificial Sequence
  ENSG00000133424_56 (sequence is synthesized)
aaaaaacaaaatcttacgttgattattactgcttgtcagaaacacctgtatattttcactggtttatggatatttcaatagaagaaaaacaagaaaagaaataaccaataacatctgaat

SEQ ID NO: 304671 - DNA, 120 bp, Artificial Sequence
  ENSG00000133424_57 (sequence is synthesized)
gttttattttctcacctggagtgccgctcatccctggaagacgtacttgggaacttcgagctcctgggaatctatgagaattgcagaaccttgacatttctgaagagttgacatcagctc

SEQ ID NO: 304672 - DNA, 120 bp, Artificial Sequence
  ENSG00000133424_58 (sequence is synthesized)
ccactgataaaacagacaaagcgaaaagtcagacatcgacagcaggagatcaatggataaaaacggacataaactgcaagatgtttctgctcctcgtgagggattatgttcccagcactg

SEQ ID NO: 304673 - DNA, 120 bp, Artificial Sequence
  ENSG00000133424_59 (sequence is synthesized)
ttagggggcagcaaactcacaatcccaagaaataagtttgagtttggtcatatccatgctctcctcctacctcccttcttaatggggcacaaacagggagaaaggcgacctatagctacc

SEQ ID NO: 304674 - DNA, 120 bp, Artificial Sequence
  ENSG00000133424_60 (sequence is synthesized)
tggtatttgatgttaatattgtttgctgaaacttgaacttctgctgacgtagaggttttctcaaggacactcaagcctttgactctttaagtaaatatattaagtggtgctatctttgtt

SEQ ID NO: 304675 - DNA, 120 bp, Artificial Sequence
  ENSG00000133424_61 (sequence is synthesized)
atgatttggcactgatagcccacacaattaagcatggaatttcctcaaaaacaagccaattgggagtttcatttactattcaccacttgctaaatgtttccctcatatctgcatcgtaaa

SEQ ID NO: 304676 - DNA, 120 bp, Artificial Sequence
  ENSG00000133424_62 (sequence is synthesized)
tttctttttattcttacagaatagctagagatcaccagtttaagaaatcctacaagactttttccatgagagctatgcactctctctccagcatcacctctccatctgcttttcacgatg

SEQ ID NO: 304677 - DNA, 120 bp, Artificial Sequence
  ENSG00000133424_63 (sequence is synthesized)
catttcttacactggaatgtgataaaaccgtacactgtacttagcccttccctgtaaaggggcaatgagctgtttaagggtaaaggggtagttactaagcccatgccatcgtctgtatta

SEQ ID NO: 304678 - DNA, 120 bp, Artificial Sequence
  ENSG00000133424_64 (sequence is synthesized)
agtcttatttttgtatttctacaagggtggaaagagagcctgttaagtgaatgtacctgtaatgaacaagttcatgccaaacagtggagtagctttcaattattttggagccaaagacct

SEQ ID NO: 304679 - DNA, 120 bp, Artificial Sequence
  ENSG00000133424_65 (sequence is synthesized)
tcacttcattctggagtattgaaacacaaagatggtcattggaaatgttggaaactggtttttttcctacatcagtaaaagcataccacacttcattttaaaatgtaatacagagttata

SEQ ID NO: 304680 - DNA, 120 bp, Artificial Sequence
  ENSG00000133424_66 (sequence is synthesized)
gaaaatatattcaaggcccaagtgacaaattggtaaatagcgaaaagaatcagagcttgaacaatttacttagttcttctgagcacacttttccaacctgcgacatggggacaatgaggg

SEQ ID NO: 304681 - DNA, 120 bp, Artificial Sequence
  ENSG00000133424_67 (sequence is synthesized)
ctgcccaagacgactgtgttaaggatctgtgataatttatatgatgcatctagtacagtgttggacttaaaagaaactcataatatttgagaatatatgcaaatgctggattttcatgga

SEQ ID NO: 304682 - DNA, 120 bp, Artificial Sequence
  ENSG00000133424_68 (sequence is synthesized)
atgacagacacccctttactcacattgattaagcagtgcaattacaacatagacatgagaagagaatctgagaagacacctctatttgtgggtaccggcatgagcaaacactaaaggaaa

SEQ ID NO: 304683 - DNA, 120 bp, Artificial Sequence
  ENSG00000133424_69 (sequence is synthesized)
ttttcccagaggactgtaatccacctccaacactaatgaaagaactttgtaagcatacacgtccaagtgttaaccttttaattggtgacaatctccttattatgaaagttttaagaggta

SEQ ID NO: 304684 - DNA, 120 bp, Artificial Sequence
  ENSG00000133424_70 (sequence is synthesized)
cttagtgtgccataacattttgtcataagtgtataattcagtaactttcagtcaattgttagagctgtgcaaccactgccacaattcaattttagaatatttccatcaccccgaaaaggc

SEQ ID NO: 304685 - DNA, 120 bp, Artificial Sequence
  ENSG00000133424_71 (sequence is synthesized)
ttcatgtgccaatttacagacatcctctattttcaccccaacctccaggcagccattctttcttctgtagataagcaagccatcagtaacttccttgccagcaaagttgatcctgattta

SEQ ID NO: 304686 - DNA, 120 bp, Artificial Sequence
  ENSG00000133424_72 (sequence is synthesized)
tgatttttctgatactttaagtaaagagaaagaaaagtcatagggaagatgatatagtttggctatgttctcacccagatctcatcttgaattgtagttcccatcatccccacgtgtcag

SEQ ID NO: 304687 - DNA, 120 bp, Artificial Sequence
  ENSG00000133424_73 (sequence is synthesized)
gggacctggtgggaggtaattgaatcactggggcagttacccccgtgctgttctgtgatagtgactgagttctcatgagatctgatggtgtgataaggggcttttcctcctttgttcagc

SEQ ID NO: 304688 - DNA, 86 bp, Artificial Sequence
  ENSG00000133424_74 (sequence is synthesized)
ggggcttttcctcctttgttcagcacttttctcaattgtaaatttcctgaggccttgcctgccatgctgaactgtgagtcaattaa

SEQ ID NO: 304689 - DNA, 120 bp, Artificial Sequence
  ENSG00000133424_75 (sequence is synthesized)
atcagccctttttgcagttgcctctgttgaagtgagtggccatgcctgtggccacaccccttcgtgggacaccccacatcacggaatggctgatgaacatgaggtcctgcaggatcatct

SEQ ID NO: 304690 - DNA, 120 bp, Artificial Sequence
  ENSG00000133424_76 (sequence is synthesized)
gccacactcggatactgcctcacaggctgattttcccctctgcctagtcctgctttctccccttccctttcataggtgctgttctcaagagctctctctaataaacctcttgtatgctga

SEQ ID NO: 304691 - DNA, 120 bp, Artificial Sequence
  ENSG00000133424_77 (sequence is synthesized)
aagaatcttttccatttctgttgaatgagggggcttgagaaaaagctcacgaaattaaaaggagaatgaagacgcttctgaagggagctcgaacctacattaagaaacgcattcagatgc

SEQ ID NO: 304692 - DNA, 120 bp, Artificial Sequence
  ENSG00000133424_78 (sequence is synthesized)
gcagttaacttatcccgaagctccaaagcaaacgtcttttacttcttcgccggggacgctgctgtaccaccgctgcctccctttcgcattctgctgggctcggtcagccgctgagattag

SEQ ID NO: 304693 - DNA, 120 bp, Artificial Sequence
  ENSG00000133424_79 (sequence is synthesized)
ccccttgttttcagcgcgttctggaacagagctgcacgtcagaggaagaactgagcagccttcgagctaaaagacttggcattaaactttgacactttaatggtctctaggatattagat

SEQ ID NO: 304694 - DNA, 120 bp, Artificial Sequence
  ENSG00000133424_80 (sequence is synthesized)
agtattttttcatataatgttcttctccgacacggtaatggcatcagaaacagaatctgctatgcctgccaacgtgcacggtgaggctcatcgccgcagagaacctacattaagaaacgc

SEQ ID NO: 304695 - DNA, 120 bp, Artificial Sequence
  ENSG00000133424_81 (sequence is synthesized)
aaatctggcactaagtgcaagagtttgctttcctagactagagagatctgggtctgtcacccctgaaagggtctgagcccccttcatgggaggcccatccagaccctggccctgcctgca

SEQ ID NO: 304696 - DNA, 120 bp, Artificial Sequence
  ENSG00000133424_82 (sequence is synthesized)
ttaatgagtcccagtcctattcatttcaaagtggtggatcccacatgcagtaccagatgccagcactctggagagatccagagatactcagcacattcagattgattgagatcatcactt

SEQ ID NO: 304697 - DNA, 120 bp, Artificial Sequence
  ENSG00000133433_0 (sequence is synthesized)
ccacaccgcgctcagcgccttcactgccatccccgctgtccttgccgcccccgccatgggcctagagctgtttcttgacctggtgtcccagcccagccgcgccgtctacatcttcgccaa

SEQ ID NO: 304698 - DNA, 120 bp, Artificial Sequence
  ENSG00000133433_1 (sequence is synthesized)
gaagaatggcatccccttagagctgcgcaccgtggatttggtcaaagggcagcacaagagcaaggagttcttgcagatcaacagcctggggaaactgccgacgctcaaggatggtgattt

SEQ ID NO: 304699 - DNA, 120 bp, Artificial Sequence
  ENSG00000133433_2 (sequence is synthesized)
catcttgaccgaaagctcggccatcctgatttacctgagctgtaagtaccagacgccggaccactggtatccatctgacctgcaggctcgtgcccgtgttcatgagtacctgggctggca

SEQ ID NO: 304700 - DNA, 120 bp, Artificial Sequence
  ENSG00000133433_3 (sequence is synthesized)
tgccgactgcatccgtggcacctttggtatacccctgtgggtccaggtgttggggccactcattggggtccaggtgcccgaggagaaggtggaacgcaacaggactgccatggaccaggc

SEQ ID NO: 304701 - DNA, 120 bp, Artificial Sequence
  ENSG00000133433_4 (sequence is synthesized)
aagttcctgggggacaggcccttcctcgctggccagcaggtgacactggctgatctcatggccctggaggagctgatgcagccggtggctctcggctatgaactgtttgagggacggcca

SEQ ID NO: 304702 - DNA, 120 bp, Artificial Sequence
  ENSG00000133433_5 (sequence is synthesized)
cgactggcagcatggcgtggacgagtggaggctttcctgggtgctgagctatgccaggaggcccacagcatcatcttgagcatcctggaacaggcggccaagaaaaccctcccaacaccc

SEQ ID NO: 304703 - DNA, 120 bp, Artificial Sequence
  ENSG00000133433_6 (sequence is synthesized)
tcaccagaggcctatcaggctatgctgcttcgaatcgccaggatcccctgaagggtctgggatgggggccaggagattagcaacaaggattcattctgttacttacttgcccctttttat

SEQ ID NO: 304704 - DNA, 120 bp, Artificial Sequence
  ENSG00000133433_7 (sequence is synthesized)
ctttccctcttgccccagtcccttctctccagcttcatgtgaagctctgcacagacaagacactcagtgtccttggcagtgctgctactcctcaggtgcagcatacataaccagtaagag

SEQ ID NO: 304705 - DNA, 120 bp, Artificial Sequence
  ENSG00000133433_8 (sequence is synthesized)
actaaatctgcaatatataaagagctcctacaaatcagtaacatgaagaacactcaaaaattggcaaatgtcatcagtgttttaaacagaataaagattccaaacactttgaatagagaa

SEQ ID NO: 304706 - DNA, 120 bp, Artificial Sequence
  ENSG00000133454_0 (sequence is synthesized)
gggaagggatgtgtgtcggtgtgtgtggagagggtgctccttcgctcctgctttcccggctcggtggggtcccttcgcggccacccggggagacgtcttagacagtcgtggttcctgtga

SEQ ID NO: 304707 - DNA, 120 bp, Artificial Sequence
  ENSG00000133454_1 (sequence is synthesized)
tctgtgtcctctttgcagaagttctgtgtccatctcatgtgctgcgtgtgtctgtaaagcctcattccgtgctgtctggcaggaagctccatctcatctcatcatctcacggccctggca

SEQ ID NO: 304708 - DNA, 120 bp, Artificial Sequence
  ENSG00000133454_2 (sequence is synthesized)
ctgcctcagcatggccatctcatcacgcctcgccctgtgggagcagaagattcgggaagaggacaagagccctccaccatcctcgccccctcctcttttctctgtcatcccagggggctt

SEQ ID NO: 304709 - DNA, 120 bp, Artificial Sequence
  ENSG00000133454_3 (sequence is synthesized)
cattaagcaactggtccgggggactgaaaaagaggccaaggaagcgagacagaggaagcagttagctgtcgcctctccagaacgagagatcccagaaatttccatcagccaacccaacag

SEQ ID NO: 304710 - DNA, 120 bp, Artificial Sequence
  ENSG00000133454_4 (sequence is synthesized)
caagtccagcagtggcaccagatctggaagccagcagatctctcaggacgaccagtcaagctctcctgggagctcagacattctgggcaaggagagcgaggggtcccgcagccccgaccc

SEQ ID NO: 304711 - DNA, 120 bp, Artificial Sequence
  ENSG00000133454_5 (sequence is synthesized)
tgagcagatgacaagcatcaatggtgagaaggcccaggagctgggctccagtgcgacaccaaccaaaaagactgtccccttcaagaggggcgtgaggaggggtgatgtgttgttgatggt

SEQ ID NO: 304712 - DNA, 120 bp, Artificial Sequence
  ENSG00000133454_6 (sequence is synthesized)
ggccaagctggacccggactcagccaagccagagaagactcatccccatgacgcccccccttgcaagacctctccccccgccacagatactggaaaggaaaagaaaggggagacctctag

SEQ ID NO: 304713 - DNA, 120 bp, Artificial Sequence
  ENSG00000133454_7 (sequence is synthesized)
gactccttgtggctcccaggccagcaccgagatcttggccccgaaagctgagaagacccggactgggggtcttggggacccaggccaaggaactgtggcactgaaaaaaggcgaggaggg

SEQ ID NO: 304714 - DNA, 120 bp, Artificial Sequence
  ENSG00000133454_8 (sequence is synthesized)
tcaaagcatagtggggaaggggcttgggacccccaagaccacagagctgaaagaggctgagccccagggcaaagacaggcaggggaccaggccccaagcccaagggcccggcgagggggt

SEQ ID NO: 304715 - DNA, 120 bp, Artificial Sequence
  ENSG00000133454_9 (sequence is synthesized)
gcgaccagggaaagcagagaaggagggagcagagcccacaaacacggtggaaaaggggaatgtctctaaggacgtagggagtgaagggaagcacgtaaggccccaaatccctgggagaaa

SEQ ID NO: 304716 - DNA, 120 bp, Artificial Sequence
  ENSG00000133454_10 (sequence is synthesized)
gtggggaggtttcctgggaagaaggagtaagtgggacggtccccagaataagaaggacaaagaaggggtgctcttaagtaaggcagagaagacaggtgagcctcagacccagatggagaa

SEQ ID NO: 304717 - DNA, 120 bp, Artificial Sequence
  ENSG00000133454_11 (sequence is synthesized)
gacaagccaagtgcagggcgagttgggggacgatctgagaatgggggagaaagcaggtgagcttcggagcacgactgggaaggcaggtgagtcctgggataagaaggaaaagatggggca

SEQ ID NO: 304718 - DNA, 120 bp, Artificial Sequence
  ENSG00000133454_12 (sequence is synthesized)
accccagggtaagtccgggaacgcaggtgaagctcggagtcagacagagaagggctgtgaagccccaaaggaggtgagcacaatggtggagtcgccagcagctcctgggaagggaggctg

SEQ ID NO: 304719 - DNA, 120 bp, Artificial Sequence
  ENSG00000133454_13 (sequence is synthesized)
gccaggaagccgtgggcaggaagcagaggagccctgctcaagagcaggtgatggggctggtgccctggagacagagctggaaggacccagccagcctgctctggagaaggatgcagaaag

SEQ ID NO: 304720 - DNA, 120 bp, Artificial Sequence
  ENSG00000133454_14 (sequence is synthesized)
gcctcggatacggaaggagaaccaagacgggccagccccgcaggaggagggcaaaggaggccagagcagagactcagaccaggctcctgaggacagatggtatgaggcagagaaagtctg

SEQ ID NO: 304721 - DNA, 120 bp, Artificial Sequence
  ENSG00000133454_15 (sequence is synthesized)
gctggctcagaaggatggatttactcttgctacggtgctaaagccagatgagggaacagcagacctgccagcaggaagggtgagactttggattgatgctgacaaaaccatcactgaggt

SEQ ID NO: 304722 - DNA, 120 bp, Artificial Sequence
  ENSG00000133454_16 (sequence is synthesized)
ggatgaggagcatgtccatcgggccaaccctcctgagctggaccaggtcgaggacctggcctctctcatcagtgtcaacgaatccagtgtcctgaacacgcttctgcagcgctacaaagc

SEQ ID NO: 304723 - DNA, 120 bp, Artificial Sequence
  ENSG00000133454_17 (sequence is synthesized)
tcagctgctgcacacctgcacagggcctgatctgattgtcctccagccccgggggccctcggtgccttctgcagggaaggtgcccaagggccgccgggatggcctgcctgcccacattgg

SEQ ID NO: 304724 - DNA, 120 bp, Artificial Sequence
  ENSG00000133454_18 (sequence is synthesized)
ctccatggcacagcgggcatactgggcgctgctgaaccagcggagagaccagagcattgtggccctgggctggagtggcgctgggaagaccacctgctgtgagcaggtcctggaacacct

SEQ ID NO: 304725 - DNA, 120 bp, Artificial Sequence
  ENSG00000133454_19 (sequence is synthesized)
ggtggggatggcaggcagtgtggatggcagggtctcagtggagaagatccgagccaccttcactgtcctccgggccttcggctctgtgtccatggcccacagccgcagtgccacccggtt

SEQ ID NO: 304726 - DNA, 120 bp, Artificial Sequence
  ENSG00000133454_20 (sequence is synthesized)
ctccatggtgatgtcgctggacttcaacgctacaggccgcatcacagctgctcagctccagacaatgcttttggagaagagccgcgtggcacggcagccggaaggggaaagtaacttcct

SEQ ID NO: 304727 - DNA, 120 bp, Artificial Sequence
  ENSG00000133454_21 (sequence is synthesized)
ggttttctcccagatgctggctggattggacttggatctcaggacggagctgaacctgcaccagatggcagatagcagctcctttggcatgggcgtgtggtccaagcctgaagataaaca

SEQ ID NO: 304728 - DNA, 120 bp, Artificial Sequence
  ENSG00000133454_22 (sequence is synthesized)
gaaggcggcagctgcctttgcccagctccagggtgccatggagatgctcggcatctcagagagcgagcagcgggctgtttggcgggtcctggcagccatctaccacctgggtgcggcggg

SEQ ID NO: 304729 - DNA, 120 bp, Artificial Sequence
  ENSG00000133454_23 (sequence is synthesized)
ggcctgcaaagtgggtcggaagcagttcatgaggtttgagtgggcaaactacgcagctgaggccctgggctgcgagtatgaggagctgaacacggccaccttcaagcaccaccttcgaca

SEQ ID NO: 304730 - DNA, 120 bp, Artificial Sequence
  ENSG00000133454_24 (sequence is synthesized)
gatcatccagcaaatgacgtttgggccaagccgatggggcctcgaggatgaggaaaccagctcagggctcaagatgacaggagtggactgtgtggaggggatggcctcgggcctgtacca

SEQ ID NO: 304731 - DNA, 120 bp, Artificial Sequence
  ENSG00000133454_25 (sequence is synthesized)
ggaactctttgcggctgtggtctcactcatcaacagatccttttcctcccaccatctctccatggcctccatcatggtggtggactctccaggcttccagaacccccggcaccagggcaa

SEQ ID NO: 304732 - DNA, 120 bp, Artificial Sequence
  ENSG00000133454_26 (sequence is synthesized)
ggaccgggcggccacctttgaggagctgtgccacaactacgcccatgagcgcctgcagctgctgttctaccagcggacctttgtctccacgctacagcgatatcaagaggaaggtgttcc

SEQ ID NO: 304733 - DNA, 120 bp, Artificial Sequence
  ENSG00000133454_27 (sequence is synthesized)
tgtgcagtttgacctcccggacccctccccagggaccaccgtggctgttgtggatcaaaatccctctcaggtccgcttaccagctggaggaggtgcccaggatgccagaggccttttctg

SEQ ID NO: 304734 - DNA, 120 bp, Artificial Sequence
  ENSG00000133454_28 (sequence is synthesized)
ggtcttagatgaggaagtccatgtagagggctccagtgacagtgtggtgctcgagcgtctgtgtgctgctttcgagaagaaaggagctgggactgaagggtcctctgccctgcggacctg

SEQ ID NO: 304735 - DNA, 120 bp, Artificial Sequence
  ENSG00000133454_29 (sequence is synthesized)
tgagcagcccctccagtgtgagattttccaccagttgggatgggaccctgtgcggtacgacctcacgggctggctccacagagccaagcccaacctctcggccctggatgcaccccaggt

SEQ ID NO: 304736 - DNA, 120 bp, Artificial Sequence
  ENSG00000133454_30 (sequence is synthesized)
cctgcaccagtcaaaaagagaggagctgcggagtctattccaggcccgggccaagctgcctcctgtgtgccgggctgtggcaggcctggagggcacctcccagcaggccctgcagaggag

SEQ ID NO: 304737 - DNA, 120 bp, Artificial Sequence
  ENSG00000133454_31 (sequence is synthesized)
ccgcatggtgaggaggacctttgccagcagccttgccgcggtgaggaggaaagccccgtgctcccagatcaagctgcagatggatgcgctgaccagcatgatcaaaaggtcccggctgca

SEQ ID NO: 304738 - DNA, 120 bp, Artificial Sequence
  ENSG00000133454_32 (sequence is synthesized)
ctttatccactgcctggtaccaaaccctgtggtggaaagcaggagtgggcaggaatctccaccaccaccgcagcctggtagagacaagcctggggcaggtggacctctggccctggatat

SEQ ID NO: 304739 - DNA, 120 bp, Artificial Sequence
  ENSG00000133454_33 (sequence is synthesized)
cccagcactgagggtccagcttgctgggttccacatcctggaggctctgcgtctgcataggacaggctatgctgaccacatggggctcactcgcttccgccggcaattccaggtgctgga

SEQ ID NO: 304740 - DNA, 120 bp, Artificial Sequence
  ENSG00000133454_34 (sequence is synthesized)
cgctccactcctgaagaagctcatgtcgacctccgagggaatagatgaaaggaaggccgtggaggagctcctggagaccctggatctggaaaagaaggcggtggctgtggggcacagcca

SEQ ID NO: 304741 - DNA, 120 bp, Artificial Sequence
  ENSG00000133454_35 (sequence is synthesized)
agagaagctggtatctcagagcatcgttctcttccaggcggcttgcaagggctttctgtctcgccaggaattcaagaagctgaagattcgccgactggctgcacagtgcatccagaagaa

SEQ ID NO: 304742 - DNA, 120 bp, Artificial Sequence
  ENSG00000133454_36 (sequence is synthesized)
tgtggctgtgttcctcgcagtcaaggactggccatggtggcagctgcttggttccctccagcctctacttagtgccaccattggaactgagcagctccgagccaaggaggaggagcttac

SEQ ID NO: 304743 - DNA, 120 bp, Artificial Sequence
  ENSG00000133454_37 (sequence is synthesized)
aacgctaagacggaagctagaaaaatcagagaagttgcggaatgaactccggcagaacacagatctgctagaaagcaagattgctgacttgacctctgaccttgccgatgagcgcttcaa

SEQ ID NO: 304744 - DNA, 120 bp, Artificial Sequence
  ENSG00000133454_38 (sequence is synthesized)
aggtgatgtggcctgccaggtgctggagagtgagcgggcagagcggctacaggccttccgggaggtccaggagctcaagagcaagcatgaacaagtccagaaaaaactgggagatgtgaa

SEQ ID NO: 304745 - DNA, 120 bp, Artificial Sequence
  ENSG00000133454_39 (sequence is synthesized)
taaacagttggaagaagcccagcagaaaattcagttgaatgacttggaaaggaatcccactggaggagcagacgagtggcagatgcgcttcgactgtgctcagatggagaacgagttcct

SEQ ID NO: 304746 - DNA, 120 bp, Artificial Sequence
  ENSG00000133454_40 (sequence is synthesized)
cagaaagcgtctgcagcaatgcgaggagaggctggactcggagctgacagccaggaaagagctggagcaaaagcttggggagttgcaaagtgcttatgacggggccaagaagatggctca

SEQ ID NO: 304747 - DNA, 120 bp, Artificial Sequence
  ENSG00000133454_41 (sequence is synthesized)
ccaactgaagaggaagtgccaccatcttacctgtgaccttgaggatacctgcgtcctgctagagaaccaacaaagtcgaaaccatgagctggagaagaagcagaagaagtttgacctgca

SEQ ID NO: 304748 - DNA, 120 bp, Artificial Sequence
  ENSG00000133454_42 (sequence is synthesized)
gctggcccaggccctaggtgagtcagtgtttgagaagggtctccgtgagaaagtgacccaggagaacaccagtgtccggtgggagctaggccagcttcagcagcagctgaagcaaaagga

SEQ ID NO: 304749 - DNA, 120 bp, Artificial Sequence
  ENSG00000133454_43 (sequence is synthesized)
gcaggaagcctcacagctgaagcagcaggtggagatgctacaggaccataaacgggagctgctggggtcaccctctctgggggaaaattgcgttgctggcttgaaggagaggctctggaa

SEQ ID NO: 304750 - DNA, 120 bp, Artificial Sequence
  ENSG00000133454_44 (sequence is synthesized)
gttggaatccagcgcccttgagcaacagaaaatccagagccagcaggaaaacaccatcaagcagctggagcagctccgccagcggtttgagctggagatcgagcggatgaagcagatgca

SEQ ID NO: 304751 - DNA, 120 bp, Artificial Sequence
  ENSG00000133454_45 (sequence is synthesized)
ccagaaggaccgtgaggaccaggaggaggaactggaggatgtccgtcagtcctgccagaagcggcttcatcagctggaaatgcagctggagcaagagtatgaagagaagcagatggtcct

SEQ ID NO: 304752 - DNA, 120 bp, Artificial Sequence
  ENSG00000133454_46 (sequence is synthesized)
ccatgagaagcaagatttggaaggcttgatcggaaccctctgtgaccagattggccatcgggactttgatgtggagaagcgacttcggagagacctcaggaggacacatgcactgttgtc

SEQ ID NO: 304753 - DNA, 120 bp, Artificial Sequence
  ENSG00000133454_47 (sequence is synthesized)
agacgtgcagctccttctgggcaccatggaggatggcaagacatcagtcagcaaggaggagctggagaaagtgcacagccagctggagcagagtgaagccaagtgtgaggaggccttgaa

SEQ ID NO: 304754 - DNA, 120 bp, Artificial Sequence
  ENSG00000133454_48 (sequence is synthesized)
gacgcagaaggtgctcacagcggacctggagagcatgcacagcgagctggagaacatgacgcggaacaagagcctggtggatgagcagctgtacaggctgcagtttgagaaggcggacct

SEQ ID NO: 304755 - DNA, 120 bp, Artificial Sequence
  ENSG00000133454_49 (sequence is synthesized)
cctgaagcgcatcgatgaggaccaggatgacctgaatgagctgatgcagaagcacaaggacctcattgctcagtctgctgctgacattgggcagatccaagaactgcagctgcagctgga

SEQ ID NO: 304756 - DNA, 120 bp, Artificial Sequence
  ENSG00000133454_50 (sequence is synthesized)
ggaagccaagaaggagaagcacaagctacaagaacaactgcaggtggctcagatgcgcatcgagtacctggaacagtccaccgtggatcgagccatcgtcagcaggcaggaggcggtcat

SEQ ID NO: 304757 - DNA, 120 bp, Artificial Sequence
  ENSG00000133454_51 (sequence is synthesized)
ctgtgacctagagaacaagacagagttccagaaggtgcagattaagagatttgaggtcctggtgatccggcttcgggacagcctgatcaagatgggggaggagctttcacaggcggccac

SEQ ID NO: 304758 - DNA, 120 bp, Artificial Sequence
  ENSG00000133454_52 (sequence is synthesized)
ctccgagtcccagcagcgggagagcagccagtactaccagcggcgcctggaagagctgaaggccgacatggaagagctggtgcagcgggaggcagaggccagccggcggtgcatggagct

SEQ ID NO: 304759 - DNA, 120 bp, Artificial Sequence
  ENSG00000133454_53 (sequence is synthesized)
ggagaagtacgtggaggaacttgcagcagtgaggcaaaccctccagacagacctggagacatccattcggcggattgccgacctgcaggctgccttggaagaagtggcatccagtgacag

SEQ ID NO: 304760 - DNA, 120 bp, Artificial Sequence
  ENSG00000133454_54 (sequence is synthesized)
tgatactgagagtgtccagacggcagtggattgtggcagcagcggccgaaaagagatggataacgtctccatcctcagctcccagccagagggcagcctgcagtcctggttgagctgtac

SEQ ID NO: 304761 - DNA, 120 bp, Artificial Sequence
  ENSG00000133454_55 (sequence is synthesized)
tctgtccctggccacagatactatgaggactccttctcgacagtcagccaccagcagccgcatcctcagccccaggataaacgaagaggctggggacactgagaggacccagtcggcatt

SEQ ID NO: 304762 - DNA, 120 bp, Artificial Sequence
  ENSG00000133454_56 (sequence is synthesized)
ggcactgagcagagcccggtccaccaatgtccacagcaagacctcaggagacaagcctgtttctccccactttgtccgccggcaaaagtactgtcattttggggacggcgaagtgcttgc

SEQ ID NO: 304763 - DNA, 120 bp, Artificial Sequence
  ENSG00000133454_57 (sequence is synthesized)
cgtccagagaaagtccacagagagattagaacctgcttcctctcccctggcttctcggagtacaaatacatccccgctgtcgagggaaaagctgcccagtccttcagcggccctctcgga

SEQ ID NO: 304764 - DNA, 120 bp, Artificial Sequence
  ENSG00000133454_58 (sequence is synthesized)
gttcgtggaagggctccggaggaagagagcccagagaggccaggggtccacgctgggcctagaggactggcccactctccccatttaccagacgactggggcctccacactaaggagggg

SEQ ID NO: 304765 - DNA, 120 bp, Artificial Sequence
  ENSG00000133454_59 (sequence is synthesized)
cagggctggcagtgacgagggaaacctctcgctgagggttggggcaaagtcacccctggaaatcgaaggggccgctggtggtctcttgaggtccaccagcctcaaatgcatctcttcaga

SEQ ID NO: 304766 - DNA, 120 bp, Artificial Sequence
  ENSG00000133454_60 (sequence is synthesized)
cggtgttgggggcacaaccctactccccgaaaagtcgaaaacccaattcagttcctgcgagtccctcttagaatccagaccgagcatggggagaaaactgagctctccgaccacacccag

SEQ ID NO: 304767 - DNA, 120 bp, Artificial Sequence
  ENSG00000133454_61 (sequence is synthesized)
ggacatgctgttgtcgcccacactgcgtcctcggaggcggtgtctggagtcctctgtggacgatgcgggctgtccagaccttggaaaggagccgcttgttttccagaaccgccagtttgc

SEQ ID NO: 304768 - DNA, 120 bp, Artificial Sequence
  ENSG00000133454_62 (sequence is synthesized)
ccacctgatggaggaacctctaggcagtgacccattcagctggaaactcccaagcctcgactacgaacgcaagaccaaagtggacttcgatgacttcctcccagctatccggaagcccca

SEQ ID NO: 304769 - DNA, 120 bp, Artificial Sequence
  ENSG00000133454_63 (sequence is synthesized)
gacacctacctccttggctggatcagccaaaggtgggcaagacggttcacagcgttcaagcatccactttgaaacggaagaggctaaccgttcctttctctcggggatcaagaccatttt

SEQ ID NO: 304770 - DNA, 120 bp, Artificial Sequence
  ENSG00000133454_64 (sequence is synthesized)
gaagaagagcccggagcccaaggaggatcccgctcacctgtctgactcgtcctcatcctccggctccatcgtgtccttcaaaagtgctgacagcatcaaaagtcgaccaggaatcccacg

SEQ ID NO: 304771 - DNA, 120 bp, Artificial Sequence
  ENSG00000133454_65 (sequence is synthesized)
acttgcgggtgacggtggcgagcgaacgtcccccgagcggagagagccagggacggggaggaaagacgacgatgttgcgagcataatgaagaaatacctccagaagtaggaaccagttca

SEQ ID NO: 304772 - DNA, 120 bp, Artificial Sequence
  ENSG00000133454_66 (sequence is synthesized)
gcctccttgaagctgcccttgaagacttcccgactctacaataacttggagacagagagactggccaggcctccccggtggccagagccagccagcatggccaccctcaagaggcgagat

SEQ ID NO: 304773 - DNA, 120 bp, Artificial Sequence
  ENSG00000133454_67 (sequence is synthesized)
gagcccacagaggcatatcctgcggggatgctgggctcccagtgtggttggcctgaacaaaataaagtgttgactcctgggcatctgtgccttctctatggccttgctacctgggattcc

SEQ ID NO: 304774 - DNA, 120 bp, Artificial Sequence
  ENSG00000133454_68 (sequence is synthesized)
agagagttgatggggtgcagataggggtaggactgttagaatagaaccaacccaaactgtgtgtagtttggggtgtatacttctatttctcttcctacatgtctacatgccatgaccttc

SEQ ID NO: 304775 - DNA, 120 bp, Artificial Sequence
  ENSG00000133454_69 (sequence is synthesized)
ctcctcctcttcacttggccagtttcagctcacttcctccaggaagtctttcctgatatatcaaactgaaacaaatgctcctcctccatgctcccttaatccccatgcttgtcgattata

SEQ ID NO: 304776 - DNA, 120 bp, Artificial Sequence
  ENSG00000133454_70 (sequence is synthesized)
ttcctttgccaattcatttctctatcctgtgtatgtataagtgtgtacaagcattcaagaaactgatgaatgatgaatgaatgaatgagccaaagaacaaataaatgagcccacacaccc

SEQ ID NO: 304777 - DNA, 120 bp, Artificial Sequence
  ENSG00000133454_71 (sequence is synthesized)
ggctgctatggatgaagaacagagagaaattcttctttgctttgaccctcagtggttcccagaaattgctcaagggatccctcaaggtcctggtgatccggcttcgggacagcctgatca

SEQ ID NO: 304778 - DNA, 120 bp, Artificial Sequence
  ENSG00000133454_72 (sequence is synthesized)
cgcagggcagctggagaagggggaacgtcaggaaaggagaaagtcaagaatggaaagaggcggaaattagactccctacccttgtaggaaaaaaaccggtagcggttccagcaaaatcca

SEQ ID NO: 304779 - DNA, 120 bp, Artificial Sequence
  ENSG00000133454_73 (sequence is synthesized)
atcccaaccttcctgagacccagaggcgacttcacagcagaatctaattctgagtggaattgaaggccttgctgcagactgtgtacttttaatcatgtttaaataaaacatgggaccatg

SEQ ID NO: 304780 - DNA, 120 bp, Artificial Sequence
  ENSG00000133454_74 (sequence is synthesized)
gagtccacttgcattgcatatggagagaaactgaggccctaggttcaggggggagggaacaagtacaaaaatcacagagcaacaatgcaggataagtaactacttgctgcccttcctccc

SEQ ID NO: 304781 - DNA, 120 bp, Artificial Sequence
  ENSG00000133454_75 (sequence is synthesized)
agaagtctgagactttgaatgatagtctagtattaaggaacactggatagtcttataataagcgagactttcttgccaccaaaggccaaaccccatgcccacttctgccatatcaagatc

SEQ ID NO: 304782 - DNA, 120 bp, Artificial Sequence
  ENSG00000133454_76 (sequence is synthesized)
tctggaacaatgggacttcctgtttgggccaaggggaagtgactgaaagtcacaccttactgaggcttggcaaagccttctctatcggtttcctcacctgtgatactgccaggaggctga

SEQ ID NO: 304783 - DNA, 120 bp, Artificial Sequence
  ENSG00000133454_77 (sequence is synthesized)
acactgtgagaaacccccgtgtaaggtagaagatgggcagcggtgccatttgctggtttaatttacgtgatgttggttctcaggctcctgaggacagatggtatgaggcagagaaagtct

SEQ ID NO: 304784 - DNA, 120 bp, Artificial Sequence
  ENSG00000133460_0 (sequence is synthesized)
ctatgtttctgtgaccacaaatagcatctttggcaagtctagtttcagttggtctttgtccagctcctggattcctccatgcagggcctgagaagccctgagggataaaagattaatccg

SEQ ID NO: 304785 - DNA, 120 bp, Artificial Sequence
  ENSG00000133460_1 (sequence is synthesized)
gttcagtggactctgtggttcctcaactccaagtgcccccagcataagtcggacctgcctctcacgcaatggatcccctggcggcaacccgagaccggttctcctacccgcattccgcca

SEQ ID NO: 304786 - DNA, 120 bp, Artificial Sequence
  ENSG00000133460_2 (sequence is synthesized)
agtctctcgctctgcccaggacgcacagatgagagcgctccgaagactgattcagggcaggatcctgctcctgaccatctgcgctgccggcattggtgggacttttcagtttggctataa

SEQ ID NO: 304787 - DNA, 120 bp, Artificial Sequence
  ENSG00000133460_3 (sequence is synthesized)
cctctctatcatcaatgccccgaccttgcacattcaggaattcaccaatgagacatggcaggcgcgtactggagagccactgcccgatcacctagtcctgcttatgtggtccctcatcgt

SEQ ID NO: 304788 - DNA, 120 bp, Artificial Sequence
  ENSG00000133460_4 (sequence is synthesized)
gtctctgtatcccctgggaggcctctttggagcactgcttgcaggtcccttggccatcacgctgggaaggaagaagtccctcctggtgaataacatctttgtggtgtcagcagcaatcct

SEQ ID NO: 304789 - DNA, 120 bp, Artificial Sequence
  ENSG00000133460_5 (sequence is synthesized)
gtttggattcagccgcaaagcaggctcctttgagatgatcatgctgggaagactgctcgtgggagtcaatgcaggtgtgagcatgaacatccagcccatgtacctgggggagagcgcccc

SEQ ID NO: 304790 - DNA, 120 bp, Artificial Sequence
  ENSG00000133460_6 (sequence is synthesized)
taaggagctccgaggagctgtggccatgagctcagccatctttacggctctggggatcgtgatgggacaggtggtcggactcagggagctcctaggtggccctcaggcctggcccctgct

SEQ ID NO: 304791 - DNA, 120 bp, Artificial Sequence
  ENSG00000133460_7 (sequence is synthesized)
gctggccagctgcctggtgcccggggcgctccagctcgcctccctgcctctgctccctgaaagcccgcgctacctcctcattgactgtggagacaccgaggcctgcctggcagcactacg

SEQ ID NO: 304792 - DNA, 120 bp, Artificial Sequence
  ENSG00000133460_8 (sequence is synthesized)
gcggctccggggctccggggacttggcaggggagctggaggagctggaggaggagcgcgctgcctgccagggctgccgtgcccggcgcccatgggagctgttccagcatcgggccctgag

SEQ ID NO: 304793 - DNA, 120 bp, Artificial Sequence
  ENSG00000133460_9 (sequence is synthesized)
gagacaggtgacaagcctcgtggttctgggcagtgccatggagctctgcgggaatgactcggtgtacgcctacgcctcctccgtgttccggaaggcaggagtgccggaagcgaagatcca

SEQ ID NO: 304794 - DNA, 120 bp, Artificial Sequence
  ENSG00000133460_10 (sequence is synthesized)
gtacgcgatcatcgggactgggagctgcgagctgctcacggcggttgttagttgtgtggtaatcgagagggtgggtcggcgcgtgctgctcatcggtgggtacagcctgatgacctgctg

SEQ ID NO: 304795 - DNA, 120 bp, Artificial Sequence
  ENSG00000133460_11 (sequence is synthesized)
ggggagcatcttcactgtggccctgtgcctgcagagctccttcccctggacactctacctggccatggcctgcatctttgccttcatcctcagctttggcattggccctgccggagtgac

SEQ ID NO: 304796 - DNA, 120 bp, Artificial Sequence
  ENSG00000133460_12 (sequence is synthesized)
ggggatcctggccacagagctgtttgaccagatggccaggcctgctgcctgcatggtctgcggggcgctcatgtggatcatgctcatcctggtcggcctgggatttccctttatcatgga

SEQ ID NO: 304797 - DNA, 120 bp, Artificial Sequence
  ENSG00000133460_13 (sequence is synthesized)
ccaagagatctccaaggaattacacagactcaacttccccaggcgggcccagggccccacgtggaggagcctggaggttatccagtcaacagaactctagtcccaaaggggtggccagag

SEQ ID NO: 304798 - DNA, 120 bp, Artificial Sequence
  ENSG00000133460_14 (sequence is synthesized)
ccaaagccagctactgtcctgtcctctgcttcctgccagggccctggtcctcactccctcctgcattcctcatttaaggagtgtttattgagcaccctttgtgtgcagacatggctccag

SEQ ID NO: 304799 - DNA, 120 bp, Artificial Sequence
  ENSG00000133460_15 (sequence is synthesized)
gtgcttagcaatcaatggtgagcgtggtattccaggctaaaggtaattaactgacagaaaatcagtaacaacataattacaggctggttgtggcagctcatgactgtaatcccagcactt

SEQ ID NO: 304800 - DNA, 120 bp, Artificial Sequence
  ENSG00000133460_16 (sequence is synthesized)
tgggaggccaaggtgggaggatcaattgaggccagagtttgaaaccagcctaggtaacatagtgagaccccctatctctacaaaaaattttaaacattagctgggcatggtggtatgtgc

SEQ ID NO: 304801 - DNA, 120 bp, Artificial Sequence
  ENSG00000133460_17 (sequence is synthesized)
taacagctctagctactcaggaggctgaggcagcaggatcacttgagtccaagagttcaaggtagcagtaagctacaatcacaccactgcatgccagactgggtgacagagggagacttc

SEQ ID NO: 304802 - DNA, 120 bp, Artificial Sequence
  ENSG00000133460_18 (sequence is synthesized)
gggtgacagagggagacttcatctctttaaaacataataataataattacagactcaggaaatgcagtgaaagaaaaatacaggttggccaggtgaggtggctgatgcctgtaatcccag

SEQ ID NO: 304803 - DNA, 85 bp, Artificial Sequence
  ENSG00000133460_19 (sequence is synthesized)
cactttgggaggccaagatgggaagattgctttgagaccagaagtttgagaccagcctgggccacatagtaagatcctgtttcta

SEQ ID NO: 304804 - DNA, 120 bp, Artificial Sequence
  ENSG00000133460_20 (sequence is synthesized)
agcctgggaggtcgaggctgcagtgagtcctaattgagccactgcactccagcctggacaacagaaagagaccatgtttcaaaaaaaataaatacaggttgtagtgggtatgggtatgca

SEQ ID NO: 304805 - DNA, 120 bp, Artificial Sequence
  ENSG00000133460_21 (sequence is synthesized)
aaaataaatacaggttgtagtgggtatgggtatgcataccaggaggcccgacctcgtctgagaggggagtggtcagaaaagaattttctgaggaattgatgtttttaatcaactttattg

SEQ ID NO: 304806 - DNA, 120 bp, Artificial Sequence
  ENSG00000133460_22 (sequence is synthesized)
aggtataatttatacataaccaactgcatccattttaagtatatatttggcgagttttgagttctaagtatagttttggtgagtgtatacacttgggaaacaccaccgtgatcaagatgg

SEQ ID NO: 304807 - DNA, 120 bp, Artificial Sequence
  ENSG00000133460_23 (sequence is synthesized)
aacctttaccctaccccaaggcacccacatgcccatttgctatcagtaacccaccccagtcccagacctggggaaccactgacctgctttctgcctcaattggtcagatttgcctttttt

SEQ ID NO: 304808 - DNA, 120 bp, Artificial Sequence
  ENSG00000133460_24 (sequence is synthesized)
cagaatctgaagtcattccgtactgtatgtacacatttgtgtctggcttggctccagataaagtttttgggattcatgaatgttgttgcacgtattaggagagactcctttgtattgctg

SEQ ID NO: 304809 - DNA, 120 bp, Artificial Sequence
  ENSG00000133460_25 (sequence is synthesized)
agtagtattcccctctgtggttagaccatgatttatttatccatctacctgttggtgaacattttggctgtttctaattcttggccatcatgaataaaactgctgtgaatgttcctacaa

SEQ ID NO: 304810 - DNA, 120 bp, Artificial Sequence
  ENSG00000133460_26 (sequence is synthesized)
atctttcggtctttcctaattttcccgtcctctggggaaaggtcggggatacctgaaccaaagtgtgtgtgtgtgggggggggggggtgtaggtggggcgtgcatagatgtgcacaacca

SEQ ID NO: 304811 - DNA, 120 bp, Artificial Sequence
  ENSG00000133460_27 (sequence is synthesized)
agggcttggccctccggagaacgcccaggggcagtggcctccgaggttctggcggccggcagtggcgaccggcgcagggaatcgcgcagggttgcggctgaggtcagaccagcgagagac

SEQ ID NO: 304812 - DNA, 120 bp, Artificial Sequence
  ENSG00000133460_28 (sequence is synthesized)
agagacccgcagacatttagtccagagactgtagcaaaggagggggacgaggggccagagccggaatttcgggggaggacttgggagcgcggcgaccagagtcgcttgctggcacttgcg

SEQ ID NO: 304813 - DNA, 120 bp, Artificial Sequence
  ENSG00000133460_29 (sequence is synthesized)
agggcgaatgcaggggcttggccgagatgaccttggaccagagctcccttccggcctgcagagatgagcttggggcttagccgagtaaggagtgagcggcttttcagcctcagtgctgcg

SEQ ID NO: 304814 - DNA, 120 bp, Artificial Sequence
  ENSG00000133460_30 (sequence is synthesized)
agataccagtaaaagcgtttcttcacctaaatgtctcccctacccactagtagattaaagcattattgctttgcatgaaggcatcgaatcctctatccacatctctgctgccaattcacg

SEQ ID NO: 304815 - DNA, 120 bp, Artificial Sequence
  ENSG00000133460_31 (sequence is synthesized)
catcgggactgggagctgcgagctgctcacggcggttgttagtgtgagtctggagggtgcccttcctccaccagccctgtggggagggacccccaggtcctctgcattaaaccagtttac

SEQ ID NO: 304816 - DNA, 70 bp, Artificial Sequence
  ENSG00000133460_32 (sequence is synthesized)
ggggagggacccccaggtcctctgcattaaaccagtttacactccagcttatggtgttaaaatgcagtga

SEQ ID NO: 304817 - DNA, 61 bp, Artificial Sequence
  ENSG00000133460_33 (sequence is synthesized)
ccgtctctactaaaaaatacaaaaaattatcccggcgtggtggtaggtggaggttgcagtg

SEQ ID NO: 304818 - DNA, 63 bp, Artificial Sequence
  ENSG00000133460_34 (sequence is synthesized)
caggagaatcgcaaggcaatagtgctgaggtgggatcaggagttggagaccagcctgggcaac

SEQ ID NO: 304819 - DNA, 78 bp, Artificial Sequence
  ENSG00000133460_35 (sequence is synthesized)
tgtagtgctagctactggactgcagtaaaccgagattgtgccactgcactccagcgtgggctggaccagtgagaccct

SEQ ID NO: 304820 - DNA, 120 bp, Artificial Sequence
  ENSG00000133460_36 (sequence is synthesized)
agaccagtaagaccctgtctcaatcaatcaatcaatgcagtgagttagagagcatctattgagcatctacggtttgcgggtcacttccagcaccattttgagatgcggaaactggctgaa

SEQ ID NO: 304821 - DNA, 120 bp, Artificial Sequence
  ENSG00000133460_37 (sequence is synthesized)
gttgggtgattgattgaccaagttcctttgggaaattaataaagtcacactgaagcaataaactaccctcacctccaccaccagctttctcaggagaccccttcccattgcctgccccag

SEQ ID NO: 304822 - DNA, 120 bp, Artificial Sequence
  ENSG00000133460_38 (sequence is synthesized)
gggagcatcttcactgtggccctgtgcctgcaggtagctggggtggatgagggctggggggtccaggccgggctgacttccacctcacccccgccccgtccacggcagagctccttcccc

SEQ ID NO: 304823 - DNA, 120 bp, Artificial Sequence
  ENSG00000133460_39 (sequence is synthesized)
ccctgcaggccctcagagaccacctcatgccggggcttctgggagggaatggcaggaggagagcactgaggggccccccatacagactgggcctgggctcccactcccatgtctgggctg

SEQ ID NO: 304824 - DNA, 120 bp, Artificial Sequence
  ENSG00000133460_40 (sequence is synthesized)
ctctttcaccactgggcgctgcgcgctgcccttccctccgcgcacaggctgccggctcaccgcttgctaatggcagccggggtctccctgggacagcaagacctccgctcaggcccctct

SEQ ID NO: 304825 - DNA, 120 bp, Artificial Sequence
  ENSG00000133460_41 (sequence is synthesized)
aatgaggagcgctgcagcctgcaggctgaggaatgtggaagaaggaagaggcccggcaagctccaggcccagatcagctcctcatccagcctcttactctgcctggagtttcaccttgca

SEQ ID NO: 304826 - DNA, 120 bp, Artificial Sequence
  ENSG00000133460_42 (sequence is synthesized)
tctaaccaagagaagggtgtccatgtcttcctcatgtctttcctaaccatgtggcttcccttcactcacctgaggtttggagtctggggagtccaaactacctggtacaactctgacctg

SEQ ID NO: 304827 - DNA, 120 bp, Artificial Sequence
  ENSG00000133460_43 (sequence is synthesized)
tggctaacgctgtgagcaagtcatttcacctctccctgagcctaatccccagtcttgacagtgaccaaggctgggcatggttgctcatgtctgtaatcccggtgctttgggaggctgaag

SEQ ID NO: 304828 - DNA, 62 bp, Artificial Sequence
  ENSG00000133460_44 (sequence is synthesized)
gggaggctgaagcaggaggattgcttgaggccaggaattgcctggcatgctggtatgtgcct

SEQ ID NO: 304829 - DNA, 120 bp, Artificial Sequence
  ENSG00000133460_45 (sequence is synthesized)
attcgaggttttttcatgtgtcaacaaaccacgctcacaattatttttgagacaggcttctctcccaaggcctaattgctggtatttagggtatgtcaggctaccgtgaatcaacgccct

SEQ ID NO: 304830 - DNA, 120 bp, Artificial Sequence
  ENSG00000133460_46 (sequence is synthesized)
caagcctcctaaatgcccccttttctagttgtgagggtctgtgaggcactgctttaagctatacccttgatttgatctttactatgagtccatggcttcctggcagtgctctggatttga

SEQ ID NO: 304831 - DNA, 120 bp, Artificial Sequence
  ENSG00000133460_47 (sequence is synthesized)
tctttgctcacaggctgttacttaatttgggattcttttgctagctggagaggatagaggcgagaaaacattttttgttgttgttttcaactaacccagtgtttctgaaatatgctacgt

SEQ ID NO: 304832 - DNA, 120 bp, Artificial Sequence
  ENSG00000133460_48 (sequence is synthesized)
ttaattaaattttgttgcctctgaattctgcttgcaaactggccagttattttctgagctaattcttcatgtcttacagcaagcttagaatatgcatctaacagcaaccagttcatgctt

SEQ ID NO: 304833 - DNA, 120 bp, Artificial Sequence
  ENSG00000133460_49 (sequence is synthesized)
tcaacatttggagttttctttgctcaagtccataagttcactgagcccattttctttcttccgtgttactgcactatataacatagcttttcatttctccagcctcatcgccgtcctctg

SEQ ID NO: 304834 - DNA, 120 bp, Artificial Sequence
  ENSG00000133460_50 (sequence is synthesized)
cctcgtcttggaactgataccatatttcacaggtctttgttacggtagcaccaactcctggtgccaatttattgatcagctttctattgctgactaatagatgatcataacatctcggtg

SEQ ID NO: 304835 - DNA, 120 bp, Artificial Sequence
  ENSG00000133460_51 (sequence is synthesized)
gtaaagaaacaaaaaaagcaattatttagcctaagcctctaagtcctctgggctgggctgatctaggatggttctggctgatggctctgctgatcttggtcattcctgcaactgcagctc

SEQ ID NO: 304836 - DNA, 120 bp, Artificial Sequence
  ENSG00000133460_52 (sequence is synthesized)
agctgggcattggctggctgatctagaatagtcccagtgagggtggcttagctgggcccctttggctgtccatgtcttgtcatcctcctggctagcctggaatgttctcatgaaggcaga

SEQ ID NO: 304837 - DNA, 120 bp, Artificial Sequence
  ENSG00000133460_53 (sequence is synthesized)
agagcaagtagaagtgagcaaggcctcttaaggcttaggctggaacatggtacgccctcactgcagcctcatcctattggccgagcccagagccaggagcagggatgtaggcagtacttg

SEQ ID NO: 304838 - DNA, 120 bp, Artificial Sequence
  ENSG00000133460_54 (sequence is synthesized)
cccctttagtgggaggaactgcaaaatcacacagcaagcagtgtgggtgcagggaggggtgaagaattgggtttgataatgtgctgcaatagtcatgtcctgtctgatatgtccgcagaa

SEQ ID NO: 304839 - DNA, 120 bp, Artificial Sequence
  ENSG00000133460_55 (sequence is synthesized)
ccctgcgtttctttctaaagccttttttcatccatggtggcaacaccgcaacagccctgagaaatgtcagggcaaggaagatcatctccatctgaccagggaggcaaacagagacagaga

SEQ ID NO: 304840 - DNA, 120 bp, Artificial Sequence
  ENSG00000133460_56 (sequence is synthesized)
agaaacacacacacacacagacagacacagagacagagagattgagagagacagaggcagagagagagagaaacacacacacacacagacacagagacagagagattgagagagacagag

SEQ ID NO: 304841 - DNA, 120 bp, Artificial Sequence
  ENSG00000133460_57 (sequence is synthesized)
gcagagagagagaaacacacacacacacagacacagagacagagagattgagagagacagaggcagagagagagagaaacacacacacacacacacacacagagacagagagattgagag

SEQ ID NO: 304842 - DNA, 120 bp, Artificial Sequence
  ENSG00000133460_58 (sequence is synthesized)
agacagaggcagagagagagagaaacacacacacagacacagagacagagagattgagaggcagagagagaaacacacacacacacagagacacacacagagacagagagattgagaaag

SEQ ID NO: 304843 - DNA, 120 bp, Artificial Sequence
  ENSG00000133460_59 (sequence is synthesized)
acaggcagagagagagagaaacacacacacacagacacagagacagagagattgagagagacagaggcagagagagagagaaacacacacacacacacagacacagagacagagagattg

SEQ ID NO: 304844 - DNA, 120 bp, Artificial Sequence
  ENSG00000133460_60 (sequence is synthesized)
agaggcagagagagaaacacacacacacacagagacacacacagagacagagagattgagagagacagaggcagagagagagacacacacacacacagacagactcagagacagagagtg

SEQ ID NO: 304845 - DNA, 120 bp, Artificial Sequence
  ENSG00000133460_61 (sequence is synthesized)
gagacacaaaccttcaaaccatagcaccagcactggatcagcaagactggattagaccactgggctcatatctgcaccgtggggagtaggggaacagtcgcaaacaaaagtggggctctt

SEQ ID NO: 304846 - DNA, 120 bp, Artificial Sequence
  ENSG00000133460_62 (sequence is synthesized)
tgtatcctctctgggtggagactgtccctgtctgagtgggtactggctaacagctgcccactgaggggcttcagccaggcatccactaggtggcactttctgccacaagtttgtctccat

SEQ ID NO: 304847 - DNA, 120 bp, Artificial Sequence
  ENSG00000133460_63 (sequence is synthesized)
caggctgccggctcaccgcttgctaatggcagccggggtctccctgggacagcaagacctccgctcaggcccctctttcgaatgctccacgccctcctgcgatctagaatggtatgaatt

SEQ ID NO: 304848 - DNA, 120 bp, Artificial Sequence
  ENSG00000133460_64 (sequence is synthesized)
ctcatacttgcccagaccaggcgtttcagatgagggattgcggacctgagtgaactgcgcaggtgcagccacctgggaggcttaactaagtcgtcaaatgttcaaaaatatcgtgcttat

SEQ ID NO: 304849 - DNA, 120 bp, Artificial Sequence
  ENSG00000133460_65 (sequence is synthesized)
ggggatcgtgatgggacaggtggtcggactcaggtcagggagcaaagaacaggtcttcacagaggagagggtgaagatttgggctttcaaagacaaacgtgttccagtcattccagaaaa

SEQ ID NO: 304850 - DNA, 120 bp, Artificial Sequence
  ENSG00000133460_66 (sequence is synthesized)
aagaggagaaggcagagcctggacccttgggaagaggagttgctagggatgaggtggggcagtggccctgtcctctcttggtcccaacctgggtgggagggatcttgatgttcagaccca

SEQ ID NO: 304851 - DNA, 120 bp, Artificial Sequence
  ENSG00000133460_67 (sequence is synthesized)
gacttggataggaagaggcacggggcaattgcagactccctgcagggaggtgtgtaggtgggcaggagagcagggtggtaggactctggcaaagaggcatctggcctggcctctcctctg

SEQ ID NO: 304852 - DNA, 120 bp, Artificial Sequence
  ENSG00000133460_68 (sequence is synthesized)
gtttggctataacctctctatcatcaatgccccgaccttgatttgatgagcttccaggttcatgaacacattgaggtgctgggaaggtggtgctcctggaggggacatggaagcctctag

SEQ ID NO: 304853 - DNA, 120 bp, Artificial Sequence
  ENSG00000133466_0 (sequence is synthesized)
agtattgcagacatgggccaaggagccagaggccatgcagtggctcagggtccgtgagtcgcctggggaggccacaggacacagggtcaccatggggacagccgccctgggtcccgtctg

SEQ ID NO: 304854 - DNA, 120 bp, Artificial Sequence
  ENSG00000133466_1 (sequence is synthesized)
ggcagcgctcctgctctttctcctgatgtgtgagatccctatggtggagctcacctttgacagagctgtggccagcggctgccaacggtgctgtgactctgaggaccccctggatcctgc

SEQ ID NO: 304855 - DNA, 120 bp, Artificial Sequence
  ENSG00000133466_2 (sequence is synthesized)
ccatgtatcctcagcctcttcctccggccgcccccacgccctgcctgagatcagaccctacattaatatcaccatcctgaagggtgacaaaggggacccaggcccaatgggcctgccagg

SEQ ID NO: 304856 - DNA, 120 bp, Artificial Sequence
  ENSG00000133466_3 (sequence is synthesized)
gtacatgggcagggagggtccccaaggggagcctggccctcagggcagcaagggtgacaagggggagatgggcagccccggcgccccgtgccagaagcgcttcttcgccttctcagtggg

SEQ ID NO: 304857 - DNA, 120 bp, Artificial Sequence
  ENSG00000133466_4 (sequence is synthesized)
ccgcaagacggccctgcacagcggcgaggacttccagacgctgctcttcgaaagggtctttgtgaaccttgatgggtgctttgacatggcgaccggccagtttgctgctcccctgcgtgg

SEQ ID NO: 304858 - DNA, 120 bp, Artificial Sequence
  ENSG00000133466_5 (sequence is synthesized)
catctacttcttcagcctcaatgtgcacagctggaattacaaggagacgtacgtgcacattatgcataaccagaaagaggctgtcatcctgtacgcgcagcccagcgagcgcagcatcat

SEQ ID NO: 304859 - DNA, 120 bp, Artificial Sequence
  ENSG00000133466_6 (sequence is synthesized)
gcagagccagagtgtgatgctggacctggcctacggggaccgcgtctgggtgcggctcttcaagcgccagcgcgagaacgccatctacagcaacgacttcgacacctacatcaccttcag

SEQ ID NO: 304860 - DNA, 120 bp, Artificial Sequence
  ENSG00000133466_7 (sequence is synthesized)
cggccacctcatcaaggccgaggacgactgagggcctctgggccaccctcccggctggagagctcaggtgctggtcccgtcccctgcagggctcagtttgcactgctgtgaagcaggaag

SEQ ID NO: 304861 - DNA, 120 bp, Artificial Sequence
  ENSG00000133466_8 (sequence is synthesized)
gccagggaggtccccggggacctggcattctggggagaccctgcttctatcttggctgccatcatccctcccagcctatttctgctcctctcttctctcttggacctattttaagaagct

SEQ ID NO: 304862 - DNA, 120 bp, Artificial Sequence
  ENSG00000133466_9 (sequence is synthesized)
tgctaacctaaatattctagaactttcccagcctcgtagcccagcacttctcaaacttggaaatgcatgcgaatcacccggggttcgtgttaaatgcagattctgactcagcaggtctga

SEQ ID NO: 304863 - DNA, 120 bp, Artificial Sequence
  ENSG00000133466_10 (sequence is synthesized)
gtgggtccaggattctgtgtttctcatatgttcctgggtgatgctgatggggtcagtctatgaaccacactggagcaaccaggttctaggactttctcaatattctagtactttctgaac

SEQ ID NO: 304864 - DNA, 78 bp, Artificial Sequence
  ENSG00000133466_11 (sequence is synthesized)
aggttctaggactttctcaatattctagtactttctgaacattctggaatcctccccacattctagaattctcccaac

SEQ ID NO: 304865 - DNA, 76 bp, Artificial Sequence
  ENSG00000133466_12 (sequence is synthesized)
ccaacattcttaaattctctcatccctccagggctccccgtgctatgttctctttaccccttccccctcttctctt

SEQ ID NO: 304866 - DNA, 120 bp, Artificial Sequence
  ENSG00000133466_13 (sequence is synthesized)
cccgtgctatgttctctttaccccttccccctcttctcttgctcaggcctgcaccactgcagccaccgttcatttattcattcattaaacactgagcactcactctgtgctgggtcccgg

SEQ ID NO: 304867 - DNA, 120 bp, Artificial Sequence
  ENSG00000133466_14 (sequence is synthesized)
gaagggtgagggggtcagacacaggccctgcccctgccctcagtgactggccagtccagcccaggcggggagagatgtgtacataggttttaaagcagacccagagctcatgggggcctg

SEQ ID NO: 304868 - DNA, 120 bp, Artificial Sequence
  ENSG00000133466_15 (sequence is synthesized)
tgttctgggtgttcaggtgctgctggtcctccattacccactgctccccaaggctggtgggacggggtcccggtggcaggggcaggtatctccttcccgttcctcatccacctgcccagt

SEQ ID NO: 304869 - DNA, 120 bp, Artificial Sequence
  ENSG00000133466_16 (sequence is synthesized)
gctcatcgttacagcaaaccccagggggccttggccaggtcaagggttctgtgaggagaggacccaggagtgtgggggcatttggggggtgaagtggcccccgaagaatggaacccacac

SEQ ID NO: 304870 - DNA, 120 bp, Artificial Sequence
  ENSG00000133466_17 (sequence is synthesized)
ccatagctctccccacagctgatacggcatcctgcgagaagacctgccctcctcactgggatccccttcctgcctcctcccagggctctgccagggccttgctcagtcccttccaccaaa

SEQ ID NO: 304871 - DNA, 120 bp, Artificial Sequence
  ENSG00000133466_18 (sequence is synthesized)
gtcatctgaacttccgtttccccagggcctccagctgccctcagacactgatgtctgtccccaggtgctctctgcccctcatgcccctctcaccggcccagtgccccgactctccaggct

SEQ ID NO: 304872 - DNA, 120 bp, Artificial Sequence
  ENSG00000133466_19 (sequence is synthesized)
ttatcaaggtgctaaggcccgggtgggcagctcctcgtctcagagccctcctccggcctggtgctgcctttacaaacacctgcaggagaagggccacggaagccccaggctttagagccc

SEQ ID NO: 304873 - DNA, 120 bp, Artificial Sequence
  ENSG00000133466_20 (sequence is synthesized)
tcagcaggtctggggagctagagcaaaggagggacctcaggccttccgtttcttcttccagggtggggtggcctggtgttcccctagccttccaaacccaggtggcctgcccttctcccc

SEQ ID NO: 304874 - DNA, 120 bp, Artificial Sequence
  ENSG00000133466_21 (sequence is synthesized)
agagggaggcggcctccgcccattggtgctcatgcagactctggggctgaggtgccccggggggtgatctctggtgctcacagccgaggagccgtggctccatggccagatgacggaaac

SEQ ID NO: 304875 - DNA, 120 bp, Artificial Sequence
  ENSG00000133466_22 (sequence is synthesized)
agggtctgaccaagtgccaggaagacctgtgctataaaccaccctgcctgatcctgcccctgcctgaccccgccacgccctgccgtccagcatgattaaagaatgctgtctcctcttggc

SEQ ID NO: 304876 - DNA, 120 bp, Artificial Sequence
  ENSG00000133466_23 (sequence is synthesized)
gaggcccgggtgggccagagaggcaggtcctcgtccctcgggcccgtggcgctgtcgtggatgccacctgaccagctgaggagatcgtcagaaaggctgggacaccaacggatgacgcac

SEQ ID NO: 304877 - DNA, 120 bp, Artificial Sequence
  ENSG00000133466_24 (sequence is synthesized)
aaatggaggaattttcaggcacggtcaaagctaatgggagggaaaatactgaagtgtaatattccagagttctctcttgtctgctctgactcctgccagctgccctgcacctagagggac

SEQ ID NO: 304878 - DNA, 120 bp, Artificial Sequence
  ENSG00000133466_25 (sequence is synthesized)
acccctttccagtaccattttttctagtgaaccacgaagggacgataccagaaaacaccctcaacccaaaggaaatagactacagccccaattggctgactttggctatagaaaaaagaa

SEQ ID NO: 304879 - DNA, 120 bp, Artificial Sequence
  ENSG00000133466_26 (sequence is synthesized)
aggaacgaaaagagacagttttttttggaaagctaagtcttccctttatcgagtcaagaaacccccccttcttgagctatttacagcttttaacaattgagtaaagtacgctccggacac

SEQ ID NO: 304880 - DNA, 120 bp, Artificial Sequence
  ENSG00000133466_27 (sequence is synthesized)
aattggagaaactggttatttaacaagggtttgactcgagtggcatgctttcaaatataaacagacttctttaaggaattaaagttgactaatagagccaataaaagcctcttggaaaaa

SEQ ID NO: 304881 - DNA, 120 bp, Artificial Sequence
  ENSG00000133466_28 (sequence is synthesized)
agagcattgttggaaggattagaggagtcaagatatggaaggcccacagaatggttggggagaaaagccagcttctggaggcaggggaaagggtggggagtggctggggaagcagggcct

SEQ ID NO: 304882 - DNA, 120 bp, Artificial Sequence
  ENSG00000133466_29 (sequence is synthesized)
gtaccctgggtttctgcattggggttactcctttgctgctgggagtgatagcagggtgatgagagccaccctgggcctgcgctcctcctggtcatgctgttgtcctgggtcccagggtgc

SEQ ID NO: 304883 - DNA, 120 bp, Artificial Sequence
  ENSG00000133466_30 (sequence is synthesized)
ctgggaaagggcacacagctttactgatgggtggccagtggggagtgcccccatcgggcattccaccagtcggccccgatggtcctggcctcctcatgtttatctggcccagggacacca

SEQ ID NO: 304884 - DNA, 120 bp, Artificial Sequence
  ENSG00000133466_31 (sequence is synthesized)
aggctcagagaggtaaacttgcccgaggtcacacagctaggagggggagctgagtcatcacccaggtttgtctgccccagggctggagctctgttttcaggccacctgaccagctgagga

SEQ ID NO: 304885 - DNA, 120 bp, Artificial Sequence
  ENSG00000133466_32 (sequence is synthesized)
acctcagcctcctcacctgtgaagtgggttgaacagctcttctctgcagaggagctgttgagggcggtatggaacactgccaggcacacagttggcccttgacaaaaccattgctgtgtc

SEQ ID NO: 304886 - DNA, 120 bp, Artificial Sequence
  ENSG00000133466_33 (sequence is synthesized)
cccagcctgtttctccccaagtcccattgatggttctctctatccctgtttcctcagaaggtcaggttttctaagcccgaaggcttggagccaggcaggagctgtctccctctccagtgc

SEQ ID NO: 304887 - DNA, 120 bp, Artificial Sequence
  ENSG00000133466_34 (sequence is synthesized)
tgccgactcaacccttttcccttagaagcagggagggaggctccccttggctccctccctctgcagccctggctctgcgccctgggaatgctgcctggggcagggccacgtagagagcag

SEQ ID NO: 304888 - DNA, 120 bp, Artificial Sequence
  ENSG00000133466_35 (sequence is synthesized)
ggccagtgcaggcctttgggtgttcccagtggccaaagtcctttagtctgctttcctttgggcccccttgcacccctgaatggatgacctgggggattccaagtcggtttgggaggggtg

SEQ ID NO: 304889 - DNA, 120 bp, Artificial Sequence
  ENSG00000133466_36 (sequence is synthesized)
acagcacaaggctggaggttgggagagtctggctgtcatcccagcttggattgtagtctgccatgtgacctttgggccaaagataaatcctccctgggccacagtgtccctgctggtcag

SEQ ID NO: 304890 - DNA, 120 bp, Artificial Sequence
  ENSG00000133466_37 (sequence is synthesized)
atgaaagaatcagatgagatcatttctgaggatctttccaggcttcatattcttctgtttgattatccccccaaataaattggaaattggaggcccaaggatgagccctggttgaggacg

SEQ ID NO: 304891 - DNA, 120 bp, Artificial Sequence
  ENSG00000133466_38 (sequence is synthesized)
cagagcccaggggccgtcccatcctccacacttggcccagctgtgagtgggggaatgggatttagcacctgaagccccagatttaaatatatccccactccccgccggggtccccgcact

SEQ ID NO: 304892 - DNA, 120 bp, Artificial Sequence
  ENSG00000133466_39 (sequence is synthesized)
cctgcacctccctcctcccaggacggccctgacctgcaggcattgttccccgcccatgcccaagccccgagggaattccatcgggttggagagtcttcccttctgtagggggctttgctc

SEQ ID NO: 304893 - DNA, 120 bp, Artificial Sequence
  ENSG00000133466_40 (sequence is synthesized)
ctctctaccagttatgtgaccttgggcaagtcacttcagctgcctgaccccagctccctaggactagttgaagtaatggatataaacaccctttggggaccaaaagcccctagagagatg

SEQ ID NO: 304894 - DNA, 120 bp, Artificial Sequence
  ENSG00000133466_41 (sequence is synthesized)
agacctggcccaggcagtaagtcttcaacaaatgtagaataggaggatgctgtaaacaagccagccaaaacccaccaaatcccttggtggaggataagggacatttgagacagtctttat

SEQ ID NO: 304895 - DNA, 120 bp, Artificial Sequence
  ENSG00000133466_42 (sequence is synthesized)
acaggagtctcgggccccaggaagccagggcagagagtctttgccaaacttccccctgcctaacaagaaggaaactgaggcaggaccctgccagacccagaggcaaacaggctgccctcc

SEQ ID NO: 304896 - DNA, 120 bp, Artificial Sequence
  ENSG00000133466_43 (sequence is synthesized)
tgtgaacttgttgggggtcatttccacaagggaatagttctagaagaccagggtgagtcagtaacaatggcagaattccagtcagaggaagaagactttggtgtagctggggctggagca

SEQ ID NO: 304897 - DNA, 120 bp, Artificial Sequence
  ENSG00000133466_44 (sequence is synthesized)
agcatagaggagcgacttggctgccgccctggccctgtgtcagaggtgttagaaccagagccactccatcttgagtaggagctgggtaaaatagggctgagacctgctgggctgcattcc

SEQ ID NO: 304898 - DNA, 120 bp, Artificial Sequence
  ENSG00000133466_45 (sequence is synthesized)
aggttaggcatttttagtcacaggatgagatgggagtcggcaggactggtatcataagatacaggtcataaataccctgctgataaacaggatgcgctaaacaagccggccaaaacacac

SEQ ID NO: 304899 - DNA, 120 bp, Artificial Sequence
  ENSG00000133466_46 (sequence is synthesized)
agacactcccaccagcaccatgacaatttacaaatgccatggcaatgtccagaaattaccttatacggtctaaaagcgggaggaactctcagttctggggaaatctcccctttcttggaa

SEQ ID NO: 304900 - DNA, 120 bp, Artificial Sequence
  ENSG00000133466_47 (sequence is synthesized)
gcatataatcaagaaataaccataaaaacagccaaccagcagcgctcaggggtggtctgtctatggagtagccattcttttgtttctttacttctctgtaaacttgctttgacttcactc

SEQ ID NO: 304901 - DNA, 120 bp, Artificial Sequence
  ENSG00000133466_48 (sequence is synthesized)
ccaaagagttaagcaaaggaaatccctgcctccctttatctccgcagaacccagaggctgaaagggagggagcagggaggaggggaagtgggaagcggctctgccctctccctccgccct

SEQ ID NO: 304902 - DNA, 120 bp, Artificial Sequence
  ENSG00000133466_49 (sequence is synthesized)
cgtttgtccccagtgttcactaacctcagtcctcctgcccggagggcatgtgtttgctggagatagtggagtcggtggcaagaaagtgccagagggaggtcaccatggggacagccgccc

SEQ ID NO: 304903 - DNA, 120 bp, Artificial Sequence
  ENSG00000133466_50 (sequence is synthesized)
taacctcagtcctcctgcccggagggcatgtgtttgctggagatagtggagtcggtggcaagaaagtgccagagggaggtgcgcgggcgggaaagcatctgacggtctcctgggttgcca

SEQ ID NO: 304904 - DNA, 120 bp, Artificial Sequence
  ENSG00000133466_51 (sequence is synthesized)
cccatggccagctggggcatcttctcacctgccccagcaaagcttcctgggatccctgtctgctctcagctgtggctgttttcagaggggcttcatccttccaaggcctgtgtggagcag

SEQ ID NO: 304905 - DNA, 120 bp, Artificial Sequence
  ENSG00000133466_52 (sequence is synthesized)
aagcctccatggactgggtgcccggagactcagcatgcaggccctgccctgccagtctcctcccgatcttggggaacttgctgctctgtggaggtctcagtcttcttgtctgatagatgg

SEQ ID NO: 304906 - DNA, 120 bp, Artificial Sequence
  ENSG00000133466_53 (sequence is synthesized)
ggacaataaccttccctctggagttaggtcaggagtgctgtggctggaggacgcagcacccgcccaccccaggcatcggcacatagtagatgttgagtgaagtatagttcctgtccctcc

SEQ ID NO: 304907 - DNA, 120 bp, Artificial Sequence
  ENSG00000133475_0 (sequence is synthesized)
atgctgcatattgctggcccagctcctgaggctctttggacctccaggaatcggtgtctctaccaggaacccttaaccctgacccggactcccggctgggacccggggtgttggagtggc

SEQ ID NO: 304908 - DNA, 120 bp, Artificial Sequence
  ENSG00000133475_1 (sequence is synthesized)
aagagcgctgtcaggcctggtgaagggtgtgagctgtccaacagggcagggaggaggcagggcctgttctgcagttggacagacagagccctctagctgctttctggaagactgaagggc

SEQ ID NO: 304909 - DNA, 120 bp, Artificial Sequence
  ENSG00000133475_2 (sequence is synthesized)
agcaaggcaagtgaggtgctgccgtcatccaggctggacagttcagtgatttgcctgaggccccacagcaggagaacgagaaggctgcctgatcagagagtctctgaagaagattctgtg

SEQ ID NO: 304910 - DNA, 120 bp, Artificial Sequence
  ENSG00000133475_3 (sequence is synthesized)
gctacaggcttcagcagagtgtgagggagaccccggttatttcctcagctgtttccaccaaatcctcctgtctttcgtggccaacaccccaggcaaggcttggggcccccgtctgctgct

SEQ ID NO: 304911 - DNA, 120 bp, Artificial Sequence
  ENSG00000133475_4 (sequence is synthesized)
ggacgcagagccatgaagaagaagttagtggtgctgggcctgctggccgtggtcctggtgctggtcattgtcggcctctgtctctggctgccctcggcctccaaggaacctgacaaccat

SEQ ID NO: 304912 - DNA, 120 bp, Artificial Sequence
  ENSG00000133475_5 (sequence is synthesized)
gtgtacaccagggctgccatggccgcggatgccaagcagtgcttggagattgggagggacacactgcgggacggtggctctgcagtggatgcagccattgcagccctgttgtgtgtgggg

SEQ ID NO: 304913 - DNA, 120 bp, Artificial Sequence
  ENSG00000133475_6 (sequence is synthesized)
ctcatgaatgcccacagcatgggcatcggggttggcctcttcctcaccatctacaacagcaccactcgaaaagctgaggtcatcaatgcccgcgaggtggcccccaggctggcctttgcc

SEQ ID NO: 304914 - DNA, 120 bp, Artificial Sequence
  ENSG00000133475_7 (sequence is synthesized)
agcatgttcaacagctcggagcagtcccagaagggagggctgtcggtggcggtgcctggggagatccgaggctatgagctggcacaccagcggcatgggcggctgccctgggctcgcctc

SEQ ID NO: 304915 - DNA, 120 bp, Artificial Sequence
  ENSG00000133475_8 (sequence is synthesized)
ttccagcccagcatccagctggcccgccagggcttccctgtgggcaagggcttggcggcagtcctggaaaacaagcggactgtcatcgagcagcagcctgtcttgtggtatgtgttctgc

SEQ ID NO: 304916 - DNA, 120 bp, Artificial Sequence
  ENSG00000133475_9 (sequence is synthesized)
ccaggccttctacaacggcagcctcatggcccagattgtgaaggacatccaggcggctgggggcattgtgacagctgaggacctgaacaactaccgtgctgagctgatcgagcacccgct

SEQ ID NO: 304917 - DNA, 120 bp, Artificial Sequence
  ENSG00000133475_10 (sequence is synthesized)
gaacatcagcctgggagacgcggtgctgtacatgcccagtgcgcggctcagcgggcccgtgctggccctcatcctcaacatcctcaaagggtacaacttctcccgggagagcgtggagac

SEQ ID NO: 304918 - DNA, 120 bp, Artificial Sequence
  ENSG00000133475_11 (sequence is synthesized)
ccccgagcagaagggcctgacgtaccaccgcatcgtagaggctttccggtttgcctacgccaagaggaccctgcttggggaccccaagtttgtggatgtgactgaggtggtccgcaacat

SEQ ID NO: 304919 - DNA, 120 bp, Artificial Sequence
  ENSG00000133475_12 (sequence is synthesized)
gacctctgagttcttcgctgcccagctccggtcccagatctctgaccacaccactcacccgatctcctactacaagcccgagttctacacgccggatgacgggggcactgctcacctgtc

SEQ ID NO: 304920 - DNA, 120 bp, Artificial Sequence
  ENSG00000133475_13 (sequence is synthesized)
tgtcgtcgcagaggacggcagtgctgtgtccgccaccagcaccatcaacctctactttggctccaaggtctgctccccggtcagtgggatcctgttcaataatgaatggacgacttcagc

SEQ ID NO: 304921 - DNA, 120 bp, Artificial Sequence
  ENSG00000133475_14 (sequence is synthesized)
cagctctcccagcattcaccaatgagtttggggcacccccctcacctgccaatttcatccagccagggaagcagccgctcttgtccatgtgcctgacgatcatggtgggccaggacggcc

SEQ ID NO: 304922 - DNA, 85 bp, Artificial Sequence
  ENSG00000133475_15 (sequence is synthesized)
acagacactgcacttgaagagggccgtggaggagccccggctgcacaacaagcttctgcccaacgtcacgacagtggagagaaac

SEQ ID NO: 304923 - DNA, 85 bp, Artificial Sequence
  ENSG00000133475_16 (sequence is synthesized)
gctatgacgtgaagagggccgtggaggagccccggctgcacaacaagcttctgcccaacgtcacgacagtggagagaaacattga

SEQ ID NO: 304924 - DNA, 120 bp, Artificial Sequence
  ENSG00000133475_17 (sequence is synthesized)
agccatcgtccgcacggctggtggctgggcagctgcctcggactccaggaaaggcggggaacctgctggctactgattgctccaggcagacaaggctgacaagcaatccagggacaagat

SEQ ID NO: 304925 - DNA, 120 bp, Artificial Sequence
  ENSG00000133475_18 (sequence is synthesized)
actcaccaggatgaggaagaggactttgggggacgggcttcccctgtgagcagcagagcagcataataaatgaggccactgtgccaggctccaggtggcctccctggcctgtctccccac

SEQ ID NO: 304926 - DNA, 120 bp, Artificial Sequence
  ENSG00000133477_0 (sequence is synthesized)
caggtgcggctgtgggacctcggaccgcggcggggccggggccagggccggggccggggccggggcgccatggccgagtcccagctgaactgcctggacgaggcgcacgtgaacgagaag

SEQ ID NO: 304927 - DNA, 120 bp, Artificial Sequence
  ENSG00000133477_1 (sequence is synthesized)
aggcgcacgtgaacgagaaggtgaccgaggcgcaggccgccttctactactgcgagcggcggcgggccgcgctggaggcgctgctgggcggcggcgagcaggcctaccgcgagcggctca

SEQ ID NO: 304928 - DNA, 120 bp, Artificial Sequence
  ENSG00000133477_2 (sequence is synthesized)
aggaggagcagctgcgggacttcctctccagcccggagcgccaggccctgcgggccgcctggagcccctacgaggacgccgtccccgccgccaacgcccggggcaagagcaaggccaagg

SEQ ID NO: 304929 - DNA, 120 bp, Artificial Sequence
  ENSG00000133477_3 (sequence is synthesized)
ccaaggcccccgcgccggcgccggctgagtccggcgagtccctggcctactggcccgaccgttccgacaccgaggtgcctcctctggacctgggctggacggacactggtttctaccgcg

SEQ ID NO: 304930 - DNA, 120 bp, Artificial Sequence
  ENSG00000133477_4 (sequence is synthesized)
gcgtgagccgggtcacgctcttcacccacccgcccaaggacgagaaggcgccgcacctcaagcaggtggtcaggcagatgatccaacaggcccagaaggtcattgctgtggtcatggacc

SEQ ID NO: 304931 - DNA, 120 bp, Artificial Sequence
  ENSG00000133477_5 (sequence is synthesized)
tcttcactgatggtgatatctttcaagacattgtggatgctgcctgtaagcgccgggtcccagtgtacatcatcctggacgaggcaggagtgaagtatttcctggagatgtgtcaggacc

SEQ ID NO: 304932 - DNA, 120 bp, Artificial Sequence
  ENSG00000133477_6 (sequence is synthesized)
tgcagctcactgacttccggattcggaacatccgtgtccgctctgtgacaggcgtcggcttctacatgcccatggggaggatcaaggggaccctgtcatcaaggttcctgatggtggacg

SEQ ID NO: 304933 - DNA, 120 bp, Artificial Sequence
  ENSG00000133477_7 (sequence is synthesized)
gtgacaaagtggccactggatcttacaggttcacctggagttcctcccatgtggacagaaacctcctcctgctcctgacaggacagaacgtagagccctttgacacggagttccgggagc

SEQ ID NO: 304934 - DNA, 120 bp, Artificial Sequence
  ENSG00000133477_8 (sequence is synthesized)
tgtacgccatctccgaggaggtggacttgtaccggcagctgagcctggcgggcagggttggcctccattactcctccactgtggctcgaaagcttatcaaccccaagtacgccttggtgt

SEQ ID NO: 304935 - DNA, 120 bp, Artificial Sequence
  ENSG00000133477_9 (sequence is synthesized)
gtgtcaggctgccgccacccgcctggggagatgatgcgctgggctgcccggcaacagcgggaggcgggcggcaacccggaggggcaggaggagggcgccagcggtggcgagtcggcctgg

SEQ ID NO: 304936 - DNA, 120 bp, Artificial Sequence
  ENSG00000133477_10 (sequence is synthesized)
tggagagcttcctgaaagacctggttacggtggagcaggtgctgccccccgtggagcccatccccttgggagagctgagccagaaggatggcaggatggtctctcacatgcacagagacc

SEQ ID NO: 304937 - DNA, 120 bp, Artificial Sequence
  ENSG00000133477_11 (sequence is synthesized)
tgaagcccaaatcccgagaggcacccagccgaaacggcatgggagaagcggcccggggggaggccgcccccgccaggcgcttcagcagcaggctcttcagtcgccgagccaagaggcctg

SEQ ID NO: 304938 - DNA, 120 bp, Artificial Sequence
  ENSG00000133477_12 (sequence is synthesized)
cggcgcccaatggcatggccagctctgtctccaccgagacctctgaagtggagtttctgacggggaagaggcccaacgagaattccagtgctgacatctcaggtaaaacaagtcccagtt

SEQ ID NO: 304939 - DNA, 120 bp, Artificial Sequence
  ENSG00000133477_13 (sequence is synthesized)
ctgccaagcctagcaactgtgtgatttcctgagctgcgggatggtggtgggcaggacgtgtggatgcctgcctgccctgccctgtgctgtggagagcgcaggtcgcacactgcaccagtt

SEQ ID NO: 304940 - DNA, 120 bp, Artificial Sequence
  ENSG00000133477_14 (sequence is synthesized)
tgcacatcagacgccaactggccttctgccctgcagcctccgtcctggcctcagggacgctggatcccaaatgagagggtccgaagcatctcagtcacacgcctccaccggactgtcggt

SEQ ID NO: 304941 - DNA, 120 bp, Artificial Sequence
  ENSG00000133477_15 (sequence is synthesized)
ggctgggcaggggtcagtgccacggcctccttgtttacatgaagtggaagcttgaccagtgtctgctcgcctttgtgccccaccccctccgctgattgccagatggggtgagggcccatt

SEQ ID NO: 304942 - DNA, 120 bp, Artificial Sequence
  ENSG00000133477_16 (sequence is synthesized)
ctttaaacctttatggggtggggtgtctggggcagctgcagtggcttctcctttcccaggcttcctggtgcttctggttccccacgccactccccacccaagagattggtggaataaaag

SEQ ID NO: 304943 - DNA, 120 bp, Artificial Sequence
  ENSG00000133477_17 (sequence is synthesized)
ggaagagggcagggccctgagcctgggatcccaagttccagtctttctctagcctctgaactccagatgtaaggtgcagctggaactgcaggggcactggctgcagtggccttcctggcc

SEQ ID NO: 304944 - DNA, 120 bp, Artificial Sequence
  ENSG00000133477_18 (sequence is synthesized)
ccatccctgcaggctcctgaactagacttgaatgagggtaagatcctgcggcctcccgcagtgggggcagaatttgacactgcttttctgagagcgctcgcactgaggtctctttttccc

SEQ ID NO: 304945 - DNA, 120 bp, Artificial Sequence
  ENSG00000133477_19 (sequence is synthesized)
tgcccagtgccgtcctggcagtctcggcatgggtggttgagacctccttggctgctgcctgctgcgggcctatgtgggggtccttacagggcctttacctgggactgctccttccctcag

SEQ ID NO: 304946 - DNA, 120 bp, Artificial Sequence
  ENSG00000133477_20 (sequence is synthesized)
tcagtaaactttggtttacagcccaaggcagggagggagcttggctgagaggggattgggggtgtgggaggctgggccctgaggacaggagcatttgccttttctccctcaactctaacg

SEQ ID NO: 304947 - DNA, 120 bp, Artificial Sequence
  ENSG00000133477_21 (sequence is synthesized)
gggtcctcggaccccttcaccaaccagggcttccaggttacactttggccagactggcctttgcctcctgcgagagtcaggccatttttaggagcctgtgcctcgccagagcaggtcagc

SEQ ID NO: 304948 - DNA, 120 bp, Artificial Sequence
  ENSG00000133477_22 (sequence is synthesized)
ctaatggccatgaggctgagctgggaggcccagtaagcaattccattctgccttccccacttgggtgactggagagggccgaggagagtttgtgaatggacctgggagaaattgccaaac

SEQ ID NO: 304949 - DNA, 120 bp, Artificial Sequence
  ENSG00000133477_23 (sequence is synthesized)
tgcagactctgtgagccggccctgccggcagggcgatgggggatccaagccctgtggaagagccatgcagcggactttcttgccctctgacctctgaaccaaactctcatcctctttctt

SEQ ID NO: 304950 - DNA, 120 bp, Artificial Sequence
  ENSG00000133477_24 (sequence is synthesized)
tccttctaaaaaaccctaggacactaccagcacctgggggaggggtacagatgtctgcaaggcagctgatgtgagagcaagaaaaggggctgctctggctgggctgtgggagccaggcat

SEQ ID NO: 304951 - DNA, 120 bp, Artificial Sequence
  ENSG00000133477_25 (sequence is synthesized)
tgcttctgaggaagcaggaagtggggaccacatgtggcggccattgaggagatgcaatctctctggcagtggggaggggaagggaaaggaagggtgagcctgtccccagggtcttctctg

SEQ ID NO: 304952 - DNA, 120 bp, Artificial Sequence
  ENSG00000133477_26 (sequence is synthesized)
ttaatcccaaggctggcttctagggcgtgtggagaagggactctggcccacctccctgagcttttatgaaggtgaaatgcttctgggaagtgtttccttaggcaccaagaccaggcagtg

SEQ ID NO: 304953 - DNA, 120 bp, Artificial Sequence
  ENSG00000133477_27 (sequence is synthesized)
tggcatgagctcattctggaggggagggaagggagagaggggggaggtgggatgtgggggtgttacacctcagctcgaggcggacaccttgaaggtatgggacatgaaatgtgtaaactg

SEQ ID NO: 304954 - DNA, 120 bp, Artificial Sequence
  ENSG00000133477_28 (sequence is synthesized)
caacgcggcaaagagatcactctctggtgtggagggtgggtgtctctggggattagggaggcagcctggggaagggaccggcctccaagcaagtcagccaagggcatctgtgcctcccct

SEQ ID NO: 304955 - DNA, 120 bp, Artificial Sequence
  ENSG00000133477_29 (sequence is synthesized)
gccagaagagcaggccctgctttgtccctttacctcctctaggcccaaagcacacccaggtccctcccctgccctgacatctaatctgggaggatccctgattggaatctccaagtcacc

SEQ ID NO: 304956 - DNA, 120 bp, Artificial Sequence
  ENSG00000133477_30 (sequence is synthesized)
acagccttgagccaggccttcctttctgcctcagtttctccatgtgccaagatggcgtttttcacactttcttggtagaaatgatggggagaccatatgttaggaagcaagttggcatag

SEQ ID NO: 304957 - DNA, 120 bp, Artificial Sequence
  ENSG00000133477_31 (sequence is synthesized)
tgggaagagggccagccacaaggcaggagtgcccaggcagggtgcctctccctgctggcctgtgtcctcgtccttatagcagtgtggacaagatggtgtcggcaccccccgctccaaaag

SEQ ID NO: 304958 - DNA, 120 bp, Artificial Sequence
  ENSG00000133477_32 (sequence is synthesized)
gcttgagacagaaactgtagtccgagatggcaaggattttgaactcacaaaatgcagctcttcatgtttgcctgtctgcctaggcaccggcccactctgttctgcctcttggcttctcag

SEQ ID NO: 304959 - DNA, 120 bp, Artificial Sequence
  ENSG00000133477_33 (sequence is synthesized)
ctgtgagtacgcctgccctctgttccagcacttgcacatactttgtgaagcagtctcttactcatcaaatctcaagggtacatctggccctcccagttggatggcaagttcaagggtgga

SEQ ID NO: 304960 - DNA, 120 bp, Artificial Sequence
  ENSG00000133477_34 (sequence is synthesized)
tcatgcccttggtccctgcacagcagcttctgcaaggctggttacattggaagggctctaggaggaacaggataaggcagcactctcggggctggggtctggcttcactgcacccccctc

SEQ ID NO: 304961 - DNA, 120 bp, Artificial Sequence
  ENSG00000133477_35 (sequence is synthesized)
ccaccccacaccaccaccaagctgctgtctttctgagtcagcttctgtagggtaagtgttcacagctggtgcagctctttgggaaacctaacctcccagtgagctgagcccctggtgcgg

SEQ ID NO: 304962 - DNA, 120 bp, Artificial Sequence
  ENSG00000133477_36 (sequence is synthesized)
ccgccacgcttgcttctgccccacaagggcagtaagcacaggacttctggatggatctgggagcctgccccttgggatttggcaaaacttcccatctccttagctacctgtccttaatct

SEQ ID NO: 304963 - DNA, 120 bp, Artificial Sequence
  ENSG00000133477_37 (sequence is synthesized)
tatccctgacccctcgagggctttcaagatagcctctgttaacatcactaccctctgcctgtgtagaactttatagaaaggctaggcaaaaaatgagacccagagatatggaagaaactg

SEQ ID NO: 304964 - DNA, 82 bp, Artificial Sequence
  ENSG00000133477_38 (sequence is synthesized)
cgtacccggccaggctatttttttgttttgtttttgtttactactgtattgcttttctctttttcatatttattgagcacct

SEQ ID NO: 304965 - DNA, 120 bp, Artificial Sequence
  ENSG00000133477_39 (sequence is synthesized)
actgtattgcttttctctttttcatatttattgagcacctactatatgccagtcaccatgctagatgctttagtaacatgaaggtttcaaactaagaaaagctcaacaaagagcccttta

SEQ ID NO: 304966 - DNA, 120 bp, Artificial Sequence
  ENSG00000133477_40 (sequence is synthesized)
gaaaggtaacagttttcctgtgtattgggggagtgggtctcataaggttgtatgatgagaagcgcaagtaattgttttgttttttttttgagacaatgtcttgctctgtcgatcaggctg

SEQ ID NO: 304967 - DNA, 120 bp, Artificial Sequence
  ENSG00000133477_41 (sequence is synthesized)
tgagacaatgtcttgctctgtcgatcaggctggagtgcagtggcgtcatctcagctcgctacaacctccacctcctgggtttaagtgattctctggcctcagcctcctgagtagctgaga

SEQ ID NO: 304968 - DNA, 120 bp, Artificial Sequence
  ENSG00000133477_42 (sequence is synthesized)
cacgcccagcctggctaaggttcattatccccatctttcagatgaggaggcacacaactctccccagatcccacgtcacagagaatgcaggtctgagtctgttccttgagctcagggtct

SEQ ID NO: 304969 - DNA, 120 bp, Artificial Sequence
  ENSG00000133477_43 (sequence is synthesized)
tggcaatggtgatgctttggagctgcagaatcctctgttggggatggggctgccctgtgcattatagtacgtttagcaacatccctagcttccacctactaaatgccactagcactcctt

SEQ ID NO: 304970 - DNA, 120 bp, Artificial Sequence
  ENSG00000133477_44 (sequence is synthesized)
cagatgagaccaccaaaaatgtctccagatgttaccacatgtcccctggggggtaaaagtgcccccgttgagagcactggctcttttcttcacagtcctgacctggtggcctgcacaggc

SEQ ID NO: 304971 - DNA, 120 bp, Artificial Sequence
  ENSG00000133477_45 (sequence is synthesized)
cacttctccgaagtgtttcaatgcactctctgccctgggtaccttggacacagcaccctggcccagagaggttggctgacttgcctgagacgctgcttcctgggagacgcagtagcatct

SEQ ID NO: 304972 - DNA, 120 bp, Artificial Sequence
  ENSG00000133477_46 (sequence is synthesized)
ttcctttctgttctggttatctttcttagttctttaccaccttatattccccatgacaggtgtgtttatgtacacacatctgcctcactccactcagctccctgtcaggtttcctgccag

SEQ ID NO: 304973 - DNA, 120 bp, Artificial Sequence
  ENSG00000133477_47 (sequence is synthesized)
tctgtccctcttccttcaggctcagctacgtcctgcacagacagtaccactgcacatacctgtgtgtgcccagcggtggacccacctccaaaagcagccagtgctgacagcagagagcct

SEQ ID NO: 304974 - DNA, 120 bp, Artificial Sequence
  ENSG00000133477_48 (sequence is synthesized)
tccacactcaagtcaggccaagcaggaatcgctacctgcctgtcatgaccacattctcagtgaacattgacaaagcccccttagcagctaattagccctgccgtgcgctagggatgcaat

SEQ ID NO: 304975 - DNA, 120 bp, Artificial Sequence
  ENSG00000133477_49 (sequence is synthesized)
ttctcatctggcagtgcgccacactcctgcctccctgcccaaaggacgtagtggctgctgctgatcgtctgcactgctgttccaggggcaggaggtttgctgcaaatcaggtacccccag

SEQ ID NO: 304976 - DNA, 120 bp, Artificial Sequence
  ENSG00000133477_50 (sequence is synthesized)
ctcagtgagcagaaccagtccaaggttgagtgaggagaagggcaagaagggcaggcacagccgtgagtatgttctggggctaagtaaccatgagatcagcccagagaccttgcacagtta

SEQ ID NO: 304977 - DNA, 120 bp, Artificial Sequence
  ENSG00000133477_51 (sequence is synthesized)
ggcaggcctggacttctcgcccttccccttgcagcttctgctctcccagctagggactgaggaaagccctgcttctagatgccatgtgctgctgcctggcacgataggtacccatctgtc

SEQ ID NO: 304978 - DNA, 120 bp, Artificial Sequence
  ENSG00000133477_52 (sequence is synthesized)
cttggggttcctgagcctggagagcgggctttgtgagcactggtgcctcacctgcctggctcagctctgcagccacaatatatgcttaatacctatttgttaaatgattgaagacttgac

SEQ ID NO: 304979 - DNA, 120 bp, Artificial Sequence
  ENSG00000133477_53 (sequence is synthesized)
tgccattcagtacagagaattagccaggtgaataaacaggatgtgtcatagaggttctagaattgatcatgaccctttctgtctcattcctgacttctaataccgtatatgccaaatggg

SEQ ID NO: 304980 - DNA, 120 bp, Artificial Sequence
  ENSG00000133477_54 (sequence is synthesized)
gttctgctgtgatttaatttcttaaggactgggtttatcaaaagtccctcctgatctaatcctttcctctaggaaggcttctcctttcttcatctgtcctaagtgcatggtcttcatctc

SEQ ID NO: 304981 - DNA, 120 bp, Artificial Sequence
  ENSG00000133477_55 (sequence is synthesized)
ctgggtggtccagactaggtggcactgggcctgcaggcctctagctgctcaaggatggccctgtctgcatgcttcctttcaaaagctagcatagaaaggagggcccaaggtgaggaaatt

SEQ ID NO: 304982 - DNA, 120 bp, Artificial Sequence
  ENSG00000133477_56 (sequence is synthesized)
tgtccaaagtcacccaatgagtcgcaggaagggctagaatctggttatctggaccgtcctagagcactttcacagtgacagccggctggaatcaagttttcatttagaaaaatggctaga

SEQ ID NO: 304983 - DNA, 120 bp, Artificial Sequence
  ENSG00000133477_57 (sequence is synthesized)
agttagggcattgcctgcagccactgaaaagcagctttaggagcagatgtccacgtaatagaaggagatgggctagggcctgccacggaagccagcaagcgcgtgggagctgggggagga

SEQ ID NO: 304984 - DNA, 120 bp, Artificial Sequence
  ENSG00000133477_58 (sequence is synthesized)
aaggagcaaaaggcaagaacaggcagtatgtccgcggtgcccacagtgctgtgggtacaagcaaggggaaaagagcccatggtgtgcagaaaaccatgcgtcatgattcttatttcctgc

SEQ ID NO: 304985 - DNA, 120 bp, Artificial Sequence
  ENSG00000133477_59 (sequence is synthesized)
tcgcagctttgactctctgcctcatctcttcctggaagtgtcttggaagttaggcgactgcacagggaaaggttcgctgcagtgcttgcaggcctgcacccatttattcatccggtggat

SEQ ID NO: 304986 - DNA, 120 bp, Artificial Sequence
  ENSG00000133477_60 (sequence is synthesized)
atttgctgggtgcccggcctggggatccatggtgagcgaggaaggcatggtattgaagtggtatgcctgcatgaccttggcgggggcgcatggcatagagaggacaggcttcagaacagg

SEQ ID NO: 304987 - DNA, 120 bp, Artificial Sequence
  ENSG00000133477_61 (sequence is synthesized)
tttcctcatgtgtcaaatggggatgatctcgagacgactctccagagtaaccacgtgaagcacctagcacaggggctgacgcaaacagctgggcatcggaggagcctccagggttgtgac

SEQ ID NO: 304988 - DNA, 120 bp, Artificial Sequence
  ENSG00000133477_62 (sequence is synthesized)
ctccagtggcttattttccttttgggatcttctctcctagatcctcccctttaattccctgtgaaatttaccactttcatattgaatcgttggcacacagggctaactgcttgttcacct

SEQ ID NO: 304989 - DNA, 120 bp, Artificial Sequence
  ENSG00000133477_63 (sequence is synthesized)
gcacacagggctaactgcttgttcacctgaaggaagctacagagttcaggtttcttttttctttctttctttcttttttgcttttttaagatgatcttgctccgtcacccaggctggagt

SEQ ID NO: 304990 - DNA, 120 bp, Artificial Sequence
  ENSG00000133477_64 (sequence is synthesized)
cctcaaactcctgggctcaatgagttccttgagatcttccatcctcagcttcccaagtagctagtagtagtagtggcttgcaccaacgctcctgccctaattttcaatatttttttgtag

SEQ ID NO: 304991 - DNA, 120 bp, Artificial Sequence
  ENSG00000133477_65 (sequence is synthesized)
ctcctgccctaattttcaatatttttttgtagagataggatctcactgtgttacccaagctagacttgaactcctggcctcaagcgatccttccgccttggcctcccaaagtgttgggat

SEQ ID NO: 304992 - DNA, 120 bp, Artificial Sequence
  ENSG00000133477_66 (sequence is synthesized)
ccaggtttcgacagaaagggagagaaaacctgccagagatgccatttcggagccactctgcttggcagggacctgtgttcccctcatgcaggttcatccttagagggctgcggtcttatc

SEQ ID NO: 304993 - DNA, 120 bp, Artificial Sequence
  ENSG00000133477_67 (sequence is synthesized)
tggttgtgcaaaagtcccacaacctttctggattgatagtttgtggtgaaataaacaattttagtttgtttggagaatcttttgtatacaaaatacaaataaaacctaaatcaaagaaac

SEQ ID NO: 304994 - DNA, 120 bp, Artificial Sequence
  ENSG00000133477_68 (sequence is synthesized)
agagcatgtccggagaagtctgccaacccttctccaggccatggggcttcccaagccaggcctgtactcctcatgtagattccacaccccgccttgatgtctttggctttcacactagtg

SEQ ID NO: 304995 - DNA, 120 bp, Artificial Sequence
  ENSG00000133477_69 (sequence is synthesized)
actatagcctggtgggacggggtctaggggccacagtcctggtcctgcgcaggtggccctggagagaagccttggagaacttggagaagcccacgcggctggcagcatcatggtgagagg

SEQ ID NO: 304996 - DNA, 120 bp, Artificial Sequence
  ENSG00000133477_70 (sequence is synthesized)
ctgacaccttgtggctggctggcagcatacgtccttcctcccctaggtcagctagacggccaaagcagggatctgcaagctccttctgtggcgggccaaaaagtgaacattcagtgtgtc

SEQ ID NO: 304997 - DNA, 120 bp, Artificial Sequence
  ENSG00000133477_71 (sequence is synthesized)
tgttgcagctactgtcatagcactgaggcacccctagacagtacagaaacaagcaggtgtggccatgttccagtgaaaccttatgaatactgaaatctgaatccataattttcatgtatc

SEQ ID NO: 304998 - DNA, 120 bp, Artificial Sequence
  ENSG00000133477_72 (sequence is synthesized)
aaatctgaatccataattttcatgtatcacaaagtagtaatattcttttaatatgcaaaaaccggccaggtgcggtggctcatgcctgtgacctcagcactttgggaggccgaggtgggt

SEQ ID NO: 304999 - DNA, 88 bp, Artificial Sequence
  ENSG00000133477_73 (sequence is synthesized)
gcacttcagcctgggcaacagagctacaaaagcaaaaaccagtcttagctcacaggctgtgccaaaacaggcagtgggctggatttgg

SEQ ID NO: 305000 - DNA, 120 bp, Artificial Sequence
  ENSG00000133477_74 (sequence is synthesized)
ctcacaggctgtgccaaaacaggcagtgggctggatttggtcctcaagcctgggcttgctgacctctggcctaggacacctctcctttatgcctccgctcccaacacggactctcaactc

SEQ ID NO: 305001 - DNA, 120 bp, Artificial Sequence
  ENSG00000133477_75 (sequence is synthesized)
tcatgtttaccttgtcattgttctgtcaagaggaattcactagtctcactcctccaaccagaccgctgccactaaggcttcttctgaacagaaattctggatttgttctcacccatttca

SEQ ID NO: 305002 - DNA, 120 bp, Artificial Sequence
  ENSG00000133477_76 (sequence is synthesized)
taaatgtacataagcacccatcaggtgccaagccctgtgctgagatgcctgcagagcccagagttttcaccaactttttttttaagagatgggggtctctgttgccaggttggagtgcaa

SEQ ID NO: 305003 - DNA, 80 bp, Artificial Sequence
  ENSG00000133477_77 (sequence is synthesized)
tttaagagatgggggtctctgttgccaggttggagtgcaatgacataatcataactcaccgcaacctcaaactcctaggt

SEQ ID NO: 305004 - DNA, 71 bp, Artificial Sequence
  ENSG00000133477_78 (sequence is synthesized)
ctacaggcatgcaccaccctgcccagctaattaaaaaaaaaactttagggatggggtcttgctatgttgtc

SEQ ID NO: 305005 - DNA, 120 bp, Artificial Sequence
  ENSG00000133477_79 (sequence is synthesized)
ctcaacatttaattttttcattcattcattcgttcattcatttgttcaaacgaacttattgagaacttactgtgttccaggcactgtgataagatagacctggcctttaccttcaaatgt

SEQ ID NO: 305006 - DNA, 120 bp, Artificial Sequence
  ENSG00000133477_80 (sequence is synthesized)
tcagaacatggttaggaagatggatactgggaggcaagtgttctgatgggaaagcacagcatgtaaagaagcccagaggaggcacttaacctgggggagaagaacagggtaggcttcctg

SEQ ID NO: 305007 - DNA, 120 bp, Artificial Sequence
  ENSG00000133477_81 (sequence is synthesized)
gaggaggaggtaatctctgagccgatacctgaggagtgaatggaggaggggacaatgaggcaaggcattccagggaaaggtccagagcctagacagaactcttttaggagaattatgaga

SEQ ID NO: 305008 - DNA, 120 bp, Artificial Sequence
  ENSG00000133477_82 (sequence is synthesized)
atcacaattatcgaggacacagtgaagactcagataactcaaatataggttttgcccgcaaagccttcctgtctggtgggtgagacagtctacagcaagctgctccaaggatatggagaa

SEQ ID NO: 305009 - DNA, 120 bp, Artificial Sequence
  ENSG00000133477_83 (sequence is synthesized)
aaaagtttttcctctggccttgtaggattggttattactgagcctggagtacgcaaaggccagcgagtgctcctaaggcagggagggggctgccttcactatgggtgctcaggaaatctg

SEQ ID NO: 305010 - DNA, 120 bp, Artificial Sequence
  ENSG00000133477_84 (sequence is synthesized)
ccaggggaagggagatgtgggcctgcctcggctgcagaaacccctcagaggaggaggaggggcttgaactgagctttgaagaaagtgtagacttggggacaggcagaggaagagggggca

SEQ ID NO: 305011 - DNA, 120 bp, Artificial Sequence
  ENSG00000133477_85 (sequence is synthesized)
tcataggcagcagaaaccacatggacaaactctctgccggagaatgggcatggccgggctgaggggtccctggacaggaaccagccttccctatgcacctgcacccgtgagtctcacaac

SEQ ID NO: 305012 - DNA, 120 bp, Artificial Sequence
  ENSG00000133477_86 (sequence is synthesized)
agccccaacaggcaagtgttattttcctcaattctaccaattaaaaactgaccttgggcaactgcttaacctatctctgccttactttcttcatctgtatctacctcagaaagttactat

SEQ ID NO: 305013 - DNA, 120 bp, Artificial Sequence
  ENSG00000133477_87 (sequence is synthesized)
gaggactgaataagctcatacatatacaatgcttggagcagaggctggtactagagctggcttcatgggcatgaaacctgtgaacacagaaccccatgctttcattttccacttagtcct

SEQ ID NO: 305014 - DNA, 90 bp, Artificial Sequence
  ENSG00000133477_88 (sequence is synthesized)
tgaacacagaaccccatgctttcattttccacttagtcctgcctggcatagtatgcagtttttttaatttgagatggagtctccctttgt

SEQ ID NO: 305015 - DNA, 63 bp, Artificial Sequence
  ENSG00000133477_89 (sequence is synthesized)
ttttggccagcctggtcttgaacctctgacttccatgatccacctgcctctgcctcccaaagt

SEQ ID NO: 305016 - DNA, 120 bp, Artificial Sequence
  ENSG00000133477_90 (sequence is synthesized)
ctgcctctgcctcccaaagtgctgggaggattacaggcatgaaccactacgcctggcctggtatgtgggttaaaatgttaggttttatcattatcttaggtggagaataacaaatccgat

SEQ ID NO: 305017 - DNA, 120 bp, Artificial Sequence
  ENSG00000133477_91 (sequence is synthesized)
gaataacaaatccgattcaatatattcattttagaaacgaggaaactgaagcttagatagtttgtgtgacttgcaaaaagtcacgcagcaaacaagctgcagaatgaagggtggagatgg

SEQ ID NO: 305018 - DNA, 120 bp, Artificial Sequence
  ENSG00000133477_92 (sequence is synthesized)
agagatagaattctcatcttagaggtgaaagtaggataatgacccagctgagcttgctgagtcctgcgagcgtcgcacgcccccagagacaacataaggagagaagtgcagacagattcc

SEQ ID NO: 305019 - DNA, 120 bp, Artificial Sequence
  ENSG00000133477_93 (sequence is synthesized)
tttgaaggagcttagagaaagagatggtagggaaaagagcatgaacagttgtagaggtaggaggaaagctggctatttggggaagcaaagaaaagattctcagagtaaaacgtattggtg

SEQ ID NO: 305020 - DNA, 120 bp, Artificial Sequence
  ENSG00000133477_94 (sequence is synthesized)
aagccatggaaacaaggactgagaaagtctcttggatcttggccacaaaaaggttatagatgagcttagagaaatgaatttcagtagagttagggctagaagccaggttcagagagagaa

SEQ ID NO: 305021 - DNA, 120 bp, Artificial Sequence
  ENSG00000133477_95 (sequence is synthesized)
aacgagagagcattcctggtggtggagatggccgcaggccattatttaaaaagctaggataagaaaatagagaagaaagggaaggaagctatttgaagggagtgggagaaaagccagatc

SEQ ID NO: 305022 - DNA, 120 bp, Artificial Sequence
  ENSG00000133477_96 (sequence is synthesized)
tcagttgggacgtggaggaaggaccaccagaggcagtaatttagccggaaagaggtgtatttctttccttgagtttatagggggtaaagaggatggggctgagatactaaagactacgag

SEQ ID NO: 305023 - DNA, 120 bp, Artificial Sequence
  ENSG00000133477_97 (sequence is synthesized)
gacaactgttcattgagggctggtcatctccccagctgcactgtggggttcccaagtcagacatcccagaggcaatatagcagcgtggacaagagcttactcgttggagtcagaccgcct

SEQ ID NO: 305024 - DNA, 120 bp, Artificial Sequence
  ENSG00000133477_98 (sequence is synthesized)
aggttcaacgatgggttagttagcccttcagtgcctccattttcctatctagaaaatgtggataacaatggttgttgtgaagattaacagccataatccacgtaaagccctcagtacagt

SEQ ID NO: 305025 - DNA, 120 bp, Artificial Sequence
  ENSG00000133477_99 (sequence is synthesized)
gtatgacacacagcaagtgtccaccaaagggtagttattattaaccataatcctggttctcttgtgagctgcctcctgtgtgtctagcattggccagcacacatgagggggtccagtgtt

SEQ ID NO: 305026 - DNA, 120 bp, Artificial Sequence
  ENSG00000133477_100 (sequence is synthesized)
tgctgcttaactaagtagcttctcaggaagtgtggtcataaaaaatgataggtgatttagaaggtgagacagacacaagggatgtgttgcacagtaaatgctcccagacatgcaataaat

SEQ ID NO: 305027 - DNA, 120 bp, Artificial Sequence
  ENSG00000133477_101 (sequence is synthesized)
gcttataagcatgccctctgtaatcagccctctttagagagtttccctgcctcattgctcttggtctttggcaatggctacacccactgcccaagcaagcagtatcagctgtcagctgtc

SEQ ID NO: 305028 - DNA, 120 bp, Artificial Sequence
  ENSG00000133477_102 (sequence is synthesized)
cccttgtcttttggatcagattcctttacagggatcttcccattgttataagcttcaagaattggagaatgcttaatgaacacttccaaattcttcatagctatgaggggccagtgcaaa

SEQ ID NO: 305029 - DNA, 120 bp, Artificial Sequence
  ENSG00000133477_103 (sequence is synthesized)
gggcggaaggagttcttctgtgtcacagaaattagagctggagcagatccagcttgctatccccccttcccccagcttgtgggttattgcagaattgttcacaaaaattcccattgcctt

SEQ ID NO: 305030 - DNA, 120 bp, Artificial Sequence
  ENSG00000133477_104 (sequence is synthesized)
ggaatttgtccaagccgagggcagggatcacaacacaacctctcaagggaaaaaaggaaggcctgttgcttgagatggctcagagcacttttggtagccagccaaggcagctatcactca

SEQ ID NO: 305031 - DNA, 120 bp, Artificial Sequence
  ENSG00000133477_105 (sequence is synthesized)
tgaaatctgccttcccctccagcaaaaagccaactgtatagaacaccacatatagagcgctaagaatagcacagcgctccaagaacatagtgcacttggcctgcatacaagtgtgcaggg

SEQ ID NO: 305032 - DNA, 120 bp, Artificial Sequence
  ENSG00000133477_106 (sequence is synthesized)
cttaacgagtctttttactctgaaagctgggtgggttggaacaaacaaacagaaaaatattttccccaagtagcatgcagagaggaaatgagagcaagcacaagagagcaccctggcata

SEQ ID NO: 305033 - DNA, 120 bp, Artificial Sequence
  ENSG00000133477_107 (sequence is synthesized)
gcattctctgacctgggctgccttttcagggtatgagttgattccgcaggcaccaaggcatgcctgtaagccctacagggcagacgccctcaccccaatcattggcttaacattcacacc

SEQ ID NO: 305034 - DNA, 120 bp, Artificial Sequence
  ENSG00000133477_108 (sequence is synthesized)
aggctgagtaagccccaaaagtcctgccattggctctgacaggaattgaaacccatcttctccacaataaatatttgattgacagattggcttccttcctataagtatagaaagcgaggg

SEQ ID NO: 305035 - DNA, 120 bp, Artificial Sequence
  ENSG00000133477_109 (sequence is synthesized)
caggttccatccaaagccgcagttctgggtgatgagagctctgagagcccagaaaagaccctgaaccacatcccactgtttgttggaagaagaaactcatttgtgggtctgttcataaaa

SEQ ID NO: 305036 - DNA, 120 bp, Artificial Sequence
  ENSG00000133477_110 (sequence is synthesized)
gagtctgggaagatagtctccttaacagtgtctggatgtaacagactatgggcggcttttactttataactttctatattgtctgaaatacagaatattaaatattgagttaatattata

SEQ ID NO: 305037 - DNA, 60 bp, Artificial Sequence
  ENSG00000133477_111 (sequence is synthesized)
aatattgagttaatattatatttactcaatgttagctcactgcagccttgaactcccagg

SEQ ID NO: 305038 - DNA, 120 bp, Artificial Sequence
  ENSG00000133477_112 (sequence is synthesized)
cagcatcccaagtagctgggactgtaggcgcaggccaccatgcgcaactatttattttctttctttttgtagaaatgggctctgcctgtgttgctctagctagtctcaagctcctggcct

SEQ ID NO: 305039 - DNA, 120 bp, Artificial Sequence
  ENSG00000133477_113 (sequence is synthesized)
caagcaatccttccgccttggcctctcaaattgctgggattacaagcataagccaatgtgcctggcctcaatgttacttttatgatcagaaaaacggccatcttatttggaaattatttt

SEQ ID NO: 305040 - DNA, 120 bp, Artificial Sequence
  ENSG00000133477_114 (sequence is synthesized)
cctattctcaagtgggcaaataggagaaggtttcaggcatttgttttgtctctgggagggaaggcacaatgaggtggagtggacaaattgctgaggcctttatggacaaagattctaaga

SEQ ID NO: 305041 - DNA, 120 bp, Artificial Sequence
  ENSG00000133477_115 (sequence is synthesized)
agaacaggctttggccatctctggatattcccattctgctccctgccaccagagagcaaatgtcgtaggtcaccacacatcaccagtctcttgcctagctaaccgtaactcattctttag

SEQ ID NO: 305042 - DNA, 120 bp, Artificial Sequence
  ENSG00000133477_116 (sequence is synthesized)
ttctccttgaaggtgtcacttcttccaggaagccatttctgtccctcccgagatggagtcccatgtccctaccatttgcttccagggcaccttctcacagcactgcatcatggttatctg

SEQ ID NO: 305043 - DNA, 120 bp, Artificial Sequence
  ENSG00000133477_117 (sequence is synthesized)
cttatctgctggacacccctactcgactgaggtccttgaaggaagagagagtgtatcactcatctgcatagcctttgtaacttagtaaaagtgcctgacatgctcactaaacatttactg

SEQ ID NO: 305044 - DNA, 120 bp, Artificial Sequence
  ENSG00000133477_118 (sequence is synthesized)
agtaattatttatttgggggccttttacgatcagaacaatgtgaaggacacaaagatgaaaaagaaaccatctgcttcaaggtacttacaactgaaatgtatcaaacaattacccagaaa

SEQ ID NO: 305045 - DNA, 120 bp, Artificial Sequence
  ENSG00000133477_119 (sequence is synthesized)
gtcaagcaccaacttaagtgctaaaataggggtccaagcaaccaactttgaagattaggaaggttttagattctgaatgtttctcattcattgtgtttttgagttcagaatccccatact

SEQ ID NO: 305046 - DNA, 120 bp, Artificial Sequence
  ENSG00000133477_120 (sequence is synthesized)
ggaaggctaatatggggtatgtgcatacaattttaaggactcacgttcttacaacctatattagaatttgacgcacgatctttcttctgtccttcttgcagttgccctaggaatacatgc

SEQ ID NO: 305047 - DNA, 120 bp, Artificial Sequence
  ENSG00000133477_121 (sequence is synthesized)
cacttactcttaattgacgtttatgaaataccttggcttcatttgctgaaaggctctaagtgttgagcattgttactatgttacaatggttgttttattattaaagcagtgccaaggagg

SEQ ID NO: 305048 - DNA, 120 bp, Artificial Sequence
  ENSG00000133477_122 (sequence is synthesized)
ttacacaacagcttggatcaggaagtgaaacaagggcggtgatcccactgaagctacaggggatggggatttgggacggtaaaatgttaattacccaagatggaatgtgggctagagtcc

SEQ ID NO: 305049 - DNA, 120 bp, Artificial Sequence
  ENSG00000133477_123 (sequence is synthesized)
agcgttgtgctcctggagatcatttcggtcgcaaaagctcactggcaatgggtcctaagcgtcctgccctcctctggctgaaatgttggattcacttcgatgaatgctgctatagggaaa

SEQ ID NO: 305050 - DNA, 120 bp, Artificial Sequence
  ENSG00000133477_124 (sequence is synthesized)
gaacccagtggccaccagccaggagcacacgtcttgctcagcatcaactatcctggaagatttccaggagctgaagggctgttctctttgcatgcaataaattattcatttctaagacga

SEQ ID NO: 305051 - DNA, 120 bp, Artificial Sequence
  ENSG00000133477_125 (sequence is synthesized)
ggggagtgcctgtgtggctgagggacacgtccaagctgcagtcggctctgtggttgtggacacctggcagagccatgccttctctagtctgggtcatccaaacacacgtggggtgcaggg

SEQ ID NO: 305052 - DNA, 120 bp, Artificial Sequence
  ENSG00000133477_126 (sequence is synthesized)
gccaggtggagccctcttgtcgtttttgttatctaacggtaattacggagtccagaaagagaattggaaatgccggcagtttaattaaagctgaatggcaggagaggggcatttggaggc

SEQ ID NO: 305053 - DNA, 120 bp, Artificial Sequence
  ENSG00000133477_127 (sequence is synthesized)
tccctccctgccttcactccccgtcctgccgcccaggcaggatgtcagatgaggagacgttgagctcatcaaacacccaatgagaagtcttacaacatcagaagctgtctgccaatgcgc

SEQ ID NO: 305054 - DNA, 120 bp, Artificial Sequence
  ENSG00000133477_128 (sequence is synthesized)
ctgctcaggtcatcgtaactgccccggagtggacttacagcaagaccatgtgtagactgggaaactcttggttcttatttgcaaagccagagtaaggggaccaatctggataggctggca

SEQ ID NO: 305055 - DNA, 120 bp, Artificial Sequence
  ENSG00000133477_129 (sequence is synthesized)
acttggaaggattgtgcatccgtttgaccactggacaaatatttagaggtttactgcatgtgctaagcatactttagtggaaagcagatacctaaaacacacctctgctcttaaatagcc

SEQ ID NO: 305056 - DNA, 120 bp, Artificial Sequence
  ENSG00000133488_0 (sequence is synthesized)
acaaccaggcggcagcggatacaaggccaggcggcggcgggcgggcggacctgcgccctgagcctttctgcgcccgcgggcaccatgagcagccgagtcggggacctgagcccccagcag

SEQ ID NO: 305057 - DNA, 120 bp, Artificial Sequence
  ENSG00000133488_1 (sequence is synthesized)
caggaagcgctggccaggttccgggagaacctccaggacctgctgcccatactgcccaatgctgatgactacttcctcctgcgctggctgcgagctcgaaactttgacctgcagaaatcc

SEQ ID NO: 305058 - DNA, 120 bp, Artificial Sequence
  ENSG00000133488_2 (sequence is synthesized)
gaagacatgctccgaaggcacatggagttccggaagcaacaagacctggacaacattgtcacatggcagccccctgaggtcatccagctgtatgactcgggtggtctttgtggctacgac

SEQ ID NO: 305059 - DNA, 120 bp, Artificial Sequence
  ENSG00000133488_3 (sequence is synthesized)
tacgaaggctgccctgtgtacttcaacatcattgggtccctcgaccccaagggtctcctgctgtcagcctccaagcaggatatgatccggaagcgcatcaaagtctgtgagctgctgttg

SEQ ID NO: 305060 - DNA, 120 bp, Artificial Sequence
  ENSG00000133488_4 (sequence is synthesized)
catgagtgtgagctgcaaactcagaagctgggcaggaagatcgagatggcgctgatggtgtttgacatggaggggctgagcctgaaacacctgtggaagccagctgtggaggtctaccag

SEQ ID NO: 305061 - DNA, 120 bp, Artificial Sequence
  ENSG00000133488_5 (sequence is synthesized)
cagttttttagcatcctggaagcaaattatcctgagaccctgaagaatttaattgttattcgagccccaaaactgttccccgtggccttcaacttggtcaagtcgttcatgagtgaggag

SEQ ID NO: 305062 - DNA, 120 bp, Artificial Sequence
  ENSG00000133488_6 (sequence is synthesized)
acacgcaggaagattgtgattctgggagacaactggaagcaggagctgacaaaattcatcagccccgaccagctgcctgtggagtttggggggaccatgactgaccccgatggcaacccc

SEQ ID NO: 305063 - DNA, 120 bp, Artificial Sequence
  ENSG00000133488_7 (sequence is synthesized)
aagtgcctgaccaagatcaactatgggggtgaggtgcccaagagctactacctgtgcgagcaggtgaggctgcagtatgagcacacgaggtccgtgggccgcggctcctccctgcaggtg

SEQ ID NO: 305064 - DNA, 120 bp, Artificial Sequence
  ENSG00000133488_8 (sequence is synthesized)
gagaacgagatcctgttcccgggctgtgtgctcaggtggcagtttgcttcagatggtggggacatcggctttggggttttcctgaagaccaagatgggggagcagcagagtgctagggag

SEQ ID NO: 305065 - DNA, 120 bp, Artificial Sequence
  ENSG00000133488_9 (sequence is synthesized)
atgacggaggtgctgcccagccagcgctacaatgcccacatggtgcctgaggatgggagcctcacctgcctccaggctggcgtctatgtcctgcgcttcgacaacacctacagccggatg

SEQ ID NO: 305066 - DNA, 120 bp, Artificial Sequence
  ENSG00000133488_10 (sequence is synthesized)
ccagccacctctacctgtgcactccaaccccttcacacccacccctctgacccctgccttcccaggcagggtggtgctggaggtggctgcagagagccacttgtcccacgtcaccatttc

SEQ ID NO: 305067 - DNA, 120 bp, Artificial Sequence
  ENSG00000133488_11 (sequence is synthesized)
atctcattgtaggctcacctggcacagtggccaagcaggaaggggccaccagtgcatagcccatgctgaagattcagacaggaacctctttccctgttcccagagaatgcggctgagaat

SEQ ID NO: 305068 - DNA, 120 bp, Artificial Sequence
  ENSG00000133488_12 (sequence is synthesized)
gagaacgctgaagatgatccagtccactgaggatgggtcctgcttgcagaagctgccctttcacccatcttgacaagatccagccacccaggactcacccatgcctggtgttccagcttc

SEQ ID NO: 305069 - DNA, 120 bp, Artificial Sequence
  ENSG00000133488_13 (sequence is synthesized)
agggggtgtgcgtggttcctaggtcctgtggacatcacagcttcaggcctgaagagcagagaagccctgttctctgcatgtaggaggtcagcaggggtgggcaggcccagctggaggcag

SEQ ID NO: 305070 - DNA, 120 bp, Artificial Sequence
  ENSG00000133488_14 (sequence is synthesized)
ggaggcagctgggtgagggtcctggttccagcagagcactggggcccatccaagtttgttctgccaccactggatggaaaattggaaatggactgggcgtggtggctcacgcctataatc

SEQ ID NO: 305071 - DNA, 120 bp, Artificial Sequence
  ENSG00000133488_15 (sequence is synthesized)
caaacaaacaaacaaacaaacaaataaagaaagaacattggacatggagaggtggggcctggcatgggtaaccatcagaggaaaaagccatgctcagccttccagttgagtgggtaacga

SEQ ID NO: 305072 - DNA, 120 bp, Artificial Sequence
  ENSG00000133488_16 (sequence is synthesized)
ggtaacgactgagtctccagggaattcccagtgacctcccctccacacctgctgtgatcctgccaacatttagctttggttctcttggcagctgcaccattcatgggtgcatatacgtag

SEQ ID NO: 305073 - DNA, 120 bp, Artificial Sequence
  ENSG00000133488_17 (sequence is synthesized)
agtctgaacaggtgctctgctgctagaaacagcaaaccatctagattaaactcctaaagccagtgccacgaggcattcctgttccaactgggtgtttgagcagattggcaaaaaaaaaaa

SEQ ID NO: 305074 - DNA, 120 bp, Artificial Sequence
  ENSG00000133561_0 (sequence is synthesized)
acttcctgttcctccatctccagcggacactgctctttcaagggcaggtctccagcccagctctctgaaaacattttgctgaaaatataagcaaacatcggccttgtcctccttgtgttc

SEQ ID NO: 305075 - DNA, 120 bp, Artificial Sequence
  ENSG00000133561_1 (sequence is synthesized)
atacactgtggaagcttttctctgcctcctccgtgagagtgcgtggccgggagaccagaaacgtggtcctttctcttgcctgtgagctggtgcagagatggaggaagaagaatatgaaca

SEQ ID NO: 305076 - DNA, 120 bp, Artificial Sequence
  ENSG00000133561_2 (sequence is synthesized)
aattccccaggagaatcccccagaagagctgtcccaggatcctgtgctggagctgtcaggaggtctaagggagaaagaacagaagaccccaaggagactgaggctcattctcatggggaa

SEQ ID NO: 305077 - DNA, 120 bp, Artificial Sequence
  ENSG00000133561_3 (sequence is synthesized)
aacagggagtgggaagagtgcaacaggaaacagcatcctcggcagggacgtcttcgagtctaaactcagcaccagacccgtgaccaagacctcccagagacggagccgagagtgggctgg

SEQ ID NO: 305078 - DNA, 120 bp, Artificial Sequence
  ENSG00000133561_4 (sequence is synthesized)
gaaggagcttgaggtgattgacacacccaacattctgtccccccaggtctcgccagaggtggcagacgctatctgccaagccatcgtcttatccgccccagggccccacgccgtgctcct

SEQ ID NO: 305079 - DNA, 120 bp, Artificial Sequence
  ENSG00000133561_5 (sequence is synthesized)
ggtgacacaactgggccggttcacggatgaggatcagcaggtggtcaggcgcctgcaggaggtctttggagtgggggttctgggtcacaccatcctggtgttcacccggaaggaagacct

SEQ ID NO: 305080 - DNA, 120 bp, Artificial Sequence
  ENSG00000133561_6 (sequence is synthesized)
ggctggcggctccctggaagactatgtgcgagagaccaacaaccaggcccttgcctggctggatgtgacccttgcacggcgccattgcggcttcaacaacagggcacagggggaggagca

SEQ ID NO: 305081 - DNA, 120 bp, Artificial Sequence
  ENSG00000133561_7 (sequence is synthesized)
ggaggcccaactgcgagagctcatggagaaagttgaagccattatgtgggaaaacgaaggagattattacagcaacaaggcttaccaatatacccagcaaaactttcggctgaaagaact

SEQ ID NO: 305082 - DNA, 120 bp, Artificial Sequence
  ENSG00000133561_8 (sequence is synthesized)
acaggaaaggcaagtaagccagggccaaggctctgaggacgtgcctggtgaggagtcttggctggaaggactgtcccagatccagaaggaatctgaggaagcccacagatgcctgctggg

SEQ ID NO: 305083 - DNA, 120 bp, Artificial Sequence
  ENSG00000133561_9 (sequence is synthesized)
gaaggctgacctttgagcctgtgctggacttgagccaaggacaccatcagcctttgcacccccctgtgtccagccctctgtttctctttccatcccatggagtgcttcccagtctccagg

SEQ ID NO: 305084 - DNA, 120 bp, Artificial Sequence
  ENSG00000133561_10 (sequence is synthesized)
tcatgacgtctggtgtaggaagaggggcatggggcttgaggacagggtccagcatgcccagatcacattccagttccttcattccttcttccagaacatctgggtcctccctcctctgtg

SEQ ID NO: 305085 - DNA, 120 bp, Artificial Sequence
  ENSG00000133561_11 (sequence is synthesized)
ccccaacagcacgctgtcttcctattggaccttctatctcattgcattgcctttcatgagttacttgtctatactctgatagaaccaaagtttcttgagggcaggcctgtatcttttact

SEQ ID NO: 305086 - DNA, 120 bp, Artificial Sequence
  ENSG00000133561_12 (sequence is synthesized)
tctgtgtaacttccacagcttttgactgcattggagtcatgcagtcacgtttggtgcggcaactccatgcaagctgttgaccagatgacttctcatctctccccacaccatgatggttta

SEQ ID NO: 305087 - DNA, 120 bp, Artificial Sequence
  ENSG00000133561_13 (sequence is synthesized)
aggtgcctgttgtgtctggtggctggaacatggcagtggtgctgagacatggggagggttggagactgggtggggagggttggagactgggctgggaggagagcaagcaggaacagggat

SEQ ID NO: 305088 - DNA, 120 bp, Artificial Sequence
  ENSG00000133561_14 (sequence is synthesized)
gggagaagtttggggcagggtatccaagaagtcagactgtggtcaagtaggtggtcccttgccctggctacagaacatggaagcccctagggatgcaagtggacttgggcagaggaggtc

SEQ ID NO: 305089 - DNA, 120 bp, Artificial Sequence
  ENSG00000133561_15 (sequence is synthesized)
acaccaccccaccaaggtagacttagattagagatgacttgcatctgttacttcccctttttccatgggtttcatggcccctcatgatatttgccttctgctcctagaaggcacagacta

SEQ ID NO: 305090 - DNA, 120 bp, Artificial Sequence
  ENSG00000133561_16 (sequence is synthesized)
ctttcaacctgcctcgcccttcactgccacccctcccttctcccttgataatgggagcatgtggatggggtgtctgcgtgtgcaaacgggttccctagcaaagtatttgtgggggtccaa

SEQ ID NO: 305091 - DNA, 120 bp, Artificial Sequence
  ENSG00000133561_17 (sequence is synthesized)
tgcaaggaggcagggaagaaagggggcctgcaaaggaagcagtagagtgacttaaacatcttgcgaggcagcctgcctggtttatgggagaactctgaagcccatgatgttttcctggaa

SEQ ID NO: 305092 - DNA, 120 bp, Artificial Sequence
  ENSG00000133561_18 (sequence is synthesized)
ggctgttcctacagacggggtttataagtactgatactggacaggatgagaagggagtaggatgtcatcctgtctcaggcctcggataggaagctgcctgccagcaagaggagactgatg

SEQ ID NO: 305093 - DNA, 120 bp, Artificial Sequence
  ENSG00000133561_19 (sequence is synthesized)
tgccccgggtgcaccccacctcctttgaggtccaagatgctcctggggagttgaccgacatttgggaagataataggaggcattggggaaactgctccccaatatattcctcttttcctt

SEQ ID NO: 305094 - DNA, 120 bp, Artificial Sequence
  ENSG00000133561_20 (sequence is synthesized)
tcttcaagctgcgtagcagggggcctttagctagtttctcccgagaggggcgggaagtacagctggtggagacagtgctgggagatgatcagaaatctcagggcacagcctcaggtctac

SEQ ID NO: 305095 - DNA, 120 bp, Artificial Sequence
  ENSG00000133561_21 (sequence is synthesized)
ctggacactcatccactgttggagatgctcaacagctagacacagatgctcacagccgacctgtggcctcttgctctgaagccatcccccatcttccctagacacagcagacatctgaga

SEQ ID NO: 305096 - DNA, 120 bp, Artificial Sequence
  ENSG00000133561_22 (sequence is synthesized)
aagcttcagcatttctcttgctaacagattcagaaaagtgtctcaaagcagagcacagagttatttggtgtttgctgaagacagcctttgtgccacaatcacttattaaataagcgatca

SEQ ID NO: 305097 - DNA, 120 bp, Artificial Sequence
  ENSG00000133561_23 (sequence is synthesized)
atttcccattgaactgaacatgcaacatttatcatacattcagttctcattcacactccttaagatttggtcagaatttttatttctgttcatgtcttctacttttctactcctgtatga

SEQ ID NO: 305098 - DNA, 120 bp, Artificial Sequence
  ENSG00000133561_24 (sequence is synthesized)
ataaaatattgatttgattacagtggctttgactataatgtgggagccaatttttgcctcagtcttcatttttatatttaccttgttattctcaggcatttttttcttctatgtgagagt

SEQ ID NO: 305099 - DNA, 120 bp, Artificial Sequence
  ENSG00000133561_25 (sequence is synthesized)
taaaatcattctgtaatttccccccaaaatcatattggtattctagttggcaatgtcttacatttatgttaagtttgagggaattggtagttcaagtataagttaattaaggccatttta

SEQ ID NO: 305100 - DNA, 120 bp, Artificial Sequence
  ENSG00000133561_26 (sequence is synthesized)
tttctaagtgaacagacttgaaactccagagctactgaagtaaaagttagaatcatttgcattttcattcagataggagataattttgtaaattttgatgctattattttaactctatta

SEQ ID NO: 305101 - DNA, 120 bp, Artificial Sequence
  ENSG00000133561_27 (sequence is synthesized)
gcttaagtaatgtcataatagaaaacacaagcatttgaccaaatgagatccattcagcgactaactggcaaggcactcaaaacatgtcattcattaaatgttgtttttatttacctcaaa

SEQ ID NO: 305102 - DNA, 120 bp, Artificial Sequence
  ENSG00000133561_28 (sequence is synthesized)
gagacaatgactgtttgccccaatactgaggcatagaagttccctggggaagaggtggggttcagaaaagagagatcagggaaagtcactcctcctgacacaaatctttctgaggcatct

SEQ ID NO: 305103 - DNA, 120 bp, Artificial Sequence
  ENSG00000133561_29 (sequence is synthesized)
gcctctttttaagctctgagttctagttatcctggctcaggataaaaataatcccaccactggtatcctccctttttctacttccgaggctgcaaagtgcaacagcagactcttctgact

SEQ ID NO: 305104 - DNA, 120 bp, Artificial Sequence
  ENSG00000133561_30 (sequence is synthesized)
caccttcaaggatgtgggcccagaatggtggcccagcgctggtttcagggcagatgttggtcttttacaatctgcccctgcagtctgggggtacacccagaggctcctggtgatgacaag

SEQ ID NO: 305105 - DNA, 120 bp, Artificial Sequence
  ENSG00000133574_0 (sequence is synthesized)
agtattgtgtgcaaaatcagagaggggtgcaagatcctgatttttcaggagttcaagcgacaatggcagcccaatacggcagtatgagcttcaaccccagcacaccaggggccagttatg

SEQ ID NO: 305106 - DNA, 120 bp, Artificial Sequence
  ENSG00000133574_1 (sequence is synthesized)
ggcctggaaggcaagagcccagaaattcccaattgagaattgtgttagtgggtaaaaccggagcaggaaaaagtgcaacaggaaacagcatccttggccggaaagtgtttcattctggca

SEQ ID NO: 305107 - DNA, 120 bp, Artificial Sequence
  ENSG00000133574_2 (sequence is synthesized)
ctgcagcaaaatccattaccaagaagtgtgagaaacgcagcagctcatggaaggaaacagaacttgtcgtagttgacacaccaggcattttcgacacagaggtgcccaatgctgaaacgt

SEQ ID NO: 305108 - DNA, 120 bp, Artificial Sequence
  ENSG00000133574_3 (sequence is synthesized)
ccaaggagattattcgctgcattcttctgacctccccagggcctcatgctctgcttctggtggttccactgggccgttacactgaggaagagcacaaagccacagagaagatcctgaaaa

SEQ ID NO: 305109 - DNA, 120 bp, Artificial Sequence
  ENSG00000133574_4 (sequence is synthesized)
tgtttggagagagggctagaagtttcatgattctcatattcacccggaaagatgacttaggtgacaccaatttgcatgactacttaagggaagctccagaagacattcaagacttgatgg

SEQ ID NO: 305110 - DNA, 120 bp, Artificial Sequence
  ENSG00000133574_5 (sequence is synthesized)
acattttcggtgaccgctactgtgcgttaaacaacaaggcaacaggcgctgagcaggaggcccagagggcacagttgctgggcctgatccagcgcgtggtgagggagaacaaggaaggct

SEQ ID NO: 305111 - DNA, 120 bp, Artificial Sequence
  ENSG00000133574_6 (sequence is synthesized)
gctacactaataggatgtaccaaagggcggaggaggagatccagaagcaaacacaagcaatgcaagaactccacagagtggagctggagagagagaaagcgcggataagagaggagtatg

SEQ ID NO: 305112 - DNA, 120 bp, Artificial Sequence
  ENSG00000133574_7 (sequence is synthesized)
aagagaaaatcagaaagctggaagataaagtggagcaggaaaagagaaagaagcaaatggagaagaaactagcagaacaggaggctcactatgctgtaaggcagcaaagggcaagaacgg

SEQ ID NO: 305113 - DNA, 120 bp, Artificial Sequence
  ENSG00000133574_8 (sequence is synthesized)
tgaattaatcatgacagcgttacagattgcttcctttattttgttacgtctgttcgcggaagattaaacttaatgaaaatctgtttgtattttctgcatattctctggcaaccttgcccc

SEQ ID NO: 305114 - DNA, 120 bp, Artificial Sequence
  ENSG00000133574_9 (sequence is synthesized)
atacttacttatttagcatagtcgagtgctctagtttctgtctctcaggcactcgtaactaaggaccaccattggccattggtagatgtttgattgacttaacaagagagggacaaattt

SEQ ID NO: 305115 - DNA, 120 bp, Artificial Sequence
  ENSG00000133574_10 (sequence is synthesized)
tcaatttgtgaaactccaaagcagaaagtattggtgcttgctaccttgtgaattcttccttagacatgcagagaaaatgtatgcaagagaccaaaaagatggctccaagctatgtcatgt

SEQ ID NO: 305116 - DNA, 120 bp, Artificial Sequence
  ENSG00000133574_11 (sequence is synthesized)
tacctgtaataaaatcttttcttctagattctttctatgttggcagataatctccccttgtagcttccactcacttattcttgcattcagagtcacaatgatcatcttacccatgtggtt

SEQ ID NO: 305117 - DNA, 120 bp, Artificial Sequence
  ENSG00000133574_12 (sequence is synthesized)
tttgagaaagaaagatcaattctttgtttgcagtaggtaatcttagagatggagatgattgtagaattattcctagatgagtgtcaatttatttaattccattgtcatataaggagtcaa

SEQ ID NO: 305118 - DNA, 120 bp, Artificial Sequence
  ENSG00000133574_13 (sequence is synthesized)
attgtttcttatcatttgttcattgaagaacagagacctgtctggaaaatcgatctctacaaattcaattaaataatgatccccaaatgctgaaaaagtgaaatacagcaattcaacaga

SEQ ID NO: 305119 - DNA, 120 bp, Artificial Sequence
  ENSG00000133574_14 (sequence is synthesized)
taatagagcaatgtttagtatattcagctgtatctgtagaaactctttgacgaacctcaatttaaccaatttgatgaatacccagttctcttcttttctagagaaagatagttgcaacct

SEQ ID NO: 305120 - DNA, 120 bp, Artificial Sequence
  ENSG00000133574_15 (sequence is synthesized)
cacctccctcactcaacactttgaatacttattgtttggcaggtcatccacacacttctgcccccactgcattgaattttttgcttatgttgtttataataaaacttttcaattatctca

SEQ ID NO: 305121 - DNA, 120 bp, Artificial Sequence
  ENSG00000133574_16 (sequence is synthesized)
aggtaagggaataggggtgtgtgtggtgggggtcgggacgaatgtgcgattttggtgaggagggacctgtatcttaaatcgtctggagttcaagcgacaatggcagcccaatacggcagt

SEQ ID NO: 305122 - DNA, 80 bp, Artificial Sequence
  ENSG00000133597_0 (sequence is synthesized)
gccaccccagcgatctcatactggcccctgggcgcacggtgaccctgcggctgcccggcccctgcctccgcccgcgcggc

SEQ ID NO: 305123 - DNA, 80 bp, Artificial Sequence
  ENSG00000133597_1 (sequence is synthesized)
gtgggtcctggctcctcccgttccgcagttggtgccgtctgacagccccttccgcgcggcgcggcgcggcgcggcgggtg

SEQ ID NO: 305124 - DNA, 120 bp, Artificial Sequence
  ENSG00000133597_2 (sequence is synthesized)
tgctggagggagcggggcgcggatccggcccagatgggcagctccgtccgcggggtcagggccgggcttcggcttcaccgcagcctcgcctgagcgggcgcctctgaagtggagggcggg

SEQ ID NO: 305125 - DNA, 120 bp, Artificial Sequence
  ENSG00000133597_3 (sequence is synthesized)
ccgcctgggccgcgggcctcgggaggatggtggcgccctggcgcgtctccgtcagggtttgcctgtcgcacctgaggtgcttcgagctcagacagggactcagcctcctgaggccctccg

SEQ ID NO: 305126 - DNA, 120 bp, Artificial Sequence
  ENSG00000133597_4 (sequence is synthesized)
agtgccctcgcgatgccaggctctgctggcttctgctgggcactttgcccaaggtcgtctccctgtgcggggacgtgggtgagggggcccctgacgttctgagtcggcgaagggtccgct

SEQ ID NO: 305127 - DNA, 120 bp, Artificial Sequence
  ENSG00000133597_5 (sequence is synthesized)
gcagcggggcggctggcgcggggcccgcggagagcctcccccgagcgggacctctgggcggcgtcttcctgcatctccgcctctggcttcgcgccggcgctctgttggtgaaattcttcc

SEQ ID NO: 305128 - DNA, 120 bp, Artificial Sequence
  ENSG00000133597_6 (sequence is synthesized)
ccctcctactcctctaccccctcacctacctggctcccagcgtctccaccctctggctccacctgcttctgaaagccaccgagacctcaggcccaacctacatcaaactgggccagtggg

SEQ ID NO: 305129 - DNA, 120 bp, Artificial Sequence
  ENSG00000133597_7 (sequence is synthesized)
ccagcacccggcgcgatctgttttcggaggctttctgtgcccaattttccaagctgcatgtccgagtgacgccccacccgtggactcacactgagcgcttccttcggcaggcttttgggg

SEQ ID NO: 305130 - DNA, 120 bp, Artificial Sequence
  ENSG00000133597_8 (sequence is synthesized)
atgactgggggagcatcctctcttttgagaaccgggaacctgtgggctcaggctgcgtggcccaggtgtacaaagcatacgccaacactgccttcctggagactgacagcgtccagagac

SEQ ID NO: 305131 - DNA, 120 bp, Artificial Sequence
  ENSG00000133597_9 (sequence is synthesized)
ttggcagggcctcctgtctgccgcccttctcacatactggggcagtcggtgggctgagagagctctttggataccttggaaatggccggaaacctccagaaaatctcgcagaccagtcgt

SEQ ID NO: 305132 - DNA, 120 bp, Artificial Sequence
  ENSG00000133597_10 (sequence is synthesized)
tgtctcgggctcaggtccctggccaccaacctgaggccaccaacctcatctccgtggcagtgaaagtgttgcaccctggcctgctcgctcaggtgcatatggacctgctgctgatgaaga

SEQ ID NO: 305133 - DNA, 120 bp, Artificial Sequence
  ENSG00000133597_11 (sequence is synthesized)
ttggcagccgagtcctgggagttttgccaggcatcaagtggcttagcttgcctgagattgtggaggaatttgagaagctgatggtccaacagattgacctgcgttacgaagctcagaatc

SEQ ID NO: 305134 - DNA, 120 bp, Artificial Sequence
  ENSG00000133597_12 (sequence is synthesized)
tagaacacttccaggtcaacttccggaatgtgaaagccgtcaagttccccacccctctgcgcccctttgtcaccagagaagtcttggtggaaacgtatgaagagagtgtgcctgtgtcca

SEQ ID NO: 305135 - DNA, 120 bp, Artificial Sequence
  ENSG00000133597_13 (sequence is synthesized)
gttaccagcaggcaggaattcccgtggacttgaaaaggaagattgcacggctggggatcaacatgctcctgaagatgatatttgtggataactttgtccatgcagaccttcaccctggaa

SEQ ID NO: 305136 - DNA, 120 bp, Artificial Sequence
  ENSG00000133597_14 (sequence is synthesized)
acatcctggttcagggtgccaacggcctgtcctcgagtcaggaggcgcagctgcagcaggcggacatctgtgacactctggtggtggccgtgccatcttccctctgcccgctgcgactgg

SEQ ID NO: 305137 - DNA, 120 bp, Artificial Sequence
  ENSG00000133597_15 (sequence is synthesized)
tgctgctggatgctggcattgtggcggagctgcaggcccctgacctgaggaatttccgggcagttttcatggctgtggtgatggggcagggccagagagtggctgagctgatcctgcatc

SEQ ID NO: 305138 - DNA, 120 bp, Artificial Sequence
  ENSG00000133597_16 (sequence is synthesized)
atgcccgggccagcgagtgcagggacgtggaggggttcaaaaccgagatggccatgctggtgacccaggccaggaagaacaccatcaccctggagaagcttcatgtgtccagccttctct

SEQ ID NO: 305139 - DNA, 120 bp, Artificial Sequence
  ENSG00000133597_17 (sequence is synthesized)
ctagtgtctttaagttgctgatgactcacaaggtaaagcttgagagcaactttgcctccattgtgtttgccatcatggtgttggaggggcttggccgctcactggaccccaaactggaca

SEQ ID NO: 305140 - DNA, 120 bp, Artificial Sequence
  ENSG00000133597_18 (sequence is synthesized)
tcctggaggcagcgaggcccttcctcctcacgggcccagtgtgccccccgtgatggggcagtggcctctgtgggcccttgtcaagagctggaggccactcccaagagcctctcctatggc

SEQ ID NO: 305141 - DNA, 120 bp, Artificial Sequence
  ENSG00000133597_19 (sequence is synthesized)
agctgggacgttttaaaattgggacaccaatttcaaatgtaaccctccagtggtggaaggcacaccatggcttcctctgcttggtttgagggtctgttcaaaagctttgggccaattagg

SEQ ID NO: 305142 - DNA, 120 bp, Artificial Sequence
  ENSG00000133597_20 (sequence is synthesized)
gagtaaaaggagggaaggggcctatccattccattgtggaagctgggccaggtgccagggacactctccttcagggaaaatgttatgtggaggaggacgaataaatttattttgttttcc

SEQ ID NO: 305143 - DNA, 120 bp, Artificial Sequence
  ENSG00000133597_21 (sequence is synthesized)
accaccaggcagcgaatggagtcaagcccttgcgctctccgagagtcctgccctgactacaggactagtttctcccattctttccttctccaggataaagttcctcattcctgtctttta

SEQ ID NO: 305144 - DNA, 120 bp, Artificial Sequence
  ENSG00000133597_22 (sequence is synthesized)
cgggaccacatcctcttttctttgataagaagccacctggctcttgcttggatggtgggacccagccctggctgggtaaaatgtgtccagcaggtttctcctgtctcacggttcctcttt

SEQ ID NO: 305145 - DNA, 120 bp, Artificial Sequence
  ENSG00000133597_23 (sequence is synthesized)
acaaggtcttgaggggacattcaaagcaggcagagaggggttgggatggctccagatggctgggagggagaacaccagctggtcacgcagcccctcgtgccagtgcgcatcaggtacagt

SEQ ID NO: 305146 - DNA, 120 bp, Artificial Sequence
  ENSG00000133597_24 (sequence is synthesized)
gtggaggcgggaaagggacaaaaagacggcagtctcttccctgagcctatgccaacccagccttaaagccagtggatcgaatcaagccatttgtggcattatctattgctgcgtacgaac

SEQ ID NO: 305147 - DNA, 120 bp, Artificial Sequence
  ENSG00000133606_0 (sequence is synthesized)
gagagcgctcagatacgcgacgcgtagcaggcggggaccgaacgggtgcctcagtgtccttcccctcccctcgcctggcctcgccgtcctctccccgcagccggaccggaactatgtgat

SEQ ID NO: 305148 - DNA, 120 bp, Artificial Sequence
  ENSG00000133606_1 (sequence is synthesized)
cccggaagttccggggcctttgctgtgtgggataaacagtaatggcggaggctgcaactcccggaacaacagccacaacatcaggagcaggagcggcagcggcgacggcggcagcagcct

SEQ ID NO: 305149 - DNA, 120 bp, Artificial Sequence
  ENSG00000133606_2 (sequence is synthesized)
cccccaccccgatccccacagtcaccgccccgtccctgggggcgggcggagggggcggcggcagcgacggcagcggcggcggctggactaaacaggtcacctgcaggtattttatgcatg

SEQ ID NO: 305150 - DNA, 120 bp, Artificial Sequence
  ENSG00000133606_3 (sequence is synthesized)
gggtttgtaaggaaggagacaactgtcgctactcgcatgacctctctgacagtccgtatagtgtagtgtgcaagtattttcagcgagggtactgtatttatggagaccgctgcagatatg

SEQ ID NO: 305151 - DNA, 120 bp, Artificial Sequence
  ENSG00000133606_4 (sequence is synthesized)
aacatagcaaaccattgaaacaggaagaagcaactgctacagagctaactacaaagtcatcccttgctgcttcctcaagtctctcatcgatagttggaccacttgttgaaatgaatacag

SEQ ID NO: 305152 - DNA, 120 bp, Artificial Sequence
  ENSG00000133606_5 (sequence is synthesized)
gcgaagctgagtcaagaaattcaaactttgcaactgtaggagcaggttcagaggactgggtgaatgctattgagtttgttcctgggcaaccctactgtggccgtactgcgccttcctgca

SEQ ID NO: 305153 - DNA, 120 bp, Artificial Sequence
  ENSG00000133606_6 (sequence is synthesized)
ctgaagcacccctgcagggctcagtgaccaaggaagaatcagagaaagagcaaaccgccgtggagacaaagaagcagctgtgcccctatgctgcagtgggagagtgccgatacggggaga

SEQ ID NO: 305154 - DNA, 120 bp, Artificial Sequence
  ENSG00000133606_7 (sequence is synthesized)
actgtgtgtatctccacggagattcttgtgacatgtgtgggctgcaggtcctgcatccaatggatgctgcccagagatcgcagcatatcaaatcgtgcattgaggcccatgagaaggaca

SEQ ID NO: 305155 - DNA, 120 bp, Artificial Sequence
  ENSG00000133606_8 (sequence is synthesized)
tggagctctcatttgccgtgcagcgcagcaaggacatggtgtgtgggatctgcatggaggtggtctatgagaaagccaaccccagtgagcgccgcttcgggatcctctccaactgcaacc

SEQ ID NO: 305156 - DNA, 120 bp, Artificial Sequence
  ENSG00000133606_9 (sequence is synthesized)
acacctactgtctcaagtgcattcgcaagtggaggagtgctaagcaatttgagagcaagatcataaagtcctgcccagaatgccggatcacatctaactttgtcattccaagtgagtact

SEQ ID NO: 305157 - DNA, 120 bp, Artificial Sequence
  ENSG00000133606_10 (sequence is synthesized)
gggtggaggagaaagaagagaagcagaaactcattctgaaatacaaggaggcaatgagcaacaaggcgtgcaggtattttgatgaaggacgtgggagctgcccatttggagggaactgtt

SEQ ID NO: 305158 - DNA, 120 bp, Artificial Sequence
  ENSG00000133606_11 (sequence is synthesized)
tttacaagcatgcgtaccctgatggccgtagagaggagccacagagacagaaagtgggaacatcaagcagataccgggcccaacgaaggaaccacttctgggaactcattgaggaaagag

SEQ ID NO: 305159 - DNA, 120 bp, Artificial Sequence
  ENSG00000133606_12 (sequence is synthesized)
cgaactaacagactctgaagatgagtgggacttgtttcatgatgagctggaagatttttatgacttggatctatagcaaccttgcgtggcgtgtgaactggtctgctgacctcagacagc

SEQ ID NO: 305160 - DNA, 120 bp, Artificial Sequence
  ENSG00000133606_13 (sequence is synthesized)
agctgtcccctgtggtggtgtggcagtgcctgtgttctctcctaggcaggcctctcaactccaggtgctgtcctaagaatttttacccagggcctgtcttctcaacccctcacctttccc

SEQ ID NO: 305161 - DNA, 120 bp, Artificial Sequence
  ENSG00000133606_14 (sequence is synthesized)
tgaggagtgtgttgttttccctgttgaaaaaagttacaaaaataaatcttaaagttagttttttgtaacacgaatttaactgtcagacagttagtgtaggtgtgttgcgtcatctgtttt

SEQ ID NO: 305162 - DNA, 120 bp, Artificial Sequence
  ENSG00000133606_15 (sequence is synthesized)
caaccagattgcatttatggacttttcacacactcattttgaggaccccaggttcaaaagtaaaagcagtggccctgctttggggtccaagaataggagtgatgggtgaagggacctaag

SEQ ID NO: 305163 - DNA, 120 bp, Artificial Sequence
  ENSG00000133606_16 (sequence is synthesized)
ctggccaatagccctctgccccagacatgggatgtggatccttgaggtttctggtgaaatctgcacatctgtgtttttatatctgttccctaccctgtaatccctaccacgtgcacttgt

SEQ ID NO: 305164 - DNA, 120 bp, Artificial Sequence
  ENSG00000133606_17 (sequence is synthesized)
tctgtggttttggtctcttgtttaattgcacacaagtaatactactgggtaaccagaatcaggtgtgaatgtgttgagattttttactgttttgcatgataggaaaattgagaaagaata

SEQ ID NO: 305165 - DNA, 120 bp, Artificial Sequence
  ENSG00000133606_18 (sequence is synthesized)
cgtataaaagatagagaggcataacatcaatgcagagttggaagttggctcccaagggctgacatggtgtgagtgtgtgggtgtgtgataagcttctcatccctgcatagatgcagtatt

SEQ ID NO: 305166 - DNA, 120 bp, Artificial Sequence
  ENSG00000133606_19 (sequence is synthesized)
cttagccttagtagaaaaacctggtttagtggtttaagccttgtgtggcagatagatcttaaagggcaaagcagtatattggtagttgtcaatatagcagtgctagctctgtctatataa

SEQ ID NO: 305167 - DNA, 120 bp, Artificial Sequence
  ENSG00000133606_20 (sequence is synthesized)
atagagaaatggggttagccatagaggttaaaactacctggttatcccatataataacacaaactgggtcttggatacacagttgtatttaatgttttacgatctagcctttccagtaca

SEQ ID NO: 305168 - DNA, 120 bp, Artificial Sequence
  ENSG00000133606_21 (sequence is synthesized)
ggcactttctgagaaacctttgtcctcacttgaggcattttgttgtcgggtttttgtgtttgtttttgtgggtatttgcctcattccacccctgagctttcaggtagacagacgtgattc

SEQ ID NO: 305169 - DNA, 120 bp, Artificial Sequence
  ENSG00000133606_22 (sequence is synthesized)
aaaactctgttctaaggtgtttattgtagtggagtaatgggtttgcagtgataagtcatacttttccaccgaaagggagggcttgggaatccctgagattagctaaagttaagttgttgg

SEQ ID NO: 305170 - DNA, 120 bp, Artificial Sequence
  ENSG00000133606_23 (sequence is synthesized)
aagaattccttgattggaaattgtacctttgtgttttgttgctctgtttcctgaaaataactcggggatgctcctggtttgtccatctactgctttgattccttggatcccacccattct

SEQ ID NO: 305171 - DNA, 120 bp, Artificial Sequence
  ENSG00000133606_24 (sequence is synthesized)
ttcactttaagaaaaaacaaataattgttgcagaggtctctgtattttgcagctgcccttttgtaagaagcacttttcccaaataaaacaattaaaaaaaaagttggctgttctgtgtaa

SEQ ID NO: 305172 - DNA, 120 bp, Artificial Sequence
  ENSG00000133606_25 (sequence is synthesized)
actgcgtcaacccccgctgggccgcggagccctcagcgctgtccgcggaggcctggcggtgcgcgattactgcggagccgcggggctgcaccgccgcttacacttccctgagcgctgcct

SEQ ID NO: 305173 - DNA, 120 bp, Artificial Sequence
  ENSG00000133606_26 (sequence is synthesized)
tttgagagcaagatcataaagtgagactcctccccagtcttcatttgtgctttctcttttggggaagaatttagtaacttgtgccaactttcaaccagatggaccgcatttaaatgcatg

SEQ ID NO: 305174 - DNA, 120 bp, Artificial Sequence
  ENSG00000133606_27 (sequence is synthesized)
cattttatcttgaaactgggatattctaatggggatttcttctttgtatttcagctagcttctaggttagttggtctatctacttttatttgaatgaggaaaccctgtgtatcagttaga

SEQ ID NO: 305175 - DNA, 120 bp, Artificial Sequence
  ENSG00000133606_28 (sequence is synthesized)
atcttcgtgctttttctgaggagattgtgtttaatggattattagccagtttaggctcagtgaacaaactgatctagctctgaatgtatgtttcctgacgttttacatttccactttcct

SEQ ID NO: 305176 - DNA, 120 bp, Artificial Sequence
  ENSG00000133606_29 (sequence is synthesized)
attccattcattaagctagccaacaatccaccatcctttaaagattgttctcataactgaacaaaaaccacataatctaaacagagcaaagctacaagaaataaatttatttaaacgaaa

SEQ ID NO: 305177 - DNA, 120 bp, Artificial Sequence
  ENSG00000133606_30 (sequence is synthesized)
ggcaatgaggtatgagcactgcagccttttctcaagcgaagagcccaacagagcttgggttcactttgaaaagaatggtgctgcattatacactcctacctccttcctacccttctttga

SEQ ID NO: 305178 - DNA, 120 bp, Artificial Sequence
  ENSG00000133606_31 (sequence is synthesized)
cttcccaggacagtttattttgtcaccctgataacatccagtatatatcttgctataacacagtccttggggtccatgccaagggactgtgttataaagaggtctctactgttgacaagt

SEQ ID NO: 305179 - DNA, 120 bp, Artificial Sequence
  ENSG00000133606_32 (sequence is synthesized)
aaggccccatgagtggggttctaccttattctgaatccgtgtcatagctgtcctatgttctcatgtgttggctttctagaagattttctctctatggcatctgcttgtactagagctatt

SEQ ID NO: 305180 - DNA, 120 bp, Artificial Sequence
  ENSG00000133606_33 (sequence is synthesized)
aaccagcatagacttgaacagagttaccggtttctagttagtgtttcttgcattggcacacacatgtttataagaacacatcttggggagggctgtaagctgacatactggttctatccc

SEQ ID NO: 305181 - DNA, 120 bp, Artificial Sequence
  ENSG00000133606_34 (sequence is synthesized)
tacctgtttaaagaaaccccggatgatagtcaaatacagacctgaaatccactgtgaataagggttgcgatattttcctttccagcaacaaggcgtgcaggtattttgatgaaggacgtg

SEQ ID NO: 305182 - DNA, 120 bp, Artificial Sequence
  ENSG00000133606_35 (sequence is synthesized)
cttctccacccgcggtttttttgagctgcagattattaccctcccccagcgctatgttcctcttttgaaatttacgcatcttccgaagggagtgaaagggctcttcgctcccggaagaga

SEQ ID NO: 305183 - DNA, 120 bp, Artificial Sequence
  ENSG00000133606_36 (sequence is synthesized)
gagaggtttggttttggtttgatatgcgagacgaaaatattagaaaaattaagggatggcggttgtatggatgtgtatggttgtaaaaaactacctagctctacgcagaagagggcattt

SEQ ID NO: 305184 - DNA, 120 bp, Artificial Sequence
  ENSG00000133606_37 (sequence is synthesized)
aattgtacgttttttattttccggtttttaaatagtgatcagtagcgactgtaagcttttctttttctatcagttgaataaatcaactgaaatgccggttttcacctgggtggtataatt

SEQ ID NO: 305185 - DNA, 75 bp, Artificial Sequence
  ENSG00000133606_38 (sequence is synthesized)
gagtgcaatggcgcgatctcggctcattgaaacctcagcctcccacgtgtgtgtgccaccacaccagccaatttt

SEQ ID NO: 305186 - DNA, 120 bp, Artificial Sequence
  ENSG00000133606_39 (sequence is synthesized)
gtttgtaacgtcttttcacgtccctccgtccctccgccccccatcctccgcccaactgtgagaagaagcttttgtatttcttctttgtatgtttgtcgaggttggcggtgctgagctttg

SEQ ID NO: 305187 - DNA, 72 bp, Artificial Sequence
  ENSG00000133606_40 (sequence is synthesized)
gacggagtctcagtggcgtgatcctggttcactgcaacctctgggccccccccaacccactgcgggtaccgc

SEQ ID NO: 305188 - DNA, 120 bp, Artificial Sequence
  ENSG00000133606_41 (sequence is synthesized)
tcctcccctgccgctggaaggatgcccccgccgctgcctccggctcccggggctcgggaggtggtcacttgaggccggtctcccagcgatcctctccgggcctagacaccccgccgaggg

SEQ ID NO: 305189 - DNA, 120 bp, Artificial Sequence
  ENSG00000133606_42 (sequence is synthesized)
ccccagcgagcttgcctggctcccggccctctcctctctccgtgccatccgtttgtaacgtcttttcacgtccctccgtccctccgccccccatcctccgcccaactgtattttatgcat

SEQ ID NO: 305190 - DNA, 80 bp, Artificial Sequence
  ENSG00000133612_0 (sequence is synthesized)
gttgttgccgctggaggctgctccgaggcagcgggatcacggcgctgggaagcgctcggcagcggcggccacagcgtgcg

SEQ ID NO: 305191 - DNA, 120 bp, Artificial Sequence
  ENSG00000133612_1 (sequence is synthesized)
cacggctccgaagccatgaacttccaggcgggcggggggcagagcccgcagcagcagcagagcctggcggctccggggggcggcggcgctgccgcgcagcagctcgtctgcggcgggcag

SEQ ID NO: 305192 - DNA, 120 bp, Artificial Sequence
  ENSG00000133612_2 (sequence is synthesized)
ggccgggggcggcggcggcccctcgcagcagctggccggcgggcccccccagcagttcgcgctctccaactccgcggccatccgggccgagatccagcgcttcgagtccgtgcatcccaa

SEQ ID NO: 305193 - DNA, 120 bp, Artificial Sequence
  ENSG00000133612_3 (sequence is synthesized)
gagatccagcgcttcgagtccgtgcatcccaatatctacgccatctacgacctgatcgagcgcatcgaggatttggcgctgcagaaccagatccgggagcacgtcatctccatcgaggac

SEQ ID NO: 305194 - DNA, 120 bp, Artificial Sequence
  ENSG00000133612_4 (sequence is synthesized)
tcgtttgtgaacagccaggagtggacgctgagccgctccgtaccggagcttaaagtgggcatagtggggaacctgtctagcgggaagtcagccctggtgcaccgctatctgacggggacc

SEQ ID NO: 305195 - DNA, 120 bp, Artificial Sequence
  ENSG00000133612_5 (sequence is synthesized)
tatgtccaggaggagtcccctgaaggggggcggtttaagaaggagattgtggtggatggccagagttacctgctgctgatccgagatgaaggaggcccccctgagctccagtttgctgcc

SEQ ID NO: 305196 - DNA, 120 bp, Artificial Sequence
  ENSG00000133612_6 (sequence is synthesized)
tgggtggatgcagtggtgtttgtgttcagcctggaggatgaaatcagtttccagacggtgtacaactacttcctgcgtctctgcagcttccgcaacgccagcgaggtgcccatggtgctt

SEQ ID NO: 305197 - DNA, 120 bp, Artificial Sequence
  ENSG00000133612_7 (sequence is synthesized)
gtgggcacgcaggatgccatcagcgctgcgaatccccgggttatcgacgacagcagagcccgcaagctctccacagatctgaagcggtgcacctactatgagacgtgcgcgacctacggg

SEQ ID NO: 305198 - DNA, 120 bp, Artificial Sequence
  ENSG00000133612_8 (sequence is synthesized)
ctcaatgtggagcgtgtcttccaggacgtggcccagaaggtagtggccttgcgaaagaagcagcaactggccatcgggccctgcaagtcactgcccaactcgcccagccactcggccgtg

SEQ ID NO: 305199 - DNA, 120 bp, Artificial Sequence
  ENSG00000133612_9 (sequence is synthesized)
tccgccgcctccatcccggccgtgcacatcaaccaggccacgaatggcggcggcagcgccttcagcgactactcgtcctcagtcccctccacccccagcatcagccagcgggagctgcgc

SEQ ID NO: 305200 - DNA, 120 bp, Artificial Sequence
  ENSG00000133612_10 (sequence is synthesized)
atcgagaccatcgctgcctcctccacccccacacccatccgaaagcagtccaagcggcgctccaacatcttcacgtctcggaagggtgctgacctggaccgggagaagaaggctgccgag

SEQ ID NO: 305201 - DNA, 120 bp, Artificial Sequence
  ENSG00000133612_11 (sequence is synthesized)
tgcaaggtggacagcatcgggagcggccgcgccatccccatcaagcaggggatcctgctaaagcggagcggcaagtccctgaacaaggagtggaagaagaagtatgtgacgctctgtgac

SEQ ID NO: 305202 - DNA, 120 bp, Artificial Sequence
  ENSG00000133612_12 (sequence is synthesized)
aacgggctgctcacctatcaccccagcctgcatgattacatgcagaacatccacggcaaggagattgacctgctgcggacaacggtgaaagtgccagggaagcgcctgccccgagccaca

SEQ ID NO: 305203 - DNA, 120 bp, Artificial Sequence
  ENSG00000133612_13 (sequence is synthesized)
gggcaccagcccccgtgccaacgggctgtccgtggagcggagtaacacacagctgggtgggggcacaggtgccccccactcggccagcagcgcatccctgcactctgagcgccccctcag

SEQ ID NO: 305204 - DNA, 120 bp, Artificial Sequence
  ENSG00000133612_14 (sequence is synthesized)
cagctcggcctgggctggcccgcgccctgaggggctgcaccagcgctcctgctccgtttccagcgccgaccagtggagtgaggccaccacttccctgcccccaggcatgcagcaccctgc

SEQ ID NO: 305205 - DNA, 120 bp, Artificial Sequence
  ENSG00000133612_15 (sequence is synthesized)
cagtggcccagctgaggtactcagttccagccccaagctggatcctcccccatctccccactccaaccggaagaagcaccggaggaaaaagagcaccgggaccccccgaccagacggccc

SEQ ID NO: 305206 - DNA, 120 bp, Artificial Sequence
  ENSG00000133612_16 (sequence is synthesized)
cagcagtgctactgaagaggcagaggagtcgtttgaatttgtggtggtgtccctcactgggcagacgtggcacttcgaggcttcaacggcggaggagcgggagctgtgggttcagagtgt

SEQ ID NO: 305207 - DNA, 120 bp, Artificial Sequence
  ENSG00000133612_17 (sequence is synthesized)
gcaggcccagatccttgccagcctgcaaggctgccgcagtgccaaggacaagactcgactggggaaccagaacgcagctctggctgtgcaggccgtccgcaccgtccgcggcaacagctt

SEQ ID NO: 305208 - DNA, 120 bp, Artificial Sequence
  ENSG00000133612_18 (sequence is synthesized)
ttgtatcgactgcgatgcacccaatccagactgggccagcctgaacctgggtgccctgatgtgcattgagtgctcaggcatccaccgacacctgggggctcacctgtcccgggtgcgctc

SEQ ID NO: 305209 - DNA, 120 bp, Artificial Sequence
  ENSG00000133612_19 (sequence is synthesized)
ccttgacctcgatgactggccgcctgagctgctggctgtcatgactgccatgggcaatgccctcgccaacagcgtctgggagggggccttgggtggctactccaagccagggcctgatgc

SEQ ID NO: 305210 - DNA, 120 bp, Artificial Sequence
  ENSG00000133612_20 (sequence is synthesized)
ctgcagagaggagaaggaacgctggatacgggccaagtatgaacagaagctcttcctggccccactgccaagctcagatgtgccactggggcagcagctgctccgggccgtggtggaaga

SEQ ID NO: 305211 - DNA, 120 bp, Artificial Sequence
  ENSG00000133612_21 (sequence is synthesized)
tgacctgcggctgttggtgatgctcctggcacatggctccaaagaggaggtgaatgagacctatggggacggggacgggcggacggctctacatctctccagtgccatggccaacgttgt

SEQ ID NO: 305212 - DNA, 120 bp, Artificial Sequence
  ENSG00000133612_22 (sequence is synthesized)
cttcacgcagctgctcatctggtacggggtggacgtgaggagccgggacgcccggggcctgactccactggcatatgctcgccgggccggcagccaggagtgtgcagacatcttgatcca

SEQ ID NO: 305213 - DNA, 120 bp, Artificial Sequence
  ENSG00000133612_23 (sequence is synthesized)
gcatggctgccctggggagggctgtggcttagcgcctacccccaacagagagcctgccaatggcaccaacccctctgctgagctgcaccgtagtcctagcctcctataaggcccaggaag

SEQ ID NO: 305214 - DNA, 120 bp, Artificial Sequence
  ENSG00000133612_24 (sequence is synthesized)
agggcagaggggccagaaggactccatggcccaaagaccctcctccctgcaggcactgtgggaacagacacagagatggagaagcagggacatgctgagaggacgaagccaaggaaatta

SEQ ID NO: 305215 - DNA, 120 bp, Artificial Sequence
  ENSG00000133612_25 (sequence is synthesized)
gggaggagagtcaaagggatcaaggagagttggggatttgagctgcagcagagagggatgagggatttagccctctgccctaaggtgccattgaaaagggacaggacccttcggaggtgc

SEQ ID NO: 305216 - DNA, 120 bp, Artificial Sequence
  ENSG00000133612_26 (sequence is synthesized)
ctgtgaggagaggggagcaggacctctccctcctccagatccctgcctcctagtgccagcccctcacacgccttcatcctgaaacaggaagaggacggcaccaagttgggggtgctggat

SEQ ID NO: 305217 - DNA, 120 bp, Artificial Sequence
  ENSG00000133612_27 (sequence is synthesized)
gaaagagacgaggggtgatctgtgagtcccatgtaaactttgtacattggaatatttatgtttgtgtacatatttgatgtgtgtgtgtatgatgagccaataaaccagactgtgtgcgtg

SEQ ID NO: 305218 - DNA, 120 bp, Artificial Sequence
  ENSG00000133612_28 (sequence is synthesized)
atggcatatgtggactagaatggagggtgcaggggcccaagccaggaggggcccctcaaggagcactgcggcgatgggtgtcagcaccacccagctcgttccacaagttggaagatctct

SEQ ID NO: 305219 - DNA, 120 bp, Artificial Sequence
  ENSG00000133612_29 (sequence is synthesized)
gatgcagagaccccccgccccgctcccggaccacagtgaggggacagagctgtggaccgtgaagatctggggacaggctgcttcctaaggcacacagggtccctgcgcagcctctggctc

SEQ ID NO: 305220 - DNA, 120 bp, Artificial Sequence
  ENSG00000133612_30 (sequence is synthesized)
tcccagaagctggcccgccacctgatgaacccagtgccctgctgaatgtctcaggctctgctctgcagctctatttttaggatagtatctttgagaatcctcccctgcccggcctccctt

SEQ ID NO: 305221 - DNA, 120 bp, Artificial Sequence
  ENSG00000133612_31 (sequence is synthesized)
gggtgagcggagccgggggctgcgggagccggggcgcagtggcctctccggcgccggccgagggctccacaggccgtgcctggccatgctctccctgtcgggggtccttgcgcgcttgag

SEQ ID NO: 305222 - DNA, 120 bp, Artificial Sequence
  ENSG00000133612_32 (sequence is synthesized)
cgcccacctgccggaacagcggtccagctgcttcctgatggatgatgggggagagccgagttctggggaaggactggtctaaggggccttcccaagttcaccgataggtccttaaaggct

SEQ ID NO: 305223 - DNA, 120 bp, Artificial Sequence
  ENSG00000133612_33 (sequence is synthesized)
gctttgctcaaagtggcccaggagaagcggggaggggggagggcattgcctgacgacatcgtgacctcctcatgccctatgacctagggggctggctcctggtttctgatcagacctctg

SEQ ID NO: 305224 - DNA, 120 bp, Artificial Sequence
  ENSG00000133612_34 (sequence is synthesized)
gctcgtgtctgagggcttttgcccccactgaaacctgctgtccctgtgactagcaggtctgtgtttttttagatgaataaacgtgctcagagcttaagtgcttgctggtttgcactcagt

SEQ ID NO: 305225 - DNA, 120 bp, Artificial Sequence
  ENSG00000133612_35 (sequence is synthesized)
gaggccatggaagggttgaaatgagacccaggcacccgcgttcttggtgctctgtgtgttccactcaccaggccctttgcacacctgcccttgggccaaatgccccccaccacactaccc

SEQ ID NO: 305226 - DNA, 120 bp, Artificial Sequence
  ENSG00000133612_36 (sequence is synthesized)
cagtaattaggcagctccctgattgtttctaattctgctattaattgtgaggagcggggagtgtgattgaggataaatttggtgcggagctgctggggcttcagctccccgtgagttccc

SEQ ID NO: 305227 - DNA, 120 bp, Artificial Sequence
  ENSG00000133612_37 (sequence is synthesized)
tgggctgccttccacccctccaggctgcagaggcagcttcctccctttgcctccatcctgctctgcctaagtttcctattctctttccacattttcctcctccaaggctggggagctttg

SEQ ID NO: 305228 - DNA, 120 bp, Artificial Sequence
  ENSG00000133612_38 (sequence is synthesized)
ggactgggaagcccaggcagacctcgcctagagagaggtgtccgtctggctctcctgagtgtggcccagctacagttggcaggactggtcctctcctcctcccagtgccctgcgcccctc

SEQ ID NO: 305229 - DNA, 120 bp, Artificial Sequence
  ENSG00000133612_39 (sequence is synthesized)
ggggatagtaccctaaaagtaacacctattttttattttttgtattcagtggattaagcactttctagtagttgctaatcaaagtagttctacagcttcttttggtaatctagacctggt

SEQ ID NO: 305230 - DNA, 120 bp, Artificial Sequence
  ENSG00000133612_40 (sequence is synthesized)
atcttagaaaagttcttctgataactgaaaccctttctgttgaaatgtgggcttacttcatttattcttaaggtaaaagacagcagactgctacatcaatagctcctctaagatgttcgg

SEQ ID NO: 305231 - DNA, 120 bp, Artificial Sequence
  ENSG00000133612_41 (sequence is synthesized)
gcaggacctgtgttttctgtctcttgtgtcataccgagtttaataaagtgctgggtacttactaggtgcgtaatacatgtgtacagattggctgagtctctcattagttttccttaggct

SEQ ID NO: 305232 - DNA, 120 bp, Artificial Sequence
  ENSG00000133612_42 (sequence is synthesized)
aaggaattccaggtcctgaagccttcttccataggacctttctcttcctctattaattatactgctgctcctcagattttcctcaaagtatcttcaaaacctccctcttcttggtgattg

SEQ ID NO: 305233 - DNA, 120 bp, Artificial Sequence
  ENSG00000133612_43 (sequence is synthesized)
gagtttctttgctcccaaataagtttaacttctacagactcataatttctcacttctgctctaatcatcagggtagacgtatgggtcaggggagcagagacacctagccaacctgtgaca

SEQ ID NO: 305234 - DNA, 120 bp, Artificial Sequence
  ENSG00000133612_44 (sequence is synthesized)
agcagagacacctagccaacctgtgacacagtgatgcttagtacttacagcgtggggtctcccttctggtccggcagactaagccccacaaatgatcatggagatcacgtagttcgaagg

SEQ ID NO: 305235 - DNA, 120 bp, Artificial Sequence
  ENSG00000133612_45 (sequence is synthesized)
tggtggtgcctggggaaggaggcgccggttctatttctgtgggaaggcagttctgctaacagtccctgagagcaagggcccagcagaggaggaattccaggggatgtcggtgtcactgag

SEQ ID NO: 305236 - DNA, 120 bp, Artificial Sequence
  ENSG00000133612_46 (sequence is synthesized)
gtgaggctgcctggggccaagatgcagtgaggacttacaagcagagatggccttggcagaactggggttcaccctggggccttaccacaggcacctgtgctgtctttccagcccccagga

SEQ ID NO: 305237 - DNA, 120 bp, Artificial Sequence
  ENSG00000133612_47 (sequence is synthesized)
cacagtcacactgcttgttaggaattgttcacccatggggcagtgaccattgggaatgagattcatgcggctgtcttctggggcctgggggaccagagcttggaagagcttcaccacatt

SEQ ID NO: 305238 - DNA, 120 bp, Artificial Sequence
  ENSG00000133612_48 (sequence is synthesized)
gcttgggttcacagtccagccctcagtgcttgtcagtacagatgccctcaggcccctatttgctcacatactgcaggtcctgtagaaaacctctcctcctctcccccatccacttgccct

SEQ ID NO: 305239 - DNA, 120 bp, Artificial Sequence
  ENSG00000133612_49 (sequence is synthesized)
ggggcccagctcccaggagccccacgctgacgccgtcaggaatattgggtttaatgagctgcaaaatgaggcggctgcagctgacatgtacggatggtgcccacacccgccttcccccac

SEQ ID NO: 305240 - DNA, 120 bp, Artificial Sequence
  ENSG00000133612_50 (sequence is synthesized)
cctctcccagtgtttgcctcctagcaccccgtcacatccttctccagatactcagctctttctgtgggatgcacccctctctggtttcacacccattcccggcagtgccaggggtgccaa

SEQ ID NO: 305241 - DNA, 120 bp, Artificial Sequence
  ENSG00000133612_51 (sequence is synthesized)
gatcttgcatcccccatctgttttcacttaagctccacaggtggttaggaatgagaactgggagctcacactagtcttgcaggtttactctggcctccccctgcaagctgtcctggagtg

SEQ ID NO: 305242 - DNA, 120 bp, Artificial Sequence
  ENSG00000133612_52 (sequence is synthesized)
tgtggccttgcagctggggaagggtctaggggaggacacttgccagtggagcagggtagtgagtggagttgtggcgatagcatgccctgggtgtgcacgcaggccaggagccctgatggc

SEQ ID NO: 305243 - DNA, 120 bp, Artificial Sequence
  ENSG00000133612_53 (sequence is synthesized)
gggagaccattttgaaaagttcctttcccaccagaggccaaggaaagagaaaacctgcccattacttggccttagggagtggaagaagtacagccttcagctgggagggagagctggagg

SEQ ID NO: 305244 - DNA, 120 bp, Artificial Sequence
  ENSG00000133612_54 (sequence is synthesized)
gctcactatgtgcagagcctctgagccaccttcacctcactagtggggaaactgaggctcagagaagggagggagccaagcggatacagccagggagagtataggccttcaacaggagcc

SEQ ID NO: 305245 - DNA, 120 bp, Artificial Sequence
  ENSG00000133612_55 (sequence is synthesized)
cgcttccggcttggcactcacctgcagtgagcgctccctgacagcttgggtttcctggctgagtcctagaaagagggatgcaggagaacgagggcctcagtccaaatggggacactgggc

SEQ ID NO: 305246 - DNA, 120 bp, Artificial Sequence
  ENSG00000133612_56 (sequence is synthesized)
acgtggagcgcaggatgttgtaccaagctagccaggagccccaaaggagcccgggatctttccaggacctgctggtcccagtcgttgtgtgcagttcacagattgcctgccctgggctgt

SEQ ID NO: 305247 - DNA, 120 bp, Artificial Sequence
  ENSG00000133612_57 (sequence is synthesized)
aggctgtttgcccaaggcgacacagagggttagctggcccagctagagtcagagcccaggcctccccgtcgccttccggctctttttccgttaccccactgccgaggggaaaattcatgc

SEQ ID NO: 305248 - DNA, 120 bp, Artificial Sequence
  ENSG00000133612_58 (sequence is synthesized)
tttccacccaccgctgtgattggtttaacaaaggcttagccatcttttcctgggcttcaccacgctgcctcgttcctccctctcagatatgtgccactgtttccaacttttcatcaacaa

SEQ ID NO: 305249 - DNA, 120 bp, Artificial Sequence
  ENSG00000133612_59 (sequence is synthesized)
aaaggcctttccaactccttccaaattagaagaccagttggtgacacacagcacctctggacatgccccctgtgcggggccggaggcgggccgggccctgggactgctctcagatgagaa

SEQ ID NO: 305250 - DNA, 120 bp, Artificial Sequence
  ENSG00000133612_60 (sequence is synthesized)
ccacacctgccacagccccgggcaccagcccccgtgccaacgggctgtccgtggagcggagtaacacacagctgggtgggggcacagcagggagccagaggacagctgggctgtttccct

SEQ ID NO: 305251 - DNA, 120 bp, Artificial Sequence
  ENSG00000133612_61 (sequence is synthesized)
ggagcggcagtggcatggaggagacagccccgtgccctcgctcctgtaatgacagcgcccacacgcaggagctcgcggacggtgcccacccagcccgcgtcccgctgccgcatgccgacg

SEQ ID NO: 305252 - DNA, 120 bp, Artificial Sequence
  ENSG00000133612_62 (sequence is synthesized)
ccgacaccgaccctcgtgcacactcacacatgtctctcactcaccgggcgatgttaacatctcattatctttgttactgtaattacattatccgctgctttatgcagaattatcctccga

SEQ ID NO: 305253 - DNA, 120 bp, Artificial Sequence
  ENSG00000133612_63 (sequence is synthesized)
acgctaatgaaccggcggccggaaggctgtttgcccaaggcgacacagaggatatgtgccactgtttccaacttttcatcaacaaaaaggcctttccaactccttccaaattagaagacc

SEQ ID NO: 305254 - DNA, 120 bp, Artificial Sequence
  ENSG00000133612_64 (sequence is synthesized)
ggagcggcaagtccctgaacaaggagtggaagaagaagtatgtgacgctctgtgacaacgggctgctcacctatcaccccagcctgcatcaagggtctcgcctgagccccaagggcatcg

SEQ ID NO: 305255 - DNA, 120 bp, Artificial Sequence
  ENSG00000133612_65 (sequence is synthesized)
gccagccctgagccccgcgcccgattctcgccggcccaagagagcccgccgcagcctcccccattttgcagccagcggagccattcacacaatcaccttctgttaattctatctgcaaca

SEQ ID NO: 305256 - DNA, 120 bp, Artificial Sequence
  ENSG00000133612_66 (sequence is synthesized)
aaacccgttggaatactcgtggtctcagttccttcccgtcccgccgccccggcccgacccactgctagggctgcccaggaggagggaggcaggagggaggccgggaagtccaggtgggca

SEQ ID NO: 305257 - DNA, 120 bp, Artificial Sequence
  ENSG00000133612_67 (sequence is synthesized)
acctttgtaactaaccccacccccagggaaggctaggagcgccggagcccgcgctgggggctgccggggaccaggcccggccggacgctgcaggctcgctgcatggagaagaaggcagct

SEQ ID NO: 305258 - DNA, 120 bp, Artificial Sequence
  ENSG00000133612_68 (sequence is synthesized)
cggcgctggccagcgcgacgaggcccagaggggcgggggagtccaagcccgcccggcccggctgctcctggggggcgctttcctgcccctcccctcctctgctccttcctgcatggacct

SEQ ID NO: 305259 - DNA, 120 bp, Artificial Sequence
  ENSG00000133612_69 (sequence is synthesized)
ctgcatggacctctgccgttcctgctcctgctccggaagccgccgccgccgccgcgcttgccttgccccctctttttggcctccccctatttcctaggatccgcattcgggtggactctg

SEQ ID NO: 305260 - DNA, 120 bp, Artificial Sequence
  ENSG00000133612_70 (sequence is synthesized)
ccccaggagcttgacagggtgcagggcctcttctggcctctctcctctctctgtccatccactgtgccccttgggccacgccgacgcgctcggtgccacgtgccgtgtggtgtctgtgcc

SEQ ID NO: 305261 - DNA, 120 bp, Artificial Sequence
  ENSG00000133612_71 (sequence is synthesized)
gcagacgggccatctgcccgctcacttgtggactttgcgctcccggttgtcgcgccctgtgctcccgaccagcagccccaccgtccacctcctcgcccccgcttctcttacgcccccgcc

SEQ ID NO: 305262 - DNA, 120 bp, Artificial Sequence
  ENSG00000133612_72 (sequence is synthesized)
ccgggcgtgctcctcgcgccctcggcctctctgtccttgctcttttgtaaggggcgggcccggctcagtgacctgtgctgctctgtatggtgccgtgtgtaagaataaacccgttggaat

SEQ ID NO: 305263 - DNA, 120 bp, Artificial Sequence
  ENSG00000133612_73 (sequence is synthesized)
acaccccacacctgggggctgttgtgctggcccggctgagggtggcctctggctctcaggccccagggcctgctgtctctccactcccaatgtgcgacacacagtgcccatccaaaccct

SEQ ID NO: 305264 - DNA, 120 bp, Artificial Sequence
  ENSG00000133612_74 (sequence is synthesized)
aatcctccagccgggcttggctggatgttccaggagtcttgggccagacaaaggtgggtgaacccccgtgtgggttgtcacgagagcgcccgcccctccgcgtcactccatgcgcctctt

SEQ ID NO: 305265 - DNA, 120 bp, Artificial Sequence
  ENSG00000133612_75 (sequence is synthesized)
cacagatctgaagcggtgcacctactatgagacgtgcgcgacctacgggctcaatgtggagcgtgtcttccaggacgtgggtataattgactctgctgtcccctgcagtggcccagaagg

SEQ ID NO: 305266 - DNA, 80 bp, Artificial Sequence
  ENSG00000133612_76 (sequence is synthesized)
cgtgcccctcgccatgggcctggcccgcgcccgccggccctgagcatggagcggggctggccgcagggggacagctgtcc

SEQ ID NO: 305267 - DNA, 80 bp, Artificial Sequence
  ENSG00000133612_77 (sequence is synthesized)
agctgtcccggggagcggcccgccgcttgccgccgcgcccacagcgtctgcgactcgctggacctgcacggcgcctcggc

SEQ ID NO: 305268 - DNA, 80 bp, Artificial Sequence
  ENSG00000133612_78 (sequence is synthesized)
cgtccagccccgcgccgacccggcgcagccgcacccgcggggagccgactccgcggccccggccggccagcatgactttc

SEQ ID NO: 305269 - DNA, 120 bp, Artificial Sequence
  ENSG00000133612_79 (sequence is synthesized)
agcatgactttcctggaggtgaaccgcctggagctggcggccgccgaggcgccgggcgcgggtctggggcgcgcgggcagcgcgggcttcctgcgcggcgcggcgttgtggagcagccag

SEQ ID NO: 305270 - DNA, 120 bp, Artificial Sequence
  ENSG00000133612_80 (sequence is synthesized)
ggcctggcggcgctcaggaagagcttcagcttccgcctgcgccgcggccaggaggtgcggcgctccgagtcagggctgctggcccggccgccgcgcgcgcgcacccgtagcgacggcgac

SEQ ID NO: 305271 - DNA, 80 bp, Artificial Sequence
  ENSG00000133612_81 (sequence is synthesized)
cggccgccgcgcgcgcgcacccgtagcgacggcgacgccggctccctaggcgccttccccagccgccgcgacctgctggg

SEQ ID NO: 305272 - DNA, 120 bp, Artificial Sequence
  ENSG00000133612_82 (sequence is synthesized)
gaggctgctcacgagccgcttccgccggagggagcccgcgcccgccgcgccgctgtggggccgtcgggcggctgcggccccggagctcctgcgcgcgcccagcgactcgtttgtgaacag

SEQ ID NO: 305273 - DNA, 120 bp, Artificial Sequence
  ENSG00000133612_83 (sequence is synthesized)
atttagctaatctcccaagtccggcagggggagggtcttttaggagagcactgctgcagccggcagtggagagcctgggcagggagacagggagaaaactccggcagcagggtggtctct

SEQ ID NO: 305274 - DNA, 120 bp, Artificial Sequence
  ENSG00000133612_84 (sequence is synthesized)
ctcttcacccggctcaggaatgtggtgggtggccccaccctgccagggtgcgctgttcttacttgcaggagtctgccccccaaccaggtgcccagcccttgggtctgttctgagacctgc

SEQ ID NO: 305275 - DNA, 120 bp, Artificial Sequence
  ENSG00000133612_85 (sequence is synthesized)
tggagtggcctctaacctgggcctggtatttgggccacaggggcactaggccaggtgtggcttggtggggggacaataaacctgctggagcaggaagaggaggaaggacacagggccgaa

SEQ ID NO: 305276 - DNA, 120 bp, Artificial Sequence
  ENSG00000133612_86 (sequence is synthesized)
atgagacgtgcgcgacctacgggctcaatgtggagcgtgtcttccaggacggtaactcgggtgccgggtgggagtcactggcagccgcggccccagtgctggcgataggaaggctcccag

SEQ ID NO: 305277 - DNA, 120 bp, Artificial Sequence
  ENSG00000133619_0 (sequence is synthesized)
cccgcgccggaaaccgaggagtggcggggaggctgagcccggggatggcgcgccaggtgtccatcaccttcaaggacttggccgtgcggttctcggaggaggagtggcggctcctggagg

SEQ ID NO: 305278 - DNA, 120 bp, Artificial Sequence
  ENSG00000133619_1 (sequence is synthesized)
aggggcagagggagttctaccgagacgtgatgcgggagaactacgagacgctggtctctgtggggacagctgagctgctccccctctctgctttcctgtcaccctcagagcctggaagag

SEQ ID NO: 305279 - DNA, 120 bp, Artificial Sequence
  ENSG00000133619_2 (sequence is synthesized)
ctgttgggggagggagccacgctgatgaggggcaggagcctgctggttgtggagatccccaggggggacagccccggcacagcctgcacctcacagccctggtgcagctggtgaaggaga

SEQ ID NO: 305280 - DNA, 120 bp, Artificial Sequence
  ENSG00000133619_3 (sequence is synthesized)
tcccagagttcttgtttggagaagtcaagggcgctatggacagccccgagagcgagagccggggagccagcctggatggagagagagcgagccccgaggctgcggcaagagagccctgcc

SEQ ID NO: 305281 - DNA, 120 bp, Artificial Sequence
  ENSG00000133619_4 (sequence is synthesized)
ctctccgaggcctgctcagctgccttccagacggccctaccagccagccccacctggccaccacgcccaccgacagctcgtgttccagtggcccaactggtgacggggtccagggaagtc

SEQ ID NO: 305282 - DNA, 120 bp, Artificial Sequence
  ENSG00000133619_5 (sequence is synthesized)
ctctccccatcaaaactgccgacaaaccgtggcctacaaggaaggaaggcccaggagccctgggcggggagcccagccctcccacccatagccccagcaggaggaagagccacagaggac

SEQ ID NO: 305283 - DNA, 120 bp, Artificial Sequence
  ENSG00000133619_6 (sequence is synthesized)
aggagagagggacctcagaggccggaatttctcctgggaacagccccttgcaaggcctcatcaactgtctgaaggaaatccttgtgcctgggccccggcaccccgagacatccccaagct

SEQ ID NO: 305284 - DNA, 120 bp, Artificial Sequence
  ENSG00000133619_7 (sequence is synthesized)
tcttgccacctctccctagcctgggcacgtccaggctaaccagagcagacctggggcctgggagcccgccctgggcagtgaagaccgaggcggtttcaggggattgtcccctccagggtc

SEQ ID NO: 305285 - DNA, 120 bp, Artificial Sequence
  ENSG00000133619_8 (sequence is synthesized)
tgctacactgtctgaaggagctccccgaggcccaggacaggcatcccagtccctcaggagtggggaaccgacggctacaggagaatccaggagcctggaaaaggggttctggagggcctg

SEQ ID NO: 305286 - DNA, 120 bp, Artificial Sequence
  ENSG00000133619_9 (sequence is synthesized)
gatacctcctgacccctcctccccatcctgatcttggagctggcggtctgctctctgtgaagatggagaacagctgggtccagagccccccaggacctgcatcctgtcagcctggcaggc

SEQ ID NO: 305287 - DNA, 120 bp, Artificial Sequence
  ENSG00000133619_10 (sequence is synthesized)
agcccctcagtccctcagccactggagacaccagaggggtcccccaacccagctggggccctgaggctcaagctgccagtgcctcaagctcaccgctggaagccctggaagcctgtctga

SEQ ID NO: 305288 - DNA, 120 bp, Artificial Sequence
  ENSG00000133619_11 (sequence is synthesized)
agggcattcccccaaatgggtcgtcaccttcccagctgccacccacttcttgttcccagaacccccagccaggagactctaggtctcagaagcctgaactgcaaccccacagatcacaca

SEQ ID NO: 305289 - DNA, 120 bp, Artificial Sequence
  ENSG00000133619_12 (sequence is synthesized)
gtgaagaagcgaccagagagcctgttctgcctctgggtctgcagagctgtgtgagagatggccccagcaggcccctggccccccgaggaacccccaccagcttctcctcatccagcagca

SEQ ID NO: 305290 - DNA, 120 bp, Artificial Sequence
  ENSG00000133619_13 (sequence is synthesized)
ccgactgggacctggattttgggagtcctgtggggaaccaggggcagcatcctggaaaaggaagcccaccaggaagctccccactgcagggtctggagaattgtctcaaggagatacctg

SEQ ID NO: 305291 - DNA, 120 bp, Artificial Sequence
  ENSG00000133619_14 (sequence is synthesized)
tgcctgtgctgcggcctgcctggccctgctcctcagcagcagacaggggaccgaggagagcagagcccaggaactggacagcagacaaggaaggactgagggctgaggcctgcgagtcag

SEQ ID NO: 305292 - DNA, 120 bp, Artificial Sequence
  ENSG00000133619_15 (sequence is synthesized)
ccatctggtcagcccacaggtgttcacctccagctgcgtccccgcctgccaccagcgggggttcaaagaccctggggccaccaggccaggagtgtggaggtggctcccagaggggtctgc

SEQ ID NO: 305293 - DNA, 120 bp, Artificial Sequence
  ENSG00000133619_16 (sequence is synthesized)
ccccaagccctccccgctgcactgcctggagagcgccctgagggggatcttgcctgtaaggcccttgcgcttcgcctgcgtgggaggccccagccccagccccagccccggctccagctc

SEQ ID NO: 305294 - DNA, 120 bp, Artificial Sequence
  ENSG00000133619_17 (sequence is synthesized)
gagcttcagcggctctgaaggagaagacccgaggccagagcctgatctctggaagccgctcccccaggagagggaccgccttcccagctgtaagcctcctgtccctctgtccccatgtcc

SEQ ID NO: 305295 - DNA, 120 bp, Artificial Sequence
  ENSG00000133619_18 (sequence is synthesized)
tggtgggacccctgctggcagcagtggcggcagccctggtgaagaccccaggagaacagagcccaggtactgcagcggcctcggtgcaggtacagctcaggatccctgcccggtttctca

SEQ ID NO: 305296 - DNA, 120 bp, Artificial Sequence
  ENSG00000133619_19 (sequence is synthesized)
gctggagaaaaggcccagggttagtgaagcatccagaggcctggagcttggacatggaagacccagagttgcagccaagacccatgagaggctgctcccccagggcccgcctgagctgcc

SEQ ID NO: 305297 - DNA, 120 bp, Artificial Sequence
  ENSG00000133619_20 (sequence is synthesized)
cagtgagtctccccctccggagctgccccctccggaagctgcgcctcctgtgttgccagcctcctccctgcagccgccatgccactgtgggaagcccctgcagcaggagctgcacagcct

SEQ ID NO: 305298 - DNA, 120 bp, Artificial Sequence
  ENSG00000133619_21 (sequence is synthesized)
cggtgctgcccttgcggagaagctggatcggctcgccacagcgctggcaggcctggctcaggaagtggccaccatgaggacccaggtgaatcggctggggaggcgcccccaaggccctgg

SEQ ID NO: 305299 - DNA, 120 bp, Artificial Sequence
  ENSG00000133619_22 (sequence is synthesized)
gccaatgggccaagcttcctggatgtggaccctcccacggggacctcgctgggctcatggccctggtcacagacatctgccctactggaggcagaagggacccacgaggcctaaaccaaa

SEQ ID NO: 305300 - DNA, 120 bp, Artificial Sequence
  ENSG00000133619_23 (sequence is synthesized)
gatcctgcgtggccagggagagagctgcagggctggtgacctgcaaggactctccagagggaccgctcgccgggcacgtccgctgcctccagacgctcccccggcagaacctcctgggct

SEQ ID NO: 305301 - DNA, 120 bp, Artificial Sequence
  ENSG00000133619_24 (sequence is synthesized)
ccactgcagctcttcccagcagctgctgtcctctacacccagctgccatgctgcgccgcctgcacaccccctcctcgcacataccgggggccaccagagcccccttccccctttagtgcc

SEQ ID NO: 305302 - DNA, 120 bp, Artificial Sequence
  ENSG00000133619_25 (sequence is synthesized)
tgctgccttacccctgcagggagcctctcctcctgcagccagtgcagatgcagacgtgccgacctcaggagtggcaccagacgggatcccagagcggcccaaggagccgagcagcctgct

SEQ ID NO: 305303 - DNA, 120 bp, Artificial Sequence
  ENSG00000133619_26 (sequence is synthesized)
gggaggagtgcagagggccctccaggaagaactgtggggtggggagcacagggacccgagatggggggcgcattgatggcattcctcttctccacatctgctcgttcttgccgagggtgc

SEQ ID NO: 305304 - DNA, 120 bp, Artificial Sequence
  ENSG00000133619_27 (sequence is synthesized)
agtggtggcgtggaagccctgtcaccccaccccaggccaccctctcccagaggacgccatctcccttactgttgctgggagcctcgccctttgtcccaactgggtagagcccccaggtgc

SEQ ID NO: 305305 - DNA, 120 bp, Artificial Sequence
  ENSG00000133619_28 (sequence is synthesized)
tgtttgctcaggaggctgctgtgggggtgccttcctcagcctctggccctcttggctcagattcaatcaaatgttgcttccctctcctgtctttcccactggagccgcccaagcttgtag

SEQ ID NO: 305306 - DNA, 120 bp, Artificial Sequence
  ENSG00000133619_29 (sequence is synthesized)
gtgggtggtgtgcataggccacgtgtgccccacatatgcagggggtgccccacacagctagagcggccaggagagcgcctcctaaccaccagccgttcctgatctcaggagccttgaagg

SEQ ID NO: 305307 - DNA, 120 bp, Artificial Sequence
  ENSG00000133619_30 (sequence is synthesized)
gctgggctcttgccttcctggagtaaatattggcacagatttcatttgagagaactcagccccctggtctaagctggacttacctctgtggattctgaaattaaagaagtgagttgctaa

SEQ ID NO: 305308 - DNA, 80 bp, Artificial Sequence
  ENSG00000133619_31 (sequence is synthesized)
gtagtccgcgtctgcgccggccggccgggccgccgaagccgggggctccgggcggaaacggcaccacccaccaagggatg

SEQ ID NO: 305309 - DNA, 80 bp, Artificial Sequence
  ENSG00000133619_32 (sequence is synthesized)
ccgccttctcctgcgcggacctgggccgccgccgacgagggtcgcgtgcgcccgcgccagggcccgcgccggaaaccgag

SEQ ID NO: 305310 - DNA, 120 bp, Artificial Sequence
  ENSG00000133619_33 (sequence is synthesized)
tctaccgagacgtgatgcgggagaactacgagacgctggtctctgtggagcctggaagagctgttgggggagggagccacgctgatgaggggcaggagcctgctggttgtggagatcccc

SEQ ID NO: 305311 - DNA, 120 bp, Artificial Sequence
  ENSG00000133619_34 (sequence is synthesized)
cagaccctggctattatcctggagtgtgcgcctggaggcctaggtggggttaccaagtgcagggacagctaggctgtcccctctgggatggaacaaccaacccccccggagactgtgcct

SEQ ID NO: 305312 - DNA, 120 bp, Artificial Sequence
  ENSG00000133619_35 (sequence is synthesized)
cagactggatcctttgagtcctgcctgtcgctttgcctggctcttgccagggagtcctgcacattggccgtgctttagttccctgtaaggtacagctcaggatccctgcccggtttctca

SEQ ID NO: 305313 - DNA, 120 bp, Artificial Sequence
  ENSG00000133619_36 (sequence is synthesized)
gtccggttctggcaggtgtgtggacccaggcactgggaagactcagcgagccactggaagagcctcatcttcagagttggccccacgcccttctaacttgtcccctgtttgttgtttgtc

SEQ ID NO: 305314 - DNA, 120 bp, Artificial Sequence
  ENSG00000133619_37 (sequence is synthesized)
cagggagcaggacaacatatttagcctctggtgtaaccaccaaagaggaggcatgatgctcagcccctggggagcctgtcatcccgccccgatcactgagcactttgtacacagaaagtc

SEQ ID NO: 305315 - DNA, 120 bp, Artificial Sequence
  ENSG00000133619_38 (sequence is synthesized)
tccggcagtttctaacatgcaggcccacggccagcagcattgacctacctgtgtgcactggtctgatccttagaccgtctcatcacagcaaccctaactgcagagcagggcaaggggagc

SEQ ID NO: 305316 - DNA, 120 bp, Artificial Sequence
  ENSG00000133619_39 (sequence is synthesized)
tcctaggatttctctggggtctcattttatttttaaaacttctcacaaattttgcatgtctgtttttataaaaaagtacttcaaatttatatggaataaaattggcactcccaaagagca

SEQ ID NO: 305317 - DNA, 120 bp, Artificial Sequence
  ENSG00000133619_40 (sequence is synthesized)
ggcgcgccaggtaaggcaggcggacgcgcggacccctcggcgcagtgcggccccgaaggcggtagggcgagaaagagctgggacccccccgcaacttcgggatcggctgggtgaggctgg

SEQ ID NO: 305318 - DNA, 120 bp, Artificial Sequence
  ENSG00000133619_41 (sequence is synthesized)
gcaggcctgatgctcaggggttcgtgccgggaagttcaggtcctcggacaacctctctccagctctccgccgccggtacccacggcccagtctccacctggggaaacccccttggcgtgg

SEQ ID NO: 305319 - DNA, 80 bp, Artificial Sequence
  ENSG00000133627_0 (sequence is synthesized)
cggacggcgacggggcgctctcgggctgccggcggggccgagcgccgcgcgtcccgagcatggcaggctccctgcctccc

SEQ ID NO: 305320 - DNA, 120 bp, Artificial Sequence
  ENSG00000133627_1 (sequence is synthesized)
gcgtcccgagcatggcaggctccctgcctccctgcgtggtggactgtggcaccgggtataccaagcttggctacgcaggcaacactgagccccagttcattattccttcatgtattgcca

SEQ ID NO: 305321 - DNA, 120 bp, Artificial Sequence
  ENSG00000133627_2 (sequence is synthesized)
tcagagagtcagcaaaggtagttgaccaagctcaaaggagagtgttgaggggagttgatgaccttgactttttcataggagatgaagccatcgataaacctacatatgctacaaagtggc

SEQ ID NO: 305322 - DNA, 120 bp, Artificial Sequence
  ENSG00000133627_3 (sequence is synthesized)
cgatacgacatggaatcattgaagactgggatcttatggaaaggttcatggagcaagtggtttttaaatatcttcgagctgaacctgaggaccattattttttaatgacagaacctccac

SEQ ID NO: 305323 - DNA, 120 bp, Artificial Sequence
  ENSG00000133627_4 (sequence is synthesized)
tcaatacaccagaaaacagagagtatcttgcagaaattatgtttgaatcatttaacgtaccaggactctacattgcagttcaggcagtgctggccttggcggcatcttggacatctcgac

SEQ ID NO: 305324 - DNA, 120 bp, Artificial Sequence
  ENSG00000133627_5 (sequence is synthesized)
aagtgggtgaacgtacgttaacggggatagtcattgacagcggagatggagtcacccatgttatcccagtggcagaaggttatgtaattggaagctgcatcaaacacatcccgattgcag

SEQ ID NO: 305325 - DNA, 120 bp, Artificial Sequence
  ENSG00000133627_6 (sequence is synthesized)
gtagagatattacgtatttcattcaacagctgctaagggagagggaggtgggaatccctcctgagcagtcactggagaccgcaaaagccattaaggagaaatactgttacatttgccccg

SEQ ID NO: 305326 - DNA, 120 bp, Artificial Sequence
  ENSG00000133627_7 (sequence is synthesized)
atatagtcaaggaatttgccaagtatgatgtggatccccggaagtggatcaaacagtacacgggtatcaatgcgatcaaccagaagaagtttgttatagacgttggttacgaaagattcc

SEQ ID NO: 305327 - DNA, 120 bp, Artificial Sequence
  ENSG00000133627_8 (sequence is synthesized)
tgggacctgaaatattctttcacccggagtttgccaacccagactttatggagtccatctcagatgttgttgatgaagtaatacagaactgccccatcgatgtgcggcgcccgctgtata

SEQ ID NO: 305328 - DNA, 120 bp, Artificial Sequence
  ENSG00000133627_9 (sequence is synthesized)
ctgcagagggatttgaagagagtggtggatgctaggctgaggctcagcgaggagctcagcggcgggaggatcaagccgaagcctgtggaggtccaggtggtcacgcatcacatgcagcgc

SEQ ID NO: 305329 - DNA, 120 bp, Artificial Sequence
  ENSG00000133627_10 (sequence is synthesized)
tacgccgtgtggttcggaggctccatgctggcctcgactcccgagttctttcaggtctgccacaccaagaaggactatgaagagtacgggcccagcatctgccgccacaaccccgtcttt

SEQ ID NO: 305330 - DNA, 120 bp, Artificial Sequence
  ENSG00000133627_11 (sequence is synthesized)
ggagtcatgtcctagtgtctgcctgaacgcgtcgttcgatggtgtcacgttggggaacaagtgtccttcagaacccagagaaggccgccgttctgtaaatagcgacgtcggtgttgctgc

SEQ ID NO: 305331 - DNA, 120 bp, Artificial Sequence
  ENSG00000133627_12 (sequence is synthesized)
ccagcagcgtgcttgcattgccggtgcatgaggcgcggcgcgggcccttcagtaaaagccatttatccgtgtgccgaccgctgtctgccagcctcctccttctcccgccctcctcaccct

SEQ ID NO: 305332 - DNA, 120 bp, Artificial Sequence
  ENSG00000133627_13 (sequence is synthesized)
cgctctccctcctcctcctcctccgagctgctagctgacaaatacaattctgaaggaatccaaatgtgactttgaaaattgttagagaaaacaacattagaaaatggcgcaaaatcgtta

SEQ ID NO: 305333 - DNA, 120 bp, Artificial Sequence
  ENSG00000133627_14 (sequence is synthesized)
ggtcccaggagagaatgtgggggcgcaaacccttttcctcccagcctatttttgtaaataaaatgtttaaacttgaaatacaaatcgatgtttatatttcctatcattttgtattttatg

SEQ ID NO: 305334 - DNA, 120 bp, Artificial Sequence
  ENSG00000133627_15 (sequence is synthesized)
gtatttggtacaactggctgatactaagcacgaatagatattgatgttatggagtgctgtaatccaaagtttttaattgtgaggcatgttctgatatgtttataggcaaacaaataaaac

SEQ ID NO: 305335 - DNA, 120 bp, Artificial Sequence
  ENSG00000133627_16 (sequence is synthesized)
agcaaacttttttgccacatgtttgctagaaaatgattatactttattggagtgacatgaagtttgaacactaaacagtaatgtatgagaattactacagatacatgtatcttttagttt

SEQ ID NO: 305336 - DNA, 120 bp, Artificial Sequence
  ENSG00000133627_17 (sequence is synthesized)
tttttgtttgaactttctggagctgttttatagaagatgatggtttgttgtcggtgagtgttggatgaaatacttccttgcaccattgtaataaaagctgttagaatatttgtaaatatc

SEQ ID NO: 305337 - DNA, 120 bp, Artificial Sequence
  ENSG00000133627_18 (sequence is synthesized)
tgcctgtaatcccagctactctggaggcagaggcaggagaattgcttgaattctgggaggtggagtctcccagagatccgagattgggctactgcacttgagcctggttgacagagtgag

SEQ ID NO: 305338 - DNA, 120 bp, Artificial Sequence
  ENSG00000133627_19 (sequence is synthesized)
acgctgtctcaaaaaaaaaaaaaaaaaagttttcattacaaattgttgaagcagaaggatatttaaaaatgtatacggaatggagacacctctttttcacttaacaattcatcatagaga

SEQ ID NO: 305339 - DNA, 120 bp, Artificial Sequence
  ENSG00000133627_20 (sequence is synthesized)
cctctttttcacttaacaattcatcatagagattgtttcttcatagagttcatttttttaaattgttccaaagtgtttagtgatgggtatttaggttgtttctgatcttctgatacagac

SEQ ID NO: 305340 - DNA, 120 bp, Artificial Sequence
  ENSG00000133627_21 (sequence is synthesized)
aatgttgactttttacctttccaagctactttgttttagttgggtctcttaacctcagaatgtaatttgattttgtttttgtttttaactgagagacttttagtagttgaatttcccatt

SEQ ID NO: 305341 - DNA, 120 bp, Artificial Sequence
  ENSG00000133627_22 (sequence is synthesized)
tgtatttgctgataattttagtaatagcaactcacttccattgaacacatctgtgtatccagtactgctctaagcacattatttagactgcctttaatctttccaactctctgagtgggg

SEQ ID NO: 305342 - DNA, 120 bp, Artificial Sequence
  ENSG00000133627_23 (sequence is synthesized)
tactaattacctgcactttacccatgaggagactcagggagagaggaaatagcttaccaagcctagtaaagtggaaggctgggatttgatcccagtcagtttgacttcacatctcttaat

SEQ ID NO: 305343 - DNA, 120 bp, Artificial Sequence
  ENSG00000133627_24 (sequence is synthesized)
cggactggtatggcatgctactgtgtgacagatacgtttggtcttaatttaactattttttaaaaatgttatgcttcatgtttttaatgtattttatttatgtattagtattttttaact

SEQ ID NO: 305344 - DNA, 120 bp, Artificial Sequence
  ENSG00000133627_25 (sequence is synthesized)
gaagacttgtttttctctttgctttttattgggtgtgtgttcttggtaataattaaaaggactcatgtttgcatattttagtataatttgatatatttaccctgtatttgtttaggggta

SEQ ID NO: 305345 - DNA, 120 bp, Artificial Sequence
  ENSG00000133627_26 (sequence is synthesized)
actatctccttcctgctgtaatcagtgaccaggttggtattgccacatgttcttgcctccccttccttctctccaccacctgcttttgattaatgatgtcactaaacttattccagtgtt

SEQ ID NO: 305346 - DNA, 120 bp, Artificial Sequence
  ENSG00000133627_27 (sequence is synthesized)
aacatttataactttatgtttactaatgcctctgatactttatcagttttaaataatatcttttgatttcactgtaagaggcaagtgtctttacactctctccttctttccttgtgcact

SEQ ID NO: 305347 - DNA, 120 bp, Artificial Sequence
  ENSG00000133627_28 (sequence is synthesized)
tccttctttccttgtgcactgctcaacttgataacatttttttccattaaaatttataacatttacattctgttcttaattcccagaaaataaaagtctttttttttttttttttttttt

SEQ ID NO: 305348 - DNA, 120 bp, Artificial Sequence
  ENSG00000133627_29 (sequence is synthesized)
caggcatgagccaccgtgcccggccaaagaaaagtctttattcctacatcttaaatggcttcattgctcactgtaagtcttttgctggactttctgcattcttcttgagtggataaagtt

SEQ ID NO: 305349 - DNA, 120 bp, Artificial Sequence
  ENSG00000133627_30 (sequence is synthesized)
agtttatcctctaatagttcatgaacccatacattttggctcatgggaatgaaattttccaagttcttgtatgtttaaggatatatattttttctccttagtattttattttattgtttt

SEQ ID NO: 305350 - DNA, 120 bp, Artificial Sequence
  ENSG00000133627_31 (sequence is synthesized)
gtattttattttattgtttttttttaaattgacacataatgtgcatatttatggggtacagagtgaagttttgatacatataatgtgtggttatcagatcagggtaattagcatatccat

SEQ ID NO: 305351 - DNA, 120 bp, Artificial Sequence
  ENSG00000133627_32 (sequence is synthesized)
ttgattttgtaacatacttgattgacactgtggccagatatagaattcttgggtcgtaccttcttcccttgaagactctaagtgtggccctatgtgtcctagtgttaaatgtagccgtgt

SEQ ID NO: 305352 - DNA, 120 bp, Artificial Sequence
  ENSG00000133627_33 (sequence is synthesized)
tgaaggctgaggctgattgtactttccctgtcgtaggggtgtattagtctactcggctgctgtaattttgtttataccacaggttgggtggcgtaaacagcagacagttcgttgttttct

SEQ ID NO: 305353 - DNA, 120 bp, Artificial Sequence
  ENSG00000133627_34 (sequence is synthesized)
cacagttctggaggttagaagtccaaggtcgaggtgccgtcggggttggctcctggcgcagccctcttcctggcttgtatgtggtcacctttcctgctgggtcctcacatgcctttcccc

SEQ ID NO: 305354 - DNA, 120 bp, Artificial Sequence
  ENSG00000133627_35 (sequence is synthesized)
tgtgtgagcgtagagtggggagagaataggagagagagactgatttctggtgtctcttccttttcttagaagaccttcctccagtcctgtcaaattagggccccacccctatgacctcag

SEQ ID NO: 305355 - DNA, 120 bp, Artificial Sequence
  ENSG00000133627_36 (sequence is synthesized)
gtaaccgtgatgacctcttgaaaggccctatttccaattatagtacactgggagttagggctttaatgtatgaactggaggtagggggagcacagttcattcataataaagggtaatgta

SEQ ID NO: 305356 - DNA, 120 bp, Artificial Sequence
  ENSG00000133627_37 (sequence is synthesized)
tacgttttgcccaaaggtccagagactttttattttttcagttttaaatacgagatatagacccatatttgttgacaaggaaaaatgttcatagtatattgttgaatgagaaaaatcaag

SEQ ID NO: 305357 - DNA, 120 bp, Artificial Sequence
  ENSG00000133627_38 (sequence is synthesized)
tttatttattctttttctgtttctgttgtctgtcattttgtcctgtttgatgacggttattgttttaaaatagatacttggattcttggaaatgtctttggaaattcttggcaattttta

SEQ ID NO: 305358 - DNA, 75 bp, Artificial Sequence
  ENSG00000133627_39 (sequence is synthesized)
attcttggcaatttttatctgctttgtttcaatatttttccagatattttttttttcggtcttttggagacaggt

SEQ ID NO: 305359 - DNA, 83 bp, Artificial Sequence
  ENSG00000133627_40 (sequence is synthesized)
tcctacctcagccttggctgacttttaaattttttcatagaggtggggtctcccaatattgcccaggctggtctcaaactcct

SEQ ID NO: 305360 - DNA, 120 bp, Artificial Sequence
  ENSG00000133627_41 (sequence is synthesized)
gtgatcctccctcctcagcctcctaaagtgctaggatgatgggcgtgagctaccacgcctgcccctggatatgtgtttttgtctgccatttgtttttcctcttttctctgtcccttttct

SEQ ID NO: 305361 - DNA, 120 bp, Artificial Sequence
  ENSG00000133627_42 (sequence is synthesized)
ttctctttgagtgtttttatatcactgttggctggcttctttgtgccccttactcgtctctgaatgagcagagttcttctggactaatggcgtgtgggtaggctggggaggtcctgggca

SEQ ID NO: 305362 - DNA, 120 bp, Artificial Sequence
  ENSG00000133627_43 (sequence is synthesized)
gcgtctgggggaagctgtgatctgccctggactcttcccttgccgctggactgtaagggtgcttggcctaaccctgcctgctctgccaccctgtggctcctcacaccggcctgtcctgag

SEQ ID NO: 305363 - DNA, 120 bp, Artificial Sequence
  ENSG00000133627_44 (sequence is synthesized)
caagggcttgctgctgctcctctggctctcctttgctgagacctgaagtcaccggttcgcctttgatgtcctcactcgtcttggttgtgttttcatagcccttggcaacttgcttctggg

SEQ ID NO: 305364 - DNA, 120 bp, Artificial Sequence
  ENSG00000133627_45 (sequence is synthesized)
atattcagtttcggggtgtttaggtgttacgttattgaagataagagtttctttttctgtaacttgttctaatttgggtgggtaataagaacagaggccttcagagaagtatttactctg

SEQ ID NO: 305365 - DNA, 120 bp, Artificial Sequence
  ENSG00000133627_46 (sequence is synthesized)
acgtcttaaagcttttaaggcccatggccagatttctttaatacactttgggcatcctctgtctgtaaaattagggaattgtataatgtcctcgctaacatactttcaggttaacctgtt

SEQ ID NO: 305366 - DNA, 120 bp, Artificial Sequence
  ENSG00000133627_47 (sequence is synthesized)
tatggttctgatgtatttacatgaaattcgggtaaacactaaatatagtgaatgttttcttacagacagaacctccactcaatacaccagaaaacagagagtatcttgcagaaattatgt

SEQ ID NO: 305367 - DNA, 120 bp, Artificial Sequence
  ENSG00000133636_0 (sequence is synthesized)
atagttcactcactttcaaagccagctgaaggaaagaggaagtgctagagagagcccccttcagtgtgcttctgacttttacggacttggcttgttagaaggctgaaagatgatggcagg

SEQ ID NO: 305368 - DNA, 120 bp, Artificial Sequence
  ENSG00000133636_1 (sequence is synthesized)
aatgaaaatccagcttgtatgcatgctactcctggctttcagctcctggagtctgtgctcagattcagaagaggaaatgaaagcattagaagcagatttcttgaccaatatgcatacatc

SEQ ID NO: 305369 - DNA, 120 bp, Artificial Sequence
  ENSG00000133636_2 (sequence is synthesized)
aaagattagtaaagcacatgttccctcttggaagatgactctgctaaatgtttgcagtcttgtaaataatttgaacagcccagctgaggaaacaggagaagttcatgaagaggagcttgt

SEQ ID NO: 305370 - DNA, 120 bp, Artificial Sequence
  ENSG00000133636_3 (sequence is synthesized)
tgcaagaaggaaacttcctactgctttagatggctttagcttggaagcaatgttgacaatataccagctccacaaaatctgtcacagcagggcttttcaacactgggagttaatccagga

SEQ ID NO: 305371 - DNA, 120 bp, Artificial Sequence
  ENSG00000133636_4 (sequence is synthesized)
agatattcttgatactggaaatgacaaaaatggaaaggaagaagtcataaagagaaaaattccttatattctgaaacggcagctgtatgagaataaacccagaagaccctacatactcaa

SEQ ID NO: 305372 - DNA, 120 bp, Artificial Sequence
  ENSG00000133636_5 (sequence is synthesized)
ttacatgtgattgtgattcatcatcccttaattaaatatcaaattatatttgtgtgaaaatgtgacaaacacacttatctgtctcttctacaattgtggtttattgaatgtgatttttct

SEQ ID NO: 305373 - DNA, 120 bp, Artificial Sequence
  ENSG00000133636_6 (sequence is synthesized)
gcactaatataaattagactaagtgttttcaaataaatctaaatcttcagcatgatgtgttgtgtataattggagtagatattaattaagtcacctgtataatgttttgtaattttgcaa

SEQ ID NO: 305374 - DNA, 120 bp, Artificial Sequence
  ENSG00000133636_7 (sequence is synthesized)
aacatatcttgagttgtttaaacagtcaaaatgtttgatattttataccagcttatgagctcaaagtactacagcaaagcctagcctgcatatcattcacccaaaacaaagtaatagcgc

SEQ ID NO: 305375 - DNA, 120 bp, Artificial Sequence
  ENSG00000133636_8 (sequence is synthesized)
ctcttttattattttgactgaatgttttatggaattgaaagaaacatacgttcttttcaagacttcctcatgaatctctcaattataggaaaagttattgtgataaaataggaacagctg

SEQ ID NO: 305376 - DNA, 120 bp, Artificial Sequence
  ENSG00000133636_9 (sequence is synthesized)
aaagattgattaatgaactattgttaattcttcctattttaatgaatgacattgaactgaattttttgtctgttaaatgaacttgatagctaataaaaagacaactagccatcaaaatca

SEQ ID NO: 305377 - DNA, 120 bp, Artificial Sequence
  ENSG00000133636_10 (sequence is synthesized)
tttttcatctgtgatatatatatcatttatatatttctgccatcattttaatttccttgctttcttactttgctctgtgtgtacacacataagtgcatgtatatgtgaatataactattg

SEQ ID NO: 305378 - DNA, 120 bp, Artificial Sequence
  ENSG00000133636_11 (sequence is synthesized)
cattttattaaacagaagttatgagatattggcagtatacaactttgtgaactgatgttactaaataaataacactatatttattagactggagtagcaattagaccctaaatgtgatgg

SEQ ID NO: 305379 - DNA, 120 bp, Artificial Sequence
  ENSG00000133639_0 (sequence is synthesized)
cgcctctcggagctggaaatgcagctattgagatcttcgaatgctgcggagctggaggcggaggcagctggggaggtccgagcgatgtgaccaggccgccatcgctcgtctcttcctctc

SEQ ID NO: 305380 - DNA, 120 bp, Artificial Sequence
  ENSG00000133639_1 (sequence is synthesized)
tcctgccgcctcctgtctcgaaaataacttttttagtctaaagaaagaaagacaaaagtagtcgtccgcccctcacgccctctcttcctctcagccttccgcccggtgaggaagcccggg

SEQ ID NO: 305381 - DNA, 120 bp, Artificial Sequence
  ENSG00000133639_2 (sequence is synthesized)
gccgcgccgccgagccccagccgccccgggccgcccccgcacgccgcccccatgcatcccttctacacccgggccgccaccatgataggcgagatcgccgccgccgtgtccttcatctcc

SEQ ID NO: 305382 - DNA, 120 bp, Artificial Sequence
  ENSG00000133639_3 (sequence is synthesized)
ccgccgtgtccttcatctccaagtttctccgcaccaaggggctcacgagcgagcgacagctgcagaccttcagccagagcctgcaggagctgctggcagaacattataaacatcactggt

SEQ ID NO: 305383 - DNA, 120 bp, Artificial Sequence
  ENSG00000133639_4 (sequence is synthesized)
tcccagaaaagccatgcaagggatcgggttaccgttgtattcgcatcaaccataaaatggatcctctgattggacaggcagcacagcggattggactgagcagtcaggagctgttcaggc

SEQ ID NO: 305384 - DNA, 120 bp, Artificial Sequence
  ENSG00000133639_5 (sequence is synthesized)
ttctcccaagtgaactcacactctgggttgacccctatgaagtgtcctacagaattggagaggatggctccatctgtgtgctgtatgaagcctcaccagcaggaggtagcactcaaaaca

SEQ ID NO: 305385 - DNA, 120 bp, Artificial Sequence
  ENSG00000133639_6 (sequence is synthesized)
gcaccaacgtgcaaatggtagacagccgaatcagctgtaaggaggaacttctcttgggcagaacgagcccttccaaaaactacaatatgatgactgtatcaggttaagatatagtctgtg

SEQ ID NO: 305386 - DNA, 120 bp, Artificial Sequence
  ENSG00000133639_7 (sequence is synthesized)
gatggatcatctgatgatgatggataaatttgatttttgctttgggtgggctcctcttggggatggattatggaatttaaaccatgtcacagctgtgaagatctggcacaagatagaatg

SEQ ID NO: 305387 - DNA, 120 bp, Artificial Sequence
  ENSG00000133639_8 (sequence is synthesized)
gtaaaaaaaaaaaaaattttaagtgacagtgccatagtttggacagtacctttcaatgattaattttaatagcctgtgagtccaagtaaatgatcactttatttgctagggagggaagtc

SEQ ID NO: 305388 - DNA, 120 bp, Artificial Sequence
  ENSG00000133639_9 (sequence is synthesized)
ctagggtggtttcagtttctcccagacatacctaaatttttacatcaatccttttaaagaaaatctgtatttcaaagaatctttctctgcagtaaatctcgcaggggaatttgcactatt

SEQ ID NO: 305389 - DNA, 120 bp, Artificial Sequence
  ENSG00000133639_10 (sequence is synthesized)
acacttgaaagttgttattgttaaccttttcggcagcttttaataggaaagttaaacgttttaaacatggtagtactggaaattttacaagacttttacctagcacttaaatatgtataa

SEQ ID NO: 305390 - DNA, 120 bp, Artificial Sequence
  ENSG00000133639_11 (sequence is synthesized)
atgtacataaagacaaactagtaagcatgacctggggaaatggtcagaccttgtattgtgtttttggccttgaaagtagcaagtgaccagaatctgccatggcaacaggctttaaaaaag

SEQ ID NO: 305391 - DNA, 120 bp, Artificial Sequence
  ENSG00000133639_12 (sequence is synthesized)
acccttaaaaagacactgtctcaactgtggtgttagcaccagccagctctctgtacatttgctagcttgtagttttctaagactgagtaaacttcttatttttagaaagtggaggtctgg

SEQ ID NO: 305392 - DNA, 120 bp, Artificial Sequence
  ENSG00000133639_13 (sequence is synthesized)
tttgtaactttccttgtacttaattgggtaaaagtcttttccacaaaccaccatctattttgtgaactttgttagtcatcttttatttggtaaattatgaactggtgtaaatttgtacag

SEQ ID NO: 305393 - DNA, 120 bp, Artificial Sequence
  ENSG00000133639_14 (sequence is synthesized)
ttcatgtatattgattgtggcaaagttgtacagatttctatattttggatgagaaatttttcttctctctataataaatcgtttcttatcttggcattttaatcaatctcttgtcatgat

SEQ ID NO: 305394 - DNA, 120 bp, Artificial Sequence
  ENSG00000133639_15 (sequence is synthesized)
tatagaggtttagctaaaagtattttttcttagaagacaggttctataaactgaatctctgttgcacactggtcatgctggaaaaacatttgatgaggaatgaagatgctctgtatatac

SEQ ID NO: 305395 - DNA, 120 bp, Artificial Sequence
  ENSG00000133639_16 (sequence is synthesized)
atgtttaggttttacaggaaacacaggagtagcatgttttaaaaatttctaaagtcaaaacatggacacattcacaggctaatgatctcatgaaataaggataagagaccacggtagcat

SEQ ID NO: 305396 - DNA, 120 bp, Artificial Sequence
  ENSG00000133639_17 (sequence is synthesized)
ctaccaaaaatgtgatactcaaaggattacatttcattgcttccctgttgaagtgaagatataaatgttccattctgacccacctttgaaaaacaattactttgccccatggattctttg

SEQ ID NO: 305397 - DNA, 120 bp, Artificial Sequence
  ENSG00000133639_18 (sequence is synthesized)
ttcaattagaaatttccccggggcaggtgacccatagtcttaaagaacaggctaaacaccacagagagattggttgctttttgcttttcatcacctgcaagatgtacataaaaatcacat

SEQ ID NO: 305398 - DNA, 120 bp, Artificial Sequence
  ENSG00000133639_19 (sequence is synthesized)
attcctcattttcagacttttatttcagataaatactaaaaacctaagtgaaccttgataatgctgtagtgtagattacttcactaccccatataatagaaggacttgctgtttagttgt

SEQ ID NO: 305399 - DNA, 120 bp, Artificial Sequence
  ENSG00000133639_20 (sequence is synthesized)
agaggataacagcgtttttcagtggaaattgaaagtggaaaaattgaattttgctctacacagttaacatatagtggcctttttttggtatatatgtaaacatgttgacactggaaatac

SEQ ID NO: 305400 - DNA, 120 bp, Artificial Sequence
  ENSG00000133639_21 (sequence is synthesized)
gcagtctgaaataaaattagtaattacttgaaattagtaatctcaaataacttttaagaagttatttctacacccaggaataaattattctgattttgtagacaacacaggaataggcca

SEQ ID NO: 305401 - DNA, 120 bp, Artificial Sequence
  ENSG00000133639_22 (sequence is synthesized)
ctgaatatgcaggtatttagagtacaaatgtctgtggatattattggcacaccattctcgagagttagaattcgtagacccgcaacacatggactacccttgccaattgttatggtttta

SEQ ID NO: 305402 - DNA, 120 bp, Artificial Sequence
  ENSG00000133639_23 (sequence is synthesized)
tttttaaacctattctgtgaaaaagctcctcggtatttcaaacttgaattacaataaaaacaccaggtagggttgtttttaaatgggtctcaccccagtgctgactactgttgtttacca

SEQ ID NO: 305403 - DNA, 120 bp, Artificial Sequence
  ENSG00000133639_24 (sequence is synthesized)
actacatttcatctggtaactccattgaaactaagtacctcaaccattttttttttttatcataaagccttttttcaaatggaaagttgtttttgaagatcttgacatcagactttttca

SEQ ID NO: 305404 - DNA, 120 bp, Artificial Sequence
  ENSG00000133639_25 (sequence is synthesized)
atctttgaaaatgatggaaacagttaataaaaatgtttattttagaattcaggtgatgtctggcttgtgaggagctgtttataagtttgtctttgaaaaaggcttgcacacatcactctg

SEQ ID NO: 305405 - DNA, 120 bp, Artificial Sequence
  ENSG00000133639_26 (sequence is synthesized)
agaccagctgtttcctgtgactttaaccttaccttccccagacaattgagctgaacctgtatctgcggtacagtagctgtttgtgatgtatttcttgttcactgtttctggggaatgttt

SEQ ID NO: 305406 - DNA, 120 bp, Artificial Sequence
  ENSG00000133639_27 (sequence is synthesized)
tgaaatattttattataaatccttttaagataggatgactactttcaaaattattgttgcctttggcaccaggaattcatagttgtgattggcagtaagtttgaggagtgttactttcta

SEQ ID NO: 305407 - DNA, 120 bp, Artificial Sequence
  ENSG00000133639_28 (sequence is synthesized)
agttttaacaggtagttttgaaattatttccttttttccaaatttaagtagtgcctccctctgtaatgttgaaacaaggcttcaagtggattgtatagcaagagttaccctggttcatgc

SEQ ID NO: 305408 - DNA, 120 bp, Artificial Sequence
  ENSG00000133639_29 (sequence is synthesized)
aggataatgcggctgttatctttgtcatctggaatgggaatctcatgtctttatccttatgtgcaatatttctataataatagactggaaaggccaccagaaagtggctttcaggtacat

SEQ ID NO: 305409 - DNA, 120 bp, Artificial Sequence
  ENSG00000133639_30 (sequence is synthesized)
tgcacaaatagtttccttaagtcattataactcacacattgcaagtaattaattttgttttgtataggtgttgcagtttatgaaattggccttcaagttaaaaggaaggaagccgtattc

SEQ ID NO: 305410 - DNA, 120 bp, Artificial Sequence
  ENSG00000133639_31 (sequence is synthesized)
ccgatggctagtgtttaatgactacaggtttccaggctccctttaatcttgggagcaaataaatctactattggacttctccctgcgtgacttttaacatttctgatactctctcttctt

SEQ ID NO: 305411 - DNA, 120 bp, Artificial Sequence
  ENSG00000133639_32 (sequence is synthesized)
cctctttacagaagagaggtatgataactgaagttgtactttgcatattgaagtttaaagatacttcctctccccttttcacccctatttcaaatgatgtgataaaatcctcttgatagg

SEQ ID NO: 305412 - DNA, 120 bp, Artificial Sequence
  ENSG00000133639_33 (sequence is synthesized)
ctatatggagaacatttgtcaatagttttatctatgcatggaagtcttcaaaaagtatatcttggattgtctaaaactgaatagatttcttatttatctgaaggtatacagactgccaac

SEQ ID NO: 305413 - DNA, 120 bp, Artificial Sequence
  ENSG00000133639_34 (sequence is synthesized)
attttagacttatctctcagtctctgccactgaacttttatatatggctgctatcaaaatataaccggtttattttcatatttggaactaatataacagtatcacaaaatcttttacagt

SEQ ID NO: 305414 - DNA, 120 bp, Artificial Sequence
  ENSG00000133639_35 (sequence is synthesized)
aagatagtttgtaataccagccgacccagctgcttaactgagtccttaaatcatttaatatatgggactgtaaatagagaaatctgtacattatgagatctgatttctggttatgcctat

SEQ ID NO: 305415 - DNA, 120 bp, Artificial Sequence
  ENSG00000133639_36 (sequence is synthesized)
agatctttattttctttatccctatagatcattttcttctgatgttaagtgttatatttttgaaatgctcctaaacaagtaagccttagattgtattaatcctgaggattgataccattt

SEQ ID NO: 305416 - DNA, 120 bp, Artificial Sequence
  ENSG00000133639_37 (sequence is synthesized)
cctcaacactttgtggagtatgattgacaccagtttttttttgactgcaggtttaacttggcttatcacttttcgtattgctcagtatgtccaagataggaataaaaaaatgtagttcaa

SEQ ID NO: 305417 - DNA, 120 bp, Artificial Sequence
  ENSG00000133639_38 (sequence is synthesized)
agcggttccccgcgaggctttaggggctggacggagggcgcccccttccccccagctggcaaaacggagaggagaagacaacacgcacaacaaagaaacttaagcccaccgaggcgggag

SEQ ID NO: 305418 - DNA, 120 bp, Artificial Sequence
  ENSG00000133640_0 (sequence is synthesized)
gtgtagcggctatgggcgctgtcttacaacaaagccaaggaatctcgctgctgagggttctgtgctttattatgaagaataatggacgatgatgatgcaaagctcaaagcagaaatagaa

SEQ ID NO: 305419 - DNA, 120 bp, Artificial Sequence
  ENSG00000133640_1 (sequence is synthesized)
gctgaattggataaactcagcatttcctccttggaaaaagaagacattgagagtgatgcaaaatcagaaacccagagtgatgatagtgatacagattcagttgaattaccagaatcagtt

SEQ ID NO: 305420 - DNA, 120 bp, Artificial Sequence
  ENSG00000133640_2 (sequence is synthesized)
cttcactgtattaacatcataaagaacaggagtaaagctgttgaagagctcattcttcaggacctggaagatactgatattttaagctgtagttatggagcagtttctaataatcatatg

SEQ ID NO: 305421 - DNA, 120 bp, Artificial Sequence
  ENSG00000133640_3 (sequence is synthesized)
catttaagaacaggactatcaactgaatatgaagaaagttcagagcaattaattaagatattatctgaaatagaaaaagaagaatttatgagaagtaaaaccgattgtgccactcctgat

SEQ ID NO: 305422 - DNA, 120 bp, Artificial Sequence
  ENSG00000133640_4 (sequence is synthesized)
tttgttcctgagcctagtcctcatgacttgcctatggatgaacatgttttaccagatgatgctgatataaattttggatactgtgaagtggaagaaaaatgtagacagtcttttgaggct

SEQ ID NO: 305423 - DNA, 120 bp, Artificial Sequence
  ENSG00000133640_5 (sequence is synthesized)
tggcaagagaaacagaaggaattagaagataaagagaaacaaactctcaaagctcagagggatagagaagaaaaacaatttcaagaagaagaagaaaagcgacattgctggatgaaacaa

SEQ ID NO: 305424 - DNA, 120 bp, Artificial Sequence
  ENSG00000133640_6 (sequence is synthesized)
tttaaagttgaaaagaagaaattagagaacattcagaagcaagaacaggacaagatgaatgatgaactctataaagaagagaaaatttggaaagagaaatttaaacagcatgaggagtat

SEQ ID NO: 305425 - DNA, 120 bp, Artificial Sequence
  ENSG00000133640_7 (sequence is synthesized)
attagaaacttgcatttacaaatggaagaagaaagaacaagatttaaagaccaacaagaaaaagaaaaaaattctttgttaaaacagcagaataatgcagctgttaaaattcaagctaaa

SEQ ID NO: 305426 - DNA, 120 bp, Artificial Sequence
  ENSG00000133640_8 (sequence is synthesized)
tataaagcatttgttgcctatcaaaaatatggcccaattattaaagagcaaattgaaagtaagaaaaggaaagcacaagagtggaaggaaaaggaagcaaaaatacgacaaaaggaggaa

SEQ ID NO: 305427 - DNA, 120 bp, Artificial Sequence
  ENSG00000133640_9 (sequence is synthesized)
gaaaatcgaaaaagattagaggaggaacaaaggataaaagaagagagaaaaaagcaaaaggaagaggaaaggaaaaggagagaaaaagaatatgaagaaaaaaagaatattgtgaaacag

SEQ ID NO: 305428 - DNA, 120 bp, Artificial Sequence
  ENSG00000133640_10 (sequence is synthesized)
gaaagagagcaactaataagcaaggaaaaaataatattaagagaagatgcaagccaacagctaataataagtagtgcattaaagaagagcggatataataacaaacatttaagtcttgaa

SEQ ID NO: 305429 - DNA, 120 bp, Artificial Sequence
  ENSG00000133640_11 (sequence is synthesized)
gatatttcaaatgataagggtgatatagccaaaaatctagtggatgaaaattcaaagaagcaggaagatgttctcctttggctagttgaggaatcaaatatgaaagaaaatgtagataga

SEQ ID NO: 305430 - DNA, 120 bp, Artificial Sequence
  ENSG00000133640_12 (sequence is synthesized)
cagactatattaaaagaatcaatacaagtaaagttaaaagaatctatatcaagccaaacaattctggcagattttaaaatggaagaaaaaaatgaaaacctagcaaaaaaacgatgttca

SEQ ID NO: 305431 - DNA, 120 bp, Artificial Sequence
  ENSG00000133640_13 (sequence is synthesized)
gaagaattggtcaagcaagaaagaaaatatgaaaatacagataacaaaactgaattgggaaactctgatctaaaaggaaatctgaaagaacagtttccattgcaagaattaaagtctgat

SEQ ID NO: 305432 - DNA, 120 bp, Artificial Sequence
  ENSG00000133640_14 (sequence is synthesized)
gcacaaaaagaagaaaaaatcatgaaacatgtcataaatgagaatacaggacaaaaaacccagataatattaggacataaccaagaaatcagtgaggtgaaaaccaatgaagagcagaaa

SEQ ID NO: 305433 - DNA, 120 bp, Artificial Sequence
  ENSG00000133640_15 (sequence is synthesized)
ataatcaaagataatcagcagaaaaagatacaaaaagtagaaaaagaagagatacaagaacagaatggattattatataaagataaggatactttagttatttcagtgaaacaaagatca

SEQ ID NO: 305434 - DNA, 120 bp, Artificial Sequence
  ENSG00000133640_16 (sequence is synthesized)
ctctcactaacatcagaaaattccaaagatgtaagagaaaacgtaatattacaagaaaaagaaatttattcaaaatccaaagaaattgaggagaacccaaaagacaatgcttggaatagt

SEQ ID NO: 305435 - DNA, 120 bp, Artificial Sequence
  ENSG00000133640_17 (sequence is synthesized)
ggcattgtgatttttaacacaactgataccatgataaatatagaaggcaaaagaaatgaccaagattatgtgttaggtagacatgctccttgtgagggcttgagtaactataatgcagaa

SEQ ID NO: 305436 - DNA, 120 bp, Artificial Sequence
  ENSG00000133640_18 (sequence is synthesized)
agctccatggtatctaaagaagtcaactctcttaaatctgagattagaaatatttcagaaaaatgccatgaaaatgcacctgaacctgatagcatgacctgctgtgtatcagagtcaacc

SEQ ID NO: 305437 - DNA, 120 bp, Artificial Sequence
  ENSG00000133640_19 (sequence is synthesized)
cttctatattctattgaagaaaggagactagcctggataaaatcatttaaaccttggcttgaaattttcaagcaaaatcaacaaaagaaaattgttagaagaaagagacctgtgaaatgc

SEQ ID NO: 305438 - DNA, 120 bp, Artificial Sequence
  ENSG00000133640_20 (sequence is synthesized)
ccagccaacatgacacccgctttggataaactggaaattcttcgatgtggcccttgggatactttacagcaggttacaacagttacatttcaagatttgccaggctgtgttctctccaca

SEQ ID NO: 305439 - DNA, 120 bp, Artificial Sequence
  ENSG00000133640_21 (sequence is synthesized)
ctggcagagtgtacaaatcttcagtttctatcccttcgacgctgtggattaacttctttgcacagcctgagtaattgtaaaaaacttaagtacattgatgcacaggaaaaccatattgag

SEQ ID NO: 305440 - DNA, 120 bp, Artificial Sequence
  ENSG00000133640_22 (sequence is synthesized)
aaatttggaaaatctctgtgttgttcttcttaataaaaatcaactgacttctcttcatggtttggatggctgtactaatattcagtgtcttgaactttcatataataaaattactcgaat

SEQ ID NO: 305441 - DNA, 120 bp, Artificial Sequence
  ENSG00000133640_23 (sequence is synthesized)
tggatattccttctttctggaagaaaaacttgttgacaatgcagggttctgccatcacttgggcacctccacttcttacttatccctggcacaagtctggattccaactggattatgttg

SEQ ID NO: 305442 - DNA, 120 bp, Artificial Sequence
  ENSG00000133640_24 (sequence is synthesized)
gtcctggatacctattacctcacttacaaaaaattcagattgtaatttccttatctcccacttatactggaattgtggtttagaatctttgaaaaatcttcaacaactaattttggacca

SEQ ID NO: 305443 - DNA, 120 bp, Artificial Sequence
  ENSG00000133640_25 (sequence is synthesized)
caatcagttaattaatacaaaaggtctttgtgatacacctaccattgtatacctagattgctcccataatcatcttactgatgtagagggcgttgaaaattgtggattgctccaaatatt

SEQ ID NO: 305444 - DNA, 120 bp, Artificial Sequence
  ENSG00000133640_26 (sequence is synthesized)
gaagttacagggaaattatctgagtgagcttccatccttggagaatcttgttttactaagagaattgcacttggatgataacagcatttcaactgtggaagcattttcttcatactggct

SEQ ID NO: 305445 - DNA, 120 bp, Artificial Sequence
  ENSG00000133640_27 (sequence is synthesized)
gcctttactacaaaatattactatctctcaaaacagcttgactaaaatcgtaccactttttcattttgtttcattggaaaagctagatgtcagccacaattgtctttctgatcttaaaag

SEQ ID NO: 305446 - DNA, 120 bp, Artificial Sequence
  ENSG00000133640_28 (sequence is synthesized)
tgccataaaatggtttgatgcatgctattctctccatgaattgtctcttactggaaacccacttcttcaagaaacaaactggagggattctctacttaaagtgttgcctgctctgagaat

SEQ ID NO: 305447 - DNA, 120 bp, Artificial Sequence
  ENSG00000133640_29 (sequence is synthesized)
cctcaatggcaatatactaaactctaattcagaaagccgcactgaagaacacaatcaactgggatcagcaggtttcctggcactttgtcagtctcagattcgagaattcaacttgctaat

SEQ ID NO: 305448 - DNA, 120 bp, Artificial Sequence
  ENSG00000133640_30 (sequence is synthesized)
tgaaaattatataactggaaaaggagatgtatttaccttggatactgcagaaaatctctgtcattattttaagaaattgatgatacttagtactgaataccgacatgcacacgaacgagg

SEQ ID NO: 305449 - DNA, 120 bp, Artificial Sequence
  ENSG00000133640_31 (sequence is synthesized)
ggatgtaactatcaccaagaaagatgaatcagaagcccagaaaaatcatttggcccctacaaacagtgacagcactctgcaaaatggagtcttctactcttgtgcacgtgaaggtgagcc

SEQ ID NO: 305450 - DNA, 120 bp, Artificial Sequence
  ENSG00000133640_32 (sequence is synthesized)
agactcaccagatattcctgagaaatggatggactctgtctccagccactccccattaagcaaatccgccacatgtgaaaatatggaaggaagacatcaggaaatattagtatgtcagaa

SEQ ID NO: 305451 - DNA, 120 bp, Artificial Sequence
  ENSG00000133640_33 (sequence is synthesized)
gagagaagacagcaaggcaagcagtattcccaccataagaatcccatttaaggaagtagtaatgacaaattctttgctgaggaatcaccaaaatattgagcctagtgaaaaaattatggc

SEQ ID NO: 305452 - DNA, 120 bp, Artificial Sequence
  ENSG00000133640_34 (sequence is synthesized)
agctgtggtaatccagtcatactggcgtggttacctcatgcgcagacagactcatttctccacaaggctacatactgctgcaacagaaggcctgccaaattcttccatcaagaatcagac

SEQ ID NO: 305453 - DNA, 120 bp, Artificial Sequence
  ENSG00000133640_35 (sequence is synthesized)
tattttaaagaaaggaaaaagagaaaatattgtgaatatccgaaaacagagggagaaggctgctattcttattcaggcagtttggaagggctttattttgcgaaagaaactgacaacagc

SEQ ID NO: 305454 - DNA, 120 bp, Artificial Sequence
  ENSG00000133640_36 (sequence is synthesized)
tctagaggctattaagaatgaagaatccgatgaagaatacagagaaatagatttagaggattttatatttgatgaagctgccttagaagaagaatggctagcattagattccacccgctt

SEQ ID NO: 305455 - DNA, 120 bp, Artificial Sequence
  ENSG00000133640_37 (sequence is synthesized)
cccttcacaaacactgcttctttcaaaccagctgcattggccaaagattcctggaaacttaaaatgggatgatacttcatttaatttaccaagtaatccagctcaagcatggttatgtaa

SEQ ID NO: 305456 - DNA, 120 bp, Artificial Sequence
  ENSG00000133640_38 (sequence is synthesized)
tgacaaagaaaatttgtcttcttcagaacacacacaatttaatagcagatcagaaaataaaacttcttcctggacacctgaatcaaagaccagtagaaagagtttgctaaaatctgaaaa

SEQ ID NO: 305457 - DNA, 120 bp, Artificial Sequence
  ENSG00000133640_39 (sequence is synthesized)
agaaaaaaaaatttcagaagaatggggctttaaggatatttctactgctcagcaaatgttgaagagggcacagaaaatgaaatcgaagaaactaaagaaaaaaatagattccactgtgcg

SEQ ID NO: 305458 - DNA, 120 bp, Artificial Sequence
  ENSG00000133640_40 (sequence is synthesized)
tctagccttattcaaaaacaatgaaaataaagtgtctcttccaaaatcaccaaagatggtacagcccagaagagatggttactttgaaggtatagaagaagaccctatccacaaagatac

SEQ ID NO: 305459 - DNA, 120 bp, Artificial Sequence
  ENSG00000133640_41 (sequence is synthesized)
cactgcaaatgaaaaattagaacggaatagagaatatacataccaatggcttcacacacaggttggggttcatgaaacgactagttccagaaatatgaaatgcaatcactttttgcctga

SEQ ID NO: 305460 - DNA, 120 bp, Artificial Sequence
  ENSG00000133640_42 (sequence is synthesized)
gttagatccagatgtacttaatggtggaagagttcagcttgtggcaagacttgtaagcagagaagacacggatttagaccttttttccatgaccaatggaagtgctttgtctgtgaacag

SEQ ID NO: 305461 - DNA, 120 bp, Artificial Sequence
  ENSG00000133640_43 (sequence is synthesized)
agaaaaaaaaaatcaggcacacagacactcagcaggatcttcaagtaagttgtggtttccttcaaaattaatttagaaatcacaaacgaattgatggaacctaatgccaacaagcattct

SEQ ID NO: 305462 - DNA, 120 bp, Artificial Sequence
  ENSG00000133640_44 (sequence is synthesized)
ttttcagatagggggtaggatgccagcaacctgaactgcccaaaaatgtgtatttaaattttttctttctttaaatatcctcttttgatataaacaaaattaaattatttctaaaattaa

SEQ ID NO: 305463 - DNA, 120 bp, Artificial Sequence
  ENSG00000133640_45 (sequence is synthesized)
gttggacagaggaagagacagaagattccactgtgcgtctagccttattcaaaaacaatgaaaataaagtgtctcttccaaaatcaccaaagatggtacagcccagaagagatggttact

SEQ ID NO: 305464 - DNA, 120 bp, Artificial Sequence
  ENSG00000133640_46 (sequence is synthesized)
atcattccgagacaatcctgtacaactcagtggtggatggggaagtggcaaaaagaaggcgaacatttccaactaatccttaaggcttcagcattcaaaacatgtggcaaactgtttcat

SEQ ID NO: 305465 - DNA, 120 bp, Artificial Sequence
  ENSG00000133640_47 (sequence is synthesized)
gaagtctggatatctagtcatgttaccaactggatacaaggttttagactcctatatttaatttggtttattatacgtatttcacaagtttgttttctagtggagctatcttatttctct

SEQ ID NO: 305466 - DNA, 120 bp, Artificial Sequence
  ENSG00000133640_48 (sequence is synthesized)
tccagaaaattcttaagatattgtaatggaacttgcatatccagtttttttagttttaatttttatgacacatgtattccagatagcttttgttaccaataataaatattaatgctatac

SEQ ID NO: 305467 - DNA, 120 bp, Artificial Sequence
  ENSG00000133640_49 (sequence is synthesized)
acataaaagagaatgtaactgtcttactgatgctgtttaatgtagcaataatgattaatatattaataaactttattagattatcgtacttgagtatttcaaagataaattaatacatgg

SEQ ID NO: 305468 - DNA, 120 bp, Artificial Sequence
  ENSG00000133640_50 (sequence is synthesized)
atagaaatttaagtaattaccaattggataattggatattttatctgtaacgtcagatgtttattacccttatttatagaggtagatgctaattttggttcatttacattattatactaa

SEQ ID NO: 305469 - DNA, 120 bp, Artificial Sequence
  ENSG00000133640_51 (sequence is synthesized)
agaaatactttatcattttaatttttcattaaggtaccttaaaattgtcatttaaaagtactttttcaaagttcaacttaccattttgtaatattaacctattttctaaaattacagacc

SEQ ID NO: 305470 - DNA, 120 bp, Artificial Sequence
  ENSG00000133640_52 (sequence is synthesized)
gacccattttattaaagtcttactgttgtgtgattaatgttctaccctatcttagtaaatttacaaaatgctgtgtttacacttagttctcattgagctgttactctcccgagtctggaa

SEQ ID NO: 305471 - DNA, 120 bp, Artificial Sequence
  ENSG00000133640_53 (sequence is synthesized)
cttttttcataaagctaaattcatagtatttcagttactttccacagctgtgttgctcaataatagcatccagtgaactttagtatttttttgtttttcctgtattttattaaaatattt

SEQ ID NO: 305472 - DNA, 120 bp, Artificial Sequence
  ENSG00000133640_54 (sequence is synthesized)
catctagagataactgaagtgatgtagagatacttgtattaatttgtatcccccatctacttttggatccctattgcattgcaaacctataaatctcttttaacttgattgagatagaaa

SEQ ID NO: 305473 - DNA, 120 bp, Artificial Sequence
  ENSG00000133640_55 (sequence is synthesized)
cgttaatgagacttcagctgtcaatcaataaagaagatgtagattcatatgtggtgtcctagaatttccactccatgtatagttggaactacatcaagatcagctttaatctataatttc

SEQ ID NO: 305474 - DNA, 120 bp, Artificial Sequence
  ENSG00000133640_56 (sequence is synthesized)
cttattctgtaacctgtgtaattgtttcataatattaactttgaggatgatgaatggtgctgatgctcctaaatttgtaggtaatgattgatatatatgtcaataaaatactttcctaat

SEQ ID NO: 305475 - DNA, 120 bp, Artificial Sequence
  ENSG00000133640_57 (sequence is synthesized)
ctagtgctcaaataaatggcactttaagatatgtttataattaaactatgaaaatatcacaactgtatctatttgggataatatcaaaatatcatgtgttaaaataataacatgttttct

SEQ ID NO: 305476 - DNA, 120 bp, Artificial Sequence
  ENSG00000133640_58 (sequence is synthesized)
tgacttgtaatacaatttaaaatgtgacattgcttaaaaatgttaattttatgtgacagatgtaaaaatattagcatcctacaactttaaaataaaattactgtggatggaaaattgaaa

SEQ ID NO: 305477 - DNA, 120 bp, Artificial Sequence
  ENSG00000133640_59 (sequence is synthesized)
atcacaatcatatttcataccgattccattatgttttcgtgaggtgcattatgttttcatgaggtgcacaaatcattaattatagtgcatattaatttgattaaattctcatttaatttc

SEQ ID NO: 305478 - DNA, 120 bp, Artificial Sequence
  ENSG00000133640_60 (sequence is synthesized)
ggatacgctttgtgtagcggctatgggcgctgtcttacaacaaagccaaggaatctcgctgctgagggcagttctgtgctttattatgaagaataatggacgatgatgatgcaaagctca

SEQ ID NO: 305479 - DNA, 120 bp, Artificial Sequence
  ENSG00000133640_61 (sequence is synthesized)
gaggtccttgattagtttttattgaaattcattggaaggtcagacacacttctgatcttgggggccaatggagtctatgaatttcaagggtcatcatggatagcctgaaatttacaatat

SEQ ID NO: 305480 - DNA, 120 bp, Artificial Sequence
  ENSG00000133640_62 (sequence is synthesized)
aaattgttgtttttctttatatgcttctaaacattggaaaaagcaatgaaaaattcttgagtatgcattaaccttgctctgtggtctggcatatgacatgtaaaacatatttaaaagtag

SEQ ID NO: 305481 - DNA, 120 bp, Artificial Sequence
  ENSG00000133640_63 (sequence is synthesized)
ttcaaccatttagagtcagtctgcgccccaccttcataattaagctacttccttgaactggcaactttttggtgtgaagttttgtactgttttcatttctgtcgtatgtgttgttggtgt

SEQ ID NO: 305482 - DNA, 120 bp, Artificial Sequence
  ENSG00000133640_64 (sequence is synthesized)
tgttttccccctaggagatccacacaatcagatcatagtggtggtatatcggtattgagaaactggtggattttaggacaccacttgcaggtcatgagaaccttagaatatttggataac

SEQ ID NO: 305483 - DNA, 120 bp, Artificial Sequence
  ENSG00000133640_65 (sequence is synthesized)
aggcatgactgacttctctatctttcatgattaaagttgatttatacattatccagaacttgctgggtttgagtgttgcatataaagaacattagcttgttcaacattttttaatcctcc

SEQ ID NO: 305484 - DNA, 85 bp, Artificial Sequence
  ENSG00000133640_66 (sequence is synthesized)
tataaagaacattagcttgttcaacattttttaatcctccatgttgaggacatttcatttcttgactgtgtagaaaataaacaca

SEQ ID NO: 305485 - DNA, 60 bp, Artificial Sequence
  ENSG00000133640_67 (sequence is synthesized)
ggtgaaaccccgtctctactaaaaatagagaaaattagccaggcatagtggcgggcgcct

SEQ ID NO: 305486 - DNA, 120 bp, Artificial Sequence
  ENSG00000133641_0 (sequence is synthesized)
gcggagtgtgcgtggcctgagccgtgcgggtgactgcttcagggcttctccgcgactggaccgggcgccgctcgaaagcacgccctccattcgcactgcttgttgggctcatcatgaagc

SEQ ID NO: 305487 - DNA, 120 bp, Artificial Sequence
  ENSG00000133641_1 (sequence is synthesized)
gcttgggctccgtgcagcggaaaatgccgtgtgtgtttgtgacggaggtgaaagaggagccttcctccaaaagggagcatcagccatttaaagttttggcaactgaaactgtaagtcaca

SEQ ID NO: 305488 - DNA, 120 bp, Artificial Sequence
  ENSG00000133641_2 (sequence is synthesized)
aggcattagatgcagatatatacagtgcaattccaacagaaaaagtggatggaacatgttgttatgttactacctataaagatcagccatacctttgggctcgactagatagaaaaccca

SEQ ID NO: 305489 - DNA, 120 bp, Artificial Sequence
  ENSG00000133641_3 (sequence is synthesized)
acaaacaagctgaaaaaagatttaaaaattttctacattcaaaagaaaacccaaaagaatttttttggaacgttgaggaggacttcaaaccagctccggagtgctggataccagcaaagg

SEQ ID NO: 305490 - DNA, 120 bp, Artificial Sequence
  ENSG00000133641_4 (sequence is synthesized)
agacagaacaaataaatgggaacccagtgcctgatgaaaatggacacattcctggttgggtaccagtagagaaaaacaacaaacagtattgctggcattcctctgtagttaattatgaat

SEQ ID NO: 305491 - DNA, 120 bp, Artificial Sequence
  ENSG00000133641_5 (sequence is synthesized)
ttgaaattgccctggtactaaaacatcatcctgatgattctggacttttggaaattagtgcagtgccactttcagatctcttagaacaaacactggaactcataggaacaaatatcaatg

SEQ ID NO: 305492 - DNA, 120 bp, Artificial Sequence
  ENSG00000133641_6 (sequence is synthesized)
gaaacccatatgggttagggagcaagaaacatccattacatcttcttataccacatggagcatttcaaataagaaatctaccttcattgaagcacaatgatctcgtgtcctggtttgaag

SEQ ID NO: 305493 - DNA, 120 bp, Artificial Sequence
  ENSG00000133641_7 (sequence is synthesized)
attgcaaagagggtaaaattgaaggaatagtgtggcattgcagtgatggctgtttaataaaggtccatcgccatcatcttggcttatgctggccaattccagatacttacatgaattcaa

SEQ ID NO: 305494 - DNA, 120 bp, Artificial Sequence
  ENSG00000133641_8 (sequence is synthesized)
gaccagttattatcaacatgaacctgaacaaatgtgactctgcctttgatattaagtgtttgtttaatcattttttaaaaatagataatcagaaatttgttagactcaaagatataatat

SEQ ID NO: 305495 - DNA, 120 bp, Artificial Sequence
  ENSG00000133641_9 (sequence is synthesized)
taaaatgcaaataaaattagtttatcattatattctaatcttgaatattctaccatatttaaaaatatctcaaggtttctgttcattatgaaacatcaatatgttttctaccatttgtga

SEQ ID NO: 305496 - DNA, 120 bp, Artificial Sequence
  ENSG00000133641_10 (sequence is synthesized)
atttgtgaagaaatgaattttccagtttcaagtacctattcaaaattttattaaaaaccagcaaattaattttaatctctagccataaaaacataagtaatagtaagctcctaagcttgg

SEQ ID NO: 305497 - DNA, 120 bp, Artificial Sequence
  ENSG00000133641_11 (sequence is synthesized)
tcaaaattaaatagtttaagctcaatttaattttgctagatatttaacaaaacatacggctcaacctcataacctatatgtgtgtatgtctacatctgtgtatatatcataggatttgag

SEQ ID NO: 305498 - DNA, 120 bp, Artificial Sequence
  ENSG00000133641_12 (sequence is synthesized)
aatcttaacacatgtataaataagtatatataaactccaattttaaatcttaaaattgctgaatttaccctcatattctttaaaaaacttaaagcattatgaatgtagagaaattcacca

SEQ ID NO: 305499 - DNA, 120 bp, Artificial Sequence
  ENSG00000133641_13 (sequence is synthesized)
gagctcactgcctatttgatggctgtaacaagtcttcaagtatatacttttataataagttgaaaatttcatataattttatttattaagaattccaatctaagtataaaggtacaaggt

SEQ ID NO: 305500 - DNA, 120 bp, Artificial Sequence
  ENSG00000133641_14 (sequence is synthesized)
agtgagaaggaaatactacagttcggagaactgcttatttccaagtatatttaacttataaagttaataaatagttaaatgaaacaaagtttataggtgacctttagtaaatggggaaat

SEQ ID NO: 305501 - DNA, 120 bp, Artificial Sequence
  ENSG00000133641_15 (sequence is synthesized)
taacaggactttcttcttcatcttcaaactcttcagaagcagcaacagggctagttaattcaactcccaattgttctgaaagtttttttaccttctcttctaagagaatattcttcttca

SEQ ID NO: 305502 - DNA, 120 bp, Artificial Sequence
  ENSG00000133641_16 (sequence is synthesized)
cttcttccttgtaattatacttaagatcttcaatttcttcaaaaaatgaaggatcaaaattttccagttcttttttcagcttctttatttcctcctaatggaaacattatctttaaaagt

SEQ ID NO: 305503 - DNA, 120 bp, Artificial Sequence
  ENSG00000133641_17 (sequence is synthesized)
tgcatataggaaatatacatattttacgtttgaacaaggagatttaattgtaaatatgaaagccaaagtattcctgaatggtcaaatacagcaataaaggcagaagaattaagatttttc

SEQ ID NO: 305504 - DNA, 120 bp, Artificial Sequence
  ENSG00000133641_18 (sequence is synthesized)
tttgttccattgtacagtgtaaataactaagttgttaactgtcaagtccagttatgtattctgtaagttgtgttctagtctttgactaaaatttatcatctcttataatgggacttaatc

SEQ ID NO: 305505 - DNA, 120 bp, Artificial Sequence
  ENSG00000133641_19 (sequence is synthesized)
tttctctaaaagcatataagagcttgtcaatagagcaatcaatcaaaaagattttgtgattcataacattgaagttagtctggttaagagttttggtttagacttcatttatattttcct

SEQ ID NO: 305506 - DNA, 120 bp, Artificial Sequence
  ENSG00000133641_20 (sequence is synthesized)
tactaatatctaatatttaatgaataatgatcaattttttataaagttattaatatgatcagggaaacctttgggacttctgacaggcatctggtgaagagacaattcaagccttagtga

SEQ ID NO: 305507 - DNA, 120 bp, Artificial Sequence
  ENSG00000133641_21 (sequence is synthesized)
ctatttagaatagccagtgatcactagctaattctcatatccatgcctttttgtcctgtttacagtcttaaaagaggtaaaacagcaaatatttttttaagggaactataaccttaggat

SEQ ID NO: 305508 - DNA, 120 bp, Artificial Sequence
  ENSG00000133641_22 (sequence is synthesized)
tcctgaaaagaatttcaaaaaaaaaataaagacactgttgccaatgtgacccaaaacttaagaacatactaatggcatatatttgttacaattaaaaaataaatttactacttaatccta

SEQ ID NO: 305509 - DNA, 120 bp, Artificial Sequence
  ENSG00000133641_23 (sequence is synthesized)
ccgggcaggcttggcggcccgcgtgggctcctccccgcggcgctggctcagtgcgaacccggcgagggcggctgggcgctttagaactgccctgcaggccaggaacctctgtaggtttcc

SEQ ID NO: 305510 - DNA, 120 bp, Artificial Sequence
  ENSG00000133641_24 (sequence is synthesized)
ctggggaggtctggggtgggagttccgtacgccctgagctccaggttcttgtacttttcttagttgtgagggagggaatttgcgaaagaattttccttatcaggagattcaaacttgtcc

SEQ ID NO: 305511 - DNA, 120 bp, Artificial Sequence
  ENSG00000133641_25 (sequence is synthesized)
atgaaaatggacacattcctggtatcatgatatctcttctagtgcagttttgtgtttactagtaaaatgatcaaaatatccattcaatcagaaattacagaattttaatctgggtcttca

SEQ ID NO: 305512 - DNA, 120 bp, Artificial Sequence
  ENSG00000133641_26 (sequence is synthesized)
ttaatatgtatagcacagaatttctgaatcaaatttatgtaaagtcctacatacattttatatcaaagatgtttcatatcaagaatgtcctcttaggtttagaatcttttctaagatggg

SEQ ID NO: 305513 - DNA, 120 bp, Artificial Sequence
  ENSG00000133641_27 (sequence is synthesized)
ttaggtttagaatcttttctaagatgggcattttttactagctgtagtctgtgacaataaagcgtcaaaagagaatagccttgaggccaggtgcagtggtcacacctgtaatcccagcac

SEQ ID NO: 305514 - DNA, 86 bp, Artificial Sequence
  ENSG00000133641_28 (sequence is synthesized)
ttgggcatggcattgtgcgcctgtagtctcagctactcgggagactaatgtgggaaacacctaagccccggaagttgagactgcag

SEQ ID NO: 305515 - DNA, 120 bp, Artificial Sequence
  ENSG00000133641_29 (sequence is synthesized)
aatgtgggaaacacctaagccccggaagttgagactgcagtgaaccatgatcgtgccactgcactctagcctgagagttggactgtgaccttgtctcaaaaaaacaacaaaagaagaggg

SEQ ID NO: 305516 - DNA, 120 bp, Artificial Sequence
  ENSG00000133641_30 (sequence is synthesized)
aatagcttccaagttcttgtcaggatagatgagatgatctagtctgaaatgagatttcaagaagtggctatacctttagattagggatgggaaaattttgcgaaggtatgctgaatagga

SEQ ID NO: 305517 - DNA, 120 bp, Artificial Sequence
  ENSG00000133641_31 (sequence is synthesized)
agatatcccagattaaggttataggttctcaaccggcatgtcttgagtgcccattatgtgcaaagtcctcttagtttctggtaatacaaaaatgaaggtcagaacccttgtcctcaatga

SEQ ID NO: 305518 - DNA, 120 bp, Artificial Sequence
  ENSG00000133641_32 (sequence is synthesized)
ctggagaaaagaggaattcctcattcagcttgtggttagtggaggctcccaagaggagtagacatctgtactgaagcttaaggaccaggaagtcagctgacaaggaagagggaagatcag

SEQ ID NO: 305519 - DNA, 120 bp, Artificial Sequence
  ENSG00000133641_33 (sequence is synthesized)
cttaggcaaactcccaggaagagggaatatcagcttaggcaaactcccaggaagaggagagggcatggggtattttgaatattttatgtaacactttattgcagctagaatgttcagggt

SEQ ID NO: 305520 - DNA, 120 bp, Artificial Sequence
  ENSG00000133641_34 (sequence is synthesized)
atatgacatcatgaagtggctgtaaaagttgaggctagaagtgtggtgggctcagatcggaaaggcccttttattccatctaaaggagtttgaagtttatcctgaagataatggttttta

SEQ ID NO: 305521 - DNA, 120 bp, Artificial Sequence
  ENSG00000133641_35 (sequence is synthesized)
atcagtggtacagcaaaagcaaatttaagttttagaaatagaactatgataaaagtgggttggatttcactggaggctaggtgaccagcaaagaagttattacagtaatctagtgtgagt

SEQ ID NO: 305522 - DNA, 120 bp, Artificial Sequence
  ENSG00000133641_36 (sequence is synthesized)
aatgaaggaattctggcaataagaatgagaagggtaatagcaataacattcaataaacgtggcatcagtaaattgttcggtatatattggaacattttaataaacttggaacacttaact

SEQ ID NO: 305523 - DNA, 120 bp, Artificial Sequence
  ENSG00000133641_37 (sequence is synthesized)
gcattatgtccattgtccctgaagcttgagagaaggcagagagaaaacttattttatataaaaaattttgagtgctgtgtcttagaataatgttcagttcttaatgaataagggtgaatt

SEQ ID NO: 305524 - DNA, 120 bp, Artificial Sequence
  ENSG00000133641_38 (sequence is synthesized)
ttctagtaagagaatgctaggtgctgtgtagtgaataataggttaattctacagaataaaaaatgaacccttatgattttttaaaaagtaataaactgttaactttcccactgaatttta

SEQ ID NO: 305525 - DNA, 120 bp, Artificial Sequence
  ENSG00000133641_39 (sequence is synthesized)
aagtaatatctctttgcgatagacacccagaaaacatgagaaatttacaacaaaaatataaattacctgtagtgtcagtccaaagaaaaacgatctaataacaaataattttcttcttta

SEQ ID NO: 305526 - DNA, 120 bp, Artificial Sequence
  ENSG00000133641_40 (sequence is synthesized)
aacgataatacagttttaatctggttcttcatattatttatctggatagctaataagtagtacagaatatttggaccactgtgcagcagtttctttataaaccttggatttgtatacttg

SEQ ID NO: 305527 - DNA, 120 bp, Artificial Sequence
  ENSG00000133641_41 (sequence is synthesized)
agaaaactgtaaaagattttttagactttgatgtctattaagaaactatagtgtgtatcattatgcgtgaggacggcaaactgggttagaatttaactgctaaactcaagtcacagaacc

SEQ ID NO: 305528 - DNA, 120 bp, Artificial Sequence
  ENSG00000133641_42 (sequence is synthesized)
caaagtgacaatgcttacaaatccacatttattactactaaagaattactactaaattattactactaaggcattaaaagtaaagatgtgtattatagccaaggactgtctcacagtaag

SEQ ID NO: 305529 - DNA, 120 bp, Artificial Sequence
  ENSG00000133641_43 (sequence is synthesized)
gagtatggagaggccaagtaaaagctactattgttccctgctttagagccttggcaggacacattttcttagatcaggaaccacttatgtgtgcaggcaaacagcttggaaccagggaat

SEQ ID NO: 305530 - DNA, 120 bp, Artificial Sequence
  ENSG00000133641_44 (sequence is synthesized)
gcaaaatggactcacagctggagatttttatatttttgctggtcacgtaggtaggcagctgatgctcagcttcaacagcagagccctccagggttctcagaccaagctatcagtctcact

SEQ ID NO: 305531 - DNA, 120 bp, Artificial Sequence
  ENSG00000133641_45 (sequence is synthesized)
cctaccaataaagaatactagcacagtgccctgcaactcctcagatccatgagtacaaatcaacattattagtattttcatgccttgatcaggggtcagtgccatgcagaacagctcagc

SEQ ID NO: 305532 - DNA, 120 bp, Artificial Sequence
  ENSG00000133641_46 (sequence is synthesized)
ctgattccagatgtgtcagaattaacccttacagcacagtgttatgtttggggggaaggggtggggtaaatacagttatctggttatgtttccattttgaagaggtagcttcagttgtcc

SEQ ID NO: 305533 - DNA, 120 bp, Artificial Sequence
  ENSG00000133641_47 (sequence is synthesized)
tttaaccagagaaataagtcttctcatagcatcaggtactgctaggaggtatatattcttagactccatatttccctttgtcttctttgagaaattagcctcctgtttgttgacaaactg

SEQ ID NO: 305534 - DNA, 120 bp, Artificial Sequence
  ENSG00000133641_48 (sequence is synthesized)
gggaggtgacagttgatagttgtgaaagttgttgtctctgagattcgtgaaacacgccgctttttagaatgcctctgaaagaacaaagaagtcactggcactcgactataatatgctaaa

SEQ ID NO: 305535 - DNA, 120 bp, Artificial Sequence
  ENSG00000133657_0 (sequence is synthesized)
tttattcaaataataggagctctacgagtgacagatggcagaagggcacatcttctgaaaacttactaaaaattggtgaattacaaaattctaaattttaataccttaatcattttgaaa

SEQ ID NO: 305536 - DNA, 120 bp, Artificial Sequence
  ENSG00000133657_1 (sequence is synthesized)
gcagttcagacagaaccgaaacagaaatatttggcataaaattccaaatttttatgcttagttttatttttattattaaaagccagcttttgaaagctgtgcaaatatcaggaattggga

SEQ ID NO: 305537 - DNA, 120 bp, Artificial Sequence
  ENSG00000133657_2 (sequence is synthesized)
agaatgatgatatagtgctactggtaagaaaaatttcttcaatttgttttctctgatatcgaatttgacttggttaaaaaacgtgtgctccagcagtccagaaaagttatatttcttgat

SEQ ID NO: 305538 - DNA, 120 bp, Artificial Sequence
  ENSG00000133657_3 (sequence is synthesized)
cttccattgtttgaagcactggacctttaatccactgtaggtatggacagggaagaaaggaagaccatcaatcagggtcaagaagatgaaatggagatttatggttacaatttgagtcgc

SEQ ID NO: 305539 - DNA, 120 bp, Artificial Sequence
  ENSG00000133657_4 (sequence is synthesized)
tggaagcttgccatagtttctttaggagtgatttgctctggtgggtttctcctcctcctcctctattggatgcctgagtggcgggtgaaagcgacctgtgtcagagctgcaattaaagac

SEQ ID NO: 305540 - DNA, 120 bp, Artificial Sequence
  ENSG00000133657_5 (sequence is synthesized)
tgtgaagtagtgctgctgaggactactgatgaattcaaaatgtggttttgtgcaaaaattcgcgttctttctttggaaacttacccagtttcaagtccaaaatctatgtctaataagctt

SEQ ID NO: 305541 - DNA, 120 bp, Artificial Sequence
  ENSG00000133657_6 (sequence is synthesized)
tcaaatggccatgcagtttgtttaattgagaatcccactgaagaaaataggcacaggatcagtaaatattcacagactgaatcacaacagattcgttatttcacccaccatagtgtaaaa

SEQ ID NO: 305542 - DNA, 120 bp, Artificial Sequence
  ENSG00000133657_7 (sequence is synthesized)
tatttctggaatgataccattcacaattttgatttcttaaagggactggatgaaggtgtttcttgtacgtcaatttatgaaaagcatagtgcaggactgacaaaggggatgcatgcctac

SEQ ID NO: 305543 - DNA, 120 bp, Artificial Sequence
  ENSG00000133657_8 (sequence is synthesized)
agaaaactgctttatggagtaaatgaaattgctgtaaaagtgccttctgtttttaagcttctaattaaagaggttctcaacccattttacattttccagctgttcagtgttatactgtgg

SEQ ID NO: 305544 - DNA, 120 bp, Artificial Sequence
  ENSG00000133657_9 (sequence is synthesized)
agcactgatgaatactattactatgctctagctattgtggttatgtccatagtatcaatcgtaagctcactatattccattagaaagcaatatgttatgttgcatgacatggtggcaact

SEQ ID NO: 305545 - DNA, 120 bp, Artificial Sequence
  ENSG00000133657_10 (sequence is synthesized)
catagtaccgtaagagtttcagtttgtagagtaaatgaagaaatagaagaaatcttttctaccgaccttgtgccaggagatgtcatggtcattccattaaatgggacaataatgccttgt

SEQ ID NO: 305546 - DNA, 120 bp, Artificial Sequence
  ENSG00000133657_11 (sequence is synthesized)
gatgctgtgcttattaatggtacctgcattgtaaacgaaagcatgttaacaggagaaagtgttccagtgacaaagactaatttgccaaatccttcagtggatgtgaaaggaataggagat

SEQ ID NO: 305547 - DNA, 120 bp, Artificial Sequence
  ENSG00000133657_12 (sequence is synthesized)
gaattatataatccagaaacacataaacgacatactttgttttgtgggacaactgttattcagactcgtttctacactggagaactcgtcaaagccatagttgttagaacaggatttagt

SEQ ID NO: 305548 - DNA, 120 bp, Artificial Sequence
  ENSG00000133657_13 (sequence is synthesized)
acttccaaaggacagcttgttcgttccatattgtatcccaaaccaactgattttaaactctacagagatgcctacttgtttctactatgtcttgtggcagttgctggcattgggtttatc

SEQ ID NO: 305549 - DNA, 120 bp, Artificial Sequence
  ENSG00000133657_14 (sequence is synthesized)
tacactattattaatagcattttaaatgaggtacaagttggggtcataattatcgagtctcttgatattatcacaattactgtgccccctgcacttcctgctgcaatgactgctggtatt

SEQ ID NO: 305550 - DNA, 120 bp, Artificial Sequence
  ENSG00000133657_15 (sequence is synthesized)
gtgtatgctcagagaagactgaaaaaaatcggtattttctgtatcagtcctcaaagaataaatatttgtggacagctcaatcttgtttgctttgacaagactggaactctaactgaagat

SEQ ID NO: 305551 - DNA, 120 bp, Artificial Sequence
  ENSG00000133657_16 (sequence is synthesized)
ggtttagatctttgggggattcaacgagtggaaaatgcacgatttctttcaccagaagaaaatgtgtgcaatgagatgttggtaaaatcccagtttgttgcttgtatggctacttgtcat

SEQ ID NO: 305552 - DNA, 120 bp, Artificial Sequence
  ENSG00000133657_17 (sequence is synthesized)
tcacttacaaaaattgaaggagtgctctctggtgatccacttgatctgaaaatgtttgaggctattggatggattctggaagaagcaactgaagaagaaacagcacttcataatcgaatt

SEQ ID NO: 305553 - DNA, 120 bp, Artificial Sequence
  ENSG00000133657_18 (sequence is synthesized)
atgcccacagtggttcgtcctcccaaacaactgcttcctgaatctacccctgcaggaaaccaagaaatggagctgtttgaacttccagctacttatgagataggaattgttcgccagttc

SEQ ID NO: 305554 - DNA, 120 bp, Artificial Sequence
  ENSG00000133657_19 (sequence is synthesized)
ccattttcttctgctttgcaacgtatgagtgtggttgccagggtgctgggggataggaaaatggacgcctacatgaaaggagcgcccgaggccattgccggtctctgtaaacctgaaaca

SEQ ID NO: 305555 - DNA, 120 bp, Artificial Sequence
  ENSG00000133657_20 (sequence is synthesized)
gttcctgtcgattttcaaaacgttttggaagacttcactaaacagggcttccgtgtgattgctcttgcacacagaaaattggagtcaaaactgacatggcataaagtacagaatattagc

SEQ ID NO: 305556 - DNA, 120 bp, Artificial Sequence
  ENSG00000133657_21 (sequence is synthesized)
agagatgcaattgagaacaacatggattttatgggattaattataatgcagaacaaattaaagcaagaaacccctgcagtacttgaagatttgcataaagccaacattcgcaccgtcatg

SEQ ID NO: 305557 - DNA, 120 bp, Artificial Sequence
  ENSG00000133657_22 (sequence is synthesized)
gtcacaggtgacagtatgttgactgctgtctctgtggccagagattgtggaatgattctacctcaggataaagtgattattgctgaagcattacctccaaaggatgggaaagttgccaaa

SEQ ID NO: 305558 - DNA, 120 bp, Artificial Sequence
  ENSG00000133657_23 (sequence is synthesized)
ataaattggcattatgcagactccctcacgcagtgcagtcatccatcagcaattgacccagaggctattccggttaaattggtccatgatagcttagaggatcttcaaatgactcgttat

SEQ ID NO: 305559 - DNA, 120 bp, Artificial Sequence
  ENSG00000133657_24 (sequence is synthesized)
cattttgcaatgaatggaaaatcattctcagtgatactggagcattttcaagaccttgttcctaagttgatgttgcatggcaccgtgtttgcccgtatggcacctgatcagaagacacag

SEQ ID NO: 305560 - DNA, 120 bp, Artificial Sequence
  ENSG00000133657_25 (sequence is synthesized)
ttgatagaagcattgcaaaatgttgattattttgttgggatgtgtggtgatggcgcaaatgattgtggtgctttgaagagggcacacggaggcatttccttatcggagctcgaagcttca

SEQ ID NO: 305561 - DNA, 120 bp, Artificial Sequence
  ENSG00000133657_26 (sequence is synthesized)
gtggcatctccctttacctctaagactcctagtatttcctgtgtgccaaaccttatcagggaaggccgtgctgctttaataacttccttctgtgtgtttaaattcatggcattgtacagc

SEQ ID NO: 305562 - DNA, 120 bp, Artificial Sequence
  ENSG00000133657_27 (sequence is synthesized)
attatccagtacttcagtgttactctgctgtattctatcttaagtaacctaggagacttccagtttctcttcattgatctggcaatcattttggtagtggtatttacaatgagtttaaat

SEQ ID NO: 305563 - DNA, 120 bp, Artificial Sequence
  ENSG00000133657_28 (sequence is synthesized)
cctgcctggaaagaacttgtggcacaaagaccaccttcgggtcttatatctggggcccttctcttctccgttttgtctcagattatcatctgcattggatttcaatctttgggttttttt

SEQ ID NO: 305564 - DNA, 120 bp, Artificial Sequence
  ENSG00000133657_29 (sequence is synthesized)
tgggtcaaacagcaaccttggtatgaagtgtggcatccaaaatcagatgcttgtaatacaacaggaagcgggttttggaattcttcacacgtagacaatgaaaccgaacttgatgaacat

SEQ ID NO: 305565 - DNA, 120 bp, Artificial Sequence
  ENSG00000133657_30 (sequence is synthesized)
tatacaaaattatgaaaataccacagtgttttttatttccagttttcagtacctcatagtggcaattgccttttcaaaaggaaaacccttcaggcaaccttgctacaaaaattatttttt

SEQ ID NO: 305566 - DNA, 120 bp, Artificial Sequence
  ENSG00000133657_31 (sequence is synthesized)
tgttttttctgtgatttttttatatatttttatattattcatcatgttgtatccagttgcctctgttgaccaggttcttcagatagtgtgtgtaccatatcagtggcgtgtaactatgct

SEQ ID NO: 305567 - DNA, 120 bp, Artificial Sequence
  ENSG00000133657_32 (sequence is synthesized)
catcattgttcttgtcaatgcctttgtgtctatcacagtggaggagtcagtggatcggtggggaaaatgctgcttaccctgggccctgggctgtagaaagaagacaccaaaggcaaagta

SEQ ID NO: 305568 - DNA, 120 bp, Artificial Sequence
  ENSG00000133657_33 (sequence is synthesized)
catgtatctggcgcaggagctcttggttgatccagaatggccaccaaaacctcagacaaccacagaagctaaagctttagttaaggagaatggatcatgtcaaatcatcaccataacata

SEQ ID NO: 305569 - DNA, 120 bp, Artificial Sequence
  ENSG00000133657_34 (sequence is synthesized)
gcagtgaatcagtctcagtggtattgctgatagcagtattcaggaatatgtgattttaggagtttctgatcctgtgtgtcagaatggcactagttcagtttatgtcccttctgatatagt

SEQ ID NO: 305570 - DNA, 120 bp, Artificial Sequence
  ENSG00000133657_35 (sequence is synthesized)
agcttatttgacagctttgctcttccttaaaataaaaacagaaaaatatatcgtcctaacagttaaattaacaatcaatccataaagtcctatatcttcattcagcaacccaaatattac

SEQ ID NO: 305571 - DNA, 120 bp, Artificial Sequence
  ENSG00000133657_36 (sequence is synthesized)
atacatttccagaattttcttgattgttactttcagtgatattctttatattgggtacaggagaagtttggtgtttggtaggtttttcaacattagtttttgagactagtttacctcttc

SEQ ID NO: 305572 - DNA, 120 bp, Artificial Sequence
  ENSG00000133657_37 (sequence is synthesized)
acatttatgctcacaaccctcttgttagaaaagtctgtgtttatatacaggctgtaagtttgtgattgataaaaagaagatgagtgttaattagcctccagtgaaaatatactgaaagcc

SEQ ID NO: 305573 - DNA, 120 bp, Artificial Sequence
  ENSG00000133657_38 (sequence is synthesized)
tgttttcatttgattccaatgtttcttccaaagaattctgtataaacatatgccaattccctatgatggtctagagttaggaatgagtgtttatggtgttgcttatagaacaactcaggt

SEQ ID NO: 305574 - DNA, 120 bp, Artificial Sequence
  ENSG00000133657_39 (sequence is synthesized)
aatctccatttctggttttatattttctgtacaaactgcctgggttttatttttctaatcagcaaggtgcttcactgccttcttgagacgcctctcaaagctcttaaatggctcctgtgc

SEQ ID NO: 305575 - DNA, 120 bp, Artificial Sequence
  ENSG00000133657_40 (sequence is synthesized)
tatgtgtggtgttggcagtctaatttgcttctgttaaatgttgtagaacctttttcactaggaaataagattcatttctttcggcagtagatgtagattcatcttttaacgtttcttcaa

SEQ ID NO: 305576 - DNA, 120 bp, Artificial Sequence
  ENSG00000133657_41 (sequence is synthesized)
atttgtttctgtcaggctttgtgttattttaaatggttttttaaaattttcttctatgttttcaattacctaaagacataggataatagttttttttaagttagaattttacctcataaa

SEQ ID NO: 305577 - DNA, 120 bp, Artificial Sequence
  ENSG00000133657_42 (sequence is synthesized)
attttttgaggtttgatgtatgtctctgtcttatcaataatgaggcttaaaaaatactggatttgaatggctgccgttttttcaaagcaatatgaatttgatgagtttgttttatgccat

SEQ ID NO: 305578 - DNA, 120 bp, Artificial Sequence
  ENSG00000133657_43 (sequence is synthesized)
taggtggcgccagaggtcagaacatgtctattttgaattggatcgttacaaatgagcatatttgatgcggaaatttctgggagaaaaaaaattgaggaaataaagttaaaaaattgacat

SEQ ID NO: 305579 - DNA, 120 bp, Artificial Sequence
  ENSG00000133657_44 (sequence is synthesized)
tcattgagccaaaagagatgtggagaaacatttttcacctttctgtttggcctgattaacatttaaattcttgccaaaattaaggtaacttttaaaaaacaccttttataggtggatcca

SEQ ID NO: 305580 - DNA, 120 bp, Artificial Sequence
  ENSG00000133657_45 (sequence is synthesized)
gcagtctggcaacgcccacagttaccacaacacagaaaactgatcgtgctataaaatggacgctaaactatgaaaacagtgtgacattgttctctgttcttccagagccagtaacatgct

SEQ ID NO: 305581 - DNA, 120 bp, Artificial Sequence
  ENSG00000133657_46 (sequence is synthesized)
tgctcgtgctttctacttctagctgatcattcttttcccaacatatatttacaaatttaccaaattttacctagaattttaggaccaaatggttctcactctttatgctgcaaagacctg

SEQ ID NO: 305582 - DNA, 120 bp, Artificial Sequence
  ENSG00000133657_47 (sequence is synthesized)
gatgatgtttggtaactatagaaaaatagaaattacactcaggatcactgttactgctattgccactgatgattcctgcaaaaatataatcgaagttttccatcaaatgtataatatgct

SEQ ID NO: 305583 - DNA, 120 bp, Artificial Sequence
  ENSG00000133657_48 (sequence is synthesized)
attaatacacattagatgataacagttgttccatgaatgattctatgaagctatgcatcttagacctcttgagctgtgaattagcactattttctatagttacttattctctggatcatt

SEQ ID NO: 305584 - DNA, 120 bp, Artificial Sequence
  ENSG00000133657_49 (sequence is synthesized)
ttataatttccatattaatttcaaatatgctcgtgttattcttcagtgatttccacaattgtgcattttattctttggtttaagtactgaagcatataatgaaagtaattgctaagtagc

SEQ ID NO: 305585 - DNA, 120 bp, Artificial Sequence
  ENSG00000133657_50 (sequence is synthesized)
agcttaaaaattcaattatccgattgtatttaacatctttaagagcatgatcataaagagctatttttgacaccccccccccacttttttaacatttagagttagtaagggttttatatc

SEQ ID NO: 305586 - DNA, 120 bp, Artificial Sequence
  ENSG00000133657_51 (sequence is synthesized)
tcttctgtccatattgttttcaaaggaatgaggtgtttaggtggctggaaaagcatttgtaggaagttagatttgaatatagacaaggtgggttattcacgttgagaatgttatttgaag

SEQ ID NO: 305587 - DNA, 120 bp, Artificial Sequence
  ENSG00000133657_52 (sequence is synthesized)
aatgcctgtgaagccaggtgtgggttctactcagtgccatagatagactgagtcttctctcgtaggttaccattacatagtaattttgattctgaatttcacattaaattatttgagttt

SEQ ID NO: 305588 - DNA, 120 bp, Artificial Sequence
  ENSG00000133657_53 (sequence is synthesized)
atacagacctaaattttaaaatctgtacatatattattttgatgtattaagatgaatattgctgatttaaattttatttatgcacatacttaaaggacagaaatgtctgggaaagtaatt

SEQ ID NO: 305589 - DNA, 120 bp, Artificial Sequence
  ENSG00000133657_54 (sequence is synthesized)
gttaaataatgatatgtaactttttaactttttaaataaataacaagatttttaatgtgtgtctccctcagggttgtttaaagttttttttctccctcaagtataaatagtggtaactat

SEQ ID NO: 305590 - DNA, 120 bp, Artificial Sequence
  ENSG00000133657_55 (sequence is synthesized)
atgttttgtatcttctagcaccaactgctgtaaagcaatgctgcaaataatgcttgaatacaagtggctaagccaacaacagaataaatacttttatagtagttttataatcctgaaatt

SEQ ID NO: 305591 - DNA, 120 bp, Artificial Sequence
  ENSG00000133657_56 (sequence is synthesized)
cgaaagctttcccaattgcacttgcatctaaacaaaactgttgcagtttttactctatttattttgttccccatgtttatgaaagtcctgcacagtttcaaaggcatggtaaataatata

SEQ ID NO: 305592 - DNA, 120 bp, Artificial Sequence
  ENSG00000133657_57 (sequence is synthesized)
tcaatgtttatgtagtctgttacagaaacagctatagataacattatccagtgaagagcaaaattcaagctttagaaaatattcatgcatgcaattttgacatatctaaaaataggtttt

SEQ ID NO: 305593 - DNA, 120 bp, Artificial Sequence
  ENSG00000133657_58 (sequence is synthesized)
tgtatatttatggtgggaggtggttgggaacttttaacaaaatggggtgttaatttttgtacagtctgtgggcatttacacatttttaatgtattaaaatttggtaattatgtgtacatt

SEQ ID NO: 305594 - DNA, 120 bp, Artificial Sequence
  ENSG00000133657_59 (sequence is synthesized)
aaattaataaaagttacttctagttatgatttgtgaattccctaagaccttggatttttttaagtaactttatatcagaaatgatactgcatctttatatttttaaaattgtattgctgc

SEQ ID NO: 305595 - DNA, 120 bp, Artificial Sequence
  ENSG00000133657_60 (sequence is synthesized)
tcaagaatggtaccctcttgtcaaaaaggcatacattcataattgtacattcagcattgtaaataatcttatgaaaccttttttgattgaagctattcaaaataaaaattttaatgaatg

SEQ ID NO: 305596 - DNA, 120 bp, Artificial Sequence
  ENSG00000133657_61 (sequence is synthesized)
cttctgcctcagcctgagtagctgggatgggactacagatgcacgccaccacacatggctaatttttttattttttagagacgaggtcccatgtgagccacggtgccccaccttttaaag

SEQ ID NO: 305597 - DNA, 120 bp, Artificial Sequence
  ENSG00000133657_62 (sequence is synthesized)
caattaccgtaaggaagcaactgtctttagcaaatagaagatcataaacatccttctggagatcttgagatgttgactgtggtttatagggcaatgaaaatctacatacctgagtggggc

SEQ ID NO: 305598 - DNA, 120 bp, Artificial Sequence
  ENSG00000133657_63 (sequence is synthesized)
agtgagacatgagtgccacctatgatccttccagtgagcaattctttctggtgccaggagcccaaaggaaactcagtcaaccagctgtagatgggcttgttccgagtttgttctagaagt

SEQ ID NO: 305599 - DNA, 120 bp, Artificial Sequence
  ENSG00000133657_64 (sequence is synthesized)
cagaactgccagctctgaaagtaggtcacaagtgactggccatccctgggctgctcacaggaagtagctgcaaaggtcagggaaagtttttaatgactatacaggccagtgaatgacagg

SEQ ID NO: 305600 - DNA, 120 bp, Artificial Sequence
  ENSG00000133657_65 (sequence is synthesized)
ctttgaggagcttctcttcttggcatctgaaacagcatactttctgactaccgctgtgtgctgtgaggggctgaggatccagatgtggctgaggaaggtcctggctcatgaggaggtgga

SEQ ID NO: 305601 - DNA, 120 bp, Artificial Sequence
  ENSG00000133657_66 (sequence is synthesized)
agtctgggtgcttaaacagataatccagagttttgatgcgagatgaactcattctggtgaatcactctggcttcatttggttatagtggtcaagagtttggccctggagcaaagtgtctg

SEQ ID NO: 305602 - DNA, 120 bp, Artificial Sequence
  ENSG00000133657_67 (sequence is synthesized)
ccgcctgcctgccggctctccccgcagcgtgatcgggcgccgccgcggaggggaggggggttctctacgtcgctggcggcgggggggccgtttcggagtgcagaccgcccccctcccctg

SEQ ID NO: 305603 - DNA, 120 bp, Artificial Sequence
  ENSG00000133657_68 (sequence is synthesized)
cgtttcggagtgcagaccgcccccctcccctgcccacctcccgccgccctcccttgttctcgccctgccggctgcacgccgccgccgcgggcgcggaggaggaggagagcgcggacgtcc

SEQ ID NO: 305604 - DNA, 80 bp, Artificial Sequence
  ENSG00000133657_69 (sequence is synthesized)
ccgccgcggcgcctccttccctcaccctgagccgcagcgcgcggcgccggccgagggcgatggggctgggctgaggcgag

SEQ ID NO: 305605 - DNA, 120 bp, Artificial Sequence
  ENSG00000133657_70 (sequence is synthesized)
cgcggtccctggggctggtccggccgcgagggaggccgcggaggaggcggcgcggcggcggccagtgagcggccccgatctgacagacatccctgaatcttggtgtttggacataggagt

SEQ ID NO: 305606 - DNA, 120 bp, Artificial Sequence
  ENSG00000133657_71 (sequence is synthesized)
tggaatgataccattcacaattttgatttcttaaagtaagtatcttccttttgtttggattgtattttgaatatcctgaaaacgttctagatagaaaagagtccattctagtattcataa

SEQ ID NO: 305607 - DNA, 120 bp, Artificial Sequence
  ENSG00000133657_72 (sequence is synthesized)
ggcagagtttacatgaaacttagagtcagtatgatgccaaagtctactgagtctgagttcttacctgtttcacctcaaagtgattttgagtatacctcatagcctgtgtctcaacttaga

SEQ ID NO: 305608 - DNA, 120 bp, Artificial Sequence
  ENSG00000133657_73 (sequence is synthesized)
gtatctgaatcattacctgttggtttactgacacttaaagcctgtggtacttgaggagtagagtaataggcaaagagaaatttaattttactatgtagataaagaatggggcaagctgta

SEQ ID NO: 305609 - DNA, 120 bp, Artificial Sequence
  ENSG00000133657_74 (sequence is synthesized)
aagaaccatacattatcgttactctgccagcccagtcatggagactgtagtagattctcagcaagtacatgtttgatacgttcacgtttccattttaatttcaatacatttaaaatattt

SEQ ID NO: 305610 - DNA, 120 bp, Artificial Sequence
  ENSG00000133657_75 (sequence is synthesized)
attgaatacatgttttaaatgataatctcattttgccacacatagtttagtctcttatttgtgcattatgtattggctttattatcttacaaagtagctatccatttgggcgacatacaa

SEQ ID NO: 305611 - DNA, 120 bp, Artificial Sequence
  ENSG00000133657_76 (sequence is synthesized)
atgtctgtgaaggtctgagtcttatttttttaagtgctgattattttctgaaggactttcacggttaaagttaatggagtttaaacataacatcacgttgtgtatgtgaatcttttgggt

SEQ ID NO: 305612 - DNA, 120 bp, Artificial Sequence
  ENSG00000133657_77 (sequence is synthesized)
catcaactgaagtgaaagtattcaaaaccaaatttacaaatgacagtataccagctgttattggatgcctttttatataaaggaatttcctaatttacttgttttacttttgctgtcttt

SEQ ID NO: 305613 - DNA, 120 bp, Artificial Sequence
  ENSG00000133657_78 (sequence is synthesized)
tccagatttttttgttttttctgtgatttttttatatatttttatattattcatcatgttgtatccagttgcctctgttgaccaggttcttcagatagtgtgtgtaccatatcagtggcg

SEQ ID NO: 305614 - DNA, 120 bp, Artificial Sequence
  ENSG00000133657_79 (sequence is synthesized)
cagtaactataaaaatggaagagagagatacagttgtgatttttaagttaagagtttcatagcacaggcttttggatcaaaataaaggtaatttttttgagaaatatatatgcatatatt

SEQ ID NO: 305615 - DNA, 120 bp, Artificial Sequence
  ENSG00000133657_80 (sequence is synthesized)
ttagtgataatagctctggtcttagaaattacacttaatttcaattaccccctaaaagatgacttggtatttaaatttgggatatgatgggcagcatggatattatggtactgacctttt

SEQ ID NO: 305616 - DNA, 120 bp, Artificial Sequence
  ENSG00000133657_81 (sequence is synthesized)
gaagttgcccattgaaatgtgattttttttctattttatgggtgctaggaagcacatgtaagatactatattcttaaaatgtttctttttctacagtatcagttcatcttttcacagaaa

SEQ ID NO: 305617 - DNA, 120 bp, Artificial Sequence
  ENSG00000133657_82 (sequence is synthesized)
tgttacttattcttactacctaaagaatggtttgtgttggatgctgatgaaattatatatctatagatagggatatagaattagtactagatattcaatgaaaataaccattgtgaagaa

SEQ ID NO: 305618 - DNA, 120 bp, Artificial Sequence
  ENSG00000133657_83 (sequence is synthesized)
agacttcaaattacataagcatcattttaatatgggaaagacctatttatacaaaagccatatttcatggaaaatttagaagtctcattttatcaagaattttatgatgatttgtatttg

SEQ ID NO: 305619 - DNA, 120 bp, Artificial Sequence
  ENSG00000133657_84 (sequence is synthesized)
ttacaaaagtcctatcattcttgatcatttggcagtattaactgaaattccatatatgaaaatcaaaatatccttttcatcaattatgcagcatgtgtgattttttaaaaaggtgcacat

SEQ ID NO: 305620 - DNA, 120 bp, Artificial Sequence
  ENSG00000133657_85 (sequence is synthesized)
taataaaaaatgacttagtcattattaattcttaactcactggaatatctctcagaacttcttccttgacatggtcctttggaaagttgtgttcaaccgagacaaacaaggagagtatcg

SEQ ID NO: 305621 - DNA, 120 bp, Artificial Sequence
  ENSG00000133657_86 (sequence is synthesized)
tacaggcttgagccactctgcctcgcacatacattcatttttttaagaactaaaagtatacatttcagttcctgagtttgtatcaaattcatttatttatataaaattgtatttttcttc

SEQ ID NO: 305622 - DNA, 120 bp, Artificial Sequence
  ENSG00000133657_87 (sequence is synthesized)
tatgtagcaggcactatgctaggctctggggattcggtgtagagataacagtagtaacagtaacaatacagtgtgacaaatgctatgataaggagaagtcagccaacttatgtattaggg

SEQ ID NO: 305623 - DNA, 120 bp, Artificial Sequence
  ENSG00000133657_88 (sequence is synthesized)
gagctcatttactgtaggtatcagggatgacttctttgattaagtgcttgtaagtgatgactatttgaattagccaaataagaggtaggtgagaagttgataaggggaggctgagagaag

SEQ ID NO: 305624 - DNA, 120 bp, Artificial Sequence
  ENSG00000133657_89 (sequence is synthesized)
gagagaagagggttctaaatacccaaaggcctagaaattagagattgtgtggacattataagaactgaaagaagaaatttagtatgacaaatacagcaactataaatgatggatagctct

SEQ ID NO: 305625 - DNA, 120 bp, Artificial Sequence
  ENSG00000133657_90 (sequence is synthesized)
ctgaagcatgttagggatttgggctcagtccaaaagacagtggaaagccattgaaggctattattattaatttattttattttattttattttttcgatagagtctccttcccaggctgg

SEQ ID NO: 305626 - DNA, 120 bp, Artificial Sequence
  ENSG00000133657_91 (sequence is synthesized)
acctccgcctcccaggttcaaggaattcttgtgcctcagcctcctgagtagccgggattagaggcatgtgccaccacgcccagccagttttttgtatttttagtagaaacagggtgttac

SEQ ID NO: 305627 - DNA, 90 bp, Artificial Sequence
  ENSG00000133657_92 (sequence is synthesized)
cgggattagaggcatgtgccaccacgcccagccagttttttgtatttttagtagaaacagggtgttgggtctgaagtgatccacccgcct

SEQ ID NO: 305628 - DNA, 88 bp, Artificial Sequence
  ENSG00000133657_93 (sequence is synthesized)
gtgctgggattacaggcgtacacaccataacagtgtcaaccttgttggccaggctggtttggtactcctggcctcaagtgatctgccc

SEQ ID NO: 305629 - DNA, 120 bp, Artificial Sequence
  ENSG00000133657_94 (sequence is synthesized)
ctggcatgagccaccatgcatagccaccattgaagggttttaagcagaggagtgataaaatacttgccctttggaaaaaaatcattctggcgtccacattcagactggtttagaggagag

SEQ ID NO: 305630 - DNA, 120 bp, Artificial Sequence
  ENSG00000133657_95 (sequence is synthesized)
taatactgaagacatgcccccccgaatcaaggtagcaattgcggagatgaaaagaaatgagttcaaaagatacttaaatgtgaccattgaacaggatttgactcattggatatgaggcca

SEQ ID NO: 305631 - DNA, 120 bp, Artificial Sequence
  ENSG00000133657_96 (sequence is synthesized)
tggagcagtgtctggctaggtggatggatgttggtgctgtttagttaaataggaaactggaagagaagcaggcttgcaagaatggtaatattttggacgtgtaacttgtctggcaagatg

SEQ ID NO: 305632 - DNA, 120 bp, Artificial Sequence
  ENSG00000133657_97 (sequence is synthesized)
ttgaagaggtaaaggaggcagcacagcatcatgggccttggaggcagaagccgctttgatttactcagaacaccaaatcagtctccattttcttgactcagactacacccaagagattgc

SEQ ID NO: 305633 - DNA, 120 bp, Artificial Sequence
  ENSG00000133657_98 (sequence is synthesized)
ttccttccctgtgcttcctggccacttgctactctagctaggaagatctgcctcccttagctgaagtctaagatgtgtagcttattgatgcctctcctcttcttgttctgctgttgctga

SEQ ID NO: 305634 - DNA, 120 bp, Artificial Sequence
  ENSG00000133657_99 (sequence is synthesized)
atataatggggatgccagggcagacataccattcaacttgaatcttccttacccactttgtatagtcttacatgtcattgataccttgttttctggtacgcctaaaaggagtagaacttc

SEQ ID NO: 305635 - DNA, 120 bp, Artificial Sequence
  ENSG00000133657_100 (sequence is synthesized)
aagtggtatttaaaagctttaagaaaagtcaaatttttacttttttcttcccatctgaggaatggatttattttctttttaaagaaatccaaatttttaaaagaagggatcttattttta

SEQ ID NO: 305636 - DNA, 120 bp, Artificial Sequence
  ENSG00000133657_101 (sequence is synthesized)
aaacgaagatcgataatatctactatgtactaaatgtcattctttaaaagttgttccctcataatttagtaaattacttccttttttaaaaaaaggaaagaaagagtgtttgtcttacag

SEQ ID NO: 305637 - DNA, 120 bp, Artificial Sequence
  ENSG00000133657_102 (sequence is synthesized)
gctaacatcacaaacaataagtttcttctcatccatctccatttataaactagtgtgactgtcttctgagcacagtattaaacctggacagggagagggagggtgttagagaatgagagg

SEQ ID NO: 305638 - DNA, 120 bp, Artificial Sequence
  ENSG00000133657_103 (sequence is synthesized)
aaaagagagagaatacctacatataaggtgaccctaaagaaaagcctttcacccttcggaagatcttttcattttcatttttctttttttcaaacaccaacttgtaccagagggaagatc

SEQ ID NO: 305639 - DNA, 120 bp, Artificial Sequence
  ENSG00000133657_104 (sequence is synthesized)
cttgtaccagagggaagatctttttttaaaagtgtttcactaaaatttgtaaggaaataatgagctagataaaatattacagtgtttatttaatgaatttactcatatttaaaataatat

SEQ ID NO: 305640 - DNA, 120 bp, Artificial Sequence
  ENSG00000133657_105 (sequence is synthesized)
atattgaggcaatgagacttgaaggttataaatagtggcagtgagaaaaggaatattatagataagctgttgaaaagaaaagatgctaagttttctagtgcttccttctgtttccaaggg

SEQ ID NO: 305641 - DNA, 120 bp, Artificial Sequence
  ENSG00000133657_106 (sequence is synthesized)
attatagaaatcggagtttgtttgacctgtttcacaggcatctcctttgtggactcattgtgtctcttccttaggctaatagtcaccatttatcatggacggttgtcatgagtgttgaag

SEQ ID NO: 305642 - DNA, 120 bp, Artificial Sequence
  ENSG00000133657_107 (sequence is synthesized)
cacacttaacctgcttcgtcagagggtacttggcatcaccggtgcacagctggtgtcctagcaggagactaactagctgacacaccgtgctttgttagcctaataatcttatttgttaaa

SEQ ID NO: 305643 - DNA, 120 bp, Artificial Sequence
  ENSG00000133657_108 (sequence is synthesized)
acttgccatttgttggatttttctattttaccccattataaacttcttattgagatcagatgacttctgaatagcatttgctgtatttttccaaggtaaagaatatctttttcagatttt

SEQ ID NO: 305644 - DNA, 120 bp, Artificial Sequence
  ENSG00000133661_0 (sequence is synthesized)
agtttgcttggagctcctggggcctaacaaaaagaaacctgccatgctgctcttcctcctctctgcactggtcctgctcacacagcccctgggctacctggaagcagaaatgaagaccta

SEQ ID NO: 305645 - DNA, 120 bp, Artificial Sequence
  ENSG00000133661_1 (sequence is synthesized)
ctcccacagaacaatgcccagtgcttgcaccctggtcatgtgtagctcagtggagagtggcctgcctggtcgcgatggacgggatgggagagagggccctcggggcgagaagggggaccc

SEQ ID NO: 305646 - DNA, 120 bp, Artificial Sequence
  ENSG00000133661_2 (sequence is synthesized)
aggtttgccaggagctgcagggcaagcagggatgcctggacaagctggcccagttgggcccaaaggggacaatggctctgttggagaacctggaccaaagggagacactgggccaagtgg

SEQ ID NO: 305647 - DNA, 120 bp, Artificial Sequence
  ENSG00000133661_3 (sequence is synthesized)
acctccaggacctcccggtgtgcctggtccagctggaagagaaggtcccctggggaagcaggggaacataggacctcagggcaagccaggcccaaaaggagaagctgggcccaaaggaga

SEQ ID NO: 305648 - DNA, 120 bp, Artificial Sequence
  ENSG00000133661_4 (sequence is synthesized)
agtaggtgccccaggcatgcagggctcggcaggggcaagaggcctcgcaggccctaagggagagcgaggtgtccctggtgagcgtggagtccctggaaacacaggggcagcagggtctgc

SEQ ID NO: 305649 - DNA, 120 bp, Artificial Sequence
  ENSG00000133661_5 (sequence is synthesized)
gagcaaagggagaaagtgggcttccagatgttgcttctctgaggcagcaggttgaggccttacagggacaagtacagcacctccaggctgctttctctcagtataagaaagttgagctct

SEQ ID NO: 305650 - DNA, 120 bp, Artificial Sequence
  ENSG00000133661_6 (sequence is synthesized)
tcccaaatggccaaagtgtcggggagaagattttcaagacagcaggctttgtaaaaccatttacggaggcacagctgctgtgcacacaggctggtggacagttggcctctccacgctctg

SEQ ID NO: 305651 - DNA, 120 bp, Artificial Sequence
  ENSG00000133661_7 (sequence is synthesized)
ccgctgagaatgccgccttgcaacagctggtcgtagctaagaacgaggctgctttcctgagcatgactgattccaagacagagggcaagttcacctaccccacaggagagtccctggtct

SEQ ID NO: 305652 - DNA, 120 bp, Artificial Sequence
  ENSG00000133661_8 (sequence is synthesized)
attccaactgggccccaggggagcccaacgatgatggcgggtcagaggactgtgtggagatcttcaccaatggcaagtggaatgacagggcttgtggagaaaagcgtcttgtggtctgcg
